United States Patent Application Publication US 2021/0115453 A1 - sequence listing, part 2

SEQ ID NO: 4865 - protein, 532 aa, Homo Sapiens
MFHSSAMVNSHRKPMFNIHRGFYCLTAILPQICICSQFSVPSSYHFTEDPGAFPVATNGERFPWQELRLPSVVIPLHYDLFVHPNLTSLDFVASEKIEVLVSNATQFIILHSKDLEITNATLQSEEDSRYMKPGKELKVLSYPAHEQIALLVPEKLTPHLKYYVAMDFQAKLGDGFEGFYKSTYRTLGGETRILAVTDFEPTQARMAFPCFDEPLFKANFSIKIRRESRHIALSNMPKVKTIELEGGLLEDHFETTVKMSTYLVAYIVCDFHSLSGFTSSGVKVSIYASPDKRNQTHYALQASLKLLDFYEKYFDIYYPLSKLDLIAIPDFAPGAMENWGLITYRETSLLFDPKTSSASDKLWVTRVIAHELAHQWFGNLVTMEWWNDIWLKEGFAKYMELIAVNATYPELQFDDYFLNVCFEVITKDSLNSSRPISKPAETPTQIQEMFDEVSYNKGACILNMLKDFLGEEKFQKGIIQYLKKFSYRNAKNDDLWSSLSNSCLESDFTSGGVCHSDPKMTSNMVRIKRVTE

SEQ ID NO: 4866 - protein, 915 aa, Homo Sapiens
MFHSSAMVNSHRKPMFNIHRGFYCLTAILPQICICSQFSVPSSYHFTEDPGAFPVATNGERFPWQELRLPSVVIPLHYDLFVHPNLTSLDFVASEKIEVLVSNATQFIILHSKDLEITNATLQSEEDSRYMKPGKELKVLSYPAHEQIALLVPEKLTPHLKYYVAMDFQAKLGDGFEGFYKSTYRTLGGETRILAVTDFEPTQARMAFPCFDEPLFKANFSIKIRRESRHIALSNMPKVSIYASPDKRNQTHYALQASLKLLDFYEKYFDIYYPLSKLDLIAIPDFAPGAMENWGLITYRETSLLFDPKTSSASDKLWVTRVIAHELAHQWFGNLVTMEWWNDIWLKEGFAKYMELIAVNATYPELQFDDYFLNVCFEVITKDSLNSSRPISKPAETPTQIQEMFDEVSYNKGACILNMLKDFLGEEKFQKGIIQYLKKFSYRNAKNDDLWSSLSNSCLESDFTSGGVCHSDPKMTSNMLAFLGENAEVKEMMTTWTLQKGIPLLVVKQDGCSLRLQQERFLQGVFQEDPEWRALQERYLWHIPLTYSTSSSNVIHRHILKSKTDTLDLPEKTSWVKFNVDSNGYYIVHYEGHGWDQLITQLNQNHTLLRPKDRVGLIHDVFQLVGAGRLTLDKALDMTYYLQHETSSPALLEGLSYLESFYHMMDRRNISDISENLKRYLLQYFKPVIDRQSWSDKGSVWDRMLRSALLKLACDLNHAPCIQKAAELFSQWMESSGKLNIPTDVLKIVYSVGAQTTAGWNYLLEQYELSMSSAEQNKILYALSTSKHQEKLLKLIELGMEGKVIKTQNLAALLHAIARRPKGQQLAWDFVRENWTHLLKKFDLGSYDIRMIISGTTAHFSSKDKLQEVKLFFESLEAQGSHLDIFQTVLETITKNIKWLEKNLPTLRTWLMVNT

SEQ ID NO: 4867 - protein, 29 aa, Homo Sapiens
MLHRVDGLVSQGQDPSGRILAVTDFEPTQ

SEQ ID NO: 4868 - protein, 79 aa, Homo Sapiens
  misc_feature (1)..(1): Xaa can be any naturally occurring amino acid
XGKVIKTQNLAALLHAIARRPKGQQLAWDFVRENWTHLLKKFDLGSYDIRMIISGTTAHFSSKDKLQEVCDFLFLTISK

SEQ ID NO: 4869 - protein, 163 aa, Homo Sapiens
  misc_feature (1)..(1): Xaa can be any naturally occurring amino acid
XQTHYALQASLKLLDFYEKYFDIYYPLSKLDLIAIPDFAPGAMENWGLITYRETSLLFDPKTSSASDKLWVTRVIAHELAHQWFGNLVTMEWWNDIWLKEGFAKYMELIAVNATYPELQFGACILNMLKDFLGEEKFQKGIIQYLKKFSYRNAKNDDLWSSLS

SEQ ID NO: 4870 - protein, 649 aa, Homo Sapiens
CLSCRNYSRGGVCVTHCNFLNGEPREFAHEAECFSCHPECQPMEGTATCNGSGSDTCAQCAHFRDGPHCVSSCPHGVLGAKGPIYKYPDVQNECRPCHENCTQGCKGPELQDCLGQTLVLIGKTHLTMALTVIAGLVVIFMMLGGTFLYWRGRRIQNKRAMRRYLERGESIEPLDPSEKTPIKWMALESIHFGKYTHQSDVWSYGVTVWELMTFGAEPYAGLRLAEVPDLLEKGERLAQPQICTIDVYMVMVKCWMIDENIRPTFKELANEFTRMARDPPRYLVIKRESGPGIAPGPEPHGLTNKKLEEVELEPELDLDLDLEAEEDNLATTTLGSALSLPVGTLNRPRGSQSLLSPSSGYMPMNQGNLGESCQESAVSGSSERCPRPVSLHPMPRGCLASESSEGHVTGSEAELQEKVSMCRSRSRSRSPRPRGDSAYHSQRHSLLTPVTPLSPPGLEEEDVNGYVMPDTHLKGTPSSREGTLSSVGLSSVLGTEEEDEDEEYEYMNRRRRHSPPHPPRPSSLEELGYEYMDVGSDLSASLGSTQSCPLHPVPIMPTAGTTPDEDYEYMNRQRDGGGPGGDYAAMGACPASEQGYEEMRAFQGPGHQAPHVHYARLKTLRSLEATDSAFDNPDYWHSRLFPKANAQRT

SEQ ID NO: 4871 - protein, 81 aa, Homo Sapiens
LDIKHNRPRRDCVAEGKVCDPLCSSGGCWGPGPGQCLSCRNYSRGGVCVTHCNFLNGYSKGSQSRMGGGGALQWNCSGGIQ

SEQ ID NO: 4872 - protein, 19 aa, Homo Sapiens
MGNLEIVLTGHNADLSFLQ

SEQ ID NO: 4873 - protein, 115 aa, Homo Sapiens
MGNLEIVLTGHNADLSFLQWIREVTGYVLVAMNEFSTLPLPNLRVVRGTQVYDGKFAIFVMLNYNTNSSHALRQLRLTQLTEILSGGVYIEKNDKLCHMDTIDWRDIVRDRDAEI

SEQ ID NO: 4874 - protein, 116 aa, Homo Sapiens
MGNLEIVLTGHNADLSFLQWIREVTGYVLVAMNEFSTLPLPNLRVVRGTQVYDGKFAIFVMLNYNTNSSHALRQLRLTQLTEILSGGVYIEKNDKLCHMDTIDWRDIVRDRDAEIV

SEQ ID NO: 4875 - protein, 1283 aa, Homo Sapiens
MGNLEIVLTGHNADLSFLQWIREVTGYVLVAMNEFSTLPLPNLRVVRGTQVYDGKFAIFVMLNYNTNSSHALRQLRLTQLTEILSGGVYIEKNDKLCHMDTIDWRDIVRDRDAEIVVKDNGRSCPPCHEVCKGRCWGPGSEDCQTLTKTICAPQCNGHCFGPNPNQCCHDECAGGCSGPQDTDCFACRHFNDSGACVPRCPQPLVYNKLTFQLEPNPHTKYQYGGVCVASCPHNFVVDQTSCVRACPPDKMEVDKNGLKMCEPCGGLCPKACEGTGSGSRFQTVDSSNIDGFVNCTKILGNLDFLITGLNGDPWHKIPALDPEKLNVFRTVREITGYLNIQSWPPHMHNFSVFSNLTTIGGRSLYNRGFSLLIMKNLNVTSLGFRSLKEISAGRIYISANRQLCYHHSLNWTKVLRGPTEERLDIKHNRPRRDCVAEGKVCDPLCSSGGCWGPGPGQCLSCRNYSRGGVCVTHCNFLNGEPREFAHEAECFSCHPECQPMEGTATCNGSGSDTCAQCAHFRDGPHCVSSCPHGVLGAKGPIYKYPDVQNECRPCHENCTQGCKGPELQDCLGQTLVLIGKTHLTMALTVIAGLVVIFMMLGGTFLYWRGRRIQNKRAMRRYLERGESIEPLDPSEKANKVLARIFKETELRKLKVLGSGVFGTVHKGVWIPEGESIKIPVCIKVIEDKSGRQSFQAVTDHMLAIGSLDHAHIVRLLGLCPGSSLQLVTQYLPLGSLLDHVRQHRGALGPQLLLNWGVQIAKGMYYLEEHGMVHRNLAARNVLLKSPSQVQVADFGVADLLPPDDKQLLYSEAKTPIKWMALESIHFGKYTHQSDVWSYGVTVWELMTFGAEPYAGLRLAEVPDLLEKGERLAQPQICTIDVYMVMVKCWMIDENIRPTFKELANEFTRMARDPPRYLVIKRESGPGIAPGPEPHGLTNKKLEEVELEPELDLDLDLEAEEDNLATTTLGSALSLPVGTLNRPRGSQSLLSPSSGYMPMNQGNLGESCQESAVSGSSERCPRPVSLHPMPRGCLASESSEGHVTGSEAELQEKVSMCRSRSRSRSPRPRGDSAYHSQRHSLLTPVTPLSPPGLEEEDVNGYVMPDTHLKGTPSSREGTLSSVGLSSVLGTEEEDEDEEYEYMNRRRRHSPPHPPRPSSLEELGYEYMDVGSDLSASLGSTQSCPLHPVPIMPTAGTTPDEDYEYMNRQRDGGGPGGDYAAMGACPASEQGYEEMRAFQGPGHQAPHVHYARLKTLRSLEATDSAFDNPDYWHSRLFPKANAQRT

SEQ ID NO: 4876 - protein, 583 aa, Homo Sapiens
MLAIGSLDHAHIVRLLGLCPGSSLQLVTQYLPLGSLLDHVRQHRGALGPQLLLNWGVQIAKGMYYLEEHGMVHRNLAARNVLLKSPSQVQVADFGVADLLPPDDKQLLYSEAKTPIKWMALESIHFGKYTHQSDVWSYGVTVWELMTFGAEPYAGLRLAEVPDLLEKGERLAQPQICTIDVYMVMVKCWMIDENIRPTFKELANEFTRMARDPPRYLVIKRESGPGIAPGPEPHGLTNKKLEEVELEPELDLDLDLEAEEDNLATTTLGSALSLPVGTLNRPRGSQSLLSPSSGYMPMNQGNLGESCQESAVSGSSERCPRPVSLHPMPRGCLASESSEGHVTGSEAELQEKVSMCRSRSRSRSPRPRGDSAYHSQRHSLLTPVTPLSPPGLEEEDVNGYVMPDTHLKGTPSSREGTLSSVGLSSVLGTEEEDEDEEYEYMNRRRRHSPPHPPRPSSLEELGYEYMDVGSDLSASLGSTQSCPLHPVPIMPTAGTTPDEDYEYMNRQRDGGGPGGDYAAMGACPASEQGYEEMRAFQGPGHQAPHVHYARLKTLRSLEATDSAFDNPDYWHSRLFPKANAQRT

SEQ ID NO: 4877 - protein, 462 aa, Homo Sapiens
MPMSTILPVTSPCLPATGVTVWELMTFGAEPYAGLRLAEVPDLLEKGERLAQPQICTIDVYMVMVKCWMIDENIRPTFKELANEFTRMARDPPRYLVIKRESGPGIAPGPEPHGLTNKKLEEVELEPELDLDLDLEAEEDNLATTTLGSALSLPVGTLNRPRGSQSLLSPSSGYMPMNQGNLGESCQESAVSGSSERCPRPVSLHPMPRGCLASESSEGHVTGSEAELQEKVSMCRSRSRSRSPRPRGDSAYHSQRHSLLTPVTPLSPPGLEEEDVNGYVMPDTHLKGTPSSREGTLSSVGLSSVLGTEEEDEDEEYEYMNRRRRHSPPHPPRPSSLEELGYEYMDVGSDLSASLGSTQSCPLHPVPIMPTAGTTPDEDYEYMNRQRDGGGPGGDYAAMGACPASEQGYEEMRAFQGPGHQAPHVHYARLKTLRSLEATDSAFDNPDYWHSRLFPKANAQRT

SEQ ID NO: 4878 - protein, 126 aa, Homo Sapiens
MRANDALQVLGLLFSLARGSEVGNSQAVCPGTLNGLSVTGDAENQYQTLYKLYERCEVVMGNLEIVLTGHNADLSFLQWIREVTGYVLVAMNEFSTLPLPNLRVVRGTQVYDGKFAIFVMLNYNTN

SEQ ID NO: 4879 - protein, 1342 aa, Homo Sapiens
MRANDALQVLGLLFSLARGSEVGNSQAVCPGTLNGLSVTGDAENQYQTLYKLYERCEVVMGNLEIVLTGHNADLSFLQWIREVTGYVLVAMNEFSTLPLPNLRVVRGTQVYDGKFAIFVMLNYNTNSSHALRQLRLTQLTEILSGGVYIEKNDKLCHMDTIDWRDIVRDRDAEIVVKDNGRSCPPCHEVCKGRCWGPGSEDCQTLTKTICAPQCNGHCFGPNPNQCCHDECAGGCSGPQDTDCFACRHFNDSGACVPRCPQPLVYNKLTFQLEPNPHTKYQYGGVCVASCPHNFVVDQTSCVRACPPDKMEVDKNGLKMCEPCGGLCPKACEGTGSGSRFQTVDSSNIDGFVNCTKILGNLDFLITGLNGDPWHKIPALDPEKLNVFRTVREITGYLNIQSWPPHMHNFSVFSNLTTIGGRSLYNRGFSLLIMKNLNVTSLGFRSLKEISAGRIYISANRQLCYHHSLNWTKVLRGPTEERLDIKHNRPRRDCVAEGKVCDPLCSSGGCWGPGPGQCLSCRNYSRGGVCVTHCNFLNGEPREFAHEAECFSCHPECQPMEGTATCNGSGSDTCAQCAHFRDGPHCVSSCPHGVLGAKGPIYKYPDVQNECRPCHENCTQGCKGPELQDCLGQTLVLIGKTHLTMALTVIAGLVVIFMMLGGTFLYWRGRRIQNKRAMRRYLERGESIEPLDPSEKANKVLARIFKETELRKLKVLGSGVFGTVHKGVWIPEGESIKIPVCIKVIEDKSGRQSFQAVTDHMLAIGSLDHAHIVRLLGLCPGSSLQLVTQYLPLGSLLDHVRQHRGALGPQLLLNWGVQIAKGMYYLEEHGMVHRNLAARNVLLKSPSQVQVADFGVADLLPPDDKQLLYSEAKTPIKWMALESIHFGKYTHQSDVWSYGVTVWELMTFGAEPYAGLRLAEVPDLLEKGERLAQPQICTIDVYMVMVKCWMIDENIRPTFKELANEFTRMARDPPRYLVIKRESGPGIAPGPEPHGLTNKKLEEVELEPELDLDLDLEAEEDNLATTTLGSALSLPVGTLNRPRGSQSLLSPSSGYMPMNQGNLGESCQESAVSGSSERCPRPVSLHPMPRGCLASESSEGHVTGSEAELQEKVSMCRSRSRSRSPRPRGDSAYHSQRHSLLTPVTPLSPPGLEEEDVNGYVMPDTHLKGTPSSREGTLSSVGLSSVLGTEEEDEDEEYEYMNRRRRHSPPHPPRPSSLEELGYEYMDVGSDLSASLGSTQSCPLHPVPIMPTAGTTPDEDYEYMNRQRDGGGPGGDYAAMGACPASEQGYEEMRAFQGPGHQAPHVHYARLKTLRSLEATDSAFDNPDYWHSRLFPKANAQRT

SEQ ID NO: 4880 - protein, 921 aa, Homo Sapiens
MRANDALQVLGLLFSLARGSEVGNSQAVCPGTLNGLSVTGDAENQYQTLYKLYERCEVVMGNLEIVLTGHNADLSFLQWIREVTGYVLVAMNEFSTLPLPNLRVVRGTQVYDGKFAIFVMLNYNTNSSHALRQLRLTQLTEILSGGVYIEKNDKLCHMDTIDWRDIVRDRDAEIVVKDNGRSCPPCHEVCKGRCWGPGSEDCQTLTKTICAPQCNGHCFGPNPNQCCHDECAGGCSGPQDTDCFACRHFNDSGACVPRCPQPLVYNKLTFQLEPNPHTKYQYGGVCVASCPHNFVVDQTSCVRACPPDKMEVDKNGLKMCEPCGGLCPKACEGTGSGSRFQTVDSSNIDGFVNCTKILGNLDFLITGLNGDPWHKIPALDPEKLNVFRTVREITGYLNIQSWPPHMHNFSVFSNLTTIGGRSLYNRGFSLLIMKNLNVTSLGFRSLKEISAGRIYISANRQLCYHHSLNWTKVLRGPTEERLDIKHNRPRRDCVAEGKVCDPLCSSGGCWGPGPGQCLSCRNYSRGGVCVTHCNFLNGEPREFAHEAECFSCHPECQPMEGTATCNGSGSDTCAQCAHFRDGPHCVSSCPHGVLGAKGPIYKYPDVQNECRPCHENCTQGCKGPELQDCLGQTLVLIGKTHLTMALTVIAGLVVIFMMLGGTFLYWRGRRIQNKRAMRRYLERGESIEPLDPSEKANKVLARIFKETELRKLKVLGSGVFGTVHKGVWIPEGESIKIPVCIKVIEDKSGRQSFQAVTDHMLAIGSLDHAHIVRLLGLCPGSSLQLVTQYLPLGSLLDHVRQHRGALGPQLLLNWGVQIAKGMYYLEEHGMVHRNLAARNVLLKSPSQVQVADFGVADLLPPDDKQLLYSEAKTPIKWMALESIHFGKYTHQSDVWSYGQCIWMPSLPSLAPVSNLPFETPS

SEQ ID NO: 4881 - protein, 331 aa, Homo Sapiens
MRANDALQVLGLLFSLARGSEVGNSQAVCPGTLNGLSVTGDAENQYQTLYKLYERCEVVMGNLEIVLTGHNADLSFLQWIREVTGYVLVAMNEFSTLPLPNLRVVRGTQVYDGKFAIFVMLNYNTNSSHALRQLRLTQLTEILSGGVYIEKNDKLCHMDTIDWRDIVRDRDAEIVVKDNGRSCPPCHEVCKGRCWGPGSEDCQTLTKTICAPQCNGHCFGPNPNQCCHDECAGGCSGPQDTDCFACRHFNDSGACVPRCPQPLVYNKLTFQLEPNPHTKYQYGGVCVASCPHNFVVDQTSCVRACPPDKMEVDKNGLKMCEPCGGLCPKAF

SEQ ID NO: 4882 - protein, 183 aa, Homo Sapiens
MRANDALQVLGLLFSLARGSEVGNSQAVCPGTLNGLSVTGDAENQYQTLYKLYERCEVVMGNLEIVLTGHNADLSFLQWIREVTGYVLVAMNEFSTLPLPNLRVVRGTQVYDGKFAIFVMLNYNTNSSHALRQLRLTQLTGQFPMVPSGLTPQPAQDWYLLDDDPRLLTLSASSKVPVTLAAV

SEQ ID NO: 4883 - protein, 43 aa, Homo Sapiens
MRANDALQVPRAQSTSTQMFRMNVGPAMRTAPRGVKDQSFKTV

SEQ ID NO: 4884 - protein, 354 aa, Homo Sapiens
MAPARRPAGARLLLVYAGLLAAAAAGLGSPEPGAPSRSRARREPPPGNELPRGPGESRAGPAARPPEPTAERAHSVDPRDAWMLFVRQSDKGVNGKKRSRGKAKKLKFGLPGPPGPPGPQGPPGPIIPPEALLKEFQLLLKGAVRQRERAEPEPCTCGPAGPVAASLAPVSATAGEDDDDVVGDVLALLAAPLAPGPRAPRVEAAFLCRLRRDALVERRALHELGVYYLPDAEGAFRRGPGLNLTSGQYRAPVAGFYALAATLHVALGEPPRRGPPRPRDHLRLLICIQSRCQRNASLEAIMGLESSSELFTISVNGVLYLQMGQWTSVFLDNASGCSLTVRSGSHFSAVLLGV

SEQ ID NO: 4885 - protein, 63 aa, Homo Sapiens
  misc_feature (1)..(1): Xaa can be any naturally occurring amino acid
XFGYSSLEAIMGLESSSELFTISVNGVLYLQMGQWTSVFLDNASGCSLTVRSGSHFSAVLLGV

SEQ ID NO: 4886 - protein, 74 aa, Homo Sapiens
  misc_feature (1)..(1): Xaa can be any naturally occurring amino acid
XIQSRCQRNASLEAIMGLESSSELFTISVNGVLYLQATKNLVPQDLLGAKLVWQGRSGLGEKGAMASHLHLLTN

SEQ ID NO: 4887 - protein, 275 aa, Homo Sapiens
MNMTQARVLVAAVVGLVAVLLYASIHKIEEGHLAVYYRGGALLTSPSGPGYHIMLPFITTFRSVQTTLQTDEVKNVPCGTSGGVMIYIDRIEVVNMLAPYAVFDIVRNYTADYDKTLIFNKIHHELNQFCSAHTLQEVYIELFDQIDENLKQALQKDLNLMAPGLTIQAVRVTKPKIPEAIRRNFELMEAEKTKLLIAAQKQKVVEKEAETERKKAVIEAEKIAQVAKIRFQQKVMEKETEKRISEIEDAAFLAREKAKADAEYYAAHKYATSNK

SEQ ID NO: 4888 - protein, 348 aa, Homo Sapiens
MNMTQARVLVAAVVGLVAVLLYASIHKIEEGHLAVYYRGGALLTSPSGPGYHIMLPFITTFRSVQTTLQTDEVKNVPCGTSGGVMIYIDRIEVVNMLAPYAVFDIVRNYTADYDKTLIFNKIHHELNQFCSAHTLQEVYIELFDQIDENLKQALQKDLNLMAPGLTIQAVRVTKPKIPEAIRRNFELMEAEKTKLLIAAQKQKVVEKEAETERKKAVIEAEKIAQVAKIRFQQKVMEKETEKRISEIEDAAFLAREKAKADAEYYAAHKYATSNKHKLTPEYLELKKYQAIASNSKIYFGSNIPNMFVDSSCALKYSDIRTGRESSLPSKEALEPSGENVIQNKESTG

SEQ ID NO: 4889 - protein, 348 aa, Homo Sapiens; identical to SEQ ID NO: 4888

SEQ ID NO: 4890 - protein, 339 aa, Homo Sapiens
MAQLGAVVAVASSFFCASLFSAVHKIEEGHIGVYYRGGALLTSTSGPGFHLMLPFITSYKSVQTTLQTDEVKNVPCGTSGGVMIYFDRIEVVNFLVPNAVYDIVKNYTADYDKALIFNKIHHELNQFCSVHTLQEVYIELFDQIDENLKLALQQDLTSMAPGLVIQAVRVTKPNIPEAIRRNYELMESEKTKLLIAAQKQKVVEKEAETERKKALIEAEKVAQVAEITYGQKVMEKETEKKISEIEDAAFLAREKAKADAECYTAMKIAEANKLKLTPEYLQLMKYKAIASNSKIYFGKDIPNMFMDSAGSVSKQFEGLADKLSFGLEDEPLETATKEN

SEQ ID NO: 4891 - protein, 339 aa, Homo Sapiens; identical to SEQ ID NO: 4890

SEQ ID NO: 4892 - protein, 338 aa, Homo Sapiens
MAQLGAVVAVASSFFCASLFSAVHKIEEGHIGVYYRGGALLTSTSGPGFHLMLPFITSYKSVQTTLQTDEVKNVPCGTSGGVMIYFDRIEVVNFLVPNAVYDIVKNYTADYDKALIFNKIHHELNQFCSVHTLQEVYIELFDQIDENLKLALQQDLTSMAPGLVIQAVRVTKPNIPEAIRRNYELMESEKTKLLIAAQKQKVVEKEAETERKKALIEAEKVAQVAEITYGQKVMEKETEKKISEIEDAAFLAREKAKADAECYTAMKIAEANKLKLTPEYLQLMKYKAIASNSKIYFGKDIPNMFMDSAGSVSKQFEGLADKLSFGLEDEPLETATKE

SEQ ID NO: 4893 - protein, 206 aa, Homo Sapiens
MAQLGAVVAVASSFFCASLFSAVHKIEEGHIGVYYRGGALLTSTSGPGFHLMLPFITSYKSVQTTLQTDEVKNVPCGTSGGVMIYFDRIEVVNFLVPNAVYDIVKNYTADYDKALIFNKIHHELNQFCSVHTLQEVYIELFGKKVSPEHAVLKQGSWNPASLHCLKPGCLQGVMVTYGQEMLKNLVLRSWSQRSSWRMLIAMQQDP

SEQ ID NO: 4894 - protein, 206 aa, Homo Sapiens; identical to SEQ ID NO: 4893

SEQ ID NO: 4895 - protein, 206 aa, Homo Sapiens; identical to SEQ ID NO: 4893

SEQ ID NO: 4896 - protein, 152 aa, Homo Sapiens
MAQLGAVVAVASSFFCASLFSAVHKIEEGHIGVYYRGGALLTSTSGPGFHLMLPFITSYKSVQTTLQTDEVKNVPCGTSGGVMIYFDRIEVVNFLVPNAVYDIVKNYTADYDKALIFNKIHHELNQFCSVHTLQEVYIELFGLENDFSQESS

SEQ ID NO: 4897 - protein, 152 aa, Homo Sapiens; identical to SEQ ID NO: 4896

SEQ ID NO: 4898 - protein, 197 aa, Homo Sapiens
MAQLGAVVAVASSFFCASLFSAVHKIEEGHIGVYYSGGVMIYFDRIEVVNFLVPNAVYDIVKNYTADYDKALIFNKIHHELNQFCSVHTLQEVYIELFDQIDENLKLALQQDLTSMAPGLVIQAVRVTKPNIPEAIRRNYELMESEKTKLLIAAQKQKVVEKEAETERKKALIEAEKVAQVAEITYGQKVMEKETEK

SEQ ID NO: 4899 - protein, 977 aa, Homo Sapiens
MPARRLLLLLTLLLPGLGIFGSTSTVTLPETLLFVSTLDGSLHAVSKRTGSIKWTLKEDPVLQVPTHVEEPAFLPDPNDGSLYTLGSKNNEGLTKLPFTIPELVQASPCRSSDGILYMGKKQDIWYVIDLLTGEKQQTLSSAFADSLCPSTSLLYLGRTEYTITMYDTKTRELRWNATYFDYAASLPEDDVDYKMSHFVSNGDGLVVTVDSESGDVLWIQNYASPVVAFYVWQREGLRKVMHINVAVETLRYLTFMSGEVGRITKWKYPFPKETEAKSKLTPTLYVGKYSTSLYASPSMVHEGVAVVPRGSTLPLLEGPQTDGVTIGDKGECVITPSTDVKFDPGLKSKNKLNYLRNYWLLIGHHETPLSASTKMLERFPNNLPKHRENVIPADSEKKSFEEVINLVDQTSENAPTTVSRDVEEKPAHAPARPEAPVDSMLKDMATIILSTFLLIGWVAFIITYPLSMHQQQQLQHQQFQKELEKIQLLQQQQQQLPFHPPGDTAQDGELLDTSGPYSESSGTSSPSTSPRASNHSLCSGSSASKAGSSPSLEQDDGDEETSVVIVGKISFCPKDVLGHGAEGTIVYRGMFDNRDVAVKRILPECFSFADREVQLLRESDEHPNVIRYFCTEKDRQFQYIAIELCAATLQEYVEQKDFAHLGLEPITLLQQTTSGLAHLHSLNIVHRDLKPHNILISMPNAHGKIKAMISDFGLCKKLAVGRHSFSRRSGVPGTEGWIAPEMLSEDCKENPTYTVDIFSAGCVFYYVISEGSHPFGKSLQRQANILLGACSLDCLHPEKHEDVIARELIEKMIAMDPQKRPSAKHVLKHPFFWSLEKQLQFFQDVSDRIEKESLDGPIVKQLERGGRAVVKMDWRENITVPLQTDLRKFRTYKGGSVRDLLRAMRNKKHHYRELPAEVRETLGSLPDDFVCYFTSRFPHLLAHTYRAMELCSHERLFQPYYFHEPPEPQPPVTPDAL

SEQ ID NO: 4900 - protein, 70 aa, Homo Sapiens
MPARRLLLLLTLLLPGLGVSDRGAWGGGQLATAGSGPGQRRGAGAGVRAGSATAAARCPVSPAVGGSGRA

SEQ ID NO: 4901 - protein, 23 aa, Homo Sapiens
ELLQLLPPDSPTRWLPGTWLEPC

SEQ ID NO: 4902 - protein, 80 aa, Homo Sapiens
MASAVRGSRPWPRLGLQLQFAALLLGTLSPQGCGWATRMLGLLLGAQPHPVCSRRDWSRFILSGQRTSCWCPPWMEVSTH

SEQ ID NO: 4903 - protein, 129 aa, Homo Sapiens
MASAVRGSRPWPRLGLQLQFAALLLGTLSPQVHTLRPENLLLVSTLDGSLHALSKQTGDLKWTLRDDPVIEGPMYVTEMAFLSDPADGSLYILGTQKQQGLMAGVQWYDHKAHCSLELLASSNPRTSVS

SEQ ID NO: 4904 - protein, 926 aa, Homo Sapiens
MASAVRGSRPWPRLGLQLQFAALLLGTLSPQVHTLRPENLLLVSTLDGSLHALSKQTGDLKWTLRDDPVIEGPMYVTEMAFLSDPADGSLYILGTQKQQGLMKLPFTIPELVHASPCRSSDGVFYTGRKQDAWFVVDPESGETQMTLTTEGPSTPRLYIGRTQYTVTMHDPRAPALRWNTTYRRYSAPPMDGSPGKYMSHLASCGMGLLLTVDPGSGTVLWTQDLGVPVMGVYTWHQDGLRQLPHLTLARDTLHFLALRWGHIRLPASGPRDTATLFSTLDTQLLMTLYVGKDETGFYVSKALVHTGVALVPRGLTLAPADGPTTDEVTLQVSGEREGSPSTAVRYPSGSVALPSQWLLIGHHELPPVLHTTMLRVHPTLGSGTAETRPPENTQAPAFFLELLSLSREKLWDSELHPEEKTPDSYLGLGPQDLLAASLTAVLLGGWILFVMRQQQPQVVEKQQETPLAPADFAHISQDAQSLHSGASRRSQKRLQSPSKQAQPLDDPEAEQLTVVGKISFNPKDVLGRGAGGTFVFRGQFEGRAVAVKRLLRECFGLVRREVQLLQESDRHPNVLRYFCTERGPQFHYIALELCRASLQEYVENPDLDRGGLEPEVVLQQLMSGLAHLHSLHIVHRDLKPGNILITGPDSQGLGRVVLSDFGLCKKLPAGRCSFSLHSGIPGTEGWMAPELLQLLPPDSPTSAVDIFSAGCVFYYVLSGGSHPFGDSLYRQANILTGAPCLAHLEEEVHDKVVARDLVGAMLSPLPQPRPSAPQVLAHPFFWSRAKQLQFFQDVSDWLEKESEQEPLVRALEAGGCAVVRDNWHEHISMPLQTDLRKFRSYKGTSVRDLLRAVRNKKHHYRELPVEVRQALGQVPDGFVQYFTNRFPRLLLHTHRAMRSCASESLFLPYYPPDSEARRPCPGATGR

SEQ ID NO: 4905 - protein, 874 aa, Homo Sapiens
MASAVRGSRPWPRLGLQLQFAALLLGTLSPQVHTLRPENLLLVSTLDGSLHALSKQTGDLKWTLRDDPVIEGPMYVTEMAFLSDPADGSLYILGTQKQQGLMKLPFTIPELVHASPCRSSDGVFYTGRKQDAWFVVDPESGETQMTLTTEGPSTPRLYIGRTQYTVTMHDPRAPALRWNTTYRRYSAPPMDGSPGKYMSHLASCGMGLLLTVDPGSGTVLWTQDLGVPVMGVYTWHQDGLRQLPHLTLARDTLHFLALRWGHIRLPASGPRDTATLFSTLDTQLLMTLYVGKDETGFYVSKALVHTGVALVPRGLTLAPADGPTTDEVTLQVSGEREGSPSTAVRYPSGSVALPSQWLLIGHHELPPVLHTTMLRVHPTLGSGTAETRPPENTQAPAFFLEQQPQVVEKQQETPLAPADFAHISQDAQSLHSGASRRSQKRLQSPSKQAQPLDDPEAEQLTVVGKISFNPKDVLGRGAGGTFVFRGQFEGRAVAVKRLLRECFGLVRREVQLLQESDRHPNVLRYFCTERGPQFHYIALELCRASLQEYVENPDLDRGGLEPEVVLQQLMSGLAHLHSLHIVHRDLKPGNILITGPDSQGLGRVVLSDFGLCKKLPAGRCSFSLHSGIPGTEGWMAPELLQLLPPDSPTSAVDIFSAGCVFYYVLSGGSHPFGDSLYRQANILTGAPCLAHLEEEVHDKVVARDLVGAMLSPLPQPRPSAPQVLAHPFFWSRAKQLQFFQDVSDWLEKESEQEPLVRALEAGGCAVVRDNWHEHISMPLQTDLRKFRSYKGTSVRDLLRAVRNKKHHYRELPVEVRQALGQVPDGFVQYFTNRFPRLLLHTHRAMRSCASESLFLPYYPPDSEARRPCPGATGR

SEQ ID NO: 4906 - protein, 169 aa, Homo Sapiens
MGRGWGFLFGLLGAVWLLSSGHGEEQPPETAAQRCFCQVNLKRPCPFWNDISQCGRRDCAVKPCQSDEVPDGIKSASYKYSEEANNLIEECEQAERLGAVDESLSEETQKAVLQWTKHDDSSDNFCEADDIQSPEAEYVDLLLNPERYTGYKGPDAWKIWNVIYEENCF

SEQ ID NO: 4907 - protein, 125 aa, Homo Sapiens
MGRGWGFLFGLLGAVWLLSSGHGEEQPPETAAQRCFCQVSGYLDDCTCDVETIDRFNNYRLFPRLQKLLESDYFRYYKVNLKRPCPFWNDISQCGRRDCAVKPCQSDEVPDGIKSASYKVCTYTY

SEQ ID NO: 4908 - protein, 257 aa, Homo Sapiens
MGRGWGFLFGLLGAVWLLSSGHGEEQPPETAAQRCFCQVSGYLDDCTCDVETIDRFNNYRLFPRLQKLLESDYFRYYKVNLKRPCPFWNDISQCGRRDCAVKPCQSDEVPDGIKSASYKYSEEANNLIEECEQAERLGAVDESLSEETQKAVLQWTKHDDSSDNFCEADDIQSPEAEYVDLLLNPERYTGYKGPDAWKIWNVIYEENCFKPQTIKRPLNPLASGQGKLLICVSLLFLRSLCRKKSILQTYIWPTCKH

SEQ ID NO: 4909 - protein, 257 aa, Homo Sapiens; identical to SEQ ID NO: 4908

SEQ ID NO: 4910 - protein, 257 aa, Homo Sapiens; identical to SEQ ID NO: 4908

SEQ ID NO: 4911 - protein, 468 aa, Homo Sapiens
MGRGWGFLFGLLGAVWLLSSGHGEEQPPETAAQRCFCQVSGYLDDCTCDVETIDRFNNYRLFPRLQKLLESDYFRYYKVNLKRPCPFWNDISQCGRRDCAVKPCQSDEVPDGIKSASYKYSEEANNLIEECEQAERLGAVDESLSEETQKAVLQWTKHDDSSDNFCEADDIQSPEAEYVDLLLNPERYTGYKGPDAWKIWNVIYEENCFKPQTIKRPLNPLASGQGTSEENTFYSWLEGLCVEKRAFYRLISGLHASINVHLSARYLLQETWLEKKWGHNITEFQQRFDGILTEGEGPRRLKNLYFLYLIELRALSKVLPFFERPDFQLFTGNKIQDEENKMLLLEILHEIKSFPLHFDENSFFAGDKKEAHKLKEDFRLHFRNISRIMDCVGCFKCRLWGKLQTQGLGTALKILFSEKLIANMPESGPSYEFHLTRQEIVSLFNAFGRISTSVKELENFRNLLQNIH

SEQ ID NO: 4912 - protein, 75 aa, Homo Sapiens
MLLLEILHEIKSFPLHFDENSFFAGDKKEAHKLKEDFRLHFRNISRIMDCVGCFKCRLWGKLQTQGLGTALKILF

SEQ ID NO: 4913 - protein, 71 aa, Homo Sapiens
MANNTKELEDCEQANKLGAINSTLSNQSKEAFIDWARYDDSRDHFCELDDERSPAAQYVDLLLNPERYTGY

SEQ ID NO: 4914 - protein, 467 aa, Homo Sapiens
MSQGVRRAGAGQGVAAAVQLLVTLSFLRSVVEAQVTGVLDDCLCDIDSIDNFNTYKIFPKIKKLQERDYFRYYKVNLKRPCPFWAEDGHCSIKDCHVEPCPESKIPVGIKAGHSNKYLKMANNTKELEDCEQANKLGAINSTLSNQSKEAFIDWARYDDSRDHFCELDDERSPAAQYVDLLLNPERYTGYKGTSAWRVWNSIYEENCFKPRSVYRPLNPLAPSRGEDDGESFYTWLEGLCLEKRVFYKLISGLHASINLHLCANYLLEETWGKPSWGPNIKEFKHRFDPVETKGEGPRRLKNLYFLYLIELRALSKVAPYFERSIVDLYTGNAEEDADTKTLLLNIFQDTKSFPMHFDEKSMFAGDKKGAKSLKEEFRLHFKNISRIMDCVGCDKCRLWGKLQTQGLGTALKILFSEKEIQKLPENSPSKGFQLTRQEIVALLNAFGRLSTSIRDLQNFKVLLQHSR

SEQ ID NO: 4915 - protein, 173 aa, Homo Sapiens
WGPNIKEFKHRFDPVETKGEGPRRLKNLYFLYLIELRALSKVAPYFERSIVDLYTGNAEEDADTKTLLLNIFQDTKSFPMHFDEKSMFAGDKKGAKSLKEEFRLHFKNISRIMDCVGCDKCRLWGKLQTQGLGTALKILFSEKEIQKLPENSPSKGFQLTRQEIVALLNAFGR

SEQ ID NO: 4916 - protein, 273 aa, Homo Sapiens
MEAAPSRFMFLLFLLTCELAAEVAAEVEKSSDGPGAAQEPTWLTDVPAAMEFIAATEVAVIGFFQDLEIPAVPILHSMVQKFPGVSFGISTDSEVLTHYNITGNTICLFRLVDNEQLNLEDEDIESIDATKLSRFIEINSLHMVTEYNPVTVIGLFNSVIQIHLLLIMNKASPEYEENMHRYQKAAKLFQGKILFILVDSGMKENGKVISFFKLKESQLPALAIYQTLDDEWDTLPTAEVSVEHVQNFCDGFLSGKLLKENRESEGKTPKVEL

SEQ ID NO: 4917 - protein, 172 aa, Homo Sapiens
MKETCQLEIQVDNEQLNLEDEDIESIDATKLSRFIEINSLHMVTEYNPVTVIGLFNSVIQIHLLLIMNKASPEYEENMHRYQKAAKLFQGKILFILVDSGMKENGKVISFFKLKESQLPALAIYQTLDDEWDTLPTAEVSVEHVQNFCDGFLSGKLLKENRESEGKTPKVEL

SEQ ID NO: 4918 - protein, 53 aa, Homo Sapiens
MAAAVPRAAFLSPLLPLLLGFLLLSAPHGGSGLHTKGALPLDTVTFYKIMVTS

SEQ ID NO: 4919 - protein, 261 aa, Homo Sapiens
MAAAVPRAAFLSPLLPLLLGFLLLSAPHGGSGLHTKGALPLDTVTFYKVIPKSKFVLVKFDTQYPYGEKQDEFKRLAENSASSDDLLVAEVGISDYGDKLNMELSEKYKLDKESYPVFYLFRDGDFENPVPYTGAVKVGAIQRWLKGQGVYLGMPGCLPVYDALAGEFIRASGVEARQALLKQGQDNLSSVKETQKKWAEQYLKIMGKILDQGEDFPASEMTRIARLIEKNKMSDGKKEELQKSLNILTAFQKKGAEKEEL

SEQ ID NO: 4920 - protein, 160 aa, Homo Sapiens
MELSEKYKLDKESYPVFYLFRDGDFENPVPYTGAVKVGAIQRWLKGQGVYLGMPGCLPVYDALAGEFIRASGVEARQALLKQGQDNLSSVKETQKKWAEQYLKIMGKILDQGEDFPASEMTRIARLIEKNKMSDGKKEELQKSLNILTAFQKKGAEKEEL

SEQ ID NO: 4921 - protein, 95 aa, Homo Sapiens
  misc_feature (1)..(1): Xaa can be any naturally occurring amino acid
XPAPHFSPRCFPFSWASCSSPLRMAAAACTPRAPFPWIRSLSTRGPLGRGISPKSPWNTHLLSSIRPQVIPKSKFVLVKFDTQYPYGEKQDEFKR

SEQ ID NO: 4922 - protein, 406 aa, Homo Sapiens
MHPAVFLSLPDLRCSLLLLVTWVFTPVTTEITSLDTENIDEILNNADVALVNFYADWCRFSQMLHPIFEEASDVIKEEFPNENQVVFARVDCDQHSDIAQRYRISKYPTLKLFRNGMMMKREYRGQRSVKALADYIRQQKSDPIQEIRDLAEITTLDRSKRNIIGYFEQKDSDNYRVFERVANILHDDCAFLSAFGDVSKPERYSGDNIIYKPPGHSAPDMVYLGAMTNFDVTYNWIQDKCVPLVREITFENGEELTEEGLPFLILFHMKEDTESLEIFQNEVARQLISEKGTINFLHADCDKFRHPLLHIQKTPADCPVIAIDSFRHMYVFGDFKDVLIPGKLKQFVFDLHSGKLHREFHHGPDPTDTAPGEQAQDVASSPPESSFQKLAPSEYRYTLLRDRDEL

SEQ ID NO: 4923 - protein, 604 aa, Homo Sapiens
MLGMNMLLITLFLLLPLSMLKGEPWEGCLHCTHTTWSGNIMTKTLLYHTYYECAGTCLGTCTHNQTTYSVCDPGRGQPYVCYDPKSSPGTWFEIHVGSKEGDLLNQTKVFPSGKDVVSLYFDVCQIVSMGSLFPVIFSSMEYYSSCHKNRYAHPACSTDSPVTTCWDCTTWSTNQQSLGPIMLTKIPLEPDCKTSTCNSVNLTILEPDQPIWTTGLKAPLGARVSGEEIGPGAYVYLYIIKKTRTRSTQQFRVFESFYEHVNQKLPEPPPLASNLFAQLAENIASSLHVASCYVCGGMNMGDQWPWEARELMPQDNFTLTASSLEPAPSSQSIWFLKTSIIGKFCIARWGKAFTDPVGELTCLGQQYYNETLGKTLWRGKSNNSESPHPSPFSRFPSLNHSWYQLEAPNTWQAPSGLYWICGPQAYRQLPAKWSGACVLGTIRPSFFLMPLKQGEALGYPIYDETKRKSKRGITIGDWKDNEWPPERIIQYYGPATWAEDGMWGYRTPVYMLNRIIRLQAVLEIITNETAGALNLLAQQATKMRNVIYQNRLALDYLLAQEEGVCGKFNLTNCCLELDDEGKVIKEITAKIQKLAHIPVQTWKG

SEQ ID NO: 4924 - protein, 89 aa, Homo Sapiens
MKSVLLLTTLLVPAHLVAAWSNNYAVDCPQHCDSSECKSSPRCKRTVLDDCGCCRVCAAGRGETCYRTVSGMDGMKCGPGLRCQPSNGE

SEQ ID NO: 4925 - protein, 184 aa, Homo Sapiens
MKSVLLLTTLLVPAHLVAAWSNNYAVDCPQHCDSSECKSSPRCKRTVLDDCGCCRVCAAGRGETCYRTVSGMDGMKCGPGLRCQPSNGEDPFGEEFGICKDCPYGTFGMDCRETCNCQSGICDRGTGKCLKFPFFQYSVTKSSNRFVSLTEHDMASGDGNIVREEVVKENAAGSPVMRKWLNPR

SEQ ID NO: 4926 - protein, 134 aa, Homo Sapiens
MKSVLLLTTLLVPAHLVAAWSNNYAVDCPQHCDSSECKSSPRCKRTVLDDCGCCRVCAAGRGETCYRTVSGMDGMKCGPGLRCQPSNGEDPFGEEFGICKEHDMASGDGNIVREEVVKENAAGSPVMRKWLNPR

SEQ ID NO: 4927 - protein, 522 aa, Homo Sapiens
EFKKCCPGSPDIDKLDVATMTEYLNFEKSSSVSRYGASQVEDMGNIILAMISEPYNHRFSDPERVNYKFESGTCSKMELIDDNTVVRARGLPWQSSDQDIARFFKGLNIAKGGAALCLNAQGRRNGEALVRFVSEEHRDLALQRHKHHMGTRYIEVYKATGEDFLKIAGGTSNEVAQFLSKENQVIVRMRGLPFTATAEEVVAFFGQHCPITGGKEGILFVTYPDGRPTGDAFVLFACEEYAQNALRKHKDLLGKRYIELFRSTAAEVQQVLNRFSSAPLIPLPTPPIIPVLPQQFVPPTNVRDCIRLRGLPYAATIEDILDFLGEFATDIRTHGVHMVLNHQGRPSGDAFIQMKSADRAFMAAQKCHKKNMKDRYVEVFQCSAEEMNFVLMGGTLNRNGLSPPPCKLPCLSPPSYTFPAPAAVIPTEAAIYQPSVILNPRALQPSTAYYPAGTQLFMNYTAYYPSPPGSPNSLGYFPTAANLSGVPPQPGTVVRMQGLAYNTGVKEILNFFQGYQCLKDVW

SEQ ID NO: 4928 - protein, 677 aa, Homo Sapiens
MTASPDYLVVLFGITAGATGAKLGSDEKELILLFWKVVDLANKKVGQLHEVLVRPDQLELTEDCKEETKIDVESLSSASQLDQALRQFNQSVSNELNIGVGTSFCLCTDGQLHVRQILHPEASKKNVLLPECFYSFFDLRKEFKKCCPGSPDIDKLDVATMTEYLNFEKSSSVSRYGASQVEDMGNIILAMISEPYNHRFSDPERVNYKFESGTCSKMELIDDNTVVRARGLPWQSSDQDIARFFKGLNIAKGGAALCLNAQGRRNGEALVRFVSEEHRDLALQRHKHHMGTRYIEVYKATGEDFLKIAGGTSNEVAQFLSKENQVIVRMRGLPFTATAEEVVAFFGQHCPITGGKEGILFVTYPDGRPTGDAFVLFACEEYAQNALRKHKDLLGKRYIELFRSTAAEVQQVLNRFSSAPLIPLPTPPIIPVLPQQFVPPTNVRDCIRLRGLPYAATIEDILDFLGEFATDIRTHGVHMVLNHQGRPSGDAFIQMKSADRAFMAAQKCHKKNMKDRYVEVFQCSAEEMNFVLMGGTLNRNGLSPPPCLSPPSYTFPAPAAVIPTEAAIYQPSVILNPRALQPSTAYYPAGTQLFMNYTAYYPSPPGSPNSLGYFPTAANLSGVPPQPGTVVRMQGLAYNTGVKEILNFFQGYQYATEDGLIHTNDQARTLPKEWVCI

SEQ ID NO: 4929 - protein, 681 aa, Homo Sapiens
MTASPDYLVVLFGITAGATGAKLGSDEKELILLFWKVVDLANKKVGQLHEVLVRPDQLELTEDCKEETKIDVESLSSASQLDQALRQFNQSVSNELNIGVGTSFCLCTDGQLHVRQILHPEASKKNVLLPECFYSFFDLRKEFKKCCPGSPDIDKLDVATMTEYLNFEKSSSVSRYGASQVEDMGNIILAMISEPYNHRFSDPERVNYKFESGTCSKMELIDDNTVVRARGLPWQSSDQDIARFFKGLNIAKGGAALCLNAQGRRNGEALVRFVSEEHRDLALQRHKHHMGTRYIEVYKATGEDFLKIAGGTSNEVAQFLSKENQVIVRMRGLPFTATAEEVVAFFGQHCPITGGKEGILFVTYPDGRPTGDAFVLFACEEYAQNALRKHKDLLGKRYIELFRSTAAEVQQVLNRFSSAPLIPLPTPPIIPVLPQQFVPPTNVRDCIRLRGLPYAATIEDILDFLGEFATDIRTHGVHMVLNHQGRPSGDAFIQMKSADRAFMAAQKCHKKNMKDRYVEVFQCSAEEMNFVLMGGTLNRNGLSPPPCKLPCLSPPSYTFPAPAAVIPTEAAIYQPSVILNPRALQPSTAYYPAGTQLFMNYTAYYPSPPGSPNSLGYFPTAANLSGVPPQPGTVVRMQGLAYNTGVKEILNFFQGYQYATEDGLIHTNDQARTLPKEWVCI

SEQ ID NO: 4930 - protein, 659 aa, Homo Sapiens
MTASPDYLVVLFGITAGATGAKLGSDEKELILLFWKVVDLANKKVGQLHEVLVRPDQLELTEDCKEETKIDVESLSSASQLDQALRQFNQSVSNELNIGVGTSFCLCTDGQLHVRQILHPEASKKNVLLPECFYSFFDLRKEFKKCCPGSPDIDKLDVATMTEYLNFEKSSSVSRYGASQVEDMGNIILAMISEPYNHRFSDPERVNYKFESGTCSKMELIDDNTVVRARGLPWQSSDQDIARFFKGLNIAKGGAALCLNAQGRRNGEALVRFVSEEHRDLALQRHKHHMGTRYIEVYKATGEDFLKIAGGTSNEVAQFLSKENQVIVRMRGLPFTATAEEVVAFFGQHCPITGGKEGILFVTYPDGRPTGDAFVLFACEEYAQNALRKHKDLLGKRYIELFRSTAAEVQQVLNRFSSAPLIPLPTPPIIPVLPQQFVPPTNVRDCIRLRGLPYAATIEDILDFLGEFATDIRTHGVHMVLNHQGRPSGDAFIQMKSADRAFMAAQKCHKKNMKDRYVEVFQCSAEEMNFVLMGGTLNRNGLSPPPCLSPPSYTFPAPAAVIPTEAAIYQPSVILNPRALQPSTAYYPAGTQLFMNYTAYYPSPPGSPNSLGYFPTAANLSGVPPQPGTVVRMQGLAYNTGVKEILNFFQGYQCLKDVW

SEQ ID NO: 4931 - protein, 604 aa, Homo Sapiens
MTASPDYLVVLFGITAGATGAKLGSDEKELILLFWKVVDLANKKVGQLHEVLVRPDQLELTEDCKEETKIDVESLSSASQLDQALRQFNQSVSNELNIGVGTSFCLCTDGQLHVRQILHPEASKKNVLLPECFYSFFDLRKEFKKCCPGSPDIDKLDVATMTEYLNFEKSSSVSRYGASQVEDMGNIILAMISEPYNHRFSDPERVNYKFESGTCSKMELIDDNTVVRARGLPWQSSDQDIARFFKGLNIAKGGAALCLNAQGRRNGEALVRFVSEEHRDLALQRHKHHMGTRYIEVYKATGEDFLKIAGGTSNEVAQFLSKENQVIVRMRGLPFTATAEEVVAFFGQHCPITGGKEGILFVTYPDGRPTGDAFVLFACEEYAQNALRKHKDLLGKRYIELFRSTAAEVQQVLNRFSSAPLIPLPTPPIIPVLPQQFVPPTNVRDCIRLRGLPYAATIEDILDFLGEFATDIRTHGVHMVLNHQGRPSGDAFIQMKSADRAFMAAQKCHKKNMKDRYVEVFQCSAEEMNFVLMGGTLNRNGLSPPPCLSPPSYTFPAPAAVIPTEAAIYQPSVILNPRALQPSTAYYPAGTQLFMNYTAYYPSV

SEQ ID NO: 4932 - protein, 681 aa, Homo Sapiens; identical to SEQ ID NO: 4929

SEQ ID NO: 4933 - protein, 608 aa, Homo Sapiens
MTASPDYLVVLFGITAGATGAKLGSDEKELILLFWKVVDLANKKVGQLHEVLVRPDQLELTEDCKEETKIDVESLSSASQLDQALRQFNQSVSNELNIGVGTSFCLCTDGQLHVRQILHPEASKKNVLLPECFYSFFDLRKEFKKCCPGSPDIDKLDVATMTEYLNFEKSSSVSRYGASQVEDMGNIILAMISEPYNHRFSDPERVNYKFESGTCSKMELIDDNTVVRARGLPWQSSDQDIARFFKGLNIAKGGAALCLNAQGRRNGEALVRFVSEEHRDLALQRHKHHMGTRYIEVYKATGEDFLKIAGGTSNEVAQFLSKENQVIVRMRGLPFTATAEEVVAFFGQHCPITGGKEGILFVTYPDGRPTGDAFVLFACEEYAQNALRKHKDLLGKRYIELFRSTAAEVQQVLNRFSSAPLIPLPTPPIIPVLPQQFVPPTNVRDCIRLRGLPYAATIEDILDFLGEFATDIRTHGVHMVLNHQGRPSGDAFIQMKSADRAFMAAQKCHKKNMKDRYVEVFQCSAEEMNFVLMGGTLNRNGLSPPPCKLPCLSPPSYTFPAPAAVIPTEAAIYQPSVILNPRALQPSTAYYPAGTQLFMNYTAYYPSV

SEQ ID NO: 4934 - protein, 502 aa, Homo Sapiens
  misc_feature (1)..(1): Xaa can be any naturally occurring amino acid
XFFDLRKEFKKCCPGSPDIDKLDVATMTEYLNFEKSSSVSRYGASQVEDMGNIILAMISEPYNHRFSDPERVNYKFESGTCSKMELIDDNTVVRARGLPWQSSDQDIARFFKGLNIAKGGAALCLNAQGRRNGEALVRFVSEEHRDLALQRHKHHMGTRYIEVYKATGEDFLKIAGGTSNEVAQFLSKENQVIVRMRGLPFTATAEEVVAFFGQHCPITGGKEGILFVTYPDGRPTGDAFVLFACEEYAQNALRKHKDLLGKRYIELFRSTAAEVQQVLNRFSSAPLIPLPTPPIIPVLPQQFVPPTNVRDCIRLRGLPYAATIEDILDFLGEFATDIRTHGVHMVLNHQGRPSGDAFIQMKSADRAFMAAQKCHKKNMKDRYVEVFQCSAEEMNFVLMGGTLNRNGLSPPPCKLPCLSPPSYTFPAPAAVIPTEAAIYQPSVILNPRALQPSTAYYPAGTQLFMNYTAYYPSMQPRMDLYTQMTRPGLYPKNGFVFKGPSS

SEQ ID NO: 4935 - protein, 40 aa, Homo Sapiens
  misc_feature (1)..(1): Xaa can be any naturally occurring amino acid
XLLPECFYSFFDLRKEFKKCCPGSPDIDKLDVATMTECIL

SEQ ID NO: 4936 - protein, 56 aa, Homo Sapiens
MAIKSIASRLRGSRRFLSGFVAGAVVGAAGAGLAALQFFRSQGAEGALTGKQPDDC

SEQ ID NO: 4937 - protein, 56 aa, Homo Sapiens; identical to SEQ ID NO: 4936

SEQ ID NO: 4938 - protein, 56 aa, Homo Sapiens; identical to SEQ ID NO: 4936

SEQ ID NO: 4939 - protein, 56 aa, Homo Sapiens; identical to SEQ ID NO: 4936

SEQ ID NO: 4940 - protein, 56 aa, Homo Sapiens; identical to SEQ ID NO: 4936

SEQ ID NO: 4941 - protein, 318 aa, Homo Sapiens
MAIKSIASRLRGSRRFLSGFVAGAVVGAAGAGLAALQFFRSQGAEGALTGKQPDGDADRKHCKFKPDPNIPPTFSAFNEDYVGSGWSRGHMAPAGNNKFSSKAMAETFYLSNIVPQDFDNNSGYWNRIEMYCRELTERFEDVWVVSGPLTLPQTRGDGKKIVSYQVIGEDNVAVPSHLYKVILARRSSVSTEPLALGAFVVPNEAIGFQPQLTEFQVSLQDLEKLSGLVFFPHLDRTSDIRNICSVDTCKLLDFQEFTLYLSTRKIEGARSVLRLEKIMENLKNAEIEPDDYFMSRYEKKLEELKAKEQSGTQIRKPS

SEQ ID NO: 4942 - protein, 368 aa, Homo Sapiens
MAIKSIASRLRGSRRFLSGFVAGAVVGAAGAGLAALQFFRSQGAEGALTGKQPDGSAEKAVLEQFGFPLTGTEARCYTNHALSYDQAKRVPRWVLEHISKSKIMGDADRKHCKFKPDPNIPPTFSAFNEDYVGSGWSRGHMAPAGNNKFSSKAMAETFYLSNIVPQDFDNNSGYWNRIEMYCRELTERFEDVWVVSGPLTLPQTRGDGKKIVSYQVIGEDNVAVPSHLYKVILARRSSVSTEPLALGAFVVPNEAIGFQPQLTEFQVSLQDLEKLSGLVFFPHLDRTSDIRNICSVDTCKLLDFQEFTLYLSTRKIEGARSVLRLEKIMENLKNAEIEPDDYFMSRYEKKLEELKAKEQSGTQIRKPS

SEQ ID NO: 4943 - protein, 143 aa, Homo Sapiens
MAIKSIASRLRGSRRFLSGFVAGAVVGAAGAGLAALQFFRSQGAEGALTGKQPDGSAEKAVLEQFGFPLTGTEARCYTNHALSYDQAKRVPRWVLEHISKSKIMGRFFKFTLLASLFLLSLNLHLWLVLNFWVQVTLLPQPPE

SEQ ID NO: 4944 - protein, 107 aa, Homo Sapiens
MAIKSIASRLRGSRRFLSGFVAGAVVGAAGAGLAALQFFRSQGAEGALTGKQPDGSAEKAVLEQFGFPLTGTEARCYTNHALSYDQAKRVPRWVLEHISKSKIMGWS

SEQ ID NO: 4945 - protein, 81 aa, Homo Sapiens
MAIKSIASRLRGSRRFLSGFVAGAVVGAAGAGLAALQFFRSQGAEGALTGKQPDGSAEKAVLEQFGFPLTGTEVDSSSLHS

SEQ ID NO: 4946 - protein, 146 aa, Homo Sapiens
MAIKSIASRLRGSRRFLSGFVAGAVVGAAGAGLAALQFFRSQGAEGALTGKQPDGSAEKAVLEQFGFPLTGTEVMQTESIVNLSLIPISLQPSVPSMKIMLEVGGHEDTWLQQEITNFQVKPWLKPFTFLTLCLRILIIILDIGTE

SEQ ID NO: 4947 - protein, 107 aa, Homo Sapiens
RSQGAEGALTGKQPDGSAEKAVLEQFGFPLTGTEVMQTESIVNLSLIPISLQPSVPSMKIMLEVGGHEDTWLQQEITNFQVKPWLKPFTFLTLCLRILIIILDIGTE

SEQ ID NO: 4948 - protein, 187 aa, Homo Sapiens
  misc_feature (1)..(1): Xaa can be any naturally occurring amino acid
XFRSQGAEGALTGKQPDGSAEKAVLEQFGFPLTGTEARCYTNHALSYDQAKRVPRWVLEHISKSKIMGDADRKHCKFKPDPNIPPTFSAFNEDYVGSGWSRGHMAPAGNNKFSSKAMAETFYLSNIVPQDFDNNSGYWNRIEMYCRELTERFEDVWVVSGPLTLPQTRGDGKKIVSYQSWEYPSLQF

SEQ ID NO: 4949 - protein, 15 aa, Homo Sapiens
  misc_feature (1)..(1): Xaa can be any naturally occurring amino acid
XGAEGALTGKQPDDC

SEQ ID NO: 4950 - protein, 676 aa, Homo Sapiens
MQSWRRRKSLWLALSASWLLLVLLGGFSLLRLALPPRPRPGASQGWPRWLDAELLQSFSQPGELPEDAVSPPQAPHGGSCNWESCFDTSKCRGDGLKVFVYPAVGTISETHRRILASIEGSRFYTFSPAGACLLLLLSLDAQTGECSSMPLQWNRGRNHLVLRLHPAPCPRTFQLGQAMVAEASPTVDSFRPGFDVALPFLPEAHPLRGGAPGQLRQHSPQPGVALLALEEERGGWRTADTGSSACPWDGRCEQDPGPGQTQRQETLPNATFCLISGHRPEAASRFLQALQAGCIPVLLSPRWELPFSEVIDWTKAAIVADERLPLQVLAALQEMSPARVLALRQQTQFLWDAYFSSVEKVIHTTLEVIQDRIFGTSAHPSLLWNSPPGALLALSTFSTSPQDFPFYYLQQGSRPEGRFSALIWVGPPGQPPLKLIQAVAGSQHCAQILVLWSNERPLPSRWPETAVPLTVIDGHRKVSDRFYPYSTIRTDAILSLDARSSLSTSEVDFAFLVWQSFPERMVGFLTSSHFWDEAHGGWGYTAERTNEFSMVLTTAAFYHRYYHTLFTHSLPKALRTLADEAPTCVDVLMNFIVAAVTKLPPIKVPYGKQRQEAAPLAPGGPGPRPKPPAPAPDCINQIAAAFGHMPLLSSRLRLDPVLFKDPVSVQRKKYRSLEKP

SEQ ID NO: 4951 - protein, 117 aa, Homo Sapiens
MGIRVLRLSLVVILVLLLVAGALTALLPSVKEDKMLMLRREIKSQGKSTMDSFTLIMQTYNRTDLLLKLLNHYQAVPNLHKVIVVWNNIGEKAPDELWNSLGPHPIPVIFKQQTANR

SEQ ID NO: 4952 - protein, 147 aa, Homo Sapiens
MRCCHICKLPGRVMGIRVLRLSLVVILVLLLVAGALTALLPSVKEDKMLMLRREIKSQGKSTMDSFTLIMQTYNRTDLLLKLLNHYQAVPNLHKVIVVWNNIGEKAPDELWNSLGPHPIPVIFKQQTANRMRNRLQVFPELETNAIS

SEQ ID NO: 4953 - protein, 330 aa, Homo Sapiens
MRCCHICKLPGRVMGIRVLRLSLVVILVLLLVAGALTALLPSVKEDKMLMLRREIKSQGKSTMDSFTLIMQTYNRTDLLLKLLNHYQAVPNLHKVIVVWNNIGEKAPDELWNSLGPHPIPVIFKQQTANRMRNRLQVFPELETNAVLMVDDDTLISTPDLVFAFSVWQQFPDQIVGFVPRKHVSTSSGIYSYGSFEMQAPGSGNGDQYSMVLIGASFFNSKYLELFQRQPAAVHALIDDTQNCDDIAMNFIIAKHIGKTSGIFVKPVNMDNLEKETNSGYSGMWHRAEHALQRSYCINKLVNIYDSMPLRYSNIMISQFGFPYANYKRKI

SEQ ID NO: 4954 - protein, 330 aa, Homo Sapiens; identical to SEQ ID NO: 4953

SEQ ID NO: 4955 - protein, 266 aa, Homo Sapiens
MRTWNSGGTKCCHICKLPGRVMGIRVLRLSLVVILVLLLVAGALTALLPSVKEDKMLMLRREIKSQGKSTMDSFTLIMQTYNRTDLLLKLLNHYQAVPNLHKVIVVWNNIGEKAPDELWNSLGPHPIPVIFKQQTANRMRNRLQVFPELETNAVLMVDDDTLISTPDLVFAFSVWQQFPDQIVGFVPRKHVSTSSGIYSYGSFEMQAPGSGNGDQYSMVLIGASFFNSKYLELFQRQPAAVHALIDDTQNCDDIAMNFIIAKHIGK

SEQ ID NO: 4956 - protein, 130 aa, Homo Sapiens
MGRPLHLVLLSASLAGLLLLGESLFIRREQANNILARVTRANSFLEEMKKGHLERECMEETCSYEEAREVFEDSDKTNEFWNKYKDGDQCETSPCQNQGKCKDGLGEYTCTCLEGFEGKNCELCMLIFAL

SEQ ID NO: 4957 - protein, 334 aa, Homo Sapiens
MGRPLHLVLLSASLAGLLLLGESLFIRREQANNILARVTRANSFLEEMKKGHLERECMEETCSYEEAREVFEDSDKTNEFWNKYKDGDQCETSPCQNQGKCKDGLGEYTCTCLEGFEGKNCELFTRKLCSLDNGDCDQFCHEEQNSVVCSCARGYTLADNGKACIPTGPYPCGKQTLERRKRSVAQATSSSGEAPDSITWKPYDAADLDPTENPFDLLDFNQTQPERGDNNLTRIVGGQECKDGECPWQALLINEENEGFCGGTILSEFYILTAAHCLYQAKRFKVRGTGTRSRRRAVRRCTRWRWSSSTTGSQRRPMTSTSPCSGSRPPSPSA

SEQ ID NO: 4958 - protein, 332 aa, Homo Sapiens
MGRPLHLVLLSASLAGLLLLGESLFIRREQANNILARVTRANSFLEEMKKGHLERECMEETCSYEEAREVFEDSDKTNEFWNKYKDGDQCETSPCQNQGKCKDGLGEYTCTCLEGFEGKNCELFTRKLCSLDNGDCDQFCHEEQNSVVCSCARGYTLADNGKACIPTGPYPCGKQTLERRKRSVAQATSSSGEAPDSITWKPYDAADLDPTENPFDLLDFNQTQPERGDNNLTRIVGGQECKDGECPWQALLINEENEGFCGGTILSEFYILTAAHCLYQAKRFKGTGTRSRRRAVRRCTRWRWSSSTTGSQRRPMTSTSPCSGSRPPSPSA

SEQ ID NO: 4959 - protein, 488 aa, Homo Sapiens
MGRPLHLVLLSASLAGLLLLGESLFIRREQANNILARVTRANSFLEEMKKGHLERECMEETCSYEEAREVFEDSDKTNEFWNKYKDGDQCETSPCQNQGKCKDGLGEYTCTCLEGFEGKNCELFTRKLCSLDNGDCDQFCHEEQNSVVCSCARGYTLADNGKACIPTGPYPCGKQTLERRKRSVAQATSSSGEAPDSITWKPYDAADLDPTENPFDLLDFNQTQPERGDNNLTRIVGGQECKDGECPWQALLINEENEGFCGGTILSEFYILTAAHCLYQAKRFKVRVGDRNTEQEEGGEAVHEVEVVIKHNRFTKETYDFDIAVLRLKTPITFRMNVAPACLPERDWAESTLMTQKTGIVSGFGRTHEKGRQSTRLKMLEVPYVDRNSCKLSSSFIITQNMFCAGYDTKQEDACQGDSGGPHVTRFKDTYFVTGIVSWGEGCARKGKYGIYTKVTAFLKWIDRSMKTRGLPKAKSHAPEVITSSPLK

SEQ ID NO: 4960 - protein, 162 aa, Homo Sapiens
MIFLYQVVHFILFTSVSGECVTQLLKDTCFEGGDITTVFTPSAKYCQVVCTYHPRCLLFTFTAESPSEDPTRWFTCVLKDSVTETLPRVNRTAAISGYSFKQCSHQISACNKDIYVDLDMKGINYNSSVAKSAQECQERCTDDVHCHFFTYATRQFPSLEHR

SEQ ID NO: 4961 - protein, 625 aa, Homo Sapiens
MIFLYQVVHFILFTSVSGECVTQLLKDTCFEGGDITTVFTPSAKYCQVVCTYHPRCLLFTFTAESPSEDPTRWFTCVLKDSVTETLPRVNRTAAISGYSFKQCSHQISACNKDIYVDLDMKGINYNSSVAKSAQECQERCTDDVHCHFFTYATRQFPSLEHRNICLLKHTQTGTPTRITKLDKVVSGFSLKSCALSNLACIRDIFPNTVFADSNIDSVMAPDAFVCGRICTHHPGCLFFTFFSQEWPKESQRNLCLLKTSESGLPSTRIKKSKALSGFSLQSCRHSIPVFCHSSFYHDTDFLGEELDIVAAKSHEACQKLCTNAVRCQFFTYTPAQASCNEGKGKCYLKLSSNGSPTKILHGRGGISGYTLRLCKMDNECTTKIKPRIVGGTASVRGEWPWQVTLHTTSPTQRHLCGGSIIGNQWILTAAHCFYGVESPKILRVYSGILNQSEIKEDTSFFGVQEIIIHDQYKMAESGYDIALLKLETTVNYTDSQRPICLPSKGDRNVIYTDCWVTGWGYRKLRDKIQNTLQKAKIPLVTNEECQKRYRGHKITHKMICAGYREGGKDACKGDSGGPLSCKHNEVWHLVGITSWGEGCAQRERPGVYTNVVEYVDWILEKTQAV

SEQ ID NO: 4962 - protein, 571 aa, Homo Sapiens
MIFLYQVVHFILFTSVSGECVTQLLKDTCFEGGDITTVFTPSAKYCQVVCTYHPRCLLFTFTAESPSEDPTRWFTCVLKDSVTETLPRVNRTAAISGYSFKQCSHQISNICLLKHTQTGTPTRITKLDKVVSGFSLKSCALSNLACIRDIFPNTVFADSNIDSVMAPDAFVCGRICTHHPGCLFFTFFSQEWPKESQRNLCLLKTSESGLPSTRIKKSKALSGFSLQSCRHSIPVFCHSSFYHDTDFLGEELDIVAAKSHEACQKLCTNAVRCQFFTYTPAQASCNEGKGKCYLKLSSNGSPTKILHGRGGISGYTLRLCKMDNECTTKIKPRIVGGTASVRGEWPWQVTLHTTSPTQRHLCGGSIIGNQWILTAAHCFYGVESPKILRVYSGILNQSEIKEDTSFFGVQEIIIHDQYKMAESGYDIALLKLETTVNYTDSQRPICLPSKGDRNVIYTDCWVTGWGYRKLRDKIQNTLQKAKIPLVTNEECQKRYRGHKITHKMICAGYREGGKDACKGDSGGPLSCKHNEVWHLVGITSWGEGCAQRERPGVYTNVVEYVDWILEKTQAV

SEQ ID NO: 4963 - protein, 210 aa, Homo Sapiens
  misc_feature (1)..(1): Xaa can be any naturally occurring amino acid
XSGFSLKSCALSNLACIRDIFPNTVFADSNIDSVMAPDAFVCGRICTHHPGCLFFTFFSQEWPKESQRNLCLLKTSESGLPSTRIKKSKALSGFSLQSCRHSIPVFCHSSFYHDTDFLGEELDIVAAKSHEACQKLCTNAVRCQFFTYTPAQASCNEGKGKCYLKLSSNGSPTKILHGRGGISGYTLRLCKMDNELRGAPMKISGWLKTS

SEQ ID NO: 4964 - protein, 159 aa, Homo Sapiens
  misc_feature (1)..(1): Xaa can be any naturally occurring amino acid
XVESPKILRVYSGILNQSEIKEDTSFFGVQEIIIHDQYKMAESGYDIALLKLETTVNYTDKIQNTLQKAKIPLVTNEECQKRYRGHKITHKMICAGYREGGKDACKGDSGGPLSCKHNEVWHLVGITSWGEGCAQRERPGVYTNVVEYVDWILEKTQAV

SEQ ID NO: 4965 - protein, 615 aa, Homo Sapiens
MRALLLLGFLLVSLESTLSIPPWEAPKEHKYKAEEHTVVLTVTGEPCHFPFQYHRQLYHKCTHKGRPGPQPWCATTPNFDQDQRWGYCLEPKKVKDHCSKHSPCQKGGTCVNMPSGPHCLCPQHLTGNHCQKEKCFEPQLLRFFHKNEIWYRTEQAAVARCQCKGPDAHCQRLASQACRTNPCLHGGRCLEVEGHRLCHCPVGYTGAFCDVDTKASCYDGRGLSYRGLARTTLSGAPCQPWASEATYRNVTAEQARNWGLGGHAFCRNPDNDIRPWCFVLNRDRLSWEYCDLAQCQTPTQAAPPTPVSPRLHVPLMPAQPAPPKPQPTTRTPPQSQTPGALPAKREQPPSLTRNGPLSCGQRLRKSLSSMTRVVGGLVALRGAHPYIAALYWGHSFCAGSLIAPCWVLTAAHCLQDRPAPEDLTVVLGQERRNHSCEPCQTLAVRSYRLHEAFSPVSYQHDLALLRLQEDADGSCALLSPYVQPVCLPSGAARPSETTLCQVAGWGHQFEGAEEYASFLQEAQVPFLSLERCSAPDVHGSSILPGMLCAGFLEGGTDACQGDSGGPLVCEDQAAERRLTLQGIISWGSGCGDRNKPGVYTDVAYYLAWIREHTVS

SEQ ID NO: 4966 - protein, 661 aa, Homo Sapiens
MRLKNLTFIIILIISGELYAEEKPCGFPHVENGRIAQYYYTFKSFYFPMSIDKKLSFFCLAGYTTESGRQEEQTTCTTEGWSPEPRCFKKCTKPDLSNGYISDVKLLYKIQENMRYGCASGYKTTGGKDEEVVQCLSDGWSSQPTCRKEHETCLAPELYNGNYSTTQKTFKVKDKVQYECATGYYTAGGKKTEEVECLTYGWSLTPKCTKLKCSSLRLIENGYFHPVKQTYEEGDVVQFFCHENYYLSGSDLIQCYNFGWYPESPVCEGRRNRCPPPPLPINSKIQTHSTTYRHGEIVHIECELNFEIHGSAEIRCEDGKWTEPPKCIEGQEKVACEEPPFIENGAANLHSKIYYNGDKVTYACKSGYLLHGSNEITCNRGKWTLPPECVENNENCKHPPVVMNGAVADGILASYATGSSVEYRCNEYYLLRGSKISRCEQGKWSSPPVCLEPCTVNVDYMNRNNIEMKWKYEGKVLHGDLIDFVCKQGYDLSPLTPLSELSVQCNRGEVKYPLCTRKESKGMCTSPPLIKHGVIISSTVDTYENGSSVEYRCFDHHFLEGSREAYCLDGMWTTPPLCLEPCTLSFTEMEKNNLLLKWDFDNRPHILHGEYIEFICRGDTYPAELYITGSILRMQCDRGQLKYPRCIPRQSTLSYQEPLRT

SEQ ID NO: 4967 - protein, 622 aa, Homo Sapiens
MAHVRGLQLPGCLALAALCSLVHSQHVFLAPQQARSLLQRVRRANTFLEEVRKGNLERECVEETCSYEEAFEALESSTATDVFWAKYTACETARTPRDKLAACLEGNCAEGLGTNYRGHVNITRSGIECQLWRSRYPHKPEINSTTHPGADLQENFCRNPDSSTTGPWCYTTDPTVRRQECSIPVCGQDQVTVAMTPRSEGSSVNLSPPLEQCVPDRGQQYQGRLAVTTHGLPCLAWASAQAKALSKHQDFNSAVQLVENFCRNPDGDEEGVWCYVAGKPGDFGYCDLNYCEEAVEEETGDGLDEDSDRAIEGRTATSEYQTFFNPRTFGSGEADCGLRPLFEKKSLEDKTERELLESYIDGRIVEGSDAEIGMSPWQVMLFRKSPQELLCGASLISDRWVLTAAHCLLYPPWDKNFTENDLLVRIGKHSRTRYERNIEKISMLEKIYIHPRYNWRENLDRDIALMKLKKPVAFSDYIHPVCLPDRETAASLLQAGYKGRVTGWGNLKETWTANVGKGQPSVLQVVNLPIVERPVCKDSTRIRITDNMFCAGYKPDEGKRGDACEGDSGGPFVMKSPFNNRWYQMGIVSWGEGCDRDGKYGFYTHVFRLKKWIQKVIDQFGE

SEQ ID NO: 4968 - protein, 583 aa, Homo Sapiens
MAHVRGLQLPGCLALAALCSLVHSQHVFLAPQQARSLLQRVRRANTFLEEVRKGNLERECVEETCSYEEAFEALESSTATDVFWAKYTACETARTPRDKLAACLEGNCAEGLGTNYRGHVNITRSGIECQLWRSRYPHKPEINSTTHPGADLQENFCRNPDSSTTGPWCYTTDPTVRRQECSIPVCGQDQVTVAMTPRSEGSSVNLSPPLEQCVPDRGQQYQGRLAVTTHGLPCLAWASAQAKALSKHQDFNSAVQLVENFCRNPDGDEEGVWCYVAGKPGDFGYCDLNYCEEAVEEETGDGLDEDSDRAIEGRTATSEYQTFFNPRTFGSGEADCGLRPLFEKKSLEDKTERELLESYIDGRIVEGSDAEIGMSPWQVMLFRKSPQELLCGASLISDRWVLTAAHCLLYPPWDKNFTENDLLVRIGKHSRTRYERNIEKISMLEKIYIHPSLLQAGYKGRVTGWGNLKETWTANVGKGQPSVLQVVNLPIVERPVCKDSTRIRITDNMFCAGYKPDEGKRGDACEGDSGGPFVMKSPFNNRWYQMGIVSWGEGCDRDGKYGFYTHVFRLKKWIQKVIDQFGE

SEQ ID NO: 4969 - protein, 324 aa, Homo Sapiens
MGWGLLAGQSTQSWPLMFLAPQQARSLLQRVRRANTFLEEVRKGNLERECVEETCSYEEAFEALESSTATDVFWAKYTACETARTPRDKLAACLEGNCAEGLGTNYRGHVNITRSGIECQLWRSRYPHKPEINSTTHPGADLQENFCRNPDSSTTGPWCYTTDPTVRRQECSIPVCGQDQVTVAMTPRSEGSSVNLSPPLEQCVPDRGQQYQGRLAVTTHGLPCLAWASAQAKALSKHQDFNSAVQLVENFCRNPDGDEEGVWCYVAGKPGDFGYCDLNYCEEAVEEETGDGLDEDSDRAIEGRTATSEYQTFFNPRTFGSGEA

SEQ ID NO: 4970 - protein, 425 aa, Homo Sapiens
MGPRRLLLVAACFSLCGPLLSARTRARRPESKATNATLDPRSFLLRNPNDKYEPFWEDEEKNESGLTEYRLVSINKSSPLQKQLPAFISEDASGYLTSSWLTLFVPSVYTGVFVVSLPLNIMAIVVFILKMKVKKPAVVYMLHLATADVLFVSVLPFKISYYFSGSDWQFGSELCRFVTAAFYCNMYASILLMTVISIDRFLAVVYPMQSLSWRTLGRASFTCLAIWALAIAGVVPLLLKEQTIQVPGLNITTCHDVLNETLLEGYYAYYFSAFSAVFFFVPLIISTVCYVSIIRCLSSSAVANRSKKSRALFLSAAVFCIFIICFGPTNVLLIAHYSFLSHTSTTEAAYFAYLLCVCVSSISCCIDPLIYYYASSECQRYVYSILCCKESSDPSSYNSSGQLMASKMDTCSSNLNNSIYKKLLT

SEQ ID NO: 4971 - protein, 102 aa, Homo Sapiens
MGPRRLLLVAACFSLCGPLLSARTRARRPVTFRWGVPPPSRAQPMPLWTRSWRVQPACHGVLDMEEDGAEAPWGSLQSCVALVIVFLPGPPPKRKALTLLHQ

SEQ ID NO: 4972 - protein, 113 aa, Homo Sapiens
MWGRLLLWPLVLGFSLSGGTQTPSVYDESGSTGGGDARPQSCLPPAATQAKSVPMTVTPWSSRTAHGHCFWAGCPPGWCPPSMGWSWWWGCRPMGWRCGCWPRRHLGCPPPCC

SEQ ID NO: 4973 - protein, 385 aa, Homo Sapiens
MWGRLLLWPLVLGFSLSGGTQTPSVYDESGSTGGGDDSTPSILPAPRGYPGQVCANDSDTLELPDSSRALLLGWVPTRLVPALYGLVLVVGLPANGLALWVLATQAPRLPSTMLLMNLAAADLLLALALPPRIAYHLRGQRWPFGEAACRLATAALYGHMYGSVLLLAAVSLDRYLALVHPLRARALRGRRLALGLCMAAWLMAAALALPLTLQRQTFRLARSDRVLCHDALPLDAQASHWQPAFTCLALLGCFLPLLAMLLCYGATLHTLAASGRRYGHALRLTAVVLASAVAFFVPSNLLLLLHYSDPSPSAWGNLYGAYVPSLALSTLNSCVDPFIYYYVSAEFRDKVRAGLFQRSPGDTVASKASAEGGSRGMGTHSSLLQ

SEQ ID NO: 4974 - protein, 2224 aa, Homo Sapiens
MFPGCPRLWVLVVLGTSWVGWGSQGTEAAQLRQFYVAAQGISWSYRPEPTNSSLNLSVTSFKKIVYREYEPYFKKEKPQSTISGLLGPTLYAEVGDIIKVHFKNKADKPLSIHPQGIRYSKLSEGASYLDHTFPAEKMDDAVAPGREYTYEWSISEDSGPTHDDPPCLTHIYYSHENLIEDFNSGLIGPLLICKKGTLTEGGTQKTFDKQIVLLFAVFDESKSWSQSSSLMYTVNGYVNGTMPDITVCAHDHISWHLLGMSSGPELFSIHFNGQVLEQNHHKVSAITLVSATSTTANMTVGPEGKWIISSLTPKHLQAGMQAYIDIKNCPKKTRNLKKITREQRRHMKRWEYFIAAEEVIWDYAPVIPANMDKKYRSQHLDNFSNQIGKHYKKVMYTQYEDESFTKHTVNPNMKEDGILGPIIRAQVRDTLKIVFKNMASRPYSIYPHGVTFSPYEDEVNSSFTSGRNNTMIRAVQPGETYTYKWNILEFDEPTENDAQCLTRPYYSDVDIMRDIASGLIGLLLICKSRSLDRRGIQRAADIEQQAVFAVFDENKSWYLEDNINKFCENPDEVKRDDPKFYESNIMSTINGYVPESITTLGFCFDDTVQWHFCSVGTQNEILTIHFTGHSFIYGKRHEDTLTLFPMRGESVTVTMDNVGTWMLTSMNSSPRSKKLRLKFRDVKCIPDDDEDSYEIFEPPESTVMATRKMHDRLEPEDEESDADYDYQNRLAAALGIRSFRNSSLNQEEEEFNLTALALENGTEFVSSNTDIIVGSNYSSPSNISKFTVNNLAEPQKAPSHQQATTAGSPLRHLIGKNSVLNSSTAEHSSPYSEDPIEDPLQPDVTGIRLLSLGAGEFKSQEHAKHKGPKVERDQAAKHRFSWMKLLAHKVGRHLSQDTGSPSGMRPWEDLPSQDTGSPSRMRPWKDPPSDLLLLKQSNSSKILVGRWHLASEKGSYEIIQDTDEDTAVNNWLISPQNASRAWGESTPLANKPGKQSGHPKFPRVRHKSLQVRQDGGKSRLKKSQFLIKTRKKKKEKHTHHAPLSPRTFHPLRSEAYNTFSERRLKHSLVLHKSNETSLPTDLNQTLPSMDFGWIASLPDHNQNSSNDTGQASCPPGLYQTVPPEEHYQTFPIQDPDQMHSTSDPSHRSSSPELSEMLEYDRSHKSFPTDISQMSPSSEHEVWQTVISPDLSQVTLSPELSQTNLSPDLSHTTLSPELIQRNLSPALGQMPISPDLSHTTLSPDLSHTTLSLDLSQTNLSPELSQTNLSPALGQMPLSPDLSHTTLSLDFSQTNLSPELSHMTLSPELSQTNLSPALGQMPISPDLSHTTLSLDFSQTNLSPELSQTNLSPALGQMPLSPDPSHTTLSLDLSQTNLSPELSQTNLSPDLSEMPLFADLSQIPLTPDLDQMTLSPDLGETDLSPNFGQMSLSPDLSQVTLSPDISDTTLLPDLSQISPPPDLDQIFYPSESSQSLLLQEFNESFPYPDLGQMPSPSSPTLNDTFLSKEFNPLVIVGLSKDGTDYIEIIPKEEVQSSEDDYAEIDYVPYDDPYKTDVRTNINSSRDPDNIAAWYLRSNNGNRRNYYIAAEEISWDYSEFVQRETDIEDSDDIPEDTTYKKVVFRKYLDSTFTKRDPRGEYEEHLGILGPIIRAEVDDVIQVRFKNLASRPYSLHAHGLSYEKSSEGKTYEDDSPEWFKEDNAVQPNSSYTYVWHATERSGPESPGSACRAWAYYSAVNPEKDIHSGLIGPLLICQKGILHKDSNMPMDMREFVLLFMTFDEKKSWYYEKKSRSSWRLTSSEMKKSHEFHAINGMIYSLPGLKMYEQEWVRLHLLNIGGSQDIHVVHFHGQTLLENGNKQHQLGVWPLLPGSFKTLEMKASKPGWWLLNTEVGENQRAGMQTPFLIMDRDCRMPMGLSTGIISDSQIKASEFLGYWEPRLARLNNGGSYNAWSVEKLAAEFASKPWIQVDMQKEVIITGIQTQGAKHYLKSCYTTEFYVAYSSNQINWQIFKGNSTRNVMYFNGNSDASTIKENQFDPPIVARYIRISPTRAYNRPTLRLELQGCEVNGCSTPLGMENGKIENKQITASSFKKSWWGDYWEPFRARLNAQGRVNAWQAKANNNKQWLEIDLLKIKKITAIITQGCKSLSSEMYVKSYTIHYSEQGVEWKPYRLKSSMVDKIFEGNTNTKGHVKNFFNPPIISRFIRVIPKTWNQSIALRLELFGCDIY

SEQ ID NO: 4975 - protein, 2229 aa, Homo Sapiens
MFPGCPRLWVLVVLGTSWVGWGSQGTEAAQLRQFYVAAQGISWSYRPEPTNSSLNLSVTSFKKIVYREYEPYFKKEKPQSTISGLLGPTLYAEVGDIIKVHFKNKADKPLSIHPQGIRYSKLSEGASYLDHTFPAEKMDDAVAPGREYTYEWSISEDSGPTHDDPPCLTHIYYSHENLIEDFNSGLIGPLLICKKGTLTEGGTQKTFDKQIVLLFAVFDESKSWSQSSSLMYTVNGYVNGTMPDITVCAHDHISWHLLGMSSGPELFSIHFNGQVLEQNHHKVSAITLVSATSTTANMTVGPEGKWIISSLTPKHLQAGMQAYIDIKNCPKKTRNLKKITREQRRHMKRWEYFIAAEEVIWDYAPVIPANMDKKYRSQHLDNFSNQIGKHYKKVMYTQYEDESFTKHTVNPNMKEDGILGPIIRAQVRDTLKIVFKNMASRPYSIYPHGVTFSPYEDEVNSSFTSGRNNTMIRAVQPGETYTYKWNILEFDEPTENDAQCLTRPYYSDVDIMRDIASGLIGLLLICKSRSLDRRGIQRAADIEQQAVFAVFDENKSWYLEDNINKFCENPDEVKRDDPKFYESNIMSNFTLSAINGYVPESITTLGFCFDDTVQWHFCSVGTQNEILTIHFTGHSFIYGKRHEDTLTLFPMRGESVTVTMDNVGTWMLTSMNSSPRSKKLRLKFRDVKCIPDDDEDSYEIFEPPESTVMATRKMHDRLEPEDEESDADYDYQNRLAAALGIRSFRNSSLNQEEEEFNLTALALENGTEFVSSNTDIIVGSNYSSPSNISKFTVNNLAEPQKAPSHQQATTAGSPLRHLIGKNSVLNSSTAEHSSPYSEDPIEDPLQPDVTGIRLLSLGAGEFKSQEHAKHKGPKVERDQAAKHRFSWMKLLAHKVGRHLSQDTGSPSGMRPWEDLPSQDTGSPSRMRPWKDPPSDLLLLKQSNSSKILVGRWHLASEKGSYEIIQDTDEDTAVNNWLISPQNASRAWGESTPLANKPGKQSGHPKFPRVRHKSLQVRQDGGKSRLKKSQFLIKTRKKKKEKHTHHAPLSPRTFHPLRSEAYNTFSERRLKHSLVLHKSNETSLPTDLNQTLPSMDFGWIASLPDHNQNSSNDTGQASCPPGLYQTVPPEEHYQTFPIQDPDQMHSTSDPSHRSSSPELSEMLEYDRSHKSFPTDISQMSPSSEHEVWQTVISPDLSQVTLSPELSQTNLSPDLSHTTLSPELIQRNLSPALGQMPISPDLSHTTLSPDLSHTTLSLDLSQTNLSPELSQTNLSPALGQMPLSPDLSHTTLSLDFSQTNLSPELSHMTLSPELSQTNLSPALGQMPISPDLSHTTLSLDFSQTNLSPELSQTNLSPALGQMPLSPDPSHTTLSLDLSQTNLSPELSQTNLSPDLSEMPLFADLSQIPLTPDLDQMTLSPDLGETDLSPNFGQMSLSPDLSQVTLSPDISDTTLLPDLSQISPPPDLDQIFYPSESSQSLLLQEFNESFPYPDLGQMPSPSSPTLNDTFLSKEFNPLVIVGLSKDGTDYIEIIPKEEVQSSEDDYAEIDYVPYDDPYKTDVRTNINSSRDPDNIAAWYLRSNNGNRRNYYIAAEEISWDYSEFVQRETDIEDSDDIPEDTTYKKVVFRKYLDSTFTKRDPRGEYEEHLGILGPIIRAEVDDVIQVRFKNLASRPYSLHAHGLSYEKSSEGKTYEDDSPEWFKEDNAVQPNSSYTYVWHATERSGPESPGSACRAWAYYSAVNPEKDIHSGLIGPLLICQKGILHKDSNMPMDMREFVLLFMTFDEKKSWYYEKKSRSSWRLTSSEMKKSHEFHAINGMIYSLPGLKMYEQEWVRLHLLNIGGSQDIHVVHFHGQTLLENGNKQHQLGVWPLLPGSFKTLEMKASKPGWWLLNTEVGENQRAGMQTPFLIMDRDCRMPMGLSTGIISDSQIKASEFLGYWEPRLARLNNGGSYNAWSVEKLAAEFASKPWIQVDMQKEVIITGIQTQGAKHYLKSCYTTEFYVAYSSNQINWQIFKGNSTRNVMYFNGNSDASTIKENQFDPPIVARYIRISPTRAYNRPTLRLELQGCEVNGCSTPLGMENGKIENKQITASSFKKSWWGDYWEPFRARLNAQGRVNAWQAKANNNKQWLEIDLLKIKKITAIITQGCKSLSSEMYVKSYTIHYSEQGVEWKPYRLKSSMVDKIFEGNTNTKGHVKNFFNPPIISRFIRVIPKTWNQSIALRLELFGCDIY

SEQ ID NO: 4976 - protein, 382 aa, Homo Sapiens
MVSQALRLLCLLLGLQGCLAADGDQCASSPCQNGGSCKDQLQSYICFCLPAFEGRNCETHKDDQLICVNENGGCEQYCSDHTGTKRSCRCHEGYSLLADGVSCTPTVEYPCGKIPILEKRNASKPQGRIVGGKVCPKGECPWQVLLLVNGAQLCGGTLINTIWVVSAAHCFDKIKNWRNLIAVLGEHDLSEHDGDEQSRRVAQVIIPSTYVPGTTNHDIALLRLHQPVVLTDHVVPLCLPERTFSERTLAFVRFSLVSGWGQLLDRGATALELMVLNVPRLMTQDCLQQSRKVGDSPNITEYMFCAGYSDGSKDSCKGDSGGPHATHYRGTWYLTGIVSWGQGCATVGHFGVYTRVSQYIEWLQKLMRSEPRPGVLLRAPFP

SEQ ID NO: 4977 - protein, 74 aa, Homo Sapiens
MVSQALRLLCLLLGLQGCLAAGGSPRRPAPAPARQRVPGGAAAGLPGEGVQGGAVLLRGGPGDLQGRGEDVVSG

SEQ ID NO: 4978 - protein, 466 aa, Homo Sapiens
MVSQALRLLCLLLGLQGCLAAGGVAKASGGETRDMPWKPGPHRVFVTQEEAHGVLHRRRRANAFLEELRPGSLERECKEEQCSFEEAREIFKDAERTKLFWISYSDGDQCASSPCQNGGSCKDQLQSYICFCLPAFEGRNCETHKDDQLICVNENGGCEQYCSDHTGTKRSCRCHEGYSLLADGVSCTPTVEYPCGKIPILEKRNASKPQGRIVGGKVCPKGECPWQVLLLVNGAQLCGGTLINTIWVVSAAHCFDKIKNWRNLIAVLGEHDLSEHDGDEQSRRVAQVIIPSTYVPGTTNHDIALLRLHQPVVLTDHVVPLCLPERTFSERTLAFVRFSLVSGWGQLLDRGATALELMVLNVPRLMTQDCLQQSRKVGDSPNITEYMFCAGYSDGSKDSCKGDSGGPHATHYRGTWYLTGIVSWGQGCATVGHFGVYTRVSQYIEWLQKLMRSEPRPGVLLRAPFP

SEQ ID NO: 4979 - protein, 444 aa, Homo Sapiens
MVSQALRLLCLLLGLQGCLAAVFVTQEEAHGVLHRRRRANAFLEELRPGSLERECKEEQCSFEEAREIFKDAERTKLFWISYSDGDQCASSPCQNGGSCKDQLQSYICFCLPAFEGRNCETHKDDQLICVNENGGCEQYCSDHTGTKRSCRCHEGYSLLADGVSCTPTVEYPCGKIPILEKRNASKPQGRIVGGKVCPKGECPWQVLLLVNGAQLCGGTLINTIWVVSAAHCFDKIKNWRNLIAVLGEHDLSEHDGDEQSRRVAQVIIPSTYVPGTTNHDIALLRLHQPVVLTDHVVPLCLPERTFSERTLAFVRFSLVSGWGQLLDRGATALELMVLNVPRLMTQDCLQQSRKVGDSPNITEYMFCAGYSDGSKDSCKGDSGGPHATHYRGTWYLTGIVSWGQGCATVGHFGVYTRVSQYIEWLQKLMRSEPRPGVLLRAPFP

SEQ ID NO: 4980 - protein, 165 aa, Homo Sapiens [sequence omitted]

SEQ ID NO: 4981 - protein, 222 aa, Homo Sapiens
MHRDARAQKASRGFPPRVPKSFPFNTSVVYKKTLFVEFTDHLFNIAKPRPPWMGLLGPTIQAEVYDTVVITLKNMASHPVSLHAVGVSYWKASEGAEYDDQTSQREKEDDKVFPGGSHTYVWQVLKENGPMASDPLCLTYSYLSHVDLVKDLNSGLIGALLVCREGSLAKEKTQTLHKFILLFAVFDEGKSWHSETKNSLMQDRDAASARAWPKMHTVNGYV

SEQ ID NO: 4982 - protein, 262 aa, Homo Sapiens
MLEQEEERENARKGGSAAHFQTIIRSCERSIRRIARGKSAPMIQSPPTRPFLQQVFFGNVDSSGIKHNIFNPPIIARYIRLHPTHYSIRSTLRMELMGCDLNSCSMPLGMESKAISDAQITASSYFTNMFATWSPSKARLHLQGRSNAWRPQVNNPKEWLQVDFQKTMKVTGVTTQGVKSLLTSMYVKEFLISSSQDGHQWTLFFQNGKVKVFQGNQDSFTPVVNSLDPPLLTRYLRIHPQSWVHQIALRMEVLGCEAQDLY

SEQ ID NO: 4983 - protein, 63 aa, Homo Sapiens
MQIELSTCFFLCLLRFCFSATRRYYLGAVELSWDYMQSDLDFLLECQNLFHSTPQSCTKRLCL

SEQ ID NO: 4984 - protein, 2351 aa, Homo Sapiens
MQIELSTCFFLCLLRFCFSATRRYYLGAVELSWDYMQSDLGELPVDARFPPRVPKSFPFNTSVVYKKTLFVEFTDHLFNIAKPRPPWMGLLGPTIQAEVYDTVVITLKNMASHPVSLHAVGVSYWKASEGAEYDDQTSQREKEDDKVFPGGSHTYVWQVLKENGPMASDPLCLTYSYLSHVDLVKDLNSGLIGALLVCREGSLAKEKTQTLHKFILLFAVFDEGKSWHSETKNSLMQDRDAASARAWPKMHTVNGYVNRSLPGLIGCHRKSVYWHVIGMGTTPEVHSIFLEGHTFLVRNHRQASLEISPITFLTAQTLLMDLGQFLLFCHISSHQHDGMEAYVKVDSCPEEPQLRMKNNEEAEDYDDDLTDSEMDVVRFDDDNSPSFIQIRSVAKKHPKTWVHYIAAEEEDWDYAPLVLAPDDRSYKSQYLNNGPQRIGRKYKKVRFMAYTDETFKTREAIQHESGILGPLLYGEVGDTLLIIFKNQASRPYNIYPHGITDVRPLYSRRLPKGVKHLKDFPILPGEIFKYKWTVTVEDGPTKSDPRCLTRYYSSFVNMERDLASGLIGPLLICYKESVDQRGNQIMSDKRNVILFSVFDENRSWYLTENIQRFLPNPAGVQLEDPEFQASNIMHSINGYVFDSLQLSVCLHEVAYWYILSIGAQTDFLSVFFSGYTFKHKMVYEDTLTLFPFSGETVFMSMENPGLWILGCHNSDFRNRGMTALLKVSSCDKNTGDYYEDSYEDISAYLLSKNNAIEPRSFSQNSRHPSTRQKQFNATTIPENDIEKTDPWFAHRTPMPKIQNVSSSDLLMLLRQSPTPHGLSLSDLQEAKYETFSDDPSPGAIDSNNSLSEMTHFRPQLHHSGDMVFTPESGLQLRLNEKLGTTAATELKKLDFKVSSTSNNLISTIPSDNLAAGTDNTSSLGPPSMPVHYDSQLDTTLFGKKSSPLTESGGPLSLSEENNDSKLLESGLMNSQESSWGKNVSSTESGRLFKGKRAHGPALLTKDNALFKVSISLLKTNKTSNNSATNRKTHIDGPSLLIENSPSVWQNILESDTEFKKVTPLIHDRMLMDKNATALRLNHMSNKTTSSKNMEMVQQKKEGPIPPDAQNPDMSFFKMLFLPESARWIQRTHGKNSLNSGQGPSPKQLVSLGPEKSVEGQNFLSEKNKVVVGKGEFTKDVGLKEMVFPSSRNLFLTNLDNLHENNTHNQEKKIQEEIEKKETLIQENVVLPQIHTVTGTKNFMKNLFLLSTRQNVEGSYDGAYAPVLQDFRSLNDSTNRTKKHTAHFSKKGEEENLEGLGNQTKQIVEKYACTTRISPNTSQQNFVTQRSKRALKQFRLPLEETELEKRIIVDDTSTQWSKNMKHLTPSTLTQIDYNEKEKGAITQSPLSDCLTRSHSIPQANRSPLPIAKVSSFPSIRPIYLTRVLFQDNSSHLPAASYRKKDSGVQESSHFLQGAKKNNLSLAILTLEMTGDQREVGSLGTSATNSVTYKKVENTVLPKPDLPKTSGKVELLPKVHIYQKDLFPTETSNGSPGHLDLVEGSLLQGTEGAIKWNEANRPGKVPFLRVATESSAKTPSKLLDPLAWDNHYGTQIPKEEWKSQEKSPEKTAFKKKDTILSLNACESNHAIAAINEGQNKPEIEVTWAKQGRTERLCSQNPPVLKRHQREITRTTLQSDQEEIDYDDTISVEMKKEDFDIYDEDENQSPRSFQKKTRHYFIAAVERLWDYGMSSSPHVLRNRAQSGSVPQFKKVVFQEFTDGSFTQPLYRGELNEHLGLLGPYIRAEVEDNIMVTFRNQASRPYSFYSSLISYEEDQRQGAEPRKNFVKPNETKTYFWKVQHHMAPTKDEFDCKAWAYFSDVDLEKDVHSGLIGPLLVCHTNTLNPAHGRQVTVQEFALFFTIFDETKSWYFTENMERNCRAPCNIQMEDPTFKENYRFHAINGYIMDTLPGLVMAQDQRIRWYLLSMGSNENIHSIHFSGHVFTVRKKEEYKMALYNLYPGVFETVEMLPSKAGIWRVECLIGEHLHAGMSTLFLVYSNKCQTPLGMASGHIRDFQITASGQYGQWAPKLARLHYSGSINAWSTKEPFSWIKVDLLAPMIIHGIKTQGARQKFSSLYISQFIIMYSLDGKKWQTYRGNSTGTLMVFFGNVDSSGIKHNIFNPPIIARYIRLHPTHYSIRSTLRMELMGCDLNSCSMPLGMESKAISDAQITASSYFTNMFATWSPSKARLHLQGRSNAWRPQVNNPKEWLQVDFQKTMKVTGVTTQGVKSLLTSMYVKEFLISSSQDGHQWTLFFQNGKVKVFQGNQDSFTPVVNSLDPPLLTRYLRIHPQSWVHQIALRMEVLGCEAQDLY

SEQ ID NO: 4985 - protein, 216 aa, Homo Sapiens
MRIQDPGKVFFGNVDSSGIKHNIFNPPIIARYIRLHPTHYSIRSTLRMELMGCDLNSCSMPLGMESKAISDAQITASSYFTNMFATWSPSKARLHLQGRSNAWRPQVNNPKEWLQVDFQKTMKVTGVTTQGVKSLLTSMYVKEFLISSSQDGHQWTLFFQNGKVKVFQGNQDSFTPVVNSLDPPLLTRYLRIHPQSWVHQIALRMEVLGCEAQDLY

SEQ ID NO: 4986 - protein, 461 aa, Homo Sapiens
MQRVNMIMAESPGLITICLLGYLLSAECTVFLDHENANKILNRPKRYNSGKLEEFVQGNLERECMEEKCSFEEAREVFENTERTTEFWKQYVDGDQCESNPCLNGGSCKDDINSYECWCPFGFEGKNCELDVTCNIKNGRCEQFCKNSADNKVVCSCTEGYRLAENQKSCEPAVPFPCGRVSVSQTSKLTRAETVFPDVDYVNSTEAETILDNITQSTQSFNDFTRVVGGEDAKPGQFPWQVVLNGKVDAFCGGSIVNEKWIVTAAHCVETGVKITVVAGEHNIEETEHTEQKRNVIRIIPHHNYNAAINKYNHDIALLELDEPLVLNSYVTPICIADKEYTNIFLKFGSGYVSGWGRVFHKGRSALVLQYLRVPLVDRATCLRSTKFTIYNNMFCAGFHEGGRDSCQGDSGGPHVTEVEGTSFLTGIISWGEECAMKGKYGIYTKVSRYVNWIKEKTKLT

SEQ ID NO: 4987 - protein, 423 aa, Homo Sapiens
MQRVNMIMAESPGLITICLLGYLLSAECTVFLDHENANKILNRPKRYNSGKLEEFVQGNLERECMEEKCSFEEAREVFENTERTTEFWKQYVDVTCNIKNGRCEQFCKNSADNKVVCSCTEGYRLAENQKSCEPAVPFPCGRVSVSQTSKLTRAETVFPDVDYVNSTEAETILDNITQSTQSFNDFTRVVGGEDAKPGQFPWQVVLNGKVDAFCGGSIVNEKWIVTAAHCVETGVKITVVAGEHNIEETEHTEQKRNVIRIIPHHNYNAAINKYNHDIALLELDEPLVLNSYVTPICIADKEYTNIFLKFGSGYVSGWGRVFHKGRSALVLQYLRVPLVDRATCLRSTKFTIYNNMFCAGFHEGGRDSCQGDSGGPHVTEVEGTSFLTGIISWGEECAMKGKYGIYTKVSRYVNWIKEKTKLT

SEQ ID NO: 4988 - protein, 38 aa, Homo Sapiens
LTQVLRAVLSACTWVSRKGDLQRMKQTHKGKRTFSQDG

SEQ ID NO: 4989 - protein, 128 aa, Homo Sapiens
MAFTGKFEMESEKNYDEFMKLLGISSDVIEKARNFKIVTEVQQDGQDFTWSQHYSGGHTMTNKFTVGKESNIQTMGGKTFKATVQMEGGKLVVNFPNYHQTSEIVGDKLVEVSTIGGVTYERVSKRLA

SEQ ID NO: 4990 - protein, 177 aa, Homo Sapiens
MKTVTMMMVVEMQALTQVLRAVLSACTWVSRKGDLQRMKQTHKGKPPSSMAFTGKFEMESEKNYDEFMKLLGISSDVIEKARNFKIVTEVQQDGQDFTWSQHYSGGHTMTNKFTVGKESNIQTMGGKTFKATVQMEGGKLVVNFPNYHQTSEIVGDKLVEVSTIGGVTYERVSKRLA

SEQ ID NO: 4991 - protein, 67 aa, Homo Sapiens
MAEPDYIEDDNPELIRPQKLINPVKTSRNHQDLHRELLMNQKRGLAPQNKPELQKVMEKRKRDQVIK

SEQ ID NO: 4992 - protein, 84 aa, Homo Sapiens
MAEPDYIEDDNPELIRPQKLINPVKTSRNHQDLHRELLMNQKRGLAPQNKPELQKVMEKRKRDQVIKQKEEEAQKKKSDLEIEL

SEQ ID NO: 4993 - protein, 90 aa, Homo Sapiens
MAEPDYIEDDNPELIRPQKLINPVKTSRNHQDLHRELLMNQKRGLAPQNKPELQKVMEKRKRDQVIKQKEEEAQKKKSDLEIELLKRQQK

SEQ ID NO: 4994 - protein, 93 aa, Homo Sapiens
MAEPDYIEDDNPELIRPQKLINPVKTSRNHQDLHRELLMNQKRGLAPQNKPELQKVMEKRKRDQVIKQKEEEAQKKKSDLEIELLKRQQKLEQ

SEQ ID NO: 4995 - protein, 101 aa, Homo Sapiens
MAEPDYIEDDNPELIRPQKLINPVKTSRNHQDLHRELLMNQKRGLAPQNKPELQKVMEKRKRDQVIKQKEEEAQKKKSDLEIELLKRQQKLEQLELEKQKL

SEQ ID NO: 4996 - protein, 125 aa, Homo Sapiens
MAEPDYIEDDNPELIRPQKLINPVKTSRNHQDLHRELLMNQKRGLAPQNKPELQKVMEKRKRDQVIKQKEEEAQKKKSDLEIELLKRQQKLEQLELEKQKLQEEQENAPEFVKVKGNLRRTGQEV

SEQ ID NO: 4997 - protein, 126 aa, Homo Sapiens
MAEPDYIEDDNPELIRPQKLINPVKTSRNHQDLHRELLMNQKRGLAPQNKPELQKVMEKRKRDQVIKQKEEEAQKKKSDLEIELLKRQQKLEQLELEKQKLQEEQENAPEFVKVKGNLRRTGQEVA

SEQ ID NO: 4998 - protein, 128 aa, Homo Sapiens
MAEPDYIEDDNPELIRPQKLINPVKTSRNHQDLHRELLMNQKRGLAPQNKPELQKVMEKRKRDQVIKQKEEEAQKKKSDLEIELLKRQQKLEQLELEKQKLQEEQENAPEFVKVKGNLRRTGQEVAQA

SEQ ID NO: 4999 - protein, 131 aa, Homo Sapiens
MAEPDYIEDDNPELIRPQKLINPVKTSRNHQDLHRELLMNQKRGLAPQNKPELQKVMEKRKRDQVIKQKEEEAQKKKSDLEIELLKRQQKLEQLELEKQKLQEEQENAPEFVKVKGNLRRTGQEVAQAQES

SEQ ID NO: 5000 - protein, 131 aa, Homo Sapiens; identical to SEQ ID NO: 4999

SEQ ID NO: 5001 - protein, 131 aa, Homo Sapiens; identical to SEQ ID NO: 4999

SEQ ID NO: 5002 - protein, 131 aa, Homo Sapiens; identical to SEQ ID NO: 4999

SEQ ID NO: 5003 - protein, 131 aa, Homo Sapiens; identical to SEQ ID NO: 4999

SEQ ID NO: 5004 - protein, 131 aa, Homo Sapiens; identical to SEQ ID NO: 4999

SEQ ID NO: 5005 - protein, 131 aa, Homo Sapiens; identical to SEQ ID NO: 4999

SEQ ID NO: 5006 - protein, 131 aa, Homo Sapiens; identical to SEQ ID NO: 4999

SEQ ID NO: 5007 - protein, 131 aa, Homo Sapiens; identical to SEQ ID NO: 4999

SEQ ID NO: 5008 - protein, 131 aa, Homo Sapiens; identical to SEQ ID NO: 4999

SEQ ID NO: 5009 - protein, 131 aa, Homo Sapiens; identical to SEQ ID NO: 4999

SEQ ID NO: 5010 - protein, 51 aa, Homo Sapiens
MAEPDYIEDDNPELIRPQKLINPVKTSRNHQDLHRELLMNQKRILVWLEIH

SEQ ID NO: 5011 - protein, 306 aa, Homo Sapiens
MSTWKARLTKRLKSPSRSMHPFPCSALLACFGNTRESASFNQSGVADTHSTVRVQPVAKAGRQPRHPSAEGAPEKRQDSSTHAERNGSANRNSSHRTAAQPAETPEDVPGSLDDGADCEAVVFHASIPRPSIIDTPKEEEFREEPKCLELEQKMTSDSPPEDIDHKDSYLITRSIMAEPDYIEDDNPELIRPQKLINPVKTSRNHQDLHRELLMNQKRGLAPQNKPELQKVMEKRKRDQVIKQKEEEAQKKKSDLEIELLKRQQKLEQLELEKQKLQEEQENAPEFVKVKGNLRRTGQEVAQAQES

SEQ ID NO: 5012 - protein, 160 aa, Homo Sapiens
MSTWKARLTKRLKSPSRSMHPFPCSALLACFGNTRESASFNQSGVADTHSTVRVQPVAKAGRQPRHPSAEGAPEKRQDSSTHAERNGSANRNSSHRTAAQPAETPEDVPGSLDDGADCEAVVFHASIPRPSIIDTPKEEEFREEPKCLELEQKMTSGECS

SEQ ID NO: 5013 - protein, 251 aa, Homo Sapiens
MAQGRVAHLIEWKGWSKPSDSPAALESAFSSYSDLSEGEQEARFAAGVAEQFAIAEAKLRAWSSVDGEDSTDDSYDEDFAGGMDTDMAGQLPLGPHLQDLFTGHRFSRPVRQGSVEPESDCSQTVSPDTLCSSLCSLEDGLLGSPARLASQLLGDELLLAKLPPSRESAFRSLGPLEAQDSLYNSPLTEGWLLPSRSLWVEPSLKGPCPAGLVLCFIHLSIVSKSSSFFLKTEGFWSVFSVGSSLLWEALE

SEQ ID NO: 5014 - protein, 335 aa, Homo Sapiens
MFLATLSFLLPFAHPFGTVSCEYMLGSPLSSLAQVNLSPFSHPKVHMDPNYCHPSTSLHLCSLAWSFTRLLHPPLSPGISQVVKDHVTKPTAMAQGRVAHLIEWKGWSKPSDSPAALESAFSSYSDLSEGEQEARFAAGVAEQFAIAEAKLRAWSSVDGEDSTDDSYDEDFAGGMDTDMAGQLPLGPHLQDLFTGHRFSRPVRQGSVEPESDCSQTVSPDTLCSSLCSLEDGLLGSPARLASQLLGDELLLAKLPPSRESAFRSLGPLEAQDSLYNSPLTESCLSPAEEEPAPCKDCQPLCPPLTGSWERQRQASDLASSGVVSLDEDEAEPEEQ

SEQ ID NO: 5015 - protein, 123 aa, Homo Sapiens
MLPKSRRALTIQEIAALARSSLHGISQVVKDHVTKPTAMAQGRVAHLIEWKGWSKPSDSPAALESAFSSYSDLSEGEQEARFAAGVAEQFAIAEAKLRAWSSVDGEDSTDDSYDEDFAGGMDT

SEQ ID NO: 5016 - protein, 232 aa, Homo Sapiens
MLPKSRRALTIQEIAALARSSLHGISQVVKDHVTKPTAMAQGRVAHLIEWKGWSKPSDSPAALESAFSSYSDLSEGEQEARFAAGVAEQFAIAEAKLRAWSSVDGEDSTDDSYDEDFAGGMDTDMAGQLPLGPHLQDLFTGHRFSRPVRQGSVEPESDCSQTVSPDTLCSSLCSLEDGLLGSPARLASQLLGDELLLAKLPPSRESAFRSLGPLEAQDSLYNSPLTESCLSP

SEQ ID NO: 5017 - protein, 281 aa, Homo Sapiens
MLPKSRRALTIQEIAALARSSLHGISQVVKDHVTKPTAMAQGRVAHLIEWKGWSKPSDSPAALESAFSSYSDLSEGEQEARFAAGVAEQFAIAEAKLRAWSSVDGEDSTDDSYDEDFAGGMDTDMAGQLPLGPHLQDLFTGHRFSRPVRQGSVEPESDCSQTVSPDTLCSSLCSLEDGLLGSPARLASQLLGDELLLAKLPPSRESAFRSLGPLEAQDSLYNSPLTESCLSPAEEEPAPCKDCQPLCPPLTGSWERQRQASDLASSGVVSLDEDEAEPEEQ

SEQ ID NO: 5018 - protein, 281 aa, Homo Sapiens; identical to SEQ ID NO: 5017

SEQ ID NO: 5019 - protein, 281 aa, Homo Sapiens; identical to SEQ ID NO: 5017

SEQ ID NO: 5020 - protein, 366 aa, Homo Sapiens
MPMISVLGKMFLWQREGPGGRWTCQTSRRVSSDPAWAVEWIELPRGLSLSSLGSARTLRGWSRSSRPSSVDSQDLPEVNVGDTVAMLPKSRRALTIQEIAALARSSLHGISQVVKDHVTKPTAMAQGRVAHLIEWKGWSKPSDSPAALESAFSSYSDLSEGEQEARFAAGVAEQFAIAEAKLRAWSSVDGEDSTDDSYDEDFAGGMDTDMAGQLPLGPHLQDLFTGHRFSRPVRQGSVEPESDCSQTVSPDTLCSSLCSLEDGLLGSPARLASQLLGDELLLAKLPPSRESAFRSLGPLEAQDSLYNSPLTESCLSPAEEEPAPCKDCQPLCPPLTGSWERQRQASDLASSGVVSLDEDEAEPEEQ

SEQ ID NO: 5021 - protein, 359 aa, Homo Sapiens
MPMISVLGKMFLWQREGPGGRWTCQTSRRVSSDPAWAVEWIELPRGLSLSSLGSARTLRGWSRSSRPSSVDSQDLPEVNVGDTVAMLPKSRRALTIQEIAALARSSLHGISQVVKDHVTKPTAMAQGRVAHLIEWKGWSKPSDSPAALESAFSSYSDLSEGEQEARFAAGVAEQFAIAEAKLRAWSSVDGEDSTDDSYDEDFAGGMDTDMAGQLPLGPHLQDLFTGHRFSRPVRQGSVEPESDCSQTVSPDTLCSSLCSLEDGLLGSPARLASQLLGDELLLAKLPPSRESAFRSLGPLEAQDSLYNSPLTESCLSPAEEEPAPCKDCQPLCPPLTGSWERQRQASDLGLAPALPEPMG

SEQ ID NO: 5022 - protein, 890 aa, Homo Sapiens
MSRSATLLLCLLGCHVWKAVTKTLREPGAGAQEVTLKVHISDASTHQPVADALIEIFTNQASIASGTSGTDGVAFIKFQYKLGSQLIVTASKHAYVPNSAPWKPIRLPVFSSLSLGLLPERSATLMVYEDVVQIVSGFQGARPQPRVHFQRRALRLPENTSYSDLTAFLTAASSPSEVDSFPYLRGLDGNGTGNSTRHDLTPVTAVSVHLLSSNGTPVLVDGPIYVTVPLATQSSLRHNAYVAAWRFDQKLGTWLKSGLGLVHQEGSQLTWTYIAPQLGYWVAAMSPPIPGPVVTQDITTYHTVFLLAILGGMAFILLVLLCLLLYYCRRKCLKPRQHHRKLQLPAGLESSKRDQSTSMSHINLLFSRRASEFPGPLSVTSHGRPEAPGTKELMSGVHLEMMSPGGEGDLHTPMLKLSYSTSQEFSSREELLSCKEEDKSQISFDNLTPSGTLGKDYHKSVEVFPLKARKSMEREGYESSGNDDYRGSYNTVLSQPLFEKQDREGPASTGSKLTIQEHLYPAPSSPEKEQLLDRRPTECMMSRSVDHLERPTSFPRPGQLICCSSVDQVNDSVYRKVLPALVIPAHYMKLPGDHSYVSQPLVVPADQQLEIERLQAELSNPHAGIFPHPSSQIQPQPLSSQAISQQHLQDAGTREWSPQNASMSESLSIPASLNDAALAQMNSEVQLLTEKALMELGGGKPLPHPRAWFVSLDGRSNAHVRHSYIDLQRAGRNGSNDASLDSGVDMNEPKSARKGRGDALSLQQNYPPVQEHQQKEPRAPDSTAYTQLVYLDDVEQSGSECGTTVCTPEDSALRCLLEGSSRRSGGQLPSLQEETTRRTADAPSEPAASPHQRRSAHEEEEDDDDDDQGEDKKSPWQKREERPLMAFNIK

SEQ ID NO: 5023 - protein, 198 aa, Homo Sapiens
MSRSATLLLCLLGCHVWKAVTKTLREPGAGAQEVTLKVHISDASTHQPVADALIEIFTNQASIASGTSGTDGVAFIKFQYKLGSQLIVTASKHAYVPNSAPWKPIRLPVFSSLSLGLLPERSATLMVYEDVVQIVSGFQGNSTRHDLTPVTAVSVHLLSSNGTPVLVDGPIYVTVPLATQSSLRHNAYVAAWRFDQKL

SEQ ID NO: 5024 - protein, 826 aa, Homo Sapiens
MARLCRRVPCTLLLGLAVVLLKARLVPAAARAELSRSDLSLIQQQQQQQQQQQQQQKQLEEAEEERTEVPGATSTLTVPVSVFMLKVQVNDIISRQYLSQAVVEVFVNYTKTNSTVTKSNGAVLIKVPYKLGLSLTIIAYKDGYVLTPLPWKTRRMPIYSSVTLSLFPQSQANIWLFEDTVLITGKLADAKSQPSVQFSKALIKLPDNHHISNVTGYLTVLQQFLKVDNFLHTTGITLNKPGFENIELTPLAAICVKIYSGGKELKVNGSIQVSLPLLRLNDISAGDRIPAWTFDMNTGAWVNHGRGMVKEHNNHLIWTYDAPHLGYWIAAPLPGTRGSGINEDSKDITAYHTVFLTAILGGTIVIVIGFFAVLLCYCRDKCGTPQKRERNITKLEVLKRDQTTSTTHINHISTVKVALKAEDKSQLFNAKNSSYSPQKKEPSKAETEERVSMVKTRDDFKIYNEDVSFLSVNQNNYSRNPTQSLEPNVGSKQPKHINNNLSSSLGDAQDEKRYLTGNEEAYGRSHIPEQLMHIYSQPIAILQTSDLFSTPEQLHTAKSATLPRKGQLVYGQLMEPVNRENFTQTLPKMPIHSHAQPPDAREEDIILEGQQSLPSQASDWSRYSSSLLESVSVPGTLNEAVVMTPFSSELQGISEQTLLELSKGKPSPHPRAWFVSLDGKPVAQVRHSFIDLKKGKRTQSNDTSLDSGVDMNELHSSRKLEREKTFIKSMHQPKILYLEDLDLSSSESGTTVCSPEDPALRHILDGGSGVIMEHPGEESPGRKSTVEDFEANTSPTKRRGRPPLAKRDSKTNIWKKREERPLIPIN

SEQ ID NO: 5025 - protein, 238 aa, Homo Sapiens
MARLCRRVPCTLLLGLAVVLLKARLVPAAARAELSRSDLSLIQQQQQQQQQQQQQQKQLEEAEEERTEVPGATSTLTVPVSVFMLKVQVNDIISRQYLSQAVVEVFVNYTKTNSTVTKSNGAVLIKVPYKLGLSLTIIAYKDGYVLTPLPWKTRRMPIYSSVTLSLFPQSQANIWLFEDTVLITGKLADAKSQPSVQFSKALIKLPDNHHISNVTGYLTVLQQFLKVDNFLHTTGITQ

SEQ ID NO: 5026 - protein, 306 aa, Homo Sapiens
MKKDEPPLDFPDTLEGFEYAFNEKGQLRHIKTGEPFVFNYREDLHRWNQKRYEALGEIITKYVYELLEKDCNLKKVSIPEGYGVIVLNPNENYIEVEKPKIHVQSSSDSSDEPAEKRERKDKVSKETKKRRDFYEKYRNPQREKEMMQLYIRENGSPEEHAIYVWDHFIAQAAAENVFFVAHSYGGLAFVELMIQREADVKNKVTAVALTDSVHNVWHQEAGKTIREWMRENCCNWVSSSEPLDTSVESMLPDCPRVSAGTDRHELTSWKSFPSIFKFFTEASEAKTSSLKPAVTRRSHRIKHEEL

SEQ ID NO: 5027 - protein, 370 aa, Homo Sapiens
MKKDEPPLDFPDTLEGFEYAFNEKGQLRHIKTGEPFVFNYREDLHRWNQKRYEALGEIITKYVYELLEKDCNLKKVSIPVDATESEPKSFIFMSEDALTNPQKLMVLIHGSGVVRAGQWARRLIINEDLDSGTQIPFIKRAVAEGYGVIVLNPNENYIEVEKPKIHVQSSSDSSDEPAEKRERKDKVSKETKKRRDFYEKYRNPQREKEMMQLYIRENGSPEEHAIYVWDHFIAQAAAENVFFVAHSYGGLAFVELMIQREADVKNKVTAVALTDSVHNVWHQEAGKTIREWMRENCCNWVSSSEPLDTSVESMLPDCPRVSAGTDRHELTSWKSFPSIFKFFTEASEAKTSSLKPAVTRRSHRIKHEEL

SEQ ID NO: 5028 - protein, 269 aa, Homo Sapiens
MNRLLIFLIPWKDLNMLLMKIITKYVYELLEKDCNLKKVSIPEGYGVIVLNPNENYIEVEKPKIHVQSSSDSSDEPAEKRERKDKVSKETKKRRDFYEKYRNPQREKEMMQLYIRENGSPEEHAIYVWDHFIAQAAAENVFFVAHSYGGLAFVELMIQREADVKNKVTAVALTDSVHNVWHQEAGKTIREWMRENCCNWVSSSEPLDTSVESMLPDCPRVSAGTDRHELTSWKSFPSIFKFFTEASEAKTSSLKPAVTRRSHRIKHEEL

SEQ ID NO: 5029 - protein, 305 aa, Homo Sapiens
MNRLLIFLIPWKDLNMLLMKIITKYVYELLEKDCNLKKVSIPVDATESEPKSFIFMSEDALTNPQKLMVLIHGSGVVRAGQWARRLIINEDLDSGTQIPFIKRAVAEGYGVIVLNPNENYIEVEKPKIHVQSSSDSSDEPAEKRERKDKVSKETKKRRDFYEKYRNPQREKEMMQLYIRENGSPEEHAIYVWDHFIAQAAAENVFFVAHSYGGLAFVELMIQREADVKNKVTAVALTDSVHNVWHQEAGKTIREWMRENCCNWVSSSEPLDTSVESMLPDCPRVSAGFSCCQMQSHEDLLLCFLL

SEQ ID NO: 5030 - protein, 416 aa, Homo Sapiens
MSISLSSLILLPIWINMAQIQQGGPDEKEKTTALKDLLSRIDLDELMKKDEPPLDFPDTLEGFEYAFNEKGQLRHIKTGEPFVFNYREDLHRWNQKRYEALGEIITKYVYELLEKDCNLKKVSIPVDATESEPKSFIFMSEDALTNPQKLMVLIHGSGVVRAGQWARRLIINEDLDSGTQIPFIKRAVAEGYGVIVLNPNENYIEVEKPKIHVQSSSDSSDEPAEKRERKDKVSKETKKRRDFYEKYRNPQREKEMMQLYIRENGSPEEHAIYVWDHFIAQAAAENVFFVAHSYGGLAFVELMIQREADVKNKVTAVALTDSVHNVWHQEAGKTIREWMRENCCNWVSSSEPLDTSVESMLPDCPRVSAGTDRHELTSWKSFPSIFKFFTEASEAKTSSLKPAVTRRSHRIKHEEL

SEQ ID NO: 5031 - protein, 36 aa, Homo Sapiens
AAAAAFGESAGQVGGAAEADVRGAEPPPCLLRGPLF

SEQ ID NO: 5032 - protein, 76 aa, Homo Sapiens
MDQEPVGGVERGEAVAASGAAAAAAFGESAGQMSNERGFENVELGVIGKKKKVPRRVIHFVSGETMEEYSTDEDEV

SEQ ID NO: 5033 - protein, 213 aa, Homo Sapiens
MDQEPVGGVERGEAVAASGAAAAAAFGESAGQMSNERGFENVELGVIGKKKKVPRRVIHFVSGETMEEYSTDEDEVDGLEKKDVLPTVDPTKLTWGPYLWFYMLRAATSTLSVCDFLGEKIASVLGISTPKYQYAIDEYYRMKKEEEEEEEENRMSEEAEKQYQQNKLQTDSIVQTDQPETVISSSFVNVNFEMEGDSEVIMESKQNPVSVPP

SEQ ID NO: 5034 - protein, 213 aa, Homo Sapiens; identical to SEQ ID NO: 5033

SEQ ID NO: 5035 - protein, 236 aa, Homo Sapiens
MEVGLPAITLFLTSASSPVVATTMDQEPVGGVERGEAVAASGAAAAAAFGESAGQMSNERGFENVELGVIGKKKKVPRRVIHFVSGETMEEYSTDEDEVDGLEKKDVLPTVDPTKLTWGPYLWFYMLRAATSTLSVCDFLGEKIASVLGISTPKYQYAIDEYYRMKKEEEEEEEENRMSEEAEKQYQQNKLQTDSIVQTDQPETVISSSFVNVNFEMEGDSEVIMESKQNPVSVPP

SEQ ID NO: 5036 - protein, 89 aa, Homo Sapiens
MEVGLPAITLFLTSASSPVVATTMDQEPVGGVERGEAVAASGAAAAAAFGESAGQNLTLLPRLKFMARSRLAATSTSRVQAILLPQPPV

SEQ ID NO: 5037 - protein, 140 aa, Homo Sapiens
MSNERGFENVELGVIGKKKKVPRRVIHFVSGETMEEYSTDEDEVDGLEKKDVLPTVDPTKLTWGPYLWFYMLRAATSTLSVCDFLGEKIASVLGISTPKYQYAIDEYYRMKKEEEEEEEENRMSEEAEKQYQQNKLQTDS

SEQ ID NO: 5038 - protein, 39 aa, Homo Sapiens
  misc_feature (1)..(1): Xaa can be any naturally occurring amino acid
XAFGESAGQEIKGSKKLSHGPKGNVDVRTAIAKFYLKDE

SEQ ID NO: 5039 - protein, 7 aa, Homo Sapiens
  misc_feature (1)..(1): Xaa can be any naturally occurring amino acid
XLRGPLF

SEQ ID NO: 5040 - protein, 49 aa, Homo Sapiens
  misc_feature (1)..(1): Xaa can be any naturally occurring amino acid
XNKLQTDSIVQTDQPETVISSSFVNVNFEMEGDSEVIMESKQNPVSVPP

SEQ ID NO: 5041 - protein, 173 aa, Homo Sapiens
MHWKMLLLLLLYYNAEASMCHRWSRAVLFPAAHRPKRSSSLPLNPVLQTSLEEVELLYEFLLAELEISPDLQISIKDEELASLRKASDFRTVCNNVIPKSIPDIRRLSASLSSHPGILKKEDFERTVLTLAYTAYRTALSHGHQKDIWAQSLVSLFQALRHDLMRSSQPGVPP

SEQ ID NO: 5042 - protein, 173 aa, Homo Sapiens; identical to SEQ ID NO: 5041

SEQ ID NO: 5043 - protein, 173 aa, Homo Sapiens; identical to SEQ ID NO: 5041

SEQ ID NO: 5044 - protein, 78 aa, Homo Sapiens
MLLSAVCVMLNLAGSILSCQNAQLVNSLEGCQLIKFDSVEVCVCCELQHQSSGCSNLGETLKLNPLQENCNAVRLTLK

SEQ ID NO: 5045 - protein, 539 aa, Homo Sapiens
MPPAGGPRAPRPAALPRSLSRLRECPGRSRIVLALGATQMALGCLIVAVSFAALALTTSARVRHSCPFWAGFSVLLSGLIGVVSWKRPLSLVITFFMLLSAVCVMLNLAGSILSCQNAQLVNSLEGCQLIKFDSVEVCVCCELQHQSSGCSNLGETLKLNPLQENCNAVRLTLKDLLFSVCALNVLSTIVCALATAMCCMQMVSSDVLQMFLPQRSHPANPTCVTPHGTVLHQTLDFDEFIPPLPPPPYYPPEYTCTPSTEAQRGLHLDFAPSPFGTLYDVAINSPGLLYPAELPPPYEAVVGQPPASQVTSIGQQVAESSSGDPNTSAGFSTPVPADSTSLLVSEGTATPGSSPSPDGPVGAPAPSEPALPPGHVSPEDPGMGSQVQPGPGRVSRSTSDPTLCTSSMAGDASSHRPSCSQDLEAGLSEAVPGSASMSRSATAACRAQLSPAGDPDTWKTDQRPTPEPFPATSKERPRSLVDSKAYADARVLVAKFLEHSHCALPTEAQHMVGAMRLAVTNEERLEEEAVFGADVLDQV

SEQ ID NO: 5046 - protein, 575 aa, Homo Sapiens
MASWLRRKLRGKRRPVIAFCLLMILSAMAVTRFPPQRPSAGPDPGPMEPQGVTGAPATHIRQALSSSRRQRARNMGFWRSRALPRNSILVCAEEQGHRARVDRSRESPGGDLRHPGRVRRDITLSGHPRLSTQHVVLLREDEVGDPGTKDLGHPQHGSPIQETQSEVVTLVSPLPGSDMAALPAWRATSGLTLWPHTAEGRDLLGAENRALTGGQQAEDPTLASGAHQWPGSVEKLQGSVWCDAETLLSSSRTGGQAPPWLTDHDVQMLRLLAQGEVVDKARVPAHGQVLQVGFSTEAALQDLSSPRLSQLCSQGLCGLIKRPGDLPEVLSFHVDRVLGLRRSLPAVARRFHSPLLPYRYTDGGARPVIWWAPDVQHLSDPDEDQNSLALGWLQYQALLAHSCNWPGQAPCPGIHHTEWARLALFDFLLQVHDRLDRYCCGFEPEPSDPCVEERLREKCQNPAELRLVHILVRSSDPSHLVYIDNAGNLQHPEDKLNFRLLEGIDGFPESAVKVLASGCLQNMLLKSLQMDPVFWESQGGAQGLKQVLQTLEQRGQVLLGHIQKHNLTLFRDEDP

SEQ ID NO: 5047 - protein, 575 aa, Homo Sapiens; identical to SEQ ID NO: 5046

SEQ ID NO: 5048 - protein, 140 aa, Homo Sapiens
MVHDRLDRYCCGFEPEPSDPCVEERLREKCQNPAELRLVHILVRSSDPSHLVYIDNAGNLQHPEDKLNFRLLEGIDGFPESAVKVLASGCLQNMLLKSLQMDPVFWESQGGAQGLKQVLQTLEQRGQVLLGHIQKHNLTL

SEQ ID NO: 5049 - protein, 133 aa, Homo Sapiens [sequence omitted]

SEQ ID NO: 5050 - protein, 133 aa, Homo Sapiens [sequence omitted]

SEQ ID NO: 5051 - protein, 52 aa, Homo Sapiens [sequence omitted]

SEQ ID NO: 5052 - protein, 87 aa, Homo Sapiens
MMSKRYLQKATKGKLLIIIFIVTLWGKVVSSANHHKAHHVKTGTCEVVALHRCCNKNKIEERSQTVKCSCFPGQVAGTTRAAPSCVD

SEQ ID NO: 5053 - protein, 110 aa, Homo Sapiens
MMSKRYLQKATKGKLLIIIFIVTLWGKVVSSANHHKAHHVKTGTCEVVALHRCCNKNKIEERSQTVKCSCFPGQVAGTTRAAPSCVDASIVEQKWWCHMQPCLEGEECKV

SEQ ID NO: 5054 - protein, 34 aa, Homo Sapiens
MQPCLEGEECKVLPDRKGWSCSSGNKVKTTRVTH

SEQ ID NO: 5055 - protein, 131 aa, Homo Sapiens
MSKRYLQKATKGKLLIIIFIVTLWGKVVSSANHHKAHHVKTGTCEVVALHRCCNKNKIEERSQTVKCSCFPGQVAGTTRAAPSCVDASIVEQKWWCHMQPCLEGEECKVLPDRKGWSCSSGNKVKTTRANV

SEQ ID NO: 5056 - protein, 131 aa, Homo Sapiens
MSKRYLQKATKGKLLIIIFIVTLWGKVVSSANHHKAHHVKTGTCEVVALHRCCNKNKIEERSQTVKCSCFPGQVAGTTRAAPSCVDASIVEQKWWCHMQPCLEGEECKVLPDRKGWSCSSGNKVKTTRVTH

SEQ ID NO: 5057 - protein, 131 aa, Homo Sapiens; identical to SEQ ID NO: 5056

SEQ ID NO: 5058 - protein, 49 aa, Homo Sapiens
MSKRYLQKATKGKLLIIIFIVTLWGKVVSSANHHKGNPLTQEKSSDPQG

SEQ ID NO: 5059 - protein, 101 aa, Homo Sapiens
MVTPITRMSKRYLQKATKGKLLIIIFIVTLWGKVVSSANHHKAHHVKTGTCEVVALHRCCNKNKIEERSQTVKCSCFPGQVAGTTRAAPSCVDASIVEQKW

SEQ ID NO: 5060 - protein, 133 aa, Homo Sapiens
MSERVERNWSTGGWLLALCLAWLWTHLTLAALQPPTATVLVQQGTCEVIAAHRCCNRNRIEERSQTVKCSCFSGQVAGTTRAKPSCVDASIVLQRWWCQMEPCLPGEECKVLPDLSGWSCSSGHKVKTTKVTR

SEQ ID NO: 5061 - protein, 169 aa, Homo Sapiens
MSERVERNWSTGGWLLALCLAWLWTHLTLAALQPPTATVLVQQGTCEVIAAHRCCNRNRIEERSQTVKCSCFSGQVAGTTRAKPSCVDDLLLAAHCARRDPRAALRLLLPQPPSSCRDGGVRWSPACRGRSVRCSRTCRDGAAAVDTKSKPPRSHDSSWGSRPGQERLD

SEQ ID NO: 5062 - protein, 58 aa, Homo Sapiens
MRSPRMRVCAKSVLLSHWLFLAYVLMVCCKLMSASSQHLRGHAGHHQIKQGTCEVVAV

SEQ ID NO: 5063 - protein, 77 aa, Homo Sapiens
MRSPRMRVCAKSVLLSHWLFLAYVLMVCCKLMSASSQHLRGHAGHHQIKQGTCEVVAVHRCCNKNRIEERSQTVKCS

SEQ ID NO: 5064 - protein, 140 aa, Homo Sapiens
MRSPRMRVCAKSVLLSHWLFLAYVLMVCCKLMSASSQHLRGHAGHHQIKQGTCEVVAVHRCCNKNRIEERSQTVKCSCFPGQVAGTTRAQPSCVEASIVIQKWWCHMNPCLEGEDCKVLPDYSGWSCSSGNKVKTTKVTR

SEQ ID NO: 5065 - protein, 181 aa, Homo Sapiens
MAPSPRTGSRQDATALPSMSSTFWAFMILASLLIAYCSQLAAGTCEIVTLDRDSSQPRRTIARQTARCACRKGQIAGTTRARPACVDARIIKTKQWCDMLPCLEGEGCDLLINRSGWTCTQPGGRIKTTTSPSKPPKRAPPGIPSCRQRAGGSLGSRDLRTSLLCQGSHLADRRRWLRPSQ

SEQ ID NO: 5066 - protein, 132 aa, Homo Sapiens
MAPSPRTGSRQDATALPSMSSTFWAFMILASLLIAYCSQLAAGTCEIVTLDRDSSQPRRTIARQTARCACRKGQIAGTTRARPACVDARIIKTKQWCDMLPCLEGEGCDLLINRSGWTCTQPGGRIKTTTVS

SEQ ID NO: 5067 - protein, 125 aa, Homo Sapiens
MQLLKALWALAGAALCCFLVLVIHAQFLKEGQLAAGTCEIVTLDRDSSQPRRTIARQTARCACRKGQIAGTTRARPACVDARIIKTKQWCDMLPCLEGEGCDLLINRSGWTCTQPGGRIKTTTVS

SEQ ID NO: 5068 - protein, 53 aa, Homo Sapiens
MYHHREWPARIIKTKQWCDMLPCLEGEGCDLLINRSGWTCTQPGGRIKTTTVS

SEQ ID NO: 5069 - protein, 145 aa, Homo Sapiens
MFTSPSEGKPGNMDRHHYEMFTKFGDDGFLIHLDNARGFGRHSHDEISILSPLSQCCMIKKKTLLHLQLLAQADYRLSDVMRESLLEDQLSPVLTEPHLLALDRRLQTILRTVEGCIVAHGQQSVIVDGPVEQLAPDSGQANLTS

SEQ ID NO: 5070 - protein, 541 aa, Homo Sapiens
MPGLRRDRLLTLLLLGALLSADLYFHLWPQVQRQLRPRERPRGCPCTGRASSLARDSAAAASDPGTIVHNFSRTEPRTEPAGGSHSGSSSKLQALFAHPLYNVPEEPPLLGAEDSLLASQEALRYYRRKVARWNRRHKMYREQMNLTSLDPPLQLRLEASWVQFHLGINRHGLYSRSSPVVSKLLQDMRHFPTISADYSQDEKALLGACDCTQIVKPSGVHLKLVLRFSDFGKAMFKPMRQQRDEETPVDFFYFIDFQRHNAEIAAFHLDRILDFRRVPPTVGRIVNVTKEILEVTKNEILQSVFFVSPASNVCFFAKCPYMCKTEYAVCGNPHLLEGSLSAFLPSLNLAPRLSVPNPWIRSYTLAGKEEWEVNPLYCDTVKQIYPYNNSQRLLNVIDMAIFDFLIGNMDRHHYEMFTKFGDDGFLIHLDNARGFGRHSHDEISILSPLSQCCMIKKKTLLHLQLLAQADYRLSDVMRESLLEDQLSPVLTEPHLLALDRRLQTILRTVEGCIVAHGQQSVIVDGPVEQLAPDSGQANLTS

SEQ ID NO: 5071 - protein, 21 aa, Homo Sapiens
QRHNAEIAAFHLDREYGPAPL

SEQ ID NO: 5072 - protein, 127 aa, Homo Sapiens
  misc_feature (1)..(1): Xaa can be any naturally occurring amino acid
XFHLWPQVQRQLRPRERPRGCPCTGRASSLARDSAAAASDPGTIVHNFSRTEPRTEPAGGSHSGSSSKLQALFAHPLYNVPEEPPLLGAEDSLLASQEALRYYRRKVARWNRPQFLLLKGRGGVCDP

SEQ ID NO: 5073 - protein, 584 aa, Homo Sapiens
MKMMLVRRFRVLILMVFLVACALHIALDLLPRLERRGARPSGEPGCSCAQPAAEVAAPGWAQVRGRPGEPPAASSAAGDAGWPNKHTLRILQDFSSDPSSNLSSHSLEKLPPAAEPAERALRGRDPGALRPHDPAHRPLLRDPGPRRSESPPGPGGDASLLARLFEHPLYRVAVPPLTEEDVLFNVNSDTRLSPKAAENPDWPHAGAEGAEFLSPGEAAVDSYPNWLKFHIGINRYELYSRHNPAIEALLHDLSSQRITSVAMKSGGTQLKLIMTFQNYGQALFKPMKQTREQETPPDFFYFSDYERHNAEIAAFHLDRILDFRRVPPVAGRMVNMTKEIRDVTRDKKLWRTFFISPANNICFYGECSYYCSTEHALCGKPDQIEGSLAAFLPDLSLAKRKTWRNPWRRSYHKRKKAEWEVDPDYCEEVKQTPPYDSSHRILDVMDMTIFDFLMGNMDRHHYETFEKFGNETFIIHLDNGRGFGKYSHDELSILVPLQQCCRIRKSTYLRLQLLAKEEYKLSLLMAESLRGDQVAPVLYQPHLEALDRRLRVVLKAVRDCVERNGLHSVVDDDLDTEHRAASAR

SEQ ID NO: 5074 - protein, 218 aa, Homo Sapiens
MGMWSIGAGALGAAALALLLANTDVFLSKPQKAALEYLEDIDLKTLEKEPRTFKAKELWEKNGAVIMAVRRPGCFLCREEAADLSSLKSMLDQLGVPLYAVVKEHIRTEVKDFQPYFKGEIFLDEKKKFYGPQRRKMMFMGFIRLGVWYNFFRAWNGGFSGNLEGEGFILGGVFVVGSGKQGILLEHREKEFGDKVNLLSVLEAAKMIKPQTLASEKK

SEQ ID NO: 5075 - protein, 229 aa, Homo Sapiens
MSFLQDPSFFTMGMWSIGAGALGAAALALLLANTDVFLSKPQKAALEYLEDIDLKTLEKEPRTFKAKELWEKNGAVIMAVRRPGCFLCREEAADLSSLKSMLDQLGVPLYAVVKEHIRTEVKDFQPYFKGEIFLDEKKKFYGPQRRKMMFMGFIRLGVWYNFFRAWNGGFSGNLEGEGFILGGVFVVGSGKQGILLEHREKEFGDKVNLLSVLEAAKMIKPQTLASEKK

SEQ ID NO: 5076 - protein, 229 aa, Homo Sapiens; identical to SEQ ID NO: 5075

SEQ ID NO: 5077 - protein, 229 aa, Homo Sapiens; identical to SEQ ID NO: 5075

SEQ ID NO: 5078 - protein, 229 aa, Homo Sapiens; identical to SEQ ID NO: 5075

SEQ ID NO: 5079 - protein, 229 aa, Homo Sapiens; identical to SEQ ID NO: 5075

SEQ ID NO: 5080 - protein, 425 aa, Homo Sapiens
MMPSESGAERRDRAAAQVGTAAATAVATAAPAGGGPDPEALSAFPGRHLSGLSWPQVKRLDALLSEPIPIHGRGNFPTLSVQPRQIVQVVRSTLEEQGLHVHSVRLHGSAASHVLHPESGLGYKDLDLVFRVDLRSEASFQLTKAVVLACLLDFLPAGVSRAKITPLTLKEAYVQKLVKVCTDSDRWSLISLSNKSGKNVELKFVDSVRRQFEFSIDSFQIILDSLLLFGQCSSTPMSEAFHPTVTGESLYGDFTEALEHLRHRVIATRSPEEIRGGGLLKYCHLLVRGFRPRPSTDVRALQRYMCSRFFIDFPDLVEQRRTLERYLEAHFGGADAARRYACLVTLHRVVNESTVCLMNHERRQTLDLIAALALQALAEQGPAATAALAWRPPGTDGVVPATVNYYVTPVQPLLAHAYPTWLPCN

SEQ ID NO: 5081 - protein, 113 aa, Homo Sapiens
MISTRYRRRRDAPRGPGRCPPHPTRPRGPGRKRGAAGSPGAAPSASRRPEFPKPLRVLPWRERGRGGREWPMSLRSPLPTSACGWGESGRRAGPGSLRSSDRTERARCSLRPR

SEQ ID NO: 5082 - protein, 225 aa, Homo Sapiens
MLLTLAGGALFFPGLFALCTWALRRSQPGWSRTDCVMISTRLVSSVHAVLATGSGIVIIRSCDDVITGRHWLAREYVWFLIPYMIYDSYAMYLCEWCRTRDQNRAPSLTLRNFLSRNRLMITHHAVILFVLVPVAQLKQQHTLLYKVNGILTLATFLSCRILLFPFMYWSYGRQQGLSLLQVPFSIPFYCNVANAFLVAPQIYWFCLLCRKAVRLFDTPQAKKDG

SEQ ID NO: 5083 - protein, 257 aa, Homo Sapiens
MLLTLAGGALFFPGLFALCTWALRRSQPGWSRTDCVMISTRLVSSVHAVLATGSGIVIIRSCDDVITGRHWLAREYVWFLIPYMIYDSYAMYLCEWCRTRDQNRAPSLTLRNFLSRNRLMITHHAVILFVLVPVAQRLRGDLGDFFVGCIFTAELSTPFVSLGRVLIQLKQQHTLLYKVNGILTLATFLSCRILLFPFMYWSYGRQQGLSLLQVPFSIPFYCNVANAFLVAPQIYWFCLLCRKAVRLFDTPQAKKDG

SEQ ID NO: 5084 - protein, 69 aa, Homo Sapiens
MLLTLAGGALFFPGLFALCTWALRRSQPGWSRTDCVMISTRLVSSVHAVLATGSGIVIIRSCDDVITGS

SEQ ID NO: 5085 - protein, 149 aa, Homo Sapiens
MLLTLAGGALFFPGLFALCTWALRRSQPGWSRTDCVMISTRYRRRRDAPRGPGRCPPHPTRPRGPGRKRGAAGSPGAAPSASRRPEFPKPLRVLPWRERGRGGREWPMSLRSPLPTSACGWGESGRRAGPGSLRSSDRTERARCSLRPR

SEQ ID NO: 5086 - protein, 38 aa, Homo Sapiens
  misc_feature (1)..(1): Xaa can be any naturally occurring amino acid
XATGSGIVIIRSCDDVITGRGSGETLGTSLSAASSRQN

SEQ ID NO: 5087 - protein, 252 aa, Homo Sapiens
GQGIAAALIHLPSTGNKHWRPRSPEASTDCCWLHQATGSGSVTQAGVQWYDLGSLQPLPPRFKRFSCLSLPSSWDYRSSWELPDLQEGKIQAISDSDGVNYPWYGNTTETCTIVGPTKRDSKFIISMNDNFYPSVTWAVPVSESNVAKLTNIYRDQSFTTWLVATNTSTNDMIILQTLHWRMQLSIEVNPNRPLGQRARLREPIAQDQPKILSKNEPIPPSALVKPNANDAQVLMWRPKYGQPLVVIPPKHR

SEQ ID NO: 5088 - protein, 283 aa, Homo Sapiens
MPGFFCDCWPSLEIRALLYAMGCIQSIGGKARVFREGITVIDVKASIDPVPTSIDESSSVVLRYRTPHFRASAQVVMPPIPKKETWVVGWIQACSHMEFYNQYGEQGMSSWELPDLQEGKIQAISDSDGVNYPWYGNTTETCTIVGPTKRDSKFIISMNDNFYPSVTWAVPVSESNVAKLTNIYRDQSFTTWLVATNTSTNDMIILQTLHWRMQLSIEVNPNRPLGQRARLREPIAQDQPKILSKNEPIPPSALVKPNANDAQVLMWRPKYGQPLVVIPPKHR

SEQ ID NO: 5089 - protein, 280 aa, Homo Sapiens
MTSYILISFVLLIGVGCIEKDQSCPVFGGRKRLHLLFVGGQLRQVRMLRGSPEASTDCCWLHQATGSGSVTQAGVQWYDLGSLQPLPPRFKRFSCLSLPSSWDYRSSWELPDLQEGKIQAISDSDGVNYPWYGNTTETCTIVGPTKRDSKFIISMNDNFYPSVTWAVPVSESNVAKLTNIYRDQSFTTWLVATNTSTNDMIILQTLHWRMQLSIEVNPNRPLGQRARLREPIAQDQPKILSKNEPIPPSALVKPNANDAQVLMWRPKYGQPLVVIPPKHR

SEQ ID NO: 5090 - protein, 160 aa, Homo Sapiens
MQRVSGLLSWTLSRVLWLSGLSEPGAARQPRIMEEKALEVYDLIRTIRDPEKPNTLEELEVVSESCVEVQEINEEEYLVIIRFTPTVPHCSLATLIGLCLRVKLQRCLPFKHKLEIYISEGTHSTEEDINKQINDKERVAAAMENPNLREIVEQCVLEPD

SEQ ID NO: 5091 - protein, 130 aa, Homo Sapiens
MQRVSGLLSWTLSRVLWLSGLSEPGAARQPRIMEEKALEVYDLIRTIRDPEKPNTLEELEVVSESCVEVQEINEEEYLVIIRFTPTVPHCSLATLIGLCLRVKLQRCLPFKHKLEIYISEGTHSTEEDSK

SEQ ID NO: 5092 - protein, 102 aa, Homo Sapiens
MQRVSGLLSWTLSRVLWLSGLSEPGAARQPRIMEEKALEVYDLIRTIRDPEKPNTLEELEVVSESCVEVQEINEEEYLVIIRFTPTVPHCSLATLIVGNLHF

SEQ ID NO: 5093 - protein, 102 aa, Homo Sapiens; identical to SEQ ID NO: 5092

SEQ ID NO: 5094 - protein, 69 aa, Homo Sapiens
MQRVSGLLSWTLSRVLWLSGLSEPGAARQPRIMEEKALEVYGWNAMAGSRLTATSAFWFQVILLPQSPK

SEQ ID NO: 5095 - protein, 186 aa, Homo Sapiens
MAAWGKKHAGKDPVRDECEERNRFTETREEDVTDEHGEREPFAETDEHTGANTKKPEDTAEDLTAKRKRMKMDKTCSKTKNKSKHALRKKQLKRQKRDYIHSLKLLNVLEEYITDEQKEEEEEEGEEEELIRIFQEQQKKWQQYRSVRRERLKEMKLLRDQFVKALEDFEDLCDRVFSDEDSELDN

SEQ ID NO: 5096 - protein, 186 aa, Homo Sapiens; identical to SEQ ID NO: 5095

SEQ ID NO: 5097 - protein, 90 aa, Homo Sapiens
MKAKKAHPRVEYNKTSGNAFEEQFSLPTKVRGSPLASQDNQPRILWAGGLPRPSWRLNLWRPGGRSMQERIQSVMNVRKETVLQKQGRKM

SEQ ID NO: 5098 - protein, 226 aa, Homo Sapiens
MPGFLSFLSVSLRSPGSGIASSFPGQPATDPVGRRAAKAQLEAQFMAAWGKKHAGKDPVRDECEERNRFTETREEDVTDEHGEREPFAETDEHTGANTKKPEDTAVGANNFKNYPVHIGVSSEQHILLDCSLSRQKRDYIHSLKLLNVLEEYITDEQKEEEEEEGEEEELIRIFQEQQKKWQQYRSVRRERLKEMKLLRDQFVKALEDFEDLCDRVFSDEDSELDN

SEQ ID NO: 5099 - protein, 25 aa, Homo Sapiens
KERCQYYTASFSDYAKYYALVCYGE

SEQ ID NO: 5100 - protein, 155 aa, Homo Sapiens
MCIVLRPSRVHNSEENTMRALTLKDILNGTFSYKTFFPNWISGQEYLHQSADNNIVLYNIETGQSYTILSNRTMKSVNASNYGLSPDRQFVYLESDYSKLWRYSYTATYYIYDLSNGEFVRGNELPRPIQYLCWSPVGSKLAYVYQNNIYLKQRP

SEQ ID NO: 5101 - protein, 121 aa, Homo Sapiens
MCIVLRPSRVHNSEENTMRALTLKDILNGTFSYKTFFPNWISGQEYLHQSADNNIVLYNIETGQSYTILSNRTMKSVNASNYGLSPDRQFVYLESDYSKLWRYSYTATYYIYDLSNGKWQL

SEQ ID NO: 5102 - protein, 760 aa, Homo Sapiens
MKTWVKIVFGVATSAVLALLVMCIVLRPSRVHNSEENTMRALTLKDILNGTFSYKTFFPNWISGQEYLHQSADNNIVLYNIETGQSYTILSNRTMKSVNASNYGLSPDRQFVYLESDYSKLWRYSYTATYYIYDLSNGEFVRGNELPRPIQYLCWSPVGSKLAYVYQNNIYLKQRPGDPPFQITFNGRENKIFNGIPDWVYEEEMLATKYALWWSPNGKFLAYAEFNDTDIPVIAYSYYGDEQYPRTINIPYPKAGAKNPVVRIFIIDTTYPAYVGPQEVPVPAMIASSDYYFSWLTWVTDERVCLQWLKRVQNVSVLSICDFREDWQTWDCPKTQEHIEESRTGWAGGFFVSTPVFSYDAISYYKIFSDKDGYKHIHYIKDTVENAIQITSGKWEAINIFRVTQDSLFYSSNEFEEYPGRRNIYRISIGSYPPSKKCVTCHLRKERCQYYTASFSDYAKYYALVCYGPGIPISTLHDGRTDQEIKILEENKELENALKNIQLPKEEIKKLEVDEITLWYKMILPPQFDRSKKYPLLIQVYGGPCSQSVRSVFAVNWISYLASKEGMVIALVDGRGTAFQGDKLLYAVYRKLGVYEVEDQITAVRKFIEMGFIDEKRIAIWGWSYGGYVSSLALASGTGLFKCGIAVAPVSSWEYYASVYTERFMGLPTKDDNLEHYKNSTVMARAEYFRNVDYLLIHGTADDNVHFQNSAQIAKALVNAQVDFQAMWYSDQNHGLSGLSTNHLYTHMTHFLKQCFSLSD

SEQ ID NO: 5103 - protein, 735 aa, Homo Sapiens
MKTWVKIVFGVATSAVLALLVMCIVLRPSRVHNSEENTMRALTLKDILNGTFSYKTFFPNWISGQEYLHQSADNNIVLYNIETGQSYTILSNRTMLWRYSYTATYYIYDLSNGEFVRGNELPRPIQYLCWSPVGSKLAYVYQNNIYLKQRPGDPPFQITFNGRENKIFNGIPDWVYEEEMLATKYALWWSPNGKFLAYAEFNDTDIPVIAYSYYGDEQYPRTINIPYPKAGAKNPVVRIFIIDTTYPAYVGPQEVPVPAMIASSDYYFSWLTWVTDERVCLQWLKRVQNVSVLSICDFREDWQTWDCPKTQEHIEESRTGWAGGFFVSTPVFSYDAISYYKIFSDKDGYKHIHYIKDTVENAIQITSGKWEAINIFRVTQDSLFYSSNEFEEYPGRRNIYRISIGSYPPSKKCVTCHLRKERCQYYTASFSDYAKYYALVCYGPGIPISTLHDGRTDQEIKILEENKELENALKNIQLPKEEIKKLEVDEITLWYKMILPPQFDRSKKYPLLIQVYGGPCSQSVRSVFAVNWISYLASKEGMVIALVDGRGTAFQGDKLLYAVYRKLGVYEVEDQITAVRKFIEMGFIDEKRIAIWGWSYGGYVSSLALASGTGLFKCGIAVAPVSSWEYYASVYTERFMGLPTKDDNLEHYKNSTVMARAEYFRNVDYLLIHGTADDNVHFQNSAQIAKALVNAQVDFQAMWYSDQNHGLSGLSTNHLYTHMTHFLKQCFSLSD

SEQ ID NO: 5104 - protein, 759 aa, Homo Sapiens
MTWVKIVFGVATSAVLALLVMCIVLRPSRVHNSEENTMRALTLKDILNGTFSYKTFFPNWISGQEYLHQSADNNIVLYNIETGQSYTILSNRTMKSVNASNYGLSPDRQFVYLESDYSKLWRYSYTATYYIYDLSNGEFVRGNELPRPIQYLCWSPVGSKLAYVYQNNIYLKQRPGDPPFQITFNGRENKIFNGIPDWVYEEEMLATKYALWWSPNGKFLAYAEFNDTDIPVIAYSYYGDEQYPRTINIPYPKAGAKNPVVRIFIIDTTYPAYVGPQEVPVPAMIASSDYYFSWLTWVTDERVCLQWLKRVQNVSVLSICDFREDWQTWDCPKTQEHIEESRTGWAGGFFVSTPVFSYDAISYYKIFSDKDGYKHIHYIKDTVENAIQITSGKWEAINIFRVTQDSLFYSSNEFEEYPGRRNIYRISIGSYPPSKKCVTCHLRKERCQYYTASFSDYAKYYALVCYGPGIPISTLHDGRTDQEIKILEENKELENALKNIQLPKEEIKKLEVDEITLWYKMILPPQFDRSKKYPLLIQVYGGPCSQSVRSVFAVNWISYLASKEGMVIALVDGRGTAFQGDKLLYAVYRKLGVYEVEDQITAVRKFIEMGFIDEKRIAIWGWSYGGYVSSLALASGTGLFKCGIAVAPVSSWEYYASVYTERFMGLPTKDDNLEHYKNSTVMARAEYFRNVDYLLIHGTADDNVHFQNSAQIAKALVNAQVDFQAMWYSDQNHGLSGLSTNHLYTHMTHFLKQCFSLSD

SEQ ID NO: 5105 - protein, 47 aa, Homo Sapiens
  misc_feature (1)..(1): Xaa can be any naturally occurring amino acid
XYTERFMGLPTKDDNLEHYKNSTVMARAEYFRNVDYLLIHGTADGEV

SEQ ID NO: 5106 - protein, 86 aa, Homo Sapiens
MLGIWTLLPLVLTSVARLSSKSVNAQVTDINSKGLELRKTVTTVETQNLEGLHHDGQFCHKPCPPDVNMESSRNAHSPATPSAKRK

SEQ ID NO: 5107 - protein, 103 aa, Homo Sapiens
MLGIWTLLPLVLTSVARLSSKSVNAQVTDINSKGLELRKTVTTVETQNLEGLHHDGQFCHKPCPPDVNMESSRNAHSPATPSAKRKDPDLTWGGFVFFFCQFH

SEQ ID NO: 5108 - protein, 132 aa, Homo Sapiens
MLGIWTLLPLVLTSVARLSSKSVNAQVTDINSKGLELRKTVTTVETQNLEGLHHDGQFCHKPCPPGERKARDCTVNGDEPDCVPCQEGKEYTDKAHFSSKCRRCRLCDEGHDVNMESSRNAHSPATPSAKRK

SEQ ID NO: 5109 - protein, 149 aa, Homo Sapiens
MLGIWTLLPLVLTSVARLSSKSVNAQVTDINSKGLELRKTVTTVETQNLEGLHHDGQFCHKPCPPGERKARDCTVNGDEPDCVPCQEGKEYTDKAHFSSKCRRCRLCDEGHDVNMESSRNAHSPATPSAKRKDPDLTWGGFVFFFCQFH

SEQ ID NO: 5110 - protein, 149 aa, Homo Sapiens; identical to SEQ ID NO: 5109

SEQ ID NO: 5111 - protein, 335 aa, Homo Sapiens
MLGIWTLLPLVLTSVARLSSKSVNAQVTDINSKGLELRKTVTTVETQNLEGLHHDGQFCHKPCPPGERKARDCTVNGDEPDCVPCQEGKEYTDKAHFSSKCRRCRLCDEGHGLEVEINCTRTQNTKCRCKPNFFCNSTVCEHCDPCTKCEHGIIKECTLTSNTKCKEEGSRSNLGWLCLLLLPIPLIVWVKRKEVQKTCRKHRKENQGSHESPTLNPETVAINLSDVDLSKYITTIAGVMTLSQVKGFVRKNGVNEAKIDEIKNDNVQDTAEQKVQLLRNWHQLHGKKEAYDTLIKDLKKANLCTLAEKIQTIILKDITSDSENSNFRNEIQSLV

SEQ ID NO: 5112 - protein, 233 aa, Homo Sapiens [sequence omitted]

SEQ ID NO: 5113 - protein, 244 aa, Homo Sapiens
MLGIWTLLPLVLTSVARLSSKSVNAQVTDINSKGLELRKTVTTVETQNLEGLHHDGQFCHKPCPPGERKARDCTVNGDEPDCVPCQEGKEYTDKAHFSSKCRRCRLCDEGHGLEVEINCTRTQNTKCRCKPNFFCNSTVCEHCDPCTKCEHGIIKECTLTSNTKCKEEGSRSNLGWLCLLLLPIPLIVWVKRKEVQKTCRKHRKENQGSHESPTLNPMESCSIAQAGVQGCNHGSLQPQSPGLK

SEQ ID NO: 5114 - protein, 220 aa, Homo Sapiens
MLGIWTLLPLVLTSVARLSSKSVNAQVTDINSKGLELRKTVTTVETQNLEGLHHDGQFCHKPCPPGERKARDCTVNGDEPDCVPCQEGKEYTDKAHFSSKCRRCRLCDEGHGLEVEINCTRTQNTKCRCKPNFFCNSTVCEHCDPCTKCEHGIIKECTLTSNTKCKEEGSRSNLGWLCLLLLPIPLIVWVKRKEVQKTCRKHRKENQGSHESPTLNPMLT

SEQ ID NO: 5115 - protein, 314 aa, Homo Sapiens
MLGIWTLLPLVLTSVARLSSKSVNAQVTDINSKGLELRKTVTTVETQNLEGLHHDGQFCHKPCPPGERKARDCTVNGDEPDCVPCQEGKEYTDKAHFSSKCRRCRLCDEGHGLEVEINCTRTQNTKCRCKPNFFCNSTVCEHCDPCTKCEHGIIKECTLTSNTKCKEEVKRKEVQKTCRKHRKENQGSHESPTLNPETVAINLSDVDLSKYITTIAGVMTLSQVKGFVRKNGVNEAKIDEIKNDNVQDTAEQKVQLLRNWHQLHGKKEAYDTLIKDLKKANLCTLAEKIQTIILKDITSDSENSNFRNEIQSLV

SEQ ID NO: 5116 - protein, 119 aa, Homo Sapiens
LSKKPLEEKPSQPYSARESLSEVQSLSSFQSESCDDNASIVTVMHLVNAVVDTVSTEESLAAPDLSKPRGYHWDTSDWMPSVPLPDIQEFPNYEVIDEQTPLYSADPNAIDTDYYPGGY

SEQ ID NO: 5117 - protein, 4588 aa, Homo Sapiens
MGRHLALLLLLLLLFQHFGDSDGSQRLEQTPLQFTHLEYNVTVQENSAAKTYVGHPVKMGVYITHPAWEVRYKIVSGDSENLFKAEEYILGDFCFLRIRTKGGNTAILNREVKDHYTLIVKALEKNTNVEARTKVRVQVLDTNDLRPLFSPTSYSVSLPENTAIRTSIARVSATDADIGTNGEFYYSFKDRTDMFAIHPTSGVIVLTGRLDYLETKLYEMEILAADRGMKLYGSSGISSMAKLTVHIEQANECAPVITAVTLSPSELDRDPAYAIVTVDDCDQGANGDIASLSIVAGDLLQQFRTVRSFPGSKEYKVKAIGGIDWDSHPFGYNLTLQAKDKGTPPQFSSVKVIHVTSPQFKAGPVKFEKDVYRAEISEFAPPNTPVVMVKAIPAYSHLRYVFKSTPGKAKFSLNYNTGLISILEPVKRQQAAHFELEVTTSDRKASTKVLVKVLGANSNPPEFTQTAYKAAFDENVPIGTTVMSLSAVDPDEGENGYVTYSIANLNHVPFAIDHFTGAVSTSENLDYELMPRVYTLRIRASDWGLPYRREVEVLATITLNNLNDNTPLFEKINCEGTIPRDLGVGEQITTVSAIDADELQLVQYQIEAGNELDFFSLNPNSGVLSLKRSLMDGLGAKVSFHSLRITATDGENFATPLYINITVAASHKLVNLQCEETGVAKMLAEKLLQANKLHNQGEVEDIFFDSHSVNAHIPQFRSTLPTGIQVKENQPVGSSVIFMNSTDLDTGFNGKLVYAVSGGNEDSCFMIDMETGMLKILSPLDRETTDKYTLNITVYDLGIPQKAAWRLLHVVVVDANDNPPEFLQESYFVEVSEDKEVHSEIIQVEATDKDLGPNGHVTYSIVTDTDTFSIDSVTGVVNIARPLDRELQHEHSLKIEARDQAREEPQLFSTVVVKVSLEDVNDNPPTFIPPNYRVKVREDLPEGTVIMWLEAHDPDLGQSGQVRYSLLDHGEGNFDVDKLSGAVRIVQQLDFEKKQVYNLTVRAKDKGKPVSLSSTCYVEVEVVDVNENLHPPVFSSFVEKGTVKEDAPVGSLVMTVSAHDEDARRDGEIRYSIRDGSGVGVFKIGEETGVIETSDRLDRESTSHYWLTVFATDQGVVPLSSFIEIYIEVEDVNDNAPQTSEPVYYPEIMENSPKDVSVVQIEAFDPDSSSNDKLMYKITSGNPQGFFSIHPKTGLITTTSRKLDREQQDEHILEVTVTDNGSPPKSTIARVIVKILDENDNKPQFLQKFYKIRLPEREKPDRERNARREPLYHVIATDKDEGPNAEISYSIEDGNEHGKFFIEPKTGVVSSKRFSAAGEYDILSIKAVDNGRPQKSSTTRLHIEWISKPKPSLEPISFEESFFTFTVMESDPVAHMIGVISVEPPGIPLWFDITGGNYDSHFDVDKGTGTIIVAKPLDAEQKSNYNLTVEATDGTTTILTQVFIKVIDTNDHRPQFSTSKYEVVIPEDTAPETEILQISAVDQDEKNKLIYTLQSSRDPLSLKKFRLDPATGSLYTSEKLDHEAVHQHTLTVMVRDQDVPVKRNFARIVVNVSDTNDHAPWFTASSYKGRVYESAAVGSVVLQVTALDKDKGKNAEVLYSIESGNIGNSFMIDPVLGSIKTAKELDRSNQAEYDLMVKATDKGSPPMSEITSVRIFVTIADNASPKFTSKEYSVELSETVSIGSFVGMVTAHSQSSVVYEIKDGNTGDAFDINPHSGTIITQKALDFETLPIYTLIIQGTNMAGLSTNTTVLVHLQDENDNAPVFMQAEYTGLISESASINSVVLTDRNVPLVIRAADADKDSNALLVYHIVEPSVHTYFAIDSSTGAIHTVLSLDYEETSIFHFTVQVHDMGTPRLFAEYAANVTVHVIDINDCPPVFAKPLYEASLLLPTYKGVKVITVNATDADSSAFSQLIYSITEGNIGEKFSMDYKTGALTVQNTTQLRSRYELTVRASDGRFAGLTSVKINVKESKESHLKFTQDVYSAVVKENSTEAETLAVITAIGNPINEPLFYHILNPDRRFKISRTSGVLSTTGTPFDREQQEAFDVVVEVTEEHKPSAVAHVVVKVIVEDQNDNAPVFVNLPYYAVVKVDTEVGHVIRYVTAVDRDSGRNGEVHYYLKEHHEHFQIGPLGEISLKKQFELDTLNKEYLVTVVAKDGGNPAFSAEVIVPITVMNKAMPVFEKPFYSAEIAESIQVHSPVVHVQANSPEGLKVFYSITDGDPFSQFTINFNTGVINVIAPLDFEAHPAYKLSIRATDSLTGAHAEVFVDIIVDDINDNPPVFAQQSYAVTLSEASVIGTSVVQVRATDSDSEPNRGISYQMFGNHSKSHDHFHVDSSTGLISLLRTLDYEQSRQHTIFVRAVDGGMPTLSSDVIVTVDVTDLNDNPPLFEQQIYEARISEHAPHGHFVTCVKAYDADSSDIDKLQYSILSGNDHKHFVIDSATGIITLSNLHRHALKPFYSLNLSVSDGVFRSSTQVHVTVIGGNLHSPAFLQNEYEVELAENAPLHTLVMEVKTTDGDSGIYGHVTYHIVNDFAKDRFYINERGQIFTLEKLDRETPAEKVISVRLMAKDAGGKVAFCTVNVILTDDNDNAPQFRATKYEVNIGSSAAKGTSVVKVLASDADEGSNADITYAIEADSESVKENLEINKLSGVITTKESLIGLENEFFTFFVRAVDNGSPSKESVVLVYVKILPPEMQLPKFSEPFYTFTVSEDVPIGTEIDLIRAEHSGTVLYSLVKGNTPESNRDESFVIDRQSGRLKLEKSLDHETTKWYQFSILARCTQDDHEMVASVDVSIQVKDANDNSPVFESSPYEAFIVENLPGGSRVIQIRASDADSGTNGQVMYSLDQSQSVEVIESFAINMETGWITTLKELDHEKRDNYQIKVVASDHGEKIQLSSTAIVDVTVTDVNDSPPRFTAEIYKGTVSEDDPQGGVIAILSTTDADSEEINRQVTYFITGGDPLGQFAVETIQNEWKVYVKKPLDREKRDNYLLTITATDGTFSSKAIVEVKVLDANDNSPVCEKTLYSDTIPEDVLPGKLIMQISATDADIRSNAEITYTLLGSGAEKFKLNPDTGELKTSTPLDREEQAVYHLLVRATDGGGRFCQASIVLTLEDVNDNAPEFSADPYAITVFENTEPGTLLTRVQATDADAGLNRKILYSLIDSADGQFSINELSGIIQLEKPLDRELQAVYTLSLKAVDQGLPRRLTATGTVIVSVLDINDNPPVFEYREYGATVSEDILVGTEVLQVYAASRDIEANAEITYSIISGNEHGKFSIDSKTGAVFIIENLDYESSHEYYLTVEATDGGTPSLSDVATVNVNVTDINDNTPVFSQDTYTTVISEDAVLEQSVITVMADDADGPSNSHIHYSIIDGNQGSSFTIDPVRGEVKVTKLLDRETISGYTLTVQASDNGSPPRVNTTTVNIDVSDVNDNAPVFSRGNYSVIIQENKPVGFSVLQLVVTDEDSSHNGPPFFFTIVTGNDEKAFEVNPQGVLLTSSAIKRKEKDHYLLQVKVADNGKPQLSSLTYIDIRVIEESIYPPAILPLEIFITSSGEEYSGGVIGKIHATDQDVYDTLTYSLDPQMDNLFSVSSTGGKLIAHKKLDIGQYLLNVSVTDGKFTTVADITVHIRQVTQEMLNHTIAIRFANLTPEEFVGDYWRNFQRALRNILGVRRNDIQIVSLQSSEPHPHLDVLLFVEKPGSAQISTKQLLHKINSSVTDIEEIIGVRILNVFQKLCAGLDCPWKFCDEKVSVDESVMSTHSTARLSFVTPRHHRAAVCLCKEGRCPPVHHGCEDDPCPEGSECVSDPWEEKHTCVCPSGRFGQCPGSSSMTLTGNSYVKYRLTENENKLEMKLTMRLRTYSTHAVVMYARGTDYSILEIHHGRLQYKFDCGSGPGIVSVQSIQVNDGQWHAVALEVNGNYARLVLDQVHTASGTAPGTLKTLNLDNYVFFGGHIRQQGTRHGRSPQVGNGFRGCMDSIYLNGQELPLNSKPRSYAHIEESVDVSPGCFLTATEDCASNPCQNGGVCNPSPAGGYYCKCSALYIGTHCEISVNPCSSKPCLYGGTCVVDNGGFVCQCRGLYTGQRCQLSPYCKDEPCKNGGTCFDSLDGAVCQCDSGFRGERCQSDIDECSGNPCLHGALCENTHGSYHCNCSHEYRGRHCEDAAPNQYVSTPWNIGLAEGIGIVVFVAGIFLLVVVFVLCRKMISRKKKHQAEPKDKHLGPATAFLQRPYFDSKLNKNIYSDIPPQVPVRPISYTPSIPSDSRNNLDRNSFEGSAIPEHPEFSTFNPESVHGHRKAVAVCSVAPNLPPPPPSNSPSDSDSIQKPSWDFDYDTKVVDLDPCLSKKPLEEKPSQPYSARESLSEVQSLSSFQSESCDDNGYHWDTSDWMPSVPLPDIQEFPNYEVIDEQTPLYSADPNAIDTDYYPGGYDIESDFPPPPEDFPAADELPPLPPEFSNQFESIHPPRDMPAAGSLGSSSRNRQRFNLNQYLPNFYPLDMSEPQTKGTGENSTCREPHAPYPPGYQRHFEAPAVESMPMSVYASTASCSDVSACCEVESEVMMSDYESGDDGHFEEVTIPPLDSQQHTEV

SEQ ID NO: 5118 - protein, 488 aa, Homo Sapiens
MGRHLALLLLLLLLFQHFGDSDGSQRLEQTPLQFTHLEYNVTVQENSAAKTYVGHPVKMGVYITHPAWEVRYKIVSGDSENLFKAEEYILGDFCFLRIRTKGGNTAILNREVKDHYTLIVKALEKNTNVEARTKVRVQVLDTNDLRPLFSPTSYSVSLPENTAIRTSIARVSATDADIGTNGEFYYSFKDRTDMFAIHPTSGVIVLTGRLDYLETKLYEMEILAADRGMKLYGSSGISSMAKLTVHIEQANECAPVITAVTLSPSELDRDPAYAIVTVDDCDQGANGDIASLSIVAGDLLQQFRTVRSFPGSKEYKVKAIGGIDWDSHPFGYNLTLQAKDKGTPPQFSSVKVIHVTSPQFKAGPVKFEKDVYRAEISEFAPPNTPVVMVKAIPAYSHLRYVFKSTPGKAKFSLNYNTGLISILEPVKRQQAAHFELEVTTSDRKASTKVLVKVLGANSNPPEFTQTAYKAAFDENVPIGTTVMSLSAV

SEQ ID NO: 5119 - protein, 4590 aa, Homo Sapiens
MGRHLALLLLLLLLFQHFGDSDGSQRLEQTPLQFTHLEYNVTVQENSAAKTYVGHPVKMGVYITHPAWEVRYKIVSGDSENLFKAEEYILGDFCFLRIRTKGGNTAILNREVKDHYTLIVKALEKNTNVEARTKVRVQVLDTNDLRPLFSPTSYSVSLPENTAIRTSIARVSATDADIGTNGEFYYSFKDRTDMFAIHPTSGVIVLTGRLDYLETKLYEMEILAADRGMKLYGSSGISSMAKLTVHIEQANECAPVITAVTLSPSELDRDPAYAIVTVDDCDQGANGDIASLSIVAGDLLQQFRTVRSFPGSKEYKVKAIGGIDWDSHPFGYNLTLQAKDKGTPPQFSSVKVIHVTSPQFKAGPVKFEKDVYRAEISEFAPPNTPVVMVKAIPAYSHLRYVFKSTPGKAKFSLNYNTGLISILEPVKRQQAAHFELEVTTSDRKASTKVLVKVLGANSNPPEFTQTAYKAAFDENVPIGTTVMSLSAVDPDEGENGYVTYSIANLNHVPFAIDHFTGAVSTSENLDYELMPRVYTLRIRASDWGLPYRREVEVLATITLNNLNDNTPLFEKINCEGTIPRDLGVGEQITTVSAIDADELQLVQYQIEAGNELDFFSLNPNSGVLSLKRSLMDGLGAKVSFHSLRITATDGENFATPLYINITVAASHKLVNLQCEETGVAKMLAEKLLQANKLHNQGEVEDIFFDSHSVNAHIPQFRSTLPTGIQVKENQPVGSSVIFMNSTDLDTGFNGKLVYAVSGGNEDSCFMIDMETGMLKILSPLDRETTDKYTLNITVYDLGIPQKAAWRLLHVVVVDANDNPPEFLQESYFVEVSEDKEVHSEIIQVEATDKDLGPNGHVTYSIVTDTDTFSIDSVTGVVNIARPLDRELQHEHSLKIEARDQAREEPQLFSTVVVKVSLEDVNDNPPTFIPPNYRVKVREDLPEGTVIMWLEAHDPDLGQSGQVRYSLLDHGEGNFDVDKLSGAVRIVQQLDFEKKQVYNLTVRAKDKGKPVSLSSTCYVEVEVVDVNENLHPPVFSSFVEKGTVKEDAPVGSLVMTVSAHDEDARRDGEIRYSIRDGSGVGVFKIGEETGVIETSDRLDRESTSHYWLTVFATDQGVVPLSSFIEIYIEVEDVNDNAPQTSEPVYYPEIMENSPKDVSVVQIEAFDPDSSSNDKLMYKITSGNPQGFFSIHPKTGLITTTSRKLDREQQDEHILEVTVTDNGSPPKSTIARVIVKILDENDNKPQFLQKFYKIRLPEREKPDRERNARREPLYHVIATDKDEGPNAEISYSIEDGNEHGKFFIEPKTGVVSSKRFSAAGEYDILSIKAVDNGRPQKSSTTRLHIEWISKPKPSLEPISFEESFFTFTVMESDPVAHMIGVISVEPPGIPLWFDITGGNYDSHFDVDKGTGTIIVAKPLDAEQKSNYNLTVEATDGTTTILTQVFIKVIDTNDHRPQFSTSKYEVVIPEDTAPETEILQISAVDQDEKNKLIYTLQSSRDPLSLKKFRLDPATGSLYTSEKLDHEAVPAHLTVMVRDQDVPVKRNFARIVVNVSDTNDHAPWFTASSYKGRVYESAAVGSVVLQVTALDKDKGKNAEVLYSIESGTFGNIGNSFMIDPVLGSIKTAKELDRSNQAEYDLMVKATDKGSPPMSEITSVRIFVTIADNASPKFTSKEYSVELSETVSIGSFVGMVTAHSQSSVVYEIKDGNTGDAFDINPHSGTIITQKALDFETLPIYTLIIQGTNMAGLSTNTTVLVHLQDENDNAPVFMQAEYTGLISESASINSVVLTDRNVPLVIRAADADKDSNALLVYHIVEPSVHTYFAIDSSTGAIHTVLSLDYEETSIFHFTVQVHDMGTPRLFAEYAANVTVHVIDINDCPPVFAKPLYEASLLLPTYKGVKVITVNATDADSSAFSQLIYSITEGNIGEKFSMDYKTGALTVQNTTQLRSRYELTVRASDGRFAGLTSVKINVKESKESHLKFTQDVYSAVVKENSTEAETLAVITAIGNPINEPLFYHILNPDRRFKISRTSGVLSTTGTPFDREQQEAFDVVVEVTEEHKPSAVAHVVVKVIVEDQNDNAPVFVNLPYYAVVKVDTEVGHVIRYVTAVDRDSGRNGEVHYYLKEHHEHFQIGPLGEISLKKQFELDTLNKEYLVTVVAKDGGNPAFSAEVIVPITVMNKAMPVFEKPFYSAEIAESIQVHSPVVHVQANSPEGLKVFYSITDGDPFSQFTINFNTGVINVIAPLDFEAHPAYKLSIRATDSLTGAHAEVFVDIIVDDINDNPPVFAQQSYAVTLSEASVIGTSVVQVRATDSDSEPNRGISYQMFGNHSKSHDHFHVDSSTGLISLLRTLDYEQSRQHTIFVRAVDGGMPTLSSDVIVTVDVTDLNDNPPLFEQQIYEARISEHAPHGHFVTCVKAYDADSSDIDKLQYSILSGNDHKHFVIDSATGIITLSNLHRHALKPFYSLNLSVSDGVFRSSTQVHVTVIGGNLHSPAFLQNEYEVELAENAPLHTLVMEVKTTDGDSGIYGHVTYHIVNDFAKDRFYINERGQIFTLEKLDRETPAEKVISVRLMAKDAGGKVAFCTVNVILTDDNDNAPQFRATKYEVNIGSSAAKGTSVVKVLASDADEGSNADITYAIEADSESVKENLEINKLSGVITTKESLIGLENEFFTFFVRAVDNGSPSKESVVLVYVKILPPEMQLPKFSEPFYTFTVSEDVPIGTEIDLIRAEHSGTVLYSLVKGNTPESNRDESFVIDRQSGRLKLEKSLDHETTKWYQFSILARCTQDDHEMVASVDVSIQVKDANDNSPVFESSPYEAFIVENLPGGSRVIQIRASDADSGTNGQVMYSLDQSQSVEVIESFAINMETGWITTLKELDHEKRDNYQIKVVASDHGEKIQLSSTAIVDVTVTDVNDSPPRFTAEIYKGTVSEDDPQGGVIAILSTTDADSEEINRQVTYFITGGDPLGQFAVETIQNEWKVYVKKPLDREKRDNYLLTITATDGTFSSKAIVEVKVLDANDNSPVCEKTLYSDTIPEDVLPGKLIMQISATDADIRSNAEITYTLLGSGAEKFKLNPDTGELKTSTPLDREEQAVYHLLVRATDGGGRFCQASIVLTLEDVNDNAPEFSADPYAITVFENTEPGTLLTRVQATDADAGLNRKILYSLIDSADGQFSINELSGIIQLEKPLDRELQAVYTLSLKAVDQGLPRRLTATGTVIVSVLDINDNPPVFEYREYGATVSEDILVGTEVLQVYAASRDIEANAEITYSIISGNEHGKFSIDSKTGAVFIIENLDYESSHEYYLTVEATDGGTPSLSDVATVNVNVTDINDNTPVFSQDTYTTVISEDAVLEQSVITVMADDADGPSNSHIHYSIIDGNQGSSFTIDPVRGEVKVTKLLDRETISGYTLTVQASDNGSPPRVNTTTVNIDVSDVNDNAPVFSRGNYSVIIQENKPVGFSVLQLVVTDEDSSHNGPPFFFTIVTGNDEKAFEVNPQGVLLTSSAIKRKEKDHYLLQVKVADNGKPQLSSLTYIDIRVIEESIYPPAILPLEIFITSSGEEYSGGVIGKIHATDQDVYDTLTYSLDPQMDNLFSVSSTGGKLIAHKKLDIGQYLLNVSVTDGKFTTVADITVHIRQVTQEMLNHTIAIRFANLTPEEFVGDYWRNFQRALRNILGVRRNDIQIVSLQSSEPHPHLDVLLFVEKPGSAQISTKQLLHKINSSVTDIEEIIGVRILNVFQKLCAGLDCPWKFCDEKVSVDESVMSTHSTARLSFVTPRHHRAAVCLCKEGRCPPVHHGCEDDPCPEGSECVSDPWEEKHTCVCPSGRFGQCPGSSSMTLTGNSYVKYRLTENENKLEMKLTMRLRTYSTHAVVMYARGTDYSILEIHHGRLQYKFDCGSGPGIVSVQSIQVNDGQWHAVALEVNGNYARLVLDQVHTASGTAPGTLKTLNLDNYVFFGGHIRQQGTRHGRSPQVGNGFRGCMDSIYLNGQELPLNSKPRSYAHIEESVDVSPGCFLTATEDCASNPCQNGGVCNPSPAGGYYCKCSALYIGTHCEISVNPCSSKPCLYGGTCVVDNGGFVCQCRGLYTGQRCQLSPYCKDEPCKNGGTCFDSLDGAVCQCDSGFRGERCQSDIDECSGNPCLHGALCENTHGSYHCNCSHEYRGRHCEDAAPNQYVSTPWNIGLAEGIGIVVFVAGIFLLVVVFVLCRKMISRKKKHQAEPKDKHLGPATAFLQRPYFDSKLNKNIYSDIPPQVPVRPISYTPSIPSDSRNNLDRNSFEGSAIPEHPEFSTFNPESVHGHRKAVAVCSVAPNLPPPPPSNSPSDSDSIQKPSWDFDYDTKVVDLDPCLSKKPLEEKPSQPYSARESLSEVQSLSSFQSESCDDNGYHWDTSDWMPSVPLPDIQEFPNYEVIDEQTPLYSADPNAIDTDYYPGGYDIESDFPPPPEDFPAADELPPLPPEFSNQFESIHPPRDMPAAGSLGSSSRNRQRFNLNQYLPNFYPLDMSEPQTKGTGENSTCREPHAPYPPGYQRHFEAPAVESMPMSVYASTASCSDVSACCEVESEVMMSDYESGDDGHFEEVTIPPLDSQQHTEV

SEQ ID NO: 5120 - protein, 52 aa, Homo Sapiens
MTMAVIVRNKEKKVIFEFSGQISGSSFRSHFPPLPYSILFVVHTFLSHLELS

SEQ ID NO: 5121 - protein, 368 aa, Homo Sapiens
  misc_feature (1)..(1): Xaa can be any naturally occurring amino acid
XDSKLNKNIYSDIPPQVPVRPISYTPSIPSDSRNNLDRNSFEGSAIPEHPEFSTFNPESVHGHRKAVAVCSVAPNLPPPPPSNSPSDSDSIQKPSWDFDYDTKVVDLDPCLSKKPLEEKPSQPYSARESLSEVQSLSSFQSESCDDNESLAAPDLSKPRGYHWDTSDWMPSVPLPDIQEFPNYEVIDEQTPLYSADPNAIDTDYYPGGYDIESDFPPPPEDFPAADELPPLPPEFSNQFESIHPPRDMPAAGSLGSSSRNRQRFNLNQYLPNFYPLDMSEPQTKGTGENSTCREPHAPYPPGYQRHFEAPAVESMPMSVYASTASCSDVSACCEVESEVMMSDYESGDDGHFEEVTIPPLDSQQHTEV

SEQ ID NO: 5122 - protein, 285 aa, Homo Sapiens
  misc_feature (1)..(1): Xaa can be any naturally occurring amino acid
XSTTEALFASVEDYILVRGVSLVHTAKMNPVRMAEHALTVWMAPFVSVIRVLGEKGVRVISTSALETLACTGPSVRTRTAPITATAATSTGDVTARMLRPTTKVVDLDPCLSKKPLEEKPSQPYSARESLSEVQSLSSFQSESCDDNGYHWDTSDWMPSVPLPDIQEFPNYEVIDEQTPLYSADPNAIDTDYYPGGYDIESDFPPPPEDFPAADELPPLPPEFSNQFESIHPPRDMPAAGSLGSSSRNRQRFNLNQYLPNFYPLDMSEPQTKGTGENSTCREPHA

SEQ ID NO: 5123 - protein, 92 aa, Homo Sapiens
ALLAAGGRGVPGPPPQLRVPTPSASRSLRVSEPRGLGVRALPCAAPPDCQRRGLGDAPLPHGQLRSSSPPRPGDLFQNRIPPPLKHTVLPQS

SEQ ID NO: 5124 - protein, 181 aa, Homo Sapiens
CRMVQEQCCHSQLEELHCATGISLANEQDRCATPHGDNASLEATFVKRCCHCCLLGRAAQAQGQSCEYSLMVGYQCGQVFQACCVKSQETGDLDVGGLQETGGGPCKQQCRDTGDEVVCSCFVGYQLLSDGVSCEDVNECITGSHSCRLGESCINTVGSFRCQRDSSCGTGYELTEDNSCK

SEQ ID NO: 5125 - protein, 60 aa, Homo Sapiens
DITEGNLRDSFDIIKRYMDGMTVAPLLNCHILKDLQSWEMKTVASAILDSDLYSEHFQSS

SEQ ID NO: 5126 - protein, 65 aa, Homo Sapiens
MATHQKDCSLPYATESKECRMVQEQCCHSQLEELHCATGISLANEQDRCATPHGDNASLEATFVK

SEQ ID NO: 5127 - protein, 139 aa, Homo Sapiens
MATHQKDCSLPYATESKECRMVQEQCCHSQLEELHCATGISLANEQDRCATPHGDNASLEATFVKRCCHCCLLGRAAQAQGQSCEYSLMVGYQCGQVFQACCVKSQETGDLDVGGLQETDKIIEVEEEQEDPYLNDRCR

SEQ ID NO: 5128 - protein, 721 aa, Homo Sapiens
MERAAPSRRVPLPLLLLGGLALLAAGVDADVLLEACCADGHRMATHQKDCSLPYATESKECRAVGLASLCQDLNGAWAVWKVGRASQAEGTASARAQRRGMVQEQCCHSQLEELHCATGISLANEQDRCATPHGDNASLEATFVKRCCHCCLLGRAAQAQGQSCEYSLMVGYQCGQVFQACCVKSQETGDLDVGGLQETDKIIEVEEEQEDPYLNDRCRGGGPCKQQCRDTGDEVVCSCFVGYQLLSDGVSCEDVNECITGSHSCRLGESCINTVGSFRCQRDSSCGTGYELTEDNSCKDIDECESGIHNCLPDFICQNTLGSFRCRPKLQCKSGFIQDALGNCIDINECLSISAPCPIGHTCINTEGSYTCQKNVPNCGRGYHLNEEGTRCVDVDECAPPAEPCGKGHRCVNSPGSFRCECKTGYYFDGISRMCVDVNECQRYPGRLCGHKCENTLGSYLCSCSVGFRLSVDGRSCEDINECSSSPCSQECANVYGSYQCYCRRGYQLSDVDGVTCEDIDECALPTGGHICSYRCINIPGSFQCSCPSSGYRLAPNGRNCQDIDECVTGIHNCSINETCFNIQGGFRCLAFECPENYRRSAATRCERLPCHENRECSKLPLRITYYHLSFPTNIQAPAVVFRMGPSSAVPGDSMQLAITGGNEEGFFTTRKVSPHSGVVALTKPVPEPRDLLLTVKMDLSRHGTVSSFVAKLFIFVSAEL

SEQ ID NO: 5129 - protein, 683 aa, Homo Sapiens
MERAAPSRRVPLPLLLLGGLALLAAGVDADVLLEACCADGHRMATHQKDCSLPYATESKECRMVQEQCCHSQLEELHCATGISLANEQDRCATPHGDNASLEATFVKRCCHCCLLGRAAQAQGQSCEYSLMVGYQCGQVFQACCVKSQETGDLDVGGLQETDKIIEVEEEQEDPYLNDRCRGGGPCKQQCRDTGDEVVCSCFVGYQLLSDGVSCEDVNECITGSHSCRLGESCINTVGSFRCQRDSSCGTGYELTEDNSCKDIDECESGIHNCLPDFICQNTLGSFRCRPKLQCKSGFIQDALGNCIDINECLSISAPCPIGHTCINTEGSYTCQKNVPNCGRGYHLNEEGTRCVDVDECAPPAEPCGKGHRCVNSPGSFRCECKTGYYFDGISRMCVDVNECQRYPGRLCGHKCENTLGSYLCSCSVGFRLSVDGRSCEDINECSSSPCSQECANVYGSYQCYCRRGYQLSDVDGVTCEDIDECALPTGGHICSYRCINIPGSFQCSCPSSGYRLAPNGRNCQDIDECVTGIHNCSINETCFNIQGGFRCLAFECPENYRRSAATRCERLPCHENRECSKLPLRITYYHLSFPTNIQAPAVVFRMGPSSAVPGDSMQLAITGGNEEGFFTTRKVSPHSGVVALTKPVPEPRDLLLTVKMDLSRHGTVSSFVAKLFIFVSAEL

SEQ ID NO: 5130 - protein, 703 aa, Homo Sapiens
MERAAPSRRVPLPLLLLGGLALLAAGVDADVLLEACCADGHRMATHQKDCSLPYATESKECRMVQEQCCHSQLEELHCATGISLANEQDRCATPHGDNASLEATFVKRCCHCCLLGRAAQAQGQSCEYSLMVGYQCGQVFQACCVKSQETGDLDVGGLQETDKIIEVEEEQEDPYLNDRCRGGGPCKQQCRDTGDEVVCSCFVGYQLLSDGVSCEDVNECITGSHSCRLGESCINTVGSFRCQRDSSCGTGYELTEDNSCKDIDECESGIHNCLPDFICQNTLGSFRCRPKLQCKSGFIQDALGNCIDINECLSISAPCPIGHTCINTEGSYTCQKNVPNCGRGYHLNEEGTRCVDVDECAPPAEPCGKGHRCVNSPGSFRCECKTGYYFDGISRMCVDVNECQRYPGRLCGHKCENTLGSYLCSCSVGFRLSVDGRSCEDINECSSSPCSQECANVYGSYQCYCRRGYQLSDVDGVTCEDIDECALPTGGHICSYRCINIPGSFQCSCPSSGYRLAPNGRNCQDIDECVTGIHNCSINETCFNIQGGFRCLAFECPENYRRSAATLQQEKTDTVRCIKSCRPNDVTCVFDPVHTISHTVISLPTFREFTRPEEIIFLRAITPPHPASQANIIFDITEGNLRDSFDIIKRYMDGMTVGVVRQVRPIVGPFHAVLKLEMNYVVGGVVSHRNVVNVHIFVSEYWF

SEQ ID NO: 5131 - protein, 566 aa, Homo Sapiens
MERAAPSRRVPLPLLLLGGLALLAAGVDADVLLEACCADGHRMATHQKDCSLPYATESKECRMVQEQCCHSQLEELHCATGISLANEQDRCATPHGDNASLEATFVKRCCHCCLLGRAAQAQGQSCEYSLMVGYQCGQVFQACCVKSQETGDLDVGGLQETDKIIEVEEEQEDPYLNDRCRGGGPCKQQCRDTGDEVVCSCFVGYQLLSDGVSCEDVNECITGSHSCRLGESCINTVGSFRCQRDSSCGTGYELTEDNSCKDIDECESGIHNCLPDFICQNTLGSFRCRPKLQCKSGFIQDALGNCIDINECLSISAPCPIGHTCINTEGSYTCQKNVPNCGRGYHLNEEGTRCVDVDECAPPAEPCGKGHRCVNSPGSFRCECKTGYYFDGISRMCVDVNECQRYPGRLCGHKCENTLGSYLCSCSVGFRLSVDGRSCEDINECSSSPCSQECANVYGSYQCYCRRGYQLSDVDGVTCEDIDECALPTGGHICSYRCINIPGSFQCSCPSSGYRLAPNGRNCQDIDECVTGIHNCSINETCFNIQGGFRCLAFECPENYRRSAAT

SEQ ID NO: 5132 - protein, 601 aa, Homo Sapiens
MERAAPSRRVPLPLLLLGGLALLAAGVDADVLLEACCADGHRMATHQKDCSLPYATESKECRMVQEQCCHSQLEELHCATGISLANEQDRCATPHGDNASLEATFVKRCCHCCLLGRAAQAQGQSCEYSLMVGYQCGQVFQACCVKSQETGDLDVGGLQETDKIIEVEEEQEDPYLNDRCRGGGPCKQQCRDTGDEVVCSCFVGYQLLSDGVSCEDVNECITGSHSCRLGESCINTVGSFRCQRDSSCGTGYELTEDNSCKDIDECESGIHNCLPDFICQNTLGSFRCRPKLQCKSGFIQDALGNCIDINECLSISAPCPIGHTCINTEGSYTCQKNVPNCGRGYHLNEEGTRCVDVDECAPPAEPCGKGHRCVNSPGSFRCECKTGYYFDGISRMCVDVNECQRYPGRLCGHKCENTLGSYLCSCSVGFRLSVDGRSCEDINECSSSPCSQECANVYGSYQCYCRRGYQLSDVDGVTCEDIDECALPTGGHICSYRCINIPGSFQCSCPSSGYRLAPNGRNCQDIDECVTGIHNCSINETCFNIQGGFRCLAFECPENYRRSAATQKSKKGRQNTPAGSSKEDCRVLPWKQGLEDTHLDA

SEQ ID NO: 5133 - protein, 172 aa, Homo Sapiens
MERAAPSRRVPLPLLLLGGLALLAAGVDADVLLEACCADGHRMATHQKDCSLPYATESKECRMVQEQCCHSQLEELHCATGISLANEQDRCATPHGDNASLEATFVKRCCHCCLLGRAAQAQGQSCEYSLMVGYQCGQVFQACCVKSQETGDLDVGGLQETGGGPCKQQCRD

SEQ ID NO: 5134 - protein, 189 aa, Homo Sapiens
MNSYTRGSRRPSAKAASPAASVTSRVSPSGPGVPVDADVLLEACCADGHRMATHQKDCSLPYATESKECRMVQEQCCHSQLEELHCATGISLANEQDRCATPHGDNASLEATFVKRCCHCCLLGRAAQAQGQSCEYSLMVGYQCGQVFQACCVKSQETGDLDVGGLQETDKIIEVEEEQEDPYLNDRCR

SEQ ID NO: 5135 - protein, 183 aa, Homo Sapiens
  misc_feature (1)..(1): Xaa can be any naturally occurring amino acid
XKRCCHCCLLGRAAQAQGQSCEYSLMVGYQCGQVFQACCVKSQETGDLDVGGLQETDKIIEVEEEQEDPYLNDRCRGGGPCKQQCRDTGDEVVCSCFVGYQLLSDGVSCEDVNECITGSHSCRLGESCINTVGSFRCQRDSSCGTGYELTEDNSCKEYSGILPLPTQATVQEWLYTRCSRQLY

SEQ ID NO: 5136 - protein, 159 aa, Homo Sapiens
MVLLWEPAGAWLALGLALALGPSVAAAAPRQDCTGVECPPLENCIEEALEPGACCATCVQQGCACEGYQYYDCLQGGFVRGRVPAGQSYFVDFGSTECSCPPGGGKISCQFMLCPELPPNCIEAVVVADSCPQCGQVGCVHAGHKYAAGHTVHLPPCRA

SEQ ID NO: 5137 - protein, 1184 aa, Homo Sapiens
MVLLWEPAGAWLALGLALALGPSVAAAAPRQDCTGVECPPLENCIEEALEPGACCATCVQQGCACEGYQYYDCLQGGFVRGRVPAGQSYFVDFGSTECSCPPGGGKISCQFMLCPELPPNCIEAVVVADSCPQCGQVGCVHAGHKYAAGHTVHLPPCRACHCPDAGGELICYQLPGCHGNFSDAEEGDPERHYEDPYSYDQEVAEVEAATALGGEVQAGAVQAGAGGPPAALGGGSQPLSTIQAPPWPAVLPRPTAAAALGPPAPVQAKARRVTEDSEEEEEEEEEREEMAVTEQLAAGGHRGLDGLPTTAPAGPSLPIQEERAEAGARAEAGARPEENLILDAQATSRSTGPEGVTHAPSLGKAALVPTQAVPGSPRDPVKPSPHNILSTSLPDAAWIPPTREVPRKPQVLPHSHVEEDTDPNSVHSIPRSSPEGSTKDLIETCCAAGQQWAIDNDECLEIPESGTEDNVCRTAQRHCCVSYLQEKSCMAGVLGAKEGETCGAEDNDSCGISLYKQCCDCCGLGLRVRAEGQSCESNPNLGYPCNHVMLSCCEGEEPLIVPEVRRPPEPAAAPRRVSEAEMAGREALSLGTEAELPNSLPGDDQDECLLLPGELCQHLCINTVGSYHCACFPGFSLQDDGRTCRPEGHPPQPEAPQEPALKSEFSQVASNTIPLPLPQPNTCKDNGPCKQVCSTVGGSAICSCFPGYAIMADGVSCEDINECVTDLHTCSRGEHCVNTLGSFHCYKALTCEPGYALKDGECEDVDECAMGTHTCQPGFLCQNTKGSFYCQARQRCMDGFLQDPEGNCVDINECTSLSEPCRPGFSCINTVGSYTCQRNPLICARGYHASDDGTKCVDVNECETGVHRCGEGQVCHNLPGSYRCDCKAGFQRDAFGRGCIDVNECWASPGRLCQHTCENTLGSYRCSCASGFLLAADGKRCEDVNECEAQRCSQECANIYGSYQCYCRQGYQLAEDGHTCTDIDECAQGAGILCTFRCLNVPGSYQCACPEQGYTMTANGRSCKDVDECALGTHNCSEAETCHNIQGSFRCLRFECPPNYVQVSKTKCERTTCHDFLECQNSPARITHYQLNFQTGLLVPAHIFRIGPAPAFTGDTIALNIIKGNEEGYFGTRRLNAYTGVVYLQRAVLEPRDFALDVEMKLWRQGSVTTFLAKMHIFFTTFAL

SEQ ID NO: 5138 - protein, 1231 aa, Homo Sapiens
MVLLWEPAGAWLALGLALALGPSVAAAAPRQDCTGVECPPLENCIEEALEPGACCATCVQQGCACEGYQYYDCLQGGFVRGRVPAGQSYFVDFGSTECSCPPGGGKISCQFMLCPELPPNCIEAVVVADSCPQCGQVGCVHAGHKYAAGHTVHLPPCRACHCPDAGGELICYQLPGCHGNFSDAEEGDPERHYEDPYSYDQEVAEVEAATALGGEVQAGAVQAGAGGPPAALGGGSQPLSTIQAPPWPAVLPRPTAAAALGPPAPVQAKARRVTEDSEEEEEEEEEREEMAVTEQLAAGGHRGLDGLPTTAPAGPSLPIQEERAEAGARAEAGARPEENLILDAQATSRSTGPEGVTHAPSLGKAALVPTQAVPGSPRDPVKPSPHNILSTSLPDAAWIPPTREVPRKPQVLPHSHVEEDTDPNSVHSIPRSSPEGSTKDLIETCCAAGQQWAIDNDECLEIPESGTEDNVCRTAQRHCCVSYLQEKSCMAGVLGAKEGETCGAEDNDSCGISLYKQCCDCCGLGLRVRAEGQSCESNPNLGYPCNHVMLSCCEGEEPLIVPEVRRPPEPAAAPRRVSEAEMAGREALSLGTEAELPNSLPGDDQDECLLLPGELCQHLCINTVGSYHCACFPGFSLQDDGRTCRPEGHPPQPEAPQEPALKSEFSQVASNTIPLPLPQPNTCKDNGPCKQVCSTVGGSAICSCFPGYAIMADGVSCEDQDECLMGAHDCSRRQFCVNTLGSFYCVNHTVLCADGYILNAHRKCVDINECVTDLHTCSRGEHCVNTLGSFHCYKALTCEPGYALKDGECEDVDECAMGTHTCQPGFLCQNTKGSFYCQARQRCMDGFLQDPEGNCVDINECTSLSEPCRPGFSCINTVGSYTCQRNPLICARGYHASDDGTKCVDVNECETGVHRCGEGQVCHNLPGSYRCDCKAGFQRDAFGRGCIDVNECWASPGRLCQHTCENTLGSYRCSCASGFLLAADGKRCEDVNECEAQRCSQECANIYGSYQCYCRQGYQLAEDGHTCTDIDECAQGAGILCTFRCLNVPGSYQCACPEQGYTMTANGRSCKDVDECALGTHNCSEAETCHNIQGSFRCLRFECPPNYVQVSKTKCERTTCHDFLECQNSPARITHYQLNFQTGLLVPAHIFRIGPAPAFTGDTIALNIIKGNEEGYFGTRRLNAYTGVVYLQRAVLEPRDFALDVEMKLWRQGSVTTFLAKMHIFFTTFAL

SEQ ID NO: 5139 - protein, 1231 aa, Homo Sapiens; identical to SEQ ID NO: 5138

SEQ ID NO: 5140 - protein, 109 aa, Homo Sapiens
  misc_feature (1)..(1): Xaa can be any naturally occurring amino acid
XIDECAQGAGILCTFRCLNVPGSYQCACPEQGYTMTANGRSCKDVDECALGTHNCSEAETCHNIQGSFRCLRFECPPNYVQVSKTWCVPTQAPSGSLHGGPRPWRVPCG

SEQ ID NO: 5141 - protein, 101 aa, Homo Sapiens
  misc_feature (1)..(1): Xaa can be any naturally occurring amino acid
XVDECALGTHNCSEAETCHNIQGSFRCLRFECPPNYVQVSKTKCERTKWKLARWATAVAGALWVRLGDDLRTRDTRPCWGSWTPLDDPSPKLTFHFMFHCD

SEQ ID NO: 5142 - protein, 44 aa, Homo Sapiens
MPGIKRILTVTILALCLPSPGNAQAQCTNGFDLDRQSGQCLASL

SEQ ID NO: 5143 - protein, 489 aa, Homo Sapiens
MPGIKRILTVTILALCLPSPGNAQAQCTNGFDLDRQSGQCLDGVSLSSPRLECNGAISAHCNLCLPGSSDSSASASQVAGITDIDECRTIPEACRGDMMCVNQNGGYLCIPRTNPVYRGPYSNPYSTPYSGPYPAAAPPLSAPNYPTISRPLICRFGYQMDESNQCVDVDECATDSHQCNPTQICINTEGGYTCSCTDGYWLLEGQCLDIDECRYGYCQQLCANVPGSYSCTCNPGFTLNEDGRSCQDVNECATENPCVQTCVNTYGSFICRCDPGYELEEDGVHCSDMDECSFSEFLCQHECVNQPGTYFCSCPPGYILLDDNRSCQDINECEHRNHTCNLQQTCYNLQGGFKCIDPIRCEEPYLRISDNRCMCPAENPGCRDQPFTILYRDMDVVSGRSVPADIFQMQATTRYPGAYYIFQIKSGNEGREFYMRQTGPISATLVMTRPIKGPREIQLDLEMITVNTVINFRGSSVIRLRIYVSQYPF

SEQ ID NO: 5144 - protein, 91 aa, Homo Sapiens
MPGIKRILTVTILALCLPSPGNAQAQCTNGFDLDRQSGQCLDIDECRTIPEACRGDMMCVNQNGGYLCIPRTNPVYRGPYSNPYSTPYSGP

SEQ ID NO: 5145 - protein, 448 aa, Homo Sapiens
MPGIKRILTVTILALCLPSPGNAQAQCTNGFDLDRQSGQCLDIDECRTIPEACRGDMMCVNQNGGYLCIPRTNPVYRGPYSNPYSTPYSGPYPAAAPPLSAPNYPTISRPLICRFGYQMDESNQCVDVDECATDSHQCNPTQICINTEGGYTCSCTDGYWLLEGQCLDIDECRYGYCQQLCANVPGSYSCTCNPGFTLNEDGRSCQDVNECATENPCVQTCVNTYGSFICRCDPGYELEEDGVHCSDMDECSFSEFLCQHECVNQPGTYFCSCPPGYILLDDNRSCQDINECEHRNHTCNLQQTCYNLQGGFKCIDPIRCEEPYLRISDNRCMCPAENPGCRDQPFTILYRDMDVVSGRSVPADIFQMQATTRYPGAYYIFQIKSGNEGREFYMRQTGPISATLVMTRPIKGPREIQLDLEMITVNTVINFRGSSVIRLRIYVSQYPF

SEQ ID NO: 5146 - protein, 35 aa, Homo Sapiens
MPGIKRILTVTILALCLPSPGNAQQQERWTPVCQP

SEQ ID NO: 5147 - protein, 453 aa, Homo Sapiens
MRSGNCRQRYMILTVTILALCLPSPGNAQAQCTNGFDLDRQSGQCLDIDECRTIPEACRGDMMCVNQNGGYLCIPRTNPVYRGPYSNPYSTPYSGPYPAAAPPLSAPNYPTISRPLICRFGYQMDESNQCVDVDECATDSHQCNPTQICINTEGGYTCSCTDGYWLLEGQCLDIDECRYGYCQQLCANVPGSYSCTCNPGFTLNEDGRSCQDVNECATENPCVQTCVNTYGSFICRCDPGYELEEDGVHCSDMDECSFSEFLCQHECVNQPGTYFCSCPPGYILLDDNRSCQDINECEHRNHTCNLQQTCYNLQGGFKCIDPIRCEEPYLRISDNRCMCPAENPGCRDQPFTILYRDMDVVSGRSVPADIFQMQATTRYPGAYYIFQIKSGNEGREFYMRQTGPISATLVMTRPIKGPREIQLDLEMITVNTVINFRGSSVIRLRIYVSQYPF

SEQ ID NO: 5148 - protein, 261 aa, Homo Sapiens
AGSARTLGTARGGHGAGKGLSPTALLPARVASCARSQKAWPLCIIDVNECELYGQEGRPRLCMHACVNTPGSYRCTCPGGYRTLADGKSCEDVDECVGLQPVCPQGTTCINTGGSFQCVSPECPEGSGNVSYVKTSPFQCERNPCPMDSRPCRHLPKTISFHYLSLPSNLKTPITLFRMATASAPGRAGPNSLRFGIVGGNSRGHFVMQRSDRQTGDLILVQNLEGPQTLEVDVDMSEYLDRSFQANHVSKVTIFVSPYDF

SEQ ID NO: 5149 - protein, 305 aa, Homo Sapiens
MVPSSPRALFLLLLILACPEPRASQNCLSKQQLLSAIRQLQQLLKGQETRFAEGIRHMKSRLAALQNSVGRVGPDALPVSCPALNTPADGRKFGSKYLVDHEVHFTCNPGFRLVGPSSVVCLPNGTWTGEQPHCRDVDECVGLQPVCPQGTTCINTGGSFQCVSPECPEGSGNVSYVKTSPFQCERNPCPMDSRPCRHLPKTISFHYLSLPSNLKTPITLFRMATASAPGRAGPNSLRFGIVGGNSRGHFVMQRSDRQTGDLILVQNLEGPQTLEVDVDMSEYLDRSFQANHVSKVTIFVSPYDF

SEQ ID NO: 5150 - protein, 439 aa, Homo Sapiens
MVPSSPRALFLLLLILACPEPRASQNCLSKQQLLSAIRQLQQLLKGQETRFAEGIRHMKSRLAALQNSVGRVGPDALPVSCPALNTPADGRKFGSKYLVDHEVHFTCNPGFRLVGPSSVVCLPNGTWTGEQPHCRGISECSSQPCQNGGTCVEGVNQYRCICPPGRTGNRCQHQAQTAAPEGSVAGDSAFSRAPRCAQVERAQHCSCEAGFHLSGAAGDSVCQDVNECELYGQEGRPRLCMHACVNTPGSYRCTCPGGYRTLADGKSCEDVDECVGLQPVCPQGTTCINTGGSFQCVSPECPEGSGNVSYVKTSPFQCERNPCPMDSRPCRHLPKTISFHYLSLPSNLKTPITLFRMATASAPGRAGPNSLRFGIVGGNSRGHFVMQRSDRQTGDLILVQNLEGPQTLEVDVDMSEYLDRSFQANHVSKVTIFVSPYDF

SEQ ID NO: 5151 - protein, 366 aa, Homo Sapiens
MVPSSPRALFLLLLILACPEPRASQNCLSKQQLLSAIRQLQQLLKGQETRFAEGIRHMKSRLAALQNSVGRVGPDALPVSCPALNTPADGRKFGSKYLVDHEVHFTCNPGFRLVGPSSVVCLPNGTWTGEQPHCRGISECSSQPCQNGGTCVEGVNQYRCICPPGRTGNRCQHQAQTAAPEGSVAGDSAFSRAPRCAQVERAQHCSCEAGFHLSGAAGDSVCQDVNECELYGQEGRPRLCMHACVNTPGSYRCTCPGGYRTLADGKSCEDVDECVGLQPVCPQGTTCINTGGSFQCVSPECPEGSGNVSYVKTSPLTWRGLRRWRWTSTCRNTWTAPSRPTTCPRSPSLYPPMTSEGTQGHWGVES

SEQ ID NO: 5152 - protein, 393 aa, Homo Sapiens
MVPSSPRALFLLLLILACPEPRASQNCLSKQQLLSAIRQLQQLLKGQETRFAEGIRHMKSRLAALQNSVGRVGPDALPVSCPALNTPADGRKFGSKYLVDHEVHFTCNPGFRLVGPSSVVCLPNGTWTGEQPHCRGISECSSQPCQNGGTCVEGVNQYRCICPPGRTGNRCQHQAQTDVNECELYGQEGRPRLCMHACVNTPGSYRCTCPGGYRTLADGKSCEDVDECVGLQPVCPQGTTCINTGGSFQCVSPECPEGSGNVSYVKTSPFQCERNPCPMDSRPCRHLPKTISFHYLSLPSNLKTPITLFRMATASAPGRAGPNSLRFGIVGGNSRGHFVMQRSDRQTGDLILVQNLEGPQTLEVDVDMSEYLDRSFQANHVSKVTIFVSPYDF

SEQ ID NO: 5153 - protein, 273 aa, Homo Sapiens
RFAEGIRHMKSRLAALQNSVGRVGPDALPGISECSSQPCQNGGTCVEGVNQYRCICPPGRTGNRCQHQAQTAAPEGSVAGDSAFSRAPRCAQVERAQHCSCEAGFHLSGAAGDSVCQDVNECELYGQEGRPRLCMHACVNTPGSYRCTCPGGYRTLADGKSCEDVDECVGLQPVCPQGTTCINTGGSFQCVSPECPEGSGNVSYVKTSPFQCERNPCPMDSRPCRHLPKTISFHYLSLPSNLKTPITLFRMATASAPGRAGPNSLRFGIVGGN

SEQ ID NO: 5154 - protein, 55 aa, Homo Sapiens
MRRGRLLEIALGFTVLLASYTSHGADANLEAGNVKETRASRAKRRGGGGHDALKG

SEQ ID NO: 5155 - protein, 302 aa, Homo Sapiens
MRRGRLLEIALGFTVLLASYTSHGADANLEAGNVKETRASRAKRRGGGGHDALKGPNVCGSRYNAYCCPGWKTLPGGNQCIVPICRHSCGDGFCSRPNMCTCPSGQIAPSCGSRSIQHCNIRCMNGGSCSDDHCLCQKGYIGTHCGQPVCESGCLNGGRCVAPNRCACTYGFTGPQCERDYRTGPCFTVISNQMCQGQLSGIVCTKTLCCATTSMNVKLEHTTVANMLYVPIQQEASNVAAVPGGLEMALSALIWTNVPMEPICAASMQTARIPWDLTAVCARKDTQVMASLVQTLMSALRT

SEQ ID NO: 5156 - protein, 2871 aa, Homo Sapiens
MRRGRLLEIALGFTVLLASYTSHGADANLEAGNVKETRASRAKRRGGGGHDALKGPNVCGSRYNAYCCPGWKTLPGGNQCIVPICRHSCGDGFCSRPNMCTCPSGQIAPSCGSRSIQHCNIRCMNGGSCSDDHCLCQKGYIGTHCGQPVCESGCLNGGRCVAPNRCACTYGFTGPQCERDYRTGPCFTVISNQMCQGQLSGIVCTKTLCCATVGRAWGHPCEMCPAQPHPCRRGFIPNIRTGACQDVDECQAIPGLCQGGNCINTVGSFECKCPAGHKLNEVSQKCEDIDECSTIPGICEGGECTNTVSSYFCKCPPGFYTSPDGTRCIDVRPGYCYTALTNGRCSNQLPQSITKMQCCCDAGRCWSPGVTVAPEMCPIRATEDFNKLCSVPMVIPGRPEYPPPPLGPIPPVLPVPPGFPPGPQIPVPRPPVEYLYPSREPPRVLPVNVTDYCQLVRYLCQNGRCIPTPGSYRCECNKGFQLDLRGECIDVDECEKNPCAGGECINNQGSYTCQCRAGYQSTLTRTECRDIDECLQNGRICNNGRCINTDGSFHCVCNAGFHVTRDGKNCEDMDECSIRNMCLNGMCINEDGSFKCICKPGFQLASDGRYCKDINECETPGICMNGRCVNTDGSYRCECFPGLAVGLDGRVCVDTHMRSTCYGGYKRGQCIKPLFGAVTKSECCCASTEYAFGEPCQPCPAQNSAEYQALCSSGPGMTSAGSDINECALDPDICPNGICENLRGTYKCICNSGYEVDSTGKNCVDINECVLNSLLCDNGQCRNTPGSFVCTCPKGFIYKPDLKTCEDIDECESSPCINGVCKNSPGSFICECSSESTLDPTKTICIETIKGTCWQTVIDGRCEININGATLKSQCCSSLGAAWGSPCTLCQVDPICGKGYSRIKGTQCEDIDECEVFPGVCKNGLCVNTRGSFKCQCPSGMTLDATGRICLDIRLETCFLRYEDEECTLPIAGRHRMDACCCSVGAAWGTEECEECPMRNTPEYEELCPRGPGFATKEITNGKPFFKDINECKMIPSLCTHGKCRNTIGSFKCRCDSGFALDSEERNCTDIDECRISPDLCGRGQCVNTPGDFECKCDEGYESGFMMMKNCMDIDECQRDPLLCRGGVCHNTEGSYRCECPPGHQLSPNISACIDINECELSAHLCPNGRCVNLIGKYQCACNPGYHSTPDRLFCVDIDECSIMNGGCETFCTNSEGSYECSCQPGFALMPDQRSCTDIDECEDNPNICDGGQCTNIPGEYRCLCYDGFMASEDMKTCVDVNECDLNPNICLSGTCENTKGSFICHCDMGYSGKKGKTGCTDINECEIGAHNCGKHAVCTNTAGSFKCSCSPGWIGDGIKCTDLDECSNGTHMCSQHADCKNTMGSYRCLCKEGYTGDGFTCTDLDECSENLNLCGNGQCLNAPGGYRCECDMGFVPSADGKACEDIDECSLPNICVFGTCHNLPGLFRCECEIGYELDRSGGNCTDVNECLDPTTCISGNCVNTPGSYICDCPPDFELNPTRVGCVDTRSGNCYLDIRPRGDNGDTACSNEIGVGVSKASCCCSLGKAWGTPCEMCPAVNTSEYKILCPGGEGFRPNPITVILEDIDECQELPGLCQGGKCINTFGSFQCRCPTGYYLNEDTRVCDDVNECETPGICGPGTCYNTVGNYTCICPPDYMQVNGGNNCMDMRRSLCYRNYYADNQTCDGELLFNMTKKMCCCSYNIGRAWNKPCEQCPIPSTDEFATLCGSQRPGFVIDIYTGLPVDIDECREIPGVCENGVCINMVGSFRCECPVGFFYNDKLLVCEDIDECQNGPVCQRNAECINTAGSYRCDCKPGYRFTSTGQCNDRNECQEIPNICSHGQCIDTVGSFYCLCHTGFKTNDDQTMCLDINECERDACGNGTCRNTIGSFNCRCNHGFILSHNNDCIDVDECASGNGNLCRNGQCINTVGSFQCQCNEGYEVAPDGRTCVDINECLLEPRKCAPGTCQNLDGSYRCICPPGYSLQNEKCEDIDECVEEPEICALGTCSNTEGSFKCLCPEGFSLSSSGRRCQDLRMSYCYAKFEGGKCSSPKSRNHSKQECCCALKGEGWGDPCELCPTEPDEAFRQICPYGSGIIVGPDDSAVDMDECKEPDVCKHGQCINTDGSYRCECPFGYILAGNECVDTDECSVGNPCGNGTCKNVIGGFECTCEEGFEPGPMMTCEDINECAQNPLLCAFRCVNTYGSYECKCPVGYVLREDRRMCKDEDECEEGKHDCTEKQMECKNLIGTYMCICGPGYQRRPDGEGCVDENECQTKPGICENGRCLNTRGSYTCECNDGFTASPNQDECLDNREGYCFTEVLQNMCQIGSSNRNPVTKSECCCDGGRGWGPHCEICPFQGTVAFKKLCPHGRGFMTNGADIDECKVIHDVCRNGECVNDRGSYHCICKTGYTPDITGTSCVDLNECNQAPKPCNFICKNTEGSYQCSCPKGYILQEDGRSCKDLDECATKQHNCQFLCVNTIGGFTCKCPPGFTQHHTSCIDNNECTSDINLCGSKGICQNTPGSFTCECQRGFSLDQTGSSCEDVDECEGNHRCQHGCQNIIGGYRCSCPQGYLQHYQWNQCVDENECLSAHICGGASCHNTLGSYKCMCPAGFQYEQFSGGCQDINECGSAQAPCSYGCSNTEGGYLCGCPPGYFRIGQGHCVSGMGMGRGNPEPPVSGEMDDNSLSPEACYECKINGYPKRGRKRRSTNETDASNIEDQSETEANVSLASWDVEKTAIFAFNISHVSNKVRILELLPALTTLTNHNRYLIESGNEDGFFKINQKEGISYLHFTKKKPVAGTYSLQISSTPLYKKKELNQLEDKYDKDYLSGELGDNLKMKIQVLLH

SEQ ID NO: 5157 - protein, 853 aa, Homo Sapiens
  misc_feature (1)..(1): Xaa can be any naturally occurring amino acid
XLGKAWGTPCEMCPAVNTSEYKILCPGGEGFRPNPITVILEDIDECQELPGLCQGGKCINTFGSFQCRCPTGYYLNEDTRVCDDVNECETPGICGPGTCYNTVGNYTCICPPDYMQVNGGNNCMDMRRSLCYRNYYADNQTCDGELLFNMTKKMCCCSYNIGRAWNKPCEQCPIPSTDEFATLCGSQRPGFVIDIYTGLPVDIDECREIPGVCENGVCINMVGSFRCECPVGFFYNDKLLVCEDIDECQNGPVCQRNAECINTAGSYRCDCKPGYRFTSTGQCNDRNECQEIPNICSHGQCIDTVGSFYCLCHTGFKTNDDQTMCLDINECERDACGNGTCRNTIGSFNCRCNHGFILSHNNDCIDVDECASGNGNLCRNGQCINTVGSFQCQCNEGYEVAPDGRTCVDINECLLEPRKCAPGTCQNLDGSYRCICPPGYSLQNEKCEDIDECVEEPEICALGTCSNTEGSFKCLCPEGFSLSSSGRRCQDLRMSYCYAKFEGGKCSSPKSRNHSKQECCCALKGEGWGDPCELCPTEPDEAFRQICPYGSGIIVGPDDSAVDMDECKEPDVCKHGQCINTDGSYRCECPFGYILAGNECVDTDECSVGNPCGNGTCKNVIGGFECTCEEGFEPGPMMTCEDINECAQNPLLCAFRCVNTYGSYECKCPVGYVLREDRRMCKDEDECEEGKHDCTEKQMECKNLIGTYMCICGPGYQRRPDGEGCVDENECQTKPGICENGRCLNTRGSYTCECNDGFTASPNQDECLDVILSLLLLSPAFPSCFFSPRTIGKGTASQRCYKTCVRSAPATGTPSPNRNAAVTEGEAGVPTVRSALSRGLWLSRNSVPMAEDS

SEQ ID NO: 5158 - protein, 1473 aa, Homo Sapiens
MGRRRRLCLQLYFLWLGCVVLWAQGTAGQPQPPPPKPPRPQPPPQQVRSATAGSEGGFLAPEYREEGAAVASRVRRRGQQDVLRGPNVCGSRFHSYCCPGWKTLPGGNQCIVLQQCSVRCMNGGTCADDHCQCQKGYIGTYCGQPVCENGCQNGGRCIGPNRCACVYGFTGPQCERDYRTGPCFTQVNNQMCQGQLTGIVCTKTLCCATIGRAWGHPCEMCPAQPQPCRRGFIPNIRTGACQDVDECQAIPGICQGGNCINTVGSFECRCPAGHKQSETTQKCEDIDECSIIPGICETGECSNTVGSYFCVCPRGYVTSTDGSRCIDQRTGMCFSGLVNGRCAQELPGRMTKMQCCCEPGRCWGIGTIPEACPVRGSEEYRRLCMDGLPMGGIPGSAGSRPGGTGGNGFAPSGNGNGYGPGGTGFIPIPGGNGFSPGVGGAGVGAGGQGPIITGLTILNQTIDICKHHANLCLNGRCIPTVSSYRCECNMGYKQDANGDCIDVDECTSNPCTNGDCVNTPGSYYCKCHAGFQRTPTKQACIDIDECIQNGVLCKNGRCVNTDGSFQCICNAGFELTTDGKNCVDHDECTTTNMCLNGMCINEDGSFKCICKPGFVLAPNGRYCTDVDECQTPGICMNGHCINSEGSFRCDCPPGLAVGMDGRVCVDTHMRSTCYGGIKKGVCVRPFPGAVTKSECCCANPDYGFGEPCQPCPAKNSAEFHGLCSSGVGITVDGRDINECALDPDICANGICENLRGSYRCNCNSGYEPDASGRNCIDIDECLVNRLLCDNGLCRNTPGSYSCTCPPGYVFRTETETCEDINECESNPCVNGACRNNLGSFNCECSPGSKLSSTGLICIDSLKGTCWLNIQDSRCEVNINGATLKSECCATLGAAWGSPCERCELDTACPRGLARIKGVTCEDVNECEVFPGVCPNGRCVNSKGSFHCECPEGLTLDGTGRVCLDIRMEQCYLKWDEDECIHPVPGKFRMDACCCAVGAAWGTECEECPKPGTKEYETLCPRGAGFANRGDVLTGRPFYKDINECKAFPGMCTYGKCRNTIGSFKCRCNSGFALDMEERNCTDIDECRISPDLCGSGICVNTPGSFECECFEGYESGFMMMKNCMDIDECERNPLLCRGGTCVNTEGSFQCDCPLGHELSPSREDCVDINECSLSDNLCRNGKCVNMIGTYQCSCNPGYQATPDRQGCTDIDECMIMNGGCDTQCTNSEGSYECSCSEGYALMPDGRSCADIDECENNPDICDGGQCTNIPGEYRCLCYDGFMASMDMKTCIDVNECDLNSNICMFGECENTKGSFICHCQLGYSVKKGTTGCTDVDECEIGAHNCDMHASCLNIPGSFKCSCREGWIGNGIKCIDLDECSNGTHQCSINAQCVNTPGSYRCACSEGFTGDGFTCSDVDECAENINLCENGQCLNVPGAYRCECEMGFTPASDSRSCQGGSPGFQLIFKLDQPQ

SEQ ID NO: 5159 - protein, 2912 aa, Homo Sapiens
MGRRRRLCLQLYFLWLGCVVLWAQGTAGQPQPPPPKPPRPQPPPQQVRSATAGSEGGFLAPEYREEGAAVASRVRRRGQQDVLRGPNVCGSRFHSYCCPGWKTLPGGNQCIVPICRNSCGDGFCSRPNMCTCSSGQISSTCGSKSIQQCSVRCMNGGTCADDHCQCQKGYIGTYCGQPVCENGCQNGGRCIGPNRCACVYGFTGPQCERDYRTGPCFTQVNNQMCQGQLTGIVCTKTLCCATIGRAWGHPCEMCPAQPQPCRRGFIPNIRTGACQDVDECQAIPGICQGGNCINTVGSFECRCPAGHKQSETTQKCEDIDECSIIPGICETGECSNTVGSYFCVCPRGYVTSTDGSRCIDQRTGMCFSGLVNGRCAQELPGRMTKMQCCCEPGRCWGIGTIPEACPVRGSEEYRRLCMDGLPMGGIPGSAGSRPGGTGGNGFAPSGNGNGYGPGGTGFIPIPGGNGFSPGVGGAGVGAGGQGPIITGLTILNQTIDICKHHANLCLNGRCIPTVSSYRCECNMGYKQDANGDCIDVDECTSNPCTNGDCVNTPGSYYCKCHAGFQRTPTKQACIDIDECIQNGVLCKNGRCVNTDGSFQCICNAGFELTTDGKNCVDHDECTTTNMCLNGMCINEDGSFKCICKPGFVLAPNGRYCTDVDECQTPGICMNGHCINSEGSFRCDCPPGLAVGMDGRVCVDTHMRSTCYGGIKKGVCVRPFPGAVTKSECCCANPDYGFGEPCQPCPAKNSAEFHGLCSSGVGITVDGRDINECALDPDICANGICENLRGSYRCNCNSGYEPDASGRNCIDIDECLVNRLLCDNGLCRNTPGSYSCTCPPGYVFRTETETCEDINECESNPCVNGACRNNLGSFNCECSPGSKLSSTGLICIDSLKGTCWLNIQDSRCEVNINGATLKSECCATLGAAWGSPCERCELDTACPRGLARIKGVTCEDVNECEVFPGVCPNGRCVNSKGSFHCECPEGLTLDGTGRVCLDIRMEQCYLKWDEDECIHPVPGKFRMDACCCAVGAAWGTECEECPKPGTKEYETLCPRGAGFANRGDVLTGRPFYKDINECKAFPGMCTYGKCRNTIGSFKCRCNSGFALDMEERNCTDIDECRISPDLCGSGICVNTPGSFECECFEGYESGFMMMKNCMDIDECERNPLLCRGGTCVNTEGSFQCDCPLGHELSPSREDCVDINECSLSDNLCRNGKCVNMIGTYQCSCNPGYQATPDRQGCTDIDECMIMNGGCDTQCTNSEGSYECSCSEGYALMPDGRSCADIDECENNPDICDGGQCTNIPGEYRCLCYDGFMASMDMKTCIDVNECDLNSNICMFGECENTKGSFICHCQLGYSVKKGTTGCTDVDECEIGAHNCDMHASCLNIPGSFKCSCREGWIGNGIKCIDLDECSNGTHQCSINAQCVNTPGSYRCACSEGFTGDGFTCSDVDECAENINLCENGQCLNVPGAYRCECEMGFTPASDSRSCQDIDECSFQNICVFGTCNNLPGMFHCICDDGYELDRTGGNCTDIDECADPINCVNGLCVNTPGRYECNCPPDFQLNPTGVGCVDNRVGNCYLKFGPRGDGSLSCNTEIGVGVSRSSCCCSLGKAWGNPCETCPPVNSTEYYTLCPGGEGFRPNPITIILEDIDECQELPGLCQGGNCINTFGSFQCECPQGYYLSEDTRICEDIDECFAHPGVCGPGTCYNTLGNYTCICPPEYMQVNGGHNCMDMRKSFCYRSYNGTTCENELPFNVTKRMCCCTYNVGKAWNKPCEPCPTPGTADFKTICGNIPGFTFDIHTGKAVDIDECKEIPGICANGVCINQIGSFRCECPTGFSYNDLLLVCEDIDECSNGDNLCQRNADCINSPGSYRCECAAGFKLSPNGACVDRNECLEIPNVCSHGLCVDLQGSYQCICHNGFKASQDQTMCMDVDECERHPCGNGTCKNTVGSYNCLCYPGFELTHNNDCLDIDECSSFFGQVCRNGRCFNEIGSFKCLCNEGYELTPDGKNCIDTNECVALPGSCSPGTCQNLEGSFRCICPPGYEVKSENCIDINECDEDPNICLFGSCTNTPGGFQCLCPPGFVLSDNGRRCFDTRQSFCFTNFENGKCSVPKAFNTTKAKCCCSKMPGEGWGDPCELCPKDDEVAFQDLCPYGHGTVPSLHDTREDVNECLESPGICSNGQCINTDGSFRCECPMGYNLDYTGVRCVDTDECSIGNPCGNGTCTNVIGSFECNCNEGFEPGPMMNCEDINECAQNPLLCAFRCMNTFGSYECTCPIGYALREDQKMCKDLDECAEGLHDCESRGMMCKNLIGTFMCICPPGMARRPDGEGCVDENECRTKPGICENGRCVNIIGSYRCECNEGFQSSSSGTECLDNRQGLCFAEVLQTICQMASSSRNLVTKSECCCDGGRGWGHQCELCPLPGTAQYKKICPHGPGYTTDGRDIDECKVMPNLCTNGQCINTMGSFRCFCKVGYTTDISGTSCIDLDECSQSPKPCNYICKNTEGSYQCSCPRGYVLQEDGKTCKDLDECQTKQHNCQFLCVNTLGGFTCKCPPGFTQHHTACIDNNECGSQPSLCGAKGICQNTPGSFSCECQRGFSLDATGLNCEDVDECDGNHRCQHGCQNILGGYRCGCPQGYIQHYQWNQCVDENECSNPNACGSASCYNTLGSYKCACPSGFSFDQFSSACHDVNECSSSKNPCNYGCSNTEGGYLCGCPPGYYRVGQGHCVSGMGFNKGQYLSLDTEVDEENALSPEACYECKINGYSKKDSRQKRSIHEPDPTAVEQISLESVDMDSPVNMKFNLSHLGSKEHILELRPAIQPLNNHIRYVISQGNDDSVFRIHQRNGLSYLHTAKKKLMPGTYTLEITSIPLYKKKELKKLEESNEDDYLLGELGEALRMRLQIQLY

SEQ ID NO: 5160 - protein, 341 aa, Homo Sapiens
MGRRRRLCLQLYFLWLGCVVLWAQGTAGQPQPPPPKPPRPQPPPQQVRSATAGSEGGFLAPEYREEGAAVASRVRRRGQQDVLRGPNVCGSRFHSYCCPGWKTLPGGNQCIVPICRNSCGDGFCSRPNMCTCSSGQISSTCGSKSIQQCSVRCMNGGTCADDHCQCQKGYIGTYCGQPVCENGCQNGGRCIGPNRCACVYGFTGPQCERDYRTGPCFTQVNNQMCQGQLTGIVCTKTLCCATIGRAWGHPCEMCPAQPQPCRRGFIPNIRTGACQDVDECQAIPGICQGGNCINTVGSFECRCPAGHKQSETTQKCEVHVDKAQAGARCPCVILPSRLYLR

SEQ ID NO: 5161 - protein, 2912 aa, Homo Sapiens; identical to SEQ ID NO: 5159

SEQ ID NO: 5162 - protein, 2911 aa, Homo Sapiens
MGRRRRLCLQLYFLWLGCVVLWAQGTAGQPQPPPPKPPRPQPPPQQVRSATAGSEGGFLAPEYREEGAAVASRVRRRGQQDVLRGPNVCGSRFHSYCCPGWKTLPGGNQCIVPICRNSCGDGFCSRPNMCTCSSGQISSTCGSKSIQQCSVRCMNGGTCADDHCQCQKGYIGTYCGQPVCENGCQNGGRCITQPCACVYGFTGPQCERDYRTGPCFTQVNNQMCQGQLTGIVCTKTLCCATIGRAWGHPCEMCPAQPQPCRRGFIPNIRTGACQDVDECQAIPGICQGGNCINTVGSFECRCPAGHKQSETTQKCEDIDECSIIPGICETGECSNTVGSYFCVCPRGYVTSTDGSRCIDQRTGMCFSGLVNGRCAQELPGRMTKMQCCCEPGRCWGIGTIPEACPVRGSEEYRRLCMDGLPMGGIPGSAGSRPGGTGGNGFAPSGNGNGYGPGGTGFIPIPGGNGFSPGVGGAGVGAGGQGPIITGLTILNQTIDICKHHANLCLNGRCIPTVSSYRCECNMGYKQDANGDCIDVDECTSNPCTNGDCVNTPGSYYCKCHAGFQRTPTKQACIDIDECIQNGVLCKNGRCVNTDGSFQCICNAGFELTTDGKNCVDHDECTTTNMCLNGMCINEDGSFKCICKPGFVLAPNGRYCTDVDECQTPGICMNGHCINSEGSFRCDCPPGLAVGMDGRVCVDTHMRSTCYGGIKKGVCVRPFPGAVTKSECCCANPDYGFGEPCQPCPAKNSAEFHGLCSSGVGITVDGRDINECALDPDICANGICENLRGSYRCNCNSGYEPDASGRNCIDIDECLVNRLLCDNGLCRNTPGSYSCTCPPGYVFRTETETCEDINECESNPCVNGACRNNLGSFNCECSPGSKLSSTGLICIDSLKGTCWLNIQDSRCEVNINGATLKSECCATLGAAWGSPCERCELDTACPRGLARIKGVTCEDVNECEVFPGVCPNGRCVNSKGSFHCECPEGLTLDGTGRVCLDIRMEQCYLKWDEDECIHPVPGKFRMDACCCAVGAAWGTECEECPKPGTKEYETLCPRGAGFANRGDVLTGRPFYKDINECKAFPGMCTYGKCRNTIGSFKCRCNSGFALDMEERNCTDIDECRISPDLCGSGICVNTPGSFECECFEGYESGFMMMKNCMDIDECERNPLLCRGGTCVNTEGSFQCDCPLGHELSPSREDCVDINECSLSDNLCRNGKCVNMIGTYQCSCNPGYQATPDRQGCTDIDECMIMNGGCDTQCTNSEGSYECSCSEGYALMPDGRSCADIDECENNPDICDGGQCTNIPGEYRCLCYDGFMASMDMKTCIDVNECDLNSNICMFGECENTKGSFICHCQLGYSVKKGTTGCTDVDECEIGAHNCDMHASCLNIPGSFKCSCREGWIGNGIKCIDLDECSNGTHQCSINAQCVNTPGSYRCACSEGFTGDGFTCSDVDECAENINLCENGQCLNVPGAYRCECEMGFTPASDSRSCQDIDECSFQNICVFGTCNNLPGMFHCICDDGYELDRTGGNCTDIDECADPINCVNGLCVNTPGRYECNCPPDFQLNPTGVGCVDNRVGNCYLKFGPRGDGSLSCNTEIGVGVSRSSCCCSLGKAWGNPCETCPPVNSTEYYTLCPGGEGFRPNPITIILEDIDECQELPGLCQGGNCINTFGSFQCECPQGYYLSEDTRICEDIDECFAHPGVCGPGTCYNTLGNYTCICPPEYMQVNGGHNCMDMRKSFCYRSYNGTTCENELPFNVTKRMCCCTYNVGKAWNKPCEPCPTPGTADFKTICGNIPGFTFDIHTGKAVDIDECKEIPGICANGVCINQIGSFRCECPTGFSYNDLLLVCEDIDECSNGDNLCQRNADCINSPGSYRCECAAGFKLSPNGACVDRNECLEIPNVCSHGLCVDLQGSYQCICHNGFKASQDQTMCMDVDECERHPCGNGTCKNTVGSYNCLCYPGFELTHNNDCLDIDECSSFFGQVCRNGRCFNEIGSFKCLCNEGYELTPDGKNCIDTNECVALPGSCSPGTCQNLEGSFRCICPPGYEVKSENCIDINECDEDPNICLFGSCTNTPGGFQCLCPPGFVLSDNGRRCFDTRQSFCFTNFENGKCSVPKAFNTTKAKCCCSKMPGEGWGDPCELCPKDDEVAFQDLCPYGHGTVPSLHDTREDVNECLESPGICSNGQCINTDGSFRCECPMGYNLDYTGVRCVDTDECSIGNPCGNGTCTNVIGSFECNCNEGFEPGPMMNCEDINECAQNPLLCAFRCMNTFGSYECTCPIGYALREDQKMCKDLDECAEGLHDCESRGMMCKNLIGTFMCICPPGMARRPDGEGCVDENECRTKPGICENGRCVNIIGSYRCECNEGFQSSSSGTECLDNRQGLCFAEVLQTICQMASSSRNLVTKSECCCDGGRGWGHQCELCPLPGTAQYKKICPHGPGYTTDGRDIDECKVMPNLCTNGQCINTMGSFRCFCKVGYTTDISGTSCIDLDECSQSPKPCNYICKNTEGSYQCSCPRGYVLQEDGKTCKDLDECQTKQHNCQFLCVNTLGGFTCKCPPGFTQHHTACIDNNECGSQPSLCGAKGICQNTPGSFSCECQRGFSLDATGLNCEDVDECDGNHRCQHGCQNILGGYRCGCPQGYIQHYQWNQCVDENECSNPNACGSASCYNTLGSYKCACPSGFSFDQFSSACHDVNECSSSKNPCNYGCSNTEGGYLCGCPPGYYRVGQGHCVSGMGFNKGQYLSLDTEVDEENALSPEACYECKINGYSKKDSRQKRSIHEPDPTAVEQISLESVDMDSPVNMKFNLSHLGSKEHILELRPAIQPLNNHIRYVISQGNDDSVFRIHQRNGLSYLHTAKKKLMPGTYTLEITSIPLYKKKELKKLEESNEDDYLLGELGEALRMRLQIQLY

SEQ ID NO: 5163 - protein, 356 aa, Homo Sapiens
MMMKNCMDIDECERNPLLCRGGTCVNTEGSFQCDCPLGHELSPSREDCVDINECSLSDNLCRNGKCVNMIGTYQCSCNPGYQATPDRQGCTDIDECMIMNGGCDTQCTNSEGSYECSCSEGYALMPDGRSCADIDECENNPDICDGGQCTNIPGEYRCLCYDGFMASMDMKTCIDVNECDLNSNICMFGECENTKGSFICHCQLGYSVKKGTTGCTDVDECEIGAHNCDMHASCLNIPGSFKCSCREGWIGNGIKCIDLDECSNGTHQCSINAQCVNTPGSYRCACSEGFTGDGFTCSDVDECAENINLCENGQCLNVPGAYRCECEMGFTPASDSRSCQGGSPGFQLIFKLDQPQ

SEQ ID NO: 5164 - protein, 2809 aa, Homo Sapiens
MTLEGLYLARGPLARLLLAWSALLCMAGGQGRWDGALEAAGPGRVRRRGSPGILQGPNVCGSRFHAYCCPGWRTFPGRSQCVVPICRRACGEGFCSQPNLCTCADGTLAPSCGVSRGSGCSVSCMNGGTCRGASCLCQKGYTGTVCGQPICDRGCHNGGRCIGPNRCACVYGFMGPQCERDYRTGPCFGQVGPEGCQHQLTGLVCTKALCCATVGRAWGLPCELCPAQPHPCRRGFIPNIHTGACQDVDECQAVPGLCQGGSCVNMVGSFHCRCPVGHRLSDSSAACEDYRAGACFSVLFGGRCAGDLAGHYTRRQCCCDRGRCWAAGPVPELCPPRGSNEFQQLCAQRLPLLPGHPGLFPGLLGFGSNGMGPPLGPARLNPHGSDARGIPSLGPGNSNIGTATLNQTIDICRHFTNLCLNGRCLPTPSSYRCECNVGYTQDVRGECIDVDECTSSPCHHGDCVNIPGTYHCRCYPGFQATPTRQACVDVDECIVSGGLCHLGRCVNTEGSFQCVCNAGFELSPDGKNCVDHNECATSTMCVNGVCLNEDGSFSCLCKPGFLLAPGGHYCMDIDECQTPGICVNGHCTNTEGSFRCQCLGGLAVGTDGRVCVDTHVRSTCYGAIEKGSCARPFPGTVTKSECCCANPDHGFGEPCQLCPAKDSAEFQALCSSGLGITTDGRDINECALDPEVCANGVCENLRGSYRCVCNLGYEAGASGKDCTDVDECALNSLLCDNGWCQNSPGSYSCSCPPGFHFWQDTEICKDVDECLSSPCVSGVCRNLAGSYTCKCGPGSRLDPSGTFCLDSTKGTCWLKIQESRCEVNLQGASLRSECCATLGAAWGSPCERCEIDPACARGFARMTGVTCDDVNECESFPGVCPNGRCVNTAGSFRCECPEGLMLDASGRLCVDVRLEPCFLRWDEDECGVTLPGKYRMDVCCCSIGAVWGVECEACPDPESLEFASLCPRGLGFASRDFLSGRPFYKDVNECKVFPGLCTHGTCRNTVGSFHCACAGGFALDAQERNCTDIDECRISPDLCGQGTCVNTPGSFECECFPGYESGFMLMKNCMDVDECARDPLLCRGGTCTNTDGSYKCQCPPGHELTAKGTACEDIDECSLSDGLCPHGQCVNVIGAFQCSCHAGFQSTPDRQGCVDINECRVQNGGCDVHCINTEGSYRCSCGQGYSLMPDGRACADVDECEENPRVCDQGHCTNMPGGHRCLCYDGFMATPDMRTCVDVDECDLNPHICLHGDCENTKGSFVCHCQLGYMVRKGATGCSDVDECEVGGHNCDSHASCLNIPGSFSCRCLPGWVGDGFECHDLDECVSQEHRCSPRGDCLNVPGSYRCTCRQGFAGDGFFCEDRDECAENVDLCDNGQCLNAPGGYRCECEMGFDPTEDHRACQDVDECAQGNLCAFGSCENLPGMFRCICNGGYELDRGGGNCTDINECADPVNCINGVCINTPGSYLCSCPQDFELNPSGVGCVDTRAGNCFLETHDRGDSGISCSAEIGVGVTRASCCCSLGRAWGNPCELCPMANTTEYRTLCPGGEGFQPNRITVILEDIDECQELPGLCQGGDCVNTFGSFQCECPPGYHLSEHTRICEDIDECSTHSGICGPGTCYNTLGNYTCVCPAEYLQVNGGNNCMDMRKSVCFRHYNGTCQNELAFNVTRKMCCCSYNIGQAWNRPCEACPTPISPDYQILCGNQAPGFLTDIHTGKPLDIDECGEIPAICANGICINQIGSFRCECPAGFNYNSILLACEDVDECGSRESPCQQNADCINIPGSYRCKCTRGYKLSPGGACVGRNECREIPNVCSHGDCMDTEGSYMCLCHRGFQASADQTLCMDIDECDRQPCGNGTCKNIIGSYNCLCFPGFVVTHNGDCVDFDECTTLVGQVCRFGHCLNTAGSFHCLCQDGFELTADGKNCVDTNECLSLAGTCLPGTCQNLEGSFRCICPPGFQVQSDHCIDIDECSEEPNLCLFGTCTNSPGSFQCLCPPGFVLSDNGHRCFDTRQSFCFTRFEAGKCSVPKAFNTTKTRCCCSKRPGEGWGDPCELCPQEGSAAFQELCPFGHGAVPGPDDSREDVNECAENPGVCTNGVCVNTDGSFRCECPFGYSLDFTGINCVDTDECSVGHPCGQGTCTNVIGGFECACADGFEPGLMMTCEDIDECSLNPLLCAFRCHNTEGSYLCTCPAGYTLREDGAMCRDVDECADGQQDCHARGMECKNLIGTFACVCPPGMRPLPGSGEGCTDDNECHAQPDLCVNGRCVNTAGSFRCDCDEGFQPSPTLTECHDIRQGPCFAEVLQTMCRSLSSSSEAVTRAECCCGGGRGWGPRCELCPLPGTSAYRKLCPHGSGYTAEGRDVDECRMLAHLCAHGECINSLGSFRCHCQAGYTPDATATTCLDMDECSQVPKPCTFLCKNTKGSFLCSCPRGYLLEEDGRTCKDLDECTSRQHNCQFLCVNTVGAFTCRCPPGFTQHHQACFDNDECSAQPGPCGAHGHCHNTPGSFRCECHQGFTLVSSGHGCEDVNECDGPHRCQHGCQNQLGGYRCSCPQGFTQHSQWAQCVDENECALSPPTCGSASCRNTLGGFRCVCPSGFDFDQALGGCQEVDECAGRRGPCSYSCANTPGGFLCGCPQGYFRAGQGHCVSGLGFSPGPQDTPDKEELLSSEACYECKINGLSPRDRPRRSAHRDHQVNLATLDSEALLTLGLNLSHLGRAERILELRPALEGLEGRIRYVIVRGNEQGFFRMHHLRGVSSLQLGRRRPGPGTYRLEVVSHMAGPWGVQPEGQPGPWGQALRLKVQLQLL

SEQ ID NO: 5165 - protein, 2809 aa, Homo Sapiens; identical to SEQ ID NO: 5164

SEQ ID NO: 5166 - protein, 2809 aa, Homo Sapiens; identical to SEQ ID NO: 5164

SEQ ID NO: 5167 - protein, 171 aa, Homo Sapiens
  misc_feature (1)..(1): Xaa can be any naturally occurring amino acid
XFTRFEAGKCSVPKAFNTTKTRCCCSKRPGEGWGDPCELCPQEGSDVNECAENPGVCTNGVCVNTDGSFRCECPFGYSLDFTGINCVDTDECSVGHPCGQGTCTNVIGGFECACADGFEPGLMMTCEDIDECSLNPLLCAFRCHNTEGSYLCTCPAGYTLREDGAMCRDVD

SEQ ID NO: 5168 - protein, 188 aa, Homo Sapiens
  misc_feature (1)..(1): Xaa can be any naturally occurring amino acid
XYQILCGNQAPGFLTDIHTGKPLDVDECGSRESPCQQNADCINIPGSYRCKCTRGYKLSPGGACVGRNECREIPNVCSHGDCMDTEGSYMCLCHRGFQASADQTLCMDIDECDRQPCGNGTCKNIIGSYNCLCFPGFVVTHNGDCVDFDECTTLVGQVCRFGHCLNTAGSFHCLCQDGFELTADGKNC

SEQ ID NO: 5169 - protein, 627 aa, Homo Sapiens
MCVPRSGLILSCICLYCGVLLPVLLPNLPFLTCLSMSTLESVTYLPEKGLYCQRLPSSRTHGGTESLKGKNTENMGFYGTLKMIFYKMKRKLDHGSEVRSFSLGKKPCKVSEYTSTTGLVPCSATPTTFGDLRAANGQGQQRRRITSVQPPTGLQEWLKMFQSWSGPEKLLALDELIDSCEPTQVKHMMQVIEPQFQRDFISLLPKELALYVLSFLEPKDLLQAAQTCRYWRILAEDNLLWREKCKEEGIDEPLHIKRRKVIKPGFIHSPWKSAYIRQHRIDTNWRRGELKSPKVLKGHDDHVITCLQFCGNRIVSGSDDNTLKVWSAVTGKCLRTLVGHTGGVWSSQMRDNIIISGSTDRTLKVWNAETGECIHTLYGHTSTVRCMHLHEKRVVSGSRDATLRVWDIETGQCLHVLMGHVAAVRCVQYDGRRVVSGAYDFMVKVWDPETETCLHTLQGHTNRVYSLQFDGIHVVSGSLDTSIRVWDVETGNCIHTLTGHQSLTSGMELKDNILVSGNADSTVKIWDIKTGQCLQTLQGPNKHQSAVTCLQFNKNFVITSSDDGTVKLWDLKTGEFIRNLVTLESGGSGGVVWRIRASNTKLVCAVGSRNGTEETKLLVLDFDVDMK

SEQ ID NO: 5170 - protein, 627 aa, Homo Sapiens; identical to SEQ ID NO: 5169

SEQ ID NO: 5171 - protein, 70 aa, Homo Sapiens
MNQELLSVGSKRRRTGGSLRGNPSSSQVDEEQMNRVVEEEQQQQLRQQEEEHTARNGEVVGVEPRPGGQN

SEQ ID NO: 5172 - protein, 70 aa, Homo Sapiens; identical to SEQ ID NO: 5171

SEQ ID NO: 5173 - protein, 70 aa, Homo Sapiens; identical to SEQ ID NO: 5171

SEQ ID NO: 5174 - protein, 158 aa, Homo Sapiens
MNQELLSVGSKRRRTGGSLRGNPSSSQVDEEQMNRVVEEEQQQQLRQQEEEHTARNGEVVGVEPRPGGQNDSQQGQLEENNNRFISVDEDSSGNQEEQEEDEEHAGEQDEEDEEEEEMDQESDDFDQSDDSSREDEHTHTNSVTNSSSIVDLPVHQLS

SEQ ID NO: 5175 - protein, 707 aa, Homo Sapiens
MNQELLSVGSKRRRTGGSLRGNPSSSQVDEEQMNRVVEEEQQQQLRQQEEEHTARNGEVVGVEPRPGGQNDSQQGQLEENNNRFISVDEDSSGNQEEQEEDEEHAGEQDEEDEEEEEMDQESDDFDQSDDSSREDEHTHTNSVTNSSSIVDLPVHQLSSPFYTKTTKMKRKLDHGSEVRSFSLGKKPCKVSEYTSTTGLVPCSATPTTFGDLRAANGQGQQRRRITSVQPPTGLQEWLKMFQSWSGPEKLLALDELIDSCEPTQVKHMMQVIEPQFQRDFISLLPKELALYVLSFLEPKDLLQAAQTCRYWRILAEDNLLWREKCKEEGIDEPLHIKRRKVIKPGFIHSPWKSAYIRQHRIDTNWRRGELKSPKVLKGHDDHVITCLQFCGNRIVSGSDDNTLKVWSAVTGKCLRTLVGHTGGVWSSQMRDNIIISGSTDRTLKVWNAETGECIHTLYGHTSTVRCMHLHEKRVVSGSRDATLRVWDIETGQCLHVLMGHVAAVRCVQYDGRRVVSGAYDFMVKVWDPETETCLHTLQGHTNRVYSLQFDGIHVVSGSLDTSIRVWDVETGNCIHTLTGHQSLTSGMELKDNILVSGNADSTVKIWDIKTGQCLQTLQGPNKHQSAVTCLQFNKNFVITSSDDGTVKLWDLKTGEFIRNLVTLESGGSGGVVWRIRASNTKLVCAVGSRNGTEETKLLVLDFDVDMK

SEQ ID NO: 5176 - protein, 707 aa, Homo Sapiens; identical to SEQ ID NO: 5175

SEQ ID NO: 5177 - protein, 707 aa, Homo Sapiens; identical to SEQ ID NO: 5175

SEQ ID NO: 5178 - protein, 176 aa, Homo Sapiens
MNQELLSVGSKRRRTGGSLRGNPSSSQVDEEQMNRVVEEEQQQQLRQQEEEHTARNGEVVGVEPRPGGQNDSQQGQLEENNNRFISVDEDSSGNQEEQEEDEEHAGEQDEEDEEEEEMDQESDDFDQSDDSSREDEHTHTNSVTNSSSIVDLPVHQLSSPFYTKTTKVSIFNILLT

SEQ ID NO: 5179 - protein, 589 aa, Homo Sapiens
MSKPGKPTLNHGLVPVDLKSAKEPLPHQTVMKIFSISIIAQGLPFCRRRMKRKLDHGSEVRSFSLGKKPCKVSEYTSTTGLVPCSATPTTFGDLRAANGQGQQRRRITSVQPPTGLQEWLKMFQSWSGPEKLLALDELIDSCEPTQVKHMMQVIEPQFQRDFISLLPKELALYVLSFLEPKDLLQAAQTCRYWRILAEDNLLWREKCKEEGIDEPLHIKRRKVIKPGFIHSPWKSAYIRQHRIDTNWRRGELKSPKVLKGHDDHVITCLQFCGNRIVSGSDDNTLKVWSAVTGKCLRTLVGHTGGVWSSQMRDNIIISGSTDRTLKVWNAETGECIHTLYGHTSTVRCMHLHEKRVVSGSRDATLRVWDIETGQCLHVLMGHVAAVRCVQYDGRRVVSGAYDFMVKVWDPETETCLHTLQGHTNRVYSLQFDGIHVVSGSLDTSIRVWDVETGNCIHTLTGHQSLTSGMELKDNILVSGNADSTVKIWDIKTGQCLQTLQGPNKHQSAVTCLQFNKNFVITSSDDGTVKLWDLKTGEFIRNLVTLESGGSGGVVWRIRASNTKLVCAVGSRNGTEETKLLVLDFDVDMK

SEQ ID NO: 5180 - protein, 179 aa, Homo Sapiens
MDPKQTTLLCLGDFPMPFISAKSSPVIPLDGSVKIQCQAIREAYLTQLMIIKNSTYREIGRRLKFWNETDPEFVIDHMDANKAGRYQCQYRIGHYRFRYSDTLELVVTDSIHQDYTTQNLIRMAVAGLVLVALLAILVENWHSHTALNKEASADVAEPSWSQQMCQPGLTFARTPSVCK

SEQ ID NO: 5181 - protein, 253 aa, Homo Sapiens
MDPKQTTLLCLGDFPMPFISAKSSPVIPLDGSVKIQCQAIREAYLTQLMIIKNSTYREIGRRLKFWNETDPEFVIDHMDANKAGRYQCQYRIGHYRFRYSDTLELVVTGLYGKPFLSADRGLVLMPGENISLTCSSAHIPFDRFSLAKEGELSLPQHQSGEHPANFSLGPVDLNVSGIYRCYDSIHQDYTTQNLIRMAVAGLVLVALLAILVENWHSHTALNKEASADVAEPSWSQQMCQPGLTFARTPSVCK

SEQ ID NO: 5182 - protein, 275 aa, Homo Sapiens
MDPKQTTLLCLGDFPMPFISAKSSPVIPLDGSVKIQCQAIREAYLTQLMIIKNSTYREIGRRLKFWNETDPEFVIDHMDANKAGRYQCQYRIGHYRFRYSDTLELVVTGLYGKPFLSADRGLVLMPGENISLTCSSAHIPFDRFSLAKEGELSLPQHQSGEHPANFSLGPVDLNVSGIYRCYGWYNRSPYLWSFPSNALELVVTDSIHQDYTTQNLIRMAVAGLVLVALLAILVENWHSHTALNKEASADVAEPSWSQQMCQPGLTFARTPSVCK

SEQ ID NO: 5183 - protein, 227 aa, Homo Sapiens
MDPKQTTLLCLGDFPMPFISAKSSPVIPLDGSVKIQCQAIREAYLTQLMIIKNSTYREIGRRLKFWNETDPEFVIDHMDANKAGRYQCQYRIGHYRFRYSDTLELVVTGLYGKPFLSADRGLVLMPGENISLTCSSAHIPFDRFSLAKEGELSLPQHQSGEHPANFSLGPVDLNVSGIYRCYGWYNRSPYLWSFPSNALELVVTGRYRPVQPCVWVGCPGPCHRAGI

SEQ ID NO: 5184 - protein, 209 aa, Homo Sapiens
MDPKQTTLLCLGDFPMPFISAKSSPVIPLDGSVKIQCQAIREAYLTQLMIIKNSTYREIGRRLKFWNETDPEFVIDHMDANKAGRYQCQYRIGHYRFRYSDTLELVVTGLYGKPFLSADRGLVLMPGENISLTCSSAHIPFDRFSLAKEGELSLPQHQSGEHPANFSLGPVDLNVSGIYRLHPPRLHDAELDPHGRGRTGPRGSLGHTG

SEQ ID NO: 5185 - protein, 178 aa, Homo Sapiens
MDPKQTTLLCLGLYGKPFLSADRGLVLMPGENISLTCSSAHIPFDRFSLAKEGELSLPQHQSGEHPANFSLGPVDLNVSGIYRCYGWYNRSPYLWSFPSNALELVVTDSIHQDYTTQNLIRMAVAGLVLVALLAILVENWHSHTALNKEASADVAEPSWSQQMCQPGLTFARTPSVCK

SEQ ID NO: 5186 - protein, 191 aa, Homo Sapiens
MDPKQTTLLCLVLCLGQRIQAQEGDFPMPFISAKSSPVIPLDGSVKIQCQAIREAYLTQLMIIKNSTYREIGRRLKFWNETDPEFVIDHMDANKAGRYQCQYRIGHYRFRYSDTLELVVTDSIHQDYTTQNLIRMAVAGLVLVALLAILVENWHSHTALNKEASADVAEPSWSQQMCQPGLTFARTPSVCK

SEQ ID NO: 5187 - protein, 265 aa, Homo Sapiens
MDPKQTTLLCLVLCLGQRIQAQEGDFPMPFISAKSSPVIPLDGSVKIQCQAIREAYLTQLMIIKNSTYREIGRRLKFWNETDPEFVIDHMDANKAGRYQCQYRIGHYRFRYSDTLELVVTGLYGKPFLSADRGLVLMPGENISLTCSSAHIPFDRFSLAKEGELSLPQHQSGEHPANFSLGPVDLNVSGIYRCYDSIHQDYTTQNLIRMAVAGLVLVALLAILVENWHSHTALNKEASADVAEPSWSQQMCQPGLTFARTPSVCK

SEQ ID NO: 5188 - protein, 287 aa, Homo Sapiens
MDPKQTTLLCLVLCLGQRIQAQEGDFPMPFISAKSSPVIPLDGSVKIQCQAIREAYLTQLMIIKNSTYREIGRRLKFWNETDPEFVIDHMDANKAGRYQCQYRIGHYRFRYSDTLELVVTGLYGKPFLSADRGLVLMPGENISLTCSSAHIPFDRFSLAKEGELSLPQHQSGEHPANFSLGPVDLNVSGIYRCYGWYNRSPYLWSFPSNALELVVTDSIHQDYTTQNLIRMAVAGLVLVALLAILVENWHSHTALNKEASADVAEPSWSQQMCQPGLTFARTPSVCK

SEQ ID NO: 5189 - protein, 239 aa, Homo Sapiens
MDPKQTTLLCLVLCLGQRIQAQEGDFPMPFISAKSSPVIPLDGSVKIQCQAIREAYLTQLMIIKNSTYREIGRRLKFWNETDPEFVIDHMDANKAGRYQCQYRIGHYRFRYSDTLELVVTGLYGKPFLSADRGLVLMPGENISLTCSSAHIPFDRFSLAKEGELSLPQHQSGEHPANFSLGPVDLNVSGIYRCYGWYNRSPYLWSFPSNALELVVTGRYRPVQPCVWVGCPGPCHRAGI

SEQ ID NO: 5190 - protein, 1642 aa, Homo Sapiens
CPPHSHYEACSYGCPLSCGDLPVPEGCESACREGCVCDAGFVLSGDTCVPVGQCGCLHDDRYYPLGQTFYPGPGCDSLCRCREGGEVSCEPSSCGPHETCRPSGGSLGCVAVGSTTCQASGDPHYTTFDGHRFDFMGTCVYVLAQTCGTRPGLHRFAVLQENVAWGNGRVSVTRVITVQVANFTLRLEQRQWKVTVNGVDMKLPVVLANGQIRASQHGSDVVIETDFGLRVAYDLVYYVRVTVPGNYYQLMCGLCGNYNGDPKDDFQKPNGSQAGNANEFGNSWEEVVSDSPCLPPPTCPPGSEGCIPSEECPPELEKKYQKEEFCGLLSSPTGPLSSCHKLVDPQGPLKDCIFDLCLGGGNLSILCSNIHAYVSACQVAGGHVEPWRNETFCPMECPQNSHYELCADTCSLGCSALSAPLQCPDGCAEGCQCDSGFLYNGQACVPIQQCGCYHNGAYYEPEQTVLIDNCRQQCTCHAGKVVVCQEHSCKPGQVCQPSGGILSCVTKDPCHGVTCRPQETCKEQGGQGVCLPNYEATCWLWGDPHYHSFDGRKFDFQGTCNYVLATTGCPGVSTQGLTPFTVTTKNQNRGNPAVSYVRVVTVAALGTNISIHKDEIGKVRVNGVLTALPVSVADGRISVTQGASKALLVADFGLQVSYDWNWRVDVTLPSSYHGAVCGLCGNMDRNPNNDQVFPNGTLAPSIPIWGGSWRAPGWDPLCWDECRGSCPTCPEDRLEQYEGPGFCGPLAPGTGGPFTTCHAHVPPESFFKGCVLDVCMGGGDRDILCKALASYVAACQAAGVVIEDWRAQVGCEITCPENSHYEVCGPPCPASCPSPAPLTTPAVCEGPCVEGCQCDAGFVLSADRCVPLNNGCGCWANGTYHEAGSEFWADGTCSQWCRCGPGGGSLVCTPASCGLGEVCGLLPSGQHGCQPVSTAECQAWGDPHYVTLDGHRFDFQGTCEYLLSAPCHGPPLGAENFTVTVANEHRGSQAVSYTRSVTLQIYNHSLTLSARWPRKLQVDGVFVTLPFQLDSLLHAHLSGADVVVTTTSGLSLAFDGDSFVRLRVPAAYAGSLCGLCGNYNQDPADDLKAVGGKPAGWQVGGAQGCGECVSKPCPSPCTPEQQESFGGPDACGVISATDGPLAPCHGLVPPAQYFQGCLLDACQVQGHPGGLCPAVATYVAACQAAGAQLREWRRPDFCPFQCPAHSHYELCGDSCPGSCPSLSAPEGCESACREGCVCDAGFVLSGDTCVPVGQCGCLHDDRYYPLGQTFYPGPGCDSLCRCREGGEVSCEPSSCGPHETCRPSGGSLGCVAVGSTTCQASGDPHYTTFDGHRFDFMGTCVYVLAQTCGTRPGLHRFAVLQENVAWGNGRVSVTRVITVQVANFTLRLEQRQWKVTVNGVDMKLPVVLANGQIRASQHGSDVVIETDFGLRVAYDLVYYVRVTVPGNYYQLMCGLCGNYNGDPKDDFQKPNGSQAGNANEFGNSWEEVVPDSPCLPPPTCPPGSAGCIPSDKCPPELEKKYQKEEFCGLLSSPTGPLSSCHKLVDPQGPLKDCIFDLCLGGGNLSILCSNIHAYVSACQAAGGHVEPWRNETFCPMECPQNSHYELCADTCSLGCSALSAPLQCPDGCAEGCQCDSGFLYNG

SEQ ID NO: 5191 - protein, 1132 aa, Homo Sapiens
MGALWSWWILWAGATLLWGLTQEASVDLKNTGREEFLTAFLQNYQLAYSKAYPRLLISSLSESPASVSILSQADNTSKKVTVRPGESVMVNISAKAEMIGSKIFQHAVVIHSDYAISVQALNAKPDTAELTLLRPIQALGTEYFVLTPPGTSARNVKEFAVVAGAAGASVSVTLKGSVTFNGKFYPAGDVLRVTLQPYNVAQLQSSVDLSGSKVTASSPVAVLSGHSCAQKHTTCNHVVEQLLPTSAWGTHYVVPTLASQSRYDLAFVVASQATKLTYNHGGITGSRGLQAGDVVEFEVRPSWPLYLSANVGIQVLLFGTGAIRNEVTYDPYLVLIPDVAAYCPAYVVKSVPGCEGVALVVAQTKAISGLTIDGHAVGAKLTWEAVPGSEFSYAEVELGTADMIHTAEATTNLGLLTFGLAKAIGYATAADCGRTVLSPVEPSCEGMQCAAGQRCQVVGGKAGCVAESTAVCRAQGDPHYTTFDGRRYDMMGTCSYTMVELCSEDDTLPAFSVEAKNEHRGSRRVSYVGLVTVRAYSHSVSLTRGEVGFVLVDNQRSRLPVSLSEGRLRVYQSGPRAVVELVFGLVVTYDWDCQLALSLPARFQDQVCGLCGNYNGDPADDFLTPDGALAPDAVEFASSWKLDDGDYLCEDGCQNNCPACTPGQAQHYEGDRLCGMLTKLDGPFAVCHDTLDPRPFLEQCVYDLCVVGGERLSLCRGLSAYAQACLELGISVGDWRSPANCPLSCPANSRYELCGPACPTSCNGAAAPSNCSGRPCVEGCVCLPGFVASGGACVPASSCGCTFQGLQLAPGQEVWADELCQRRCTCNGATHQVTCRDKQSCPAGERCSVQNGLLGCYPDRFGTCQGSGDPHYVSFDGRRFDFMGTCTYLLVGSCGQNAALPAFRVLVENEHRGSQTVSYTRAVRVEARGVKVAVRREYPGQVLVDDVLQYLPFQAADGQVQVFRQGRDAVVRTDFGLTVTYDWNARVTAKVPSSYAEALCGLCGNFNGDPADDLALRGGGQAANALAFGNSWQEETRPGCGATEPGDCPKLDSLVAQQLQSKNECGILADPKGPFRECHSKLDPQGAVRDCVYDRCLLPGQSGPLCDALATYAAACQAAGATVHPWRSEELC

SEQ ID NO: 5192 - protein, 3072 aa, Homo Sapiens
  misc_feature (1)..(1): Xaa can be any naturally occurring amino acid
XLSCPPHSHYEACSYGCPLSCGDLPVPEGCESACREGCVCDAGFVLSGDTCVPVGQCGCLHDDRYYPLGQTFYPGPGCDSLCRCREGGEVSCEPSSCGPHETCRPSGGSLGCVAVGSTTCQASGDPHYTTFDGHRFDFMGTCVYVLAQTCGTRPGLHRFAVLQENVAWGNGRVSVTRVITVQVANFTLRLEQRQWKVTVNGVDMKLPVVLANGQIRASQHGSDVVIETDFGLRVAYDLVYYVRVTVPGNYYQLMCGLCGNYNGDPKDDFQKPNGSQAGNANEFGNSWEEVVSDSPCLPPPTCPPGSEGCIPSEECPPELEKKYQKEEFCGLLSSPTGPLSSCHKLVDPQGPLKDCIFDLCLGGGNLSILCSNIHAYVSACQVAGGHVEPWRNETFCPMECPQNSHYELCADTCSLGCSALSAPLQCPDGCAEGCQCDSGFLYNGQACVPIQQCGCYHNGAYYEPEQTVLIDNCRQQCTCHAGKVVVCQEHSCKPGQVCQPSGGILSCVTKDPCHGVTCRPQETCKEQGGQGVCLPNYEATCWLWGDPHYHSFDGRKFDFQGTCNYVLATTGCPGVSTQGLTPFTVTTKNQNRGNPAVSYVRVVTVAALGTNISIHKDEIGKVRVNGVLTALPVSVADGRISVTQGASKALLVADFGLQVSYDWNWRVDVTLPSSYHGAVCGLCGNMDRNPNNDQVFPNGTLAPSIPIWGGSWRAPGWDPLCWDECRGSCPTCPEDRLEQYEGPGFCGPLAPGTGGPFTTCHAHVPPESFFKGCVLDVCMGGGDRDILCKALASYVAACQAAGVVIEDWRAQVGCEITCPENSHYEVCGPPCPASCPSPAPLTTPAVCEGPCVEGCQCDAGFVLSADRCVPLNNGCGCWANGTYHEAGSEFWADGTCSQWCRCGPGGGSLVCTPASCGLGEVCGLLPSGQHGCQPVSTAECQAWGDPHYVTLDGHRFDFQGTCEYLLSAPCHGPPLGAENFTVTVANEHRGSQAVSYTRSVTLQIYNHSLTLSARWPRKLQVDGVFVTLPFQLDSLLHAHLSGADVVVTTTSGLSLAFDGDSFVRLRVPAAYAGSLCGLCGNYNQDPADDLKAVGGKPAGWQVGGAQGCGECVSKPCPSPCTPEQQESFGGPDACGVISATDGPLAPCHGLVPPAQYFQGCLLDACQVQGHPGGLCPAVATYVAACQAAGAQLREWRRPDFCPFQCPAHSHYELCGDSCPGSCPSLSAPEGCESACREGCVCDAGFVLSGDTCVPVGQCGCLHDDRYYPLGQTFYPGPGCDSLCRCREGGEVSCEPSSCGPHETCRPSGGSLGCVAVGSTTCQASGDPHYTTFDGHRFDFMGTCVYVLAQTCGTRPGLHRFAVLQENVAWGNGRVSVTRVITVQVANFTLRLEQRQWKVTVNGVDMKLPVVLANGQIRASQHGSDVVIETDFGLRVAYDLVYYVRVTVPGNYYQLMCGLCGNYNGDPKDDFQKPNGSQAGNANEFGNSWEEVVPDSPCLPPPTCPPGSAGCIPSDKCPPELEKKYQKEEFCGLLSSPTGPLSSCHKLVDPQGPLKDCIFDLCLGGGNLSILCSNIHAYVSACQAAGGHVEPWRNETFCPMECPQNSHYELCADTCSLGCSALSAPLQCPDGCAEGCQCDSGFLYNGQACVPIQQCGCYHNGVYYEPEQTVLIDNCRQQCTCHVGKVVVCQEHSCKPGQVCQPSGGILSCVTKDPCHGVTCRPQETCKEQGGQGVCLPNYEATCWLWGDPHYHSFDGRKFDFQGTCNYVLATTGCPGVSTQGLTPFTVTTKNQNRGNPAVSYVRVVTVAALGTNISIHKDEIGKVRVNGVLTALPVSVADGRISVAQGASKALLVADFGLQVSYDWNWRVDVTLPSSYHGAVCGLCGNMDRNPNNDQVFPNGTLAPSIPIWGGSWRAPGWDPLCWDECRGSCPTCPEDRLEQYEGPGFCGPLSSGTGGPFTTCHAHVPPESFFKGCVLDVCMGGGDRDILCKALASYVAACQAAGVVIEDWRAQVGCEITCPENSHYEVCGPPCPASCPSPAPLTTPAVCEGPCVEGCQCDAGFVLSADRCVPLNNGCGCWANGTYHEAGSEFWADGTCSQWCRCGPGGGSLVCTPASCGLGEVCGLLPSGQHGCQPVSTAECQAWGDPHYVTLDGHRFDFQGTCEYLLSAPCHGPPLGAENFTVTVANEHRGSQAVSYTRSVTLQIYNHSLTLSARWPRKLQVDGVFVALPFQLDSLLHAHLSGADVVVTTTSGLSLAFDGDSFVRLRVPAAYAASLCGLCGNYNQDPADDLKAVGGKPAGWQVGGAQGCGECVSKPCPSPCTPEQQESFGGPDACGVISATDGPLAPCHGLVPPAQYFQGCLLDACQVQGHPGGLCPAVATYVAACQAAGAQLGEWRRPDFCPLQCPAHSHYELCGDSCPVSCPSLSAPEGCESACREGCVCDAGFVLSGDTCVPVGQCGCLHDGRYYPLGEVFYPGPECERRCECGPGGHVTCQEGAACGPHEECRLEDGVQACHATGCGRCLANGGIHYITLDGRVYDLHGSCSYVLAQVCHPKPGDEDFSIVLEKNAAGDLQRLLVTVAGQVVSLAQGQQVTVDGEAVALPVAVGRVRVTAEGRNMVLQTTKGLRLLFDGDAHLLMSIPSPFRGRLCGLCGNFNGNWSDDFVLPNGSAASSVETFGAAWRAPGSSKGCGEGCGPQGCPVCLAEETAPYESNEACGQLRNPQGPFATCQAVLSPSEYFRQCVYDLCAQKGDKAFLCRSLAAYTAACQAAGVAVKPWRTDSFCPLHCPAHSHYSICTRTCQGSCAALSGLTGCTTRCFEGCECDDRFLLSQGVCIPVQDCGCTHNGRYLPVNSSLLTSDCSERCSCSSSSGLTCQAAGCPPGRVCEVKAEARNCWATRGLCVLSVGANLTTFDGARGATTSPGVYELSSRCPGLQNTIPWYRVVAEVQICHGKTEAVGQVHIFFQDGMVTLTPNKGVWVNGLRVDLPAEKLASVSVSRTPDGSLLVRQKAGVQVWLGANGKVAVIVSNDHAGKLCGACGNFDGDQTNDWHDSQEKPAMEKWRAQDFSPCYG

SEQ ID NO: 5193 - protein, 250 aa, Homo Sapiens
MGKWPPWVSVFQEETITLHCEVLHLPGSSSTQWFLNGTATQTSTPSYRITSASVNDSGEYRCQRGLSGRSDPIQLEIHRGWLLLQVSSRVFMEGEPLALRCHAWKDKLVYNVLYYRNGKAFKFFHWNSNLTILKTNISHNGTYHCSGMGKHRYTSAGISQYTVKGLQLPTPVWFHVLFYLAVGIMFLVNTVLWVTIRKELKRKKKWNLEISLDSGHEKKVISSLQEDRHLEEELKCQEQKEEQLQEGVHR

SEQ ID NO: 5194 - protein, 188 aa, Homo Sapiens
MWFLTTLLLWGWLLLQVSSRVFMEGEPLALRCHAWKDKLVYNVLYYRNGKAFKFFHWNSNLTILKTNISHNGTYHCSGMGKHRYTSAGISQYTVKGLQLPTPVWFHVLFYLAVGIMFLVNTVLWVTIRKELKRKKKWNLEISLDSGHEKKVISSLQEDRHLEEELKCQEQKEEQLQEGVHRKEPQGAT

SEQ ID NO: 5195 - protein, 224 aa, Homo Sapiens
MWFLTTLLLWVPVDGQVDTTKAVITLQPPWVSVFQEETITLHCEVLHLPGSSSTQWFLNGTATQTSTPSYRITSASVNDSGEYRCQRGLSGRSDPIQLEIHRGWLLLQVSSRVFMEGEPLALRCHAWKDKLVYNVLYYRNGKAFKFFHWNSNLTILKTNISHNGTYHCSGMGKHRYTSAGISQYTVKELFPAPVLNASVTSPLLEGNLVTLSCETKLLLQRPGL

SEQ ID NO: 5196 - protein, 224 aa, Homo Sapiens; identical to SEQ ID NO: 5195

SEQ ID NO: 5197 - protein, 280 aa, Homo Sapiens
MWFLTTLLLWVPVDGQVDTTKAVITLQPPWVSVFQEETITLHCEVLHLPGSSSTQWFLNGTATQTSTPSYRITSASVNDSGEYRCQRGLSGRSDPIQLEIHRGWLLLQVSSRVFMEGEPLALRCHAWKDKLVYNVLYYRNGKAFKFFHWNSNLTILKTNISHNGTYHCSGMGKHRYTSAGISQYTVKGLQLPTPVWFHVLFYLAVGIMFLVNTVLWVTIRKELKRKKKWNLEISLDSGHEKKVISSLQEDRHLEEELKCQEQKEEQLQEGVHRKEPQGAT

SEQ ID NO: 5198 - protein, 225 aa, Homo Sapiens
MWFLTTLLLWVPVDGQVVDTTKAVITLQPPWVSVFQEETITLHCEVLHLPGSSSTQWFLNGTATQTSTPSYRITSASVNDSGEYRCQRGLSGRSDPIQLEIHRGWLLLQVSSRVFMEGEPLALRCHAWKDKLVYNVLYYRNGKAFKFFHWNSNLTILKTNISHNGTYHCSGMGKHRYTSAGISQYTVKELFPAPVLNASVTSPLLEGNLVTLSCETKLLLQRPGL

SEQ ID NO: 5199 - protein, 359 aa, Homo Sapiens
MAEGTLWQILCVSSDAQPQTFEGVKGADPPTLPPGSFLPGPVLWWGSLARLQTEKSDEVSRKGNWWVTEMGGGAGERLFTSSCLVGLVPLGLRISLVTCPLQCGIMWQLLLPTALLLLVSAGMRTEDLPKAVVFLEPQWYRVLEKDSVTLKCQGAYSPEDNSTQWFHNESLISSQASSYFIDAATVDDSGEYRCQTNLSTLSDPVQLEVHIGWLLLQAPRWVFKEEDPIHLRCHSWKNTALHKVTYLQNGKGRKYFHHNSDFYIPKATLKDSGSYFCRGLFGSKNVSSETVNITITQGLAVSTISSFFPPGYQVSFCLVMVLLFAVDTGLYFSVKTNIRSSTRDWKDHKFKWRKDPQDK

SEQ ID NO: 5200 - protein, 290 aa, Homo Sapiens
MGGGAGERLFTSSCLVGLVPLGLRISLVTCPLQCGIMWQLLLPTALLLLVSAGMRTEDLPKAVVFLEPQWYRVLEKDSVTLKCQGAYSPEDNSTQWFHNESLISSQASSYFIDAATVDDSGEYRCQTNLSTLSDPVQLEVHIGWLLLQAPRWVFKEEDPIHLRCHSWKNTALHKVTYLQNGKGRKYFHHNSDFYIPKATLKDSGSYFCRGLFGSKNVSSETVNITITQGLAVSTISSFFPPGYQVSFCLVMVLLFAVDTGLYFSVKTNIRSSTRDWKDHKFKWRKDPQDK

SEQ ID NO: 5201 - protein, 105 aa, Homo Sapiens
MWQLLLPTALLLLVSAGMRTDLPKAVVFLEPQWYRVLEKDSVTLKCQGAYSPEDNSTQWFHNESLISSQASSYFIDAATVDDSGEYRCQTNLSTLSDPVQLEVHI

SEQ ID NO: 5202 - protein, 254 aa, Homo Sapiens
MWQLLLPTALLLLVSAGMRTEDLPKAVVFLEPQWYRVLEKDSVTLKCQGAYSPEDNSTQWFHNESLISSQASSYFIDAATVDDSGEYRCQTNLSTLSDPVQLEVHIGWLLLQAPRWVFKEEDPIHLRCHSWKNTALHKVTYLQNGKGRKYFHHNSDFYIPKATLKDSGSYFCRGLFGSKNVSSETVNITITQGLAVSTISSFFPPGYQVSFCLVMVLLFAVDTGLYFSVKTNIRSSTRDWKDHKFKWRKDPQDK

SEQ ID NO: 5203 - protein, 254 aa, Homo Sapiens; identical to SEQ ID NO: 5202

SEQ ID NO: 5204 - protein, 254 aa, Homo Sapiens; identical to SEQ ID NO: 5202

SEQ ID NO: 5205 - protein, 307 aa, Homo Sapiens
QTEKSDEVSRKGNWWVTEMGGGAGERLFTSSCLVGLVPLGLRISLVTCPLQCGIMWQLLLPTALLLLVSAGMRTDLPKAVVFLEPQWYRVLEKDSVTLKCQGAYSPEDNSTQWFHNESLISSQASSYFIDAATVDDSGEYRCQTNLSTLSDPVQLEVHIGWLLLQAPRWVFKEEDPIHLRCHSWKNTALHKVTYLQNGKGRKYFHHNSDFYIPKATLKDSGSYFCRGLFGSKNVSSETVNITITQGLAVSTISSFFPPGYQVSFCLVMVLLFAVDTGLYFSVKTNIRSSTRDWKDHKFKWRKDPQDK

SEQ ID NO: 5206 - protein, 211 aa, Homo Sapiens
GVPRPQPWALGLLLFLLPGSLGAESHLSLLYHLTAVSSPAPGTPAFWVSGWLGPQQYLSYNSLRGEAEPCGAWVWENQVSWYWEKETTDLRIKEKLFLEAFKALGGKGPYTLQGLLGCELGPDNTSVPTAKFALNGEEFMNFDLKQGTWGGDWPEALAISQRWQQQDKAANKELTFLLFSCPHRLREHLERGRGNLEWKEPKARQIFCAWI

SEQ ID NO: 5207 - protein, 273 aa, Homo Sapiens
MGVPRPQPWALGLLLFLLPGSLGAESHLSLLYHLTAVSSPAPGTPAFWVSGWLGPQQYLSYNSLRGEAEPCGAWVWENQVSWYWEKETTDLRIKEKLFLEAFKALGGKEPPSMRLKARPSSPGFSVLTCSAFSFYPPELQLRFLRNGLAAGTGQGDFGPNSDGSFHASSSLTVKSGDEHHYCCIVQHAGLAQPLRVELESPAKSSVLVVGIVIGVLLLTAAAVGGALLWRRMRSGLPAPWISLRGDDTGVLLPTPGEAQDADLKDVNVIPATA

SEQ ID NO: 5208 - protein, 141 aa, Homo Sapiens
MGVPRPQPWALGLLLFLLPGSLGAESHLSLLYHLTAVSSPAPGTPAFWVSGWLGPQQYLSYNSLRGEAEPCGAWVWENQVSWYWEKETTDLRIKEKLFLEAFKALGGKGPYTLQGLLGCELGPDNTSVPTAKFALNGEEFM

SEQ ID NO: 5209 - protein, 167 aa, Homo Sapiens
MGVPRPQPWALGLLLFLLPGSLGAESHLSLLYHLTAVSSPAPGTPAFWVSGWLGPQQYLSYNSLRGEAEPCGAWVWENQVSWYWEKETTDLRIKEKLFLEAFKALGGKGPYTLQGLLGCELGPDNTSVPTAKFALNGEEFMNFDLKQGTWGGDWPEALAISQRWQQQ

SEQ ID NO: 5210 - protein, 225 aa, Homo Sapiens
MGVPRPQPWALGLLLFLLPGSLGAESHLSLLYHLTAVSSPAPGTPAFWVSGWLGPQQYLSYNSLRGEAEPCGAWVWENQVSWYWEKETTDLRIKEKLFLEAFKALGGKGPYTLQGLLGCELGPDNTSVPTAKFALNGEEFMNFDLKQGTWGGDWPEALAISQRWQQQDKAANKELTFLLFSCPHRLREHLERGRGNLEWKDTVSHYVAQAGLELLGSSDSPALVS

SEQ ID NO: 5211 - protein, 365 aa, Homo Sapiens
MGVPRPQPWALGLLLFLLPGSLGAESHLSLLYHLTAVSSPAPGTPAFWVSGWLGPQQYLSYNSLRGEAEPCGAWVWENQVSWYWEKETTDLRIKEKLFLEAFKALGGKGPYTLQGLLGCELGPDNTSVPTAKFALNGEEFMNFDLKQGTWGGDWPEALAISQRWQQQDKAANKELTFLLFSCPHRLREHLERGRGNLEWKEPPSMRLKARPSSPGFSVLTCSAFSFYPPELQLRFLRNGLAAGTGQGDFGPNSDGSFHASSSLTVKSGDEHHYCCIVQHAGLAQPLRVELESPAKSSVLVVGIVIGVLLLTAAAVGGALLWRRMRSGLPAPWISLRGDDTGVLLPTPGEAQDADLKDVNVIPATA

SEQ ID NO: 5212 - protein, 365 aa, Homo Sapiens; identical to SEQ ID NO: 5211

SEQ ID NO: 5213 - protein, 99 aa, Homo Sapiens
MGVPRPQPWALGLLLFLLPGSLGAESPAKSSVLVVGIVIGVLLLTAAAVGGALLWRRMRSGLPAPWISLRGDDTGVLLPTPGEAQDADLKDVNVIPATA

SEQ ID NO: 5214 - protein, 39 aa, Homo Sapiens
MNFDLKQGTWGGDWPEALAISQRWQQQDKAANKELTFLL

SEQ ID NO: 5215 - protein, 153 aa, Homo Sapiens
WEKETTDLRIKEKLFLEAFKALGGKGPYTLQGLLGCELGPDNTSVPTAKFALNGEEFMNFDLKQGTWGGDWPEALAISQRWQQQDKAANKELTFLLFSCPHRLREHLERGRGNLEWKAPWISLRGDDTGVLLPTPGEAQDADLKDVNVIPATA

SEQ ID NO: 5216 - protein, 189 aa, Homo Sapiens
  misc_feature (1)..(1): Xaa can be any naturally occurring amino acid
XSSPAPGTPAFWVSGWLGPQQYLSYNSLRGEAEPCGAWVWENQVSWYWEKETTDLRIKEKLFLEAFKALGGKGPYTLQGLLGCELGPDNTSVPTAKFALNGEEFMNFDLKQGTWGGDWPEALAISQRWQQQDKAANKELTFLLFSCPHRLREHLERGRGNLEWKAPSPSTLRSCNFGSCGMGWPLAPAR

SEQ ID NO: 5217 - protein, 141 aa, Homo Sapiens
MDFWLWPLYFLPEMESCCVAQDGLELVALSDPPGSASQSAGITVSGALRILPEVKVEGELGGSVTIKCPLPEMHVRIYLCREMAGSGTCGTVVSTTNFIKAEYKGRVTLKQYPRKNLFLVEVTQLTESDSGVYACGAGMNT

SEQ ID NO: 5218 - protein, 278 aa, Homo Sapiens
MDFWLWPLYFLPEYEPSWEEQPMPETPKWFHLPYLFQMPAYASSSKFVTRVTTPAQRGKVPPVHHSSPTTQITHRPRVSRASSVAGDKPRTFLPSTTASKISALEGLLKPQTPSYNHHTRLHRQRALDYGSQSGREGQGFHILIPTILGLFLLALLGLVVKRAVERRKALSRRARRLAVRMRALESSQRPRGSPRPRSQNNIYSACPRRARGADAAGTGEAPVPGPGAPLPPAPLQVSESPWLHAPSLKTSCEYVSLYHQPAAMMEDSDSDDYINVPA

SEQ ID NO: 5219 - protein, 125 aa, Homo Sapiens
MDFWLWPLYFLPVSGALRILPEVKVEGELGGSVTIKCPLPEMHVRIYLCREMAGSGTCGTVVSTTNFIKAEYKGRVTLKQYPRKNLFLVENTSHHGKSSQCLRLQNGFICPICSRCLHMPVLPNS

SEQ ID NO: 5220 - protein, 147 aa, Homo Sapiens
MDFWLWPLYFLPVSGALRILPEVKVEGELGGSVTIKCPLPEMHVRIYLCREMAGSGTCGTVVSTTNFIKAEYKGRVTLKQYPRKNLFLVEVTQLTESDSGVYACGAGMNTDRGKTQKVTLNVHSEYEPSWEEQPMPETPKWFHLPYL

SEQ ID NO: 5221 - protein, 151 aa, Homo Sapiens
MDFWLWPLYFLPVSGALRILPEVKVEGELGGSVTIKCPLPEMHVRIYLCREMAGSGTCGTVVSTTNFIKAEYKGRVTLKQYPRKNLFLVEVTQLTESDSGVYACGAGMNTDRGKTQKVTLNVHSEYEPSWEEQPMPETPKWFHLPYLFQMP

SEQ ID NO: 5222 - protein, 390 aa, Homo Sapiens
MDFWLWPLYFLPVSGALRILPEVKVEGELGGSVTIKCPLPEMHVRIYLCREMAGSGTCGTVVSTTNFIKAEYKGRVTLKQYPRKNLFLVEVTQLTESDSGVYACGAGMNTDRGKTQKVTLNVHSEYEPSWEEQPMPETPKWFHLPYLFQMPAYASSSKFVTRVTTPAQRGKVPPVHHSSPTTQITHRPRVSRASSVAGDKPRTFLPSTTASKISALEGLLKPQTPSYNHHTRLHRQRALDYGSQSGREGQGFHILIPTILGLFLLALLGLVVKRAVERRKALSRRARRLAVRMRALESSQRPRGSPRPRSQNNIYSACPRRARGADAAGTGEAPVPGPGAPLPPAPLQVSESPWLHAPSLKTSCEYVSLYHQPAAMMEDSDSDDYINVPA

SEQ ID NO: 5223 - protein, 306 aa, Homo Sapiens
MDFWLWPLYFLPVSGALRILPEVKVEGELGGSVTIKCPLPEMHVRIYLCREMAGSGTCGTVVSTTNFIKAEYKGRVTLKQYPRKNLFLVEVTQLTESDSGVYACGAGMNTDRGKTQKVTLNVHSEYEPSWEEQPMPETPKWFHLPYLFQMPAYASSSKFVTRVTTPAQRGKVPPVHHSSPTTQITHRPRVSRASSVAGDKPRTFLPSTTASKISALEGLLKPQTPSYNHHTRLHRQSPLQAGPPTGREDARPGELPEAPRVAATALPKQHLQRLPAARSWSGRCRHRGGPRSRPRSAVAPRPAAGV

SEQ ID NO: 5224 - protein, 326 aa, Homo Sapiens
MELSGATMARGLAVLLVLFLHIKNLPAQAADTCPEVKVVGLEGSDKLTILRGCPGLPGAPGPKGEAGVIGERGERGLPGAPGKAGPVGPKGDRGEKGMRGEKGDAGQSQSCATGPRNCKDLLDRGYFLSGWHTIYLPDCRPLTVLCDMDTDGGGWTVFQRRMDGSVDFYRDWAAYKQGFGSQLGEFWLGNDNIHALTAQGSSELRVDLVDFEGNHQFAKYKSFKVADEAEKYKLVLGAFVGGSAGNSLTGHNNNFFSTKDQDNDVSSSNCAEKFQGAWWYADCHASNLNGLYLMGPHESYANGINWSAAKGYKYSYKVSEMKVRPA

SEQ ID NO: 5225 - protein, 360 aa, Homo Sapiens
MELSGATMARGLAVLLVLFLHIKNLPAQAADTCPEVKVVGLEGSDKLTILRGCPGLPGAPGPKGEAGVIGERGERGLPGAPGKAGPVGPKGDRGEKGMRGEKGDAGQSQSCATGPRNCKDLLDRGYFLSGWHTIYLPDCRPLTVLCDMDTDGGGWTVFQRRMDGSVDFYRDWAAYKQGFGSQTHSHDAHSCPFAPSSVKPPHAHNLTRGRIMFLNMFTLGQKSFTSFNVCFLNTSGFDHFPVSVARQVFPWNLVSREESGPLFSRWHYRCSGRLSDFCEDFPPPVIDTGRSSPPPPSLPHPPMPHSQHFTLLEKGHFGVQKTLTKKGESLVGTFLLPTTAEFMLWAGWLLGRDKHLALTK

SEQ ID NO: 5226 - protein, 313 aa, Homo Sapiens
MELDRAVGVLGAATLLLSFLGMAWALQAADTCPEVKMVGLEGSDKLTILRGCPGLPGAPGPKGEAGTNGKRGERGPPGPPGKAGPPGPNGAPGEPQPCLTGPRTCKDLLDRGHFLSGWHTIYLPDCRPLTVLCDMDTDGGGWTVFQRRVDGSVDFYRDWATYKQGFGSRLGEFWLGNDNIHALTAQGTSELRVDLVDFEDNYQFAKYRSFKVADEAEKYNLVLGAFVEGSAGDSLTFHNNQSFSTKDQDNDLNTGNCAVMFQGAWWYKNCHVSNLNGRYLRGTHGSFANGINWKSGKGYNYSYKVSEMKVRPA

SEQ ID NO: 5227 - protein, 275 aa, Homo Sapiens
MELDRAVGVLGAATLLLSFLGMAWALQAADTCPGERGPPGPPGKAGPPGPNGAPGEPQPCLTGPRTCKDLLDRGHFLSGWHTIYLPDCRPLTVLCDMDTDGGGWTVFQRRVDGSVDFYRDWATYKQGFGSRLGEFWLGNDNIHALTAQGTSELRVDLVDFEDNYQFAKYRSFKVADEAEKYNLVLGAFVEGSAGDSLTFHNNQSFSTKDQDNDLNTGNCAVMFQGAWWYKNCHVSNLNGRYLRGTHGSFANGINWKSGKGYNYSYKVSEMKVRPA

SEQ ID NO: 5228 - protein, 299 aa, Homo Sapiens
MDLLWILPSLWLLLLGGPACLKTQEHPSCPGPRELEASKVVLLPSCPGAPGSPGEKGAPGPQGPPGPPGKMGPKGEPGDPVNLLRCQEGPRNCRELLSQGATLSGWYHLCLPEGRALPVFCDMDTEGGGWLVFQRRQDGSVDFFRSWSSYRAGFGNQESEFWLGNENLHQLTLQGNWELRVELEDFNGNRTFAHYATFRLLGEVDHYQLALGKFSEGTAGDSLSLHSGRPFTTYDADHDSSNSNCAVIVHGAWWYASCYRSNLNGRYAVSEAAAHKYGIDWASGRGVGHPYRRVRMMLR

SEQ ID NO: 5229 - protein, 288 aa, Homo Sapiens
MDLLWILPSLWLLLLGGPACLKTQEHPSCPGPRELEASKVVLLPSCPGAPGSPGEKGAPGPQGPPGPPGKMGPKGEPGPRNCRELLSQGATLSGWYHLCLPEGRALPVFCDMDTEGGGWLVFQRRQDGSVDFFRSWSSYRAGFGNQESEFWLGNENLHQLTLQGNWELRVELEDFNGNRTFAHYATFRLLGEVDHYQLALGKFSEGTAGDSLSLHSGRPFTTYDADHDSSNSNCAVIVHGAWWYASCYRSNLNGRYAVSEAAAHKYGIDWASGRGVGHPYRRVRMMLR

SEQ ID NO: 5230 - protein, 429 aa, Homo Sapiens
MLPRLLLLICAPLCEPAELFLIASPSHPTEGSPVTLTCKMPFLQSSDAQFQFCFFRDTRALGPGWSSSPKLQIAAMWKEDTGSYWCEAQTMASKVLRSRRSQINVHRVPVADVSLETQPPGGQVMEGDRLVLICSVAMGTGDITFLWYKGAVGLNLQSKTQRSLTAEYEIPSVRESDAEQYYCVAENGYGPSPSGLVSITVRIPVSRPILMLRAPRAQAAVEDVLELHCEALRGSPPILYWFYHEDITLGSRSAPSGGGASFNLSLTEEHSGNYSCEANNGLGAQRSEAVTLNFTVPTGARSNHLTSGVIEGLLSTLGPATVALLFCYGLKRKIGRRSARDPLRSLPSPLPQEFTYLNSPTPGQLQPIYENVNVVSGDEVYSLAYYNQPEQESVAAETLGTHMEDKVSLDIYSRLRKANITDVDYEDAM

SEQ ID NO: 5231 - protein, 366 aa, Homo Sapiens
MLPRLLLLICAPLCEPAELFLIASPSHPTEGSPVTLTCKMPFLQSSDAQFQFCFFRDTRALGPGWSSSPKLQIAAMWKEDTGSYWCEAQTMASKVLRSRRSQINVHRVPVADVSLETQPPGGQVMEGDRLVLICSVAMGTGDITFLWYKGAVGLNLQSKTQRSLTAEYEIPSVRESDAEQYYCVAENGYGPSPSGLVSITVRIPVSRPILMLRAPRAQAAVEDVLELHCEALRGSPPILYWFYHEDITLGSRSAPSGGGASFNLSLTEEHSGNYSCEANNGLGAQRSEAVTLNFTGRRSARDPLRSLPSPLPQEFTYLNSPTPGQLQPIYENEPREQSVAVHGRQQHSSEQKAQKPWGHIWRTRFP

SEQ ID NO: 5232 - protein, 428 aa, Homo Sapiens
MLPRLLLLICAPLCEPAELFLIASPSHPTEGSPVTLTCKMPFLQSSDAQFQFCFFRDTRALGPGWSSSPKLQIAAMWKEDTGSYWCEAQTMASKVLRSRRSQINVHRVPVADVSLETQPPGGQVMEGDRLVLICSVAMGTGDITFLWYKGAVGLNLQSKTQRSLTAEYEIPSVRESDAEQYYCVAENGYGPSPSGLVSITVRIPVSRPILMLRAPRAQAAVEDVLELHCEALRGSPPILYWFYHEDITLGSRSAPSGGGASFNLSLTEEHSGNYSCEANNGLGAQRSEAVTLNFTVPTGARSNHLTSGVIEGLLSTLGPATVALLFCYGLKRKIGRRSARDPLRSLPSPLPQEFTYLNSPTPGQLQPIYENVNVVSGDEVYSLAYYNQPEQESVAETLGTHMEDKVSLDIYSRLRKANITDVDYEDAM

SEQ ID NO: 5233 - protein, 742 aa, Homo Sapiens
MLLWLLLLILTPGREQSGVAPKAVLLLNPPWSTAFKGEKVALICSSISHSLAQGDTYWYHDEKLLKIKHDKIQITEPGNYQCKTRGSSLSDAVHVEFSPDWLILQALHPVFEGDNVILRCQGKDNKNTHQKVYYKDGKQLPNSYNLEKITVNSVSRDNSKYHCTAYRKFYILDIEVTSKPLNIQVQELFLHPVLRASSSTPIEGSPMTLTCETQLSPQRPDVQLQFSLFRDSQTLGLGWSRSPRLQIPAMWTEDSGSYWCEVETVTHSIKKRSLRSQIRVQRVPVSNVNLEIRPTGGQLIEGENMVLICSVAQGSGTVTFSWHKEGRVRSLGRKTQRSLLAELHVLTVKESDAGRYYCAADNVHSPILSTWIRVTVRIPVSHPVLTFRAPRAHTVVGDLLELHCESLRGSPPILYRFYHEDVTLGNSSAPSGGGASFNLSLTAEHSGNYSCDADNGLGAQHSHGVSLRVTVPVSRPVLTLRAPGAQAVVGDLLELHCESLRGSFPILYWFYHEDDTLGNISAHSGGGASFNLSLTTEHSGNYSCEADNGLGAQHSKVVTLNVTGTSRNRTGLTAAGITGLVLSILVLAAAAALLHYARARRKPGGLSATGTSSHSPSECQEPSSSRPSRIDPQEPTHSKPLAPMELEPMYSNVNPGDSNPIYSQIWSIQHTKENSANCPMMHQEHEELTVLYSELKKTHPDDSAGEASSRGRAHEEDDEENYENILNPRKNKVQDFPCLCNT

SEQ ID NO: 5234 - protein, 734 aa, Homo Sapiens
MLLWLLLLILTPGREQSGVAPKAVLLLNPPWSTAFKGEKVALICSSISHSLAQGDTYWYHDEKLLKIKHDKIQITEPGNYQCKTRGSSLSDAVHVEFSPDWLILQALHPVFEGDNVILRCQGKDNKNTHQKVYYKDGKQLPNSYNLEKITVNSVSRDNSKYHCTAYRKFYILDIEVTSKPLNIQVQELFLHPVLRASSSTPIEGSPMTLTCETQLSPQRPDVQLQFSLFRDSQTLGLGWSRSPRLQIPAMWTEDSGSYWCEVETVTHSIKKRSLRSQIRVQRVPVSNVNLEIRPTGGQLIEGENMVLICSVAQGSGTVTFSWHKEGRVRSLGRKTQRSLLAELHVLTVKESDAGRYYCAADNVHSPILSTWIRVTVRIPVSHPVLTFRAPRAHTVVGDLLELHCESLRGSPPILYRFYHEDVTLGNSSAPSGGGASFNLSLTAEHSGNYSCDADNGLGAQHSHGVSLRVTVPVSRPVLTLRAPGAQAVVGDLLELHCESLRGSFPILYWFYHEDDTLGNISAHSGGGASFNLSLTTEHSGNYSCEADNGLGAQHSKVVTLNVTGTSRNRTGLTAAGITGLVLSILVLAAAAALLHYARARRKPGGLSATGTSSHSPSECQEPSSSRPSRIDPQEPTHSKPLAPMELEPMYSNVNPGDSNPIYSQIWSIQHTKENSANCPMMHQEHEELTVLYSELKKTHPDDSAGEASSRGRAHEEDDEENYENVPRVLLASDH

SEQ ID NO: 5235 - protein, 256 aa, Homo Sapiens
MLLWLLLLILTPGREQSGVAPKAVLLLNPPWSTAFKGEKVALICSSISHSLAQGDTYWYHDEKLLKIKHDKIQITEPGNYQCKTRGSSLSDAVHVEFSPDWLILQALHPVFEGDNVILRCQGKDNKNTHQKVYYKDGKQLPNSYNLEKITVNSVSRDNSKYHCTAYRKFYILDIEVTSKPLNIQVQELFLHPVLRASSSTPIEGSPMTLTCETQLSPQRPDVQLQFSLFRDSQTLGLGWSRSPRLQIPAMWTEDSG

SEQ ID NO: 5236 - protein, 740 aa, Homo Sapiens
MLLWLLLLILTPGREQSGVAPKAVLLLNPPWSTAFKGEKVALICSSISHSLAQGDTYWYHDEKLLKIKHDKIQITEPGNYQCKTRGSSLSDAVHVEFSPDWLILQALHPVFEGDNVILRCQGKDNKNTHQKVYYKDGKQLPNSYNLEKITVNSVSRDNSKYHCTAYRKFYILDIEVTSKPLNIQVQELFLHPVLRASSSTPIEGSPMTLTCETQLSPQRPDVQLQFSLFRDSQTLGLGWSRSPRLQIPAMWTEDSGSYWCEVETVTHSIKKRSLRSQIRVQRVPVSNVNLEIRPTGGQLIEGENMVLICSVAQGSGTVTFSWHKEGRVRSLGRKTQRSLLAELHVLTVKESDAGRYYCAADNVHSPILSTWIRVTVRTLLSPSVPVSHPVLTFRAPRAHTVVGDLLELHCESLRGSPPILYRFYHEDVTLGNSSAPSGGGASFNLSLTAEHSGNYSCDADNGLGAQHSHGVSLRVTVPVSRPVLTLRAPGAQAVVGDLLELHCESLRGSFPILYWFYHEDDTLGNISAHSGGGASFNLSLTTEHSGNYSCEADNGLGAQHSKVVTLNVTGTSRNRTGLTAAGITGLVLSILVLAAAAALLHYARARRKPGGLSATGTSSHSPSECQEPSSSRPSRIDPQEPTHSKPLAPMELEPMYSNVNPGDSNPIYSQIWSIQHTKENSANCPMMHQEHEELTVLYSELKKTHPDDSAGEASSRGRAHEEDDEENYENVPRVLLASDH

SEQ ID NO: 5237 - protein, 734 aa, Homo Sapiens; identical to SEQ ID NO: 5234

SEQ ID NO: 5238 - protein, 639 aa, Homo Sapiens
MLLWLLLLILTPGREQSGVAPKAVLLLNPPWSTAFKGEKVALICSSISHSLAQGDTYWYHDEKLLKIKHDKIQITEPGNYQCKTRGSSLSDAVHVEFSPDWLILQALHPVFEGDNVILRCQGKDNKNTHQKVYYKDGKQLPNSYNLEKITVNSVSRDNSKYHCTAYRKFYILDIEVTSKPLNIQVQGVPVSNVNLEIRPTGGQLIEGENMVLICSVAQGSGTVTFSWHKEGRVRSLGRKTQRSLLAELHVLTVKESDAGRYYCAADNVHSPILSTWIRVTVRIPVSHPVLTFRAPRAHTVVGDLLELHCESLRGSPPILYRFYHEDVTLGNSSAPSGGGASFNLSLTAEHSGNYSCDADNGLGAQHSHGVSLRVTVPVSRPVLTLRAPGAQAVVGDLLELHCESLRGSFPILYWFYHEDDTLGNISAHSGGGASFNLSLTTEHSGNYSCEADNGLGAQHSKVVTLNVTGTSRNRTGLTAAGITGLVLSILVLAAAAALLHYARARRKPGGLSATGTSSHSPSECQEPSSSRPSRIDPQEPTHSKPLAPMELEPMYSNVNPGDSNPIYSQIWSIQHTKENSANCPMMHQEHEELTVLYSELKKTHPDDSAGEASSRGRAHEEDDEENYENVPRVLLASDH

SEQ ID NO: 5239 - protein, 592 aa, Homo Sapiens
MLLWVILLVLAPVSGQFARTPRPIIFLQPPWTTVFQGERVTLTCKGFRFYSPQKTKWYHRYLGKEILRETPDNILEVQESGEYRCQAQGSPLSSPVHLDFSSASLILQAPLSVFEGDSVVLRCRAKAEVTLNNTIYKNDNVLAFLNKRTDFHIPHACLKDNGAYRCTGYKESCCPVSSNTVKIQVQEPFTRPVLRASSFQPISGNPVTLTCETQLSLERSDVPLRFRFFRDDQTLGLGWSLSPNFQITAMWSKDSGFYWCKAATMPYSVISDSPRSWIQVQIPASHPVLTLSPEKALNFEGTKVTLHCETQEDSLRTLYRFYHEGVPLRHKSVRCERGASISFSLTTENSGNYYCTADNGLGAKPSKAVSLSVTVPVSHPVLNLSSPEDLIFEGAKVTLHCEAQRGSLPILYQFHHEGAALERRSANSAGGVAISFSLTAEHSGNYYCTADNGFGPQRSKAVSLSVTVPVSHPVLTLSSAEALTFEGATVTLHCEVQRGSPQILYQFYHEDMPLWSSSTPSVGRVSFSFSLTEGHSGNYYCTADNGFGPQRSEVVSLFVTGKCWVLASHPPLAEFSLTHSFKNLFALSSFLP

SEQ ID NO: 5240 - protein, 977 aa, Homo Sapiens
MLLWVILLVLAPVSGQFARTPRPIIFLQPPWTTVFQGERVTLTCKGFRFYSPQKTKWYHRYLGKEILRETPDNILEVQESGEYRCQAQGSPLSSPVHLDFSSASLILQAPLSVFEGDSVVLRCRAKAEVTLNNTIYKNDNVLAFLNKRTDFHIPHACLKDNGAYRCTGYKESCCPVSSNTVKIQVQEPFTRPVLRASSFQPISGNPVTLTCETQLSLERSDVPLRFRFFRDDQTLGLGWSLSPNFQITAMWSKDSGFYWCKAATMPYSVISDSPRSWIQVQIPASHPVLTLSPEKALNFEGTKVTLHCETQEDSLRTLYRFYHEGVPLRHKSVRCERGASISFSLTTENSGNYYCTADNGLGAKPSKAVSLSVTVPVSHPVLNLSSPEDLIFEGAKVTLHCEAQRGSLPILYQFHHEGAALERRSANSAGGVAISFSLTAEHSGNYYCTADNGFGPQRSKAVSLSVTVPVSHPVLTLSSAEALTFEGATVTLHCEVQRGSPQILYQFYHEDMPLWSSSTPSVGRVSFSFSLTEGHSGNYYCTADNGFGPQRSEVVSLFVTVPVSRPILTLRVPRAQAVVGDLLELHCEAPRGSPPILYWFYHEDVTLGSSSAPSGGEASFNLSLTAEHSGNYSCEANNGLVAQHSDTISLSVIVPVSRPILTFRAPRAQAVVGDLLELHCEALRGSSPILYWFYHEDVTLGKISAPSGGGASFNLSLTTEHSGIYSCEADNGLEAQRSEMVTLKVAVPVSRPVLTLRAPGTHAAVGDLLELHCEALRGSPLILYRFFHEDVTLGNRSSPSGGASLNLSLTAEHSGNYSCEADNGLGAQRSETVTLYITGLTANRSGPFATGVAGGLLSIAGLAAGALLLYCWLSRKAGRKPASDPARSPSDSDSQEPTYHNVPAWEELQPVYTNANPRGENVVYSEVRIIQEKKKHAVASDPRHLRNKGSPIIYSEVKVASTPVSGSLFLASSAPHR

SEQ ID NO: 5241 - protein, 759 aa, Homo Sapiens
MLLWVILLVLAPVSGQFARTPRPIIFLQPPWTTVFQGERVTLTCKGFRFYSPQKTKWYHRYLGKEILRETPDNILEVQESGEYRCQAQGSPLSSPVHLDFSSASLILQAPLSVFEGDSVVLRCRAKAEVTLNNTIYKNDNVLAFLNKRTDFHIPHACLKDNGAYRCTGYKESCCPVSSNTVKIQVQEPFTRPVLRASSFQPISGNPVTLTCETQLSLERSDVPLRFRFFRDDQTLGLGWSLSPNFQITAMWSKDSGFYWCKAATMPYSVISDSPRSWIQVQIPASHPVLTLSPEKALNFEGTKVTLHCETQEDSLRTLYRFYHEGVPLRHKSVRCERGASISFSLTTENSGNYYCTADNGLGAKPSKAVSLSVTVPVSHPVLNLSSPEDLIFEGAKVTLHCEAQRGSLPILYQFHHEGAALERRSANSAGGVAISFSLTAEHSGNYYCTADNGFGPQRSKAVSLSVTVPVSHPVLTLSSAEALTFEGATVTLHCEVQRGSPQILYQFYHEDMPLWSSSTPSVGRVSFSFSLTEGHSGNYYCTADNGFGPQRSEVVSLFVTVPVSRPILTLRVPRAQAVVGDLLELHCEAPRGSPPILYWFYHEDVTLGSSSAPSGGEASFNLSLTAEHSGNYSCEANNGLVAQHSDTISLSVIVPVSRPILTFRAPRAQAVVGDLLELHCEALRGSSPILYWFYHEDVTLGKISAPSGGGASFNLSLTTEHSGIYSCEADNGLEAQRSEMVTLKVAGEWALPTSSTSEN

SEQ ID NO: 5242 - protein, 365 aa, Homo Sapiens
MKLGCVLMAWALYLSLGVLWVAQMLLAAGCHAAASFETLQCEGPVCTEESSCHTEDDLTDAREAGFQVKAYTFSEPFHLIVSYDWLILQGPAKPVFEGDLLVLRCQAWQDWPLTQVTFYRDGSALGPPGPNREFSITVVQKADSGHYHCSGIFQSPGPGIPETASVVAITVQELFPAPILRAVPSAEPQAGSPMTLSCQTKLPLQRSAARLLFSFYKDGRIVQSRGLSSEFQIPTASEDHSGSYWCEAATEDNQVWKQSPQLEIRVQGASSSAAPPTLNPAPQKSAAPGTAPEEAPGPLPPPPTPSSEDPGFSSPLGMPDPHLYHQMGLLLKHMQDVRVLLGHLLMELRELSGHRKPGTTKATAE

SEQ ID NO: 5243 - protein, 225 aa, Homo Sapiens
MKLGCVLMAWALYLSLGVLWVAQMLLAAGCHAELFPAPILRAVPSAEPQAGSPMTLSCQTKLPLQRSAARLLFSFYKDGRIVQSRGLSSEFQIPTASEDHSGSYWCEAATEDNQVWKQSPQLEIRVQGASSSAAPPTLNPAPQKSAAPGTAPEEAPGPLPPPPTPSSEDPGFSSPLGMPDPHLYHQMGLLLKHMQDVRVLLGHLLMELRELSGHRKPGTTKATAE

SEQ ID NO: 5244 - protein, 264 aa, Homo Sapiens
MKLGCVLMAWALYLSLGVLWVAQMLLAASFETLQCEGPVCTEESSCHTEDDLTDAREAGFQVKAYTFSEPFHLIVSYDWLILQGPAKPVFEGDLLVLRCQAWQDWPLTQVTFYRDGSALGPPGPNREFSITVVQKADSGHYHCSGIFQSPGPGIPETASVVAITVQGASSSAAPPTLNPAPQKSAAPGTAPEEAPGPLPPPPTPSSEDPGFSSPLGMPDPHLYHQMGLLLKHMQDVRVLLGHLLMELRELSGHRKPGTTKATAE

SEQ ID NO: 5245 - protein, 270 aa, Homo Sapiens
MKLGCVLMAWALYLSLGVLWVAQMLLAASFETLQCEGPVCTEESSCHTEDDLTDAREAGFQVKAYTFSEPFHLIVSYELFPAPILRAVPSAEPQAGSPMTLSCQTKLPLQRSAARLLFSFYKDGRIVQSRGLSSEFQIPTASEDHSGSYWCEAATEDNQVWKQSPQLEIRVQGASSSAAPPTLNPAPQKSAAPGTAPEEAPGPLPPPPTPSSEDPGFSSPLGMPDPHLYHQMGLLLKHMQDVRVLLGHLLMELRELSGHRKPGTTKATAE

SEQ ID NO: 5246 - protein, 382 aa, Homo Sapiens
MLKKISVGVAGDLNTVTMKLGCVLMAWALYLSLGVLWVAQMLLAAGCHAAASFETLQCEGPVCTEESSCHTEDDLTDAREAGFQVKAYTFSEPFHLIVSYDWLILQGPAKPVFEGDLLVLRCQAWQDWPLTQVTFYRDGSALGPPGPNREFSITVVQKADSGHYHCSGIFQSPGPGIPETASVVAITVQELFPAPILRAVPSAEPQAGSPMTLSCQTKLPLQRSAARLLFSFYKDGRIVQSRGLSSEFQIPTASEDHSGSYWCEAATEDNQVWKQSPQLEIRVQGASSSAAPPTLNPAPQKSAAPGTAPEEAPGPLPPPPTPSSEDPGFSSPLGMPDPHLYHQMGLLLKHMQDVRVLLGHLLMELRELSGHRKPGTTKATAE

SEQ ID NO: 5247 - protein, 242 aa, Homo Sapiens
MLKKISVGVAGDLNTVTMKLGCVLMAWALYLSLGVLWVAQMLLAAGCHAELFPAPILRAVPSAEPQAGSPMTLSCQTKLPLQRSAARLLFSFYKDGRIVQSRGLSSEFQIPTASEDHSGSYWCEAATEDNQVWKQSPQLEIRVQGASSSAAPPTLNPAPQKSAAPGTAPEEAPGPLPPPPTPSSEDPGFSSPLGMPDPHLYHQMGLLLKHMQDVRVLLGHLLMELRELSGHRKPGTTKATAE

SEQ ID NO: 5248 - protein, 376 aa, Homo Sapiens
MLKKISVGVAGDLNTVTMKLGCVLMAWALYLSLGVLWVAQMLLAASFETLQCEGPVCTEESSCHTEDDLTDAREAGFQVKAYTFSEPFHLIVSYDWLILQGPAKPVFEGDLLVLRCQAWQDWPLTQVTFYRDGSALGPPGPNREFSITVVQKADSGHYHCSGIFQSPGPGIPETASVVAITVQELFPAPILRAVPSAEPQAGSPMTLSCQTKLPLQRSAARLLFSFYKDGRIVQSRGLSSEFQIPTASEDHSGSYWCEAATEDNQVWKQSPQLEIRVQGASSSAAPPTLNPAPQKSAAPGTAPEEAPGPLPPPPTPSSEDPGFSSPLGMPDPHLYHQMGLLLKHMQDVRVLLGHLLMELRELSGHRKPGTTKATAE

SEQ ID NO: 5249 - protein, 287 aa, Homo Sapiens
MLKKISVGVAGDLNTVTMKLGCVLMAWALYLSLGVLWVAQMLLAASFETLQCEGPVCTEESSCHTEDDLTDAREAGFQVKAYTFSEPFHLIVSYELFPAPILRAVPSAEPQAGSPMTLSCQTKLPLQRSAARLLFSFYKDGRIVQSRGLSSEFQIPTASEDHSGSYWCEAATEDNQVWKQSPQLEIRVQGASSSAAPPTLNPAPQKSAAPGTAPEEAPGPLPPPPTPSSEDPGFSSPLGMPDPHLYHQMGLLLKHMQDVRVLLGHLLMELRELSGHRKPGTTKATAE

SEQ ID NO: 5250 - protein, 192 aa, Homo Sapiens
MLKKISVGVAGDLNTVTMKLGCVLMAWALYLSLGVLWVAQMLLAASFETLQCEGPVCTEESSCHTEDDLTDAREAGFQVKAYTFSEPFHLIVSYGASSSAAPPTLNPAPQKSAAPGTAPEEAPGPLPPPPTPSSEDPGFSSPLGMPDPHLYHQMGLLLKHMQDVRVLLGHLLMELRELSGHRKPGTTKATAE

SEQ ID NO: 5251 - protein, 236 aa, Homo Sapiens
MLKKISVGVAGDLNTVTMKLGCVLMAWALYLSLGVLWVAQMLLELFPAPILRAVPSAEPQAGSPMTLSCQTKLPLQRSAARLLFSFYKDGRIVQSRGLSSEFQIPTASEDHSGSYWCEAATEDNQVWKQSPQLEIRVQGASSSAAPPTLNPAPQKSAAPGTAPEEAPGPLPPPPTPSSEDPGFSSPLGMPDPHLYHQMGLLLKHMQDVRVLLGHLLMELRELSGHRKPGTTKATAE

SEQ ID NO: 5252 - protein, 141 aa, Homo Sapiens
MLKKISVGVAGDLNTVTMKLGCVLMAWALYLSLGVLWVAQMLLGASSSAAPPTLNPAPQKSAAPGTAPEEAPGPLPPPPTPSSEDPGFSSPLGMPDPHLYHQMGLLLKHMQDVRVLLGHLLMELRELSGHRKPGTTKATAE

SEQ ID NO: 5253 - protein, 152 aa, Homo Sapiens
MLLAASFETLQCEGPVCTEESSCHTEDDLTDAREAGFQVKAYTFSEPFHLIVSYGASSSAAPPTLNPAPQKSAAPGTAPEEAPGPLPPPPTPSSEDPGFSSPLGMPDPHLYHQMGLLLKHMQDVRVLLGHLLMELRELSGHRKPGTTKATAE

SEQ ID NO: 5254 - protein, 311 aa, Homo Sapiens
MWPLTALLLLATLEKPILSLHPPWTTIFKGERVTLKCDGYHPLLLELQPISTLWYLGHLLLPSHKKSIEVQTPGVYRCQTRGAPVSDPIHLSVSNDWLILQVPYAPVFEGEPLVLRCRGWYDKVVYKLHYYHDGQAVRYFHSSANYTVLQARASDSGRYQCSGTMRIPVESAPMFSAKVAVTVQAARCAASTGAPSTQSRSPRSRSSNRTGARRLPPPAVSGNAVRGCSSRGRVLPWTRPPPPPQLHGPQPWLLVIGRFPSESPRCPDRSRWSPPSGTPPPPGCSSRRAAPRLRGHPPALRRRPWNNRLEP

SEQ ID NO: 5255 - protein, 268 aa, Homo Sapiens
MWPLTALLLLATLEKPILSLHPPWTTIFKGERVTLKCDGYHPLLLELQPISTLWYLGHLLLPSHKKSIEVQTPGVYRCQTRGAPVSDPIHLSVSNDWLILQVPYAPVFEGEPLVLRCRGWYDKVVYKLHYYHDGQAVRYFHSSANYTVLQARASDSGRYQCSGTMRIPVESAPMFSAKVAVTVQEARHAAAVRVLQVQPRGAPLRLGRRVHSPGARGRGARIVLVRGGYRHPQCPETQSVAAAPGAGFSPGPGLHHRPSSMGRSLGSW

SEQ ID NO: 5256 - protein, 318 aa, Homo Sapiens
MWPLTALLLLVPSSGQAATLEKPILSLHPPWTTIFKGERVTLKCDGYHPLLLELQPISTLWYLGHLLLPSHKKSIEVQTPGVYRCQTRGAPVSDPIHLSVSNDWLILQVPYAPVFEGEPLVLRCRGWYDKVVYKLHYYHDGQAVRYFHSSANYTVLQARASDSGRYQCSGTMRIPVESAPMFSAKVAVTVQAARCAASTGAPSTQSRSPRSRSSNRTGARRLPPPAVSGNAVRGCSSRGRVLPWTRPPPPPQLHGPQPWLLVIGRFPSESPRCPDRSRWSPPSGTPPPPGCSSRRAAPRLRGHPPALRRRPWNNRLEP

SEQ ID NO: 5257 - protein, 275 aa, Homo Sapiens
MWPLTALLLLVPSSGQAATLEKPILSLHPPWTTIFKGERVTLKCDGYHPLLLELQPISTLWYLGHLLLPSHKKSIEVQTPGVYRCQTRGAPVSDPIHLSVSNDWLILQVPYAPVFEGEPLVLRCRGWYDKVVYKLHYYHDGQAVRYFHSSANYTVLQARASDSGRYQCSGTMRIPVESAPMFSAKVAVTVQEARHAAAVRVLQVQPRGAPLRLGRRVHSPGARGRGARIVLVRGGYRHPQCPETQSVAAAPGAGFSPGPGLHHRPSSMGRSLGSW

SEQ ID NO: 5258 - protein, 426 aa, Homo Sapiens
MWPLTALLLLVPSSGQAATLEKPILSLHPPWTTIFKGERVTLKCDGYHPLLLELQPISTLWYLGHLLLPSHKKSIEVQTPGVYRCQTRGAPVSDPIHLSVSNDWLILQVPYAPVFEGEPLVLRCRGWYDKVVYKLHYYHDGQAVRYFHSSANYTVLQARASDSGRYQCSGTMRIPVESAPMFSAKVAVTVQELFRAPVLRVMGPREARGAALGGVVLRCDTRLHPQKRDTPLQFAFYKYSRAVRRFDWGAEYTVPEPEVEELESYWCEAATATRSVRKRSPWLQLPGPGSPLDPASTTAPAPWAAALAPGNRPLSFRKPPVSRSVPLVTSVRNTTSTGLQFPASGAPTAGPPACAPPTPLEQSAGALKPDVDLLLREMQLLKGLLSRVVLELKEPQALRELRGTPETPTSHFAVSPGTPETTPVES

SEQ ID NO: 5259 - protein, 85 aa, Homo Sapiens
MKKVLLLITAILAVAVGFPVSQDQEREKRSISDSDELASGFFVFPYPYPFRPLPPIPFPRFPWFRRNFPIPIPESAPTTPLPSEK

SEQ ID NO: 5260 - protein, 317 aa, Homo Sapiens
MGLLLPLALCILVLCCGAMSPPQLALNPSALLSRGCNDSDVLAVAGFALRDINKDRKDGYVLRLNRVNDAQEYRRAISKKKIYMTCPDCPSSIPTDSSNHQVLEAATESLAKYNNENTSKQYSLFKVTRASSQWVVGPSYFVEYLIKESPCTKSQASSCSLQSSDSVPVGLCKGSLTRTHWEKFVSVTCDFFESQAPATGSENSAVNQKPTNLPKVEESQQKNTPPTDSPSKAGPRGSVQYLPDLDDKNSQEKGPQEAFPVHLDLTTNPQGETLDISFLFLEPMEEKLVVLPFPKEKARTAECPGPAQNASPLVLPP

SEQ ID NO: 5261 - protein, 92 aa, Homo Sapiens
MGLLLPLALCILVLCCGAMSPPQLALNPSALLSRGCNDSDVLAVAGFALRDINKDRKDGYVLRLNRVNDAQEYRRARWPGISVLSYTGCARD

SEQ ID NO: 5262 - protein, 119 aa, Homo Sapiens
MGLLLPLALCILVLCCGAMSPPQLALNPSALLSRGCNDSDVLAVAGFALRDINKDRKDGYVLRLNRVNDAQEYRRGGLGSLFYLTLDVLETDCHVLRKKAWQDCGMRIFFESFQKKRFT

SEQ ID NO: 5263 - protein, 382 aa, Homo Sapiens
MGLLLPLALCILVLCCGAMSPPQLALNPSALLSRGCNDSDVLAVAGFALRDINKDRKDGYVLRLNRVNDAQEYRRGGLGSLFYLTLDVLETDCHVLRKKAWQDCGMRIFFESVYGQCKAIFYMNNPSRVLYLAAYNCTLRPVSKKKIYMTCPDCPSSIPTDSSNHQVLEAATESLAKYNNENTSKQYSLFKVTRASSQWVVGPSYFVEYLIKESPCTKSQASSCSLQSSDSVPVGLCKGSLTRTHWEKFVSVTCDFFESQAPATGSENSAVNQKPTNLPKVEESQQKNTPPTDSPSKAGPRGSVQYLPDLDDKNSQEKGPQEAFPVHLDLTTNPQGETLDISFLFLEPMEEKLVVLPFPKEKARTAECPGPAQNASPLVLPP

SEQ ID NO: 5264 - protein, 382 aa, Homo Sapiens; identical to SEQ ID NO: 5263

SEQ ID NO: 5265 - protein, 345 aa, Homo Sapiens
MGLLLPLALCILVLCCGAMSPPQLALNPSALLSRGCNDSDVLAVAGFALRDINKDRKDGYVLRLNRVNDAQEYRRVYGQCKAIFYMNNPSRVLYLAAYNCTLRPVSKKKIYMTCPDCPSSIPTDSSNHQVLEAATESLAKYNNENTSKQYSLFKVTRASSQWVVGPSYFVEYLIKESPCTKSQASSCSLQSSDSVPVGLCKGSLTRTHWEKFVSVTCDFFESQAPATGSENSAVNQKPTNLPKVEESQQKNTPPTDSPSKAGPRGSVQYLPDLDDKNSQEKGPQEAFPVHLDLTTNPQGETLDISFLFLEPMEEKLVVLPFPKEKARTAECPGPAQNASPLVLPP

SEQ ID NO: 5266 - protein, 104 aa, Homo Sapiens
MTCPDCPSSIPTDSSNHQVLEAATESLAKYNNENTSKQYSLFKVTRASSQWVVGPSYFVEYLIKESPCTKSQASSCSLQSSDSVPVGLCKGSLTRTHWEKFVSV

SEQ ID NO: 5267 - protein, 289 aa, Homo Sapiens [sequence omitted]

SEQ ID NO: 5268 - protein, 866 aa, Homo Sapiens
MFSMRIVCLVLSVVGTAWTADSGEGDFLAEGGGVRGPRVVERHQSACKDSDWPFCSDEDWNYKCPSGCRMKGLIDEVNQDFTNRINKLKNSLFEYQKNNKDSHSLTTNIMEILRGDFSSANNRDNTYNRVSEDLRSRIEVLKRKVIEKVQHIQLLQKNVRAQLVDMKRLEVDIDIKIRSCRGSCSRALAREVDLKDYEDQQKQLEQVIAKDLLPSRDRQHLPLIKMKPVPDLVPGNFKSQLQKVPPEWKALTDMPQMRMELERPGGNEITRGGSTSYGTGSETESPRNPSSAGSWNSGSSGPGSTGNRNPGSSGTGGTATWKPGSSGPGSTGSWNSGSSGTGSTGNQNPGSPRPGSTGTWNPGSSERGSAGHWTSESSVSGSTGQWHSESGSFRPDSPGSGNARPNNPDWGTFEEVSGNVSPGTRREYHTEKLVTSKGDKELRTGKEKVTSGSTTTTRRSCSKTVTKTVIGPDGHKEVTKEVVTSEDGSDCPEAMDLGTLSGIGTLDGFRHRHPDEAAFFDTASTGKTFPGFFSPMLGEFVSETESRGSESGIFTNTKESSSHHPGIAEFPSRGKSSSYSKQFTSSTSYNRGDSTFESKSYKMADEAGSEADHEGTHSTKRGHAKSRPVRDCDDVLQTHPSGTQSGIFNIKLPGSSKIFSVYCDQETSLGGWLLIQQRMDGSLNFNRTWQDYKRGFGSLNDEGEGEFWLGNDYLHLLTQRGSVLRVELEDWAGNEAYAEYHFRVGSEAEGYALQVSSYEGTAGDALIEGSVEEGAEYTSHNNMQFSTFDRDADQWEENCAEVYGGGWWYNNCQAANLNGIYYPGGSYDPRNNSPYEIENGVVWVSFRGADYSLRAVRMKIRPLVTQ

SEQ ID NO: 5269 - protein, 644 aa, Homo Sapiens
MFSMRIVCLVLSVVGTAWTADSGEGDFLAEGGGVRGPRVVERHQSACKDSDWPFCSDEDWNYKCPSGCRMKGLIDEVNQDFTNRINKLKNSLFEYQKNNKDSHSLTTNIMEILRGDFSSANNRDNTYNRVSEDLRSRIEVLKRKVIEKVQHIQLLQKNVRAQLVDMKRLEVDIDIKIRSCRGSCSRALAREVDLKDYEDQQKQLEQVIAKDLLPSRDRQHLPLIKMKPVPDLVPGNFKSQLQKVPPEWKALTDMPQMRMELERPGGNEITRGGSTSYGTGSETESPRNPSSAGSWNSGSSGPGSTGNRNPGSSGTGGTATWKPGSSGPGSTGSWNSGSSGTGSTGNQNPGSPRPGSTGTWNPGSSERGSAGHWTSESSVSGSTGQWHSESGSFRPDSPGSGNARPNNPDWGTFEEVSGNVSPGTRREYHTEKLVTSKGDKELRTGKEKVTSGSTTTTRRSCSKTVTKTVIGPDGHKEVTKEVVTSEDGSDCPEAMDLGTLSGIGTLDGFRHRHPDEAAFFDTASTGKTFPGFFSPMLGEFVSETESRGSESGIFTNTKESSSHHPGIAEFPSRGKSSSYSKQFTSSTSYNRGDSTFESKSYKMADEAGSEADHEGTHSTKRGHAKSRPVRGIHTSPLGKPSLSP

SEQ ID NO: 5270 - protein, 272 aa, Homo Sapiens
MEYCRTPCTVSCNIPVVSGKECEEIIRKGGETSEMYLIQPDSSVKPYRVYCDMNTENGGWTVIQNRQDGSVDFGRKWDPYKQGFGNVATNTDGKNYCGLPGEYWLGNDKISQLTRMGPTELLIEMEDWKGDKVKAHYGGFTVQNEANKYQISVNKYRGTAGNALMDGASQLMGENRTMTIHNGMFFSTYDRDNDGWLTSDPRKQCSKEDGGGWWYNRCHAANPNGRYYWGGQYTWDMAKHGTDDGVVWMNWKGSWYSMRKMSMKIRPFFPQQ

SEQ ID NO: 5271 - protein, 491 aa, Homo Sapiens
MKRMVSWSFHKLKTMKHLLLLLLCVFLVKSQGVNDNEEGFFSARGHRPLDKKREEAPSLRPAPPPISGGGYRARPAKAAATQKKVERKAPDAGGCLHADPDLGVLCPTGCQLQEALLQQERPIRNSVDELNNNVEAVSQTSSSSFQYMYLLKDLWQKRQKQVKDNENVVNEYSSELEKHQLYIDETVNSNIPTNLRVLRSILENLRSKIQKLESDVSAQMEYCRTPCTVSCNIPVVSGKECEEIIRKGGETSEMYLIQPDSSVKPYRVYCDMNTENGGWTVIQNRQDGSVDFGRKWDPYKQGFGNVATNTDGKNYCGLPGEYWLGNDKISQLTRMGPTELLIEMEDWKGDKVKAHYGGFTVQNEANKYQISVNKYRGTAGNALMDGASQLMGENRTMTIHNGMFFSTYDRDNDGWLTSDPRKQCSKEDGGGWWYNRCHAANPNGRYYWGGQYTWDMAKHGTDDGVVWMNWKGSWYSMRKMSMKIRPFFPQQ

SEQ ID NO: 5272 - protein, 45 aa, Homo Sapiens
MKRMVSWSFHKLKTMKHLLLLLLCVFLVKSQGVNDNEEMRKLGHR

SEQ ID NO: 5273 - protein, 66 aa, Homo Sapiens
MWKWILTHCASAFPHLPGCCCCCFLLLFLVSSVPVTCQALGQDMVSPEATNSSSSSFSSPSSAGRH

SEQ ID NO: 5274 - protein, 208 aa, Homo Sapiens
MWKWILTHCASAFPHLPGCCCCCFLLLFLVSSVPVTCQALGQDMVSPEATNSSSSSFSSPSSAGRHVRSYNHLQGDVRWRKLFSFTKYFLKIEKNGKVSGTKKENCPYSILEITSVEIGVVAVKAINSNYYLAMNKKGKLYGSKEFNNDCKLKERIEENGYNTYASFNWQHNGRQMYVALNGKGAPRRGQKTRRKNTSAHFLPMVVHS

SEQ ID NO: 5275 - protein, 216 aa, Homo Sapiens
MGAARLLPNLTLCLQLLILCCQTQGENHPSPNFNQYVRDQGAMTDQLSRRQIREYQLYSRTSGKHVQVTGRRISATAEDGNKFAKLIVETDTFGSRVRIKGAESEKYICMNKRGKLIGKPSGKSKDCVFTEIVLENNYTAFQNARHEGWFMAFTRQGRPRQASRSRQNQREAHFIKRLYQGQLPFPNHAEKQKQFEFVGSAPTRRTKRTRRPQPLT

SEQ ID NO: 5276 - protein, 205 aa, Homo Sapiens
MGAARLLPNLTLCLQLLILCCQTQYVRDQGAMTDQLSRRQIREYQLYSRTSGKHVQVTGRRISATAEDGNKFAKLIVETDTFGSRVRIKGAESEKYICMNKRGKLIGKPSGKSKDCVFTEIVLENNYTAFQNARHEGWFMAFTRQGRPRQASRSRQNQREAHFIKRLYQGQLPFPNHAEKQKQFEFVGSAPTRRTKRTRRPQPLT

SEQ ID NO: 5277 - protein, 207 aa, Homo Sapiens
MYSAPSACTCLCLHFLLLCFQVQVLVAEENVDFRIHVENQTRARDDVSRKQLRLYQLYSRTSGKHIQVLGRRISARGEDGDKYAQLLVETDTFGSQVRIKGKETEFYLCMNRKGKLVGKPDGTSKECVFIEKVLENNYTALMSAKYSGWYVGFTKKGRPRKGPKTRENQQDVHFMKRYPKGQPELQKPFKYTTVTKRSRRIRPTHPA

SEQ ID NO: 5278 - protein, 216 aa, Homo Sapiens
MRSGCVVVHVWILAGLWLAVAGRPLAFSDAGPHVHYGWGDPIRLRHLYTSGPHGLSSCFLRIRADGVVDCARGQSAHSLLEIKAVALRTVAIKGVHSVRYLCMGADGKMQGLLQYSEEDCAFEEEIRPDGYNVYRSEKHRLPVSLSSAKQRQLYKNRGFLPLSHFLPMLPMVPEEPEDLRGHLESDMFSSPLETDSMDPFGLVTGLEAVRSPSFEK

SEQ ID NO: 5279 - protein, 209 aa, Homo Sapiens
MDSDETGFEHSGLWVSVLAGLLLGACQAHPIPDSSPLLQFGGQVRQRYLYTDDAQQTEAHLEIREDGTVGGAADQSPESLLQLKALKPGVIQILGVKTSRFLCQRPDGALYGSLHFDPEACSFRELLLEDGYNVYQSEAHGLPLHLPGNKSPHRDPAPRGPARFLPLPGLPPALPEPPGILAPQPPDVGSSDPLSMVGPSQGRSPSYAS

SEQ ID NO: 5280 - protein, 209 aa, Homo Sapiens; identical to SEQ ID NO: 5279

SEQ ID NO: 5281 - protein, 170 aa, Homo Sapiens
MRRRLWLGLAWLLLARAPDAAGTPSASRGPRSYPHLEGDVRWRRLFSSTHFFLRVDPGGRVQGTRWRHGQDSILEIRSVHVGVVVIKAVSSGFYVAMNRRGRLYGSRLYTVDCRFRERIEENGHNTYASQRWRRRGQPMFLALDRRGGPRPGGRTRRYHLSAHFLPVLVS

SEQ ID NO: 5282 - protein, 165 aa, Homo Sapiens
MRRRLWLGLAWLLLARAPDAAGTPSASRGPRSYPHLEGDVRWRRLFSSTHFFLRVDPGGRVQGTRWRHGQDSILEIRSVHVGVVVIKAVSSGFYVAMNRRGRLYGSVPGAHRRERPQHLRLTALAPPRPAHVPGAGQEGGAPARRPDAAVPPVRPLPARPGLLRP

SEQ ID NO: 5283 - protein, 251 aa, Homo Sapiens
MLGARLRLWVCALCSVCSMSVLRAYPNASPLLGSSWGGLIHLYTATARNSYHLQIHKNGHVDGAPHQTIYSALMIRSEDAGFVVITGVMSRRYLCMDFRGNIFGSHYFDPENCRFQHQTLENGYDVYHSPQYHFLVSLGRAKRAFLPGMNPPPYSQFLSRRNEIPLIHFNTPIPRRHTRSAEDDSERDPLNVLKPRARMTPAPASCSQELPSAEDNSPMASDPLGVVRGGRVNTHAGGTGPEGCRPFAKFI

SEQ ID NO: 5284 - protein, 239 aa, Homo Sapiens
MGLIWLLLLSLLEPGWPAAGPGARLRRDAGGRGGVYEHLGGAPRRRKLYCATKYHLQLHPSGRVNGSLENSAYSILEITAVEVGIVAIRGLFSGRYLAMNKRGRLYASEHYSAECEFVERIHELGYNTYASRLYRTVSSTPGARRQPSAERLWYVSVNGKGRPRRGFKTRRTQKSSLFLPRVLDHRDHEMVRQLQSGLPRPPGKGVQPRRRRQKQSPDNLEPSHVQASRLGSQLEASAH

SEQ ID NO: 5285 - protein, 206 aa, Homo Sapiens
MSGPGTAAVALLPAVLLALLAPWAGRGGAAAPTAPNGTLEAELERRWESLVALSLARLPVAAQPKEAAVQSGAGDYLLGIKRLRRLYCNVGIGFHLQALPDGRIGGAHADTRDSLLELSPVERGVVSIFGVASRFFVAMSSKGKLYGSPFFTDECTFKEILLPNNYNAYESYKYPGMFIALSKNGKTKKGNRVSPTMKVTHFLPRL

SEQ ID NO: 5286 - protein, 123 aa, Homo Sapiens
MSLSFLLLLFFSHLILSAWAHGEKRLAPKGQPGPAATDRNPRGSSSRQSSSSAMSSSSASSSPAASLGSQGSGLEQSSFQWSPSGRRTGSLYCRVGIGFHLQIYPDGKVNGSHEANMLSQVHR

SEQ ID NO: 5287 - protein, 268 aa, Homo Sapiens
MSLSFLLLLFFSHLILSAWAHGEKRLAPKGQPGPAATDRNPRGSSSRQSSSSAMSSSSASSSPAASLGSQGSGLEQSSFQWSPSGRRTGSLYCRVGIGFHLQIYPDGKVNGSHEANMLSVLEIFAVSQGIVGIRGVFSNKFLAMSKKGKLHASAKFTDDCKFRERFQENSYNTYASAIHRTEKTGREWYVALNKRGKAKRGCSPRVKPQHISTHFLPRFKQSEQPELSFTVTVPEKKKPPSPIKPKIPLSAPRKNTNSVKYRLKFRFG

SEQ ID NO: 5288 - protein, 119 aa, Homo Sapiens
NPRGSSSRQSSSSAMSSSSASSSPAASLGSQGSGLEQSSFQWSPSGRRTGSLYCRVGIGFHLQIYPDGKVNGSHEANMLSVLEIFAVSQGIVGIRGVFSNKFLAMSKKGKLHASNTLET

SEQ ID NO: 5289 - protein, 122 aa, Homo Sapiens
MEGGDIRVRRLFCRTQWYLRIDKRGKVKGTQEMKNNYNIMEIRTVAVGIVAIKGVESEFYLAMNKEGKLYAKKECNEDCNFKELILENHYNTYASAKWTHNGGEMFVALNQKGIPVRGKKTK

SEQ ID NO: 5290 - protein, 194 aa, Homo Sapiens
MHKWILTWILPTLLYRSCFHIICLVGTISLACNDMTPEQMATNVNCSSPERHTRSYDYMEGGDIRVRRLFCRTQWYLRIDKRGKVKGTQEMKNNYNIMEIRTVAVGIVAIKGVESEFYLAMNKEGKLYAKKECNEDCNFKELILENHYNTYASAKWTHNGGEMFVALNQKGIPVRGKKTKKEQKTAHFLPMAIT

SEQ ID NO: 5291 - protein, 194 aa, Homo Sapiens; identical to SEQ ID NO: 5290

SEQ ID NO: 5292 - protein, 194 aa, Homo Sapiens; identical to SEQ ID NO: 5290

SEQ ID NO: 5293 - protein, 97 aa, Homo Sapiens
MHKWILTWILPTLLYRSCFHIICLVGTISLACNDMTPEQMATNVNCSSPERHTRSYDYMEGGDIRVRRLFCRTQWYLRIDKRGKVKGTQEMKNNYSK

SEQ ID NO: 5294 - protein, 140 aa, Homo Sapiens
MAEDGDPFAKLIVETDTFGSRVRVRGAETGLYICMNKKGKLIAKSNGKGKDCVFTEIVLENNYTALQNAKYEGWYMAFTRKGRPRKGSKTRQHQREVHFMKRLPRGHHTTEQSLRFEFLNYPPFTRSLRGSQRTWAPEPR

SEQ ID NO: 5295 - protein, 233 aa, Homo Sapiens
MGSPRSALSCLLLHLLVLCLQAQEGPGRGPALGRELASLFRAGREPQGVSQQHVREQSLVTDQLSRRLIRTYQLYSRTSGKHVQVLANKRINAMAEDGDPFAKLIVETDTFGSRVRVRGAETGLYICMNKKGKLIAKSNGKGKDCVFTEIVLENNYTALQNAKYEGWYMAFTRKGRPRKGSKTRQHQREVHFMKRLPRGHHTTEQSLRFEFLNYPPFTRSLRGSQRTWAPEPR

SEQ ID NO: 5296 - protein, 244 aa, Homo Sapiens
MGSPRSALSCLLLHLLVLCLQAQEGPGRGPALGRELASLFRAGREPQGVSQQVTVQSSPNFTQHVREQSLVTDQLSRRLIRTYQLYSRTSGKHVQVLANKRINAMAEDGDPFAKLIVETDTFGSRVRVRGAETGLYICMNKKGKLIAKSNGKGKDCVFTEIVLENNYTALQNAKYEGWYMAFTRKGRPRKGSKTRQHQREVHFMKRLPRGHHTTEQSLRFEFLNYPPFTRSLRGSQRTWAPEPR

SEQ ID NO: 5297 - protein, 204 aa, Homo Sapiens
MGSPRSALSCLLLHLLVLCLQAQHVREQSLVTDQLSRRLIRTYQLYSRTSGKHVQVLANKRINAMAEDGDPFAKLIVETDTFGSRVRVRGAETGLYICMNKKGKLIAKSNGKGKDCVFTEIVLENNYTALQNAKYEGWYMAFTRKGRPRKGSKTRQHQREVHFMKRLPRGHHTTEQSLRFEFLNYPPFTRSLRGSQRTWAPEPR

SEQ ID NO: 5298 - protein, 37 aa, Homo Sapiens
MGSPRSALSCLLLHLLVLCLQAQVRRGARRRGPGAPV

SEQ ID NO: 5299 - protein, 215 aa, Homo Sapiens
MGSPRSALSCLLLHLLVLCLQAQVTVQSSPNFTQHVREQSLVTDQLSRRLIRTYQLYSRTSGKHVQVLANKRINAMAEDGDPFAKLIVETDTFGSRVRVRGAETGLYICMNKKGKLIAKSNGKGKDCVFTEIVLENNYTALQNAKYEGWYMAFTRKGRPRKGSKTRQHQREVHFMKRLPRGHHTTEQSLRFEFLNYPPFTRSLRGSQRTWAPEPR

SEQ ID NO: 5300 - protein, 234 aa, Homo Sapiens [sequence omitted]

SEQ ID NO: 5301 - protein, 223 aa, Homo Sapiens
MKFVPCLLLVTLSCLGTLGQAPRQKQGSTGEEFHFQTGGRDSCTMRPSSLGQGAGEVWLRVDCRNTDQTYWCEYRGQPSMCQAFAADPKPYWNQALQELRRLHHACQGAPVLRPSVCREAGPQAHMQQVTSSLKGSPEPNQQPEAGTPSLRPKATVKLTEATQLGKDSMEELGKAKPTTRPTAKPTQPGPRPGGNEEAKKKAWEHCWKPFQALCAFLISFFRG

SEQ ID NO: 5302 - protein, 258 aa, Homo Sapiens
MTPPKLRASLSPSLLLLLSGCLLAAARREKGAASNVAEPVPGPTGGSSGRFLSPEQHACSWQLLLPAPEAAAGSELALRCQSPDGARHQCAYRGHPERCAAYAARRAHFWKQVLGGLRKKRRPCHDPAPLQARLCAGKKGHGAELRLVPRASPPARPTVAGFAGESKPRARNRGRTRERASGPAAGTPPPQSAPPKENPSERKTNEGKRKAALVPNEERPMGTGPDPDGLDGNAELTETYCAEKWHSLCNFFVNFWNG

SEQ ID NO: 5303 - skipped

SEQ ID NO: 5304 - protein, 812 aa, Homo Sapiens
MAAVTRDFGEMLLHSGRVLPAEAQPWGAPVEVESFLVHPGDLLQLRCRLRDDVQSINWLRDGVQLAESNRTRITGEEVEVQDSVPADSGLYACVTSSPSGSDTTYFSVNVSDALPSSEDDDDDDDSSSEEKETDNTKPNRMPVAPYWTSPEKMEKKLHAVPAAKTVKFKCPSSGTPNPTLRWLKNGKEFKPDHRIGGYKVRYATWSIIMDSVVPSDKGNYTCIVENEYGSINHTYQLDVVERSPHRPILQAGLPANKTVALGSNVEFMCKVYSDPQPHIQWLKHIEVNGSKIGPDNLPYVQILKTAGVNTTDKEMEVLHLRNVSFEDAGEYTCLAGNSIGLSHHSAWLTVLEALEERPAVMTSPLYLEIIIYCTGAFLISCMVGSVIVYKMKSGTKKSDFHSQMAVHKLAKSIPLRRQVSADSSASMNSGVLLVRPSRLSSSGTPMLAGVSEYELPEDPRWELPRDRLVLGKPLGEGCFGQVVLAEAIGLDKDKPNRVTKVAVKMLKSDATEKDLSDLISEMEMMKMIGKHKNIINLLGACTQDGPLYVIVEYASKGNLREYLQARRPPGLEYCYNPSHNPEEQLSSKDLVSCAYQVARGMEYLASKKCIHRDLAARNVLVTEDNVMKIADFGLARDIHHIDYYKKTTNGRLPVKWMAPEALFDRIYTHQSDVWSFGVLLWEIFTLGGSPYPGVPVEELFKLLKEGHRMDKPSNCTNELYMMMRDCWHAVPSQRPTFKQLVEDLDRIVALTSNQEYLDLSMPLDQYSPSFPDTRSSTCSSGEDSVFSHEPLPEEPCLPRHPAQLANGGLKRR

SEQ ID NO: 5305 - protein, 853 aa, Homo Sapiens
MEARVSLKRRIELTVEYPWRCGALSPTSNCRTGMWSWKCLLFWAVLVTATLCTARPSPTLPEQAQPWGAPVEVESFLVHPGDLLQLRCRLRDDVQSINWLRDGVQLAESNRTRITGEEVEVQDSVPADSGLYACVTSSPSGSDTTYFSVNVSDALPSSEDDDDDDDSSSEEKETDNTKPNPVAPYWTSPEKMEKKLHAVPAAKTVKFKCPSSGTPNPTLRWLKNGKEFKPDHRIGGYKVRYATWSIIMDSVVPSDKGNYTCIVENEYGSINHTYQLDVVERSPHRPILQAGLPANKTVALGSNVEFMCKVYSDPQPHIQWLKHIEVNGSKIGPDNLPYVQILKTAGVNTTDKEMEVLHLRNVSFEDAGEYTCLAGNSIGLSHHSAWLTVLEALEERPAVMTSPLYLEIIIYCTGAFLISCMVGSVIVYKMKSGTKKSDFHSQMAVHKLAKSIPLRRQVTVSADSSASMNSGVLLVRPSRLSSSGTPMLAGVSEYELPEDPRWELPRDRLVLGKPLGEGCFGQVVLAEAIGLDKDKPNRVTKVAVKMLKSDATEKDLSDLISEMEMMKMIGKHKNIINLLGACTQDGPLYVIVEYASKGNLREYLQARRPPGLEYCYNPSHNPEEQLSSKDLVSCAYQVARGMEYLASKKCIHRDLAARNVLVTEDNVMKIADFGLARDIHHIDYYKKTTNGRLPVKWMAPEALFDRIYTHQSDVWSFGVLLWEIFTLGGSPYPGVPVEELFKLLKEGHRMDKPSNCTNELYMMMRDCWHAVPSQRPTFKQLVEDLDRIVALTSNQEYLDLSMPLDQYSPSFPDTRSSTCSSGEDSVFSHEPLPEEPCLPRHPAQLANGGLKRR

SEQ ID NO: 5306 - protein, 139 aa, Homo Sapiens
MEKKLHAVPAAKTVKFKCPSSGTPNPTLRWLKNGKEFKPDHRIGGYKVRYATWSIIMDSVVPSDKGNYTCIVENEYGSINHTYQLDVVERSPHRPILQAGLPANKTVALGSNVEFMCKVYSDPQPHIQWLKHIEVNGSK

SEQ ID NO: 5307 - protein, 61 aa, Homo Sapiens
MWSWKCLLFWAVLVTATLCTARPSPTLPEQACPDLQEAKWCSASFHSITPLPFGLGTRLSD

SEQ ID NO: 5308 - protein, 107 aa, Homo Sapiens
MWSWKCLLFWAVLVTATLCTARPSPTLPEQAQPWGAPVEVESFLVHPGDLLQLRCRLRDDVQSINWLRDGVQLAESNRTRITGEEVEVQDSVPADSGLYACVTSSPS

SEQ ID NO: 5309 - protein, 150 aa, Homo Sapiens
MWSWKCLLFWAVLVTATLCTARPSPTLPEQAQPWGAPVEVESFLVHPGDLLQLRCRLRDDVQSINWLRDGVQLAESNRTRITGEEVEVQDSVPADSGLYACVTSSPSGSDTTYFSVNVSACPDLQEAKWCSASFHSITPLPFGLGTRLSD

SEQ ID NO: 5310 - protein, 820 aa, Homo Sapiens
MWSWKCLLFWAVLVTATLCTARPSPTLPEQAQPWGAPVEVESFLVHPGDLLQLRCRLRDDVQSINWLRDGVQLAESNRTRITGEEVEVQDSVPADSGLYACVTSSPSGSDTTYFSVNVSDALPSSEDDDDDDDSSSEEKETDNTKPNPVAPYWTSPEKMEKKLHAVPAAKTVKFKCPSSGTPNPTLRWLKNGKEFKPDHRIGGYKVRYATWSIIMDSVVPSDKGNYTCIVENEYGSINHTYQLDVVERSPHRPILQAGLPANKTVALGSNVEFMCKVYSDPQPHIQWLKHIEVNGSKIGPDNLPYVQILKTAGVNTTDKEMEVLHLRNVSFEDAGEYTCLAGNSIGLSHHSAWLTVLEALEERPAVMTSPLYLEIIIYCTGAFLISCMVGSVIVYKMKSGTKKSDFHSQMAVHKLAKSIPLRRQVTVSADSSASMNSGVLLVRPSRLSSSGTPMLAGVSEYELPEDPRWELPRDRLVLGKPLGEGCFGQVVLAEAIGLDKDKPNRVTKVAVKMLKSDATEKDLSDLISEMEMMKMIGKHKNIINLLGACTQDGPLYVIVEYASKGNLREYLQARRPPGLEYCYNPSHNPEEQLSSKDLVSCAYQVARGMEYLASKKCIHRDLAARNVLVTEDNVMKIADFGLARDIHHIDYYKKTTNGRLPVKWMAPEALFDRIYTHQSDVWSFGVLLWEIFTLGGSPYPGVPVEELFKLLKEGHRMDKPSNCTNELYMMMRDCWHAVPSQRPTFKQLVEDLDRIVALTSNQEYLDLSMPLDQYSPSFPDTRSSTCSSGEDSVFSHEPLPEEPCLPRHPAQLANGGLKRR

SEQ ID NO: 5311 - protein, 820 aa, Homo Sapiens; identical to SEQ ID NO: 5310

SEQ ID NO: 5312 - protein, 820 aa, Homo Sapiens; identical to SEQ ID NO: 5310

SEQ ID NO: 5313 - protein, 822 aa, Homo Sapiens [sequence omitted]

SEQ ID NO: 5314 - protein, 298 aa, Homo Sapiens
MWSWKCLLFWAVLVTATLCTARPSPTLPEQAQPWGAPVEVESFLVHPGDLLQLRCRLRDDVQSINWLRDGVQLAESNRTRITGEEVEVQDSVPADSGLYACVTSSPSGSDTTYFSVNVSDALPSSEDDDDDDDSSSEEKETDNTKPNRMPVAPYWTSPEKMEKKLHAVPAAKTVKFKCPSSGTPNPTLRWLKNGKEFKPDHRIGGYKVRYATWSIIMDSVVPSDKGNYTCIVENEYGSINHTYQLDVVERSPHRPILQAGLPANKTVALGSNVEFMCKVYSDPQPHIQWLKHIEVNGS

SEQ ID NO: 5315 - protein, 820 aa, Homo Sapiens
MWSWKCLLFWAVLVTATLCTARPSPTLPEQAQPWGAPVEVESFLVHPGDLLQLRCRLRDDVQSINWLRDGVQLAESNRTRITGEEVEVQDSVPADSGLYACVTSSPSGSDTTYFSVNVSDALPSSEDDDDDDDSSSEEKETDNTKPNRMPVAPYWTSPEKMEKKLHAVPAAKTVKFKCPSSGTPNPTLRWLKNGKEFKPDHRIGGYKVRYATWSIIMDSVVPSDKGNYTCIVENEYGSINHTYQLDVVERSPHRPILQAGLPANKTVALGSNVEFMCKVYSDPQPHIQWLKHIEVNGSKIGPDNLPYVQILKTAGVNTTDKEMEVLHLRNVSFEDAGEYTCLAGNSIGLSHHSAWLTVLEALEERPAVMTSPLYLEIIIYCTGAFLISCMVGSVIVYKMKSGTKKSDFHSQMAVHKLAKSIPLRRQVSADSSASMNSGVLLVRPSRLSSSGTPMLAGVSEYELPEDPRWELPRDRLVLGKPLGEGCFGQVVLAEAIGLDKDKPNRVTKVAVKMLKSDATEKDLSDLISEMEMMKMIGKHKNIINLLGACTQDGPLYVIVEYASKGNLREYLQARRPPGLEYCYNPSHNPEEQLSSKDLVSCAYQVARGMEYLASKKCIHRDLAARNVLVTEDNVMKIADFGLARDIHHIDYYKKTTNGRLPVKWMAPEALFDRIYTHQSDVWSFGVLLWEIFTLGGSPYPGVPVEELFKLLKEGHRMDKPSNCTNELYMMMRDCWHAVPSQRPTFKQLVEDLDRIVALTSNQEYLDLSMPLDQYSPSFPDTRSSTCSSGEDSVFSHEPLPEEPCLPRHPAQLANGGLKRR

SEQ ID NO: 5316 - protein, 367 aa, Homo Sapiens
MWSWKCLLFWAVLVTATLCTARPSPTLPEQAQPWGAPVEVESFLVHPGDLLQLRCRLRDDVQSINWLRDGVQLAESNRTRITGEEVEVQDSVPADSGLYACVTSSPSGSDTTYFSVNVSVPIDALPSSEDDDDDDDSSSEEKETDNTKPNPVAPYWTSPEKMEKKLHAVPAAKTVKFKCPSSGTPNPTLRWLKNGKEFKPDHRIGGYKVRYATWSIIMDSVVPSDKGNYTCIVENEYGSINHTYQLDVVERSPHRPILQAGLPANKTVALGSNVEFMCKVYSDPQPHIQWLKHIEVNGSKIGPDNLPYVQILKHSGINSSDAEVLTLFNVTEAQSGEYVCKVSNYIGEANQSAWLTVTRPVAKDCWS

SEQ ID NO: 5317 - protein, 55 aa, Homo Sapiens
MWSWKCLLFWAVLVTATLCTARPSPTLPEQDALPSSEDDDDDDDSSSEEKETDNT

SEQ ID NO: 5318 - protein, 85 aa, Homo Sapiens
MWSWKCLLFWAVLVTATLCTARPSPTLPEQDALPSSEDDDDDDDSSSEEKETDNTKPNPVAPYWTSPEKMEKKLHAVPAAKTVKF

SEQ ID NO: 5319 - protein, 145 aa, Homo Sapiens
MWSWKCLLFWAVLVTATLCTARPSPTLPEQDALPSSEDDDDDDDSSSEEKETDNTKPNPVAPYWTSPEKMEKKLHAVPAAKTVKFKCPSSGTPNPTLRWLKNGKEFKPDHRIGGYKVRYATWSIIMDSVVPSDKGNYTCIVENEY

SEQ ID NO: 5320 - protein, 733 aa, Homo Sapiens
MWSWKCLLFWAVLVTATLCTARPSPTLPEQDALPSSEDDDDDDDSSSEEKETDNTKPNPVAPYWTSPEKMEKKLHAVPAAKTVKFKCPSSGTPNPTLRWLKNGKEFKPDHRIGGYKVRYATWSIIMDSVVPSDKGNYTCIVENEYGSINHTYQLDVVERSPHRPILQAGLPANKTVALGSNVEFMCKVYSDPQPHIQWLKHIEVNGSKIGPDNLPYVQILKHSGINSSDAEVLTLFNVTEAQSGEYVCKVSNYIGEANQSAWLTVTRPVAKALEERPAVMTSPLYLEIIIYCTGAFLISCMVGSVIVYKMKSGTKKSDFHSQMAVHKLAKSIPLRRQVTVSADSSASMNSGVLLVRPSRLSSSGTPMLAGVSEYELPEDPRWELPRDRLVLGKPLGEGCFGQVVLAEAIGLDKDKPNRVTKVAVKMLKSDATEKDLSDLISEMEMMKMIGKHKNIINLLGACTQDGPLYVIVEYASKGNLREYLQARRPPGLEYCYNPSHNPEEQLSSKDLVSCAYQVARGMEYLASKKCIHRDLAARNVLVTEDNVMKIADFGLARDIHHIDYYKKTTNGRLPVKWMAPEALFDRIYTHQSDVWSFGVLLWEIFTLGGSPYPGVPVEELFKLLKEGHRMDKPSNCTNELYMMMRDCWHAVPSQRPTFKQLVEDLDRIVALTSNQEYLDLSMPLDQYSPSFPDTRSSTCSSGEDSVFSHEPLPEEPCLPRHPAQLANGGLKRR

SEQ ID NO: 5321 - protein, 228 aa, Homo Sapiens
MWSWKCLLFWAVLVTATLCTARPSPTLPEQDALPSSEDDDDDDDSSSEEKETDNTKPNPVAPYWTSPEKMEKKLHAVPAAKTVKFKCPSSGTPNPTLRWLKNGKEFKPDHRIGGYKVRYATWSIIMDSVVPSDKGNYTCIVENEYGSINHTYQLDVVERSPHRPILQAGLPANKTVALGSNVEFMCKVYSDPQPHIQWLKHIEVNGSKIGPDNLPYVQILKPWKRGRQ

SEQ ID NO: 5322 - protein, 731 aa, Homo Sapiens
MWSWKCLLFWAVLVTATLCTARPSPTLPEQDALPSSEDDDDDDDSSSEEKETDNTKPNPVAPYWTSPEKMEKKLHAVPAAKTVKFKCPSSGTPNPTLRWLKNGKEFKPDHRIGGYKVRYATWSIIMDSVVPSDKGNYTCIVENEYGSINHTYQLDVVERSPHRPILQAGLPANKTVALGSNVEFMCKVYSDPQPHIQWLKHIEVNGSKIGPDNLPYVQILKTAGVNTTDKEMEVLHLRNVSFEDAGEYTCLAGNSIGLSHHSAWLTVLEALEERPAVMTSPLYLEIIIYCTGAFLISCMVGSVIVYKMKSGTKKSDFHSQMAVHKLAKSIPLRRQVTVSADSSASMNSGVLLVRPSRLSSSGTPMLAGVSEYELPEDPRWELPRDRLVLGKPLGEGCFGQVVLAEAIGLDKDKPNRVTKVAVKMLKSDATEKDLSDLISEMEMMKMIGKHKNIINLLGACTQDGPLYVIVEYASKGNLREYLQARRPPGLEYCYNPSHNPEEQLSSKDLVSCAYQVARGMEYLASKKCIHRDLAARNVLVTEDNVMKIADFGLARDIHHIDYYKKTTNGRLPVKWMAPEALFDRIYTHQSDVWSFGVLLWEIFTLGGSPYPGVPVEELFKLLKEGHRMDKPSNCTNELYMMMRDCWHAVPSQRPTFKQLVEDLDRIVALTSNQEYLDLSMPLDQYSPSFPDTRSSTCSSGEDSVFSHEPLPEEPCLPRHPAQLANGGLKRR

SEQ ID NO: 5323 - protein, 142 aa, Homo Sapiens
MWSWKCLLFWAVLVTATLCTARPSPTLPEQDALPSSEDDDDDDDSSSEEKETDNTKPNRMPVAPYWTSPEKMEKKLHAVPAAKTVKFKCPSSGTPNPTLRWLKNGKEFKPDHRIGGYKVRYATWSIIMDSVVPSDKGNYTCI

SEQ ID NO: 5324 - protein, 733 aa, Homo Sapiens
MWSWKCLLFWAVLVTATLCTARPSPTLPEQDALPSSEDDDDDDDSSSEEKETDNTKPNRMPVAPYWTSPEKMEKKLHAVPAAKTVKFKCPSSGTPNPTLRWLKNGKEFKPDHRIGGYKVRYATWSIIMDSVVPSDKGNYTCIVENEYGSINHTYQLDVVERSPHRPILQAGLPANKTVALGSNVEFMCKVYSDPQPHIQWLKHIEVNGSKIGPDNLPYVQILKTAGVNTTDKEMEVLHLRNVSFEDAGEYTCLAGNSIGLSHHSAWLTVLEALEERPAVMTSPLYLEIIIYCTGAFLISCMVGSVIVYKMKSGTKKSDFHSQMAVHKLAKSIPLRRQVTVSADSSASMNSGVLLVRPSRLSSSGTPMLAGVSEYELPEDPRWELPRDRLVLGKPLGEGCFGQVVLAEAIGLDKDKPNRVTKVAVKMLKSDATEKDLSDLISEMEMMKMIGKHKNIINLLGACTQDGPLYVIVEYASKGNLREYLQARRPPGLEYCYNPSHNPEEQLSSKDLVSCAYQVARGMEYLASKKCIHRDLAARNVLVTEDNVMKIADFGLARDIHHIDYYKKTTNGRLPVKWMAPEALFDRIYTHQSDVWSFGVLLWEIFTLGGSPYPGVPVEELFKLLKEGHRMDKPSNCTNELYMMMRDCWHAVPSQRPTFKQLVEDLDRIVALTSNQEYLDLSMPLDQYSPSFPDTRSSTCSSGEDSVFSHEPLPEEPCLPRHPAQLANGGLKRR

SEQ ID NO: 5325 - protein, 134 aa, Homo Sapiens
VSCAYQVARGMEYLASKKCIHRDLAARNVLVTEDNVMKIADFGLARDIHHIDYYKKTTNGRLPVKWMAPEALFDRIYTHQSDVWSFGVLLWEIFTLGGSPYPGVPVEELFKLLKEGHRMDKPSNCTNELPAAGT

SEQ ID NO: 5326 - protein, 371 aa, Homo Sapiens
FSSQPAVHKLTKRIPLRRQVTVSAESSSSMNSNTPLVRITTRLSSTADTPMLAGVSEYELPEDPKWEFPRDKLTLGKPLGEGCFGQVVMAEAVGIDKDKPKEAVTVAVKMLKDDATEKDLSDLVSEMEMMKMIGKHKNIINLLGACTQDGPLYVIVEYASKGNLREYLRARRPPGMEYSYDINRVPEEQMTFKDLVSCTYQLARGMEYLASQKCIHRDLAARNVLVTENNVMKIADFGLARDINNIDYYKKTTNGRLPVKWMAPEALFDRVYTHQSDVWSFGVLMWEIFTLGGSPYPGIPVEELFKLLKEGHRMDKPANCTNELNTWTSANLSNSIHLVTLTQEVLVLQEMILFFLQTPCLTNHAFLSIHT

SEQ ID NO: 5327 - protein, 593 aa, Homo Sapiens
MCLNKTKQLFGVAKRLPFWRKERSPHRPILQAGLPANASTVVGGDVEFVCKVYSDAQPHIQWIKHVEKNGSKYGPDGLPYLKVLKAAGVNTTDKEIEVLYIRNVTFEDAGEYTCLAGNSIGISFHSAWLTVLPAPGREKEITASPDYLEIAIYCIGVFLIACMVVTVILCRMKNTTKKPDFSSQPAVHKLTKRIPLRRQVTVSAESSSSMNSNTPLVRITTRLSSTADTPMLAGVSEYELPEDPKWEFPRDKLTLGKPLGEGCFGQVVMAEAVGIDKDKPKEAVTVAVKMLKDDATEKDLSDLVSEMEMMKMIGKHKNIINLLGACTQDGPLYVIVEYASKGNLREYLRARRPPGMEYSYDINRVPEEQMTFKDLVSCTYQLARGMEYLASQKCIHRDLAARNVLVTENNVMKIADFGLARDINNIDYYKKTTNGRLPVKWMAPEALFDRVYTHQSDVWSFGVLMWEIFTLGGSPYPGIPVEELFKLLKEGHRMDKPANCTNELYMMMRDCWHAVPSQRPTFKQLVEDLDRILTLTTNEEYLDLSQPLEQYSPSYPDTRSSCSSGDDSVFSPDPMPYEPCLPQYPHINGSVKT

SEQ ID NO: 5328 - protein, 669 aa, Homo Sapiens
MVSWGRFICLVVVTMATLSLARPSFSLVEDTTLEPEDAISSGDDEDDTDGAEDFVSENSNNKRAPYWTNTEKMEKRLHAVPAANTVKFRCPAGGNPMPTMRWLKNGKEFKQEHRIGGYKVRNQHWSLIMESVVPSDKGNYTCVVENEYGSINHTYHLDVVERSPHRPILQAGLPANASTVVGGDVEFVCKVYSDAQPHIQWIKHVEKNGSKYGPDGLPYLKVLKAAGVNTTDKEIEVLYIRNVTFEDAGEYTCLAGNSIGISFHSAWLTVLPAPGREKEITASPDYLEIAIYCIGVFLIACMVVTVILCRMKNTTKKPDFSSQPAVHKLTKRIPLRRQVSAESSSSMNSNTPLVRITTRLSSTADTPMLAGVSEYELPEDPKWEFPRDKLTLGKPLGEGCFGQVVMAEAVGIDKDKPKEAVTVAVKMLKDDATEKDLSDLVSEMEMMKMIGKHKNIINLLGACTQDGPLYVIVEYASKGNLREYLRARRPPGMEYSYDINRVPEEQMTFKDLVSCTYQLARGMEYLASQKCIHRDLAARNVLVTENNVMKIADFGLARDINNIDYYKKTTNGRLPVKWMAPEALFDRVYTHQSDVWSFGVLMWEIFTLGGSPYPGIPVEELFKLLKEGHRMDKPANCTNELYMMMRDCWHAVPSQRPTFKQLVEDLDRI

SEQ ID NO: 5329 - protein, 707 aa, Homo Sapiens
MVSWGRFICLVVVTMATLSLARPSFSLVEDTTLEPEDAISSGDDEDDTDGAEDFVSENSNNKRAPYWTNTEKMEKRLHAVPAANTVKFRCPAGGNPMPTMRWLKNGKEFKQEHRIGGYKVRNQHWSLIMESVVPSDKGNYTCVVENEYGSINHTYHLDVVERSPHRPILQAGLPANASTVVGGDVEFVCKVYSDAQPHIQWIKHVEKNGSKYGPDGLPYLKVLKAAGVNTTDKEIEVLYIRNVTFEDAGEYTCLAGNSIGISFHSAWLTVLPAPGREKEITASPDYLEIAIYCIGVFLIACMVVTVILCRMKNTTKKPDFSSQPAVHKLTKRIPLRRQVTVSAESSSSMNSNTPLVRITTRLSSTADTPMLAGVSEYELPEDPKWEFPRDKLTLGKPLGEGCFGQVVMAEAVGIDKDKPKEAVTVAVKMLKDDATEKDLSDLVSEMEMMKMIGKHKNIINLLGACTQDGPLYVIVEYASKGNLREYLRARRPPGMEYSYDINRVPEEQMTFKDLVSCTYQLARGMEYLASQKCIHRDLAARNVLVTENNVMKIADFGLARDINNIDYYKKTTNGRLPVKWMAPEALFDRVYTHQSDVWSFGVLMWEIFTLGGSPYPGIPVEELFKLLKEGHRMDKPANCTNELYMMMRDCWHAVPSQRPTFKQLVEDLDRILTLTTNEEEKKVSGAVDCHKPPCNPSHLPCVLAVDQ

SEQ ID NO: 5330 - protein, 732 aa, Homo Sapiens
MVSWGRFICLVVVTMATLSLARPSFSLVEDTTLEPEDAISSGDDEDDTDGAEDFVSENSNNKRAPYWTNTEKMEKRLHAVPAANTVKFRCPAGGNPMPTMRWLKNGKEFKQEHRIGGYKVRNQHWSLIMESVVPSDKGNYTCVVENEYGSINHTYHLDVVERSPHRPILQAGLPANASTVVGGDVEFVCKVYSDAQPHIQWIKHVEKNGSKYGPDGLPYLKVLKAAGVNTTDKEIEVLYIRNVTFEDAGEYTCLAGNSIGISFHSAWLTVLPAPGREKEITASPDYLEIAIYCIGVFLIACMVVTVILCRMKNTTKKPDFSSQPAVHKLTKRIPLRRQVTVSAESSSSMNSNTPLVRITTRLSSTADTPMLAGVSEYELPEDPKWEFPRDKLTLGKPLGEGCFGQVVMAEAVGIDKDKPKEAVTVAVKMLKDDATEKDLSDLVSEMEMMKMIGKHKNIINLLGACTQDGPLYVIVEYASKGNLREYLRARRPPGMEYSYDINRVPEEQMTFKDLVSCTYQLARGMEYLASQKCIHRDLAARNVLVTENNVMKIADFGLARDINNIDYYKKTTNGRLPVKWMAPEALFDRVYTHQSDVWSFGVLMWEIFTLGGSPYPGIPVEELFKLLKEGHRMDKPANCTNELYMMMRDCWHAVPSQRPTFKQLVEDLDRILTLTTNEEYLDLSQPLEQYSPSYPDTRSSCSSGDDSVFSPDPMPYEPCLPQYPHINGSVKT

SEQ ID NO: 5331 - protein, 680 aa, Homo Sapiens
MVSWGRFICLVVVTMATLSLARPSFSLVEDTTLEPEDAISSGDDEDDTDGAEDFVSENSNNKRAPYWTNTEKMEKRLHAVPAANTVKFRCPAGGNPMPTMRWLKNGKEFKQEHRIGGYKVRNQHWSLIMESVVPSDKGNYTCVVENEYGSINHTYHLDVVERSPHRPILQAGLPANASTVVGGDVEFVCKVYSDAQPHIQWIKHVEKNGSKYGPDGLPYLKVLKHSGINSSNAEVLALFNVTEADAGEYICKVSNYIGQANQSAWLTVLPKQQAPGREKEITASPDYLEIAIYCIGVFLIACMVVTVILCRMKNTTKKPDFSSQPAVHKLTKRIPLRRQVTVSAESSSSMNSNTPLVRITTRLSSTADTPMLAGVSEYELPEDPKWEFPRDKLTLGKPLGEGCFGQVVMAEAVGIDKDKPKEAVTVAVKMLKDDATEKDLSDLVSEMEMMKMIGKHKNIINLLGACTQDGPLYVIVEYASKGNLREYLRARRPPGMEYSYDINRVPEEQMTFKDLVSCTYQLARGMEYLASQKCIHRDLAARNVLVTENNVMKIADFGLARDINNIDYYKKTTNGRLPVKWMAPEALFDRVYTHQSDVWSFGVLMWEIFTLGGSPYPGIPVEELFKLLKEGHRMDKPANCTNELYMMMRDCWHAVPSQRPTFKQLVEDLDRILTLTTNEI

SEQ ID NO: 5332 - protein, 64 aa, Homo Sapiens
MVSWGRFICLVVVTMATLSLARPSFSLVEDTTLEPEDAISSGDDEDDTDGAEDFVSENSNNKSK

SEQ ID NO: 5333 - protein, 144 aa, Homo Sapiens
MVSWGRFICLVVVTMATLSLARPSFSLVEDTTLEPEEPPTKYQISQPEVYVAAPGESLEMPSHPEMMRMTPMVRKILSVRTVTTRVSNCPAPMVPERGAWREVLPVTCLLVDSSAPCCVPRPLPFPAVSTFLTFKPENKPVLLH

SEQ ID NO: 5334 - protein, 709 aa, Homo Sapiens
MVSWGRFICLVVVTMATLSLARPSFSLVEDTTLEPEEPPTKYQISQPEVYVAAPGESLEVRCLLKDAAVISWTKDGVHLGPNNRTVLIGEYLQIKGATPRDSGLYACTASRTVDSETWYFMVNVTDAISSGDDEDDTDGAEDFVSENSNNKRAPYWTNTEKMEKRLHAVPAANTVKFRCPAGGNPMPTMRWLKNGKEFKQEHRIGGYKVRNQHWSLIMESVVPSDKGNYTCVVENEYGSINHTYHLDVVAPGREKEITASPDYLEIAIYCIGVFLIACMVVTVILCRMKNTTKKPDFSSQPAVHKLTKRIPLRRQVTVSAESSSSMNSNTPLVRITTRLSSTADTPMLAGVSEYELPEDPKWEFPRDKLTLGKPLGEGCFGQVVMAEAVGIDKDKPKEAVTVAVKMLKDDATEKDLSDLVSEMEMMKMIGKHKNIINLLGACTQDGPLYVIVEYASKGNLREYLRARRPPGMEYSYDINRVPEEQMTFKDLVSCTYQLARGMEYLASQKCIHRDLAARNVLVTENNVMKIADFGLARDINNIDYYKKTTNGRLPVKWMAPEALFDRVYTHQSDVWSFGVLMWEIFTLGGSPYPGIPVEELFKLLKEGHRMDKPANCTNELYMMMRDCWHAVPSQRPTFKQLVEDLDRILTLTTNEEYLDLSQPLEQYSPSYPDTRSSCSSGDDSVFSPDPMPYEPCLPQYPHINGSVKT

SEQ ID NO: 5335 - protein, 821 aa, Homo Sapiens
MVSWGRFICLVVVTMATLSLARPSFSLVEDTTLEPEEPPTKYQISQPEVYVAAPGESLEVRCLLKDAAVISWTKDGVHLGPNNRTVLIGEYLQIKGATPRDSGLYACTASRTVDSETWYFMVNVTDAISSGDDEDDTDGAEDFVSENSNNKRAPYWTNTEKMEKRLHAVPAANTVKFRCPAGGNPMPTMRWLKNGKEFKQEHRIGGYKVRNQHWSLIMESVVPSDKGNYTCVVENEYGSINHTYHLDVVERSPHRPILQAGLPANASTVVGGDVEFVCKVYSDAQPHIQWIKHVEKNGSKYGPDGLPYLKVLKAAGVNTTDKEIEVLYIRNVTFEDAGEYTCLAGNSIGISFHSAWLTVLPAPGREKEITASPDYLEIAIYCIGVFLIACMVVTVILCRMKNTTKKPDFSSQPAVHKLTKRIPLRRQVTVSAESSSSMNSNTPLVRITTRLSSTADTPMLAGVSEYELPEDPKWEFPRDKLTLGKPLGEGCFGQVVMAEAVGIDKDKPKEAVTVAVKMLKDDATEKDLSDLVSEMEMMKMIGKHKNIINLLGACTQDGPLYVIVEYASKGNLREYLRARRPPGMEYSYDINRVPEEQMTFKDLVSCTYQLARGMEYLASQKCIHRDLAARNVLVTENNVMKIADFGLARDINNIDYYKKTTNGRLPVKWMAPEALFDRVYTHQSDVWSFGVLMWEIFTLGGSPYPGIPVEELFKLLKEGHRMDKPANCTNELYMMMRDCWHAVPSQRPTFKQLVEDLDRILTLTTNEEYLDLSQPLEQYSPSYPDTRSSCSSGDDSVFSPDPMPYEPCLPQYPHINGSVKT

SEQ ID NO: 5336 - protein, 821 aa, Homo Sapiens
MVSWGRFICLVVVTMATLSLARPSFSLVEDTTLEPEEPPTKYQISQPEVYVAAPGESLEVRCLLKDAAVISWTKDGVHLGPNNRTVLIGEYLQIKGATPRDSGLYACTASRTVDSETWYFMVNVTDAISSGDDEDDTDGAEDFVSENSNNKRAPYWTNTEKMEKRLHAVPAANTVKFRCPAGGNPMPTMRWLKNGKEFKQEHRIGGYKVRNQHWSLIMESVVPSDKGNYTCVVENEYGSINHTYHLDVVERSPHRPILQAGLPANASTVVGGDVEFVCKVYSDAQPHIQWIKHVEKNGSKYGPDGLPYLKVLKVFAAGVNTTDKEIEVLYIRNVTFEDAGEYTCLAGNSIGISFHSAWLTVLPAPGREKEITASPDYLEIAIYCIGVFLIACMVVTVILCRMKNTTKKPDFSSQPAVHKLTKRIPLRRQVSAESSSSMNSNTPLVRITTRLSSTADTPMLAGVSEYELPEDPKWEFPRDKLTLGKPLGEGCFGQVVMAEAVGIDKDKPKEAVTVAVKMLKDDATEKDLSDLVSEMEMMKMIGKHKNIINLLGACTQDGPLYVIVEYASKGNLREYLRARRPPGMEYSYDINRVPEEQMTFKDLVSCTYQLARGMEYLASQKCIHRDLAARNVLVTENNVMKIADFGLARDINNIDYYKKTTNGRLPVKWMAPEALFDRVYTHQSDVWSFGVLMWEIFTLGGSPYPGIPVEELFKLLKEGHRMDKPANCTNELYMMMRDCWHAVPSQRPTFKQLVEDLDRILTLTTNEEYLDLSQPLEQYSPSYPDTRSSCSSGDDSVFSPDPMPYEPCLPQYPHINGSVKT

SEQ ID NO: 5337 - protein, 819 aa, Homo Sapiens
MVSWGRFICLVVVTMATLSLARPSFSLVEDTTLEPEEPPTKYQISQPEVYVAAPGESLEVRCLLKDAAVISWTKDGVHLGPNNRTVLIGEYLQIKGATPRDSGLYACTASRTVDSETWYFMVNVTDAISSGDDEDDTDGAEDFVSENSNNKRAPYWTNTEKMEKRLHAVPAANTVKFRCPAGGNPMPTMRWLKNGKEFKQEHRIGGYKVRNQHWSLIMESVVPSDKGNYTCVVENEYGSINHTYHLDVVERSPHRPILQAGLPANASTVVGGDVEFVCKVYSDAQPHIQWIKHVEKNGSKYGPDGLPYLKVLKAAGVNTTDKEIEVLYIRNVTFEDAGEYTCLAGNSIGISFHSAWLTVLPAPGREKEITASPDYLEIAIYCIGVFLIACMVVTVILCRMKNTTKKPDFSSQPAVHKLTKRIPLRRQVSAESSSSMNSNTPLVRITTRLSSTADTPMLAGVSEYELPEDPKWEFPRDKLTLGKPLGEGCFGQVVMAEAVGIDKDKPKEAVTVAVKMLKDDATEKDLSDLVSEMEMMKMIGKHKNIINLLGACTQDGPLYVIVEYASKGNLREYLRARRPPGMEYSYDINRVPEEQMTFKDLVSCTYQLARGMEYLASQKCIHRDLAARNVLVTENNVMKIADFGLARDINNIDYYKKTTNGRLPVKWMAPEALFDRVYTHQSDVWSFGVLMWEIFTLGGSPYPGIPVEELFKLLKEGHRMDKPANCTNELYMMMRDCWHAVPSQRPTFKQLVEDLDRILTLTTNEEYLDLSQPLEQYSPSYPDTRSSCSSGDDSVFSPDPMPYEPCLPQYPHINGSVKT

SEQ ID NO: 5338 - protein, 768 aa, Homo Sapiens
MVSWGRFICLVVVTMATLSLARPSFSLVEDTTLEPEEPPTKYQISQPEVYVAAPGESLEVRCLLKDAAVISWTKDGVHLGPNNRTVLIGEYLQIKGATPRDSGLYACTASRTVDSETWYFMVNVTDAISSGDDEDDTDGAEDFVSENSNNKRAPYWTNTEKMEKRLHAVPAANTVKFRCPAGGNPMPTMRWLKNGKEFKQEHRIGGYKVRNQHWSLIMESVVPSDKGNYTCVVENEYGSINHTYHLDVVERSPHRPILQAGLPANASTVVGGDVEFVCKVYSDAQPHIQWIKHVEKNGSKYGPDGLPYLKVLKHSGINSSNAEVLALFNVTEADAGEYICKVSNYIGQANQSAWLTVLPKQQAPGREKEITASPDYLEIAIYCIGVFLIACMVVTVILCRMKNTTKKPDFSSQPAVHKLTKRIPLRRQVTVSAESSSSMNSNTPLVRITTRLSSTADTPMLAGVSEYELPEDPKWEFPRDKLTLGKPLGEGCFGQVVMAEAVGIDKDKPKEAVTVAVKMLKDDATEKDLSDLVSEMEMMKMIGKHKNIINLLGACTQDGPLYVIVEYASKGNLREYLRARRPPGMEYSYDINRVPEEQMTFKDLVSCTYQLARGMEYLASQKCIHRDLAARNVLVTENNVMKIADFGLARDINNIDYYKKTTNGRLPVKWMAPEALFDRVYTHQSDVWSFGVLMWEIFTLGGSPYPGIPVEELFKLLKEGHRMDKPANCTNELYMMMRDCWHAVPSQRPTFKQLVEDLDRILTLTTNE

SEQ ID NO: 5339 - protein, 769 aa, Homo Sapiens
MVSWGRFICLVVVTMATLSLARPSFSLVEDTTLEPEEPPTKYQISQPEVYVAAPGESLEVRCLLKDAAVISWTKDGVHLGPNNRTVLIGEYLQIKGATPRDSGLYACTASRTVDSETWYFMVNVTDAISSGDDEDDTDGAEDFVSENSNNKRAPYWTNTEKMEKRLHAVPAANTVKFRCPAGGNPMPTMRWLKNGKEFKQEHRIGGYKVRNQHWSLIMESVVPSDKGNYTCVVENEYGSINHTYHLDVVERSPHRPILQAGLPANASTVVGGDVEFVCKVYSDAQPHIQWIKHVEKNGSKYGPDGLPYLKVLKHSGINSSNAEVLALFNVTEADAGEYICKVSNYIGQANQSAWLTVLPKQQAPGREKEITASPDYLEIAIYCIGVFLIACMVVTVILCRMKNTTKKPDFSSQPAVHKLTKRIPLRRQVTVSAESSSSMNSNTPLVRITTRLSSTADTPMLAGVSEYELPEDPKWEFPRDKLTLGKPLGEGCFGQVVMAEAVGIDKDKPKEAVTVAVKMLKDDATEKDLSDLVSEMEMMKMIGKHKNIINLLGACTQDGPLYVIVEYASKGNLREYLRARRPPGMEYSYDINRVPEEQMTFKDLVSCTYQLARGMEYLASQKCIHRDLAARNVLVTENNVMKIADFGLARDINNIDYYKKTTNGRLPVKWMAPEALFDRVYTHQSDVWSFGVLMWEIFTLGGSPYPGIPVEELFKLLKEGHRMDKPANCTNELYMMMRDCWHAVPSQRPTFKQLVEDLDRILTLTTNEI

SEQ ID NO: 5340 - protein, 705 aa, Homo Sapiens
MVSWGRFICLVVVTMATLSLARPSFSLVEDTTLEPEEPPTKYQISQPEVYVAAPGESLEVRCLLKDAAVISWTKDGVHLGPNNRTVLIGEYLQIKGATPRDSGLYACTASRTVDSETWYFMVNVTDAISSGDDEDDTDGAEDFVSENSNNKRAPYWTNTEKMEKRLHAVPAANTVKFRCPAGGNPMPTMRWLKNGKEFKQEHRIGGYKVRNQHWSLIMESVVPSDKGNYTCVVENEYGSINHTYHLDVVERSPHRPILQAGLPANASTVVGGDVEFVCKVYSDAQPHIQWIKHVEKNGSKYGPDGLPYLKVLKVSAESSSSMNSNTPLVRITTRLSSTADTPMLAGVSEYELPEDPKWEFPRDKLTLGKPLGEGCFGQVVMAEAVGIDKDKPKEAVTVAVKMLKDDATEKDLSDLVSEMEMMKMIGKHKNIINLLGACTQDGPLYVIVEYASKGNLREYLRARRPPGMEYSYDINRVPEEQMTFKDLVSCTYQLARGMEYLASQKCIHRDLAARNVLVTENNVMKIADFGLARDINNIDYYKKTTNGRLPVKWMAPEALFDRVYTHQSDVWSFGVLMWEIFTLGGSPYPGIPVEELFKLLKEGHRMDKPANCTNELYMMMRDCWHAVPSQRPTFKQLVEDLDRILTLTTNEEYLDLSQPLEQYSPSYPDTRSSCSSGDDSVFSPDPMPYEPCLPQYPHINGSVKT

SEQ ID NO: 5341 - protein, 822 aa, Homo Sapiens
MVSWGRFICLVVVTMATLSLARPSFSLVEDTTLEPEEPPTKYQISQPEVYVAAPGESLEVRCLLKDAAVISWTKDGVHLGPNNRTVLIGEYLQIKGATPRDSGLYACTASRTVDSETWYFMVNVTDAISSGDDEDDTDGAEDFVSENSNNKRAPYWTNTEKMEKRLHAVPAANTVKFRCPAGGNPMPTMRWLKNGKEFKQEHRIGGYKVRNQHWSLIMESVVPSDKGNYTCVVENEYGSINHTYHLDVVERSPHRPILQAGLPANASTVVGGDVEFVCKVYSDAQPHIQWIKHVEKNGSKYGPDGLPYLKVLKHSGINSSNAEVLALFNVTEADAGEYICKVSNYIGQANQSAWLTVLPKQQAPGREKEITASPDYLEIAIYCIGVFLIACMVVTVILCRMKNTTKKPDFSSQPAVHKLTKRIPLRRQVTVSAESSSSMNSNTPLVRITTRLSSTADTPMLAGVSEYELPEDPKWEFPRDKLTLGKPLGEGCFGQVVMAEAVGIDKDKPKEAVTVAVKMLKDDATEKDLSDLVSEMEMMKMIGKHKNIINLLGACTQDGPLYVIVEYASKGNLREYLRARRPPGMEYSYDINRVPEEQMTFKDLVSCTYQLARGMEYLASQKCIHRDLAARNVLVTENNVMKIADFGLARDINNIDYYKKTTNGRLPVKWMAPEALFDRVYTHQSDVWSFGVLMWEIFTLGGSPYPGIPVEELFKLLKEGHRMDKPANCTNELYMMMRDCWHAVPSQRPTFKQLVEDLDRILTLTTNEEYLDLSQPLEQYSPSYPDTRSSCSSGDDSVFSPDPMPYEPCLPQYPHINGSVKT

SEQ ID NO: 5342 - protein, 254 aa, Homo Sapiens
MVSWGRFICLVVVTMATLSLARPSFSLVEDTTLEPEEPPTKYQISQPEVYVAAPGESLEVRCLLKDAAVISWTKDGVHLGPNNRTVLIGEYLQIKGATPRDSGLYACTASRTVDSETWYFMVNVTDAISSGDDEDDTDGAEDFVSENSNNKRAPYWTNTEKMEKRLHAVPAANTVKFRCPAGGNPMPTMRWLKNGKEFKQEHRIGGYKVRNQHWSLIMESVVPSDKGNYTCVVENEYGSINHTYHLDVVGSQGL

SEQ ID NO: 5343 - protein, 704 aa, Homo Sapiens
MVSWGRFICLVVVTMATLSLARPSFSLVEDTTLEPEGAPYWTNTEKMEKRLHAVPAANTVKFRCPAGGNPMPTMRWLKNGKEFKQEHRIGGYKVRNQHWSLIMESVVPSDKGNYTCVVENEYGSINHTYHLDVVERSPHRPILQAGLPANASTVVGGDVEFVCKVYSDAQPHIQWIKHVEKNGSKYGPDGLPYLKVLKAAGVNTTDKEIEVLYIRNVTFEDAGEYTCLAGNSIGISFHSAWLTVLPAPGREKEITASPDYLEIAIYCIGVFLIACMVVTVILCRMKNTTKKPDFSSQPAVHKLTKRIPLRRQVSAESSSSMNSNTPLVRITTRLSSTADTPMLAGVSEYELPEDPKWEFPRDKLTLGKPLGEGCFGQVVMAEAVGIDKDKPKEAVTVAVKMLKDDATEKDLSDLVSEMEMMKMIGKHKNIINLLGACTQDGPLYVIVEYASKGNLREYLRARRPPGMEYSYDINRVPEEQMTFKDLVSCTYQLARGMEYLASQKCIHRDLAARNVLVTENNVMKIADFGLARDINNIDYYKKTTNGRLPVKWMAPEALFDRVYTHQSDVWSFGVLMWEIFTLGGSPYPGIPVEELFKLLKEGHRMDKPANCTNELYMMMRDCWHAVPSQRPTFKQLVEDLDRILTLTTNEEYLDLSQPLEQYSPSYPDTRSSCSSGDDSVFSPDPMPYEPCLPQYPHINGSVKT

SEQ ID NO: 5344 - protein, 707 aa, Homo Sapiens
MVSWGRFICLVVVTMATLSLARPSFSLVEDTTLEPEGAPYWTNTEKMEKRLHAVPAANTVKFRCPAGGNPMPTMRWLKNGKEFKQEHRIGGYKVRNQHWSLIMESVVPSDKGNYTCVVENEYGSINHTYHLDVVERSPHRPILQAGLPANASTVVGGDVEFVCKVYSDAQPHIQWIKHVEKNGSKYGPDGLPYLKVLKHSGINSSNAEVLALFNVTEADAGEYICKVSNYIGQANQSAWLTVLPKQQAPGREKEITASPDYLEIAIYCIGVFLIACMVVTVILCRMKNTTKKPDFSSQPAVHKLTKRIPLRRQVTVSAESSSSMNSNTPLVRITTRLSSTADTPMLAGVSEYELPEDPKWEFPRDKLTLGKPLGEGCFGQVVMAEAVGIDKDKPKEAVTVAVKMLKDDATEKDLSDLVSEMEMMKMIGKHKNIINLLGACTQDGPLYVIVEYASKGNLREYLRARRPPGMEYSYDINRVPEEQMTFKDLVSCTYQLARGMEYLASQKCIHRDLAARNVLVTENNVMKIADFGLARDINNIDYYKKTTNGRLPVKWMAPEALFDRVYTHQSDVWSFGVLMWEIFTLGGSPYPGIPVEELFKLLKEGHRMDKPANCTNELYMMMRDCWHAVPSQRPTFKQLVEDLDRILTLTTNEEYLDLSQPLEQYSPSYPDTRSSCSSGDDSVFSPDPMPYEPCLPQYPHINGSVKT

SEQ ID NO: 5345 - protein, 251 aa, Homo Sapiens
MVSWGRFICLVVVTMATLSLARPSFSLVEDTTLEPEGAPYWTNTEKMEKRLHAVPAANTVKFRCPAGGNPMPTMRWLKNGKEFKQEHRIGGYKVRNQHWSLIMESVVPSDKGNYTCVVENEYGSINHTYHLDVVERSPHRPILQAGLPANASTVVGGDVEFVCKVYSDAQPHIQWIKHVEKNGSKYGPDGLPYLKVLKHSGINSSNAEVLALFNVTEADAGEYICKVSNYIGQANQSAWLTVLPKQQGRRC

SEQ ID NO: 5346 - protein, 86 aa, Homo Sapiens
  misc_feature (1)..(1): Xaa can be any naturally occurring amino acid
XPYPGIPVEELFKLLKEGHRMDKPANCTNELYMMMRDCWHAVPSQRPTFKQLVEDLDRILTLTTNEEYLDLSQPLEPYSPCYPDPR

SEQ ID NO: 5347 - protein, 136 aa, Homo Sapiens
  misc_feature (1)..(1): Xaa can be any naturally occurring amino acid
XSLARPSFSLVEDTTLEPEEPPTKYQISQPEVYVAAPGESLEVRCLLKDAAVISWTKDGVHLGPNNRTVLIGEYLQIKGATPRDSGLYACTASRTVDSETWYFMVNVTDAISSGDDEDDTDGAEDFVSENSNNKSK

SEQ ID NO: 5348 - protein, 364 aa, Homo Sapiens
MGAPACALALCVAVAIVAGASSESLGTEQRVVGRAAEVPGPEPGQQEQLVFGSGDAVELSCPPPGGGPMGPTVWVKDGTGLVPSERVLVGPQRLQVLNASHEDSGAYSCRQRLTQRVLCHFSVRVTDAPSSGDDEDGEDEAEDTGVDTGAPYWTRPERMDKKLLAVPAANTVRFRCPAAGNPTPSISWLKNGREFRGEHRIGGIKLRHQQWSLVMESVVPSDRGNYTCVVENKFGSIRQTYTLDVLERSPHRPILQAGLPANQTAVLGSDVEFHCKVYSDAQPHIQWLKHVEVNGSKVGPDGTPYVTVLKSWISESVEADVRLRLANVSERDGGEYLCRATNFIGVAEKAFWLSVHGPRADGGR

SEQ ID NO: 5349 - protein, 694 aa, Homo Sapiens
MGAPACALALCVAVAIVAGASSESLGTEQRVVGRAAEVPGPEPGQQEQLVFGSGDAVELSCPPPGGGPMGPTVWVKDGTGLVPSERVLVGPQRLQVLNASHEDSGAYSCRQRLTQRVLCHFSVRVTDAPSSGDDEDGEDEAEDTGVDTGAPYWTRPERMDKKLLAVPAANTVRFRCPAAGNPTPSISWLKNGREFRGEHRIGGIKLRHQQWSLVMESVVPSDRGNYTCVVENKFGSIRQTYTLDVLERSPHRPILQAGLPANQTAVLGSDVEFHCKVYSDAQPHIQWLKHVEVNGSKVGPDGTPYVTVLKVSLESNASMSSNTPLVRIARLSSGEGPTLANVSELELPADPKWELSRARLTLGKPLGEGCFGQVVMAEAIGIDKDRAAKPVTVAVKMLKDDATDKDLSDLVSEMEMMKMIGKHKNIINLLGACTQGGPLYVLVEYAAKGNLREFLRARRPPGLDYSFDTCKPPEEQLTFKDLVSCAYQVARGMEYLASQKCIHRDLAARNVLVTEDNVMKIADFGLARDVHNLDYYKKTTNGRLPVKWMAPEALFDRVYTHQSDVWSFGVLLWEIFTLGGSPYPGIPVEELFKLLKEGHRMDKPANCTHDLYMIMRECWHAAPSQRPTFKQLVEDLDRVLTVTSTDEYLDLSAPFEQYSPGGQDTPSSSSSGDDSVFAHDLLPPAPPSSGGSRT

SEQ ID NO: 5350 - protein, 808 aa, Homo Sapiens
MGAPACALALCVAVAIVAGASSESLGTEQRVVGRAAEVPGPEPGQQEQLVFGSGDAVELSCPPPGGGPMGPTVWVKDGTGLVPSERVLVGPQRLQVLNASHEDSGAYSCRQRLTQRVLCHFSVRVTDAPSSGDDEDGEDEAEDTGVDTGAPYWTRPERMDKKLLAVPAANTVRFRCPAAGNPTPSISWLKNGREFRGEHRIGGIKLRHQQWSLVMESVVPSDRGNYTCVVENKFGSIRQTYTLDVLERSPHRPILQAGLPANQTAVLGSDVEFHCKVYSDAQPHIQWLKHVEVNGSKVGPDGTPYVTVLKSWISESVEADVRLRLANVSERDGGEYLCRATNFIGVAEKAFWLSVHGPRAAEEELVEADEAGSVYAGILSYGVGFFLFILVVAAVTLCRLRSPPKKGLGSPTVHKISRFPLKRQVSLESNASMSSNTPLVRIARLSSGEGPTLANVSELELPADPKWELSRARLTLGKPLGEGCFGQVVMAEAIGIDKDRAAKPVTVAVKMLKDDATDKDLSDLVSEMEMMKMIGKHKNIINLLGACTQGGPLYVLVEYAAKGNLREFLRARRPPGLDYSFDTCKPPEEQLTFKDLVSCAYQVARGMEYLASQKCIHRDLAARNVLVTEDNVMKIADFGLARDVHNLDYYKKTTNGRLPVKWMAPEALFDRVYTHQSDVWSFGVLLWEIFTLGGSPYPGIPVEELFKLLKEGHRMDKPANCTHDLYMIMRECWHAAPSQRPTFKQLVEDLDRVLTVTSTDEYLDLSAPFEQYSPGGQDTPSSSSSGDDSVFAHDLLPPAPPSSGGSRT

SEQ ID NO: 5351 - protein, 806 aa, Homo Sapiens
MGAPACALALCVAVAIVAGASSESLGTEQRVVGRAAEVPGPEPGQQEQLVFGSGDAVELSCPPPGGGPMGPTVWVKDGTGLVPSERVLVGPQRLQVLNASHEDSGAYSCRQRLTQRVLCHFSVRVTDAPSSGDDEDGEDEAEDTGVDTGAPYWTRPERMDKKLLAVPAANTVRFRCPAAGNPTPSISWLKNGREFRGEHRIGGIKLRHQQWSLVMESVVPSDRGNYTCVVENKFGSIRQTYTLDVLERSPHRPILQAGLPANQTAVLGSDVEFHCKVYSDAQPHIQWLKHVEVNGSKVGPDGTPYVTVLKTAGANTTDKELEVLSLHNVTFEDAGEYTCLAGNSIGFSHHSAWLVVLPAEEELVEADEAGSVYAGILSYGVGFFLFILVVAAVTLCRLRSPPKKGLGSPTVHKISRFPLKRQVSLESNASMSSNTPLVRIARLSSGEGPTLANVSELELPADPKWELSRARLTLGKPLGEGCFGQVVMAEAIGIDKDRAAKPVTVAVKMLKDDATDKDLSDLVSEMEMMKMIGKHKNIINLLGACTQGGPLYVLVEYAAKGNLREFLRARRPPGLDYSFDTCKPPEEQLTFKDLVSCAYQVARGMEYLASQKCIHRDLAARNVLVTEDNVMKIADFGLARDVHNLDYYKKTTNGRLPVKWMAPEALFDRVYTHQSDVWSFGVLLWEIFTLGGSPYPGIPVEELFKLLKEGHRMDKPANCTHDLYMIMRECWHAAPSQRPTFKQLVEDLDRVLTVTSTDEYLDLSAPFEQYSPGGQDTPSSSSSGDDSVFAHDLLPPAPPSSGGSRT

SEQ ID NO: 5352 - protein, 694 aa, Homo Sapiens; identical to SEQ ID NO: 5349

SEQ ID NO: 5353 - protein, 792 aa, Homo Sapiens
MGAPACALALCVAVAIVAGASSESLGTEQRVVGRAAEVPGPEPGQQEQLVFGSGDAVELSCPPPGGGPMGPTVWVKDGTGLVPSERVLVGPQRLQVLNASHEDSGAYSCRQRLTQRVLCHFSVRVTDAPSSGDDEDGEDEAEDTGVDTGAPYWTRPERMDKKLLAVPAANTVRFRCPAAGNPTPSISWLKNGREFRGEHRIGGIKLRHQQWSLVMESVVPSDRGNYTCVVENKFGSIRQTYTLDVLERSPHRPILQAGLPANQTAVLGSDVEFHCKVYSDAQPHIQWLKHVEVNGSKVGPDGTPYVTVLKTAGANTTDKELEVLSLHNVTFEDAGEYTCLAGNSIGFSHHSAWLVVLPAEEELVEADEAGSVYAGILSYGVGFFLFILVVAAVTLCRLRSPPKKGLGSPTVHKISRFPLKRQQVSLESNASMSSNTPLVRIARLSSGEGPTLANVSELELPADPKWELSRARLTLGKPLGEGCFGQVVMAEAIGIDKDRAAKPVTVAVKMLKDDATDKDLSDLVSEMEMMKMIGKHKNIINLLGACTQGGPLYVLVEYAAKGNLREFLRARRPPGLDYSFDTCKPPEEQLTFKDLVSCAYQVARGMEYLASQKCIHRDLAARNVLVTEDNVMKIADFGLARDVHNLDYYKKTTNLVLWGPALGDLHAGGLPVPRHPCGGALQAAEGGPPHGQARQLHTRPVHDHAGVLACRALPEAHLQAAGGGPGPCPYRDVHRRVPGPVGAFRAVLPGWPGHPQLQLLRGRLRVCPRPAAPGPTQQWGLADVKGHWSPTM

SEQ ID NO: 5354 - protein, 364 aa, Homo Sapiens; identical to SEQ ID NO: 5348

SEQ ID NO: 5355 - protein, 112 aa, Homo Sapiens
NPTPSISWLKNGREFRGEHRIGGIKLRHQQWSLVMESVVPSDRGNYTCVVENKFGSIRQTYTLDVLERSPHRPILQAGLPANQTAVLGSDVEFHCKTAGANTTDKELEVLSL

SEQ ID NO: 5356 - protein, 72 aa, Homo Sapiens
MRLLLALLGVLLSVPGPPVLSLEASEEVELASIHLSLCLRERTGLAGRRALSWAAELVSPAWLPAWSSKSRS

SEQ ID NO: 5357 - protein, 87 aa, Homo Sapiens
MRLLLALLGVLLSVPGPPVLSLEASEEVELEPCLAPSLEQQEQELTVALGQPVRLCCGRAERGGHWYKEGSRLAPAGRVRGWRGRLE

SEQ ID NO: 5358 - protein, 108 aa, Homo Sapiens
MRLLLALLGVLLSVPGPPVLSLEASEEVELEPCLAPSLEQQEQELTVALGQPVRLCCGRAERGGHWYKEGSRLAPAGRVRGWRGRLEIASFLPEDAGRYLCLARGSMI

SEQ ID NO: 5359 - protein, 114 aa, Homo Sapiens
MRLLLALLGVLLSVPGPPVLSLEASEEVELEPCLAPSLEQQEQELTVALGQPVRLCCGRAERGGHWYKEGSRLAPAGRVRGWRGRLEIASFLPEDAGRYLCLARGSMIVLQNLT

SEQ ID NO: 5360 - protein, 201 aa, Homo Sapiens
MRLLLALLGVLLSVPGPPVLSLEASEEVELEPCLAPSLEQQEQELTVALGQPVRLCCGRAERGGHWYKEGSRLAPAGRVRGWRGRLEIASFLPEDAGRYLCLARGSMIVLQNLTLITGDSLTSSNDDEDPKSHRDPSNRHSYPQQAPYWTHPQRMEKKLHAVPAGNTVKFRCPAAGNPTPTIRWLKDGQAFHGENRIGGIR

SEQ ID NO: 5361 - protein, 802 aa, Homo Sapiens
MRLLLALLGVLLSVPGPPVLSLEASEEVELEPCLAPSLEQQEQELTVALGQPVRLCCGRAERGGHWYKEGSRLAPAGRVRGWRGRLEIASFLPEDAGRYLCLARGSMIVLQNLTLITGDSLTSSNDDEDPKSHRDPSNRHSYPQQAPYWTHPQRMEKKLHAVPAGNTVKFRCPAAGNPTPTIRWLKDGQAFHGENRIGGIRLRHQHWSLVMESVVPSDRGTYTCLVENAVGSIRYNYLLDVLERSPHRPILQAGLPANTTAVVGSDVELLCKVYSDAQPHIQWLKHIVINGSSFGADGFPYVQVLKTADINSSEVEVLYLRNVSAEDAGEYTCLAGNSIGLSYQSAWLTVLPEEDPTWTAAAPEARYTDIILYASGSLALAVLLLLAGLYRGQALHGRHPRPPATVQKLSRFPLARQFSLESGSSGKSSSSLVRGVRLSSSGPALLAGLVSLDLPLDPLWEFPRDRLVLGKPLGEGCFGQVVRAEAFGMDPARPDQASTVAVKMLKDNASDKDLADLVSEMEVMKLIGRHKNIINLLGVCTQEGPLYVIVECAAKGNLREFLRARRPPGPDLSPDGPRSSEGPLSFPVLVSCAYQVARGMQYLESRKCIHRDLAARNVLVTEDNVMKIADFGLARGVHHIDYYKKTSNGRLPVKWMAPEALFDRVYTHQSDVWSFGILLWEIFTLGGSPYPGIPVEELFSLLREGHRMDRPPHCPPELYGLMRECWHAAPSQRPTFKQLVEALDKVLLAVSEEYLDLRLTFGPYSPSGGDASSTCSSSDSVFSHDPLPLGSSSFPFGSGVQT

SEQ ID NO: 5362 - protein, 762 aa, Homo Sapiens
MRLLLALLGVLLSVPGPPVLSLEASEEVELEPCLAPSLEQQEQELTVALGQPVRLCCGRAERGGHWYKEGSRLAPAGRVRGWRGRLEIASFLPEDAGRYLCLARGSMIVLQNLTLITGDSLTSSNDDEDPKSHRDPSNRHSYPQQAPYWTHPQRMEKKLHAVPAGNTVKFRCPAAGNPTPTIRWLKDGQAFHGENRIGGIRLRHQHWSLVMESVVPSDRGTYTCLVENAVGSIRYNYLLDVLERSPHRPILQAGLPANTTAVVGSDVELLCKVYSDAQPHIQWLKHIVINGSSFGADGFPYVQVLKTADINSSEVEVLYLRNVSAEDAGEYTCLAGNSIGLSYQSAWLTVLPGTGRIPHLTCDSLTPAGRTKSPTLQFSLESGSSGKSSSSLVRGVRLSSSGPALLAGLVSLDLPLDPLWEFPRDRLVLGKPLGEGCFGQVVRAEAFGMDPARPDQASTVAVKMLKDNASDKDLADLVSEMEVMKLIGRHKNIINLLGVCTQEGPLYVIVECAAKGNLREFLRARRPPGPDLSPDGPRSSEGPLSFPVLVSCAYQVARGMQYLESRKCIHRDLAARNVLVTEDNVMKIADFGLARGVHHIDYYKKTSNGRLPVKWMAPEALFDRVYTHQSDVWSFGILLWEIFTLGGSPYPGIPVEELFSLLREGHRMDRPPHCPPELYGLMRECWHAAPSQRPTFKQLVEALDKVLLAVSEEYLDLRLTFGPYSPSGGDASSTCSSSDSVFSHDPLPLGSSSFPFGSGVQT

SEQ ID NO: 5363 - protein, 734 aa, Homo Sapiens
MRLLLALLGVLLSVPGPPVLSLEASEEVELEPCLAPSLEQQEQELTVALGQPVRLCCGRAERGGHWYKEGSRLAPAGRVRGWRGRLEIASFLPEDAGRYLCLARGSMIVLQNLTLITGDSLTSSNDDEDPKSHRDPSNRHSYPQQAPYWTHPQRMEKKLHAVPAGNTVKFRCPAAGNPTPTIRWLKDGQAFHGENRIGGIRLRHQHWSLVMESVVPSDRGTYTCLVENAVGSIRYNYLLDVLERSPHRPILQAGLPANTTAVVGSDVELLCKVYSDAQPHIQWLKHIVINGSSFGADGFPYVQVLKTADINSSEVEVLYLRNVSAEDAGEYTCLAGNSIGLSYQSAWLTVLPEEDPTWTAAAPEASSPWSQALPASQAHPWYEACVSPPAAPPCSPASLVLGKPLGEGCFGQVVRAEAFGMDPARPDQASTVAVKMLKDNASDKDLADLVSEMEVMKLIGRHKNIINLLGVCTQEGPLYVIVECAAKGNLREFLRARRPPGPDLSPDGPRSSEGPLSFPVLVSCAYQVARGMQYLESRKCIHRDLAARNVLVTEDNVMKIADFGLARGVHHIDYYKKTSNGRLPVKWMAPEALFDRVYTHQSDVWSFGILLWEIFTLGGSPYPGIPVEELFSLLREGHRMDRPPHCPPELYGLMRECWHAAPSQRPTFKQLVEALDKVLLAVSEEYLDLRLTFGPYSPSGGDASSTCSSSDSVFSHDPLPLGSSSFPFGSGVQT

SEQ ID NO: 5364 - protein, 802 aa, Homo Sapiens; identical to SEQ ID NO: 5361

SEQ ID NO: 5365 - protein, 280 aa, Homo Sapiens
  misc_feature (1)..(1): Xaa can be any naturally occurring amino acid
XRYTDIILYASGSLALAVLLLLAGLYRGQALHGRHPRPPATVQKLSRFPLARQSGSSGKSSSSLVRGVRLSSSGPALLAGLVSLDLPLDPLWEFPRDRLVLGKPLGEGCFGQVVRAEAFGMDPARPDQASTVAVKMLKDNASDKDLADLVSEMEVMKLIGRHKNIINLLGVCTQEGPLYVIVECAAKGNLREFLRARRPPGPDLSPDGPRSSEGPLSFPVLVSCAYQVARGMQYLESRKCIHRDLAARNVLVTEDNVMKIADFGLARGVHHIDYYKKTSN

SEQ ID NO: 5366 - protein, 80 aa, Homo Sapiens
MTPSPLLLLLLPPLLLGAFPPAAAARGPPKMADKVVPRQVARLGRTVRLQCPVEGDPPPLTMWTKDGRTIHSGWSRFRVL

SEQ ID NO: 5367 - protein, 152 aa, Homo Sapiens
MTPSPLLLLLLPPLLLGAFPPAAAARGPPKMADKVVPRQVARLGRTVRLQCPVEGDPPPLTMWTKDGRTIHSGWSRFRVLPQGLKVKQVEREDAGVYVCKATNGFGSLSVNYTLVVLDDISPGKESLGPDSSSGGQEDPASQQWARPRFTQP

SEQ ID NO: 5368 - protein, 504 aa, Homo Sapiens
MTPSPLLLLLLPPLLLGAFPPAAAARGPPKMADKVVPRQVARLGRTVRLQCPVEGDPPPLTMWTKDGRTIHSGWSRFRVLPQGLKVKQVEREDAGVYVCKATNGFGSLSVNYTLVVLDDISPGKESLGPDSSSGGQEDPASQQWARPRFTQPSKMRRRVIARPVGSSVRLKCVASGHPRPDITWMKDDQALTRPEAAEPRKKKWTLSLKNLRPEDSGKYTCRVSNRAGAINATYKVDVIQRTRSKPVLTGTHPVNTTVDFGGTTSFQCKVRSDVKPVIQWLKRVEYGAEGRHNSTIDVGGQKFVVLPTGDVWSRPDGSYLNKLLITRARQDDAGMYICLGANTMGYSFRSAFLTVLPDPKPPGPPVASSSSATSLPWPVVIGIPAGAVFILGTLLLWLCQAQKKPCTPAPAPPLPGHRPPGTARDRSGDKDLPSLAALSAGPGVGLCEEHGSPAAPQHLLGPGPVAGPKLYPKLYTDIHTHTHTHSHTHSHVEGKVHQHIHYQC

SEQ ID NO: 5369 - protein, 504 aa, Homo Sapiens; identical to SEQ ID NO: 5368

SEQ ID NO: 5370 - protein, 504 aa, Homo Sapiens; identical to SEQ ID NO: 5368

SEQ ID NO: 5371 - protein, 504 aa, Homo Sapiens; identical to SEQ ID NO: 5368

SEQ ID NO: 5372 - protein, 119 aa, Homo Sapiens
MIDAATLKSRKMLEEIMKYEASILTHDSSIRYLQEIYNSNNQKIVNLKEKVAQLEAQCQEPCKDTVQIHDITGKDCQDIANKGAKQSGLYFIKPLKANQQFLVYCEIDGSGNGWTVFQK

SEQ ID NO: 5373 - protein, 123 aa, Homo Sapiens
MIDAATLKSRKMLEEIMKYEASILTHDSSIRYLQEIYNSNNQKIVNLKEKVAQLEAQCQEPCKDTVQIHDITGKDCQDIANKGAKQSGLYFIKPLKANQQFLVYCEIDGSGNGWTVFQKRLDG

SEQ ID NO: 5374 - protein, 453 aa, Homo Sapiens
MSWSLHPRNLILYFYALLFLSSTCVAYVATRDNCCILDERFGSYCPTTCGIADFLSTYQTKVDKDLQSLEDILHQVENKTSEVKQLIKAIQLTYNPDESSKPNMIDAATLKSRKMLEEIMKYEASILTHDSSIRYLQEIYNSNNQKIVNLKEKVAQLEAQCQEPCKDTVQIHDITGKDCQDIANKGAKQSGLYFIKPLKANQQFLVYCEIDGSGNGWTVFQKRLDGSVDFKKNWIQYKEGFGHLSPTGTTEFWLGNEKIHLISTQSAIPYALRVELEDWNGRTSTADYAMFKVGPEADKYRLTYAYFAGGDAGDAFDGFDFGDDPSDKFFTSHNGMQFSTWDNDNDKFEGNCAEQDGSGWWMNKCHAGHLNGVYYQGGTYSKASTPNGYDNGIIWATWKTRWYSMKKTTMKIIPFNRLTIGEGQQHHLGGAKQVRPEHPAETEYDSLYPEDDL

SEQ ID NO: 5375 - protein, 437 aa, Homo Sapiens
MSWSLHPRNLILYFYALLFLSSTCVAYVATRDNCCILDERFGSYCPTTCGIADFLSTYQTKVDKDLQSLEDILHQVENKTSEVKQLIKAIQLTYNPDESSKPNMIDAATLKSRKMLEEIMKYEASILTHDSSIRYLQEIYNSNNQKIVNLKEKVAQLEAQCQEPCKDTVQIHDITGKDCQDIANKGAKQSGLYFIKPLKANQQFLVYCEIDGSGNGWTVFQKRLDGSVDFKKNWIQYKEGFGHLSPTGTTEFWLGNEKIHLISTQSAIPYALRVELEDWNGRTSTADYAMFKVGPEADKYRLTYAYFAGGDAGDAFDGFDFGDDPSDKFFTSHNGMQFSTWDNDNDKFEGNCAEQDGSGWWMNKCHAGHLNGVYYQGGTYSKASTPNGYDNGIIWATWKTRWYSMKKTTMKIIPFNRLTIGEGQQHHLGGAKQAGDV

SEQ ID NO: 5376 - protein, 461 aa, Homo Sapiens
MSWSLHPRNLILYFYALLFLSSTCVAYVATRDNCCILDERFGSYCPTTCGIADFLSTYQTKVDKDLQSLEDILHQVENKTSEVKQLIKAIQLTYNPDESSKPNMIDAATLKSRKMLEEIMKYEASILTHDSSIRYLQEIYNSNNQKIVNLKEKVAQLEAQCQEPCKDTVQIHDITGKVKVDSPSLDCQDIANKGAKQSGLYFIKPLKANQQFLVYCEIDGSGNGWTVFQKRLDGSVDFKKNWIQYKEGFGHLSPTGTTEFWLGNEKIHLISTQSAIPYALRVELEDWNGRTSTADYAMFKVGPEADKYRLTYAYFAGGDAGDAFDGFDFGDDPSDKFFTSHNGMQFSTWDNDNDKFEGNCAEQDGSGWWMNKCHAGHLNGVYYQGGTYSKASTPNGYDNGIIWATWKTRWYSMKKTTMKIIPFNRLTIGEGQQHHLGGAKQVRPEHPAETEYDSLYPEDDL

SEQ ID NO: 5377 - protein, 445 aa, Homo Sapiens
MSWSLHPRNLILYFYALLFLSSTCVAYVATRDNCCILDERFGSYCPTTCGIADFLSTYQTKVDKDLQSLEDILHQVENKTSEVKQLIKAIQLTYNPDESSKPNMIDAATLKSRKMLEEIMKYEASILTHDSSIRYLQEIYNSNNQKIVNLKEKVAQLEAQCQEPCKDTVQIHDITGKVKVDSPSLDCQDIANKGAKQSGLYFIKPLKANQQFLVYCEIDGSGNGWTVFQKRLDGSVDFKKNWIQYKEGFGHLSPTGTTEFWLGNEKIHLISTQSAIPYALRVELEDWNGRTSTADYAMFKVGPEADKYRLTYAYFAGGDAGDAFDGFDFGDDPSDKFFTSHNGMQFSTWDNDNDKFEGNCAEQDGSGWWMNKCHAGHLNGVYYQGGTYSKASTPNGYDNGIIWATWKTRWYSMKKTTMKIIPFNRLTIGEGQQHHLGGAKQAGDV

SEQ ID NO: 5378 - protein, 312 aa, Homo Sapiens
MAKVFSFILVTTALTMGREISALEDCAQEQMRLRAQVRLLETRVKQQQVKIKQLLQENEVQFLDKGDENTVIDLGSKRQYADCSEIFNDGYKLSGFYKIKPLQSPAEFSVYCDMSDGGGWTVIQRRSDGSENFNRGWKDYENGFGNFVQKHGEYWLGNKNLHFLTTQEDYTLKIDLADFEKNSRYAQYKNFKVGDEKNFYELNIGEYSGTAGDSLAGNFHPEVQWWASHQRMKFSTWDRDHDNYEGNCAEEDQSGWWFNRCHSANLNGVYYSGPYTAKTDNGIVWYTWHGWWYSLKSVVMKIRPNDFIPNVI

SEQ ID NO: 5379 - protein, 312 aa, Homo Sapiens; identical to SEQ ID NO: 5378

SEQ ID NO: 5380 - protein, 312 aa, Homo Sapiens; identical to SEQ ID NO: 5378

SEQ ID NO: 5381 - protein, 312 aa, Homo Sapiens; identical to SEQ ID NO: 5378

SEQ ID NO: 5382 - protein, 312 aa, Homo Sapiens; identical to SEQ ID NO: 5378

SEQ ID NO: 5383 - protein, 312 aa, Homo Sapiens; identical to SEQ ID NO: 5378

SEQ ID NO: 5384 - protein, 312 aa, Homo Sapiens; identical to SEQ ID NO: 5378

SEQ ID NO: 5385 - protein, 225 aa, Homo Sapiens
MKLANWYWLSSAVLATYGFLVVANNETEEIKDERAKDVCPVRLESRGKCEEAGECPYQVSLPPLTIQLPKQFSRIEEVFKEVQNLKEIVNSLKKSCQDCKLQADDNGDPGRNGLLLPSTGAPGEVGDNRVRELESEVNKLSSELKNAKEEINVLHGRLEKLNLVNMNNIENYVDSKVANLTFVVNSLDGKCSKCPSQEQIQSRPGMYNNVFLSYVHKCYTAREYL

SEQ ID NO: 5386 - protein, 439 aa, Homo Sapiens
MKLANWYWLSSAVLATYGFLVVANNETEEIKDERAKDVCPVRLESRGKCEEAGECPYQVSLPPLTIQLPKQFSRIEEVFKEVQNLKEIVNSLKKSCQDCKLQADDNGDPGRNGLLLPSTGAPGEVGDNRVRELESEVNKLSSELKNAKEEINVLHGRLEKLNLVNMNNIENYVDSKVANLTFVVNSLDGKCSKCPSQEQIQSRPVQHLIYKDCSDYYAIGKRSSETYRVTPDPKNSSFEVYCDMETMGGGWTVLQARLDGSTNFTRTWQDYKAGFGNLRREFWLGNDKIHLLTKSKEMILRIDLEDFNGVELYALYDQFYVANEFLKYRLHVGNYNGTAGDALRFNKHYNHDLKFFTTPDKDNDRYPSGNCGLYYSSGWWFDACLSANLNGKYYHQKYRGVRNGIFWGTWPGVSEAHPGGYKSSFKEAKMMIRPKHFKP

SEQ ID NO: 5387 - protein, 18 aa, Homo Sapiens
MAEKFDCHYCRDPLQGKK

SEQ ID NO: 5388 - protein, 66 aa, Homo Sapiens
MAEKFDCHYCRDPLQGKKYVQKDGHHCCLKCFDKFCANTCVECRKPIGADSKEVHYKNRFWHDTCF

SEQ ID NO: 5389 - protein, 78 aa, Homo Sapiens
MAEKFDCHYCRDPLQGKKYVQKDGHHCCLKCFDKFCANTCVECRKPIGADSKEVHYKNRFWHDTCFRCAKCLHPLANE

SEQ ID NO: 5390 - protein, 130 aa, Homo Sapiens
MAEKFDCHYCRDPLQGKKYVQKDGHHCCLKCFDKFCANTCVECRKPIGADSKEVHYKNRFWHDTCFRCAKCLHPLANETFVAKDNKILCNKCTTREDSPKCKGCFKAIVAGDQNVEYKGTVWHKDCFTCS

SEQ ID NO: 5391 - protein, 138 aa, Homo Sapiens
MAEKFDCHYCRDPLQGKKYVQKDGHHCCLKCFDKFCANTCVECRKPIGADSKEVHYKNRFWHDTCFRCAKCLHPLANETFVAKDNKILCNKCTTREDSPKCKGCFKAIVAGDQNVEYKGTVWHKDCFTCSNCKQVIGT

SEQ ID NO: 5392 - protein, 141 aa, Homo Sapiens
MAEKFDCHYCRDPLQGKKYVQKDGHHCCLKCFDKFCANTCVECRKPIGADSKEVHYKNRFWHDTCFRCAKCLHPLANETFVAKDNKILCNKCTTREDSPKCKGCFKAIVAGDQNVEYKGTVWHKDCFTCSNCKQVIGTGSF

SEQ ID NO: 5393 - protein, 147 aa, Homo Sapiens
MAEKFDCHYCRDPLQGKKYVQKDGHHCCLKCFDKFCANTCVECRKPIGADSKEVHYKNRFWHDTCFRCAKCLHPLANETFVAKDNKILCNKCTTREDSPKCKGCFKAIVAGDQNVEYKGTVWHKDCFTCSNCKQVIGTGSFFPKGED

SEQ ID NO: 5394 - protein, 152 aa, Homo Sapiens
MAEKFDCHYCRDPLQGKKYVQKDGHHCCLKCFDKFCANTCVECRKPIGADSKEVHYKNRFWHDTCFRCAKCLHPLANETFVAKDNKILCNKCTTREDSPKCKGCFKAIVAGDQNVEYKGTVWHKDCFTCSNCKQVIGTGSFFPKGEDFYCVT

SEQ ID NO: 5395 - protein, 155 aa, Homo Sapiens
MAEKFDCHYCRDPLQGKKYVQKDGHHCCLKCFDKFCANTCVECRKPIGADSKEVHYKNRFWHDTCFRCAKCLHPLANETFVAKDNKILCNKCTTREDSPKCKGCFKAIVAGDQNVEYKGTVWHKDCFTCSNCKQVIGTGSFFPKGEDFYCVTCHE

SEQ ID NO: 5396 - protein, 175 aa, Homo Sapiens
MAEKFDCHYCRDPLQGKKYVQKDGHHCCLKCFDKFCANTCVECRKPIGADSKEVHYKNRFWHDTCFRCAKCLHPLANETFVAKDNKILCNKCTTREDSPKCKGCFKAIVAGDQNVEYKGTVWHKDCFTCSNCKQVIGTGSFFPKGEDFYCVTCHETKFAKHCVKCNKAITSGGIT

SEQ ID NO: 5397 - protein, 204 aa, Homo Sapiens
MAEKFDCHYCRDPLQGKKYVQKDGHHCCLKCFDKFCANTCVECRKPIGADSKEVHYKNRFWHDTCFRCAKCLHPLANETFVAKDNKILCNKCTTREDSPKCKGCFKAIVAGDQNVEYKGTVWHKDCFTCSNCKQVIGTGSFFPKGEDFYCVTCHETKFAKHCVKCNKAITSGGITYQDQPWHADCFVCVTCSKKLAGQRFTAVE

SEQ ID NO: 5398 - protein, 205 aa, Homo Sapiens
MAEKFDCHYCRDPLQGKKYVQKDGHHCCLKCFDKFCANTCVECRKPIGADSKEVHYKNRFWHDTCFRCAKCLHPLANETFVAKDNKILCNKCTTREDSPKCKGCFKAIVAGDQNVEYKGTVWHKDCFTCSNCKQVIGTGSFFPKGEDFYCVTCHETKFAKHCVKCNKAITSGGITYQDQPWHADCFVCVTCSKKLAGQRFTAVED

SEQ ID NO: 5399 - protein, 207 aa, Homo Sapiens
MAEKFDCHYCRDPLQGKKYVQKDGHHCCLKCFDKFCANTCVECRKPIGADSKEVHYKNRFWHDTCFRCAKCLHPLANETFVAKDNKILCNKCTTREDSPKCKGCFKAIVAGDQNVEYKGTVWHKDCFTCSNCKQVIGTGSFFPKGEDFYCVTCHETKFAKHCVKCNKAITSGGITYQDQPWHADCFVCVTCSKKLAGQRFTAVEDQY

SEQ ID NO: 5400 - protein, 207 aa, Homo Sapiens; identical to SEQ ID NO: 5399

SEQ ID NO: 5401 - protein, 280 aa, Homo Sapiens
MAEKFDCHYCRDPLQGKKYVQKDGHHCCLKCFDKFCANTCVECRKPIGADSKEVHYKNRFWHDTCFRCAKCLHPLANETFVAKDNKILCNKCTTREDSPKCKGCFKAIVAGDQNVEYKGTVWHKDCFTCSNCKQVIGTGSFFPKGEDFYCVTCHETKFAKHCVKCNKAITSGGITYQDQPWHADCFVCVTCSKKLAGQRFTAVEDQYYCVDCYKNFVAKKCAGCKNPITGFGKGSSVVAYEGQSWHDYCFHCKKCSVNLANKRFVFHQEQVYCPDCAKKL

SEQ ID NO: 5402 - protein, 280 aa, Homo Sapiens; identical to SEQ ID NO: 5401

SEQ ID NO: 5403 - protein, 257 aa, Homo Sapiens
MAEKFDCHYCRDPLQGKKYVQKDGHHCCLKCFDKFCANTCVECRKPIGADSKEVHYKNRFWHDTCFRCAKCLHPLANETFVAKDNKILCNKCTTREDSPKCKGCFKAIVAGDQNVEYKGTVWHKDCFTCSNCKQVIGTGSFFPKGEDFYCVTCHETKFAKHCVKCNKAITSGGITYQDQPWHADCFVCVTCSKKLAGQRFTAVEDQYYCVDCYKNFVAKKCAGCKNPITGFGKGSSVVAYEGQSWHDYCFHCKKCSV

SEQ ID NO: 5404 - protein, 280 aa, Homo Sapiens; identical to SEQ ID NO: 5401

SEQ ID NO: 5405 - protein, 280 aa, Homo Sapiens; identical to SEQ ID NO: 5401

SEQ ID NO: 5406 - protein, 280 aa, Homo Sapiens; identical to SEQ ID NO: 5401

SEQ ID NO: 5407 - protein, 280 aa, Homo Sapiens; identical to SEQ ID NO: 5401

SEQ ID NO: 5408 - protein, 280 aa, Homo Sapiens; identical to SEQ ID NO: 5401

SEQ ID NO: 5409 - protein, 323 aa, Homo Sapiens
MAEKFDCHYCRDPLQGKKYVQKDGHHCCLKCFDKFCANTCVECRKPIGADSKEVHYKNRFWHDTCFRCAKCLHPLANETFVAKDNKILCNKCTTREDSPKCKGCFKAIVAGDQNVEYKGTVWHKDCFTCSNCKQVIGTGSFFPKGEDFYCVTCHETKFAKHCVKCNKAITSGGITYQDQPWHADCFVCVTCSKKLAGQRFTAVEDQYYCVDCYKNFVAKKCAGCKNPITGKRTVSRVSHPVSKARKPPVCHGKRLPLTLFPSANLRGRHPGGERTCPSWVVVLYRKNRSLAAPRGPGLVKAPVWWPMKDNPGTTTASTAKNAP

SEQ ID NO: 5410 - protein, 323 aa, Homo Sapiens; identical to SEQ ID NO: 5409

SEQ ID NO: 5411 - protein, 194 aa, Homo Sapiens
MAEKFDCHYCRDPLQGKKYVQKDGHHCCLKCFDKFCANTCVECRKPIGADSKEVHYKNRFWHDTCFRCAKCLHPLANETFVAKDNKILCNKCTTREDSPKCKGCFKAIVAGDQNVEYKGTVWHKDCFTCSNCKQVIGTGSFFPKGEDFYCVTCHETKFAKHCVKCNKGLVKAPVWWPMKDNPGTTTASTAKNAP

SEQ ID NO: 5412 - protein, 296 aa, Homo Sapiens
MASHRHSGPSSYKVGTMAEKFDCHYCRDPLQGKKYVQKDGHHCCLKCFDKFCANTCVECRKPIGADSKEVHYKNRFWHDTCFRCAKCLHPLANETFVAKDNKILCNKCTTREDSPKCKGCFKAIVAGDQNVEYKGTVWHKDCFTCSNCKQVIGTGSFFPKGEDFYCVTCHETKFAKHCVKCNKAITSGGITYQDQPWHADCFVCVTCSKKLAGQRFTAVEDQYYCVDCYKNFVAKKCAGCKNPITGFGKGSSVVAYEGQSWHDYCFHCKKCSVNLANKRFVFHQEQVYCPDCAKKL

SEQ ID NO: 5413 - protein, 210 aa, Homo Sapiens
MASHRHSGPSSYKVGTMAEKFDCHYCRDPLQGKKYVQKDGHHCCLKCFDKFCANTCVECRKPIGADSKEVHYKNRFWHDTCFRCAKCLHPLANETFVAKDNKILCNKCTTREDSPKCKGCFKAIVAGDQNVEYKGTVWHKDCFTCSNCKQVIGTGSFFPKGEDFYCVTCHETKFAKHCVKCNKGLVKAPVWWPMKDNPGTTTASTAKNAP

SEQ ID NO: 5414 - protein, 309 aa, Homo Sapiens
MTFYVASLALELIWMLSSPAGPSSYKVGTMAEKFDCHYCRDPLQGKKYVQKDGHHCCLKCFDKFCANTCVECRKPIGADSKEVHYKNRFWHDTCFRCAKCLHPLANETFVAKDNKILCNKCTTREDSPKCKGCFKAIVAGDQNVEYKGTVWHKDCFTCSNCKQVIGTGSFFPKGEDFYCVTCHETKFAKHCVKCNKAITSGGITYQDQPWHADCFVCVTCSKKLAGQRFTAVEDQYYCVDCYKNFVAKKCAGCKNPITGFGKGSSVVAYEGQSWHDYCFHCKKCSVNLANKRFVFHQEQVYCPDCAKKL

SEQ ID NO: 5415 - protein, 635 aa, Homo Sapiens
MAMRPRSHPPVGAGTGGGPACVPVAEASTGAWTAEGAAGTRCRASRAPCRPPPVPAPSQLPASSPTKCEICVKNTAILAITLITPQDPHLDPVPRGQPTFTKKKKTIRLFWNEVRPFDWPCKNNRRCREFLWSKLEPIKVDTSRLEHLFESKSKELSVSKKTAADGKRQEIIVLDSKRSNAINIGLTVLPPPRTIKIAILNFDEYALNKEGIEKILTMIPTDEEKQKIQEAQLANPEIPLGSAEQFLLTLSSISELSARLHLWAFKMDYETTEKEVAEPLLDLKEGIDQLENNKTLGFILSTLLAIGNFLNGTNAKAFELSYLEKVPEVKDTVHKQSLLHHVCTMVVENFPDSSDLYSEIGAITRSAKVDFDQLQDNLCQMERRCKASWDHLKAIAKHEMKPVLKQRMSEFLKDCAERIIILKIVHRRIINRFHSFLLFMGHPPYAIREVNINKFCRIISEFALEYRTTRERVLQQKQKRANHRERNKTRGKMITDSGKFSGSSPAPPSQPQGLSYAEDAAEHENMKAVLKTSSPSVEDATPALGVRTRSRASRGSTSSWTMGTDDSPNVTDDAADEIMDRIVKSATQVPSQRVVPRERKRSRANRKSLRRTLKSGLTPEEARALGLVGTSELQL

SEQ ID NO: 5416 - protein, 1439 aa, Homo Sapiens
MATLACRVQFLDDTDPFNSTNFPEPSRPPLFTFREDLALGTQLAGVHRLLQAPHKLDDCTLQLSHNGAYLDLEATLAEQRDELEGFQDDAGRGKKHSIILRTQLSVRVHACIEKLYNSSGRDLRRALFSLKQIFQDDKDLVHEFVVAEGLTCLIKVGAEADQNYQNYILRALGQIMLYVDGMNGVINRNETIQWLYTLIGSKFRLVVKTALKLLLVFVEYSESNAPLLIQAVTAVDTKRGVKPWSNIMEILEEKDGVDTELLVYAMTLVNKTLSGLPDQDTFYDVVDCLEELGIAAVSQRHLNKKGTDLDLVEQLNIYEVALRHEDGDETTEPPPSGCRDRRRASVCSSGGGEHRGLDRRRSRRHSVQSIKSTLSAPTSPCSQSAPSFKPNQVRDLREKYSNFGNNSYHSSRPSSGSSVPTTPTSSVSPPQEARLERSSPSGLLTSSFRQHQESLAAERERRRQEREERLQRIEREERNKFSRDYLDKREEQRQAREERYKYLEQLAAEEHEKELRSRSVSRGRADLSLDLTSPAAPACLAPLSHSPSSSDSQEALTVSASSPGTPHHPQASAGDPEPESEAEPEAEAGAGQVADEAGQDIASAHEGAETEVEQALEQEPEERASLSEKERQNEGVNERDNCSASSVSSSSSTLEREEKEDKLSRDRTTGLWPAGVQDAGVNGQCGDILTNKRFMLDMLYAHNRKSPDDEEKGDGEAGRTQQEAEAVASLATRISTLQANSQTQDESVRRVDVGCLDNRGSVKAFAEKFNSGDLGRGSISPDAEPNDKVPETAPVQPKTESDYIWDQLMANPRELRIQDMDFTDLGEEDDIDVLDVDLGHREAPGPPPPPPPTFLGLPPPPPPPLLDSIPPPPVPGNLLVPPPPVFNAPQGLGWSQVPRGQPTFTKKKKTIRLFWNEVRPFDWPCKNNRRCREFLWSKLEPIKVDTSRLEHLFESKSKELSVSKKTAADGKRQEIIVLDSKRSNAINIGLTVLPPPRTIKIAILNFDEYALNKEGIEKILTMIPTDEEKQKIQEAQLANPEIPLGSAEQFLLTLSSISELSARLHLWAFKMDYETTEKEVAEPLLDLKEGIDQLENNKTLGFILSTLLAIGNFLNGTNAKAFELSYLEKVPEVKDTVHKQSLLHHVCTMVVENFPDSSDLYSEIGAITRSAKVDFDQLQDNLCQMERRCKASWDHLKAIAKHEMKPVLKQRMSEFLKDCAERIIILKIVHRRIINRFHSFLLFMGHPPYAIREVNINKFCRIISEFALEYRTTRERVLQQKQKRANHRERNKTRGKMITDSGKFSGSSPAPPSQPQGLSYAEDAAEHENMKAVLKTSSPSVEDATPALGVRTRSRASRGSTSSWTMGTDDSPNVTDDAADEIMDRIVKSATQVPSQRVVPRERKRSRANRKSLRRTLKSGLTPEEARALGLVGTSELQL

SEQ ID NO: 5417 - protein, 1422 aa, Homo Sapiens
MATLACRVQFLDDTDPFNSTNFPEPSRPPLFTFREDLALGTQLAGVHRLLQAPHKLDDCTLQLSHNGAYLDLEATLAEQRDELEGFQDDAGRGKKHSIILRTQLSVRVHACIEKLYNSSGRDLRRALFSLKQIFQDDKDLVHEFVVAEGLTCLIKVGAEADQNYQNYILRALGQIMLYVDGMNGVINRNETIQWLYTLIGSKFRLVVKTALKLLLVFVEYSESNAPLLIQAVTAVDTKRGVKPWSNIMEILEEKDGVDTELLVYAMTLVNKTLSGLPDQDTFYDVVDCLEELGIAAVSQRHLNKKGTDLDLVEQLNIYEVALRHEDGDETTEPPPSGCRDRRRASVCSSGGGEHRGLDRRRSRRHSVQSIKSTLSAPTSPCSQSAPSFKPNQVRDLREKYSNFGNNSYHSSRPSSGSSVPTTPTSSVSPPQEARLERSSPSGLLTSSFRQHQESLAAERERRRQEREERLQRIEREERNKFRYKYLEQLAAEEHEKELRSRSVSRGRADLSLDLTSPAAPACLAPLSHSPSSSDSQEALTVSASSPGTPHHPQASAGDPEPESEAEPEAEAGAGQVADEAGQDIASAHEGAETEVEQALEQEPEERASLSEKERQNEGVNERDNCSASSVSSSSSTLEREEKEDKLSRDRTTGLWPAGVQDAGVNGQCGDILTNKRFMLDMLYAHNRKSPDDEEKGDGEAGRTQQEAEAVASLATRISTLQANSQTQDESVRRVDVGCLDNRGSVKAFAEKFNSGDLGRGSISPDAEPNDKVPETAPVQPKTESDYIWDQLMANPRELRIQDMDFTDLGEEDDIDVLDVDLGHREAPGPPPPPPPTFLGLPPPPPPPLLDSIPPPPVPGNLLVPPPPVFNAPQGLGWSQVPRGQPTFTKKKKTIRLFWNEVRPFDWPCKNNRRCREFLWSKLEPIKVDTSRLEHLFESKSKELSVSKKTAADGKRQEIIVLDSKRSNAINIGLTVLPPPRTIKIAILNFDEYALNKEGIEKILTMIPTDEEKQKIQEAQLANPEIPLGSAEQFLLTLSSISELSARLHLWAFKMDYETTEKEVAEPLLDLKEGIDQLENNKTLGFILSTLLAIGNFLNGTNAKAFELSYLEKVPEVKDTVHKQSLLHHVCTMVVENFPDSSDLYSEIGAITRSAKVDFDQLQDNLCQMERRCKASWDHLKAIAKHEMKPVLKQRMSEFLKDCAERIIILKIVHRRIINRFHSFLLFMGHPPYAIREVNINKFCRIISEFALEYRTTRERVLQQKQKRANHRERNKTRGKMITDSGKFSGSSPAPPSQPQGLSYAEDAAEHENMKAVLKTSSPSVEDATPALGVRTRSRASRGSTSSWTMGTDDSPNVTDDAADEIMDRIVKSATQVPSQRVVPRERKRSRANRKSLRRTLKSGLTPEEARALGLVGTSELQL

SEQ ID NO: 5418 - protein, 1622 aa, Homo Sapiens
MATLACRVQFLDDTDPFNSTNFPEPSRPPLFTFREDLALGTQLAGVHRLLQAPHKLDDCTLQLSHNGAYLDLEATLAEQRDELEGFQDDAGRGKKHSIILRTQLSVRVHACIEKLYNSSGRDLRRALFSLKQIFQDDKDLVHEFVVAEGLTCLIKVGAEADQNYQNYILRALGQIMLYVDGMNGVINRNETIQWLYTLIGSKFRLVVKTALKLLLVFVEYSESNAPLLIQAVTAVDTKRGVKPWSNIMEILEEKDGVDTELLVYAMTLVNKTLSGLPDQDTFYDVVDCLEELGIAAVSQRHLNKKGTDLDLVEQLNIYEVALRHEDGDETTEPPPSGCRDRRRASVCSSGGGEHRGLDRRRSRRHSVQSIKSTLSAPTSPCSQSAPSFKPNQVRDLREKEEEEEEEQPITEPSSEEEREDDASCQGKDSKVGAASGQSPTGRDAAPKSSALPAVSNASSQGKPLLVGTAGGTTWHSGSSGSEATPSALLSPPASAARPSSATPGSLKVSPTIDKLPYVPHSPFHLFSYDFEDSSLSTKEKEAESQKENSSSDSFSLSTYSASEPYHFRSFSSNRYSNFGNNSYHSSRPSSGSSVPTTPTSSVSPPQEARLERSSPSGLLTSSFRQHQESLAAERERRRQEREERLQRIEREERNKFSRDYLDKREEQRQAREERYKYLEQLAAEEHEKELRSRSVSRGRADLSLDLTSPAAPACLAPLSHSPSSSDSQEALTVSASSPGTPHHPQASAGDPEPESEAEPEAEAGAGQVADEAGQDIASAHEGAETEVEQALEQEPEERASLSEKERQNEGVNERDNCSASSVSSSSSTLEREEKEDKLSRDRTTGLWPAGVQDAGVNGQCGDILTNKRFMLDMLYAHNRKSPDDEEKGDGEAGRTQQEAEAVASLATRISTLQANSQTQDESVRRVDVGCLDNRGSVKAFAEKFNSGDLGRGSISPDAEPNDKVPETAPVQPKTESDYIWDQLMANPRELRIQDMDFTDLGEEDDIDVLDVDLGHREAPGPPPPPPPTFLGLPPPPPPPLLDSIPPPPVPGNLLVPPPPVFNAPQGLGWSQVPRGQPTFTKKKKTIRLFWNEVRPFDWPCKNNRRCREFLWSKLEPIKVDTSRLEHLFESKSKELSVSKKTAADGKRQEIIVLDSKRSNAINIGLTVLPPPRTIKIAILNFDEYALNKEGIEKILTMIPTDEEKQKIQEAQLANPEIPLGSAEQFLLTLSSISELSARLHLWAFKMDYETTEKEVAEPLLDLKEGIDQLENNKTLGFILSTLLAIGNFLNGTNAKAFELSYLEKVPEVKDTVHKQSLLHHVCTMVVENFPDSSDLYSEIGAITRSAKVDFDQLQDNLCQMERRCKASWDHLKAIAKHEMKPVLKQRMSEFLKDCAERIIILKIVHRRIINRFHSFLLFMGHPPYAIREVNINKFCRIISEFALEYRTTRERVLQQKQKRANHRERNKTRGKMITDTDEEEEVESGKFSGSSPAPPSQPQGLSYAEDAAEHENMKAVLKTSSPSVEDATPALGVRTRSRASRGSTSSWTMGTDDSPNVTDDAADEIMDRIVKSATQVPSQRVVPRERKRSRANRKSLRRTLKSGLTPEEARALGLVGTSELQL

SEQ ID NO: 5419 - protein, 528 aa, Homo Sapiens
RLFWNEVRPFDWPCKNNRRCREFLWSKLEPIKVDTSRLEHLFESKSKELSVSKKTAADGKRQEIIVLDSKRSNAINIGLTVLPPPRTIKIAILNFDEYALNKEGIEKILTMIPTDEEKQKIQEAQLANPEIPLGSAEQFLLTLSSISELSARLHLWAFKMDYETTEKEVAEPLLDLKEGIDQLENNKTLGFILSTLLAIGNFLNGTNAKAFELSYLEKVPEVKDTVHKQSLLHHVCTMVVENFPDSSDLYSEIGAITRSAKVDFDQLQDNLCQMERRCKASWDHLKAIAKHEMKPVLKQRMSEFLKDCAERIIILKIVHRRIINRFHSFLLFMGHPPYAIREVNINKFCRIISEFALEYRTTRERVLQQKQKRANHRERNKTRGKMITDSGKFSGSSPAPPSQPQGLSYAEDAAEHENMKAVLKTSSPSVEDATPALGVRTRSRASRGSTSSWTMGTDDSPNVTDDAADEIMDRIVKSATQVPSQRVVPRERKRSRANRKSLRRTLKSGLTPEEARALGLVGTSELQL

SEQ ID NO: 5420 - protein, 375 aa, Homo Sapiens
  misc_feature (1)..(1): Xaa can be any naturally occurring amino acid
XAINIGLTVLPPPRTIKIAILNFDEYALNKEGIEKILTMIPTDEEKQKIQEAQLANPEIPLGSAEQFLLTLSSISELSARLHLWAFKMDYETTEKEVAEPLLDLKEGIDQLENNKTLGFILSTLLAIGNFLNGTNAKAFELSYLEKVPEVKDTVHKQSLLHHVCTMVVENFPDSSDLYSEIGAITRSAKVDFDQLQDNLCQMERRCKASWDHLKAIAKHEMKPVLKQRMSEFLKDCAERIIILKIVHRRIINRFHSFLLFMGHPPYAIREVNINKFCRIISEFALEYRTTRERVLQQKQKRANHRERNKTRGKMITDDPLVPGLWELMTRPMSQMMQLMRSWTASSSQPPKCPVSEWCRGRGNDPGPTGNLCEEP

SEQ ID NO: 5421 - protein, 1200 aa, Homo Sapiens
  misc_feature (1)..(1): Xaa can be any naturally occurring amino acid
XFRLVVKTALKLLLVFVEYSESNAPLLIQAVTAVDTKRGVKPWSNIMEILEEKDGVDTELLVYAMTLVNKTLSGLPDQDTFYDVVDCLEELGIAAVSQRHLNKKGTDLDLVEQLNIYEVALRHEDGDETTEPPPSGCRDRRRASVCSSGGGEHRGLDRRRSRRHSVQSIKSTLSAPTSPCSQSAPSFKPNQVRDLREKSSPSGLLTSSFRQHQESLAAERERRRQEREERLQRIEREERNKFSRDYLDKREEQRQAREERYKYLEQLAAEEHEKELRSRSVSRGRADLSLDLTSPAAPACLAPLSHSPSSSDSQEALTVSASSPGTPHHPQASAGDPEPESEAEPEAEAGAGQVADEAGQDIASAHEGAETEVEQALEQEPEERASLSEKERQNEGVNERDNCSASSVSSSSSTLEREEKEDKLSRDRTTGLWPAGVQDAGVNGQCGDILTNKRFMLDMLYAHNRKSPDDEEKGDGEAGRTQQEAEAVASLATRISTLQANSQTQDESVRRVDVGCLDNRGSVKAFAEKFNSGDLGRGSISPDAEPNDKVPETAPVQPKTESDYIWDQLMANPRELRIQDMDFTDLGEEDDIDVLDVDLGHREAPGPPPPPPPTFLGLPPPPPPPLLDSIPPPPVPGNLLVPPPPVFNAPQGLGWSQVPRGQPTFTKKKKTIRLFWNEVRPFDWPCKNNRRCREFLWSKLEPIKVDTSRLEHLFESKSKELSVSKKTAADGKRQEIIVLDSKRSNAINIGLTVLPPPRTIKIAILNFDEYALNKEGIEKILTMIPTDEEKQKIQEAQLANPEIPLGSAEQFLLTLSSISELSARLHLWAFKMDYETTEKEVAEPLLDLKEGIDQLENNKTLGFILSTLLAIGNFLNGTNAKAFELSYLEKVPEVKDTVHKQSLLHHVCTMVVENFPDSSDLYSEIGAITRSAKVDFDQLQDNLCQMERRCKASWDHLKAIAKHEMKPVLKQRMSEFLKDCAERIIILKIVHRRIINRFHSFLLFMGHPPYAIREVNINKFCRIISEFALEYRTTRERVLQQKQKRANHRERNKTRGKMITDSGKFSGSSPAPPSQPQGLSYAEDAAEHENMKAVLKTSSPSVEDATPALGVRTRSRASRGSTSSWTMGTDDSPNVTDDAADEIMDRIVKSATQVPSQRVVPRERKRSRANRKSLRRTLKSGLTPEEARALGLVGTSELQL

SEQ ID NO: 5422 - protein, 211 aa, Homo Sapiens
MVFLKFFCMSFFCHLCQGYFDGPLYPEMSNGTLHHYFVPDGDYEENDDPEKCQLLFRVSDHRRCSQGEGSQVGSLLSLTLREEFTVLGRQVEDAGRVLEGISKSISYDLDGEESYGKYLRRESHQIGDAYSNSDKSLTELESKFKQGQEQDSRQESRLNEDFLGMLVHTRSLLKETLDISVGLRDKYELLALTIRSHGTRLGRLKNDYLKV

SEQ ID NO: 5423 - protein, 458 aa, Homo Sapiens
MMLIPMASVMAVTEPKWVSVWSRFLWVTLLSMVLGSLLALLLPLGAVEEQCLAVLKGLYLLRSKPDRAQHAATKCTSPSTELSITSRGATLLVAKTKASPAGKLEARAALNQALEMKRQGKREKAQKLFMHALKMDPDFVDALTEFGIFSEEDKDIIQADYLYTRALTISPYHEKALVNRDRTLPLVEEIDQRYFSIIDSKVKKVMSIPKGNSALRRVMEETYYHHIYHTVAIEGNTLTLSEIRHILETRYAVPGKSLEEQNEVIGMHAAMKYINTTLVSRIGSVTISDVLEIHRRVLGYVDPVEAGRFRTTQVLVGHHIPPHPQDVEKQMQEFVQWLNSEEAMNLHPVEFAALAHYKLVYIHPFIDGNGRTSRLLMNLILMQAGYPPITIRKEQRSDYYHVLEAANEGDVRPFIRFIAKCTETTLDTLLFATTEYSVALPEAQPNHSGFKETLPVKP

SEQ ID NO: 5424 - protein, 180 aa, Homo Sapiens
MMLIPMASVMAVTEPKWVSVWSRFLWVTLLSMVLGSLLALLLPLGAVEEQCLAVLKGLYLLRSKPDRAQHAATKCTSPSTELSITSRGATLLVAKTKASPESRRLGSQGGASQNTREWLWGHTDSDCIPPHGWGNRVVPGMLSTHDAAATSSSRPGTQAGHHGFLRRPAQGTAPRMSSAP

SEQ ID NO: 5425 - protein, 139 aa, Homo Sapiens
MMLIPMASVMAVTEPKWVSVWSRFLWVTLLSMVLGSLLALLLPLGAVEEQCLAVLKGLYLLRSKPDRAQHAATKCTSPSTELSITSRGATLLVAKTKASPGKTDWPSSSMLVNWIDRHRMCHVLYVGHRGIVNKSALSS

SEQ ID NO: 5426 - protein, 56 aa, Homo Sapiens
  misc_feature (1)..(1): Xaa can be any naturally occurring amino acid
XCLAVLKGLYLLRSKPDRAQHAATKCTSPSTELSITSRGATLLVAKTKASPGKCCT

SEQ ID NO: 5427 - protein, 437 aa, Homo Sapiens
MGRRMRGAAATAGLWLLALGSLLALWGGLLPPRTELPASRPPEDRLPRRPARSGGPAPAPRFPLPPPLAWDARGGSLKTFRALLTLAAGADGPPRQSRSEPRWHVSARQPRPEESAAVHGGVFWSRGLEEQVPPGFSEAQAAAWLEAARGARMVALERGGCGRSSNRLARFADGTRACVRYGINPEQIQGEALSYYLARLLGLQRHVPPLALARVEARGAQWAQVQEELRAAHWTEGSVVSLTRWLPNLTDVVVPAPWRSEDGRLRPLRDAGGELANLSQAELVDLVQWTDLILFDYLTANFDRLVSNLFSLQWDPRVMQRATSNLHRGPGGALVFLDNEAGLVHGYRVAGMWDKYNEPLLQSVCVFRERTARRVLELHRGQDAAARLLRLYRRHEPRFPELAALADPHAQLLQRRLDFLAKHILHCKAKYGRRSGT

SEQ ID NO: 5428 - protein, 147 aa, Homo Sapiens
MFPAGPPSHSLLRLPLLQLLLLVVQAVGRGLGRASPAGGPLEDVVIERYHIPRACPREVQMGDFVRYHYNGTFEDGKKFDSSGAHSTGCHPLLRCGSAGCVEQGRHRAGEHIAAPAPLPPHGPGRRLCPLPLQWHPAGRHLLRHQLQ

SEQ ID NO: 5429 - protein, 171 aa, Homo Sapiens
MFPAGPPSHSLLRLPLLQLLLLVVQAVGRGLGRASPAGGPLEDVVIERYHIPRACPREVQMGDFVRYHYNGTFEDGKKFDSSYDRNTLVAIVVGVGRLITGMDRGLMGMCVNERRRLIVPPHLGYGSIGLAGLIPPDATLYFDVVLLDVWNKEDTVQVSTLLRPPHCPRMV

SEQ ID NO: 5430 - protein, 582 aa, Homo Sapiens
MFPAGPPSHSLLRLPLLQLLLLVVQAVGRGLGRASPAGGPLEDVVIERYHIPRACPREVQMGDFVRYHYNGTFEDGKKFDSSYDRNTLVAIVVGVGRLITGMDRGLMGMCVNERRRLIVPPHLGYGSIGLAGLIPPDATLYFDVVLLDVWNKEDTVQVSTLLRPPHCPRMVQDGDFVRYHYNGTLLDGTSFDTSYSKGGTYDTYVGSGWLIKGMDQGLLGMCPGERRKIIIPPFLAYGEKGYGTVIPPQASLVFHVLLIDVHNPKDAVQLETLELPPGCVRRAGAGDFMRYHYNGSLMDGTLFDSSYSRNHTYNTYIGQGYIIPGMDQGLQGACMGERRRITIPPHLAYGENGTGDKIPGSAVLIFNVHVIDFHNPADVVEIRTLSRPSETCNETTKLGDFVRYHYNCSLLDGTQLFTSHDYGAPQEATLGANKVIEGLDTGLQGMCVGERRQLIVPPHLAHGESGARGVPGSAVLLFEVELVSREDGLPTGYLFVWHKDPPANLFEDMDLNKDGEVPPEEFSTFIKAQVSEGKGRLMPGQDPEKTIGDMFQNQDRNQDGKITVDELKLKSDEDEERVHEEL

SEQ ID NO: 5431 - protein, 81 aa, Homo Sapiens
MGDFVRYHYNGTFEDGKKFDSSYDRNTLVAIVVGVGRLITGMDRGLMGMCVNERRRLIVPPHLGYGSIGLAGLIPPDATLY

SEQ ID NO: 5432 - protein, 172 aa, Homo Sapiens
MGDFVRYHYNGTFEDGKKFDSSYDRNTLVAIVVGVGRLITGMDRGLMGMCVNERRRLIVPPHLGYGSIGLAGLIPPDATLYFDVVLLDVWNKEDTVQVSTLLRPPHCPRMVQDGDFVRYHYNGTLLDGTSFDTSYSKGGTYDTYVGSGWLIKGMDQGLLGMCPGERRKIIIP

SEQ ID NO: 5433 - protein, 386 aa, Homo Sapiens
  misc_feature (1)..(1): Xaa can be any naturally occurring amino acid
XIDVHNPKDAVQLETLELPPGCVRRAGAGDFMRYHYNGSLMDGTLFDSSYSRNHTYNTYIGQGYIIPGMDQGLQGACMGERRRITIPPHLAYGENGTDSIGFLQGSAPLRPFRSGEGQPSLGREGGYGKTEPAYPQDPAVLGASVSSPVKWASHADPQGDKIPGSAVLIFNVHVIDFHNPADVVEIRTLSRPSETCNETTKLGDFVRYHYNCSLLDGTQLFTSHDYGAPQEATLGANKVIEGLDTGLQGMCVGERRQLIVPPHLAHGESGARGVPGSAVLLFEVELVSREDGLPTGYLFVWHKDPPANLFEDMDLNKDGEVPPEEFSTFIKAQVSEGKGRLMPGQDPEKTIGDMFQNQDRNQDGKITVDELKLKSDEDEERVHEEL

SEQ ID NO: 5434 - protein, 99 aa, Homo Sapiens
MCVGEKRRAIIPSHLAYGKRGFPPSVPADAVVQYDVELIALIRANYWLKLVKGILPLVGMAMVPALLGLIGYHLYRKANRPKVSKKKLKEEKRNKSKKK

SEQ ID NO: 5435 - protein, 92 aa, Homo Sapiens
MTLRPSLLPLHLLLLLLLSAAVCRAEAGLETESPVRTLQVETLGRERDLWKSIRDPCSPIVGGAPRTMCRARCFWRHASHTLHGKLGRWTYY

SEQ ID NO: 5436 - protein, 72 aa, Homo Sapiens
MTLRPSLLPLHLLLLLLLSAAVCRAEAGLETESPVRTLQVETLSDRRWSPQNHVPSPLLLETRFTYTTREAW

SEQ ID NO: 5437 - protein, 201 aa, Homo Sapiens
MTLRPSLLPLHLLLLLLLSAAVCRAEAGLETESPVRTLQVETLVEPPEPCAEPAAFGDTLHIHYTGSLVDGRIIDTSLTRDPLVIELGQKQVIPGLEQSLLDMCVGEKRRAIIPSHLAYGKRGFPPSVPADAVVQYDVELIALIRANYWLKLVKGILPLVGMAMVPALLGLIGYHLYRKANRPKVSKKKLKEEKRNKSKKK

SEQ ID NO: 5438 - protein, 182 aa, Homo Sapiens
MTLRPSLLPLHLLLLLLLSAAVCRAEAGLETESPVRTLQVETLVEPPEPCAEPAAFGDTLHIHYTGSLVDGRIIDTSLTRDPLVIELGQKQVIPGLEQSLLDMCVGEKRRAIIPSHLAYGKRGFPPSVPDGVSLLLPRLECNSAIFTHHNLRHPGSSNSPVSASRVAGITGMRHHDRLILYF

SEQ ID NO: 5439 - protein, 146 aa, Homo Sapiens
MTLRPSLLPLHLLLLLLLSAAVCRAEAGLETESPVRTLQVETLVEPPEPCAEPAAFGDTLHIHYTGSLVDGRIIDTSLTRDPLVIELGQKQVIPGLEQSLLDMCVGEKRRAIIPSHLAYGKRGFPPSVPGTKDNLMRPPGMTSSSQ

SEQ ID NO: 5440 - protein, 63 aa, Homo Sapiens
SLTRDPLVIELGQKQVIPGLEQSLLDMCVGWKNSCFGCEDSGGFAEGASAGLRLLAYLSCLWL

SEQ ID NO: 5441 - protein, 66 aa, Homo Sapiens
MRLFLWNAVLTLFVTSLIGALIPEPEVKIEVLQKPFICHRKTKGGDLMLVHYEGYLEKDGSLFHST

SEQ ID NO: 5442 - protein, 211 aa, Homo Sapiens
MRLFLWNAVLTLFVTSLIGALIPEPEVKIEVLQKPFICHRKTKGGDLMLVHYEGYLEKDGSLFHSTHKHNNGQPIWFTLGILEALKGWDQGLKGMCVGEKRKLIIPPALGYGKEGKGKIPPESTLIFNIDLLEIRNGPRSHESFQEMDLNDDWKLSKDEVKAYLKKEFEKHGAVVNESHHDALVEDIFDKEDEDKDGFISAREFTYKHDEL

SEQ ID NO: 5443 - protein, 89 aa, Homo Sapiens
  misc_feature (1)..(1): Xaa can be any naturally occurring amino acid
XVLQKPFICHRKTKGGDLMLVHYEGYLEKDGSLFHSTHKHNNGQPIWFTLGILEALKGWDQGLKGMCVGEKRKLIIPPALGYGKEGKVF

SEQ ID NO: 5444 - protein, 102 aa, Homo Sapiens
MRLSWFRVLTVLSICLSAVATATGAEGKRKLQIGVKKRVDHCPIKSRKGDVLHMHYTGKLEDGTEFDSSLPQNQPFVFSLGTGQVIKGWDQGLLGMCEGEKR

SEQ ID NO: 5445 - protein, 142 aa, Homo Sapiens
MRLSWFRVLTVLSICLSAVATATGAEGKRKLQIGVKKRVDHCPIKSRKGDVLHMHYTGKLEDGTEFDSSLPQNQPFVFSLGTGQVIKGWDQGLLGMCEGEKRKLVIPSELGYGERGAPPKIPGGATLVFEVELLKIERRTEL

SEQ ID NO: 5446 - protein, 142 aa, Homo Sapiens; identical to SEQ ID NO: 5445

SEQ ID NO: 5447 - protein, 142 aa, Homo Sapiens; identical to SEQ ID NO: 5445

SEQ ID NO: 5448 - protein, 74 aa, Homo Sapiens
MPKTMHFLFRFIVFFYLWGLFTAQRQKKEESTEEVKIEVLHRPENCSKTSKKGDLLNAHYDGYLAKDGSKFYCR

SEQ ID NO: 5449 - protein, 86 aa, Homo Sapiens
MPKTMHFLFRFIVFFYLWGLFTAQRQKKEESTEEVKIEVLHRPENCSKTSKKGDLLNAHYDGYLAKDGSKFYCSRRQDSTGCYIDF

SEQ ID NO: 5450 - protein, 222 aa, Homo Sapiens
MPKTMHFLFRFIVFFYLWGLFTAQRQKKEESTEEVKIEVLHRPENCSKTSKKGDLLNAHYDGYLAKDGSKFYCSRTQNEGHPKWFVLGVGQVIKGLDIAMTDMCPGEKRKVVIPPSFAYGKEGYAEGKIPPDATLIFEIELYAVTKGPRSIETFKQIDMDNDRQLSKAEINLYLQREFEKDEKPRDKSYQDAVLEDIFKKNDHDGDGFISPKEYNVYQHDEL

SEQ ID NO: 5451 - protein, 221 aa, Homo Sapiens
MPKTMHFLFRFIVFFYLWGLFTAQRQKKEESTEEVKIEVLHRPENCSKTSKKGDLLNAHYDGYLAKDGSKFYCSRTQNEGHPKWFVLGVGQVIKGLDIAMTDMCPGEKRKVVIPPSFAYGKEGYEGKIPPDATLIFEIELYAVTKGPRSIETFKQIDMDNDRQLSKAEINLYLQREFEKDEKPRDKSYQDAVLEDIFKKNDHDGDGFISPKEYNVYQHDEL

SEQ ID NO: 5452 - protein, 127 aa, Homo Sapiens
MPKTMHFLFRFIVFFYLWGLFTAQRQKKEESTEEVKIEVLHRPENCSKTSKKGDLLNAHYDGYLAKDGSKFYCSRTQNEGHPKWFVLGVGQVIKGLDIAMTDMCPGEKRKVVIPPSFAYGKEGYGST

SEQ ID NO: 5453 - protein, 67 aa, Homo Sapiens
  misc_feature (1)..(1): Xaa can be any naturally occurring amino acid
XGYLAKDGSKFYCSRTQNEGHPKWFVLGVGQVIKGLDIAMTDMCPGEKRKVVIPPSFAYGKEGYGST

SEQ ID NO: 5454 - protein, 623 aa, Homo Sapiens
MAFRGWRPPPPPLLLLLLWVTGQAAPVAGLGSDAELQIERRFVPDECPRTVRSGDFVRYHYVGTFPDGQKFDSRYWDTAEDKADKSPCPQVRVGVNTSPSCRLKQKGVGIYWKDLQFLVRVQNHGLSYDRDSTFNVFVGKGQLITGMDQALVGMCVNERRFVKIPPKLAYGNEGVSGVIPPNSVLHFDVLLMDIWNSEDQVQIHTYFKPPSCPRTIQVSDFVRYHYNGTFLDGTLFDSSHNRMKTYDTYVGIGWLIPGMDKGLLGMCVGEKRIITIPPFLAYGEDGDGKDIPGQASLVFDVALLDLHNPKDSISIENKVVPENCERISQSGDFLRYHYNGTLLDGTLFDSSYSRNRTFDTYIGQGYVIPGMDEGLLGVCIGEKRRIVVPPHLGYGEEGRGNIPGSAVLVFDIHVIDFHNPSDSISITSHYKPPDCSVLSKKGDYLKYHYNASLLDGTLLDSTWNLGKTYNIVLGSGQVVLGMDMGLREMCVGEKRTVIIPPHLGYGEAGVDGEVPGSAVLVFDIELLELVAGLPEGYMFIWNGEVSPNLFEEIDKDGNGEVLLEEFSEYIHAQVASGKGKLAPGFDAELIVKNMFTNQDRNGDGKVTAEEFKLKDQEAKHDEL

SEQ ID NO: 5455 - protein, 570 aa, Homo Sapiens
MAFRGWRPPPPPLLLLLLWVTGQAAPVAGLGSDAELQIERRFVPDECPRTVRSGDFVRYHYVGTFPDGQKFDSSYDRDSTFNVFVGKGQLITGMDQALVGMCVNERRFVKIPPKLAYGNEGVSGVIPPNSVLHFDVLLMDIWNSEDQVQIHTYFKPPSCPRTIQVSDFVRYHYNGTFLDGTLFDSSHNRMKTYDTYVGIGWLIPGMDKGLLGMCVGEKRIITIPPFLAYGEDGDGKDIPGQASLVFDVALLDLHNPKDSISIENKVVPENCERISQSGDFLRYHYNGTLLDGTLFDSSYSRNRTFDTYIGQGYVIPGMDEGLLGVCIGEKRRIVVPPHLGYGEEGRGNIPGSAVLVFDIHVIDFHNPSDSISITSHYKPPDCSVLSKKGDYLKYHYNASLLDGTLLDSTWNLGKTYNIVLGSGQVVLGMDMGLREMCVGEKRTVIIPPHLGYGEAGVDGEVPGSAVLVFDIELLELVAGLPEGYMFIWNGEVSPNLFEEIDKDGNGEVLLEEFSEYIHAQVASGKGKLAPGFDAELIVKNMFTNQDRNGDGKVTAEEFKLKDQEAKHDEL

SEQ ID NO: 5456 - protein, 338 aa, Homo Sapiens
MAGKDIPGQASLVFDVALLDLHNPKDSISIENKVVPENCERISQSGDFLRYHYNGTLLDGTLFDSSYSRNRTFDTYIGQGYVIPGMDEGLLGVCIGEKRRIVVPPHLGYGEEGRGNIPGSAVLVFDIHVIDFHNPSDSISITSHYKPPDCSVLSKKGDYLKYHYNASLLDGTLLDSTWNLGKTYNIVLGSGQVVLGMDMGLREMCVGEKRTVIIPPHLGYGEAGVDGEVPGSAVLVFDIELLELVAGLPEGYMFIWNGEVSPNLFEEIDKDGNGEVLLEEFSEYIHAQVASGKGKLAPGFDAELIVKNMFTNQDRNGDGKVTAEEFKLKDQEAKHDEL

SEQ ID NO: 5457 - protein, 226 aa, Homo Sapiens [sequence omitted]

SEQ ID NO: 5458 - protein, 85 aa, Homo Sapiens
MLKRFTWTDSKPKASLKIDLRVTSKSKESGLSDVSRPSFCHSSCGHVSEGKRRFTYDHAELERKIACCSPPPDYNSVVLYSTPPI

SEQ ID NO: 5459 - protein, 85 aa, Homo Sapiens; identical to SEQ ID NO: 5458

SEQ ID NO: 5460 - protein, 361 aa, Homo Sapiens
MNSDLLVDSDGFYKEPITMEDLISYSFQVARGMEFLSSRKCIHRDLAARNILLSENNVVKICDFGLARDIYKNPDYVRKGDTRLPLKWMAPESIFDKIYSTKSDVWSYGVLLWEIFSLGGSPYPGVQMDEDFCSRLREGMRMRAPEYSTPEIYQIMLDCWHRDPKERPRFAELVEKLGDLLQANVQQDGKDYIPINAILTGNSGFTYSTPAFSEDFFKESISAPKFNSGSSDDVRYVNAFKFMSLERIKTFEELLPNATSMFDDYQGDSSTLLASPMLKRFTWTDSKPKASLKIDLRVTSKSKESGLSDVSRPSFCHSSCGHVSEGKRRFTYDHAELERKIACCSPPPDYNSVVLYSTPPI

SEQ ID NO: 5461 - protein, 433 aa, Homo Sapiens
MVIVEYCKYGNLSNYLKSKRDLFFLNKDAALHMEPKKEKMEPGLEQGKKPRLDSVTSSESFASSGFQEDKSLSDVEEEEDSDGFYKEPITMEDLISYSFQVARGMEFLSSRKCIHRDLAARNILLSENNVVKICDFGLARDIYKNPDYVRKGDTRLPLKWMAPESIFDKIYSTKSDVWSYGVLLWEIFSLGGSPYPGVQMDEDFCSRLREGMRMRAPEYSTPEIYQIMLDCWHRDPKERPRFAELVEKLGDLLQANVQQDGKDYIPINAILTGNSGFTYSTPAFSEDFFKESISAPKFNSGSSDDVRYVNAFKFMSLERIKTFEELLPNATSMFDDYQGDSSTLLASPMLKRFTWTDSKPKASLKIDLRVTSKSKESGLSDVSRPSFCHSSCGHVSEGKRRFTYDHAELERKIACCSPPPDYNSVVLYSTPPI

SEQ ID NO: 5462 - protein, 1338 aa, Homo Sapiens
MVSYWDTGVLLCALLSCLLLTGSSSGSKLKDPELSLKGTQHIMQAGQTLHLQCRGEAAHKWSLPEMVSKESERLSITKSACGRNGKQFCSTLTLNTAQANHTGFYSCKYLAVPTSKKKETESAIYIFISDTGRPFVEMYSEIPEIIHMTEGRELVIPCRVTSPNITVTLKKFPLDTLIPDGKRIIWDSRKGFIISNATYKEIGLLTCEATVNGHLYKTNYLTHRQTNTIIDVQISTPRPVKLLRGHTLVLNCTATTPLNTRVQMTWSYPDEKNKRASVRRRIDQSNSHANIFYSVLTIDKMQNKDKGLYTCRVRSGPSFKSVNTSVHIYDKAFITVKHRKQQVLETVAGKRSYRLSMKVKAFPSPEVVWLKDGLPATEKSARYLTRGYSLIIKDVTEEDAGNYTILLSIKQSNVFKNLTATLIVNVKPQIYEKAVSSFPDPALYPLGSRQILTCTAYGIPQPTIKWFWHPCNHNHSEARCDFCSNNEESFILDADSNMGNRIESITQRMAIIEGKNKMASTLVVADSRISGIYICIASNKVGTVGRNISFYITDVPNGFHVNLEKMPTEGEDLKLSCTVNKFLYRDVTWILLRTVNNRTMHYSISKQKMAITKEHSITLNLTIMNVSLQDSGTYACRARNVYTGEEILQKKEITIRDQEAPYLLRNLSDHTVAISSSTTLDCHANGVPEPQITWFKNNHKIQQEPGIILGPGSSTLFIERVTEEDEGVYHCKATNQKGSVESSAYLTVQGTSDKSNLELITLTCTCVAATLFWLLLTLFIRKMKRSSSEIKTDYLSIIMDPDEVPLDEQCERLPYDASKWEFARERLKLGKSLGRGAFGKVVQASAFGIKKSPTCRTVAVKMLKEGATASEYKALMTELKILTHIGHHLNVVNLLGACTKQGGPLMVIVEYCKYGNLSNYLKSKRDLFFLNKDAALHMEPKKEKMEPGLEQGKKPRLDSVTSSESFASSGFQEDKSLSDVEEEEDSDGFYKEPITMEDLISYSFQVARGMEFLSSRKCIHRDLAARNILLSENNVVKICDFGLARDIYKNPDYVRKGDTRLPLKWMAPESIFDKIYSTKSDVWSYGVLLWEIFSLGGSPYPGVQMDEDFCSRLREGMRMRAPEYSTPEIYQIMLDCWHRDPKERPRFAELVEKLGDLLQANVQQDGKDYIPINAILTGNSGFTYSTPAFSEDFFKESISAPKFNSGSSDDVRYVNAFKFMSLERIKTFEELLPNATSMFDDYQGDSSTLLASPMLKRFTWTDSKPKASLKIDLRVTSKSKESGLSDVSRPSFCHSSCGHVSEGKRRFTYDHAELERKIACCSPPPDYNSVVLYSTPPI

SEQ ID NO: 5463 - protein, 541 aa, Homo Sapiens
MVSYWDTGVLLCALLSCLLLTGSSSGSKLKDPELSLKGTQHIMQAGQTLHLQCRGEAAHKWSLPEMVSKESERLSITKSACGRNGKQFCSTLTLNTAQANHTGFYSCKYLAVPTSKKKETESAIYIFISDTGRPFVEMYSEIPEIIHMTEGRELVIPCRVTSPNITVTLKKFPLDTLIPDGKRIIWDSRKGFIISNATYKEIGLLTCEATVNGHLYKTNYLTHRQTNTIIDVQISTPRPVKLLRGHTLVLNCTATTPLNTRVQMTWSYPDEKNKRASVRRRIDQSNSHANIFYSVLTIDKMQNKDKGLYTCRVRSGPSFKSVNTSVHIYDKAFITVKHRKQQVLETVAGKRSYRLSMKVKAFPSPEVVWLKDGLPATEKSARYLTRGYSLIIKDVTEEDAGNYTILLSIKQSNVFKNLTATLIVNVKPQIYEKAVSSFPDPALYPLGSRQILTCTAYGIPQPTIKWFWHPCNHNHSEARCDFCSNNEESFILDADSNMGNRIESITQRMAIIEGKNKLPPANSSFMLPPTSFSSNYFHFLP

SEQ ID NO: 5464 - protein, 733 aa, Homo Sapiens
MVSYWDTGVLLCALLSCLLLTGSSSGSKLKDPELSLKGTQHIMQAGQTLHLQCRGEAAHKWSLPEMVSKESERLSITKSACGRNGKQFCSTLTLNTAQANHTGFYSCKYLAVPTSKKKETESAIYIFISDTGRPFVEMYSEIPEIIHMTEGRELVIPCRVTSPNITVTLKKFPLDTLIPDGKRIIWDSRKGFIISNATYKEIGLLTCEATVNGHLYKTNYLTHRQTNTIIDVQISTPRPVKLLRGHTLVLNCTATTPLNTRVQMTWSYPDEKNKRASVRRRIDQSNSHANIFYSVLTIDKMQNKDKGLYTCRVRSGPSFKSVNTSVHIYDKAFITVKHRKQQVLETVAGKRSYRLSMKVKAFPSPEVVWLKDGLPATEKSARYLTRGYSLIIKDVTEEDAGNYTILLSIKQSNVFKNLTATLIVNVKPQIYEKAVSSFPDPALYPLGSRQILTCTAYGIPQPTIKWFWHPCNHNHSEARCDFCSNNEESFILDADSNMGNRIESITQRMAIIEGKNKMASTLVVADSRISGIYICIASNKVGTVGRNISFYITDVPNGFHVNLEKMPTEGEDLKLSCTVNKFLYRDVTWILLRTVNNRTMHYSISKQKMAITKEHSITLNLTIMNVSLQDSGTYACRARNVYTGEEILQKKEITIRDQEAPYLLRNLSDHTVAISSSTTLDCHANGVPEPQITWFKNNHKIQQEPELYTSTSPSSSSSSPLSSSSSSSSSSSS

SEQ ID NO: 5465 - protein, 687 aa, Homo Sapiens
MVSYWDTGVLLCALLSCLLLTGSSSGSKLKDPELSLKGTQHIMQAGQTLHLQCRGEAAHKWSLPEMVSKESERLSITKSACGRNGKQFCSTLTLNTAQANHTGFYSCKYLAVPTSKKKETESAIYIFISDTGRPFVEMYSEIPEIIHMTEGRELVIPCRVTSPNITVTLKKFPLDTLIPDGKRIIWDSRKGFIISNATYKEIGLLTCEATVNGHLYKTNYLTHRQTNTIIDVQISTPRPVKLLRGHTLVLNCTATTPLNTRVQMTWSYPDEKNKRASVRRRIDQSNSHANIFYSVLTIDKMQNKDKGLYTCRVRSGPSFKSVNTSVHIYDKAFITVKHRKQQVLETVAGKRSYRLSMKVKAFPSPEVVWLKDGLPATEKSARYLTRGYSLIIKDVTEEDAGNYTILLSIKQSNVFKNLTATLIVNVKPQIYEKAVSSFPDPALYPLGSRQILTCTAYGIPQPTIKWFWHPCNHNHSEARCDFCSNNEESFILDADSNMGNRIESITQRMAIIEGKNKMASTLVVADSRISGIYICIASNKVGTVGRNISFYITDVPNGFHVNLEKMPTEGEDLKLSCTVNKFLYRDVTWILLRTVNNRTMHYSISKQKMAITKEHSITLNLTIMNVSLQDSGTYACRARNVYTGEEILQKKEITIRGEHCNKKAVFSRISKFKSTRNDCTTQSNVKH

SEQ ID NO: 5466 - protein, 665 aa, Homo Sapiens
MVSYWDTGVLLCALLSCLLLTGSSSGSKLKDPELSLKGTQHIMQAGQTLHLQCRGEAAHKWSLPEMVSKESERLSITKSACGRNGKQFCSTLTLNTAQANHTGFYSCKYLAVPTSKKKETESAIYIFISDTGRPFVEMYSEIPEIIHMTEGRELVIPCRVTSPNITVTLKKFPLDTLIPDGKRIIWDSRKGFIISNATYKEIGLLTCEATVNGHLYKTNYLTHRQTNTIIDVQISTPRPVKLLRGHTLVLNCTATTPLNTRVQMTWSYPDEKNKRASVRRRIDQSNSHANIFYSVLTIDKMQNKDKGLYTCRVRSGPSFKSVNTSVHIYDKAFITVKHRKQQVLETVAGKRSYRLSMKVKAFPSPEVVWLKDGLPATEKSARYLTRGYSLIIKDVTEEDAGNYTILLSIKQSNVFKNLTATLIVNVKPQIYEKAVSSFPDPALYPLGSRQILTCTAYGIPQPTIKWFWHPCNHNHSEARCDFCSNNEESFILDADSNMGNRIESITQRMAIIEGKNKMASTLVVADSRISGIYICIASNKVGTVGRNISFYITDVPNGFHVNLEKMPTEGEDLKLSCTVNKFLYRDVTWILLRTVNNRTMHYSISKQKMAITKEHSITLNLTIMNVSLQDSGTYACRARNVYTGEEILQKKEITIRGSEEMLLPK

SEQ ID NO: 5467 - protein, 1363 aa, Homo Sapiens
MQRGAALCLRLWLCLGLLDGLVSGYSMTPPTLNITEESHVIDTGDSLSISCRGQHPLEWAWPGAQEAPATGDKDSEDTGVVRDCEGTDARPYCKVLLLHEVHANDTGSYVCYYKYIKARIEGTTAASSYVFVRDFEQPFINKPDTLLVNRKDAMWVPCLVSIPGLNVTLRSQSSVLWPDGQEVVWDDRRGMLVSTPLLHDALYLQCETTWGDQDFLSNPFLVHITGNELYDIQLLPRKSLELLVGEKLVLNCTVWAEFNSGVTFDWDYPGKQAERGKWVPERRSQQTHTELSSILTIHNVSQHDLGSYVCKANNGIQRFRESTEVIVHENPFISVEWLKGPILEATAGDELVKLPVKLAAYPPPEFQWYKDGKALSGRHSPHALVLKEVTEASTGTYTLALWNSAAGLRRNISLELVVNVPPQIHEKEASSPSIYSRHSRQALTCTAYGVPLPLSIQWHWRPWTPCKMFAQRSLRRRQQQDLMPQCRDWRAVTTQDAVNPIESLDTWTEFVEGKNKTVSKLVIQNANVSAMYKCVVSNKVGQDERLIYFYVTTIPDGFTIESKPSEELLEGQPVLLSCQADSYKYEHLRWYRLNLSTLHDAHGNPLLLDCKNVHLFATPLAASLEEVAPGARHATLSLSIPRVAPEHEGHYVCEVQDRRSHDKHCHKKYLSVQALEAPRLTQNLTDLLVNVSDSLEMQCLVAGAHAPSIVWYKDERLLEEKSGVDLADSNQKLSIQRVREEDAGRYLCSVCNAKGCVNSSASVAVEGSEDKGSMEIVILVGTGVIAVFFWVLLLLIFCNMRRPAHADIKTGYLSIIMDPGEVPLEEQCEYLSYDASQWEFPRERLHLGRVLGYGAFGKVVEASAFGIHKGSSCDTVAVKMLKEGATASEHRALMSELKILIHIGNHLNVVNLLGACTKPQGPLMVIVEFCKYGNLSNFLRAKRDAFSPCAEKSPEQRGRFRAMVELARLDRRRPGSSDRVLFARFSKTEGGARRASPDQEAEDLWLSPLTMEDLVCYSFQVARGMEFLASRKCIHRDLAARNILLSESDVVKICDFGLARDIYKDPDYVRKGSARLPLKWMAPESIFDKVYTTQSDVWSFGVLLWEIFSLGASPYPGVQINEEFCQRLRDGTRMRAPELATPAIRRIMLNCWSGDPKARPAFSELVEILGDLLQGRGLQEEEEVCMAPRSSQSSEEGSFSQVSTMALHIAQADAEDSPPSLQRHSLAARYYNWVSFPGCLARGAETRGSSRMKTFEEFPMTPTTYKGSVDNQTDSGMVLASEEFEQIESRHRQESGFSCKGPGQNVAVTRAHPDSQGRRRRPERGARGGQVFYNSEYGELSEPSEEDHCSPSARVTFFTDNSY

SEQ ID NO: 5468 - protein, 1298 aa, Homo Sapiens
MQRGAALCLRLWLCLGLLDGLVSGYSMTPPTLNITEESHVIDTGDSLSISCRGQHPLEWAWPGAQEAPATGDKDSEDTGVVRDCEGTDARPYCKVLLLHEVHANDTGSYVCYYKYIKARIEGTTAASSYVFVRDFEQPFINKPDTLLVNRKDAMWVPCLVSIPGLNVTLRSQSSVLWPDGQEVVWDDRRGMLVSTPLLHDALYLQCETTWGDQDFLSNPFLVHITGNELYDIQLLPRKSLELLVGEKLVLNCTVWAEFNSGVTFDWDYPGKQAERGKWVPERRSQQTHTELSSILTIHNVSQHDLGSYVCKANNGIQRFRESTEVIVHENPFISVEWLKGPILEATAGDELVKLPVKLAAYPPPEFQWYKDGKALSGRHSPHALVLKEVTEASTGTYTLALWNSAAGLRRNISLELVVNVPPQIHEKEASSPSIYSRHSRQALTCTAYGVPLPLSIQWHWRPWTPCKMFAQRSLRRRQQQDLMPQCRDWRAVTTQDAVNPIESLDTWTEFVEGKNKTVSKLVIQNANVSAMYKCVVSNKVGQDERLIYFYVTTIPDGFTIESKPSEELLEGQPVLLSCQADSYKYEHLRWYRLNLSTLHDAHGNPLLLDCKNVHLFATPLAASLEEVAPGARHATLSLSIPRVAPEHEGHYVCEVQDRRSHDKHCHKKYLSVQALEAPRLTQNLTDLLVNVSDSLEMQCLVAGAHAPSIVWYKDERLLEEKSGVDLADSNQKLSIQRVREEDAGRYLCSVCNAKGCVNSSASVAVEGSEDKGSMEIVILVGTGVIAVFFWVLLLLIFCNMRRPAHADIKTGYLSIIMDPGEVPLEEQCEYLSYDASQWEFPRERLHLGRVLGYGAFGKVVEASAFGIHKGSSCDTVAVKMLKEGATASEHRALMSELKILIHIGNHLNVVNLLGACTKPQGPLMVIVEFCKYGNLSNFLRAKRDAFSPCAEKSPEQRGRFRAMVELARLDRRRPGSSDRVLFARFSKTEGGARRASPDQEAEDLWLSPLTMEDLVCYSFQVARGMEFLASRKCIHRDLAARNILLSESDVVKICDFGLARDIYKDPDYVRKGSARLPLKWMAPESIFDKVYTTQSDVWSFGVLLWEIFSLGASPYPGVQINEEFCQRLRDGTRMRAPELATPAIRRIMLNCWSGDPKARPAFSELVEILGDLLQGRGLQEEEEVCMAPRSSQSSEEGSFSQVSTMALHIAQADAEDSPPSLQRHSLAARYYNWVSFPGCLARGAETRGSSRMKTFEEFPMTPTTYKGSVDNQTDSGMVLASEEFEQIESRHRQESGFR

SEQ ID NO: 5469 - protein, 1306 aa, Homo Sapiens
MQRGAALCLRLWLCLGLLDGLVSGYSMTPPTLNITEESHVIDTGDSLSISCRGQHPLEWAWPGAQEAPATGDKDSEDTGVVRDCEGTDARPYCKVLLLHEVHANDTGSYVCYYKYIKARIEGTTAASSYVFVRDFEQPFINKPDTLLVNRKDAMWVPCLVSIPGLNVTLRSQSSVLWPDGQEVVWDDRRGMLVSTPLLHDALYLQCETTWGDQDFLSNPFLVHITGNELYDIQLLPRKSLELLVGEKLVLNCTVWAEFNSGVTFDWDYPGKQAERGKWVPERRSQQTHTELSSILTIHNVSQHDLGSYVCKANNGIQRFRESTEVIVHENPFISVEWLKGPILEATAGDELVKLPVKLAAYPPPEFQWYKDGKALSGRHSPHALVLKEVTEASTGTYTLALWNSAAGLRRNISLELVVNVPPQIHEKEASSPSIYSRHSRQALTCTAYGVPLPLSIQWHWRPWTPCKMFAQRSLRRRQQQDLMPQCRDWRAVTTQDAVNPIESLDTWTEFVEGKNKTVSKLVIQNANVSAMYKCVVSNKVGQDERLIYFYVTTIPDGFTIESKPSEELLEGQPVLLSCQADSYKYEHLRWYRLNLSTLHDAHGNPLLLDCKNVHLFATPLAASLEEVAPGARHATLSLSIPRVAPEHEGHYVCEVQDRRSHDKHCHKKYLSVQALEAPRLTQNLTDLLVNVSDSLEMQCLVAGAHAPSIVWYKDERLLEEKSGVDLADSNQKLSIQRVREEDAGRYLCSVCNAKGCVNSSASVAVEGSEDKGSMEIVILVGTGVIAVFFWVLLLLIFCNMRRPAHADIKTGYLSIIMDPGEVPLEEQCEYLSYDASQWEFPRERLHLGRVLGYGAFGKVVEASAFGIHKGSSCDTVAVKMLKEGATASEHRALMSELKILIHIGNHLNVVNLLGACTKPQGPLMVIVEFCKYGNLSNFLRAKRDAFSPCAEKSPEQRGRFRAMVELARLDRRRPGSSDRVLFARFSKTEGGARRASPDQEAEDLWLSPLTMEDLVCYSFQVARGMEFLASRKCIHRDLAARNILLSESDVVKICDFGLARDIYKDPDYVRKGSARLPLKWMAPESIFDKVYTTQSDVWSFGVLLWEIFSLGASPYPGVQINEEFCQRLRDGTRMRAPELATPAIRRIMLNCWSGDPKARPAFSELVEILGDLLQGRGLQEEEEVCMAPRSSQSSEEGSFSQVSTMALHIAQADAEDSPPSLQRHSLAARYYNWVSFPGCLARGAETRGSSRMKTFEEFPMTPTTYKGSVDNQTDSGMVLASEEFEQIESRHRQESGFRGTRRTRGA

SEQ ID NO: 5470 - protein, 295 aa, Homo Sapiens
MQRGAALCLRLWLCLGLLDGLVSGYSMTPPTLNITEESHVIDTGDSLSISCRGQHPLEWAWPGAQEAPATGDKDSEDTGVVRDCEGTDARPYCKVLLLHEVHANDTGSYVCYYKYIKARIEGTTAASSYVFVRDFEQPFINKPDTLLVNRKDAMWVPCLVSIPGLNVTLRSQSSVLWPDGQEVVWDDRRGMLVSTPLLHDALYLQCETTWGDQDFLSNPFLVHITGNELYDIQLLPRKSLELLVGEKLVLNCTVWAEFNSGVTFDWDYPGKQKIPSSASSGSKDPSWRPRQETSW

SEQ ID NO: 5471 - protein, 142 aa, Homo Sapiens
MVELARLDRRRPGSSDRVLFARFSKTEGGARRASPDQEAEDLWLSPLTMEDLVCYSFQVARGMEFLASRKCIHRDLAARNILLSESDVVKICDFGLARDIYKDPDYVRKGSARLPLKWMAPESIFDKVYTTQSDVWSFGVLL

SEQ ID NO: 5472 - protein, 126 aa, Homo Sapiens
MAKRVAIVGAGVSGLASIKCCLEEGLEPTCFERSDDLGGLWRFTEHVEEGRASLYKSVVSNSCKEMSCYSDFPFPEDYPNYVPNSQFLEYLKMYANHFDLLKHIQFKSGIQLTEQQLFPISCIRDS

SEQ ID NO: 5473 - protein, 532 aa, Homo Sapiens
MAKRVAIVGAGVSGLASIKCCLEEGLEPTCFERSDDLGGLWRFTEHVEEGRASLYKSVVSNSCKEMSCYSDFPFPEDYPNYVPNSQFLEYLKMYANHFDLLKHIQFKTKVCSVTKCSDSAVSGQWEVVTMHEEKQESAIFDAVMVCTGFLTNPYLPLDSFPGINAFKGQYFHSRQYKHPDIFKDKRVLVIGMGNSGTDIAVEASHLAEKVFLSTTGGGWVISRIFDSGYPWDMVFMTRFQNMLRNSLPTPIVTWLMERKINNWLNHANYGLIPEDRTQLKEFVLNDELPGRIITGKVFIRPSIKEVKENSVIFNNTSKEEPIDIIVFATGYTFAFPFLDESVVKVEDGQASLYKYIFPAHLQKPTLAIIGLIKPLGSMIPTGETQARWAVRVLKGVNKLPPPSVMIEEINARKENKPSWFGLCYCKALQSDYITYIDELLTYINAKPNLFSMLLTDPHLALTVFFGPCSPYQFRLTGPGKWEGARNAIMTQWDRTFKVIKARVVQESPSPFESFLKVFSFLALLVAIFLIFL

SEQ ID NO: 5474 - protein, 532 aa, Homo Sapiens; identical to SEQ ID NO: 5473

SEQ ID NO: 5475 - protein, 532 aa, Homo Sapiens; identical to SEQ ID NO: 5473

SEQ ID NO: 5476 - protein, 469 aa, Homo Sapiens
MAKRVAIVGAGVSGLASIKCCLEEGLEPTCFERSDDLGGLWRFTTKVCSVTKCSDSAVSGQWEVVTMHEEKQESAIFDAVMVCTGFLTNPYLPLDSFPGINAFKGQYFHSRQYKHPDIFKDKRVLVIGMGNSGTDIAVEASHLAEKVFLSTTGGGWVISRIFDSGYPWDMVFMTRFQNMLRNSLPTPIVTWLMERKINNWLNHANYGLIPEDRTQLKEFVLNDELPGRIITGKVFIRPSIKEVKENSVIFNNTSKEEPIDIIVFATGYTFAFPFLDESVVKVEDGQASLYKYIFPAHLQKPTLAIIGLIKPLGSMIPTGETQARWAVRVLKGVNKLPPPSVMIEEINARKENKPSWFGLCYCKALQSDYITYIDELLTYINAKPNLFSMLLTDPHLALTVFFGPCSPYQFRLTGPGKWEGARNAIMTQWDRTFKVIKARVVQESPSPFESFLKVFSFLALLVAIFLIFL

SEQ ID NO: 5477 - protein, 131 aa, Homo Sapiens
MAKKVAVIGAGVSGLISLKCCVDEGLEPTCFERTEDIGGVWRFKENVEDGRASIYQSVVTNTSKEMSCFSDFPMPEDFPNFLHNSKLLEYFRIFAKKFDLLKYIQFQTTVLSVRKCPDFSSSGQWKVVTQS

SEQ ID NO: 5478 - protein, 535 aa, Homo Sapiens [sequence omitted]

SEQ ID NO: 5479 - protein, 153 aa, Homo Sapiens
TQPREKTILSKRRCQKAKTKENVEDGRASIYQSVVTNTSKEMSCFSDFPMPEDFPNFLHNSKLLEYFRIFAKKFDLLKYIQFQTTVLSVRKCPDFSSSGQWKVVTQSNGKEQSAVFDAVMVCSGHHILPHIPLKSFPGFYQHQAWHLGHEPYL

SEQ ID NO: 5480 - protein, 218 aa, Homo Sapiens
MGKKVAIIGAGVSGLASIRSCLEEGLEPTCFEKSNDIGGLWKFSDHAEEGRASIYKSVFSNSSKEMMCFPDFPFPDDFPNFMHNSKIQEYIIAFAKEKNLLKYIQFKTFVSSVNKHPDFATTGQWDVTTERDGKKESAVFDAVMVCSGHHVYPNLPDYKEPGVFNGKRVLVVGLGNSGCDIATELSRTAEQVMISSRSGSWVMSRVWDNGYPWDMLLV

SEQ ID NO: 5481 - protein, 532 aa, Homo Sapiens
MGKKVAIIGAGVSGLASIRSCLEEGLEPTCFEKSNDIGGLWKFSDHAEEGRASIYKSVFSNSSKEMMCFPDFPFPDDFPNFMHNSKIQEYIIAFAKEKNLLKYIQFKTFVSSVNKHPDFATTGQWDVTTERDGKKESAVFDAVMVCSGHHVYPNLPKESFPGLNHFKGKCFHSRDYKEPGVFNGKRVLVVGLGNSGCDIATELSRTAEQVMISSRSGSWVMSRVWDNGYPWDMLLVTRFGTFLKNNLPTAISDWLYVKQMNARFKHENYGLMPLNGVLRKEPVFNDELPASILCGIVSVKPNVKEFTETSAIFEDGTIFEGIDCVIFATGYSFAYPFLDESIIKSRNNEIILFKGVFPPLLEKSTIAVIGFVQSLGAAIPTVDLQSRWAAQVIKGTCTLPSMEDMMNDINEKMEKKRKWFGKSETIQTDYIVYMDELSSFIGAKPNIPWLFLTDPKLAMEVYFGPCSPYQFRLVGPGQWPGARNAILTQWDRSLKPMQTRVVGRLQKPCFFFHWLKLFAIPILLIAVFLVLT

SEQ ID NO: 5482 - protein, 48 aa, Homo Sapiens
MGKKVAIIGAGVSGLASIRSCLEEGLEPTCFEKSNDIGGLWKFSRSHE

SEQ ID NO: 5483 - protein, 145 aa, Homo Sapiens
MTKKRIAVIGGGVSGLSSIKCCVEEGLEPVCFERTDDIGGLWRFQENPEEGRASIYKSVIINTSKEMMCFSDYPIPDHYPNFMHNAQVLEYFRMYAKEFDLLKYIRFKTTVCSVKKQPDFATSGQWEVVTESEGKKEMNVFDGVM

SEQ ID NO: 5484 - protein, 192 aa, Homo Sapiens
MTKKRIAVIGGGVSGLSSIKCCVEEGLEPVCFERTDDIGGLWRFQENPEEGRASIYKSVIINTSKEMMCFSDYPIPDHYPNFMHNAQVLEYFRMYAKEFDLLKYIRFKTTVCSVKKQPDFATSGQWEVVTESEGKKEMNVFDGVMVCTGHHTNAHLPLESFPGIEKFKGQYFHSRDYKNPEGFTGKRVIIIG

SEQ ID NO: 5485 - protein, 533 aa, Homo Sapiens
MTKKRIAVIGGGVSGLSSIKCCVEEGLEPVCFERTDDIGGLWRFQENPEEGRASIYKSVIINTSKEMMCFSDYPIPDHYPNFMHNAQVLEYFRMYAKEFDLLKYIRFKTTVCSVKKQPDFATSGQWEVVTESEGKKEMNVFDGVMVCTGHHTNAHLPLESFPGIEKFKGQYFHSRDYKNPEGFTGKRVIIIGIGNSGGDLAVEISQTAKQVFLSTRRGAWILNRVGDYGYPADVLFSSRLTHFIWKICGQSLANKYLEKKINQRFDHEMFGLKPKHRALSQHPTLNDDLPNRIISGLVKVKGNVKEFTETAAIFEDGSREDDIDAVIFATGYSFDFPFLEDSVKVVKNKISLYKKVFPPNLERPTLAIIGLIQPLGAIMPISELQGRWATQVFKGLKTLPSQSEMMAEISKAQEEIDKRYVESQRHTIQGDYIDTMEELADLVGVRPNLLSLAFTDPKLALHLLLGPCTPIHYRVQGPGKWDGARKAILTTDDRIRKPLMTRVVERSSSMTSTMTIGKFMLALAFFAIIIAYF

SEQ ID NO: 5486 - protein, 285 aa, Homo Sapiens
MTKKRIAVIGGGVSGLSSIKCCVEEGLEPVCFERTDDIGGLWRFQENPEEGRASIYKSVIINTSKEMMCFSDYPIPDHYPNFMHNAQVLEYFRMYAKEFDLLKYIRFKTTVCSVKKQPDFATSGQWEVVTESEGKKEMNVFDGVMVCTGHHTNAHLPLESFPGIEKFKGQYFHSRDYKNPEGFTGKRVIIIGIGNSGGDLAVEISQTAKQVFLSTRRGAWILNRVGDYGYPADVLFSSRLTHFIWKICGQSLANKYLEKKINQRFDHEMFGLKPKHRSKDIALTE

SEQ ID NO: 5487 - protein, 464 aa, Homo Sapiens
MTKKRIAVIGGGVSGLSSIKCCVEEGLEPVCFERTDDIGGLWRFQENPEEGRASIYKSVIINTSKEMMCFSDYPIPDHYPNFMHNAQVLEYFRMYAKEFDLLKYIRFKTTVCSVKKQPDFATSGQWEVVTESEGKKEMNVFDGVMVCTGHHTNAHLPLESFPGIEKFKGQYFHSRDYKNPEGFTGKRVIIIGIGNSGGDLAVEISQTAKQVFLSTRRGAWILNRVGDYGYPADVLFSSRLTHFIWKICGQSLANKYLEKKINQRFDHEMFGLKPKHRALSQHPTLNDDLPNRIISGLVKVKGNVKEFTETAAIFEDGSREDDIDAVIFATGYSFDFPFLEDSVKVVKNKISLYKKVFPPNLERPTLAIIGLIQPLGAIMPISELQGRWATQVFKGLKTLPSQSEMMAEISKAQEEIDKSLTMRKTSDKPKLKNILQIPDYLKTVKIINKESLRNCPGIKGPKET

SEQ ID NO: 5488 - protein, 278 aa, Homo Sapiens
MTKKRIAVIGGGVSGLSSIKCCVEEGLEPVCFERTDDIGGLWRFQENPEEGRASIYKSVIINTSKEMMCFSDYPIPDHYPNFMHNAQVLEYFRMYAKEFDLLKYIRFKTTVCSVKKQPDFATSGQWEVVTESEGKKEMNVFDGVMVCTGHHTNAHLPLESFPGIEKFKGQYFHSRDYKNPEGFTGKRVIIIGIGNSGGDLAVEISQTAKQVFLSTRRGAWILNRVGDYGYPADVLFSSRLTHFIWKICGQSLANKYLEKKINQRFDHEMFGLKPKHRL

SEQ ID NO: 5489 - protein, 464 aa, Homo Sapiens; identical to SEQ ID NO: 5487

SEQ ID NO: 5490 - protein, 376 aa, Homo Sapiens
MQWTSLLLLAGLFSLSQAQYEDDPHWWFHYLRSQQSTYYDPYDPYPYETYEPYPYGVDEGPAYTYGSPSPPDPRDCPQECDCPPNFPTAMYCDNRNLKYLPFVPSRMKYVYFQNNQITSIQEGVFDNATGLLWIALHGNQITSDKVGRKVFSKLRHLERLYLDHNNLTRMPGPLPRSLRELHLDHNQISRVPNNALEGLENLTALYLQHNEIQEVGSSMRGLRSLILLDLSYNHLRKVPDGLPSALEQLYMEHNNVYTVPDSYFRGAPKLLYVRLSHNSLTNNGLASNTFNSSSLLELDLSYNQLQKIPPVNTNLENLYLQGNRINEFSISSFCTVVDVVNFSKLQVLRLDGNEIKRSAMPADAPLCLRLASLIEI

SEQ ID NO: 5491 - protein, 1103 aa, Homo Sapiens
LRWTPLNSSTIIGYRITVVAAGEGIPIFEDFVDSSVGYYTVTGLEPGIDYDISVITLINGGESAPTTLTQQTAVPPPTDLRFTNIGPDTMRVTWAPPPSIDLTNFLVRYSPVKNEEDVAELSISPSDNAVVLTNLLPGTEYVVSVSSVYEQHESTPLRGRQKTGLDSPTGIDFSDITANSFTVHWIAPRATITGYRIRHHPEHFSGRPREDRVPHSRNSITLTNLTPGTEYVVSIVALNGREESPLLIGQQSTVSDVPRDLEVVAATPTSLLISWDAPAVTVRYYRITYGETGGNSPVQEFTVPGSKSTATISGLKPGVDYTITVYAVTGRGDSPASSKPISINYRTEIDKPSQMQVTDVQDNSISVKWLPSSSPVTGYRVTTTPKNGPGPTKTKTAGPDQTEMTIEGLQPTVEYVVSVYAQNPSGESQPLVQTAVTTIPAPTDLKFTQVTPTSLSAQWTPPNVQLTGYRVRVTPKEKTGPMKEINLAPDSSSVVVSGLMVATKYEVSVYALKDTLTSRPAQGVVTTLENVSPPRRARVTDATETTITISWRTKTETITGFQVDAVPANGQTPIQRTIKPDVRSYTITGLQPGTDYKIYLYTLNDNARSSPVVIDASTAIDAPSNLRFLATTPNSLLVSWQPPRARITGYIIKYEKPGSPPREVVPRPRPGVTEATITGLEPGTEYTIYVIALKNNQKSEPLIGRKKTDELPQLVTLPHPNLHGPEILDVPSTVQKTPFVTHPGYDTGNGIQLPGTSGQQPSVGQQMIFEEHGFRRTTPPTTATPIRHRPRPYPPNVGEEIQIGHIPREDVDYHLYPHGPGLNPNASTGQEALSQTTISWAPFQDTSEYIISCHPVGTDEEPLQFRVPGTSTSATLTGLTRGATYNVIVEALKDQQRHKVREEVVTVGNSVNEGLNQPTDDSCFDPYTVSHYAVGDEWERMSESGFKLLCQCLGFGSGHFRCDSSRWCHDNGVNYKIGEKWDRQGENGQMMSCTCLGNGKGEFKCDPHEATCYDDGKTYHVGEQWQKEYLGAICSCTCFGGQRGWRCDNCRRPGGEPSPEGTTGQSYNQYSQRYHQRTNTNVNCPIECFMPLDVQADREDSRE

SEQ ID NO: 5492 - protein, 2355 aa, Homo Sapiens
MLRGPGPGLLLLAVQCLGTAVPSTGASKSKRQAQQMVQPQSPVAVSQSKPGCYDNGKHYQINQQWERTYLGNALVCTCYGGSRGFNCESKPEAEETCFDKYTGNTYRVGDTYERPKDSMIWDCTCIGAGRGRISCTIANRCHEGGQSYKIGDTWRRPHETGGYMLECVCLGNGKGEWTCKPIAEKCFDHAAGTSYVVGETWEKPYQGWMMVDCTCLGEGSGRITCTSRNRCNDQDTRTSYRIGDTWSKKDNRGNLLQCICTGNGRGEWKCERHTSVQTTSSGSGPFTDVRAAVYQPQPHPQPPPYGHCVTDSGVVYSVGMQWLKTQGNKQMLCTCLGNGVSCQETAVTQTYGGNSNGEPCVLPFTYNGRTFYSCTTEGRQDGHLWCSTTSNYEQDQKYSFCTDHTVLVQTRGGNSNGALCHFPFLYNNHNYTDCTSEGRRDNMKWCGTTQNYDADQKFGFCPMAAHEEICTTNEGVMYRIGDQWDKQHDMGHMMRCTCVGNGRGEWTCIAYSQLRDQCIVDDITYNVNDTFHKRHEEGHMLNCTCFGQGRGRWKCDPVDQCQDSETGTFYQIGDSWEKYVHGVRYQCYCYGRGIGEWHCQPLQTYPSSSGPVEVFITETPSQPNSHPIQWNAPQPSHISKYILRWRPKNSVGRWKEATIPGHLNSYTIKGLKPGVVYEGQLISIQQYGHQEVTRFDFTTTSTSTPVTSNTVTGETTPFSPLVATSESVTEITASSFVVSWVSASDTVSGFRVEYELSEEGDEPQYLDLPSTATSVNIPDLLPGRKYIVNVYQISEDGEQSLILSTSQTTAPDAPPDTTVDQVDDTSIVVRWSRPQAPITGYRIVYSPSVEGSSTELNLPETANSVTLSDLQPGVQYNITIYAVEENQESTPVVIQQETTGTPRSDTVPSPRDLQFVEVTDVKVTIMWTPPESAVTGYRVDVIPVNLPGEHGQRLPISRNTFAEVTGLSPGVTYYFKVFAVSHGRESKPLTAQQTTKLDAPTNLQFVNETDSTVLVRWTPPRAQITGYRLTVGLTRRGQPRQYNVGPSVSKYPLRNLQPASEYTVSLVAIKGNQESPKATGVFTTLQPGSSIPPYNTEVTETTIVITWTPAPRIGFKLGVRPSQGGEAPREVTSDSGSIVVSGLTPGVEYVYTIQVLRDGQERDAPIVNKVVTPLSPPTNLHLEANPDTGVLTVSWERSTTPDITGYRITTTPTNGQQGNSLEEVVHADQSSCTFDNLSPGLEYNVSVYTVKDDKESVPISDTIIPAVPPPTDLRFTNIGPDTMRVTWAPPPSIDLTNFLVRYSPVKNEEDVAELSISPSDNAVVLTNLLPGTEYVVSVSSVYEQHESTPLRGRQKTGLDSPTGIDFSDITANSFTVHWIAPRATITGYRIRHHPEHFSGRPREDRVPHSRNSITLTNLTPGTEYVVSIVALNGREESPLLIGQQSTVSDVPRDLEVVAATPTSLLISWDAPAVTVRYYRITYGETGGNSPVQEFTVPGSKSTATISGLKPGVDYTITVYAVTGRGDSPASSKPISINYRTEIDKPSQMQVTDVQDNSISVKWLPSSSPVTGYRVTTTPKNGPGPTKTKTAGPDQTEMTIEGLQPTVEYVVSVYAQNPSGESQPLVQTAVTNIDRPKGLAFTDVDVDSIKIAWESPQGQVSRYRVTYSSPEDGIHELFPAPDGEEDTAELQGLRPGSEYTVSVVALHDDMESQPLIGTQSTAIPAPTDLKFTQVTPTSLSAQWTPPNVQLTGYRVRVTPKEKTGPMKEINLAPDSSSVVVSGLMVATKYEVSVYALKDTLTSRPAQGVVTTLENVSPPRRARVTDATETTITISWRTKTETITGFQVDAVPANGQTPIQRTIKPDVRSYTITGLQPGTDYKIYLYTLNDNARSSPVVIDASTAIDAPSNLRFLATTPNSLLVSWQPPRARITGYIIKYEKPGSPPREVVPRPRPGVTEATITGLEPGTEYTIYVIALKNNQKSEPLIGRKKTDELPQLVTLPHPNLHGPEILDVPSTVQKTPFVTHPGYDTGNGIQLPGTSGQQPSVGQQMIFEEHGFRRTTPPTTATPIRHRPRPYPPNVGQEALSQTTISWAPFQDTSEYIISCHPVGTDEEPLQFRVPGTSTSATLTGLTRGATYNVIVEALKDQQRHKVREEVVTVGNSVNEGLNQPTDDSCFDPYTVSHYAVGDEWERMSESGFKLLCQCLGFGSGHFRCDSSRWCHDNGVNYKIGEKWDRQGENGQMMSCTCLGNGKGEFKCDPHEATCYDDGKTYHVGEQWQKEYLGAICSCTCFGGQRGWRCDNCRRPGGEPSPEGTTGQSYNQYSQRYHQRTNTNVNCPIECFMPLDVQADREDSRE

SEQ ID NO: 5493 - protein, 2477 aa, Homo Sapiens
MLRGPGPGLLLLAVQCLGTAVPSTGASKSKRQAQQMVQPQSPVAVSQSKPGCYDNGKHYQINQQWERTYLGNALVCTCYGGSRGFNCESKPEAEETCFDKYTGNTYRVGDTYERPKDSMIWDCTCIGAGRGRISCTIANRCHEGGQSYKIGDTWRRPHETGGYMLECVCLGNGKGEWTCKPIAEKCFDHAAGTSYVVGETWEKPYQGWMMVDCTCLGEGSGRITCTSRNRCNDQDTRTSYRIGDTWSKKDNRGNLLQCICTGNGRGEWKCERHTSVQTTSSGSGPFTDVRAAVYQPQPHPQPPPYGHCVTDSGVVYSVGMQWLKTQGNKQMLCTCLGNGVSCQETAVTQTYGGNSNGEPCVLPFTYNGRTFYSCTTEGRQDGHLWCSTTSNYEQDQKYSFCTDHTVLVQTRGGNSNGALCHFPFLYNNHNYTDCTSEGRRDNMKWCGTTQNYDADQKFGFCPMAAHEEICTTNEGVMYRIGDQWDKQHDMGHMMRCTCVGNGRGEWTCIAYSQLRDQCIVDDITYNVNDTFHKRHEEGHMLNCTCFGQGRGRWKCDPVDQCQDSETGTFYQIGDSWEKYVHGVRYQCYCYGRGIGEWHCQPLQTYPSSSGPVEVFITETPSQPNSHPIQWNAPQPSHISKYILRWRPKNSVGRWKEATIPGHLNSYTIKGLKPGVVYEGQLISIQQYGHQEVTRFDFTTTSTSTPVTSNTVTGETTPFSPLVATSESVTEITASSFVVSWVSASDTVSGFRVEYELSEEGDEPQYLDLPSTATSVNIPDLLPGRKYIVNVYQISEDGEQSLILSTSQTTAPDAPPDTTVDQVDDTSIVVRWSRPQAPITGYRIVYSPSVEGSSTELNLPETANSVTLSDLQPGVQYNITIYAVEENQESTPVVIQQETTGTPRSDTVPSPRDLQFVEVTDVKVTIMWTPPESAVTGYRVDVIPVNLPGEHGQRLPISRNTFAEVTGLSPGVTYYFKVFAVSHGRESKPLTAQQTTKLDAPTNLQFVNETDSTVLVRWTPPRAQITGYRLTVGLTRRGQPRQYNVGPSVSKYPLRNLQPASEYTVSLVAIKGNQESPKATGVFTTLQPGSSIPPYNTEVTETTIVITWTPAPRIGFKLGVRPSQGGEAPREVTSDSGSIVVSGLTPGVEYVYTIQVLRDGQERDAPIVNKVVTPLSPPTNLHLEANPDTGVLTVSWERSTTPDITGYRITTTPTNGQQGNSLEEVVHADQSSCTFDNLSPGLEYNVSVYTVKDDKESVPISDTIIPEVPQLTDLSFVDITDSSIGLRWTPLNSSTIIGYRITVVAAGEGIPIFEDFVDSSVGYYTVTGLEPGIDYDISVITLINGGESAPTTLTQQTAVPPPTDLRFTNIGPDTMRVTWAPPPSIDLTNFLVRYSPVKNEEDVAELSISPSDNAVVLTNLLPGTEYVVSVSSVYEQHESTPLRGRQKTGLDSPTGIDFSDITANSFTVHWIAPRATITGYRIRHHPEHFSGRPREDRVPHSRNSITLTNLTPGTEYVVSIVALNGREESPLLIGQQSTVSDVPRDLEVVAATPTSLLISWDAPAVTVRYYRITYGETGGNSPVQEFTVPGSKSTATISGLKPGVDYTITVYAVTGRGDSPASSKPISINYRTEIDKPSQMQVTDVQDNSISVKWLPSSSPVTGYRVTTTPKNGPGPTKTKTAGPDQTEMTIEGLQPTVEYVVSVYAQNPSGESQPLVQTAVTNIDRPKGLAFTDVDVDSIKIAWESPQGQVSRYRVTYSSPEDGIHELFPAPDGEEDTAELQGLRPGSEYTVSVVALHDDMESQPLIGTQSTAIPAPTDLKFTQVTPTSLSAQWTPPNVQLTGYRVRVTPKEKTGPMKEINLAPDSSSVVVSGLMVATKYEVSVYALKDTLTSRPAQGVVTTLENVSPPRRARVTDATETTITISWRTKTETITGFQVDAVPANGQTPIQRTIKPDVRSYTITGLQPGTDYKIYLYTLNDNARSSPVVIDASTAIDAPSNLRFLATTPNSLLVSWQPPRARITGYIIKYEKPGSPPREVVPRPRPGVTEATITGLEPGTEYTIYVIALKNNQKSEPLIGRKKTDELPQLVTLPHPNLHGPEILDVPSTVQKTPFVTHPGYDTGNGIQLPGTSGQQPSVGQQMIFEEHGFRRTTPPTTATPIRHRPRPYPPNVGEEIQIGHIPREDVDYHLYPHGPGLNPNASTGQEALSQTTISWAPFQDTSEYIISCHPVGTDEEPLQFRVPGTSTSATLTGLTRGATYNVIVEALKDQQRHKVREEVVTVGNSVNEGLNQPTDDSCFDPYTVSHYAVGDEWERMSESGFKLLCQCLGFGSGHFRCDSSRWCHDNGVNYKIGEKWDRQGENGQMMSCTCLGNGKGEFKCDPHEATCYDDGKTYHVGEQWQKEYLGAICSCTCFGGQRGWRCDNCRRPGGEPSPEGTTGQSYNQYSQRYHQRTNTNVNCPIECFMPLDVQADREDSRE

SEQ ID NO: 5494 - protein, 2176 aa, Homo Sapiens
MLRGPGPGLLLLAVQCLGTAVPSTGASKSKRQAQQMVQPQSPVAVSQSKPGCYDNGKHYQINQQWERTYLGNALVCTCYGGSRGFNCESKPEAEETCFDKYTGNTYRVGDTYERPKDSMIWDCTCIGAGRGRISCTIANRCHEGGQSYKIGDTWRRPHETGGYMLECVCLGNGKGEWTCKPIAEKCFDHAAGTSYVVGETWEKPYQGWMMVDCTCLGEGSGRITCTSRNRCNDQDTRTSYRIGDTWSKKDNRGNLLQCICTGNGRGEWKCERHTSVQTTSSGSGPFTDVRAAVYQPQPHPQPPPYGHCVTDSGVVYSVGMQWLKTQGNKQMLCTCLGNGVSCQETAVTQTYGGNSNGEPCVLPFTYNGRTFYSCTTEGRQDGHLWCSTTSNYEQDQKYSFCTDHTVLVQTRGGNSNGALCHFPFLYNNHNYTDCTSEGRRDNMKWCGTTQNYDADQKFGFCPMAAHEEICTTNEGVMYRIGDQWDKQHDMGHMMRCTCVGNGRGEWTCIAYSQLRDQCIVDDITYNVNDTFHKRHEEGHMLNCTCFGQGRGRWKCDPVDQCQDSETGTFYQIGDSWEKYVHGVRYQCYCYGRGIGEWHCQPLQTYPSSSGPVEVFITETPSQPNSHPIQWNAPQPSHISKYILRWRPKNSVGRWKEATIPGHLNSYTIKGLKPGVVYEGQLISIQQYGHQEVTRFDFTTTSTSTPVTSNTVTGETTPFSPLVATSESVTEITASSFVVSWVSASDTVSGFRVEYELSEEGDEPQYLDLPSTATSVNIPDLLPGRKYIVNVYQISEDGEQSLILSTSQTTAPDAPPDTTVDQVDDTSIVVRWSRPQAPITGYRIVYSPSVEGSSTELNLPETANSVTLSDLQPGVQYNITIYAVEENQESTPVVIQQETTGTPRSDTVPSPRDLQFVEVTDVKVTIMWTPPESAVTGYRVDVIPVNLPGEHGQRLPISRNTFAEVTGLSPGVTYYFKVFAVSHGRESKPLTAQQTTKLDAPTNLQFVNETDSTVLVRWTPPRAQITGYRLTVGLTRRGQPRQYNVGPSVSKYPLRNLQPASEYTVSLVAIKGNQESPKATGVFTTLQPGSSIPPYNTEVTETTIVITWTPAPRIGFKLGVRPSQGGEAPREVTSDSGSIVVSGLTPGVEYVYTIQVLRDGQERDAPIVNKVVTPLSPPTNLHLEANPDTGVLTVSWERSTTPDITGYRITTTPTNGQQGNSLEEVVHADQSSCTFDNLSPGLEYNVSVYTVKDDKESVPISDTIIPAVPPPTDLRFTNIGPDTMRVTWAPPPSIDLTNFLVRYSPVKNEEDVAELSISPSDNAVVLTNLLPGTEYVVSVSSVYEQHESTPLRGRQKTGLDSPTGIDFSDITANSFTVHWIAPRATITGYRIRHHPEHFSGRPREDRVPHSRNSITLTNLTPGTEYVVSIVALNGREESPLLIGQQSTVSDVPRDLEVVAATPTSLLISWDAPAVTVRYYRITYGETGGNSPVQEFTVPGSKSTATISGLKPGVDYTITVYAVTGRGDSPASSKPISINYRTEIDKPSQMQVTDVQDNSISVKWLPSSSPVTGYRVTTTPKNGPGPTKTKTAGPDQTEMTIEGLQPTVEYVVSVYAQNPSGESQPLVQTAVTTIPAPTDLKFTQVTPTSLSAQWTPPNVQLTGYRVRVTPKEKTGPMKEINLAPDSSSVVVSGLMVATKYEVSVYALKDTLTSRPAQGVVTTLENVSPPRRARVTDATETTITISWRTKTETITGFQVDAVPANGQTPIQRTIKPDVRSYTITGLQPGTDYKIYLYTLNDNARSSPVVIDASTAIDAPSNLRFLATTPNSLLVSWQPPRARITGYIIKYEKPGSPPREVVPRPRPGVTEATITGLEPGTEYTIYVIALKNNQKSEPLIGRKKTGQEALSQTTISWAPFQDTSEYIISCHPVGTDEEPLQFRVPGTSTSATLTGLTRGATYNVIVEALKDQQRHKVREEVVTVGNSVNEGLNQPTDDSCFDPYTVSHYAVGDEWERMSESGFKLLCQCLGFGSGHFRCDSSRWCHDNGVNYKIGEKWDRQGENGQMMSCTCLGNGKGEFKCDPHEATCYDDGKTYHVGEQWQKEYLGAICSCTCFGGQRGWRCDNCRRPGGEPSPEGTTGQSYNQYSQRYHQRTNTNVNCPIECFMPLDVQADREDSRE

SEQ ID NO: 5495 - protein, 2386 aa, Homo Sapiens
MLRGPGPGLLLLAVQCLGTAVPSTGASKSKRQAQQMVQPQSPVAVSQSKPGCYDNGKHYQINQQWERTYLGNALVCTCYGGSRGFNCESKPEAEETCFDKYTGNTYRVGDTYERPKDSMIWDCTCIGAGRGRISCTIANRCHEGGQSYKIGDTWRRPHETGGYMLECVCLGNGKGEWTCKPIAEKCFDHAAGTSYVVGETWEKPYQGWMMVDCTCLGEGSGRITCTSRNRCNDQDTRTSYRIGDTWSKKDNRGNLLQCICTGNGRGEWKCERHTSVQTTSSGSGPFTDVRAAVYQPQPHPQPPPYGHCVTDSGVVYSVGMQWLKTQGNKQMLCTCLGNGVSCQETAVTQTYGGNSNGEPCVLPFTYNGRTFYSCTTEGRQDGHLWCSTTSNYEQDQKYSFCTDHTVLVQTRGGNSNGALCHFPFLYNNHNYTDCTSEGRRDNMKWCGTTQNYDADQKFGFCPMAAHEEICTTNEGVMYRIGDQWDKQHDMGHMMRCTCVGNGRGEWTCIAYSQLRDQCIVDDITYNVNDTFHKRHEEGHMLNCTCFGQGRGRWKCDPVDQCQDSETGTFYQIGDSWEKYVHGVRYQCYCYGRGIGEWHCQPLQTYPSSSGPVEVFITETPSQPNSHPIQWNAPQPSHISKYILRWRPKNSVGRWKEATIPGHLNSYTIKGLKPGVVYEGQLISIQQYGHQEVTRFDFTTTSTSTPVTSNTVTGETTPFSPLVATSESVTEITASSFVVSWVSASDTVSGFRVEYELSEEGDEPQYLDLPSTATSVNIPDLLPGRKYIVNVYQISEDGEQSLILSTSQTTAPDAPPDTTVDQVDDTSIVVRWSRPQAPITGYRIVYSPSVEGSSTELNLPETANSVTLSDLQPGVQYNITIYAVEENQESTPVVIQQETTGTPRSDTVPSPRDLQFVEVTDVKVTIMWTPPESAVTGYRVDVIPVNLPGEHGQRLPISRNTFAEVTGLSPGVTYYFKVFAVSHGRESKPLTAQQTTKLDAPTNLQFVNETDSTVLVRWTPPRAQITGYRLTVGLTRRGQPRQYNVGPSVSKYPLRNLQPASEYTVSLVAIKGNQESPKATGVFTTLQPGSSIPPYNTEVTETTIVITWTPAPRIGFKLGVRPSQGGEAPREVTSDSGSIVVSGLTPGVEYVYTIQVLRDGQERDAPIVNKVVTPLSPPTNLHLEANPDTGVLTVSWERSTTPDITGYRITTTPTNGQQGNSLEEVVHADQSSCTFDNLSPGLEYNVSVYTVKDDKESVPISDTIIPAVPPPTDLRFTNIGPDTMRVTWAPPPSIDLTNFLVRYSPVKNEEDVAELSISPSDNAVVLTNLLPGTEYVVSVSSVYEQHESTPLRGRQKTGLDSPTGIDFSDITANSFTVHWIAPRATITGYRIRHHPEHFSGRPREDRVPHSRNSITLTNLTPGTEYVVSIVALNGREESPLLIGQQSTVSDVPRDLEVVAATPTSLLISWDAPAVTVRYYRITYGETGGNSPVQEFTVPGSKSTATISGLKPGVDYTITVYAVTGRGDSPASSKPISINYRTEIDKPSQMQVTDVQDNSISVKWLPSSSPVTGYRVTTTPKNGPGPTKTKTAGPDQTEMTIEGLQPTVEYVVSVYAQNPSGESQPLVQTAVTNIDRPKGLAFTDVDVDSIKIAWESPQGQVSRYRVTYSSPEDGIHELFPAPDGEEDTAELQGLRPGSEYTVSVVALHDDMESQPLIGTQSTAIPAPTDLKFTQVTPTSLSAQWTPPNVQLTGYRVRVTPKEKTGPMKEINLAPDSSSVVVSGLMVATKYEVSVYALKDTLTSRPAQGVVTTLENVSPPRRARVTDATETTITISWRTKTETITGFQVDAVPANGQTPIQRTIKPDVRSYTITGLQPGTDYKIYLYTLNDNARSSPVVIDASTAIDAPSNLRFLATTPNSLLVSWQPPRARITGYIIKYEKPGSPPREVVPRPRPGVTEATITGLEPGTEYTIYVIALKNNQKSEPLIGRKKTDELPQLVTLPHPNLHGPEILDVPSTVQKTPFVTHPGYDTGNGIQLPGTSGQQPSVGQQMIFEEHGFRRTTPPTTATPIRHRPRPYPPNVGEEIQIGHIPREDVDYHLYPHGPGLNPNASTGQEALSQTTISWAPFQDTSEYIISCHPVGTDEEPLQFRVPGTSTSATLTGLTRGATYNVIVEALKDQQRHKVREEVVTVGNSVNEGLNQPTDDSCFDPYTVSHYAVGDEWERMSESGFKLLCQCLGFGSGHFRCDSSRWCHDNGVNYKIGEKWDRQGENGQMMSCTCLGNGKGEFKCDPHEATCYDDGKTYHVGEQWQKEYLGAICSCTCFGGQRGWRCDNCRRPGGEPSPEGTTGQSYNQYSQRYHQRTNTNVNCPIECFMPLDVQADREDSRE

SEQ ID NO: 5496 - protein, 2296 aa, Homo Sapiens
MLRGPGPGLLLLAVQCLGTAVPSTGASKSKRQAQQMVQPQSPVAVSQSKPGCYDNGKHYQINQQWERTYLGNALVCTCYGGSRGFNCESKPEAEETCFDKYTGNTYRVGDTYERPKDSMIWDCTCIGAGRGRISCTIANRCHEGGQSYKIGDTWRRPHETGGYMLECVCLGNGKGEWTCKPIAEKCFDHAAGTSYVVGETWEKPYQGWMMVDCTCLGEGSGRITCTSRNRCNDQDTRTSYRIGDTWSKKDNRGNLLQCICTGNGRGEWKCERHTSVQTTSSGSGPFTDVRAAVYQPQPHPQPPPYGHCVTDSGVVYSVGMQWLKTQGNKQMLCTCLGNGVSCQETAVTQTYGGNSNGEPCVLPFTYNGRTFYSCTTEGRQDGHLWCSTTSNYEQDQKYSFCTDHTVLVQTRGGNSNGALCHFPFLYNNHNYTDCTSEGRRDNMKWCGTTQNYDADQKFGFCPMAAHEEICTTNEGVMYRIGDQWDKQHDMGHMMRCTCVGNGRGEWTCIAYSQLRDQCIVDDITYNVNDTFHKRHEEGHMLNCTCFGQGRGRWKCDPVDQCQDSETGTFYQIGDSWEKYVHGVRYQCYCYGRGIGEWHCQPLQTYPSSSGPVEVFITETPSQPNSHPIQWNAPQPSHISKYILRWRPKNSVGRWKEATIPGHLNSYTIKGLKPGVVYEGQLISIQQYGHQEVTRFDFTTTSTSTPVTSNTVTGETTPFSPLVATSESVTEITASSFVVSWVSASDTVSGFRVEYELSEEGDEPQYLDLPSTATSVNIPDLLPGRKYIVNVYQISEDGEQSLILSTSQTTAPDAPPDTTVDQVDDTSIVVRWSRPQAPITGYRIVYSPSVEGSSTELNLPETANSVTLSDLQPGVQYNITIYAVEENQESTPVVIQQETTGTPRSDTVPSPRDLQFVEVTDVKVTIMWTPPESAVTGYRVDVIPVNLPGEHGQRLPISRNTFAEVTGLSPGVTYYFKVFAVSHGRESKPLTAQQTTKLDAPTNLQFVNETDSTVLVRWTPPRAQITGYRLTVGLTRRGQPRQYNVGPSVSKYPLRNLQPASEYTVSLVAIKGNQESPKATGVFTTLQPGSSIPPYNTEVTETTIVITWTPAPRIGFKLGVRPSQGGEAPREVTSDSGSIVVSGLTPGVEYVYTIQVLRDGQERDAPIVNKVVTPLSPPTNLHLEANPDTGVLTVSWERSTTPDITGYRITTTPTNGQQGNSLEEVVHADQSSCTFDNLSPGLEYNVSVYTVKDDKESVPISDTIIPAVPPPTDLRFTNIGPDTMRVTWAPPPSIDLTNFLVRYSPVKNEEDVAELSISPSDNAVVLTNLLPGTEYVVSVSSVYEQHESTPLRGRQKTGLDSPTGIDFSDITANSFTVHWIAPRATITGYRIRHHPEHFSGRPREDRVPHSRNSITLTNLTPGTEYVVSIVALNGREESPLLIGQQSTVSDVPRDLEVVAATPTSLLISWDAPAVTVRYYRITYGETGGNSPVQEFTVPGSKSTATISGLKPGVDYTITVYAVTGRGDSPASSKPISINYRTEIDKPSQMQVTDVQDNSISVKWLPSSSPVTGYRVTTTPKNGPGPTKTKTAGPDQTEMTIEGLQPTVEYVVSVYAQNPSGESQPLVQTAVTTIPAPTDLKFTQVTPTSLSAQWTPPNVQLTGYRVRVTPKEKTGPMKEINLAPDSSSVVVSGLMVATKYEVSVYALKDTLTSRPAQGVVTTLENVSPPRRARVTDATETTITISWRTKTETITGFQVDAVPANGQTPIQRTIKPDVRSYTITGLQPGTDYKIYLYTLNDNARSSPVVIDASTAIDAPSNLRFLATTPNSLLVSWQPPRARITGYIIKYEKPGSPPREVVPRPRPGVTEATITGLEPGTEYTIYVIALKNNQKSEPLIGRKKTDELPQLVTLPHPNLHGPEILDVPSTVQKTPFVTHPGYDTGNGIQLPGTSGQQPSVGQQMIFEEHGFRRTTPPTTATPIRHRPRPYPPNVGEEIQIGHIPREDVDYHLYPHGPGLNPNASTGQEALSQTTISWAPFQDTSEYIISCHPVGTDEEPLQFRVPGTSTSATLTGLTRGATYNVIVEALKDQQRHKVREEVVTVGNSVNEGLNQPTDDSCFDPYTVSHYAVGDEWERMSESGFKLLCQCLGFGSGHFRCDSSRWCHDNGVNYKIGEKWDRQGENGQMMSCTCLGNGKGEFKCDPHEATCYDDGKTYHVGEQWQKEYLGAICSCTCFGGQRGWRCDNCRRPGGEPSPEGTTGQSYNQYSQRYHQRTNTNVNCPIECFMPLDVQADREDSRE

SEQ ID NO: 5497 - protein, 2446 aa, Homo Sapiens
MLRGPGPGLLLLAVQCLGTAVPSTGASKSKRQAQQMVQPQSPVAVSQSKPGCYDNGKHYQINQQWERTYLGNALVCTCYGGSRGFNCESKPEAEETCFDKYTGNTYRVGDTYERPKDSMIWDCTCIGAGRGRISCTIANRCHEGGQSYKIGDTWRRPHETGGYMLECVCLGNGKGEWTCKPIAEKCFDHAAGTSYVVGETWEKPYQGWMMVDCTCLGEGSGRITCTSRNRCNDQDTRTSYRIGDTWSKKDNRGNLLQCICTGNGRGEWKCERHTSVQTTSSGSGPFTDVRAAVYQPQPHPQPPPYGHCVTDSGVVYSVGMQWLKTQGNKQMLCTCLGNGVSCQETAVTQTYGGNSNGEPCVLPFTYNGRTFYSCTTEGRQDGHLWCSTTSNYEQDQKYSFCTDHTVLVQTRGGNSNGALCHFPFLYNNHNYTDCTSEGRRDNMKWCGTTQNYDADQKFGFCPMAAHEEICTTNEGVMYRIGDQWDKQHDMGHMMRCTCVGNGRGEWTCIAYSQLRDQCIVDDITYNVNDTFHKRHEEGHMLNCTCFGQGRGRWKCDPVDQCQDSETGTFYQIGDSWEKYVHGVRYQCYCYGRGIGEWHCQPLQTYPSSSGPVEVFITETPSQPNSHPIQWNAPQPSHISKYILRWRPKNSVGRWKEATIPGHLNSYTIKGLKPGVVYEGQLISIQQYGHQEVTRFDFTTTSTSTPVTSNTVTGETTPFSPLVATSESVTEITASSFVVSWVSASDTVSGFRVEYELSEEGDEPQYLDLPSTATSVNIPDLLPGRKYIVNVYQISEDGEQSLILSTSQTTAPDAPPDTTVDQVDDTSIVVRWSRPQAPITGYRIVYSPSVEGSSTELNLPETANSVTLSDLQPGVQYNITIYAVEENQESTPVVIQQETTGTPRSDTVPSPRDLQFVEVTDVKVTIMWTPPESAVTGYRVDVIPVNLPGEHGQRLPISRNTFAEVTGLSPGVTYYFKVFAVSHGRESKPLTAQQTTKLDAPTNLQFVNETDSTVLVRWTPPRAQITGYRLTVGLTRRGQPRQYNVGPSVSKYPLRNLQPASEYTVSLVAIKGNQESPKATGVFTTLQPGSSIPPYNTEVTETTIVITWTPAPRIGFKLGVRPSQGGEAPREVTSDSGSIVVSGLTPGVEYVYTIQVLRDGQERDAPIVNKVVTPLSPPTNLHLEANPDTGVLTVSWERSTTPDITGYRITTTPTNGQQGNSLEEVVHADQSSCTFDNLSPGLEYNVSVYTVKDDKESVPISDTIIPEVPQLTDLSFVDITDSSIGLRWTPLNSSTIIGYRITVVAAGEGIPIFEDFVDSSVGYYTVTGLEPGIDYDISVITLINGGESAPTTLTQQTAVPPPTDLRFTNIGPDTMRVTWAPPPSIDLTNFLVRYSPVKNEEDVAELSISPSDNAVVLTNLLPGTEYVVSVSSVYEQHESTPLRGRQKTGLDSPTGIDFSDITANSFTVHWIAPRATITGYRIRHHPEHFSGRPREDRVPHSRNSITLTNLTPGTEYVVSIVALNGREESPLLIGQQSTVSDVPRDLEVVAATPTSLLISWDAPAVTVRYYRITYGETGGNSPVQEFTVPGSKSTATISGLKPGVDYTITVYAVTGRGDSPASSKPISINYRTEIDKPSQMQVTDVQDNSISVKWLPSSSPVTGYRVTTTPKNGPGPTKTKTAGPDQTEMTIEGLQPTVEYVVSVYAQNPSGESQPLVQTAVTNIDRPKGLAFTDVDVDSIKIAWESPQGQVSRYRVTYSSPEDGIHELFPAPDGEEDTAELQGLRPGSEYTVSVVALHDDMESQPLIGTQSTAIPAPTDLKFTQVTPTSLSAQWTPPNVQLTGYRVRVTPKEKTGPMKEINLAPDSSSVVVSGLMVATKYEVSVYALKDTLTSRPAQGVVTTLENVSPPRRARVTDATETTITISWRTKTETITGFQVDAVPANGQTPIQRTIKPDVRSYTITGLQPGTDYKIYLYTLNDNARSSPVVIDASTAIDAPSNLRFLATTPNSLLVSWQPPRARITGYIIKYEKPGSPPREVVPRPRPGVTEATITGLEPGTEYTIYVIALKNNQKSEPLIGRKKTDELPQLVTLPHPNLHGPEILDVPSTVQKTPFVTHPGYDTGNGIQLPGTSGQQPSVGQQMIFEEHGFRRTTPPTTATPIRHRPRPYPPNVGQEALSQTTISWAPFQDTSEYIISCHPVGTDEEPLQFRVPGTSTSATLTGLTRGATYNVIVEALKDQQRHKVREEVVTVGNSVNEGLNQPTDDSCFDPYTVSHYAVGDEWERMSESGFKLLCQCLGFGSGHFRCDSSRWCHDNGVNYKIGEKWDRQGENGQMMSCTCLGNGKGEFKCDPHEATCYDDGKTYHVGEQWQKEYLGAICSCTCFGGQRGWRCDNCRRPGGEPSPEGTTGQSYNQYSQRYHQRTNTNVNCPIECFMPLDVQADREDSRE

SEQ ID NO: 5498 - protein, 2330 aa, Homo Sapiens
MLRGPGPGLLLLAVQCLGTAVPSTGASKSKRQAQQMVQPQSPVAVSQSKPGCYDNGKHYQINQQWERTYLGNALVCTCYGGSRGFNCESKPEAEETCFDKYTGNTYRVGDTYERPKDSMIWDCTCIGAGRGRISCTIANRCHEGGQSYKIGDTWRRPHETGGYMLECVCLGNGKGEWTCKPIAEKCFDHAAGTSYVVGETWEKPYQGWMMVDCTCLGEGSGRITCTSRNRCNDQDTRTSYRIGDTWSKKDNRGNLLQCICTGNGRGEWKCERHTSVQTTSSGSGPFTDVRAAVYQPQPHPQPPPYGHCVTDSGVVYSVGMQWLKTQGNKQMLCTCLGNGVSCQETAVTQTYGGNSNGEPCVLPFTYNGRTFYSCTTEGRQDGHLWCSTTSNYEQDQKYSFCTDHTVLVQTRGGNSNGALCHFPFLYNNHNYTDCTSEGRRDNMKWCGTTQNYDADQKFGFCPMAAHEEICTTNEGVMYRIGDQWDKQHDMGHMMRCTCVGNGRGEWTCIAYSQLRDQCIVDDITYNVNDTFHKRHEEGHMLNCTCFGQGRGRWKCDPVDQCQDSETGTFYQIGDSWEKYVHGVRYQCYCYGRGIGEWHCQPLQTYPSSSGPVEVFITETPSQPNSHPIQWNAPQPSHISKYILRWRPKNSVGRWKEATIPGHLNSYTIKGLKPGVVYEGQLISIQQYGHQEVTRFDFTTTSTSTPVTSNTVTGETTPFSPLVATSESVTEITASSFVVSWVSASDTVSGFRVEYELSEEGDEPQYLDLPSTATSVNIPDLLPGRKYIVNVYQISEDGEQSLILSTSQTTAPDAPPDTTVDQVDDTSIVVRWSRPQAPITGYRIVYSPSVEGSSTELNLPETANSVTLSDLQPGVQYNITIYAVEENQESTPVVIQQETTGTPRSDTVPSPRDLQFVEVTDVKVTIMWTPPESAVTGYRVDVIPVNLPGEHGQRLPISRNTFAEVTGLSPGVTYYFKVFAVSHGRESKPLTAQQTTKLDAPTNLQFVNETDSTVLVRWTPPRAQITGYRLTVGLTRRGQPRQYNVGPSVSKYPLRNLQPASEYTVSLVAIKGNQESPKATGVFTTLQPGSSIPPYNTEVTETTIVITWTPAPRIGFKLGVRPSQGGEAPREVTSDSGSIVVSGLTPGVEYVYTIQVLRDGQERDAPIVNKVVTPLSPPTNLHLEANPDTGVLTVSWERSTTPDITGYRITTTPTNGQQGNSLEEVVHADQSSCTFDNLSPGLEYNVSVYTVKDDKESVPISDTIIPAVPPPTDLRFTNIGPDTMRVTWAPPPSIDLTNFLVRYSPVKNEEDVAELSISPSDNAVVLTNLLPGTEYVVSVSSVYEQHESTPLRGRQKTGLDSPTGIDFSDITANSFTVHWIAPRATITGYRIRHHPEHFSGRPREDRVPHSRNSITLTNLTPGTEYVVSIVALNGREESPLLIGQQSTVSDVPRDLEVVAATPTSLLISWDAPAVTVRYYRITYGETGGNSPVQEFTVPGSKSTATISGLKPGVDYTITVYAVTGRGDSPASSKPISINYRTEIDKPSQMQVTDVQDNSISVKWLPSSSPVTGYRVTTTPKNGPGPTKTKTAGPDQTEMTIEGLQPTVEYVVSVYAQNPSGESQPLVQTAVTNIDRPKGLAFTDVDVDSIKIAWESPQGQVSRYRVTYSSPEDGIHELFPAPDGEEDTAELQGLRPGSEYTVSVVALHDDMESQPLIGTQSTAIPAPTDLKFTQVTPTSLSAQWTPPNVQLTGYRVRVTPKEKTGPMKEINLAPDSSSVVVSGLMVATKYEVSVYALKDTLTSRPAQGVVTTLENVSPPRRARVTDATETTITISWRTKTETITGFQVDAVPANGQTPIQRTIKPDVRSYTITGLQPGTDYKIYLYTLNDNARSSPVVIDASTAIDAPSNLRFLATTPNSLLVSWQPPRARITGYIIKYEKPGSPPREVVPRPRPGVTEATITGLEPGTEYTIYVIALKNNQKSEPLIGRKKTVQKTPFVTHPGYDTGNGIQLPGTSGQQPSVGQQMIFEEHGFRRTTPPTTATPIRHRPRPYPPNVGQEALSQTTISWAPFQDTSEYIISCHPVGTDEEPLQFRVPGTSTSATLTGLTRGATYNVIVEALKDQQRHKVREEVVTVGNSVNEGLNQPTDDSCFDPYTVSHYAVGDEWERMSESGFKLLCQCLGFGSGHFRCDSSRWCHDNGVNYKIGEKWDRQGENGQMMSCTCLGNGKGEFKCDPHEATCYDDGKTYHVGEQWQKEYLGAICSCTCFGGQRGWRCDNCRRPGGEPSPEGTTGQSYNQYSQRYHQRTNTNVNCPIECFMPLDVQADREDSRE

SEQ ID NO: 5499 - protein, 2240 aa, Homo Sapiens
MLRGPGPGLLLLAVQCLGTAVPSTGASKSKRQAQQMVQPQSPVAVSQSKPGCYDNGKHYQINQQWERTYLGNALVCTCYGGSRGFNCESKPEAEETCFDKYTGNTYRVGDTYERPKDSMIWDCTCIGAGRGRISCTIANRCHEGGQSYKIGDTWRRPHETGGYMLECVCLGNGKGEWTCKPIAEKCFDHAAGTSYVVGETWEKPYQGWMMVDCTCLGEGSGRITCTSRNRCNDQDTRTSYRIGDTWSKKDNRGNLLQCICTGNGRGEWKCERHTSVQTTSSGSGPFTDVRAAVYQPQPHPQPPPYGHCVTDSGVVYSVGMQWLKTQGNKQMLCTCLGNGVSCQETAVTQTYGGNSNGEPCVLPFTYNGRTFYSCTTEGRQDGHLWCSTTSNYEQDQKYSFCTDHTVLVQTRGGNSNGALCHFPFLYNNHNYTDCTSEGRRDNMKWCGTTQNYDADQKFGFCPMAAHEEICTTNEGVMYRIGDQWDKQHDMGHMMRCTCVGNGRGEWTCIAYSQLRDQCIVDDITYNVNDTFHKRHEEGHMLNCTCFGQGRGRWKCDPVDQCQDSETGTFYQIGDSWEKYVHGVRYQCYCYGRGIGEWHCQPLQTYPSSSGPVEVFITETPSQPNSHPIQWNAPQPSHISKYILRWRPKNSVGRWKEATIPGHLNSYTIKGLKPGVVYEGQLISIQQYGHQEVTRFDFTTTSTSTPVTSNTVTGETTPFSPLVATSESVTEITASSFVVSWVSASDTVSGFRVEYELSEEGDEPQYLDLPSTATSVNIPDLLPGRKYIVNVYQISEDGEQSLILSTSQTTAPDAPPDTTVDQVDDTSIVVRWSRPQAPITGYRIVYSPSVEGSSTELNLPETANSVTLSDLQPGVQYNITIYAVEENQESTPVVIQQETTGTPRSDTVPSPRDLQFVEVTDVKVTIMWTPPESAVTGYRVDVIPVNLPGEHGQRLPISRNTFAEVTGLSPGVTYYFKVFAVSHGRESKPLTAQQTTKLDAPTNLQFVNETDSTVLVRWTPPRAQITGYRLTVGLTRRGQPRQYNVGPSVSKYPLRNLQPASEYTVSLVAIKGNQESPKATGVFTTLQPGSSIPPYNTEVTETTIVITWTPAPRIGFKLGVRPSQGGEAPREVTSDSGSIVVSGLTPGVEYVYTIQVLRDGQERDAPIVNKVVTPLSPPTNLHLEANPDTGVLTVSWERSTTPDITGYRITTTPTNGQQGNSLEEVVHADQSSCTFDNLSPGLEYNVSVYTVKDDKESVPISDTIIPAVPPPTDLRFTNIGPDTMRVTWAPPPSIDLTNFLVRYSPVKNEEDVAELSISPSDNAVVLTNLLPGTEYVVSVSSVYEQHESTPLRGRQKTGLDSPTGIDFSDITANSFTVHWIAPRATITGYRIRHHPEHFSGRPREDRVPHSRNSITLTNLTPGTEYVVSIVALNGREESPLLIGQQSTVSDVPRDLEVVAATPTSLLISWDAPAVTVRYYRITYGETGGNSPVQEFTVPGSKSTATISGLKPGVDYTITVYAVTGRGDSPASSKPISINYRTEIDKPSQMQVTDVQDNSISVKWLPSSSPVTGYRVTTTPKNGPGPTKTKTAGPDQTEMTIEGLQPTVEYVVSVYAQNPSGESQPLVQTAVTTIPAPTDLKFTQVTPTSLSAQWTPPNVQLTGYRVRVTPKEKTGPMKEINLAPDSSSVVVSGLMVATKYEVSVYALKDTLTSRPAQGVVTTLENVSPPRRARVTDATETTITISWRTKTETITGFQVDAVPANGQTPIQRTIKPDVRSYTITGLQPGTDYKIYLYTLNDNARSSPVVIDASTAIDAPSNLRFLATTPNSLLVSWQPPRARITGYIIKYEKPGSPPREVVPRPRPGVTEATITGLEPGTEYTIYVIALKNNQKSEPLIGRKKTVQKTPFVTHPGYDTGNGIQLPGTSGQQPSVGQQMIFEEHGFRRTTPPTTATPIRHRPRPYPPNVGQEALSQTTISWAPFQDTSEYIISCHPVGTDEEPLQFRVPGTSTSATLTGLTRGATYNVIVEALKDQQRHKVREEVVTVGNSVNEGLNQPTDDSCFDPYTVSHYAVGDEWERMSESGFKLLCQCLGFGSGHFRCDSSRWCHDNGVNYKIGEKWDRQGENGQMMSCTCLGNGKGEFKCDPHEATCYDDGKTYHVGEQWQKEYLGAICSCTCFGGQRGWRCDNCRRPGGEPSPEGTTGQSYNQYSQRYHQRTNTNVNCPIECFMPLDVQADREDSRE

SEQ ID NO: 5500 - protein, 657 aa, Homo Sapiens
MLRGPGPGLLLLAVQCLGTAVPSTGASKSKRQAQQMVQPQSPVAVSQSKPGCYDNGKHYQINQQWERTYLGNALVCTCYGGSRGFNCESKPEAEETCFDKYTGNTYRVGDTYERPKDSMIWDCTCIGAGRGRISCTIANRCHEGGQSYKIGDTWRRPHETGGYMLECVCLGNGKGEWTCKPIAEKCFDHAAGTSYVVGETWEKPYQGWMMVDCTCLGEGSGRITCTSRNRCNDQDTRTSYRIGDTWSKKDNRGNLLQCICTGNGRGEWKCERHTSVQTTSSGSGPFTDVRAAVYQPQPHPQPPPYGHCVTDSGVVYSVGMQWLKTQGNKQMLCTCLGNGVSCQETAVTQTYGGNSNGEPCVLPFTYNGRTFYSCTTEGRQDGHLWCSTTSNYEQDQKYSFCTDHTVLVQTRGGNSNGALCHFPFLYNNHNYTDCTSEGRRDNMKWCGTTQNYDADQKFGFCPMAAHEEICTTNEGVMYRIGDQWDKQHDMGHMMRCTCVGNGRGEWTCIAYSQLRDQCIVDDITYNVNDTFHKRHEEGHMLNCTCFGQGRGRWKCDPVDQCQDSETGTFYQIGDSWEKYVHGVRYQCYCYGRGIGEWHCQPLQTYPSSSGPVEVFITETPSQPNSHPIQWNAPQPSHISKYILRWRPVSIPPRNLGY

SEQ ID NO: 5501 - protein, 2267 aa, Homo Sapiens
MLRGPGPGLLLLAVQCLGTAVPSTGASKSKRQAQQMVQPQSPVAVSQSKPGCYDNGKHYQINQQWERTYLGNALVCTCYGGSRGFNCESKPEAEETCFDKYTGNTYRVGDTYERPKDSMIWDCTCIGAGRGRISCTIANRCHEGGQSYKIGDTWRRPHETGGYMLECVCLGNGKGEWTCKPIAEKCFDHAAGTSYVVGETWEKPYQGWMMVDCTCLGEGSGRITCTSRNRCNDQDTRTSYRIGDTWSKKDNRGNLLQCICTGNGRGEWKCERHTSVQTTSSGSGPFTDVRAAVYQPQPHPQPPPYGHCVTDSGVVYSVGMQWLKTQGNKQMLCTCLGNGVSCQETAVTQTYGGNSNGEPCVLPFTYNGRTFYSCTTEGRQDGHLWCSTTSNYEQDQKYSFCTDHTVLVQTRGGNSNGALCHFPFLYNNHNYTDCTSEGRRDNMKWCGTTQNYDADQKFGFCPMAAHEEICTTNEGVMYRIGDQWDKQHDMGHMMRCTCVGNGRGEWTCIAYSQLRDQCIVDDITYNVNDTFHKRHEEGHMLNCTCFGQGRGRWKCDPVDQCQDSETGTFYQIGDSWEKYVHGVRYQCYCYGRGIGEWHCQPLQTYPSSSGPVEVFITETPSQPNSHPIQWNAPQPSHISKYILRWRPKNSVGRWKEATIPGHLNSYTIKGLKPGVVYEGQLISIQQYGHQEVTRFDFTTTSTSTPVTSNTVTGETTPFSPLVATSESVTEITASSFVVSWVSASDTVSGFRVEYELSEEGDEPQYLDLPSTATSVNIPDLLPGRKYIVNVYQISEDGEQSLILSTSQTTAPDAPPDTTVDQVDDTSIVVRWSRPQAPITGYRIVYSPSVEGSSTELNLPETANSVTLSDLQPGVQYNITIYAVEENQESTPVVIQQETTGTPRSDTVPSPRDLQFVEVTDVKVTIMWTPPESAVTGYRVDVIPVNLPGEHGQRLPISRNTFAEVTGLSPGVTYYFKVFAVSHGRESKPLTAQQTTKLDAPTNLQFVNETDSTVLVRWTPPRAQITGYRLTVGLTRRGQPRQYNVGPSVSKYPLRNLQPASEYTVSLVAIKGNQESPKATGVFTTLQPGSSIPPYNTEVTETTIVITWTPAPRIGFKLGVRPSQGGEAPREVTSDSGSIVVSGLTPGVEYVYTIQVLRDGQERDAPIVNKVVTPLSPPTNLHLEANPDTGVLTVSWERSTTPDITGYRITTTPTNGQQGNSLEEVVHADQSSCTFDNLSPGLEYNVSVYTVKDDKESVPISDTIIPEVPQLTDLSFVDITDSSIGLRWTPLNSSTIIGYRITVVAAGEGIPIFEDFVDSSVGYYTVTGLEPGIDYDISVITLINGGESAPTTLTQQTAVPPPTDLRFTNIGPDTMRVTWAPPPSIDLTNFLVRYSPVKNEEDVAELSISPSDNAVVLTNLLPGTEYVVSVSSVYEQHESTPLRGRQKTGLDSPTGIDFSDITANSFTVHWIAPRATITGYRIRHHPEHFSGRPREDRVPHSRNSITLTNLTPGTEYVVSIVALNGREESPLLIGQQSTVSDVPRDLEVVAATPTSLLISWDAPAVTVRYYRITYGETGGNSPVQEFTVPGSKSTATISGLKPGVDYTITVYAVTGRGDSPASSKPISINYRTEIDKPSQMQVTDVQDNSISVKWLPSSSPVTGYRVTTTPKNGPGPTKTKTAGPDQTEMTIEGLQPTVEYVVSVYAQNPSGESQPLVQTAVTTIPAPTDLKFTQVTPTSLSAQWTPPNVQLTGYRVRVTPKEKTGPMKEINLAPDSSSVVVSGLMVATKYEVSVYALKDTLTSRPAQGVVTTLENVSPPRRARVTDATETTITISWRTKTETITGFQVDAVPANGQTPIQRTIKPDVRSYTITGLQPGTDYKIYLYTLNDNARSSPVVIDASTAIDAPSNLRFLATTPNSLLVSWQPPRARITGYIIKYEKPGSPPREVVPRPRPGVTEATITGLEPGTEYTIYVIALKNNQKSEPLIGRKKTGQEALSQTTISWAPFQDTSEYIISCHPVGTDEEPLQFRVPGTSTSATLTGLTRGATYNVIVEALKDQQRHKVREEVVTVGNSVNEGLNQPTDDSCFDPYTVSHYAVGDEWERMSESGFKLLCQCLGFGSGHFRCDSSRWCHDNGVNYKIGEKWDRQGENGQMMSCTCLGNGKGEFKCDPHEATCYDDGKTYHVGEQWQKEYLGAICSCTCFGGQRGWRCDNCRRPGGEPSPEGTTGQSYNQYSQRYHQRTNTNVNCPIECFMPLDVQADREDSRE

SEQ ID NO: 5502 - protein, 2265 aa, Homo Sapiens
MLRGPGPGLLLLAVQCLGTAVPSTGASKSKRQAQQMVQPQSPVAVSQSKPGCYDNGKHYQINQQWERTYLGNALVCTCYGGSRGFNCESKPEAEETCFDKYTGNTYRVGDTYERPKDSMIWDCTCIGAGRGRISCTIANRCHEGGQSYKIGDTWRRPHETGGYMLECVCLGNGKGEWTCKPIAEKCFDHAAGTSYVVGETWEKPYQGWMMVDCTCLGEGSGRITCTSRNRCNDQDTRTSYRIGDTWSKKDNRGNLLQCICTGNGRGEWKCERHTSVQTTSSGSGPFTDVRAAVYQPQPHPQPPPYGHCVTDSGVVYSVGMQWLKTQGNKQMLCTCLGNGVSCQETAVTQTYGGNSNGEPCVLPFTYNGRTFYSCTTEGRQDGHLWCSTTSNYEQDQKYSFCTDHTVLVQTRGGNSNGALCHFPFLYNNHNYTDCTSEGRRDNMKWCGTTQNYDADQKFGFCPMAAHEEICTTNEGVMYRIGDQWDKQHDMGHMMRCTCVGNGRGEWTCIAYSQLRDQCIVDDITYNVNDTFHKRHEEGHMLNCTCFGQGRGRWKCDPVDQCQDSETGTFYQIGDSWEKYVHGVRYQCYCYGRGIGEWHCQPLQTYPSSSGPVEVFITETPSQPNSHPIQWNAPQPSHISKYILRWRPKNSVGRWKEATIPGHLNSYTIKGLKPGVVYEGQLISIQQYGHQEVTRFDFTTTSTSTPVTSNTVTGETTPFSPLVATSESVTEITASSFVVSWVSASDTVSGFRVEYELSEEGDEPQYLDLPSTATSVNIPDLLPGRKYIVNVYQISEDGEQSLILSTSQTTAPDAPPDTTVDQVDDTSIVVRWSRPQAPITGYRIVYSPSVEGSSTELNLPETANSVTLSDLQPGVQYNITIYAVEENQESTPVVIQQETTGTPRSDTVPSPRDLQFVEVTDVKVTIMWTPPESAVTGYRVDVIPVNLPGEHGQRLPISRNTFAEVTGLSPGVTYYFKVFAVSHGRESKPLTAQQTTKLDAPTNLQFVNETDSTVLVRWTPPRAQITGYRLTVGLTRRGQPRQYNVGPSVSKYPLRNLQPASEYTVSLVAIKGNQESPKATGVFTTLQPGSSIPPYNTEVTETTIVITWTPAPRIGFKLGVRPSQGGEAPREVTSDSGSIVVSGLTPGVEYVYTIQVLRDGQERDAPIVNKVVTPLSPPTNLHLEANPDTGVLTVSWERSTTPDITGYRITTTPTNGQQGNSLEEVVHADQSSCTFDNLSPGLEYNVSVYTVKDDKESVPISDTIIPAVPPPTDLRFTNIGPDTMRVTWAPPPSIDLTNFLVRYSPVKNEEDVAELSISPSDNAVVLTNLLPGTEYVVSVSSVYEQHESTPLRGRQKTGLDSPTGIDFSDITANSFTVHWIAPRATITGYRIRHHPEHFSGRPREDRVPHSRNSITLTNLTPGTEYVVSIVALNGREESPLLIGQQSTVSDVPRDLEVVAATPTSLLISWDAPAVTVRYYRITYGETGGNSPVQEFTVPGSKSTATISGLKPGVDYTITVYAVTGRGDSPASSKPISINYRTEIDKPSQMQVTDVQDNSISVKWLPSSSPVTGYRVTTTPKNGPGPTKTKTAGPDQTEMTIEGLQPTVEYVVSVYAQNPSGESQPLVQTAVTTIPAPTDLKFTQVTPTSLSAQWTPPNVQLTGYRVRVTPKEKTGPMKEINLAPDSSSVVVSGLMVATKYEVSVYALKDTLTSRPAQGVVTTLENVSPPRRARVTDATETTITISWRTKTETITGFQVDAVPANGQTPIQRTIKPDVRSYTITGLQPGTDYKIYLYTLNDNARSSPVVIDASTAIDAPSNLRFLATTPNSLLVSWQPPRARITGYIIKYEKPGSPPREVVPRPRPGVTEATITGLEPGTEYTIYVIALKNNQKSEPLIGRKKTDELPQLVTLPHPNLHGPEILDVPSTVQKTPFVTHPGYDTGNGIQLPGTSGQQPSVGQQMIFEEHGFRRTTPPTTATPIRHRPRPYPPNVGQEALSQTTISWAPFQDTSEYIISCHPVGTDEEPLQFRVPGTSTSATLTGLTRGATYNVIVEALKDQQRHKVREEVVTVGNSVNEGLNQPTDDSCFDPYTVSHYAVGDEWERMSESGFKLLCQCLGFGSGHFRCDSSRWCHDNGVNYKIGEKWDRQGENGQMMSCTCLGNGKGEFKCDPHEATCYDDGKTYHVGEQWQKEYLGAICSCTCFGGQRGWRCDNCRRPGGEPSPEGTTGQSYNQYSQRYHQRTNTNVNCPIECFMPLDVQADREDSRE

SEQ ID NO: 5503 - protein, 241 aa, Homo Sapiens
YLYTLNDNARSSPVVIDASTAIDAPSNLRFLATTPNSLLVSWQPPRARITGYIIKYEKPGSPPREVVPRPRPGVTEATITGLEPGTEYTIYVIALKNNQKSEPLIGRKKTVQKTPFVTHPGYDTGNGIQLPGTSGQQPSVGQQMIFEEHGFRRTTPPTTATPIRHRPRPYPPNVGEEIQIGHIPREDVDYHLYPHGPGLNPNASTGQEALSQTTISWAPFQDTSEYIISCHPVGTDEEPLQ

SEQ ID NO: 5504 - protein, 1894 aa, Homo Sapiens
MAPEAGATLRAPRRLSWAALLLLAALLPVASSAAASVDHPLKPRHVKLLSTKMGLKVTWDPPKDATSRPVEHYNIAYGKSLKSLKYIKVNAETYSFLIEDVEPGVVYFVLLTAENHSGVSRPVYRAESPPGGEWIEIDGFPIKGPGPFNETVTEKEVPNKPLRVRVRSSDDRLSVAWKAPRLSGAKSPRRSRGFLLGYGESGRKMNYVPLTRDERTHEIKKLASESVYVVSLQSMNSQGRSQPVYRAALTKRKISEEDELDVPDDISVRVMSSQSVLVSWVDPVLEKQKKVVASRQYTVRYREKGELARWDYKQIANRRVLIENLIPDTVYEFAVRISQGERDGKWSTSVFQRTPESAPTTAPENLNVWPVNGKPTVVAASWDALPETEGKVKEYILSYAPALKPFGAKSLTYPGDTTSALVDGLQPGERYLFKIRATNRRGLGPHSKAFIVAMPTTSKADVEQNTEDNGKPEKPEPSSPSPRAPASSQHPSVPASPQGRNAKDLLLDLKNKILANGGAPRKPQLRAKKAEELDLQSTEITGEEELGSREDSPMSPSDTQDQKRTLRPPSRHGHSVVAPGRTAVRARMPALPRREGVDKPGFSLATQPRPGAPPSASASPAHHASTQGTSHRPSLPASLNDNDLVDSDEDERAVGSLHPKGAFAQPRPALSPSRQSPSSVLRDRSSVHPGAKPASPARRTPHSGAAEEDSSASAPPSRLSPPHGGSSRLLPTQPHLSSPLSKGGKDGEDAPATNSNAPSRSTMSSSVSSHLSSRTQVSEGAEASDGESHGDGDREDGGRQAEATAQTLRARPASGHFHLLRHKPFAANGRSPSRFSIGRGPRLQPSSSPQSTVPSRAHPRVPSHSDSHPKLSSGIHGDEEDEKPLPATVVNDHVPSSSRQPISRGWEDLRRSPQRGASLHRKEPIPENPKSTGADTHPQGKYSSLASKAQDVQQSTDADTEGHSPKAQPGSTDRHASPARPPAARSQQHPSVPRRMTPGRAPQQQPPPPVATSQHHPGPQSRDAGRSPSQPRLSLTQAGRPRPTSQGRSHSSSDPYTASSRGMLPTALQNQDEDAQGSYDDDSTEVEAQDVRAPAHAARAKEAAASLPKHQQVESPTGAGAGGDHRSQRGHAASPARPSRPGGPQSRARVPSRAAPGKSEPPSKRPLSSKSQQSVSAEDDEEEDAGFFKGGKEDLLSSSVPKWPSSSTPRGGKDADGSLAKEEREPAIALAPRGGSLAPVKRPLPPPPGSSPRASHVPSRLPPRSAATVSPVAGTHPWPQYTTRAPPGHFSTTPMLSLRQRMMHARFRNPLSRQPARPSYRQGYNGRPNVEGKVLPGSNGKPNGQRIINGPQGTKWVVDLDRGLVLNAEGRYLQDSHGNPLRIKLGGDGRTIVDLEGTPVVSPDGLPLFGQGRHGTPLANAQDKPILSLGGKPLVGLEVIKKTTHPPTTTMQPTTTTTPLPTTTTPRPTTATTRRTTTTRRTTTRRPTTTVRTTTRTTTTTTPTPTTPIPTCPPGTLERHDDDGNLIMSSNGIPECYAEEDEFSGLETDTAVPTEEAYVIYDEDYEFETSRPPTTTEPSTTATTPRVIPEEGAISSFPEEEFDLAGRKRFVAPYVTYLNKDPSAPCSLTDALDHFQVDSLDEIIPNDLKKSDLPPQHAPRNITVVAVEGCHSFVIVDWDKATPGDVVTGYLVYSASYEDFIRNKWSTQASSVTHLPIENLKPNTRYYFKVQAQNPHGYGPISPSVSFVTESDNPLLVVRPPGGEPIWIPFAFKHDPSYTDCHGRQYVKRTWYRKFVGVVLCNSLRYKIYLSDNLKDTFYSIGDSWGRGEDHCQFVDSHLDGRTGPQSYVEALPTIQGYYRQYRQEPVRFGNIGFGTPYYYVGWYECGVSIPGKW

SEQ ID NO: 5505 - protein, 1790 aa, Homo Sapiens
  misc_feature (1)..(1): Xaa can be any naturally occurring amino acid
XPRHVKLLSTKMGLKVTWDPPKDATSRPVEHYNIAYGKSLKSLKYIKVNAETYSFLIEDVEPGVVYFVLLTAENHSGVSRPVYRAESPPGGEWIEIDGFPIKGPGPFNETVTEKEVPNKPLRVRVRSSDDRLSVAWKAPRLSGAKSPRRSRGFLLGYGESGRKMNYVPLTRDERTHEIKKLASESVYVVSLQSMNSQGRSQPVYRAALTKRKISEEDELDVPDDISVRVMSSQSVLVSWVDPVLEKQKKVVASRQYTVRYREKGELARWDYKQIANRRVLIENLIPDTVYEFAVRISQGERDGKWSTSVFQRTPESAPTTAPENLNVWPVNGKPTVVAASWDALPETEGKVKASKADVEQNTEDNGKPEKPEPSSPSPRAPASSQHPSVPASPQGRNAKDLLLDLKNKILANGGAPRKPQLRAKKAEELDLQSTEITGEEELGSREDSPMSPSDTQDQKRTLRPPSRHGHSVVAPGRTAVRARMPALPRREGVDKPGFSLATQPRPGAPPSASASPAHHASTQGTSHRPSLPASLNDNDLVDSDEDERAVGSLHPKGAFAQPRPALSPSRQSPSSVLRDRSSVHPGAKPASPARRTPHSGAAEEDSSASAPPSRLSPPHGGSSRLLPTQPHLSSPLSKGGKDGEDAPATNSNAPSRSTMSSSVSSHLSSRTQVSEGAEASDGESHGDGDREDGGRQAEATAQTLRARPASGHFHLLRHKPFAANGRSPSRFSIGRGPRLQPSSSPQSTVPSRAHPRVPSHSDSHPKLSSGIHGDEEDEKPLPATVVNDHVPSSSRQPISRGWEDLRRSPQRGASLHRKEPIPENPKSTGADTHPQGKYSSLASKAQDVQQSTDADTEGHSPKAQPGSTDRHASPARPPAARSQQHPSVPRRMTPGRAPQQQPPPPVATSQHHPGPQSRDAGRSPSQPRLSLTQAGRPRPTSQGRSHSSSDPYTASSRGMLPTALQNQDEDAQGSYDDDSTEVEAQDVRAPAHAARAKEAAASLPKHQQVESPTGAGAGGDHRSQRGHAASPARPSRPGGPQSRARVPSRAAPGKSEPPSKRPLSSKSQQSVSAEDDEEEDAGFFKGGKEDLLSSSVPKWPSSSTPRGGKDADGSLAKEEREPAIALAPRGGSLAPVKRPLPPPPGSSPRASHVPSRLPPRSAATVSPVAGTHPWPQYTTRAPPGHFSTTPMLSLRQRMMHARFRNPLSRQPARPSYRQGYNGRPNVEGKVLPGSNGKPNGQRIINGPQGTKWVVDLDRGLVLNAEGRYLQDSHGNPLRIKLGGDGRTIVDLEGTPVVSPDGLPLFGQGRHGTPLANAQDKPILSLGGKPLVGLEVIKKTTHPPTTTMQPTTTTTPLPTTTTPRPTTATTRRTTTTRRTTTRRPTTTVRTTTRTTTTTTPTPTTPIPTCPPGTLERHDDDGNLIMSSNGIPECYAEEDEFSGLETDTAVPTEEAYVIYDEDYEFETSRPPTTTEPSTTATTPRVIPEEGAISSFPEEEFDLAGRKRFVAPYVTYLNKDPSAPCSLTDALDHFQVDSLDEIIPNDLKKSDLPPQHAPRNITVVAVEGCHSFVIVDWDKATPGDVVTGYLVYSASYEDFIRNKWSTQASSVTHLPIENLKPNTRYYFKVQAQNPHGYGPISPSVSFVTESDNPLLVVRPPGGEPIWIPFAFKHDPSYTDCHGRQYVKRTWYRKFVGVVLCNSLRYKIYLSDNLKDTFYSIGDSWGRGEDHCQFVDSHLDGRTGPQSYVEALPTIQGYYRQYRQEPVRFGNIGFGTPYYYVGWYECGVSIPGKW

SEQ ID NO: 5506 - protein, 733 aa, Homo Sapiens
MAGGRETCLPLIGFILICLKMVASAKSAPEIPTIDQAYSKLSNSITVEWATVPGATSYLLTAEDGDTVIETTVANSPGTVTGLKAATWYEITIRSISAAGRSQASPPKQAKTVLAAPILEVSSPSSDSILVQWEAVYMAIAFSVSIMRANGLGSIWKENTTNTSLTFTSLEAGTLYTIKAYAWNANRIPGDDSTCNQRTSPRAPANIQVSFDSGALKASFSWARAEGAFNYTVMALSDSSELTCSTTFSSCTISSLQCGTEYLISVLASNDAGSSKSSSAMTLKTVACAPGRVTIQEDPPGHLSVAWSSVDLGDYYVVFVKSDDGLEVHCNTSLTQCNFLSECGFTYFISVFVYNKAGQSPLGDIFNYTTAPCCPSDINPVLVSSDRVEIVWSPVRGAELYETKAVDGYNMVECNDTTPACTLSALECDTKYNITVYSFNEVRGSNMSCTPQFITTAPCSPEIKNVSRDAFSMINVHWRSTNDDATYTVTAQGEKGLYQCSSTGESCTMRGLPCGSVFSVTAVAETQAGRSLPSYSVPLETVPCCPTGLTVTQITQSVINVSWTIGRVAQTHVAVLESHTGQSKCHTHQNHCLLGCITCGINYTVTLKAISATGLTADCSYQSYFSGACCPLGVKLYRLGPNGIRIYWQASRGSANYSTDLYGSKGIFTCTPSAGLSFCDVTEIPCGDVYTVMVSPVAKTGLKLTFCPKKIYSVTCSGSTLGMVIYRGKRNEE

SEQ ID NO: 5507 - protein, 499 aa, Homo Sapiens
  misc_feature (1)..(1): Xaa can be any naturally occurring amino acid
XEGAFNYTVMALSDSSELTCSTTFSSCTISSLQCGTEYLISVLASNDAGSSKSSSAMTLKTVACAPGRVTIQEDPPGHLSVAWSSVDLGDYYVVFVKSDDGLEVHCNTSLTQCNFLSECGFTYFISVFVYNKAGQSPLGDIFNYTTAPCCPSDINPVLVSSDRVEIVWSPVRGAELYETKAVDGYNMVECNDTTPACTLSALECDTKYNITVYSFNEVRGSNMSCTPQFITTAPCSPEIKNVSRDAFSMINVHWRSTNDDATYTVTAQGEKGLYQCSSTGESCTMRGLPCGSVFSVTAVAETQAGRSLPSYSVPLETVPCCPTGLTVTQITQSVINVSWTIGRVAQTHVAVLESHTGQSKCHTHQNHCLLGCITCGINYTVTLKAISATGLTADCSYQSYFSGACCPLGVKLYRLGPNGIRIYWQASRGSANYSTDLYGSKGIFTCTPSAGLSFCDVTEIPCGDVYTVMVSPVAKTGLKLTFCPKKIYSVIYRGKRNEE

SEQ ID NO: 5508 - protein, 46 aa, Homo Sapiens
MAVSDVPSLSVGKEVQWEKLIAKAASIRDICHINMVQICWQLFLKC

SEQ ID NO: 5509 - protein, 1237 aa, Homo Sapiens
MAVSDVPSLSVGKEVQWEKLIAKAASIRDICKQRPYQHGADMLAAISQVLNECTKPDQATPAALVLQGLHALCQAEVVCIRSTWNALSPKLSCDTRPLILKTLSELFSLVPSLTVNTTEYENFKVQVLSFLWTHTQNKDPIVANAAYRSLANFSAGEHTILHLPEKIRPEIPIPEELDDDEDVEDVDLSVPGSCYLKLLSLTPPLVLPALEEFFTSLVKQEMVNMPRGIYHSALKGGARSDQGKTVAGIPNFILKMYETNKQPGLKPGLAGGMLFCYDVSMYQSKDGKPLNRLMASRGRSFKQTSLALVHEVHIQLSEWHRAIFLPQAWLAYMNRAYHAILQGRLGELELQLKHGKEEPEEVQYKKSTAWLWVRDMLTDEITKAAAKESPVVKGNALLALSSLAVVVSRHEASLSSDSDGLLEVQPNFLSMKEWVSMVLDTLLVIVDSHYQPRGQLLSWFYYKSYSGENTASAIARSAAATALSLLVPVFIISCKEKVEEILNMLTARLPGKPSADESQAVQIHMGLALGMFLSRLCEEKLSDISGQEMNLLLMKSLDALENCCFDTSLEYNTGCILGVGLVLSLMSHSSQMQSRVHVAALLRKLSAHVDDSGSQSRTFQEVLAYTLSCVCTSAFSAGIIEATEAEDVMNKLRLLVENSQQTSGFALALGNIVHGLSVCGHGKAEDLGSKLLPAWIRIVLTEGTPTMLCLAALHGMVALVGSEGDVMQLKSEAIQTSHFQGRLNEVIRTLTQVISVSGVIGLQSNAVWLLGHLHLSTLSSSQSRASVPTDYSYLPESSFIGAAIGFFITGGKKGPESVPPSLLKVVMKPIATVGESYQYPPVNWAALLSPLMRLNFGEEIQQLCLEIMVTQAQSSQNAAALLGLWVTPPLIHSLSLNTKRYLLISAPLWIKHISDEQILGFVENLMVAVFKAASPLGSPELCPSALHGLSQAMKLPSPAHHLWSLLSEATGKIFDLLPNKIRRKDLELYISIAKCLLEMTDDDANRIAQVTKSNIEKAAFVKLYLVSQGRFPLVNLTDMLSVAVQHREKEVLAWMILHSLYQARIVSHANTGVLKRMEWLLELMGYIRNVAYQSTSFHNTALDKALDFFLLIFATAVVAWADHTAPLLLGLSASWLPWHQENGPAGPVPSFLGRSPMHRVTLQEVLTLLPNSMALLLQKEPWKEQTQKFIDWLFSIMESPKEALSAQSRDLLKATLLSLRVLPEFKKKAVWTRAYGW

SEQ ID NO: 5510 - protein, 99 aa, Homo Sapiens
MLTARLPGKPSADESQAVQIHMGLALGMFLSRLCEEKLSDISGQEMNLLLMKSLDALENCCFDTSLEYNTGCILGVGLVLSLMSHSSQMQSRVHVAALL

SEQ ID NO: 5511 - protein, 128 aa, Homo Sapiens
MLTARLPGKPSADESQAVQIHMGLALGMFLSRLCEEKLSDISGQEMNLLLMKSLDALENCCFDTSLEYNTGCILGVGLVLSLMSHSSQMQSRVHVAALLRKLSAHVDDSGSQSRTFQEVLAYTLSCVC

SEQ ID NO: 5512 - protein, 180 aa, Homo Sapiens
MPKVFSVYFVCLCPALGKICDISGQEMNLLLMKSLDALENCCFDTSLEYNTGCILGVGLVLSLMSHSSQMQSRVHVAALLRKLSAHVDDSGSQSRTFQEVLAYTLSCVCTSAFSAGIIEATEAEDVMNKLRLLVENSQQTSGFALALGNIVHGLSVCGHGKAEDLGSKLLPAWIRIVLTE

SEQ ID NO: 5513 - protein, 1801 aa, Homo Sapiens
MSDDIRKRFEFPNSLIQSQAVGHLIAAVLKENGFSEKIHQSTNQTPALNLLWEKCCSDNVVVRTACCEGLVALVAQDHAEFSYVLNGILNLIPSTRNTHGLIKAIMHLLQMQALKEGQGGEKNIQSIYTIRNHPHPLITVLEHRPDCWPVFLQQLTAFFQQCPERLEVSCIQIMAPFLWYLYCEPSQLQEYAKLRLALLKVLLQPQVLCDKDQPSILEQQILQLCCDIVPCLQVKDLIQTTEAMMFIEEVCLSLLRHPVFWKIQLTQMSLQLLCVSEVSLKITGECSSSIHLLEHSVELLKEDFPVELVIIGIALLLLQTPASQQKPILNLALKLLSVTEDQKIPKSSLLLVMPILQILSSTALEDCISVDEEGPSRQQLALNLLEMIQQECYRDDHQKLSYKLVCPVTSMYGTIFTAWRILEVMTDSSAASDWLASVESLLPITAVIPAPAFLLLAHLLVEDKGQNLHQILKVTTELAQADSSQVPNLIPVLMFKLGRPLEPILYNDILYTLPKLGVHKVCIGQILRIIQLLGTTPRLRAVTLRLLTSLWEKQDRVYPELQRFMAVSDVPSLSVGKEVQWEKLIAKAASIRDICKQRPYQHGADMLAAISQVLNECTKPDQATPAALVLQGLHALCQAEVVCIRSTWNALSPKLSCDTRPLILKTLSELFSLVPSLTVNTTEYENFKVQVLSFLWTHTQNKDPIVANAAYRSLANFSAGEHTILHLPEKIRPEIPIPEELDDDEDVEDVDLSVPGSCYLKLLSLTPPLVLPALEEFFTSLVKQEMVNMPRGIYHSALKGGARSDQGKTVAGIPNFILKMYETNKQPGLKPGLAGGMLFCYDVSMYQSKDGKPLNRLMASRGRSFKQTSLALVHEVHIQLSEWHRAIFLPQAWLAYMNRAYHAILQGRLGELELQLKHGKEEPEEVQYKKSTAWLWVRDMLTDEITKAAAKESPVVKGNALLALSSLAVVVSRHEASLSSDSDGLLEVQPNFLSMKEWVSMVLDTLLVIVDSHYQPRGQLLSWFYYKSYSGENTASAIARSAAATALSLLVPVFIISCKEKVEEILNMLTARLPGKPSADESQAVQIHMGLALGMFLSRLCEEKLSDISGQEMNLLLMKSLDALENCCFDTSLEYNTGCILGVGLVLSLMSHSSQMQSRVHVAALLRKLSAHVDDSGSQSRTFQEVLAYTLSCVCTSAFSAGIIEATEAEDVMNKLRLLVENSQQTSGFALALGNIVHGLSVCGHGKAEDLGSKLLPAWIRIVLTEGTPTMLCLAALHGMVALVGSEGDVMQLKSEAIQTSHFQGRLNEVIRTLTQVISVSGVIGLQSNAVWLLGHLHLSTLSSSQSRASVPTDYSYLPESSFIGAAIGFFITGGKKGPESVPPSLLKVVMKPIATVGESYQYPPVNWAALLSPLMRLNFGEEIQQLCLEIMVTQAQSSQNAAALLGLWVTPPLIHSLSLNTKRYLLISAPLWIKHISDEQILGFVENLMVAVFKAASPLGSPELCPSALHGLSQAMKLPSPAHHLWSLLSEATGKIFDLLPNKIRRKDLELYISIAKCLLEMTDDDANRIAQVTKSNIEKAAFVKLYLVSQGRFPLVNLTDMLSVAVQHREKEVLAWMILHSLYQARIVSHANTGVLKRMEWLLELMGYIRNVAYQSTSFHNTALDKALDFFLLIFATAVVAWADHTAPLLLGLSASWLPWHQENGPAGPVPSFLGRSPMHRVTLQEVLTLLPNSMALLLQKEPWKEQTQKFIDWLFSIMESPKEALSAQSRDLLKATLLSLRVLPEFKKKAVWTRAYGW

SEQ ID NO: 5514 - protein, 1801 aa, Homo Sapiens; identical to SEQ ID NO: 5513

SEQ ID NO: 5515 - protein, 181 aa, Homo Sapiens
MLPAATEGQKDMVWKWMPLLLLLVCVATMCSAQDRTDLLNVCMDAKHHKTKPGPEDKLHDQCSPWKKNACCTASTSQELHKDTSRLYNFNWDHCGKMEPACKRHFIQDTCLYECSPNLGPWIQQVNQSWRKERFLDVPLCKEDCQRWWEDCHTSHTCKSNWHRGWDWTSGVNKCPAGALCR

SEQ ID NO: 5516 - protein, 198 aa, Homo Sapiens
MLPAATELRLQGQKDMVWKWMPLLLLLVCVATMCSAQDRTDLLNVCMDAKHHKTKPGPEDKLHDQCSPWKKNACCTASTSQELHKDTSRLYNFNWDHCGKMEPACKRHFIQDTCLYECSPNLGPWIQQVNQSWRKERFLDVPLCKEDCQRWWEDCHTSHTCKSNWHRGWDWTSGVNKCPAGALCRTFESYFPTPAALC

SEQ ID NO: 5517 - protein, 214 aa, Homo Sapiens
MLPAATEVQCSPWKKNACCTASTSQELHKDTSRLYNFNWDHCGKMEPACKRHFIQDTCLYECSPNLGPWIQQVNQSWRKERFLDVPLCKEDCQRWWEDCHTSHTCKSNWHRGWDWTSGVNKCPAGALCRTFESYFPTPAALCEGLWSHSYKVSNYSRGSGRCIQMWFDSAQGNPNEEVARFYAAAMHVNAGEMLHGTGGLLLSLALMLQLWLLG

SEQ ID NO: 5518 - protein, 210 aa, Homo Sapiens
MLPAATEVQGQKDMVWKWMPLLLLLVCVATMCSAQDRTDLLNVCMDAKHHKTKPGPEDKLHDQCSPWKKNACCTASTSQELHKDTSRLYNFNWDHCGKMEPACKRHFIQDTCLYECSPNLGPWIQQVNQSWRKERFLDVPLCKEDCQRWWEDCHTSHTCKSNWHRGWDWTSGVNKCPAGALCRTFESYFPTPAALCEGLWSHSYKVSNYS

SEQ ID NO: 5519 - protein, 148 aa, Homo Sapiens
MLPAATEVQKDHAGSCGEGNLKGKKLEEGRLDTKHRAMLRLQGQKDMVWKWMPLLLLLVCVATMCSAQDRTDLLNVCMDAKHHKTKPGPEDKLHDQCSPWKKNACCTASTSQELHKDTSRLYNFNWDHCGKMEPACKRHFIQDTCLYE

SEQ ID NO: 5520 - protein, 251 aa, Homo Sapiens
MLPAATEVQLRLQGQKDMVWKWMPLLLLLVCVATMCSAQDRTDLLNVCMDAKHHKTKPGPEDKLHDQCSPWKKNACCTASTSQELHKDTSRLYNFNWDHCGKMEPACKRHFIQDTCLYECSPNLGPWIQQVNQSWRKERFLDVPLCKEDCQRWWEDCHTSHTCKSNWHRGWDWTSAALCEGLWSHSYKVSNYSRGSGRCIQMWFDSAQGNPNEEVARFYAAAMHVNAGEMLHGTGGLLLSLALMLQLWLLG

SEQ ID NO: 5521 - protein, 244 aa, Homo Sapiens
MLPAATEVQLRLQGQKDMVWKWMPLLLLLVCVATMCSAQDRTDLLNVCMDAKHHKTKPGPEDKLHDQCSPWKKNACCTASTSQELHKDTSRLYNFNWDHCGKMEPACSATSSRTPVSMSAHQPGALDPAGIRAGAKNASWMCPYAKRTVSAGGRIVTPPTRARATGTEDGTGPQELTSAQLGLSAAPLSPTSPLQLPFVKASGVTHTRSATTAEGAAAASRCGLIQPRATPTRKWRGSMLQPCM

SEQ ID NO: 5522 - protein, 169 aa, Homo Sapiens
MVWKWMPLLLLLVCVATMCSAQDRTDLLNVCMDAKHHKTKPGPEDKLHDQCSPWKKNACCTASTSQELHKDTSRLYNFNWDHCGKMEPACKRHFIQDTCLYECSPNLGPWIQQVNQSWRKERFLDVPLCKEDCQRWWEDCHTSHTCKSNWHRGWDWTSAALCEGLWSHS

SEQ ID NO: 5523 - protein, 171 aa, Homo Sapiens
MVWKWMPLLLLLVCVATMCSAQDRTDLLNVCMDAKHHKTKPGPEDKLHDQCSPWKKNACCTASTSQELHKDTSRLYNFNWDHCGKMEPACKRHFIQDTCLYECSPNLGPWIQQVNQSWRKERFLDVPLCKEDCQRWWEDCHTSHTCKSNWHRGWDWTSGVNKCPAGALCRT

SEQ ID NO: 5524 - protein, 255 aa, Homo Sapiens
MVWKWMPLLLLLVCVATMCSAQDRTDLLNVCMDAKHHKTKPGPEDKLHDQCSPWKKNACCTASTSQELHKDTSRLYNFNWDHCGKMEPACKRHFIQDTCLYECSPNLGPWIQQVNQSWRKERFLDVPLCKEDCQRWWEDCHTSHTCKSNWHRGWDWTSGVNKCPAGALCRTFESYFPTPAALCEGLWSHSYKVSNYSRGSGRCIQMWFDSAQGNPNEEVARFYAAAMHVNAGEMLHGTGGLLLSLALMLQLWLLG

SEQ ID NO: 5525 - protein, 74 aa, Homo Sapiens
MAWQMMQLLLLALVTAAGSAQPRSARARTDLLNVCMNAKHHKTQPSPEDELYGQCSPWKKNACCTASTSQELHK

SEQ ID NO: 5526 - protein, 104 aa, Homo Sapiens
MAWQMMQLLLLALVTAAGSAQPRSARARTDLLNVCMNAKHHKTQPSPEDELYGQCSPWKKNACCTASTSQELHKDTSRLYNFNWDHCGKMEPTCKRHFIQDSCL

SEQ ID NO: 5527 - protein, 178 aa, Homo Sapiens
MDMAWQMMQLLLLALVTAAGSAQPRSARARTDLLNVCMNAKHHKTQPSPEDELYGQCSPWKKNACCTASTSQELHKDTSRLYNFNWDHCGKMEPTCKRHFIQDSCLYECSPNLGPWIRQVNQSWRKERILNVPLCKEDCERWWEDCRTSYTCKSNWHKGWNWTSGINECPAGALCSTF

SEQ ID NO: 5528 - protein, 245 aa, Homo Sapiens
MDMAWQMMQLLLLALVTAAGSAQPRSARARTDLLNVCMNAKHHKTQPSPEDELYGQCSPWKKNACCTASTSQELHKDTSRLYNFNWDHCGKMEPTCKRHFIQDSCLYECSPNLGPWIRQVNQSWRKERILNVPLCKEDCERWWEDCRTSYTCKSNWHKGWNWTSGINECPAGALCSTFESYFPTPAALCEGLWSHSFKVSNYSRGSGRCIQMWFDSAQGNPNEEVAKFYAAAMNAGAPSRGIIDS

SEQ ID NO: 5529 - protein, 172 aa, Homo Sapiens
MDMAWQMMQLLLLALVTAAGSAQPRSARARTDLLNVCMNAKHHKTQPSPEDELYGQVGAPQGPSPGSVPLDDLPGAEEPEYGGDGCGGERLSPVSSPPSAVPGRRMPAARPAPARSCTRTPPACTTLTGITVVRWNPPASATLSRTAVSMSAHPTWGPGSGRSTRAGAKSAF

SEQ ID NO: 5530 - protein, 86 aa, Homo Sapiens
MGLSAAAPLWGPPGLLLAIALHPALSVPPRRDYCVLGAGPAGLQMAYFLQRAGRDYAVFERAPRPGSFFTRYPRHRKLISINKRYT

SEQ ID NO: 5531 - protein, 684 aa, Homo Sapiens
MGLSAAAPLWGPPGLLLAIALHPALSVPPRRDYCVLGAGPAGLQMAYFLQRAGRDYAVFERAPRPGSFFTRYPRHRKLISINKRYTGKANAEFNLRHDWNSLLSHDPRLLFRHYSRAYFPDARDMVRYLGDFADTLGLRVQYNTTIAHVTLDKDRQAWNGHYFILTDQKGQVHQCSVLFVATGLSVPNQVDFPGSEYAEGYESVSVDPEDFVGQNVLILGRGNSAFETAENILGVTNFIHMLSRSRVRLSWATHYVGDLRAINNGLLDTYQLKSLDGLLESDLTDLAILKDSKGKFHVTPKFFLEEANTNQSADSITLPQDDNDNFAMRVPYDRVIRCLGWNFDFSIFNKSLRLNSGNAFGKKYPLIRASYESKGSRGLFILGTASHSVDYRKSAGGFIHGFRYTVRAVHRLLEHRHHSVTWPATELPITQLTSSIVRRVNEASGLYQMFGVLADVILLKENSTAFEYLEEFPIQMLAQLETLTGRKAKHGLFVINMEYGRNFSGPDKDVFFDDRSVGHTEDAWQSNFLHPVIYYYRYLPTEQEVRFRPAHWPLPRPTAIHHIVEDFLTDWTAPIGHILPLRRFLENCLDTDLRSFYAESCFLFALTRQKLPPFCQQGYLRMQGLVSTESLWQHRVESRLLRDYAPTGRRLEDSSQQLGDQEPLGSPLAPGPLAQSVDSNKEEL

SEQ ID NO: 5532 - protein, 684 aa, Homo Sapiens; identical to SEQ ID NO: 5531

SEQ ID NO: 5533 - protein, 684 aa, Homo Sapiens; identical to SEQ ID NO: 5531

SEQ ID NO: 5534 - protein, 157 aa, Homo Sapiens
MLPEQGPQPSTMPLWCLLAACTSLPRQAATMLEEAASPNEAVHASTSGSGALTDQTFTDLSAAEASSEEVPDFMEVPHSVHHKINCFFYLEKQLCQLPSPLCLSSLLTLKLKTTVPAPGRWWSFQPHKAFPLLVGTPGSWQSTIDPAWAAPSQPSPG

SEQ ID NO: 5535 - protein, 57 aa, Homo Sapiens
MAAVRALVASRLAAASAFTSLSPGGRTPSQRAALHLSVPRPAARVALDPGAPEPWRG

SEQ ID NO: 5536 - protein, 237 aa, Homo Sapiens
MAAVRALVASRLAAASAFTSLSPGGRTPSQRAALHLSVPRPAARVALVLSGCGVYDGTEIHEASAILVHLSRGGAEVQIFAPDVPQMHVIDHTKGQPSEGESRNVLTESARIARGKITDLANLSAANHDAAIFPGGFGAAKNLLCCIAPVLAAKVLRGVEVTVGHEQEEGGKWPYAGTAEAIKALGAKHCVKEVVEAHVDQKNKVVTTPAFMCETALHYIHDGIGAMVRKVLELTGK

SEQ ID NO: 5537 - protein, 268 aa, Homo Sapiens
MAAVRALVASRLAAASAFTSLSPGGRTPSQRAALHLSVPRPAARVALVLSGCGVYDGTEIHEASAILVHLSRGGAEVQIFAPDVPQMHVIDHTKGQPSEGESRNVLTESARIARGKITDLANLSAANHDAAIFPGGFGAAKNLSTFAVDGKDCKVNKEVERVLKEFHQAGKPIGLCCIAPVLAAKVLRGVEVTVGHEQEEGGKWPYAGTAEAIKALGAKHCVKEVVEAHVDQKNKVVTTPAFMCETALHYIHDGIGAMVRKVLELTGK

SEQ ID NO: 5538 - protein, 182 aa, Homo Sapiens
MHVIDHTKGQPSEGESRNVLTESARIARGKITDLANLSAANHDAAIFPGGFGAAKNLSTFAVDGKDCKVNKEVERVLKEFHQAGKPIGLCCIAPVLAAKVLRGVEVTVGHEQEEGGKWPYAGTAEAIKALGAKHCVKEVVEAHVDQKNKVVTTPAFMCETALHYIHDGIGAMVRKVLELTGK

SEQ ID NO: 5539 - protein, 224 aa, Homo Sapiens; identical to SEQ ID NO: 1865

SEQ ID NO: 5540 - protein, 106 aa, Homo Sapiens
  misc_feature (1)..(1): Xaa can be any naturally occurring amino acid
XDGTEIHEASAILVHLSRGGAEVQIFAPDVPQMHVIDHTKGQPSEGESRNVLTESARIARGKITDLANLSAANHDAAIFPGGFGAAKNLGSPYSDPAKHRSLGLQL

SEQ ID NO: 5541 - protein, 137 aa, Homo Sapiens
  misc_feature (1)..(1): Xaa can be any naturally occurring amino acid
XDGTEIHEASAILVHLSRGGAEVQIFAPDVPQMHVIDHTKGQPSEGESRNVLTESARIARGKITDLANLSAANHDAAIFPGGFGAAKNLSTFAVDGKDCKVNKEVERVLKEFHQAGKPIGGSPYSDPAKHRSLGLQL

SEQ ID NO: 5542 - protein, 537 aa, Homo Sapiens
MLNTLQTNAGYLEQVKRQRGDPQTQLEAMELYLARSGLQVEDLDRLNIIHVTGTKGKGSTCAFTECILRSYGLKTGFFSSPHLVQVRERIRINGQPISPELFTKYFWRLYHRLEETKDGSCVSMPPYFRFLTLMAFHVFLQEKVDLAVVEVGIGGAYDCTNIIRKPVVCGVSSLGIDHTSLLGDTVEKIAWQKGGIFKQGVPAFTVLQPEGPLAVLRDRAQQISCPLYLCPMLEALEEGGPPLTLGLEGEHQRSNAALALQLAHCWLQRQDRHGAGEPKASRPGLLWQLPLAPVFQPTSHMRLGLRNTEWPGRTQVLRRGPLTWYLDGAHTASSAQACVRWFRQALQGRERPSGGPEVRVLLFNATGDRDPAALLKLLQPCQFDYAVFCPNLTEVSSTGNADQQNFTVTLDQVLLRCLEHQQHWNHLDEEQASPDLWSAPSPEPGGSASLLLAPHPPHTCSASSLVFSCISHALQWISQGRDPIFQPPSPPKGLLTHPVAHSGASILREAAAIHVLVTGSLHLVGGVLKLLEPALSQ

SEQ ID NO: 5543 - protein, 265 aa, Homo Sapiens
MLNTLQTNAGYLEQVKRQRGDPQTQLEAMELYLARSGLQVEDLDRLNIIHVTGTKGKGSTCAFTECILRSYGLKTGFFSSPHLVQVRERIRINGQPISPELFTKYFWRLYHRLEETKDGSCVSMPPYFRFLTLMAFHVFLQEKVDLAVVEVGIGGAYDCTNIIRKPVVCGVSSLGIDHTSLLGDTVEKIAWQKGGIFKQGVPAFTVLQPEGPLAVLRDRAQQISVLGSQRHPGQGSCGSCPWHLCSSPHPTCGSGFGTRSGRAGR

SEQ ID NO: 5544 - protein, 194 aa, Homo Sapiens
MLNTLQTNAGYLEQVKRQRGDPQTQLEAMELYLARSGLQVEDLDRLNIIHVTGTKGKGSTCAFTECILRSYGLKTGFFSSPHLVQVRERIRINGQPISPELFTKYFWRLYHRLEETKVDLAVVEVGIGGAYDCTNIIRKPVVCGVSSLGIDHTSLLGDTVEKIAWQKGGIFKQGVPAFTVLQPEGPLAVLRDRA

SEQ ID NO: 5545 - protein, 375 aa, Homo Sapiens
MSRARSHLRAALFLAAASARGITTQVAARRGLSAWPVPQEPSMEYQDAVRMLNTLQTNAGYLEQVKRQRGDPQTQLEAMELYLARSGLQVEDLDRLNIIHVTGTKGKGSTCAFTECILRSYGLKTGFFSSPHLVQVRERIRINGQPISPELFTKYFWRLYHRLEETKDGSCVSMPPYFRFLTLMAFHVFLQEKVDLAVVEVGIGGAYDCTNIIRKPVVCGVSSLGIDHTSLLGDTVEKIAWQKGGIFKQGVPAFTVLQPEGPLAVLRDRAQQISVLGSQRHPGQGSCGSCPWHLCSSPHPTCGSGFGTRSGRAGRRCCGAGPSPGTWTVRTPPAARRPACAGSARRCRAARGRAVAPRFESCSSMLPGTGTRRPC

SEQ ID NO: 5546 - protein, 587 aa, Homo Sapiens
MSRARSHLRAALFLAAASARGITTQVAARRGLSAWPVPQEPSMEYQDAVRMLNTLQTNAGYLEQVKRQRGDPQTQLEAMELYLARSGLQVEDLDRLNIIHVTGTKGKGSTCAFTECILRSYGLKTGFFSSPHLVQVRERIRINGQPISPELFTKYFWRLYHRLEETKDGSCVSMPPYFRFLTLMAFHVFLQEKVDLAVVEVGIGGAYDCTNIIRKPVVCGVSSLGIDHTSLLGDTVEKIAWQKGGIFKQGVPAFTVLQPEGPLAVLRDRAQQISCPLYLCPMLEALEEGGPPLTLGLEGEHQRSNAALALQLAHCWLQRQDRHGAGEPKASRPGLLWQLPLAPVFQPTSHMRLGLRNTEWPGRTQVLRRGPLTWYLDGAHTASSAQACVRWFRQALQGRERPSGGPEVRVLLFNATGDRDPAALLKLLQPCQFDYAVFCPNLTEVSSTGNADQQNFTVTLDQVLLRCLEHQQHWNHLDEEQASPDLWSAPSPEPGGSASLLLAPHPPHTCSASSLVFSCISHALQWISQGRDPIFQPPSPPKGLLTHPVAHSGASILREAAAIHVLVTGSLHLVGGVLKLLEPALSQ

SEQ ID NO: 5547 - protein, 375 aa, Homo Sapiens; identical to SEQ ID NO: 5545

SEQ ID NO: 5548 - protein, 561 aa, Homo Sapiens
MSRARSHLRAALFLAAASARGITTQVAARRGLSAWPVPQEPSMEYQDAVRMLNTLQTNAGYLEQVKRQRGDPQTQLEAMELYLARSGLQVEDLDRLNIIHVTGTKGKGSTCAFTECILRSYGLKTGFFSSPHLVQVRERIRINGQPISPELFTKYFWRLYHRLEETKVDLAVVEVGIGGAYDCTNIIRKPVVCGVSSLGIDHTSLLGDTVEKIAWQKGGIFKQGVPAFTVLQPEGPLAVLRDRAQQISCPLYLCPMLEALEEGGPPLTLGLEGEHQRSNAALALQLAHCWLQRQDRHGAGEPKASRPGLLWQLPLAPVFQPTSHMRLGLRNTEWPGRTQVLRRGPLTWYLDGAHTASSAQACVRWFRQALQGRERPSGGPEVRVLLFNATGDRDPAALLKLLQPCQFDYAVFCPNLTEVSSTGNADQQNFTVTLDQVLLRCLEHQQHWNHLDEEQASPDLWSAPSPEPGGSASLLLAPHPPHTCSASSLVFSCISHALQWISQGRDPIFQPPSPPKGLLTHPVAHSGASILREAAAIHVLVTGSLHLVGGVLKLLEPALSQ

SEQ ID NO: 5549 - protein, 1976 aa, Homo Sapiens
MGVLKVWLGLALALAEFAVLPHHSEGACVYQDSLLADATIWKPDSCQSCRCHGDIVICKPAVCRNPQCAFEKGEVLQIAANQCCPECVLRTPGSCHHEKKIHEHGTEWASSPCSVCSCNHGEVRCTPQPCPPLSCGHQELAFIPEGSCCPVCVGLGKPCSYEGHVFQDGEDWRLSRCAKCLCRNGVAQCFTAQCQPLFCNQDETVVRVPGKCCPQCSARSCSAAGQVYEHGEQWSENACTTCICDRGEVRCHKQACLPLRCGKGQSRARRHGQCCEECVSPAGSCSYDGVVRYQDEMWKGSACEFCMCDHGQVTCQTGECAKVECARDEELIHLDGKCCPECISRNGYCVYEETGEFMSSNASEVKRIPEGEKWEDGPCKVCECRGAQVTCYEPSCPPCPVGTLALEVKGQCCPDCTSVHCHPDCLTCSQSPDHCDLCQDPTKLLQNGWCVHSCGLGFYQAGSLCLACQPQCSTCTSGLECSSCQPPLLMRHGQCVPTCGDGFYQDRHSCAVCHESCAGCWGPTEKHCLACRDPLHVLRDGGCESSCGKGFYNRQGTCSACDQSCDSCGPSSPRCLTCTEKTVLHDGKCMSECPGGYYADATGRCKVCHNSCASCSGPTPSHCTACSPPKALRQGHCLPRCGEGFYSDHGVCKACHSSCLACMGPAPSHCTGCKKPEEGLQVEQLSDVGIPSGECLAQCRAHFYLESTGICEACHQSCFRCAGKSPHNCTDCGPSHVLLDGQCLSQCPDGYFHQEGSCTECHPTCRQCHGPLESDCISCYPHISLTNGNCRTSCREEQFLNLVGYCADCHHLCQHCAADLHNTGSICLRCQNAHYLLLGDHCVPDCPSGYYAERGACKKCHSSCRTCQGRGPFSCSSCDTNLVLSHTGTCSTTCFPGHYLDDNHVCQPCNTHCGSCDSQASCTSCRDPNKVLLFGECQYESCAPQYYLDFSTNTCKECDWSCSACSGPLKTDCLQCMDGYVLQDGACVEQCLSSFYQDSGLCKNCDSYCLQCQGPHECTRCKGPFLLLEAQCVQECGKGYFADHAKHKCTACPQGCLQCSHRDRCHLCDHGFFLKSGLCVYNCVPGFSVHTSNETCSGKIHTPSLHVNGSLILPIGSIKPLDFSLLNVQDQEGRVEDLLFHVVSTPTNGQLVLSRNGKEVQLDKAGRFSWKDVNEKKVRFVHSKEKLRKGYLFLKISDQQFFSEPQLINIQAFSTQAPYVLRNEVLHISRGERATITTQMLDIRDDDNPQDVVIEIIDPPLHGQLLQTLQSPATPIYQFQLDELSRGLLHYAHDGSDSTSDVAVLQANDGHSFHNILFQVKTVPQNDRGLQLVANSMVWVPEGGMLQITNRILQAEAPGASAEEIIYKITQDYPQFGEVVLLVNMPADSPADEGQHLPDGRTATPTSTFTQQDINEGIVWYRHSGAPAQSDSFRFEVSSASNAQTRLESHMFNIAILPQTPEAPKVSLEASLHMTAREDGLTVIQPHSLSFINSEKPSGKIVYNITLPLHPNQGIIEHRDHPHSPIRYFTQEDINQGKVMYRPPPAAPHLQELMAFSFAGLPESVKFHFTVSDGEHTSPEMVLTIHLLPSDQQLPVFQVTAPRLAVSPGGSTSVGLQVVVRDAETAPKELFFELRRPPQHGVLLKHTAEFRRPMATGDTFTYEDVEKNALQYIHDGSSTREDSMEISVTDGLTVTMLEVRVEVSLSEDRGPRLAAGSSLSITVASKSTAIITRSHLAYVDDSSPDPEIWIQLNYLPSYGTLLRISGSEVEELSEVSNFTMEDINNKKIRYSAVFETDGHLVTDSFYFSVSDMDHNHLDNQIFTIMITPAENPPPVIAFADLITVDEGGRAPLSFHHFFATDDDDNLQRDAIIKLSALPKYGCIENTGTGDRFGPETASDLEASFPIQDVLENYIYYFQSVHESIEPTHDIFSFYVSDGTSRSEIHSINITIEVKTLEVGKVEPLTTIFHTIRELSL

SEQ ID NO: 5550 - protein, 4012 aa, Homo Sapiens
MGVLKVWLGLALALAEFAVLPHHSEGACVYQDSLLADATIWKPDSCQSCRCHGDIVICKPAVCRNPQCAFEKGEVLQIAANQCCPECVLRTPGSCHHEKKIHEHGTEWASSPCSVCSCNHGEVRCTPQPCPPLSCGHQELAFIPEGSCCPVCVGLGKPCSYEGHVFQDGEDWRLSRCAKCLCRNGVAQCFTAQCQPLFCNQDETVVRVPGKCCPQCSARSCSAAGQVYEHGEQWSENACTTCICDRGEVRCHKQACLPLRCGKGQSRARRHGQCCEECVSPAGSCSYDGVVRYQDEMWKGSACEFCMCDHGQVTCQTGECAKVECARDEELIHLDGKCCPECISRNGYCVYEETGEFMSSNASEVKRIPEGEKWEDGPCKVCECRGAQVTCYEPSCPPCPVGTLALEVKGQCCPDCTSVHCHPDCLTCSQSPDHCDLCQDPTKLLQNGWCVHSCGLGFYQAGSLCLACQPQCSTCTSGLECSSCQPPLLMRHGQCVPTCGDGFYQDRHSCAVCHESCAGCWGPTEKHCLACRDPLHVLRDGGCESSCGKGFYNRQGTCSACDQSCDSCGPSSPRCLTCTEKTVLHDGKCMSECPGGYYADATGRCKVCHNSCASCSGPTPSHCTACSPPKALRQGHCLPRCGEGFYSDHGVCKACHSSCLACMGPAPSHCTGCKKPEEGLQVEQLSDVGIPSGECLAQCRAHFYLESTGICEACHQSCFRCAGKSPHNCTDCGPSHVLLDGQCLSQCPDGYFHQEGSCTECHPTCRQCHGPLESDCISCYPHISLTNGNCRTSCREEQFLNLVGYCADCHHLCQHCAADLHNTGSICLRCQNAHYLLLGDHCVPDCPSGYYAERGACKKCHSSCRTCQGRGPFSCSSCDTNLVLSHTGTCSTTCFPGHYLDDNHVCQPCNTHCGSCDSQASCTSCRDPNKVLLFGECQYESCAPQYYLDFSTNTCKECDWSCSACSGPLKTDCLQCMDGYVLQDGACVEQCLSSFYQDSGLCKNCDSYCLQCQGPHECTRCKGPFLLLEAQCVQECGKGYFADHAKHKCTACPQGCLQCSHRDRCHLCDHGFFLKSGLCVYNCVPGFSVHTSNETCSGKIHTPSLHVNGSLILPIGSIKPLDFSLLNVQDQEGRVEDLLFHVVSTPTNGQLVLSRNGKEVQLDKAGRFSWKDVNEKKVRFVHSKEKLRKGYLFLKISDQQFFSEPQLINIQAFSTQAPYVLRNEVLHISRGERATITTQMLDIRDDDNPQDVVIEIIDPPLHGQLLQTLQSPATPIYQFQLDELSRGLLHYAHDGSDSTSDVAVLQANDGHSFHNILFQVKTVPQNDRGLQLVANSMVWVPEGGMLQITNRILQAEAPGASAEEIIYKITQDYPQFGEVVLLVNMPADSPADEGQHLPDGRTATPTSTFTQQDINEGIVWYRHSGAPAQSDSFRFEVSSASNAQTRLESHMFNIAILPQTPEAPKVSLEASLHMTAREDGLTVIQPHSLSFINSEKPSGKIVYNITLPLHPNQGIIEHRDHPHSPIRYFTQEDINQGKVMYRPPPAAPHLQELMAFSFAGLPESVKFHFTVSDGEHTSPEMVLTIHLLPSDQQLPVFQVTAPRLAVSPGGSTSVGLQVVVRDAETAPKELFFELRRPPQHGVLLKHTAEFRRPMATGDTFTYEDVEKNALQYIHDGSSTREDSMEISVTDGLTVTMLEVRVEVSLSEDRGPRLAAGSSLSITVASKSTAIITRSHLAYVDDSSPDPEIWIQLNYLPSYGTLLRISGSEVEELSEVSNFTMEDINNKKIRYSAVFETDGHLVTDSFYFSVSDMDHNHLDNQIFTIMITPAENPPPVIAFADLITVDEGGRAPLSFHHFFATDDDDNLQRDAIIKLSALPKYGCIENTGTGDRFGPETASDLEASFPIQDVLENYIYYFQSVHESIEPTHDIFSFYVSDGTSRSEIHSINITIERKNDEPPRMTLQPLRVQLSSGVVISNSSLSLQDLDTPDNELIFVLTKKPDHGHVLWRQTASEPLENGRVLVQGSTFTYQDILAGLVGYVPSVPGMVVDEFQFSLTDGLHVDTGRMKIYTELPASDTPHLAINQGLQLSAGSVARITEQHLKVTDIDSDDHQVMYIMKEDPGAGRLQMMKHGNLEQISIKGPIRSFTQADISQGHVEYSHGTGEPGGSFAFKFDVVDGEGNRLIDKSFSISILEDKSPPVITTNKGLVLDENSVKKITTLQLSATDQDSGPTELIYRITRQPQLGHLEHAASPGIQISSFTQADLTSRNVQYVHSSEAEKHSDAFSFTLSDGVSEVTQTFHITLHPVDDSLPVVQNLGMRVQEGMRKTITEFELKAVDADTEAESVTFTIVQPPRHGTIERTSNGQHFHLTSTFTMKDIYQNRVSYSHDGSNSLKDRFTFTVSDGTNPFFIIEEGGKEIMTAAPQPFRVDILPVDDGTPRIVTNLGLQWLEYMDGKATNLITKKELLTMDPDTEDAQLVYEITTGPKHGFVENKLQPGRAAATFTQEDVNLGLIRYVLHKEKIREMMDSFQFLVKDSKPNVVSDNVFHIQWSLISFKYTSYNVSEKAGSVSVTVQRTGNLNQYAIVLCRTEQGTASSSSRVSSQPGQQDYVEYAGQVQFDEREDTKSCTIVINDDDVFENVESFTVELSMPAYALLGEFTQAKVIINDTEDEPTLEFDKKIYWVNESAGFLFAPIERKGDASSIVSAICYTVPKSAMGSSLYALESGSDFKSRGMSAASRVIFGPGVTMSTCDVMLIDDSEYEEEEEFEIALADASDNARIGRVATAKVLISGPNDASTVSLGNTAFTVSEDAGTVKIPVIRHGTDLSTFASVWCATRPSDPASATPGVDYVPSSRKVEFGPGVIEQYCTLTILDDTQYPVIEGLETFVVFLSSAQGAELTKPFQAVIAINDTFQDVPSMQFAKDLLLVKEKEGVLHVPITRSGDLSYESSVRCYTQSHSAQVMEDFEERQNADSSRITFLKGDKVKNCTVYIHDDSMFEPEEQFRVYLGLPLGNHWSGARIGKNNMATITISNDEDAPTIEFEEAAYQVREPAGPDAIAILNIKVIRRGDQNRTSKVRCSTRDGSAQSGVDYYPKSRVLKFSPGVDHIFFKVEILSNEDREWHESFSLVLGPDDPVEAVLGDVTTATVTILDQEAAGSLILPAPPIVVTLADYDHVEEVTKEGVKKSPSPGYPLVCVTPCDPHFPRYAVMKERCSEAGINQTSVQFSWEVAAPTDGNGARSPFETITDNTPFTSVNHMVLDSIYFSRRFHVRCVAKAVDKVGHVGTPLRSNIVTIGTDSAICHTPVVAGTSRGFQAQSFIATLKYLDVKHKEHPNRIHISVQIPHQDGMLPLISTMPLHNLHFLLSESIYRHQHVCSNLVTTYDLRGISEAGFLDDVVYDSTALGPGYDRPFQFDPSVREPKTIQLYKHLNLKSCVWTFDAYYDMTELIDVCGGSVTADFQVRDSAQSFLTVHVPLYVSYIYVTAPRGWASLEHHTEMEFSFFYDTVLWRTGIQTDSVLSARLQIIRIYIREDGRLVIEFKTHAKFRGQFVMEHHTLPEVKSFVLTPDHLGGIEFDLQLLWSAQTFDSPHQLWRATSSYNRKDYSGEYTIYLIPCTVQPTQPWVDPGEKPLACTAHAPERFLIPIAFQQTNRPVPVVYSLNTEFQLCNNEKVFLMDPNTSDMSLAEMDYKGAFSKGQILYGRVLWNPEQNLNSAYKLQLEKVYLCTGKDGYVPFFDPTGTIYNEGPQYGCIQPNKHLKHRFLLLDRNQPEVTDKYFHDVPFEAHFASELPDFHVVSNMPGVDGFTLKVDALYKVEAGHQWYLQVIYIIGPDTISGPRVQRSLTAPLRRNRRDLVEPDGQLILDDSLIYDNEGDQVKNGTNMKSLNLEMQELAVAASLSQTGASIGSALAAIMLLLLVFLVACFINRKCQKQRKKKPAEDILEEYPLNTKVEVPKRHPDRVEKNVNRHYCTVRNVNILSEPEAAYTFKGAKVKRLNLEVRVHNNLQDGTEV

SEQ ID NO: 5551 - protein, 39 aa, Homo Sapiens
MGVLKVWLGLALALAEFAVLPHHSEGACVYQDSLLAEGG

SEQ ID NO: 5552 - protein, 652 aa, Homo Sapiens
  misc_feature (1)..(1): Xaa can be any naturally occurring amino acid
XCSYEGHVFQDGEDWRLSRCAKCLCRNGVAQCFTAQCQPLFCNQDETVVRVPGKCCPQCSARSCSAAGQVYEHGEQWSENACTTCICDRGEVRCHKQACLPLRCGKGQSRARRHGQCCEECVSPAGSCSYDGVVRYQDEMWKGSACEFCMCDHGQVTCQTGECAKVECARDEELIHLDGKCCPECISRNGYCVYEETGEFMSSNASEVKRIPEGEKWEDGPCKVCECRGAQVTCYEPSCPPCPVGTLALEVKGQCCPDCTSVHCHPDCLTCSQSPDHCDLCQDPTKLLQNGWCVHSCGLGFYQAGSLCLACQPQCSTCTSGLECSSCQPPLLMRHGQCVPTCGDGFYQDRHSCAVCHESCAGCWGPTEKHCLACRDPLHVLRDGGCESSCGKGFYNRQGTCSACDQSCDSCGPSSPRCLTCTEKTVLHDGKCMSECPGGYYADATGRCKVCHNSCASCSGPTPSHCTACSPPKALRQGHCLPRCGEGFYSDHGVCKACHSSCLACMGPAPSHCTGCKKPEEGLQVEQLSDVGIPSGECLAQCRAHFYLESTGICEACHQSCFRCAGKSPHNCTDCGPSHVLLDGQCLSQCPDGYFHQEGSCTECHPTCRQCHGPLESDCISCYPHISLTNGNCRTSCREEQFLNLVGYCAGE

SEQ ID NO: 5553 - protein, 666 aa, Homo Sapiens
  misc_feature (1)..(1): Xaa can be any naturally occurring amino acid
XGEVLQIAANQCCPECVLRTPGSCHHEKKIHEHGTEWASSPCSVCSCNHGEVRCTPQPCPPLSCGHQELAFIPEGSCCPVCVGLGKPCSYEGHVFQDGEDWRLSRCAKCLCRNGVAQCFTAQCQPLFCNQDETVVRVPGKCCPQCSARSCSAAGQVYEHGEQWSENACTTCICDRGEVRCHKQACLPLRCGKGQSRARRHGQCCEECVSPAGSCSYDGVVRYQDEMWKGSACEFCMCDHGQVTCQTGECAKVECARDEELIHLDGKCCPECISRNGYCVYEETGEFMSSNASEVKRIPEGEKWEDGPCKVCECRGAQVTCYEPSCPPCPVGTLALEVKGQCCPDCTSVHCHPDCLTCSQSPDHCDLCQDPTKLLQNGWCVHSCGLGFYQAGSLCLACQPQCSTCTSGLECSSCQPPLLMRHGQCVPTCGDGFYQDRHSCAVCHESCAGCWGPTEKHCLACRDPLHVLRDGGCESSCGKGFYNRQGTCSACDQSCDSCGPSSPRCLTCTEKTVLHDGKCMSECPGGYYADATGRCKVCHNSCASCSGPTPSHCTACSPPKALRQGHCLPRCGEGFYSDHGVCKACHSSCLACMGPAPSHCTGCKKPEEGLQVEQLSDVGIPSGECLAQCRAHFYLESTGICEGQNLDFCQNLEVISAVCLGISSTEN

SEQ ID NO: 5554 - protein, 426 aa, Homo Sapiens
  misc_feature (1)..(1): Xaa can be any naturally occurring amino acid
XTLPLHPNQGLPESVKFHFTVSDGEHTSPEMVLTIHLLPSDQQLPVFQVTAPRLAVSPGGSTSVGLQVVVRDAETAPKELFFELRRPPQHGVLLKHTAEFRRPMATGDTFTYEDVEKNALQYIHDGSSTREDSMEISVTDGLTVTMLEVRVEVSLSEDRGPRLAAGSSLSITVASKSTAIITRSHLAYVDDSSPDPEIWIQLNYLPSYGTLLRISGSEVEELSEVSNFTMEDINNKKIRYSAVFETDGHLVTDSFYFSVSDMDHNHLDNQIFTIMITPAENPPPVIAFADLITVDEGGRAPLSFHHFFATDDDDNLQRDAIIKLSALPKYGCIENTGTGDRFGPETASDLEASFPIQDVLENYIYYFQSVHESIEPTHDIFSFYVSDGTSRSEIHSINITIEVKTLEVGKVEPLTTIFHTIRELSL

SEQ ID NO: 5555 - protein, 222 aa, Homo Sapiens
MLDESLAVRRSKKCKEMIMHWEKKEDIDIVNTVDQLDKTAPRITLLHSPSQVGLLKNGCYGIYITSRVLKASDPDTEDDQIIFKILQGPKHGHLENTTTGEFIHEKFSQKDLNSKTILYIINPSLEVNSDTVEFQIMDPTGNSATPQILELKWSHIEWSQTEYEVCENVGLLPLEIIRRGYSMDSAFVGIKVNQVSAAVGKDFTVIPSKLIQFDPGSSILCL

SEQ ID NO: 5556 - protein, 2179 aa, Homo Sapiens
MNSLSWGAANAVLLLLLLAWASPTFISINRGVRVMKGHSAFLSGDDLKFAIPKEKDACKVEVVMNEPITQRVGKLTPQVFDCHFLPNEVKYVHNGCPILDEDTVKLRLYRFTERDTFIETFILWVYLLEPDCNIIHMSNNVLEVPEFNGLSQAIDKNLLRFDYDRMASLECTVSLDTARTRLPAHGQMVLGEPRPEEPRGDQPHSFFPESQLRAKLKCPGGSCTPGLKKIGSLKVSCEEFLLMGLRYQHLDPPSPNIDYISIQLDLTDTRSKIVYKSESAWLPVYIRAGIPNQIPKAAFMAVFILEVDQFILTSLTTSVLDCEEDETPKPLLVFNITKAPLQGYVTHLLDHTRPISSFTWKDLSDMQIAYQPPNSSHSERRHDEVELEVYDFFFERSAPMTVHISIRTADTNAPRVSWNTGLSLLEGQSRAITWEQFQVVDNDDIGAVRLVTVGGLQHGWLTLRGGKGFLFTVADLQAGVVRYHHDDSDSTKDFVVFRIFDGHHSIRHKFPINVLPKDDSPPFLITNVVIELEEGQTILIQGSMLRASDVDASDDYIFFNITKPPQAGEIMKKPGPGLIGYPVHGFLQRDLFNGIIYYRHFGGEIFEDSFQFVLWDSHEPPNLSVPQVATIHITPVDDQLPKEAPGVSRHLVVKETEVAYITKKQLHFIDSESYDRELVYTITTPPFFSFSHRHLDAGKLFMVDSIPKVVKNPTALELRSFTQHAVNYMKVAYMPPMQDIGPHCRDVQFTFSVSNQHGGTLHGICFNITILPVDNQVPEAFTNPLKVTEGGQSIISTEHILISDADTKLDNIDLSLRELPLHGRVELNGFPLNSGGTFSWGDLHTLKVRYQHDGTEVLQDDLLLEVTDGTNSAEFVLHVEVFPVNDEPPVLKADLMPVMNCSEGGEVVITSEYIFATDVDSDNLKLMFVIAREPQHGVVRRAGVTVDQFSQRDVISEAVTYKHTGGEIGLMPCFDTITLVVSDGEAGPFVNGCCYNGPNPSVPLHASFPVYDLNITVYPVDNQPPSIAIGPVFVVDEGCSTALTVNHLSATDPDTAADDLEFVLVSPPQFGYLENILPSVGFEKSNIGISIDSFQWKDMNAFHINYVQSRHLRIEPTADQFTVYVTDGKHHSLEIPFSIIINPTNDEAPDFVVQNITVCEGQMKELDSSIISAVDLDIPQDALLFSITQKPRHGLLIDRGFSKDFSENKQPANPHQKHAPVHSFSMELLKTGMRLTYMHDDSESLADDFTIQLSDGKHKILKTISVEVIPVNDEKPMLSKKAEIAMNMGETRIISSAILSAIDEDSPREKIYYVFERLPQNGQLQLKIGRDWVPLSPGMKCTQEEVDLNLLRYTHTGAMDSQNQDSFTFYLWDGNNRSPALDCQITIKDMEKGDIVILTKPLVVSKGDRGFLTTTTLLAVDGTDKPEELLYVITSPPRYGQIEYVHYPGVPITNFSQMDVVGQTVCYVHKSKVTVSSDRFRFIISNGLRTEHGVFEITLETVDRALPVVTRNKGLRLAQGAVGLLSPDLLQLTDPDTPAENLTFLLVQLPQHGQLYLWGTGLLQHNFTQQDVDSKNVAYRHSGGDSQTDCFTFMATDGTNQGFIVNGRVWEEPVLFTIQVDQLDKTAPRITLLHSPSQVGLLKNGCYGIYITSRVLKASDPDTEDDQIIFKILQGPKHGHLENTTTGEFIHEKFSQKDLNSKTILYIINPSLEVNSDTVEFQIMDPTGNSATPQILELKWSHIEWSQTEYEVCENVGLLPLEIIRRGYSMDSAFVGIKVNQVSAAVGKDFTVIPSKLIQFDPGMSTKMWNIAITYDGLEEDDEVFEVILNSPVNAVLGTKTKAAVKILDSKGGQCHPSYSSNQSKHSTWEKGIWHLLPPGSSSSTTSGSFHLERRPLPSSMQLAVIRGDTLRGFDSTDLSQRKLRTRGNGKTVRPSSVYRNGTDIIYNYHGIVSLKLEDDSFPTHKRKAKVSIISQPQKTIKVAELPQADKVESTTDSHFPRQDQLPSFPKNCTLELKGLFHFEEGIQKLYQCNGIAWKAWSPQTKDVEDKSCPAGWHQHSGYCHILITEQKGTWNAAAQACREQYLGNLVTVFSRQHMRWLWDIGGRKSFWIGLNDQVHAGHWEWIGGEPVAFTNGRRGPSQRSKLGKSCVLVQRQGKWQTKDCRRAKPHNYVCSRKL

SEQ ID NO: 5557 - protein, 2179 aa, Homo Sapiens; identical to SEQ ID NO: 5556

SEQ ID NO: 5558 - protein, 1335 aa, Homo Sapiens
MNSLSWGAANAVLLLLLLAWASPTFISINRGVRVMKGHSAFLSGDDLKFAIPKEKDACKVEVVMNEPITQRVGKLTPQVFDCHFLPNEVKYVHNGCPILDEDTVKLRLYRFTERDTFIETFILWVYLLEPDCNIIHMSNNVLEVPEFNGLSQAIDKNLLRFDYDRMASLECTVSLDTARTRLPAHGQMVLGEPRPEEPRGDQPHSFFPESQLRAKLKCPGGSCTPGLKKIGSLKVSCEEFLLMGLRYQHLDPPSPNIDYISIQLDLTDTRSKIVYKSESAWLPVYIRAGIPNQIPKAAFMAVFILEVDQFILTSLTTSVLDCEEDETPKPLLVFNITKAPLQGYVTHLLDHTRPISSFTWKDLSDMQIAYQPPNSSHSERRHDEVELEVYDFFFERSAPMTVHISIRTADTNAPRVSWNTGLSLLEGQSRAITWEQFQVVDNDDIGAVRLVTVGGLQHGWLTLRGGKGFLFTVADLQAGVVRYHHDDSDSTKDFVVFRIFDGHHSIRHKFPINVLPKDDSPPFLITNVVIELEEGQTILIQGSMLRASDVDASDDYIFFNITKPPQAGEIMKKPGPGLIGYPVHGFLQRDLFNGIIYYRHFGGEIFEDSFQFVLWDSHEPPNLSVPQVATIHITPVDDQLPKEAPGVSRHLVVKETEVAYITKKQLHFIDSESYDRELVYTITTPPFFSFSHRHLDAGKLFMVDSIPKVVKNPTALELRSFTQHAVNYMKVAYMPPMQDIGPHCRDVQFTFSVSNQHGGTLHGICFNITILPVDNQVPEAFTNPLKVTEGGQSIISTEHILISDADTKLDNIDLSLRELPLHGRVELNGFPLNSGGTFSWGDLHTLKVRYQHDGTEVLQDDLLLEVTDGTNSAEFVLHVEVFPVNDEPPVLKADLMPVMNCSEGGEVVITSEYIFATDVDSDNLKLMFVIAREPQHGVVRRAGVTVDQFSQRDVISEAVTYKHTGGEIGLMPCFDTITLVVSDGEAGPFVNGCCYNGPNPSVPLHASFPVYDLNITVYPVDNQPPSIAIGPVFVVDEGCSTALTVNHLSATDPDTAADDLEFVLVSPPQFGYLENILPSVGFEKSNIGISIDSFQWKDMNAFHINYVQSRHLRIEPTADQFTVYVTDGKHHSLEIPFSIIINPTNDEAPDFVVQNITVCEGQMKELDSSIISAVDLDIPQDALLFSITQKPRHGLLIDRGFSKDFSENKQPANPHQKHAPVHSFSMELLKTGMRLTYMHDDSESLADDFTIQLSDGKHKILKTISVEVIPVNDEKPMLSKKAEIAMNMGETRIISSAILSAIDEDSPREKIYYVFERLPQNGQLQLKECQLRCGI

SEQ ID NO: 5559 - protein, 715 aa, Homo Sapiens
MVTQESMLKAALPLFTRFIISNGLRTEHGVFEITLETVDRALPVVTRNKGLRLAQGAVGLLSPDLLQLTDPDTPAENLTFLLVQLPQHGQLYLWGTGLLQHNFTQQDVDSKNVAYRHSGGDSQTDCFTFMATDGTNQGFIVNGRVWEEPVLFTIQVDQLDKTAPRITLLHSPSQVGLLKNGCYGIYITSRVLKASDPDTEDDQIIFKILQGPKHGHLENTTTGEFIHEKFSQKDLNSKTILYIINPSLEVNSDTVEFQIMDPTGNSATPQILELKWSHIEWSQTEYEVCENVGLLPLEIIRRGYSMDSAFVGIKVNQVSAAVGKDFTVIPSKLIQFDPGMSTKMWNIAITYDGLEEDDEVFEVILNSPVNAVLGTKTKAAVKILDSKGGQCHPSYSSNQSKHSTWEKGIWHLLPPGSSSSTTSGSFHLERRPLPSSMQLAVIRGDTLRGFDSTDLSQRKLRTRGNGKTVRPSSVYRNGTDIIYNYHGIVSLKLEDDSFPTHKRKAKVSIISQPQKTIKVAELPQADKVESTTDSHFPRQDQLPSFPKNCTLELKGLFHFEEGIQKLYQCNGIAWKAWSPQTKDVEDKSCPAGWHQHSGYCHILITEQKGTWNAAAQACREQYLGNLVTVFSRQHMRWLWDIGGRKSFWIGLNDQVHAGHWEWIGGEPVAFTNGRRGPSQRSKLGKSCVLVQRQGKWQTKDCRRAKPHNYVCSRKL

SEQ ID NO: 5560 - protein, 2139 aa, Homo Sapiens
MAGASRHPTGTPRQLLVALACLLLSRPALQGRASSLGTEPDPALYLPARGALDGTRPDGPSVLIANPGLRVPLGRSLWLDPLRDLVIGVQPGDRCEVTVLDALPRLKGALSPRRFPCTFGPRQVQYTHFGSHSPGRARVLLQLRYDAPTHTLVLPFTLAVDLVFSQLELVTRNRPLVVEKLRSWSRAIDRRVLDFASLKSGATATRRCRLTPLPHEDGPLPKYGRLVDAVGAPLPRGKGVDCEAFLRAGVRYQHTATSSPNRDYVPMMVELLGPEGQDAGSAGVLVREHFQLLVRIRGGAENTPPRPSFMATMMMEVDPLVLTALTPDALAAEDVESDPGDLVFNILNAPTHPPGHPGQQGYVVSTDDPLGLPVSFFTQQELRELKIAYQPPAENSHGERLFQLELEVVDGDGAASDPFAFMVTVKSMNTLVPVASHNRGLVLFEGQSRPLSSTHSIPISDKDNLEEVKMAAVRGLRHGQLVVFGAPAGCKYFTPADLAAGRVVYQHDGSNTYSDNIIFRMEDGHHQVDFLFPLTILPVDDEPPMVNTNTGLSLTEGQVVQISPFVLSATDIDSEDSTIHFVLENQPLKGNEEEPQWELAPGSSHSGHYLGDLLLQQAELPLSTEDEDWHYMEKEGLYEKVVTEWLQRDIMEGRLFYRHLGPHSPQSVMVQLAFHVQDDHDPPNLSKQHIFTIKVQPVDILSPQLYPGTTLEMTVQEYQLTHFQKNFLRYIDQDSDDQNLWYTLLTLPTDTDGNHQVRAGEIVLTDSPDTLIMHFTQAQVNQHKVAYQPPQKLGIAPRVVQFTYQVEDAAGNSVPGTFTLFLQPVDNQPPEVTNRGFAILEGGSFNLSSNELHVTDPDTDIDQIVFILVRGPQHGHLQYFKRCMVPGESFMQADVINGSVSYQHGRDQTTTSDTFHLEVSDGVHHIPITIPISVHPNVANRSPRISLRSSSLLDVSIDVLENKATEITMGVIHGKRKDVGDLMLSFIVKDSPKLGTILVNGLPTERFTQEDLINGRVAYAHTAGEVGFQKQHDAFSLILSKDSYQWVVGNSIIEKVQVQVTVLPVDNVGPKVFVGESFIVYEGEKNSLTLQHLHVEDVDTHQDELLCTVTSQPASGYLEKIASAPGSKMSQSGSPISAFSLRDIQVRHINYVQSIHKGVEPQEDQFTFYCSDGINFSPNVFFPIIILPTNDEQPKLFAHEFKVLEGMSLVIDTQLLNGADADLPPNELHFQLTALPRHGRIIQQLATGSQPIHSFTLKEIQEASTIVYEHDDSETKEDSFEVWLSDGKHTTHRKVPIVVTLVDDETPHLTVNNGLKVEKGHSEIITNRILKATDLDSDDKSLSFVLHSGPQQGLLQRLRKPRGEVRNNLTLGMNFTQDEINRGLICYIHTGQEGIVDIIKFDVTDGVNTLTDHYFYVTIGNLDSVFPEVISKRITLIEGARVTLTNNLLTNSDINSSDEHHFSITRAPSLGHLESSDYAGEPIASFTQLQLASNKISYVHTSNDEKKMDSFEFQVIGELYPVFRTFRIFITDVDNKKPILTIHRLTLQKEDSQLITLLELTVEDSDTPDDLILFTITQVPMHGKILYNGSRPVTTFTKQDLNKNLISYKHDGSETTEDSFSLTVTDGTHTDFYVLPDTALATHKPQVMRVQIRSLDNRLPQITTNRGAPALKRLHTGHMGFLITSKSLKAEDQDSPHRLLKYKVTRGPEHGFIIKTGLGNQSTRVFTQADIDEMKISYVLNEGSNASKDIFYFSVEDNGGNKLTNQPFHLNWAWICLEKEYYIVDEDSTFLEVTLTRRGYLGETSFISIGTKDETAKKDKDFKWKTNKQIQFNPGQTTATWRVRIIPDNEYETSETFQIILSEPLMAVLEFPEMATVEIVDPGDESTVYIPEAEYKIEEDIGELLIPVRRSGDASQELIVICSTRQGSATGTISSTVLFSDYISRPEDHTSILHFDKNETQKTCQVLIIDDSLYEEEESFSVSLRLPVGGQLGARFPTTKVTILADRYDEPVLHFGDAEYHVNESARYVEVCVWRRGTDLSQPSSIAVRSRKSEQESAEAGTDYVGISRNLDFAPGVRMQTFQVTILDDLGQPTLEGPEKFELLLQMPMGAVLGEPNKTTIFIEDTITDCKQSACSSFD

SEQ ID NO: 5561 - protein, 1284 aa, Homo Sapiens
MHVFIVGMSLSSVTLASALQVRGEALSEEEIWSLLFLAAEQLLEDLRNDSSDYVVCPWSALLSAAGSLSFQGRVSHIEAAPFKAPELLQGQSEDEQPDASQPLQLCEPLHSILLTMCEDQPHRRCTLQSVLEACRVHEKEVSVYPAPAGLHIRRLVGLVLGTISEVEKRVVEESSSVQQNRSYLLRKRLRGTSSESPAAQAPECLHPCRVSERSTETQSSPEPHWSTLTHSHCSLLVNRALPGADPQDQQAGRRLSSGSVHSAADSSWPTTPSQRGFLQRRSKFSRPEFILLAGEAPMTLHLPGSVVTKKGKSYLALRDLCVVLLNGQHLEVKCDVESTVGAVFNAVTSFANLEELTYFGLAYMKSKEFFFLDSETRLCKIAPEGWREQPQKTSMNTFTLFLRIKFFVSHYGLLQHSLTRHQFYLQLRKDILEERLYCNEEILLQLGVLALQAEFGNYPKEVESKPYFHVEDYIPASLIERMTALRVQVEVSEMHRLSSALWGEDAELKFLRVTQQLPEYGVLVHQVFSEKRRPEEEMALGICAKGVIVYEVKNNSRIAMLRFQWRETGKISTYQKKFTITSSVTGKKHTFVTDSAKTSKYLLDLCSAQHGFNAQMGSGQPSHVLFDHDKFVQMANLSPAHQARSKPLIWIQRLSCSENELFVSRLQGAAGGLLSTSMDNFNVDGSKEAGAEGIGRSPCTGREQLKSACVIQKPMTWDSLSGPPVQSMHAGSKNNRRKSFIAEPGREIVRVTLKRDPHRGFGFVINEGEYSGQADPGIFISSIIPGGPAEKAKTIKPGGQILALNHISLEGFTFNMAVRMIQNSPDNIELIISQSKGVGGNNPDEEKNSTANSGVSSTDILSFGYQGSLLSHTQDQDRNTEELDMAGVQSLVPRLRHQLSFLPLKGAGSSCPPSPPEISAGEIYFVELVKEDGTLGFSVTGGINTSVPYGGIYVKSIVPGGPAAKEGQILQGDRLLQVDGVILCGLTHKQAVQCLTGPGQVARLVLERRVPRSTQQCPSANDSMGDERTAVSLVTALPGRPSSCVSVTDGPKFEVKLKKNANGLGFSFVQMEKESCSHLKSDLVRIKRLFPGQPAEENGAIAAGDIILAVNGRSTEGLIFQEVLHLLRGAPQEVTLLLCRPPPGALPELEQEWQTPELSADKEFTRATCTDSCTSPILDQEDSWRDSASPDAGEGLGLRPESSQKAIREAQWGQNRERPWASSLTHSPESHPHLCKLHQERDESTLATSLEKDVRQNCYSVCDIMRLGRYSFSSPLTRLSTDIF

SEQ ID NO: 5562 - protein, 66 aa, Homo Sapiens
MQPLTKDAGMSLSSVTLASALQVRGEALSEEEIWSLLFLAAEQLLEDLRNAPAALRAPALHPADHV

SEQ ID NO: 5563 - protein, 1309 aa, Homo Sapiens
MQPLTKDAGMSLSSVTLASALQVRGEALSEEEIWSLLFLAAEQLLEDLRNDSSDYVVCPWSALLSAAGSLSFQGRVSHIEAAPFKAPELLQGQSEDEQPDASQMHVYSLGMTLYWSAGFHVPPHQPLQLCEPLHSILLTMCEDQPHRRCTLQSVLEACRVHEKEVSVYPAPAGLHIRRLVGLVLGTISEVEKRVVEESSSVQQNRSYLLRKRLRGTSSESPAAQAPECLHPCRVSERSTETQSSPEPHWSTLTHSHCSLLVNRALPGADPQDQQAGRRLSSGSVHSAADSSWPTTPSQRGFLQRRSKFSRPEFILLAGEAPMTLHLPGSVVTKKGKSYLALRDLCVVLLNGQHLEVKCDVESTVGAVFNAVTSFANLEELTYFGLAYMKSKEFFFLDSETRLCKIAPEGWREQPQKTSMNTFTLFLRIKFFVSHYGLLQHSLTRHQFYLQLRKDILEERLYCNEEILLQLGVLALQAEFGNYPKEQVESKPYFHVEDYIPASLIERMTALRVQVEVSEMHRLSSALWGEDAELKFLRVTQQLPEYGVLVHQVFSEKRRPEEEMALGICAKGVIVYEVKNNSRIAMLRFQWRETGKISTYQKKFTITSSVTGKKHTFVTDSAKTSKYLLDLCSAQHGFNAQMGSGQPSHVLFDHDKFVQMANLSPAHQARSKPLIWIQRLSCSENELFVSRLQGAAGGLLSTSMDNFNVDGSKEAGAEGIGRSPCTGREQLKSACVIQKPMTWDSLSGPPVQSMHAGSKNNRRKSFIAEPGREIVRVTLKRDPHRGFGFVINEGEYSGQADPGIFISSIIPGGPAEKAKTIKPGGQILALNHISLEGFTFNMAVRMIQNSPDNIELIISQSKGVGGNNPDEEKNSTANSGVSSTDILSFGYQGSLLSHTQDQDRNTEELDMAGVQSLVPRLRHQLSFLPLKGAGSSCPPSPPEISAGEIYFVELVKEDGTLGFSVTGGINTSVPYGGIYVKSIVPGGPAAKEGQILQGDRLLQVDGVILCGLTHKQAVQCLTGPGQVARLVLERRVPRSTQQCPSANDSMGDERTAVSLVTALPGRPSSCVSVTDGPKFEVKLKKNANGLGFSFVQMEKESCSHLKSDLVRIKRLFPGQPAEENGAIAAGDIILAVNGRSTEGLIFQEVLHLLRGAPQEVTLLLCRPPPGALPELEQEWQTPELSADKEFTRATCTDSCTSPILDQEDSWRDSASPDAGEGLGLRPESSQKAIREAQWGQNRERPWASSLTHSPESHPHLCKLHQERDESTLATSLEKDVRQNCYSVCDIMRLGRYSFSSPLTRLSTDIF

SEQ ID NO: 5564 - protein, 1397 aa, Homo Sapiens
MQPLTKDAGMSLSSVTLASALQVRGEALSEEEIWSLLFLAAEQLLEDLRNDSSDYVVCPWSALLSAAGSLSFQGRVSHIEAAPFKAPELLQGQSEDEQPDASQMHVYSLGMTLYWSAGFHVPPHQPLQLCEPLHSILLTMCEDQPHRRCTLQSVLEACRVHEKEVSVYPAPAGLHIRRLVGLVLGTISEVEKRVVEESSSVQQNRSYLLRKRLRGTSSESPAAQAPECLHPCRVSERSTETQSSPEPHWSTLTHSHCSLLVNRALPGADPQDQQAGRRLSSGSVHSAADSSWPTTPSQRGFLQRRSKFSRPEFILLAGEAPMTLHLPGSVVTKKGKSYLALRDLCVVLLNGQHLEVKCDVESTVGAVFNAVTSFANLEELTYFGLAYMKSKEFFFLDSETRLCKIAPEGWREQPQKTSMNTFTLFLRIKFFVSHYGLLQHSLTRHQFYLQLRKDILEERLYCNEEILLQLGVLALQAEFGNYPKEQVESKPYFHVEDYIPASLIERMTALRVQVEVSEMHRLSSALWGEDAELKFLRVTQQLPEYGVLVHQVFSEKRRPEEEMALGICAKGVIVYEVKNNSRIAMLRFQWRETGKISTYQKKFTITSSVTGKKHTFVTDSAKTSKYLLDLCSAQHGFNAQMGSGQPSHVLFDHDKFVQMANLSPAHQARSKPLIWIQRLSCSENELFVSRLQGAAGGLLSTSMDNFNVDGSKEAGAEGIGRSPCTGREQLKSACVIQKPMTWDSLSGPPVQSMHAGSKNNRRKSFIAEPGREIVRVTLKRDPHRGFGFVINEGEYSGQADPGIFISSIIPGGPAEKAKTIKPGGQILALNHISLEGFTFNMAVRMIQNSPDNIELIISQSKGVGGNNPDEEKNSTANSGVSSTDILSFGYQGSLLSHTQDQDRNTEELDMAGVQSLVPRLRHQLSFLPLKGAGSSCPPSPPEISAGEIYFVELVKEDGTLGFSVTGGINTSVPYGGIYVKSIVPGGPAAKEGQILQGDRLLQVDGVILCGLTHKQAVQCLTGPGQVARLVLERRVPRSTQQCPSANDSMGDERTAVSLVTALPGRPSSCVSVTDGPKFEVKLKKNANGLGFSFVQMEKESCSHLKSDLVRIKRLFPGQPAEENGAIAAGDIILAVNGRSTEGLIFQEVLHLLRGAPQEVTLLLCRPPPGALPELEQEWQTPELSADKEFTRATCTDSCTSPILDQEDSWRDSASPDAGEGLGLRPESSQKAIREAQWGQNRERPWASSLTHSPESHPHLCKLHQERDESTLATSLEKDVRQNCYSVCDIMRLGSPELDGEDGEGDMYHPCGAPSPTSEDEEYLTINSTCQGQLPCEECLEADSGTIPLPQFCSWGTVPESLPPEESPESGSEWEDLEEPVALEYGALRSLSFGGLNV

SEQ ID NO: 5565 - protein, 325 aa, Homo Sapiens
MVCGSPGGMLLLRAGLLALAALCLLRVPGARAAACEPVRIPLCKSLPWNMTKMPNHLHHSTQANAILAIEQFEGLLGTHCSPDLLFFLCAMYAPICTIDFQHEPIKPCKSVCERARQGCEPILIKYRHSWPENLACEELPVYDRGVCISPEAIVTADGADFPMDSSNGNCRGASSERCKCKPIRATQKTYFRNNYNYVIRAKVKEIKTKCHDVTAVVEVKEILKSSLVNIPRDTVNLYTSSGCLCPPLNVNEEYIIMGYEDEERSRLLLVEGSIAEKWKDRLGKKVKRWDMKLRHLGLSKSDSSNSDSTQSQKSGRNSNPRQARN

SEQ ID NO: 5566 - protein, 129 aa, Homo Sapiens
MKTLQFFFLFCCWKAICCNSCELTNITIAIEKEECRFCISINTTWCAGYCYTRDLVYKDPARPKIQKTCTFKELVYETVRVPGCAHHADSLYTYPVATQCHCGKCDSDSTDCTVRGLGPSYCSFGEMKE

SEQ ID NO: 5567 - protein, 129 aa, Homo Sapiens; identical to SEQ ID NO: 5566

SEQ ID NO: 5568 - protein, 129 aa, Homo Sapiens; identical to SEQ ID NO: 5566

SEQ ID NO: 5569 - protein, 695 aa, Homo Sapiens
MALLLVSLLAFLSLGSGCHHRICHCSNRVFLCQESKVTEIPSDLPRNAIELRFVLTKLRVIQKGAFSGFGDLEKIEISQNDVLEVIEADVFSNLPKLHEIRIEKANNLLYINPEAFQNLPNLQYLLISNTGIKHLPDVHKIHSLQKVLLDIQDNINIHTIERNSFVGLSFESVILWLNKNGIQEIHNCAFNGTQLDELNLSDNNNLEELPNDVFHGASGPVILDISRTRIHSLPSYGLENLKKLRARSTYNLKKLPTLEKLVALMEASLTYPSHCCAFANWRRQISELHPICNKSILRQEVDYMTQARGQRSSLAEDNESSYSRGFDMTYTEFDYDLCNEVVDVTCSPKPDAFNPCEDIMGYNILRVLIWFISILAITGNIIVLVILTTSQYKLTVPRFLMCNLAFADLCIGIYLLLIASVDIHTKSQYHNYAIDWQTGAGCDAAGFFTVFASELSVYTLTAITLERWHTITHAMQLDCKVQLRHAASVMVMGWIFAFAAALFPIFGISSYMKVSICLPMDIDSPLSQLYVMSLLVLNVLAFVVICGCYIHIYLTVRNPNIVSSSSDTRIAKRMAMLIFTDFLCMAPISFFAISASLKVPLITVSKAKILLVLFHPINSCANPFLYAIFTKNFRRDFFILLSKCGCYEMQAQIYRTETSSTVHNTHPRNGHCSSAPRVTSGSTYILVPLSHLAQN

SEQ ID NO: 5570 - protein, 278 aa, Homo Sapiens
MALLLVSLLAFLSLGSGCHHRICHCSNRVFLCQESKVTEIPSDLPRNAIELRFVLTKLRVIQKGAFSGFGDLEKIEISQNDVLEVIEADVFSNLPKLHEIRIEKANNLLYINPEAFQNLPNLQYLLISNTGIKHLPDVHKIHSLQKVLLDIQDNINIHTIERNSFVGLSFESVILWLNKNGIQEIHNCAFNGTQLDELNLSDNNNLEELPNDVFHGASGPVILSELHPICNKSILRQEVDYMTQARGQRSSLAEDNESSYSRGFDMTYTEFDYDLCNE

SEQ ID NO: 5571 - protein, 669 aa, Homo Sapiens
MALLLVSLLAFLSLGSGCHHRICHCSNRVFLCQESKVTEIPSDLPRNAIELRFVLTKLRVIQKGAFSGFGDLEKIEISQNDVLEVIEADVFSNLPKLHEIRIEKANNLLYINPEAFQNLPNLQYLLISNTGIKHLPDVHKIHSLQKVLLWLNKNGIQEIHNCAFNGTQLDELNLSDNNNLEELPNDVFHGASGPVILDISRTRIHSLPSYGLENLKKLRARSTYNLKKLPTLEKLVALMEASLTYPSHCCAFANWRRQISELHPICNKSILRQEVDYMTQARGQRSSLAEDNESSYSRGFDMTYTEFDYDLCNEVVDVTCSPKPDAFNPCEDIMGYNILRVLIWFISILAITGNIIVLVILTTSQYKLTVPRFLMCNLAFADLCIGIYLLLIASVDIHTKSQYHNYAIDWQTGAGCDAAGFFTVFASELSVYTLTAITLERWHTITHAMQLDCKVQLRHAASVMVMGWIFAFAAALFPIFGISSYMKVSICLPMDIDSPLSQLYVMSLLVLNVLAFVVICGCYIHIYLTVRNPNIVSSSSDTRIAKRMAMLIFTDFLCMAPISFFAISASLKVPLITVSKAKILLVLFHPINSCANPFLYAIFTKNFRRDFFILLSKCGCYEMQAQIYRTETSSTVHNTHPRNGHCSSAPRVTSGSTYILVPLSHLAQN

SEQ ID NO: 5572 - protein, 152 aa, Homo Sapiens
MALLLVSLLAFLSLGSGCHHRICHCSNRVFLCQESKVTEIPSDLPRNAIELRFVLTKLRVIQKGAFSGFGDLEKIEISQNDVLEVIEADVFSNLPKLHEIRIEKANNLLYINPEAFQNLPNLQYLSFSSFVLENAKVENGDHRAFSDRTNAL

SEQ ID NO: 5573 - protein, 215 aa, Homo Sapiens
GPVCGLDGKTYRNECALLKARCKEQPELEVQYQGRCKKTCRDVFCPGSSTCVVDQTNNAYCVTCNRICPEPASSEQYLCGNDGVTYSSACHLRKATCLLGRSIGLAYEGKCITKSCEDIQCTGGKKCLWDFKVGRGRCSLCDELCPDSKSDEPVCASDNATYASECAMKEAACSSGVLLEVKHSGSCNSISEDTEEEEEDEDQDYSFPISSILEW

SEQ ID NO: 5574 - protein, 344 aa, Homo Sapiens
MVRARHQPGGLCLLLLLLCQFMEDRSAQAGNCWLRQAKNGRCQVLYKTELSKEECCSTGRLSTSWTEEDVNDNTLFKWMIFNGGAPNCIPCKETCENVDCGPGKKCRMNKKNKPRCVCAPDCSNITWKGPVCGLDGKTYRNECALLKARCKEQPELEVQYQGRCKKTCRDVFCPGSSTCVVDQTNNAYCVTCNRICPEPASSEQYLCGNDGVTYSSACHLRKATCLLGRSIGLAYEGKCIKAKSCEDIQCTGGKKCLWDFKVGRGRCSLCDELCPDSKSDEPVCASDNATYASECAMKEAACSSGVLLEVKHSGSCNSISEDTEEEEEDEDQDYSFPISSILEW

SEQ ID NO: 5575 - protein, 317 aa, Homo Sapiens
MVRARHQPGGLCLLLLLLCQFMEDRSAQAGNCWLRQAKNGRCQVLYKTELSKEECCSTGRLSTSWTEEDVNDNTLFKWMIFNGGAPNCIPCKETCENVDCGPGKKCRMNKKNKPRCVCAPDCSNITWKGPVCGLDGKTYRNECALLKARCKEQPELEVQYQGRCKKTCRDVFCPGSSTCVVDQTNNAYCVTCNRICPEPASSEQYLCGNDGVTYSSACHLRKATCLLGRSIGLAYEGKCIKAKSCEDIQCTGGKKCLWDFKVGRGRCSLCDELCPDSKSDEPVCASDNATYASECAMKEAACSSGVLLEVKHSGSCN

SEQ ID NO: 5576 - protein, 102 aa, Homo Sapiens
  misc_feature (1)..(1): Xaa can be any naturally occurring amino acid
XSACHLRKATCLLGRSIGLAYEGKCITKSCEDIQCTGGKKCLWDFKVGRGRCSLCDELCPDSKSDEPVCASDNATYASECAMKEAACSSGVLLEVKHSGSCN

SEQ ID NO: 5577 - protein, 140 aa, Homo Sapiens
MWKRWLALALALVAVAWVRAEEELRSKSKICANVFCGAGRECAVTEKGEPTCLCIEQCKPHKRPVCGSNGKTYLNHCELHRDACLTGSKIQVDYDGHCKEKKSVSPSASPVVCYQSNRDELRRRIIQWLEAEIIPDGWFS

SEQ ID NO: 5578 - protein, 308 aa, Homo Sapiens
MWKRWLALALALVAVAWVRAEEELRSKSKICANVFCGAGRECAVTEKGEPTCLCIEQCKPHKRPVCGSNGKTYLNHCELHRDACLTGSKIQVDYDGHCKEKKSVSPSASPVVCYQSNRDELRRRIIQWLEAEIIPDGWFSKGSNYSEILDKYFKNFDNGDSRLDSSEFLKFVEQNETAINITTYPDQENNKLLRGLCVDALIELSDENADWKLSFQEFLKCLNPSFNPPEKKCALEDETYADGAETEVDCNRCVCACGNWVCTAMTCDGKNQKGAQTQTEEEMTRYVQELQKHQETAEKTKRVSTKEI

SEQ ID NO: 5579 - protein, 273 aa, Homo Sapiens
MWKRWLALALALVAVAWVRAEQCKPHKRPVCGSNGKTYLNHCELHRDACLTGSKIQVDYDGHCKEKKSVSPSASPVVCYQSNRDELRRRIIQWLEAEIIPDGWFSKGSNYSEILDKYFKNFDNGDSRLDSSEFLKFVEQNETAINITTYPDQENNKLLRGLCVDALIELSDENADWKLSFQEFLKCLNPSFNPPEKKCALEDETYADGAETEVDCNRCVCACGNWVCTAMTCDGKNQKGAQTQTEEEMTRYVQELQKHQETAEKTKRVSTKEI

SEQ ID NO: 5580 - protein, 20 aa, Homo Sapiens
  misc_feature (1)..(1): Xaa can be any naturally occurring amino acid
XSFQEFLKCLNPSFNPPEKK

SEQ ID NO: 5581 - protein, 84 aa, Homo Sapiens
MLGGRPRCECAPDCSGLPARLQVCGSDGATYRDECELRAARCRGHPDLSVMYRGRCRKSCEHVVCPRPQSCVVDQTGSAHCVVC

SEQ ID NO: 5582 - protein, 263 aa, Homo Sapiens
MRPGAPGPLWPLPWGALAWAVGFVSSMGSGNPAPGGVCWLQQGQEATCSLVLQTDVTRAECCASGNIDTAWSNLTHPGNKINLLGFLGLVHCLPCKDSCDGVECGPGKACRMLGGRPRCECAPDCSGLPARLQVCGSDGATYRDECELRAARCRGHPDLSVMYRGRCRKSCEHVVCPRPQSCVVDQTGSAHCVVCRAAPCPVPSSPGQELCGNNNVTYISSCHMRQATCFLGRSIGVRHAGSCAGTPEEPPGGESAEEEENFV

SEQ ID NO: 5583 - protein, 92 aa, Homo Sapiens
MRQATCFLGRSIGVRHAGSCAGADAGRGHRPVLGAGEPPALRPQCSYRPLQAPLRSRQVVSLQKRKRTSCEPAGQAWAWCPRPPIIPCYLLP

SEQ ID NO: 5584 - protein, 40 aa, Homo Sapiens
MRQATCFLGRSIGVRHAGSCAGTPEEPPGGESAEEEENFV

SEQ ID NO: 5585 - protein, 40 aa, Homo Sapiens; identical to SEQ ID NO: 5584

SEQ ID NO: 5586 - protein, 40 aa, Homo Sapiens; identical to SEQ ID NO: 5584

SEQ ID NO: 5587 - protein, 673 aa, Homo Sapiens
MKPGGFWLHLTLLGASLPAALGWMDPGTSRGPDVGVGESQAEEPRSFEVTRREGLSSHNELLASCGKKFCSRGSRCVLSLAPEDRVSVTTVTVGLSTVLTCAVHGDLRPPIIWKRNGLTLNFLDLEDINDFGEDDSLYITKVTTIHMGNYTCHASGHEQLFQTHVLQVNVPPVIRVYPESQAQEPGVAASLRCHAEGIPMPRITWLKNGVDVSTQMSKQLSLLANGSELHISSVRYEDTGAYTCIAKNEVGVDEDISSLFIEDSARKTLANILWREEGLSVGNMFYVFSDDGIIVIHPVDCEIQRHLKPTEKIFMSYEEICPQREKNATQPCQWVSAVNVRNRYIYVAQPALSRVLVVDIQAQKVLQSIGVDPLPAKLSYDKSHDQVWVLSWGDVHKSRPSLQVITEASTGQSQHLIRTPFAGVDDFFIPPTNLIINHIRFGFIFNKSDPAVHKVDLETMMPLKTIGLHHHGCVPQAMAHTHLGGYFFIQCRQDSPASAARQLLVDSVTDSVLGPNGDVTGTPHTSPDGRFIVSAAADSPWLHVQEITVRGEIQTLYDLQINSGISDLAFQRSFTESNQYNIYAALHTEPDLLFLELSTGKVGMLKNLKEPPAGPAQPWGGTHRIMRDSGLFGQYLLTPARESLFLINGRQNTLRCEVSGIKGGTTVVWVGEV

SEQ ID NO: 5588 - protein, 842 aa, Homo Sapiens
MKPGGFWLHLTLLGASLPAALGWMDPGTSRGPDVGVGESQAEEPRSFEVTRREGLSSHNELLASCGKKFCSRGSRCVLSRKTGEPECQCLEACRPSYVPVCGSDGRFYENHCKLHRAACLLGKRITVIHSKDCFLKGDTCTMAGYARLKNVLLALQTRLQPLQEGDSRQDPASQKRLLVESLFRDLDADGNGHLSSSELAQHVLKKQDLDEDLLGCSPGDLLRFDDYNSDSSLTLREFYMAFQVVQLSLAPEDRVSVTTVTVGLSTVLTCAVHGDLRPPIIWKRNGLTLNFLDLEDINDFGEDDSLYITKVTTIHMGNYTCHASGHEQLFQTHVLQVNVPPVIRVYPESQAQEPGVAASLRCHAEGIPMPRITWLKNGVDVSTQMSKQLSLLANGSELHISSVRYEDTGAYTCIAKNEVGVDEDISSLFIEDSARKTLANILWREEGLSVGNMFYVFSDDGIIVIHPVDCEIQRHLKPTEKIFMSYEEICPQREKNATQPCQWVSAVNVRNRYIYVAQPALSRVLVVDIQAQKVLQSIGVDPLPAKLSYDKSHDQVWVLSWGDVHKSRPSLQVITEASTGQSQHLIRTPFAGVDDFFIPPTNLIINHIRFGFIFNKSDPAVHKVDLETMMPLKTIGLHHHGCVPQAMAHTHLGGYFFIQCRQDSPASAARQLLVDSVTDSVLGPNGDVTGTPHTSPDGRFIVSAAADSPWLHVQEITVRGEIQTLYDLQINSGISDLAFQRSFTESNQYNIYAALHTEPDLLFLELSTGKVGMLKNLKEPPAGPAQPWGGTHRIMRDSGLFGQYLLTPARESLFLINGRQNTLRCEVSGIKGGTTVVWVGEV

SEQ ID NO: 5589 - protein, 157 aa, Homo Sapiens
MNPVPQMEMQKSPVFCVAHAGSCRPELFLFGHLGSSWGLDLKEEEPRSFEVTRREGLSSHNELLASCGKKFCSRGSRCVLSRKTGEPECQCLEACRPSYVPVCGSDGRFYENHCKLHRAACLLGKRITVIHSKDCFLKGDTCTMAGYARLKNVLLAL

SEQ ID NO: 5590 - protein, 846 aa, Homo Sapiens
MFKCWSVVLVLGFIFLESEGRPTKEGGYGLKSYQPLMRLRHKEKNQESSRVKGFMIQDGPFGSCENKYCGLGRHCVTSRETGQAECACMDLCKRHYKPVCGSDGEFYENHCEVHRAACLKKQKITIVHNEDCFFKGDKCKTTEYSKMKNMLLDLQNQKYIMQENENPNGDDISRKKLLVDQMFKYFDADSNGLVDINELTQVIKQEELGKDLFDCTLYVLLKYDDFNADKHLALEEFYRAFQVIQLSLPEDQKLSITAATVGQSAVLSCAIQGTLRPPIIWKRNNIILNNLDLEDINDFGDDGSLYITKVTTTHVGNYTCYADGYEQVYQTHIFQVNVPPVIRVYPESQAREPGVTASLRCHAEGIPKPQLGWLKNGIDITPKLSKQLTLQANGSEVHISNVRYEDTGAYTCIAKNEAGVDEDISSLFVEDSARKTLANILWREEGLGIGNMFYVFYEDGIKVIQPIECEFQRHIKPSEKLLGFQDEVCPKAEGDEVQRCVWASAVNVKDKFIYVAQPTLDRVLIVDVQSQKVVQAVSTDPVPVKLHYDKSHDQVWVLSWGTLEKTSPTLQVITLASGNVPHHTIHTQPVGKQFDRVDDFFIPTTTLIITHMRFGFILHKDEAALQKIDLETMSYIKTINLKDYKCVPQSLAYTHLGGYYFIGCKPDSTGAVSPQVMVDGVTDSVIGFNSDVTGTPYVSPDGHYLVSINDVKGLVRVQYITIRGEIQEAFDIYTNLHISDLAFQPSFTEAHQYNIYGSSSTQTDVLFVELSSGKVKMIKSLKEPLKAEEWPWNRKNRQIQDSGLFGQYLMTPSKDSLFILDGRLNKLNCEITEVEKGNTVIWVGDA

SEQ ID NO: 5591 - protein, 837 aa, Homo Sapiens
MFKCWSVVLVLGFIFLESEGRPTKEGGYGLKSYQPLMRLRHKEKNQESSRVKGFMIQDGPFGSCENKYCGLGRHCVTSRETGQAECACMDLCKRHYKPVCGSDGEFYENHCEVHRAACLKKQKITIVHNEDCFFKGDKCKTTEYSKMKNMLLDLQNQKYIMQENENPNGDDISRKKLLVDQMFKYFDADSNGLVDINELTQVIKQEELGKDLFDCTLYVLLKYDDFNADKHLALEEFYRAFQVIQLSLPEDQKLSITAATVGQSAVLSCAIQGTLRPPIIWKRNNIILNNLDLEDINDFGDDGSLYITKVTTTHVGNYTCYADGYEQVYQTHIFQVNVPPVIRVYPESQAREPGVTASLRCHAEGIPKPQLGWLKNGIDITPKLSKQLTLQANGSEVHISNVRYEDTGAYTCIAKNEAGVDEDISSLFVEDSARKTRLGIGNMFYVFYEDGIKVIQPIECEFQRHIKPSEKLLGFQDEVCPKAEGDEVQRCVWASAVNVKDKFIYVAQPTLDRVLIVDVQSQKVVQAVSTDPVPVKLHYDKSHDQVWVLSWGTLEKTSPTLQVITLASGNVPHHTIHTQPVGKQFDRVDDFFIPTTTLIITHMRFGFILHKDEAALQKIDLETMSYIKTINLKDYKCVPQSLAYTHLGGYYFIGCKPDSTGAVSPQVMVDGVTDSVIGFNSDVTGTPYVSPDGHYLVSINDVKGLVRVQYITIRGEIQEAFDIYTNLHISDLAFQPSFTEAHQYNIYGSSSTQTDVLFVELSSGKVKMIKSLKEPLKAEEWPWNRKNRQIQDSGLFGQYLMTPSKDSLFILDGRLNKLNCEITEVEKGNTVIWVGDA

SEQ ID NO: 5592 - protein, 847 aa, Homo Sapiens
MFKCWSVVLVLGFIFLESEGRPTKEGGYGLKSYQPLMRLRHKQEKNQESSRVKGFMIQDGPFGSCENKYCGLGRHCVTSRETGQAECACMDLCKRHYKPVCGSDGEFYENHCEVHRAACLKKQKITIVHNEDCFFKGDKCKTTEYSKMKNMLLDLQNQKYIMQENENPNGDDISRKKLLVDQMFKYFDADSNGLVDINELTQVIKQEELGKDLFDCTLYVLLKYDDFNADKHLALEEFYRAFQVIQLSLPEDQKLSITAATVGQSAVLSCAIQGTLRPPIIWKRNNIILNNLDLEDINDFGDDGSLYITKVTTTHVGNYTCYADGYEQVYQTHIFQVNVPPVIRVYPESQAREPGVTASLRCHAEGIPKPQLGWLKNGIDITPKLSKQLTLQANGSEVHISNVRYEDTGAYTCIAKNEAGVDEDISSLFVEDSARKTLANILWREEGLGIGNMFYVFYEDGIKVIQPIECEFQRHIKPSEKLLGFQDEVCPKAEGDEVQRCVWASAVNVKDKFIYVAQPTLDRVLIVDVQSQKVVQAVSTDPVPVKLHYDKSHDQVWVLSWGTLEKTSPTLQVITLASGNVPHHTIHTQPVGKQFDRVDDFFIPTTTLIITHMRFGFILHKDEAALQKIDLETMSYIKTINLKDYKCVPQSLAYTHLGGYYFIGCKPDSTGAVSPQVMVDGVTDSVIGFNSDVTGTPYVSPDGHYLVSINDVKGLVRVQYITIRGEIQEAFDIYTNLHISDLAFQPSFTEAHQYNIYGSSSTQTDVLFVELSSGKVKMIKSLKEPLKAEEWPWNRKNRQIQDSGLFGQYLMTPSKDSLFILDGRLNKLNCEITEVEKGNTVIWVGDA

SEQ ID NO: 5593 - protein, 138 aa, Homo Sapiens
MSSSRVGLRLAACLLNVSEAGRKYIVENIAKAALLDKNGKKHPQVSVLNIFSDQDYKRSVITIATSVDKLGLAEDLVLHVPGCSVFLFGEADLPEKRSLVQRRKQLGWFTRRDFSALQPDLGAAPSQRCGLTACFRAL

SEQ ID NO: 5594 - protein, 147 aa, Homo Sapiens
MSSSRVGLRLAACLLNVSEAGRKYIVENIAKAALLDKNGKKHPQVSVLNIFSDQDYKRSVITIATSVDKLGLAEDLVLHVPGCSVFLFGEADLPEKRSLVQRRKQLGWFTRRDFSALQPDLGAAPSQRCGLTGSEHGFCFALFFFFF

SEQ ID NO: 5595 - protein, 114 aa, Homo Sapiens
MSSSRVGLRLAACLLNVSEAGRKYIVENIAKAALLDKNGKKHPQVSVLNIFSDQDYKRSVITIATSVDKLGSSVLAACLEAFQAIDMEVQEGIHPCLGAVDLIPIYPLSGVTVE

SEQ ID NO: 5596 - protein, 77 aa, Homo Sapiens
MSSSRVGLRLAACLLNVSEAGRKYIVENIAKAALLDKNGKKHPQVSVLNIFSDQDYKRSVITIATSVDKLVDKRNQA

SEQ ID NO: 5597 - protein, 466 aa, Homo Sapiens
MRAPGMRSRPAGPALLLLLLFLGAAESVRRAQPPRRYTPDWPSLDSRPLPAWFDEAKFGVFIHWGVFSVPAWGSEWFWWHWQGEGRPQYQRFMRDNYPPGFSYADFGPQFTARFFHPEEWADLFQAAGAKYVVLTTKHHEGFTNWPSPVSWNWNSKDVGPHRDLVGELGTALRKRNIRYGLYHSLLEWFHPLYLLDKKNGFKTQHFVSAKTMPELYDLVNSYKPDLIWSDGEWECPDTYWNSTNFLSWLYNDSPVKDEVVVNDRWGQNCSCHHGGYYNCEDKFKPQSLPDHKWEMCTSIDKFSWGYRRDMALSDVTEESEIISELVQTVSLGGNYLLNIGPTKDGLIVPIFQERLLAVGKWLSINGEAIYASKPWRVQWEKNTTSVWYTSKGSAVYAIFLHWPENGVLNLESPITTSTTKITMLGIQGDLKWSTDPDKGLFISLPQLPPSAVPAEFAWTIKLTGVK

SEQ ID NO: 5598 - protein, 467 aa, Homo Sapiens
MRPQELPRLAFPLLLLLLLLLPPPPCPAHSATRFDPTWESLDARQLPAWFDQAKFGIFIHWGVFSVPSFGSEWFWWYWQKEKIPKYVEFMKDNYPPSFKYEDFGPLFTAKFFNANQWADIFQASGAKYIVLTSKHHEGFTLWGSEYSWNWNAIDEGPKRDIVKELEVAIRNRTDLRFGLYYSLFEWFHPLFLEDESSSFHKRQFPVSKTLPELYELVNNYQPEVLWSDGDGGAPDQYWNSTGFLAWLYNESPVRGTVVTNDRWGAGSICKHGGFYTCSDRYNPGHLLPHKWENCMTIDKLSWGYRREAGISDYLTIEELVKQLVETVSCGGNLLMNIGPTLDGTISVVFEERLRQMGSWLKVNGEAIYETHTWRSQNDTVTPDVWYTSKPKEKLVYAIFLKWPTSGQLFLGHPKAILGATEVKLLGHGQPLNWISLEQNGIMVELPQLTIHQMPCKWGWALALTNVI

SEQ ID NO: 5599 - protein, 109 aa, Homo Sapiens
QLVETVSCGGNLLMNIGPTLDGTISVVFEERLRQMGSWLKVNGEAIYETHTWRSQNDTVTPDVWYTSKPKEKLVYAIFLKWPTSGQLFLGHPKAILGATEVRGNFTLFL

SEQ ID NO: 5600 - protein, 69 aa, Homo Sapiens
KPAHLNANDWATNGVGRKVSHSYGYGLWTQAPWWPWPRIGPQWPPSGSASSTSSPSPKTSGNGSRCGRP

SEQ ID NO: 5601 - protein, 69 aa, Homo Sapiens
MELRPWLLWVVAATGTLVLLAADAQGQKVFTNTWAVRIPGGPAVANSVARKHGFLNLGQIFGDYYHFWH

SEQ ID NO: 5602 - protein, 794 aa, Homo Sapiens
MELRPWLLWVVAATGTLVLLAADAQGQKVFTNTWAVRIPGGPAVANSVARKHGFLNLGQIFGDYYHFWHRGVTKRSLSPHRPRHSRLQREPQVQWLEQQVAKRRTKRDVYQEPTDPKFPQQWYLSGVTQRDLNVKAAWAQGYTGHGIVVSILDDGIEKNHPDLAGNYDPGASFDVNDQDPDPQPRYTQMNDNRHGTRCAGEVAAVANNGVCGVGVAYNARIGGVRMLDGEVTDAVEARSLGLNPNHIHIYSASWGPEDDGKTVDGPARLAEEAFFRGVSQGRGGLGSIFVWASGNGGREHDSCNCDGYTNSIYTLSISSATQFGNVPWYSEACSSTLATTYSSGNQNEKQIVTTDLRQKCTESHTGTSASAPLAAGIIALTLEANKNLTWRDMQHLVVQTSKPAHLNANDWATNGVGRKVSHSYGYGLLDAGAMVALAQNWTTVAPQRKCIIDILTEPKDIGKRLEVRKTVTACLGEPNHITRLEHAQARLTLSYNRRGDLAIHLVSPMGTRSTLLAARPHDYSADGFNDWAFMTTHSWDEDPSGEWVLEIENTSEANNYGTLTKFTLVLYGTAPEGLPVPPESSGCKTLTSSQACVVCEEGFSLHQKSCVQHCPPGFAPQVLDTHYSTENDVETIRASVCAPCHASCATCQGPALTDCLSCPSHASLDPVEQTCSRQSQSSRESPPQQQPPRLPPEVEAGQRLRAGLLPSHLPEVVAGLSCAFIVLVFVTVFLVLQLRSGFSFRGVKVYTMDRGLISYKGLPPEAWQEECPSDSEEDEGRGERTAFIKDQSAL

SEQ ID NO: 5603 - protein, 794 aa, Homo Sapiens; identical to SEQ ID NO: 5602

SEQ ID NO: 5604 - protein, 794 aa, Homo Sapiens; identical to SEQ ID NO: 5602

SEQ ID NO: 5605 - protein, 175 aa, Homo Sapiens
MELRPWLLWVVAATGTLVLLAADAQGQKVFTNTWAVRIPGGPAVANSVARKHGFLNLGQIFGDYYHFWHRGVTKRSLSPHRPRHSRLQREPQWLEQQVAKRRTKRDVYQEPTDPKFPQQWYLSGVTQRDLNVKAAWAQGYTGHGIVVSILDDGIEKNHPDLAGNYDPGASFDVND

SEQ ID NO: 5606 - protein, 216 aa, Homo Sapiens
PNHIHIYSASWGPEDDGKTVDGPARLAEEAFFRGVSQGRGGLGSIFVWASGNGGREHDSCNCDGYTNSIYTLSISSATQFGNVPWYSEACSSTLATTYSSGNQNEKQIVTTDLRQKCTESHTGTSASAPLAAGIIALTLEANKNLTWRDMQHLVVQTSKPAHLNANDWATNGVGRKVSHSYGYGLLDAGAMVALAQNWTTVAPQRKCIIDILTEPK

SEQ ID NO: 5607 - protein, 451 aa, Homo Sapiens
MVELGKFERKEFKSSSLQDGHTKMEEAPTHLNSFLKKEGLTFNRKRKWELDSYPIMLWWSPLTGETGRLGQCGADACFFTINRTYLHHHMTKAFLFYGTDFNIDSLPLPRKAHHDWAVFHEESPKNNYKLFHKPVITLFNYTATFSRHSHLPLTTQYLESIEVLKSLRYLVPLQSKNKLRKRLAPLVYVQSDCDPPSDRDSYVRELMTYIEVDSYGECLRNKDLPQQLKNPASMDADGFYRIIAQYKFILAFENAVCDDYITEKFWRPLKLGVVPVYYGSPSITDWLPSNKSAILVSEFSHPRELASYIRRLDSDDRLYEAYVEWKLKGEISNQRLLTALRERKWGVQDVNQDNYIDAFECMVCTKVWANIRLQEKGLPPKRWEAEDTHLSCPEPTVFAFSPLRTPPLSSLREMWISSFEQSKKEAQALRWLVDRNQNFSSQEFWGLVFKD

SEQ ID NO: 5608 - protein, 451 aa, Homo Sapiens; identical to SEQ ID NO: 5607

SEQ ID NO: 5609 - protein, 479 aa, Homo Sapiens
MVRIQRRKLLASCLCVTATVFLLVTLQVMVELGKFERKEFKSSSLQDGHTKMEEAPTHLNSFLKKEGLTFNRKRKWELDSYPIMLWWSPLTGETGRLGQCGADACFFTINRTYLHHHMTKAFLFYGTDFNIDSLPLPRKAHHDWAVFHEESPKNNYKLFHKPVITLFNYTATFSRHSHLPLTTQYLESIEVLKSLRYLVPLQSKNKLRKRLAPLVYVQSDCDPPSDRDSYVRELMTYIEVDSYGECLRNKDLPQQLKNPASMDADGFYRIIAQYKFILAFENAVCDDYITEKFWRPLKLGVVPVYYGSPSITDWLPSNKSAILVSEFSHPRELASYIRRLDSDDRLYEAYVEWKLKGEISNQRLLTALRERKWGVQDVNQDNYIDAFECMVCTKVWANIRLQEKGLPPKRWEAEDTHLSCPEPTVFAFSPLRTPPLSSLREMWISSFEQSKKEAQALRWLVDRNQNFSSQEFWGLVFKD

SEQ ID NO: 5610 - protein, 492 aa, Homo Sapiens
MAAGPIRVVLVLLGVLSVCAASGHGSVAEREAGGEAEWAEPWDGAVFRPPSALGAVGVTRSSGTPRPGREEAGDLPVLLWWSPGLFPHFPGDSERIECARGACVASRNRRALRDSRTRALLFYGTDFRASAAPLPRLAHQSWALLHEESPLNNFLLSHGPGIRLFNLTSTFSRHSDYPLSLQWLPGTAYLRRPVPPPMERAEWRRRGYAPLLYLQSHCDVPADRDRYVRELMRHIPVDSYGKCLQNRELPTARLQDTATATTEDPELLAFLSRYKFHLALENAICNDYMTEKLWRPMHLGAVPVYRGSPSVRDWMPNNHSVILIDDFESPQKLAEFIDFLDKNDEEYMKYLAYKQPGGITNQFLLDSLKHREWGVNDPLLPNYLNGFECFVCDYELARLDAEKAHAASPGDSPVFEPHIAQPSHMDCPVPTPGFGNVEEIPENDSWKEMWLQDYWQGLDQGEALTAMIHNNETEQTKFWDYLHEIFMKRQHL

SEQ ID NO: 5611 - protein, 476 aa, Homo Sapiens
MAAGPIRVVLVLLGVLSVCAASGHGSVAEREAGGEAEWAEPWDGAVFRPPSALGAVGVTRSSGTPRPGREEAGDLPVLLWWSPGLFPHFPGDSERIECARGACVASRNRRALRDSRTRALLFYGTDFRASAAPLPRLAHQSWALLHEESPLNNFLLSHGPGIRLFNLTSTFSRHSDYPLSLQWLPGTAYLRRPVPPPMERAEWRRRGYAPLLYLQSHCDVPADRDRYVRELMRHIPVDSYGKCLQNRELPTARLQDTATATTEDPELLAFLSRYKFHLALENAICNDYMTEKLWRPMHLGAVPVYRGSPSVRDWMPNNHSVILIDDFESPQKLAEFIDFLDKNDEEYMKYLAYKQPGGITNQFLLDSLKHREWGVNDPLLPNYLNGFECFVCDYELARLDAEKAHAASPGDSPVFEPHIAQPSHMDCPVPTPGFGNVEEIPENDSSLVQVRDHCICLRFLWPHSEKGRTHNYAAVP

SEQ ID NO: 5612 - protein, 135 aa, Homo Sapiens
MNLRKSGTLGHPGSLDETTYERLAEETLDSLAEFFEDLADKPYTFEDYDVSFGSGVLTVKLGGDLGTYVINKQTPNKQIWLSSPSSGPKRYDWTGKNWVYSHDGVSLHELLAAELTKALKTKLDLSSLAYSGKDA

SEQ ID NO: 5613 - protein, 135 aa, Homo Sapiens; identical to SEQ ID NO: 5612

SEQ ID NO: 5614 - protein, 171 aa, Homo Sapiens
MWTLGRRAVAGLLASPSPAQAQTLTRVPRPAELAPLCGRRGLRTDIDATCTPRRASSNQRGLNQIWNVKKQSVYLMNLRKSGTLGHPGSLDETTYERLAEETLDSLAEFFEDLADKPYTFEDYDVSFGSGVLTVKLGGDLGTYVINKQTPNKQIWLSSPSRLTWLLWLFHP

SEQ ID NO: 5615 - protein, 196 aa, Homo Sapiens
MWTLGRRAVAGLLASPSPAQAQTLTRVPRPAELAPLCGRRGLRTDIDATCTPRRASSNQRGLNQIWNVKKQSVYLMNLRKSGTLGHPGSLDETTYERLAEETLDSLAEFFEDLADKPYTFEDYDVSFGSGVLTVKLGGDLGTYVINKQTPNKQIWLSSPSRYVVDLSVMTGLGKTGCTPTTACPSMSCWPQSSLKP

SEQ ID NO: 5616 - protein, 210 aa, Homo Sapiens
MWTLGRRAVAGLLASPSPAQAQTLTRVPRPAELAPLCGRRGLRTDIDATCTPRRASSNQRGLNQIWNVKKQSVYLMNLRKSGTLGHPGSLDETTYERLAEETLDSLAEFFEDLADKPYTFEDYDVSFGSGVLTVKLGGDLGTYVINKQTPNKQIWLSSPSSGPKRYDWTGKNWVYSHDGVSLHELLAAELTKALKTKLDLSSLAYSGKDA

SEQ ID NO: 5617 - protein, 210 aa, Homo Sapiens; identical to SEQ ID NO: 5616

SEQ ID NO: 5618 - protein, 196 aa, Homo Sapiens
MWTLGRRAVAGLLASPSPAQAQTLTRVPRPAELAPLCGRRGLRTDIDATCTPRRASSNQRGLNQIWNVKKQSVYLMNLRKSGTLGHPGSLDETTYERLAEETLDSLAEFFEDLADKPYTFEDYDVSFGVNVAPVAVPSLRKSEDHALQTGHVLDYLCFCLLGFQSASEQRSNPDSVVHRMAGDGVWLCRPGWSAMA

SEQ ID NO: 5619 - protein, 91 aa, Homo Sapiens
MWTLGRRAVAGLLASPSPAQAQTLTRVPRPAELAPLCGRRGLRTDIDATCTPRRASSNQRGLNQIWNVKKQSVYLMNLRKSGTLGHPGVVS

SEQ ID NO: 5620 - protein, 19 aa, Homo Sapiens
MAELTVEVRGSNGAFYKAI

SEQ ID NO: 5621 - protein, 621 aa, Homo Sapiens
MAELTVEVRGSNGAFYKGFIKDVHEDSLTVVFENNWQPERQVPFNEVRLPPPPDIKKEISEGDEVEVYSRANDQEPCGWWLAKVRMMKGEFYVIEYAACDATYNEIVTFERLRPVNQNKTVKKNTFFKCTVDVPEDLREACANENAHKDFKKAVGACRIFYHPETTQLMILSASEATVKRVNILSDMHLRSIRTKLMLMSRNEEATKHLECTKQLAAAFHEEFVVREDLMGLAIGTHGSNIQQARKVPGVTAIELDEDTGTFRIYGESADAVKKARGFLEFVEDFIQVPRNLVGKVIGKNGKVIQEIVDKSGVVRVRIEGDNENKLPREDGMVPFVFVGTKESIGNVQVLLEYHIAYLKEVEQLRMERLQIDEQLRQIGSRSYSGRGRGRRGPNYTSGYGTNSELSNPSETESERKDELSDWSLAGEDDRDSRHQRDSRRRPGGRGRSVSGGRGRGGPRGGKSSISSVLKDPDSNPYSLLDNTESDQTADTDASESHHSTNRRRRSRRRRTDEDAVLMDGMTESDTASVNENGLVTVADYISRAESQSRQRNLPRETLAKNKKEMAKDVIEEHGPSEKAINGPTSASGDDISKLQRTPGEEKINTLKEENTQEAAVLNGVS

SEQ ID NO: 5622 - protein, 539 aa, Homo Sapiens
MAELTVEVRGSNGAFYKGFIKDVHEDSLTVVFENNWQPERQVPFNEVRLPPPPDIKKEISEGDEVEVYSRANDQEPCGWWLAKVRMMKGEFYVIEYAACDATYNEIVTFERLRPVNQNKTVKKNTFFKCTVDVPEDLREACANENAHKDFKKAVGACRIFYHPETTQLMILSASEATVKRVNILSDMHLRSIRTKLMLMSRNEEATKHLECTKQLAAAFHEEFVVREDLMGLAIGTHGSNIQQARKVPGVTAIELDEDTGTFRIYGESADAVKKARGFLEFVEDFIQVPRNLVGKVIGKNGKVIQEIVDKSGVVRVRIEGDNENKLPREDGMVPFVFVGTKESIGNVQVLLEYHIAYLKEVEQLRMERLQIDEQLRQIGSRSYSGRGRGRRGPNYTSGYGTNSELSNPSETESERKDELSDWSLAGEDDRDSRHQRDSRRRPGGRGRSVSGGRGRGGPRGGKSSISSVLKDPDSNPYSLLDNTESDQTADTDASESHHSTNRRRRSRRRRTDEDAVLMDGMTESDTASVNENGLGKRCD

SEQ ID NO: 5623 - protein, 490 aa, Homo Sapiens
MAELTVEVRGSNGAFYKVYSRANDQEPCGWWLAKVRMMKGEFYVIEYAACDATYNEIVTFERLRPVNQNKTVKKNTFFKCTVDVPEDLREACANENAHKDFKKAVGACRIFYHPETTQLMILSASEATVKRVNILSDMHLRSIRTKLMLMSRNEEATKHLECTKQLAAAFHEEFVVREDLMGLAIGTHGSNIQQARKVPGVTAIELDEDTGTFRIYGESADAVKKARGFLEFVEDFIQVPRNLVGKVIGKNGKVIQEIVDKSGVVRVRIEGDNENKLPREDGMVPFVFVGTKESIGNVQVLLEYHIAYLKEVEQLRMERLQIDEQLRQIGSRSYSGRGRGRRGPNYTSGYGTNSELSNPSETESERKDELSDWSLAGEDDRDSRHQRDSRRRPGGRGRSVSGGRGRGGPRGGKSSISSVLKDPDSNPYSLLDNTESDQTADTDASESHHSTNRRRRSRRRRTDEDAVLMDGMTESDTASVNENGLGKRCD

SEQ ID NO: 5624 - protein, 75 aa, Homo Sapiens
MMKGEFYVIEYAACDATYNEIVTFERLRPVNQNKTVKKNTFFKCTVDVPEDLREACANENAHKDFKKAVGACRIF

SEQ ID NO: 5625 - protein, 94 aa, Homo Sapiens
MMKGEFYVIEYAACDATYNEIVTFERLRPVNQNKTVKKNTFFKCTVDVPEDLREACANENAHKDFKKAVGACRIFYHPETTQLMILSASEATVK

SEQ ID NO: 5626 - protein, 119 aa, Homo Sapiens
MMKGEFYVIEYAACDATYNEIVTFERLRPVNQNKTVKKNTFFKCTVDVPEDLREACANENAHKDFKKAVGACRIFYHPETTQLMILSASEATVKRVNILSDMHLRSIRTKLMLMSRNEE

SEQ ID NO: 5627 - protein, 123 aa, Homo Sapiens
MMKGEFYVIEYAACDATYNEIVTFERLRPVNQNKTVKKNTFFKCTVDVPEDLREACANENAHKDFKKAVGACRIFYHPETTQLMILSASEATVKRVNILSDMHLRSIRTKLMLMSRNEEATKH

SEQ ID NO: 5628 - protein, 536 aa, Homo Sapiens
MMKGEFYVIEYAACDATYNEIVTFERLRPVNQNKTVKKNTFFKCTVDVPEDLREACANENAHKDFKKAVGACRIFYHPETTQLMILSASEATVKRVNILSDMHLRSIRTKLMLMSRNEEATKHLECTKQLAAAFHEEFVVREDLMGLAIGTHGSNIQQARKVPGVTAIELDEDTGTFRIYGESADAVKKARGFLEFVEDFIQVPRNLVGKVIGKNGKVIQEIVDKSGVVRVRIEGDNENKLPREDGMVPFVFVGTKESIGNVQVLLEYHIAYLKEVEQLRMERLQIDEQLRQIGSRSYSGRGRGRRGPNYTSGYGTNSELSNPSETESERKDELSDWSLAGEDDRDSRHQRDSRRRPGGRGRSVSGGRGRGGPRGGKSSISSVLKDPDSNPYSLLDNTESDQTADTDASESHHSTNRRRRSRRRRTDEDAVLMDGMTESDTASVNENGLVTVADYISRAESQSRQRNLPRETLAKNKKEMAKDVIEEHGPSEKAINGPTSASGDDISKLQRTPGEEKINTLKEENTQEAAVLNGVS

SEQ ID NO: 5629 - protein, 454 aa, Homo Sapiens
MMKGEFYVIEYAACDATYNEIVTFERLRPVNQNKTVKKNTFFKCTVDVPEDLREACANENAHKDFKKAVGACRIFYHPETTQLMILSASEATVKRVNILSDMHLRSIRTKLMLMSRNEEATKHLECTKQLAAAFHEEFVVREDLMGLAIGTHGSNIQQARKVPGVTAIELDEDTGTFRIYGESADAVKKARGFLEFVEDFIQVPRNLVGKVIGKNGKVIQEIVDKSGVVRVRIEGDNENKLPREDGMVPFVFVGTKESIGNVQVLLEYHIAYLKEVEQLRMERLQIDEQLRQIGSRSYSGRGRGRRGPNYTSGYGTNSELSNPSETESERKDELSDWSLAGEDDRDSRHQRDSRRRPGGRGRSVSGGRGRGGPRGGKSSISSVLKDPDSNPYSLLDNTESDQTADTDASESHHSTNRRRRSRRRRTDEDAVLMDGMTESDTASVNENGLGKRCD

SEQ ID NO: 5630 - protein, 151 aa, Homo Sapiens
MRAVNILVYFFGFFWWFFNVQGFIKDVHEDSLTVVFENNWQPERQVPFNEVRLPPPPDIKKEISEGDEVEVYSRANDQEPCGWWLAKVRMMKGEFYVIEYAACDATYNEIVTFERLRPVNQNKTVKKNTFFKCTVDVPEDLREACANENAH

SEQ ID NO: 5631 - protein, 608 aa, Homo Sapiens
MVTEGFIKDVHEDSLTVVFENNWQPERQVPFNEVRLPPPPDIKKEISEGDEVEVYSRANDQEPCGWWLAKVRMMKGEFYVIEYAACDATYNEIVTFERLRPVNQNKTVKKNTFFKCTVDVPEDLREACANENAHKDFKKAVGACRIFYHPETTQLMILSASEATVKRVNILSDMHLRSIRTKLMLMSRNEEATKHLECTKQLAAAFHEEFVVREDLMGLAIGTHGSNIQQARKVPGVTAIELDEDTGTFRIYGESADAVKKARGFLEFVEDFIQVPRNLVGKVIGKNGKVIQEIVDKSGVVRVRIEGDNENKLPREDGMVPFVFVGTKESIGNVQVLLEYHIAYLKEVEQLRMERLQIDEQLRQIGSRSYSGRGRGRRGPNYTSGYGTNSELSNPSETESERKDELSDWSLAGEDDRDSRHQRDSRRRPGGRGRSVSGGRGRGGPRGGKSSISSVLKDPDSNPYSLLDNTESDQTADTDASESHHSTNRRRRSRRRRTDEDAVLMDGMTESDTASVNENGLVTVADYISRAESQSRQRNLPRETLAKNKKEMAKDVIEEHGPSEKAINGPTSASGDDISKLQRTPGEEKINTLKEENTQEAAVLNGVS

SEQ ID NO: 5632 - protein, 247 aa, Homo Sapiens
  misc_feature (1)..(1): Xaa can be any naturally occurring amino acid
XTNSELSNPSETESERKDELSDWSLAGEDDRDSRHQRDSRRRPGGRGRSVSGGRGRGGPRGGKSSISSVLKDPDSNPYSLLDNTESDQTADTDASESHHSTNRRRRSRRRRTDEDAVLMDGMTESDTASVNENGLDDSEKKPQRRNRSRRRRFRGQAEDRQPVTVADYISRAESQSRQRNLPRETLAKNKKEMAKDVIEEHGPSEKAINGPTSASGDDISKLQRTPGEEKINTLKEENTQEAAVLNG

SEQ ID NO: 5633 - protein, 144 aa, Homo Sapiens
MGRGYSGALQARGGLEEPLERGLRGPSFTQSPLHGAAAAYLSAQRDASLPVPGQRSDMQKVTLGLLVFLAGFPVLDANDLEDKNSPFYYDWHSLQVGGLICAGVLCAMGIIIVMSAKCKCKFGQKSGHHPGETPPLITPGSAQS

SEQ ID NO: 5634 - protein, 70 aa, Homo Sapiens
MQKVTLGLLVFLAGFPVLDANDLEDKNSPFYYDWHSLQVGGLICAGVLCAMGIIIVMSAKCKCKFGQKSG

SEQ ID NO: 5635 - protein, 87 aa, Homo Sapiens
MQKVTLGLLVFLAGFPVLDANDLEDKNSPFYYDWHSLQVGGLICAGVLCAMGIIIVMSAKCKCKFGQKSGHHPGETPPLITPGSAQS

SEQ ID NO: 5636 - protein, 87 aa, Homo Sapiens; identical to SEQ ID NO: 5635

SEQ ID NO: 5637 - protein, 87 aa, Homo Sapiens; identical to SEQ ID NO: 5635

SEQ ID NO: 5638 - protein, 96 aa, Homo Sapiens
MQKVTLGLLVFLAGFPVLDANDLEDKNSPFYYDWHSLQVGGLICAGVLCAMGIIIVMSEWRSSGEQAGRGWGSPPLTTQLSPTGAKCKCKFGQKSG

SEQ ID NO: 5639 - protein, 113 aa, Homo Sapiens
MQKVTLGLLVFLAGFPVLDANDLEDKNSPFYYDWHSLQVGGLICAGVLCAMGIIIVMSEWRSSGEQAGRGWGSPPLTTQLSPTGAKCKCKFGQKSGHHPGETPPLITPGSAQS

SEQ ID NO: 5640 - protein, 113 aa, Homo Sapiens; identical to SEQ ID NO: 5639

SEQ ID NO: 5641 - protein, 113 aa, Homo Sapiens; identical to SEQ ID NO: 5639

SEQ ID NO: 5642 - protein, 116 aa, Homo Sapiens
MQKVTLGLLVFLAGFPVLDANDLEDKNSPFYYGAPYIFVKRMGGQMERTQAGTEVPSTFLLDWHSLQVGGLICAGVLCAMGIIIVMSAKCKCKFGQKSGHHPGETPPLITPGSAQS

SEQ ID NO: 5643 - protein, 116 aa, Homo Sapiens; identical to SEQ ID NO: 5642

SEQ ID NO: 5644 - protein, 61 aa, Homo Sapiens
MQKVTLGLLVFLAGFPVLDANDLEDKNSPFYYGESPCPLSPPHNPTYCLVPRVPIQGWGLT

SEQ ID NO: 5645 - protein, 61 aa, Homo Sapiens; identical to SEQ ID NO: 5644

SEQ ID NO: 5646 - protein, 844 aa, Homo Sapiens
MGPGAPFARVGWPLPLLVVMAAGVAPVWASHSPHLPRPHSRVPPHPSSERRAVYIGALFPMSGGWPGGQACQPAVEMALEDVNSRRDILPDYELKLIHHDSKCDPGQATKYLYELLYNDPIKIILMPGCSSVSTLVAEAARMWNLIVLSYGSSSPALSNRQRFPTFFRTHPSATLHNPTRVKLFEKWGWKKIATIQQTTEVFTSTLDDLEERVKEAGIEITFRQSFFSDPAVPVKNLKRQDARIIVGLFYETEARKVFCEVYKERLFGKKYVWFLIGWYADNWFKIYDPSINCTVDEMTEAVEGHITTEIVMLNPANTRSISNMTSQEFVEKLTKRLKRHPEETGGFQEAPLAYDAIWALALALNKTSGGGGRSGVRLEDFNYNNQTITDQIYRAMNSSSFEGVSGHVVFDASGSRMAWTLIEQLQGGSYKKIGYYDSTKDDLSWSKTDKWIGGSPPADQTLVIKTFRFLSQKLFISVSVLSSLGIVLAVVCLSFNIYNSHVRYIQNSQPNLNNLTAVGCSLALAAVFPLGLDGYHIGRNQFPFVCQARLWLLGLGFSLGYGSMFTKIWWVHTVFTKKEEKKEWRKTLEPWKLYATVGLLVGMDVLTLAIWQIVDPLHRTIETFAKEEPKEDIDVSILPQLEHCSSRKMNTWLGIFYGYKGLLLLLGIFLAYETKSVSTEKINDHRAVGMAIYNVAVLCLITAPVTMILSSQQDAAFAFASLAIVFSSYITLVVLFVPKMRRLITRGEWQSEAQDTMKTGSSTNNNEEEKSRLLEKENRELEKIIAEKEERVSELRHQLQSRQQLRSRRHPPTPPEPSGGLPRGPPEPPDRLSCDGSRVHLLYK

SEQ ID NO: 5647 - protein, 844 aa, Homo Sapiens; identical to SEQ ID NO: 5646

SEQ ID NO: 5648 - protein, 131 aa, Homo Sapiens
MLLLLLLAPLFLRPPGAGGAQTPNATSEGCQIIHPPWEGGIRYRGLTRDQVKAINFLPVDYEIEYVCRGEREVVGPKVRKCLANGSWTDMDTPSRCGTLPSETQASALPGLQHGQVWEGAGDQAREAGRQW

SEQ ID NO: 5649 - protein, 97 aa, Homo Sapiens
MLLLLLLAPLFLRPPGAGGAQTPNATSEGCQIIHPPWEGGIRYRGLTRDQVKAINFLPVDYEIEYVCRGEREVVGPKVRKCLANGSWTDMDTPSRCV

SEQ ID NO: 5650 - protein, 899 aa, Homo Sapiens
MLLLLLLAPLFLRPPGAGGAQTPNATSEGCQIIHPPWEGGIRYRGLTRDQVKAINFLPVDYEIEYVCRGEREVVGPKVRKCLANGSWTDMDTPSRCVNRTPHSERRAVYIGALFPMSGGWPGGQACQPAVEMALEDVNSRRDILPDYELKLIHHDSKCDPGQATKYLYELLYNDPIKIILMPGCSSVSTLVAEAARMWNLIVLSYGSSSPALSNRQRFPTFFRTHPSATLHNPTRVKLFEKWGWKKIATIQQTTEVFTSTLDDLEERVKEAGIEITFRQSFFSDPAVPVKNLKRQDARIIVGLFYETEARKVFCEVYKERLFGKKYVWFLIGWYADNWFKIYDPSINCTVDEMTEAVEGHITTEIVMLNPANTRSISNMTSQEFVEKLTKRLKRHPEETGGFQEAPLAYDAIWALALALNKTSGGGGRSGVRLEDFNYNNQTITDQIYRAMNSSSFEGVSGHVVFDASGSRMAWTLIEQLQGGSYKKIGYYDSTKDDLSWSKTDKWIGGSPPADQTLVIKTFRFLSQKLFISVSVLSSLGIVLAVVCLSFNIYNSHVRYIQNSQPNLNNLTAVGCSLALAAVFPLGLDGYHIGRNQFPFVCQARLWLLGLGFSLGYGSMFTKIWWVHTVFTKKEEKKEWRKTLEPWKLYATVGLLVGMDVLTLAIWQIVDPLHRTIETFAKEEPKEDIDVSILPQLEHCSSRKMNTWLGIFYGYKGLLLLLGIFLAYETKSVSTEKINDHRAVGMAIYNVAVLCLITAPVTMILSSQQDAAFAFASLAIVFSSYITLVVLFVPKMRRLITRGEWQSEAQDTMKTGSSTNNNEEEKSRLLEKENRELEKIIAEKEERVSELRHQLQSRQQLRSRRHPPTPPEPSGGLPRGPPEPPDRLSCDGSRVHLLYK

SEQ ID NO: 5651 - protein, 137 aa, Homo Sapiens
MLLLLLLAPLFLRPPGAGGAQTPNATSEGCQIIHPPWEGGIRYRGLTRDQVKAINFLPVDYEIEYVCRGEREVVGPKVRKCLANGSWTDMDTPSRCVRICSKSYLTLENGKVFLTGGDLPALDGARVDFRCDPDFHL

SEQ ID NO: 5652 - protein, 156 aa, Homo Sapiens
MLLLLLLAPLFLRPPGAGGAQTPNATSEGCQIIHPPWEGGIRYRGLTRDQVKAINFLPVDYEIEYVCRGEREVVGPKVRKCLANGSWTDMDTPSRCVRICSKSYLTLENGKVFLTGGDLPALDGARVDFRCDPDFHLVGSSRSICSQGQWSTPKPH

SEQ ID NO: 5653 - protein, 193 aa, Homo Sapiens
MLLLLLLAPLFLRPPGAGGAQTPNATSEGCQIIHPPWEGGIRYRGLTRDQVKAINFLPVDYEIEYVCRGEREVVGPKVRKCLANGSWTDMDTPSRCVRICSKSYLTLENGKVFLTGGDLPALDGARVDFRCDPDFHLVGSSRSICSQGQWSTPKPHCQGTLPSETQASALPGLQHGQVWEGAGDQAREAGRQW

SEQ ID NO: 5654 - protein, 961 aa, Homo Sapiens
MLLLLLLAPLFLRPPGAGGAQTPNATSEGCQIIHPPWEGGIRYRGLTRDQVKAINFLPVDYEIEYVCRGEREVVGPKVRKCLANGSWTDMDTPSRCVRICSKSYLTLENGKVFLTGGDLPALDGARVDFRCDPDFHLVGSSRSICSQGQWSTPKPHCQVNRTPHSERRAVYIGALFPMSGGWPGGQACQPAVEMALEDVNSRRDILPDYELKLIHHDSKCDPGQATKYLYELLYNDPIKIILMPGCSSVSTLVAEAARMWNLIVLSYGSSSPALSNRQRFPTFFRTHPSATLHNPTRVKLFEKWGWKKIATIQQTTEVFTSTLDDLEERVKEAGIEITFRQSFFSDPAVPVKNLKRQDARIIVGLFYETEARKVFCEVYKERLFGKKYVWFLIGWYADNWFKIYDPSINCTVDEMTEAVEGHITTEIVMLNPANTRSISNMTSQEFVEKLTKRLKRHPEETGGFQEAPLAYDAIWALALALNKTSGGGGRSGVRLEDFNYNNQTITDQIYRAMNSSSFEGVSGHVVFDASGSRMAWTLIEQLQGGSYKKIGYYDSTKDDLSWSKTDKWIGGSPPADQTLVIKTFRFLSQKLFISVSVLSSLGIVLAVVCLSFNIYNSHVRYIQNSQPNLNNLTAVGCSLALAAVFPLGLDGYHIGRNQFPFVCQARLWLLGLGFSLGYGSMFTKIWWVHTVFTKKEEKKEWRKTLEPWKLYATVGLLVGMDVLTLAIWQIVDPLHRTIETFAKEEPKEDIDVSILPQLEHCSSRKMNTWLGIFYGYKGLLLLLGIFLAYETKSVSTEKINDHRAVGMAIYNVAVLCLITAPVTMILSSQQDAAFAFASLAIVFSSYITLVVLFVPKMRRLITRGEWQSEAQDTMKTGSSTNNNEEEKSRLLEKENRELEKIIAEKEERVSELRHQLQSRQQLRSRRHPPTPPEPSGGLPRGPPEPPDRLSCDGSRVHLLYK

SEQ ID NO: 5655 - protein, 578 aa, Homo Sapiens
MLLLLLLAPLFLRPPGAGGAQTPNATSEGCQIIHPPWEGGIRYRGLTRDQVKAINFLPVDYEIEYVCRGEREVVGPKVRKCLANGSWTDMDTPSRCVRICSKSYLTLENGKVFLTGGDLPALDGARVDFRCDPDFHLVGSSRSICSQGQWSTPKPHCQVNRTPHSERRAVYIGALFPMSGGWPGGQACQPAVEMALEDVNSRRDILPDYELKLIHHDSKCDPGQATKYLYELLYNDPIKIILMPGCSSVSTLVAEAARMWNLIVLSYGSSSPALSNRQRFPTFFRTHPSATLHNPTRVKLFEKWGWKKIATIQQTTEVFTSTLDDLEERVKEAGIEITFRQSFFSDPAVPVKNLKRQDARIIVGLFYETEARKVFCEVYKERLFGKKYVWFLIGWYADNWFKIYDPSINCTVDEMTEAVEGHITTEIVMLNPANTRSISNMTSQEFVEKLTKRLKRHPEETGGFQEAPLAYDAIWALALALNKTSGGGGRSGVRLEDFNYNNQTITDQIYRAMNSSSFEGVSGHVVFDASGSRMAWTLIEQLQGGSYKKIGYYDSTKDDLSWSKTDKWIVISRTHSPT

SEQ ID NO: 5656 - protein, 578 aa, Homo Sapiens; identical to SEQ ID NO: 5655

SEQ ID NO: 5657 - protein, 133 aa, Homo Sapiens
MPGAWMLLLLLLAPLFLRPPGAGGAQTPNATSEGCQIIHPPWEGGIRYRGLTRDQVKAINFLPVDYEIEYVCRGEREVVGPKVRKCLANGSWTDMDTPSRCVRICSKSYLTLENGKVFLTGGDLPALDGARVD

SEQ ID NO: 5658 - protein, 70 aa, Homo Sapiens
MRKSPGLSDCLWAWILLLSTLTGRRTSRKSHQNTDLYEVNEGKDVAMDSRHYKMNLKTIPLSSPGFWTDS

SEQ ID NO: 5659 - protein, 35 aa, Homo Sapiens
MRKSPGLSDCLWAWILLLSTLTGRSYGQPSLQDEL

SEQ ID NO: 5660 - protein, 85 aa, Homo Sapiens
MRKSPGLSDCLWAWILLLSTLTGRSYGQPSLQDELKDNTTVFTRILDRLLDGYDNRLRPGLGERVTEVKTDIFVTSFGPVSDHDM

SEQ ID NO: 5661 - protein, 168 aa, Homo Sapiens
MRKSPGLSDCLWAWILLLSTLTGRSYGQPSLQDELKDNTTVFTRILDRLLDGYDNRLRPGLGERVTEVKTDIFVTSFGPVSDHDMEYTIDVFFRQSWKDERLKFKGPMTVLRLNNLMASKIWTPDTFFHNGKKSVAHNMTMPNKLLRITEDGTLLYTMRLTVRAECPM

SEQ ID NO: 5662 - protein, 456 aa, Homo Sapiens
MRKSPGLSDCLWAWILLLSTLTGRSYGQPSLQDELKDNTTVFTRILDRLLDGYDNRLRPGLGERVTEVKTDIFVTSFGPVSDHDMEYTIDVFFRQSWKDERLKFKGPMTVLRLNNLMASKIWTPDTFFHNGKKSVAHNMTMPNKLLRITEDGTLLYTMRLTVRAECPMHLEDFPMDAHACPLKFGSYAYTRAEVVYEWTREPARSVVVAEDGSRLNQYDLLGQTVDSGIVQSSTGEYVVMTTHFHLKRKIGYFVIQTYLPCIMTVILSQVSFWLNRESVPARTVFGVTTVLTMTTLSISARNSLPKVAYATAMDWFIAVCYAFVFSALIEFATVNYFTKRGYAWDGKSVVPEKPKKVKDPLIKKNNTYAPTATSYTPNLARGDPGLATIAKSATIEPKEVKPETKPPEPKKTFNSVSKIDRLSRIAFPLLFGIFNLVYWATYLNREPQLKAPTPHQ

SEQ ID NO: 5663 - protein, 456 aa, Homo Sapiens; identical to SEQ ID NO: 5662

SEQ ID NO: 5664 - protein, 456 aa, Homo Sapiens; identical to SEQ ID NO: 5662

SEQ ID NO: 5665 - protein, 456 aa, Homo Sapiens; identical to SEQ ID NO: 5662

SEQ ID NO: 5666 - protein, 456 aa, Homo Sapiens; identical to SEQ ID NO: 5662

SEQ ID NO: 5667 - protein, 456 aa, Homo Sapiens; identical to SEQ ID NO: 5662

SEQ ID NO: 5668 - protein, 285 aa, Homo Sapiens
MRKSPGLSDCLWAWILLLSTLTGRSYGQPSLQDELKDNTTVFTRILDRLLDGYDNRLRPGLGERVTEVKTDIFVTSFGPVSDHDMEYTIDVFFRQSWKDERLKFKGPMTVLRLNNLMASKIWTPDTFFHNGKKSVAHNMTMPNKLLRITEDGTLLYTMRLTVRAECPMHLEDFPMDAHACPLKFGSYAYTRAEVVYEWTREPARSVVVAEDGSRLNQYDLLGQTVDSGIVQSSTGEYVVMTTHFHLKRKIGYFVIQTYLPCIMTVILSQVSFWLNRESVPARTVF

SEQ ID NO: 5669 - protein, 456 aa, Homo Sapiens; identical to SEQ ID NO: 5662

SEQ ID NO: 5670 - protein, 456 aa, Homo Sapiens; identical to SEQ ID NO: 5662

SEQ ID NO: 5671 - protein, 94 aa, Homo Sapiens
MRKSPGLSDCLWAWILLLSTLTGRSYGQPSLQDELKDNTTVFTRILDRLLDGYDNRLRPGLGERVTEVKTDIFVTSFGPVSDHDMIFALQNTAQ

SEQ ID NO: 5672 - protein, 471 aa, Homo Sapiens
MVQVSIASNELLQPAMRKSPGLSDCLWAWILLLSTLTGRSYGQPSLQDELKDNTTVFTRILDRLLDGYDNRLRPGLGERVTEVKTDIFVTSFGPVSDHDMEYTIDVFFRQSWKDERLKFKGPMTVLRLNNLMASKIWTPDTFFHNGKKSVAHNMTMPNKLLRITEDGTLLYTMRLTVRAECPMHLEDFPMDAHACPLKFGSYAYTRAEVVYEWTREPARSVVVAEDGSRLNQYDLLGQTVDSGIVQSSTGEYVVMTTHFHLKRKIGYFVIQTYLPCIMTVILSQVSFWLNRESVPARTVFGVTTVLTMTTLSISARNSLPKVAYATAMDWFIAVCYAFVFSALIEFATVNYFTKRGYAWDGKSVVPEKPKKVKDPLIKKNNTYAPTATSYTPNLARGDPGLATIAKSATIEPKEVKPETKPPEPKKTFNSVSKIDRLSRIAFPLLFGIFNLVYWATYLNREPQLKAPTPHQ

SEQ ID NO: 5673 - protein, 113 aa, Homo Sapiens
MVQVSIASNEVSYPSELLQPAMRKSPGLSDCLWAWILLLSTLTGRSYGQPSLQDELKDNTTVFTRILDRLLDGYDNRLRPGLGERVTEVKTDIFVTSFGPVSDHDMEYTIDVF

SEQ ID NO: 5674 - protein, 427 aa, Homo Sapiens
MEYTIDVFFRQKWKDERLKFKGPMNILRLNNLMASKIWTPDTFFHNGKKSVAHNMTMPNKLLRIQDDGTLLYTMRLTVQAECPMHLEDFPMDAHSCPLKFGSYAYTTSEVTYIWTYNASDSVQVAPDGSRLNQYDLLGQSIGKETIKSSTGEYTVMTAHFHLKRKIGYFVIQTYLPCIMTVILSQVSFWLNRESVPARTVFGVTTVLTMTTLSISARNSLPKVAYATAMDWFIAVCYAFVFSALIEFATVNYFTKRGWAWDGKSVVNDKSPSIKAEGITLTYNSVKAILQGAKLIWSKYIAFSWPSLFQEKTLEYLEKWMDCLTFKQSSKKEKASVMIQNNAYAVAVANYAPNLSKDPVLSTISKSATTPEPNKKPENKPAEAKKTFNSVSKIDRMSRIVFPVLFGTFNLVYWATYLNREPVLGVSP

SEQ ID NO: 5675 - protein, 137 aa, Homo Sapiens
MKTKLNIYNMQFLLFVFLVWDPARLVLANIQEDEAKNNITIFTRILDRLLDGYDNRLRPGLGDSITEVFTNIYVTSFGPVSDTDMEYTIDVFFRQKWKDERLKFKGPMNILRLNNLMASKIWTPDTFFHNGKKSVAH

SEQ ID NO: 5676 - protein, 152 aa, Homo Sapiens
MKTKLNIYNMQFLLFVFLVWDPARLVLANIQEDEAKNNITIFTRILDRLLDGYDNRLRPGLGDSITEVFTNIYVTSFGPVSDTDMEYTIDVFFRQKWKDERLKFKGPMNILRLNNLMASKIWTPDTFFHNGKKSVAHNMTMPNKLLRIQDDG

SEQ ID NO: 5677 - protein, 159 aa, Homo Sapiens
MKTKLNIYNMQFLLFVFLVWDPARLVLANIQEDEAKNNITIFTRILDRLLDGYDNRLRPGLGDSITEVFTNIYVTSFGPVSDTDMEYTIDVFFRQKWKDERLKFKGPMNILRLNNLMASKIWTPDTFFHNGKKSVAHNMTMPNKLLRIQDDGTLLYTMR

SEQ ID NO: 5678 - protein, 451 aa, Homo Sapiens
MKTKLNIYNMQFLLFVFLVWDPARLVLANIQEDEAKNNITIFTRILDRLLDGYDNRLRPGLGDSITEVFTNIYVTSFGPVSDTDMEYTIDVFFRQKWKDERLKFKGPMNILRLNNLMASKIWTPDTFFHNGKKSVAHNMTMPNKLLRIQDDGTLLYTMRLTVQAECPMHLEDFPMDAHSCPLKFGSYAYTTSEVTYIWTYNASDSVQVAPDGSRLNQYDLLGQSIGKETIKSSTGEYTVMTAHFHLKRKIGYFVIQTYLPCIMTVILSQVSFWLNRESVPARTVFGVTTVLTMTTLSISARNSLPKVAYATAMDWFIAVCYAFVFSALIEFATVNYFTKRGWAWDGKSVVNDKKKEKASVMIQNNAYAVAVANYAPNLSKDPVLSTISKSATTPEPNKKPENKPAEAKKTFNSVSKIDRMSRIVFPVLFGTFNLVYWATYLNREPVLGVSP

SEQ ID NO: 5679 - protein, 451 aa, Homo Sapiens; identical to SEQ ID NO: 5678

SEQ ID NO: 5680 - protein, 511 aa, Homo Sapiens
MKTKLNIYNMQFLLFVFLVWDPARLVLANIQEDEAKNNITIFTRILDRLLDGYDNRLRPGLGDSITEVFTNIYVTSFGPVSDTDMEYTIDVFFRQKWKDERLKFKGPMNILRLNNLMASKIWTPDTFFHNGKKSVAHNMTMPNKLLRIQDDGTLLYTMRLTVQAECPMHLEDFPMDAHSCPLKFGSYAYTTSEVTYIWTYNASDSVQVAPDGSRLNQYDLLGQSIGKETIKSSTGEYTVMTAHFHLKRKIGYFVIQTYLPCIMTVILSQVSFWLNRESVPARTVFGVTTVLTMTTLSISARNSLPKVAYATAMDWFIAVCYAFVFSALIEFATVNYFTKRGWAWDGKSVVNDKSPSIKAEGITLTYNSVKAILQGAKLIWSKYIAFSWPSLFQEKTLEYLEKWMDCLTFKQSSKKEKASVMIQNNAYAVAVANYAPNLSKDPVLSTISKSATTPEPNKKPENKPAEAKKTFNSVSKIDRMSRIVFPVLFGTFNLVYWATYLNREPVLGVSP

SEQ ID NO: 5681 - protein, 451 aa, Homo Sapiens; identical to SEQ ID NO: 5678

SEQ ID NO: 5682 - protein, 367 aa, Homo Sapiens
MKTKLNIYNMQFLLFVFLVWDPARLVLANIQEDEAKNNITIFTRILDRLLDGYDNRLRPGLGDSITEVFTNIYVTSFGPVSDTDMEYTIDVFFRQKWKDERLKFKGPMNILRLNNLMASKIWTPDTFFHNGKKSVAHNMTMPNKLLRIQDDGTLLYTMRLTVQAECPMHLEDFPMDAHSCPLKFGSYAYTTSEVTYIWTYNASDSVQVAPDGSRLNQYDLLGQSIGKETIKSSTGEYTVMTAHFHLKRKIGYFVIQTYLPCIMTVILSQVSFWLNRESVPARTVFGVTTVLTMTTLSISARNSLPKVAYATAMDWFIAVCYAFVFSALIEFATVNYFTKRGWAWDGKSVVNDKVSESFRVIIIKKIP

SEQ ID NO: 5683 - protein, 451 aa, Homo Sapiens; identical to SEQ ID NO: 5678

SEQ ID NO: 5684 - protein, 66 aa, Homo Sapiens
MKTKLNIYNMQFLLFVFLVWDPARLVLANIQEDEAKNNITIFTRILDRLLDGYDNRLRPGLGGIYN

SEQ ID NO: 5685 - protein, 66 aa, Homo Sapiens; identical to SEQ ID NO: 5684

SEQ ID NO: 5686 - protein, 66 aa, Homo Sapiens; identical to SEQ ID NO: 5684

SEQ ID NO: 5687 - protein, 73 aa, Homo Sapiens
MKTKLNIYNMQFLLFVFLVWDPARLVLANIQEDEAKNNITIFTRILDRLLDGYDNRLRPGLGVSRVESPVCVT

SEQ ID NO: 5688 - protein, 56 aa, Homo Sapiens
SSTGEYTVMTAHFHLKRKIGYFVIQTYLPCIMTVILSQVSFWLNRESVPARTVFGE

SEQ ID NO: 5689 - protein, 16 aa, Homo Sapiens
MDNGMFSGFIMIKNLL

SEQ ID NO: 5690 - protein, 86 aa, Homo Sapiens
MDNGMFSGFIMIKNLLLFCISMNLSSHFGFSQMPTSSVKDETNDNITIFTRILDGLLDGYDNRLRPGLGERITQVRTDIYVTSFGP

SEQ ID NO: 5691 - protein, 149 aa, Homo Sapiens
MDNGMFSGFIMIKNLLLFCISMNLSSHFGFSQMPTSSVKDETNDNITIFTRILDGLLDGYDNRLRPGLGERITQVRTDIYVTSFGPVSDTEMEYTIDVFFRQSWKDERLRFKGPMQRLPLNNLLASKIWTPDTFFHNGKKSIAHNMTTP

SEQ ID NO: 5692 - protein, 166 aa, Homo Sapiens
MDNGMFSGFIMIKNLLLFCISMNLSSHFGFSQMPTSSVKDETNDNITIFTRILDGLLDGYDNRLRPGLGERITQVRTDIYVTSFGPVSDTEMEYTIDVFFRQSWKDERLRFKGPMQRLPLNNLLASKIWTPDTFFHNGKKSIAHNMTTPNKLLRLEDDGTLLYTMR

SEQ ID NO: 5693 - protein, 462 aa, Homo Sapiens
MDNGMFSGFIMIKNLLLFCISMNLSSHFGFSQMPTSSVKDETNDNITIFTRILDGLLDGYDNRLRPGLGERITQVRTDIYVTSFGPVSDTEMEYTIDVFFRQSWKDERLRFKGPMQRLPLNNLLASKIWTPDTFFHNGKKSIAHNMTTPNKLLRLEDDGTLLYTMRLTISAECPMQLEDFPMDAHACPLKFGSYAYPNSEVVYVWTNGSTKSVVVAEDGSRLNQYHLMGQTVGTENISTSTGEYTIMTAHFHLKRKIGYFVIQTYLPCIMTVILSQVSFWLNRESVPARTVFGVTTVLTMTTLSISARNSLPKVAYATAMDWFIAVCYAFVFSALIEFATVNYFTKRGWAWDGKKALEAAKIKKKREVILNKSTNAFTTGKMSHPPNIPKEQTPAGTSNTTSVSVKPSEEKTSESKKTYNSISKIDKMSRIVFPVLFGTFNLVYWATYLNREPVIKGAASPK

SEQ ID NO: 5694 - protein, 462 aa, Homo Sapiens; identical to SEQ ID NO: 5693

SEQ ID NO: 5695 - protein, 462 aa, Homo Sapiens; identical to SEQ ID NO: 5693

SEQ ID NO: 5696 - protein, 86 aa, Homo Sapiens
MPTSSVKDETNDNITIFTRILDGLLDGYDNRLRPGLGERITQVRTDIYVTSFGPVSDTEMEYTIDVFFRQSWKDERLRFKGPMQRL

SEQ ID NO: 5697 - protein, 166 aa, Homo Sapiens
MPTSSVKDETNDNITIFTRILDGLLDGYDNRLRPGLGERITQVRTDIYVTSFGPVSDTEMEYTIDVFFRQSWKDERLRFKGPMQRLPLNNLLASKIWTPDTFFHNGKKSIAHNMTTPNKLLRLEDDGTLLYTMRLTISAECPMQLEDFPMDAHACPLKFGSYAYPN

SEQ ID NO: 5698 - protein, 258 aa, Homo Sapiens
EAGVRGTEEDGCWVCNLESVSQSQTWQENKLSEYQIDIFFAQTWTDSRLRFNSTMKILTLNSNMVGLIWIPDTIFRNSKTAEAHWITTPNQLLRIWNDGKILYTLRLTINAECQLQLHNFPMDEHSCPLIFSSYGYPKEEMIYRWRKNSVEAADQKSWRLYQFDFMGLRNTTEIVTTSAGDYVVMTIYFELSRRMGYFTIQTYIPCILTVVLSWVSFWIKKDATPARTALGITTVLTMTTLSTIARKSLPRVSYVTAM

SEQ ID NO: 5699 - protein, 467 aa, Homo Sapiens
MAPKLLLLLCLFSGLHARSRKVEEDEYEDSSSNQKWVLAPKSQDTDVTLILNKLLREYDKKLRPDIGIKPTVIDVDIYVNSIGPVSSINMEYQIDIFFAQTWTDSRLRFNSTMKILTLNSNMVGLIWIPDTIFRNSKTAEAHWITTPNQLLRIWNDGKILYTLRLTINAECQLQLHNFPMDEHSCPLIFSSYGYPKEEMIYRWRKNSVEAADQKSWRLYQFDFMGLRNTTEIVTTSAGDYVVMTIYFELSRRMGYFTIQTYIPCILTVVLSWVSFWIKKDATPARTALGITTVLTMTTLSTIARKSLPRVSYVTAMDLFVTVCFLFVFAALMEYATLNYYSSCRKPTTTKKTTSLLHPDSSRWIPERISLQAPSNYSLLDMRPPPTAMITLNNSVYWQEFEDTCVYECLDGKDCQSFFCCYEECKSGSWRKGRIHIDILELDSYSRVFFPTSFLLFNLVYWVGYLYL

SEQ ID NO: 5700 - protein, 253 aa, Homo Sapiens
MAPKLLLLLCLFSGLHARSRKVEEDEYEDSSSNQKWVLAPKSQDTDVTLILNKLLREYDKKLRPDIGIKPTVIDVDIYVNSIGPVSSINMEYQIDIFFAQTWTDSRLRFNSTMKILTLNSNMVGLIWIPDTIFRNSKTAEAHWITTPNQLLRIWNDGKILYTLRLTINAECQLQLHNFPMDEHSCPLIFSSYGYPKEEMIYRWRKNSVEAADQKSWRLYQFDFMGLRNTTEIVTTSAGRNLLKEAQLSKAREA

SEQ ID NO: 5701 - protein, 288 aa, Homo Sapiens
MDEHSCPLIFSSYGYPKEEMIYRWRKNSVEAADQKSWRLYQFDFMGLRNTTEIVTTSAGDYVVMTIYFELSRRMGYFTIQTYIPCILTVVLSWVSFWIKKDATPARTALGITTVLTMTTLSTIARKSLPRVSYVTAMDLFVTVCFLFVFAALMEYATLNYYSSCRKPTTTKKTTSLLHPDSSRWIPERISLQAPSNYSLLDMRPPPTAMITLNNSVYWQEFEDTCVYECLDGKDCQSFFCCYEECKSGSWRKGRIHIDILELDSYSRVFFPTSFLLFNLVYWVGYLYL

SEQ ID NO: 5702 - protein, 38 aa, Homo Sapiens
  misc_feature (1)..(1): Xaa can be any naturally occurring amino acid
XAECQLQLHNFPMDEHSCPLIFSSSTILAFRLSLHAYR

SEQ ID NO: 5703 - protein, 169 aa, Homo Sapiens
  misc_feature (1)..(1): Xaa can be any naturally occurring amino acid
XDYVVMTIYFELSRRMGYFTIQTYIPCILTVVLSWVSFWIKKDATPARTALGITTVLTMTTLSTIARKSLPRVSYVTAMDLFVTVCFLFVFAALMEYATLNYYSSCRKPTTTKKTTSLLHPDSSRWIPERISLQAPSKPSCCPACGLQGLPFRSLVSHPRISRAFCLPV

SEQ ID NO: 5704 - protein, 52 aa, Homo Sapiens
MNYSLHLAFVCLSLFTERMCIQGSQFNVEVGRSDKLSLPGFENLTAGYNKFL

SEQ ID NO: 5705 - protein, 59 aa, Homo Sapiens
MNYSLHLAFVCLSLFTERMCIQGSQFNVEVGRSDKLSLPGFENLTAGYNKFLRPNFGGE

SEQ ID NO: 5706 - protein, 92 aa, Homo Sapiens
MNYSLHLAFVCLSLFTERMCIQGSQFNVEVGRSDKLSLPGFENLTAGYNKFLRPNFGGEPVQIALTLDIASISSISESNMDYTATIYLRQRW

SEQ ID NO: 5707 - protein, 171 aa, Homo Sapiens
MNYSLHLAFVCLSLFTERMCIQGSQFNVEVGRSDKLSLPGFENLTAGYNKFLRPNFGGEPVQIALTLDIASISSISESNMDYTATIYLRQRWMDQRLVFEGNKSFTLDARLVEFLWVPDTYIVESKKSFLHEVTVGNRLIRLFSNGTVLYALRITTTVACNMDLSKYPMDT

SEQ ID NO: 5708 - protein, 189 aa, Homo Sapiens
MNYSLHLAFVCLSLFTERMCIQGSQFNVEVGRSDKLSLPGFENLTAGYNKFLRPNFGGEPVQIALTLDIASISSISESNMDYTATIYLRQRWMDQRLVFEGNKSFTLDARLVEFLWVPDTYIVESKKSFLHEVTVGNRLIRLFSNGTVLYALRITTTVACNMDLSKYPMDTQTCKLQLESWGYDGNDVE

SEQ ID NO: 5709 - protein, 440 aa, Homo Sapiens
MNYSLHLAFVCLSLFTERMCIQGSQFNVEVGRSDKLSLPGFENLTAGYNKFLRPNFGGEPVQIALTLDIASISSISESNMDYTATIYLRQRWMDQRLVFEGNKSFTLDARLVEFLWVPDTYIVESKKSFLHEVTVGNRLIRLFSNGTVLYALRITTTVACNMDLSKYPMDTQTCKLQLESWGYDGNDVEFTWLRGNDSVRGLEHLRLAQYTIERYFTLVTRSQQETGNYTRLVLQFELRRNVLYFILETYVPSTFLVVLSWVSFWISLDSVPARTCIGVTTVLSMTTLMIGSRTSLPNTNCFIKAIDVYLGICFSFVFGALLEYAVAHYSSLQQMAAKDRGTTKEVEEVSITNIINSSISSFKRKISFASIEISSDNVDYSDLTMKTSDKFKFVFREKMGRIVDYFTIQNPSNVDHYSKLLFPLIFMLANVFYWAYYMYF

SEQ ID NO: 5710 - protein, 440 aa, Homo Sapiens; identical to SEQ ID NO: 5709

SEQ ID NO: 5711 - protein, 349 aa, Homo Sapiens
MNYSLHLAFVCLSLFTERMCIQGSQFNVEVGRSDKLSLPGFENLTAGYNKFLRPNFGGEPVQIALTLDIASISSISESNMDYTATIYLRQRWMDQRLVFEGNKSFTLDARLVEFLWVPDTYIVESKKSFLHEVTVGNRLIRLFSNGTVLYALRITTTVACNMDLSKYPMDTQTCKLQLESWGYDGNDVEFTWLRGNDSVRGLEHLRLAQYTIERYFTLVTRSQQETGNYTRLVLQFELRRNVLYFILETYVPSTFLVVLSWVSFWISLDSVPARTCIGVTTVLSMTTLMIGSRTSLPNTNCFIKAIDVYLGICFSFVFGALLEYAVAHYSSLQQMAAKDRQKICYLYAA

SEQ ID NO: 5712 - protein, 289 aa, Homo Sapiens
MNYSLHLAFVCLSLFTERMCIQGSQFNVEVGRSDKLSLPGFENLTAGYNKFLRPNFGGEPVQIALTLDIASISSISESNMDYTATIYLRQRWMDQRLVFEGNKSFTLDARLVEFLWVPDTYIVESKKSFLHEVTVGNRLIRLFSNGTVLYALRITTTVACNMDLSKYPMDTQTCKLQLESWGYDGNDVEFTWLRGNDSVRGLEHLRLAQYTIERYFTLVTRSQQETGNYTRLVLQFELRRNVLYFILETYVPSTFLVVLSWVSFWISLDSVPARTCIGDNKGSRRSQYY

SEQ ID NO: 5713 - protein, 123 aa, Homo Sapiens
MARGSALLLASLLLAAALSASAGLWSPAKEKRGWTLNSAGYLLGPHAVGNHRSFSDKNGLTSKRELRPEDDMKPGSFDRSIPENNIMRTIIEFLSFLHLKEAGALDRLLDLPAAASSEDIERS

SEQ ID NO: 5714 - protein, 113 aa, Homo Sapiens
MLPPQKKPWESMAKGLVLGALFTSFLLLVYSYAVPPLHAGLASTRTPEAAASCSPPALEPEAVIRANGSAGECQPRRNIVFLKTHKTASSTLLNILFRFGQKHRLKFAFPNGR

SEQ ID NO: 5715 - protein, 164 aa, Homo Sapiens
MLPPQKKPWESMAKGLVLGALFTSFLLLVYSYAVPPLHAGLASTRTPEAAASCSPPALEPEAVIRANGSAGECQPRRNIVFLKTHKTASSTLLNILFRFGQKHRLKFAFPNGRNDFDYPTFFARSLVQDYRPGACFNIICNHMRFHYDEVRGLVPTNAIFITVL

SEQ ID NO: 5716 - protein, 265 aa, Homo Sapiens
MLPPQKKPWESMAKGLVLGALFTSFLLLVYSYAVPPLHAGLASTRTPEAAASCSPPALEPEAVIRANGSAGECQPRRNIVFLKTHKTASSTLLNILFRFGQKHRLKFAFPNGRNDFDYPTFFARSLVQDYRPGACFNIICNHMRFHYDEVRGLVPTNAIFITVLRDPARLFESSFHYFGPVVPLTWKLSAGDKLTEFLQDPDRYYDPNGFNAHYLRNLLFFDLGYDNSLDPSSPQVQEHILEVERRFHLVLLQEYFDESLVLLKD

SEQ ID NO: 5717 - protein, 71 aa, Homo Sapiens
MLPPQKKPWESMAKGLVLGALFTSFLLLVYSYAVPPLHAGLASTTPEAAASCSPPALEPEAVIRANGSAGE

SEQ ID NO: 5718 - protein, 76 aa, Homo Sapiens
MLPPQKKPWESMAKGLVLGALFTSFLLLVYSYAVPPLHAGLASTTPEAAASCSPPALEPEAVIRANGSAGECQPRR

SEQ ID NO: 5719 - protein, 85 aa, Homo Sapiens
MLPPQKKPWESMAKGLVLGALFTSFLLLVYSYAVPPLHAGLASTTPEAAASCSPPALEPEAVIRANGSAGECQPRRNIVFLKTHK

SEQ ID NO: 5720 - protein, 95 aa, Homo Sapiens
MLPPQKKPWESMAKGLVLGALFTSFLLLVYSYAVPPLHAGLASTTPEAAASCSPPALEPEAVIRANGSAGECQPRRNIVFLKTHKTASSTLLNIL

SEQ ID NO: 5721 - protein, 99 aa, Homo Sapiens
MLPPQKKPWESMAKGLVLGALFTSFLLLVYSYAVPPLHAGLASTTPEAAASCSPPALEPEAVIRANGSAGECQPRRNIVFLKTHKTASSTLLNILFRFG

SEQ ID NO: 5722 - protein, 100 aa, Homo Sapiens
MLPPQKKPWESMAKGLVLGALFTSFLLLVYSYAVPPLHAGLASTTPEAAASCSPPALEPEAVIRANGSAGECQPRRNIVFLKTHKTASSTLLNILFRFGQ

SEQ ID NO: 5723 - protein, 103 aa, Homo Sapiens
MLPPQKKPWESMAKGLVLGALFTSFLLLVYSYAVPPLHAGLASTTPEAAASCSPPALEPEAVIRANGSAGECQPRRNIVFLKTHKTASSTLLNILFRFGQKHR

SEQ ID NO: 5724 - protein, 143 aa, Homo Sapiens
MLPPQKKPWESMAKGLVLGALFTSFLLLVYSYAVPPLHAGLASTTPEAAASCSPPALEPEAVIRANGSAGECQPRRNIVFLKTHKTASSTLLNILFRFGQKHRLKFAFPNGRNDFDYPTFFARSLVQDYRPGACFNIICNHMR

SEQ ID NO: 5725 - protein, 149 aa, Homo Sapiens
MLPPQKKPWESMAKGLVLGALFTSFLLLVYSYAVPPLHAGLASTTPEAAASCSPPALEPEAVIRANGSAGECQPRRNIVFLKTHKTASSTLLNILFRFGQKHRLKFAFPNGRNDFDYPTFFARSLVQDYRPGACFNIICNHMRFHYDEV

SEQ ID NO: 5726 - protein, 170 aa, Homo Sapiens
MLPPQKKPWESMAKGLVLGALFTSFLLLVYSYAVPPLHAGLASTTPEAAASCSPPALEPEAVIRANGSAGECQPRRNIVFLKTHKTASSTLLNILFRFGQKHRLKFAFPNGRNDFDYPTFFARSLVQDYRPGACFNIICNHMRFHYDEVRGLVPTNAIFITVLRDPARLF

SEQ ID NO: 5727 - protein, 199 aa, Homo Sapiens
MLPPQKKPWESMAKGLVLGALFTSFLLLVYSYAVPPLHAGLASTTPEAAASCSPPALEPEAVIRANGSAGECQPRRNIVFLKTHKTASSTLLNILFRFGQKHRLKFAFPNGRNDFDYPTFFARSLVQDYRPGACFNIICNHMRFHYDEVRGLVPTNAIFITVLRDPARLFESSFHYFGPVVPLTWKLSAGDKLTEFLQD

SEQ ID NO: 5728 - protein, 242 aa, Homo Sapiens
MLPPQKKPWESMAKGLVLGALFTSFLLLVYSYAVPPLHAGLASTTPEAAASCSPPALEPEAVIRANGSAGECQPRRNIVFLKTHKTASSTLLNILFRFGQKHRLKFAFPNGRNDFDYPTFFARSLVQDYRPGACFNIICNHMRFHYDEVRGLVPTNAIFITVLRDPARLFESSFHYFGPVVPLTWKLSAGDKLTEFLQDPDRYYDPNGFNAHYLRNLLFFDLGYDNSLDPSSPQVQEHILEV

SEQ ID NO: 5729 - protein, 423 aa, Homo Sapiens
MLPPQKKPWESMAKGLVLGALFTSFLLLVYSYAVPPLHAGLASTTPEAAASCSPPALEPEAVIRANGSAGECQPRRNIVFLKTHKTASSTLLNILFRFGQKHRLKFAFPNGRNDFDYPTFFARSLVQDYRPGACFNIICNHMRFHYDEVRGLVPTNAIFITVLRDPARLFESSFHYFGPVVPLTWKLSAGDKLTEFLQDPDRYYDPNGFNAHYLRNLLFFDLGYDNSLDPSSPQVQEHILEVERRFHLVLLQEYFDESLVLLKDLLCWELEDVLYFKLNARRDSPVPRLSGELYGRATAWNMLDSHLYRHFNASFWRKVEAFGRERMAREVAALRHANERMRTICIDGGHAVDAAAIQDEAMQPWQPLGTKSILGYNLKKSIGQRHAQLCRRMLTPEIQYLMDLGANLWVTKLWKFIRDFLRW

SEQ ID NO: 5730 - protein, 279 aa, Homo Sapiens
MLPPQKKPWESMAKGLVLGALFTSFLLLVYSYAVPPLHAGLASTTPEAAASCSPPALEPEAVIRANGSAGECQPRRNIVFLKTHKTASSTLLNILFRFGQKHRLKFAFPNGRNDFDYPTFFARSLVQDYRPGACFNIICNHMRFHYDEVRGLVPTNAIFITVLRDPARLFESSFHYFGPVVPLTWKLSAGDKLTEFLQDPDRYYDPNGFNAHYLRNLLFFDLGYDNSLDPSSPQVQEHILEVERRFHLVLLQEYFDESLVLLKDLLCWELEDVLYFKLN

SEQ ID NO: 5731 - protein, 423 aa, Homo Sapiens; identical to SEQ ID NO: 5729

SEQ ID NO: 5732 - protein, 423 aa, Homo Sapiens; identical to SEQ ID NO: 5729

SEQ ID NO: 5733 - protein, 423 aa, Homo Sapiens; identical to SEQ ID NO: 5729

SEQ ID NO: 5734 - protein, 423 aa, Homo Sapiens; identical to SEQ ID NO: 5729

SEQ ID NO: 5735 - protein, 423 aa, Homo Sapiens; identical to SEQ ID NO: 5729

SEQ ID NO: 5736 - protein, 398 aa, Homo Sapiens
MMSMLGGLQRYFRVILLLLLALTLLLLAGFLHSDLELDTPLFGGQAEGPPVTNIMFLKTHKTASSTVLNILYRFAETHNLSVALPAGSRVHLGYPWLFLARYVEGVGSQQRFNIMCNHLRFNLPQVQKVMPNDTFYFSILRNPVFQLESSFIYYKTYAPAFRGAPSLDAFLASPRTFYNDSRHLRNVYAKNNMWFDFGFDPNAQCEEGYVRARIAEVERRFRLVLIAEHLDESLVLLRRRLRWALDDVVAFRLNSRSARSVARLSPETRERARSWCALDWRLYEHFNRTLWAQLRAELGPRRLRGEVERLRARRRELASLCLQDGGALKNHTQIRDPRLRPYQSGKADILGYNLRPGLDNQTLGVCQRLVMPELQYMARLYALQFPEKPLKNIPFLGA

SEQ ID NO: 5737 - protein, 431 aa, Homo Sapiens
MPPILQRLQQATKMMSRRKILLLVLGCSTVSLLIHQGAQLSWYPKLFPLSCPPLRNSPPRPKHMTVAFLKTHKTAGTTVQNILFRFAERHNLTVALPHPSCEHQFCYPRNFSAHFVHPATRPPHVLASHLRFDRAELERLMPPSTVYVTILREPAAMFESLFSYYNQYCPAFRRVPNASLEAFLRAPEAYYRAGEHFAMFAHNTLAYDLGGDNERSPRDDAAYLAGLIRQVEEVFSLVMIAEYFDESLVLLRRLLAWDLDDVLYAKLNARAASSRLAAIPAALARAARTWNALDAGLYDHFNATFWRHVARAGRACVEREARELREARQRLLRRCFGDEPLLRPAAQIRTKQLQPWQPSRKVDIMGYDLPGGGAGPATEACLKLAMPEVQYSNYLLRKQKRRGGARARPEPVLDNPPPRPIRVLPRGPQGP

SEQ ID NO: 5738 - protein, 431 aa, Homo Sapiens; identical to SEQ ID NO: 5737

SEQ ID NO: 5739 - protein, 62 aa, Homo Sapiens
KAMTAAAGSAGRAAVPLLLCALLAPGGAYVLDDSDGLGREFDGIGAVSGGGDWCLKVSLKGR

SEQ ID NO: 5740 - protein, 685 aa, Homo Sapiens
MAEWLLSASWQRRAKAMTAAAGSAGRAAVPLLLCALLAPGGAYVLDDSDGLGREFDGIGAVSGGGATSRLLVNYPEPYRSQILDYLFKPNFGASLHILKVEIGGDGQTTDGTEPSHMHYALDENYFRGYEWWLMKEAKKRNPNITLIGLPWSFPGWLGKGFDWPYVNLQLTAYYVVTWIVGAKRYHDLDIDYIGIWNERSYNANYIKILRKMLNYQGLQRVKIIASDNLWESISASMLLDAELFKVVDVIGAHYPGTHSAKDAKLTGKKLWSSEDFSTLNSDMGAGCWGRILNQNYINGYMTSTIAWNLVASYYEQLPYGRCGLMTAQEPWSGHYVVESPVWVSAHTTQFTQPGWYYLKTVGHLEKGGSYVALTDGLGNLTIIIETMSHKHSKCIRPFLPYFNVSQQFATFVLKGSFSEIPELQVWYTKLGKTSERFLFKQLDSLWLLDSDGSFTLSLHEDELFTLTTLTTGRKGSYPLPPKSQPFPSTYKDDFNVDYPFFSEAPNFADQTGVFEYFTNIEDPGEHHFTLRQVLNQRPITWAADASNTISIIGDYNWTNLTIKCDVYIETPDTGGVFIAGRVNKGGILIRSARGIFFWIFANGSYRVTGDLAGWIIYALGRVEVTAKKWYTLTLTIKGHFTSGMLNDKSLWTDIPVNFPKNGWAAIGTHSFEFAQFDNFLVEATR

SEQ ID NO: 5741 - protein, 211 aa, Homo Sapiens
MAEWLLSASWQRRAKAMTAAAGSAGRAAVPLLLCALLAPGGAYVLDDSDGLGREFDGIGAVSGGGATSRLLVNYPEPYRSQILDYLFKPNFGASLHILKVEIGGDGQTTDGTEPSHMHYALDENYFRGYEWWLMKEAKKRNPNITLIGLPWSFPGWLGKGFDWPYVNLQLTAYYVVTWIVGAKRYHDLDIDYIGIWNERSYNANYIKVFGE

SEQ ID NO: 5742 - protein, 112 aa, Homo Sapiens
MAEWLLSASWQRRAKAMTAAAGSAGRAAVPLLLCALLAPGGAYVLDDSDGLGREFDGIGAVSGGGATSRLLVNYPEPYRSQILDYLFKPNFGASLHILKVEIGGDGQTTDIL

SEQ ID NO: 5743 - protein, 662 aa, Homo Sapiens
MAEWLLSASWQRRAKAMTAAAGSAGRAAVPLLLCALLAPGGAYVLDDSDGLGREFDGIGAVSGGGPNFGASLHILKVEIGGDGQTTDGTEPSHMHYALDENYFRGYEWWLMKEAKKRNPNITLIGLPWSFPGWLGKGFDWPYVNLQLTAYYVVTWIVGAKRYHDLDIDYIGIWNERSYNANYIKILRKMLNYQGLQRVKIIASDNLWESISASMLLDAELFKVVDVIGAHYPGTHSAKDAKLTGKKLWSSEDFSTLNSDMGAGCWGRILNQNYINGYMTSTIAWNLVASYYEQLPYGRCGLMTAQEPWSGHYVVESPVWVSAHTTQFTQPGWYYLKTVGHLEKGGSYVALTDGLGNLTIIIETMSHKHSKCIRPFLPYFNVSQQFATFVLKGSFSEIPELQVWYTKLGKTSERFLFKQLDSLWLLDSDGSFTLSLHEDELFTLTTLTTGRKGSYPLPPKSQPFPSTYKDDFNVDYPFFSEAPNFADQTGVFEYFTNIEDPGEHHFTLRQVLNQRPITWAADASNTISIIGDYNWTNLTIKCDVYIETPDTGGVFIAGRVNKGGILIRSARGIFFWIFANGSYRVTGDLAGWIIYALGRVEVTAKKWYTLTLTIKGHFTSGMLNDKSLWTDIPVNFPKNGWAAIGTHSFEFAQFDNFLVEATR

SEQ ID NO: 5744 - protein, 589 aa, Homo Sapiens
MGFMVADLWATSRLLVNYPEPYRSQILDYLFKPNFGASLHILKVEIGGDGQTTDGTEPSHMHYALDENYFRGYEWWLMKEAKKRNPNITLIGLPWSFPGWLGKGFDWPYVNLQLTAYYVVTWIVGAKRYHDLDIDYIGIWNERSYNANYIKILRKMLNYQGLQRVKIIASDNLWESISASMLLDAELFKVVDVIGAHYPGTHSAKDAKLTGKKLWSSEDFSTLNSDMGAGCWGRILNQNYINGYMTSTIAWNLVASYYEQLPYGRCGLMTAQEPWSGHYVVESPVWVSAHTTQFTQPGWYYLKTVGHLEKGGSYVALTDGLGNLTIIIETMSHKHSKCIRPFLPYFNVSQQFATFVLKGSFSEIPELQVWYTKLGKTSERFLFKQLDSLWLLDSDGSFTLSLHEDELFTLTTLTTGRKGSYPLPPKSQPFPSTYKDDFNVDYPFFSEAPNFADQTGVFEYFTNIEDPGEHHFTLRQVLNQRPITWAADASNTISIIGDYNWTNLTIKCDVYIETPDTGGVFIAGRVNKGGILIRSARGIFFWIFANGSYRVTGDLAGWIIYALGRVEVTAKKWYTLTLTIKVAGRRKKT

SEQ ID NO: 5745 - protein, 659 aa, Homo Sapiens
MLGKSHGRATHGPLPLADLGIHLPCVKVLHQVTPEEKPAATSRLLVNYPEPYRSQILDYLFKPNFGASLHILKVEIGGDGQTTDGTEPSHMHYALDENYFRGYEWWLMKEAKKRNPNITLIGLPWSFPGWLGKGFDWPYVNLQLTAYYVVTWIVGAKRYHDLDIDYIGIWNERSYNANYIKILRKMLNYQGLQRVKIIASDNLWESISASMLLDAELFKVVDVIGAHYPGTHSAKDAKLTGKKLWSSEDFSTLNSDMGAGCWGRILNQNYINGYMTSTIAWNLVASYYEQLPYGRCGLMTAQEPWSGHYVVESPVWVSAHTTQFTQPGWYYLKTVGHLEKGGSYVALTDGLGNLTIIIETMSHKHSKCIRPFLPYFNVSQQFATFVLKGSFSEIPELQVWYTKLGKTSERFLFKQLDSLWLLDSDGSFTLSLHEDELFTLTTLTTGRKGSYPLPPKSQPFPSTYKDDFNVDYPFFSEAPNFADQTGVFEYFTNIEDPGEHHFTLRQVLNQRPITWAADASNTISIIGDYNWTNLTIKCDVYIETPDTGGVFIAGRVNKGGILIRSARGIFFWIFANGSYRVTGDLAGWIIYALGRVEVTAKKWYTLTLTIKGHFTSGMLNDKSLWTDIPVNFPKNGWAAIGTHSFEFAQFDNFLVEATR

SEQ ID NO: 5746 - protein, 434 aa, Homo Sapiens
MLNYQGLQRVKIIASDNLWESISASMLLDAELFKVVDVIGAHYPGTHSAKDAKLTGKKLWSSEDFSTLNSDMGAGCWGRILNQNYINGYMTSTIAWNLVASYYEQLPYGRCGLMTAQEPWSGHYVVESPVWVSAHTTQFTQPGWYYLKTVGHLEKGGSYVALTDGLGNLTIIIETMSHKHSKCIRPFLPYFNVSQQFATFVLKGSFSEIPELQVWYTKLGKTSERFLFKQLDSLWLLDSDGSFTLSLHEDELFTLTTLTTGRKGSYPLPPKSQPFPSTYKDDFNVDYPFFSEAPNFADQTGVFEYFTNIEDPGEHHFTLRQVLNQRPITWAADASNTISIIGDYNWTNLTIKCDVYIETPDTGGVFIAGRVNKGGILIRSARGIFFWIFANGSYRVTGDLAGWIIYALGRVEVTAKKWYTLTLTIKVAGRRKKT

SEQ ID NO: 5747 - protein, 72 aa, Homo Sapiens
  misc_feature (1)..(1): Xaa can be any naturally occurring amino acid
XKLGKTSERFLFKQLDSLWLLDSDGSFTLSLHEDELFTLTTLTTGRKGSYPLPPKSQPFPSTYKDDFNVGPI

SEQ ID NO: 5748 - protein, 404 aa, Homo Sapiens
  misc_feature (1)..(1): Xaa can be any naturally occurring amino acid
XLLSASWQRRAKAMTAAAGSAGRAAVPLLLCALLAPGGAYVLDDSDGLGREFDGIGAVSGGGATSRLLVNYPEPYRSQILDYLFKPNFGASLHILKVEIGGDGQTTDGTEPSHMHYALDENYFRGYEWWLMKEAKKRNPNITLIGLPWSFPGWLGKGFDWPYVNLQLTAYYVVTWIVGAKRYHDLDIDYIGIWNERSYNANYIKILRKMLNYQGLQRVKIIASDNLWESISASMLLDAELFKVVDVIGAHYPGTHSAKDAKLTGKKLWSSEDFSTLNSDMGAGCWGRILNQNYINGYMTSTIAWNLVASYYEQLPYGRCGLMTAQEPWSGHYVVESPVWVSAHTTQFTQPGWYYLKTVGHLEKGGSYVALTDGLGNLTIIIETMVNFCCCYWINSLLYYWKNKI

SEQ ID NO: 5749 - protein, 78 aa, Homo Sapiens
MAAVVAATRWWQLLLVLSAAGMGASGAPQPPNILLLLMDDESLPPPRAAGSPRWAPVLPDGCLCPLENAERRSGVPKV

SEQ ID NO: 5750 - protein, 116 aa, Homo Sapiens
MAAVVAATRWWQLLLVLSAAGMGASGAPQPPNILLLLMDDESLPPPRAAGSPRWAPVLPDGCLCPLENAERSDCFPEHALQRPGVRVLTAVAGPFSALSGISLLKILCFRISSFHF

SEQ ID NO: 5751 - protein, 522 aa, Homo Sapiens
MAAVVAATRWWQLLLVLSAAGMGASGAPQPPNILLLLMDDMGWGDLGVYGEPSRETPNLDRMAAEGLLFPNFYSANPLCSPSRAALLTGRLPIRNGFYTTNAHARNAYTPQEIVGGIPDSEQLLPELLKKAGYVSKIVGKWHLGHRPQFHPLKHGFDEWFGSPNCHFGPYDNKARPNIPVYRDWEMVGRYYEEFPINLKTGEANLTQIYLQEALDFIKRQARHHPFFLYWAVDATHAPVYASKPFLGTSQRGRYGDAVREIDDSIGKILELLQDLHVADNTFVFFTSDNGAALISAPEQGGSNGPFLCGKQTTFEGGMREPALAWWPGHVTAGQVSHQLGSIMDLFTTSLALAGLTPPSDRAIDGLNLLPTLLQGRLMDRPIFYYRGDTLMAATLGQHKAHFWTWTNSWENFRQGIDFCPGQNVSGVTTHNLEDHTKLPLIFHLGRDPGERFPLSFASAEYQEALSRITSVVQQHQEALVPAQPQLNVCNWAVMNWAPPGCEKLGKCLTPPESIPKKCLWSH

SEQ ID NO: 5752 - protein, 170 aa, Homo Sapiens
MTGTASSLAARAALLTGRLPIRNGFYTTNAHARNAYTPQEIVGGIPDSEQLLPELLKKAGYVSKIVGKWHLGHRPQFHPLKHGFDEWFGSPNCHFGPYDNKARPNIPVYRDWEMVGRYYEEFPINLKTGEANLTQIYLQEALDFIKRQARHHPFFLYWAVDATHAPVYAS

SEQ ID NO: 5753 - protein, 51 aa, Homo Sapiens
SAAGMGASGAPQPPNILLLLMDDMHVFRGQLLRACRCWCQAGRRQTDTFPT

SEQ ID NO: 5754 - protein, 69 aa, Homo Sapiens
SAAGMGASGAPQPPNILLLLMDDRGRHCSQDGYPSAMASTPPTPMPETPTHRRRLWAASQTRSSSCRSF

SEQ ID NO: 5755 - protein, 202 aa, Homo Sapiens
MRRKEKRLLQAVALVLAALVLLPNVGLWALYRERQPDGTPGGSGAAVAPAAGQGSHSRQKKTFFLGDGQKLKDWHDKEAIRRDAQRVGNGEQGRPYPMTDAERVDQAYRENGFNIYVSDKISLNRSLPDIRHPNCNSKRYLETLPNTSIIIPFHNEGWSSLLRTVHSVLNRSPPELVAEIVLVDDFSDRDLPTASTPSPFVC

SEQ ID NO: 5756 - protein, 541 aa, Homo Sapiens
MRRKEKRLLQAVALVLAALVLLPNVGLWALYRERQPDGTPGGSGAAVAPAAGQGSHSRQKKTFFLGDGQKLKDWHDKEAIRRDAQRVGNGEQGRPYPMTDAERVDQAYRENGFNIYVSDKISLNRSLPDIRHPNCNSKRYLETLPNTSIIIPFHNEGWSSLLRTVHSVLNRSPPELVAEIVLVDDFSDRDRIARNRKTIVCPMIDVIDHDDFRYETQAGDAMRGAFDWEMYYKRIPIPPELQKADPSDPFESPVMAGGLFAVDRKWFWELGGYDPGLEIWGGEQYEISFKVWMCGGRMEDIPCSRVGHIYRKYVPYKVPAGVSLARNLKRVAEVWMDEYAEYIYQRRPEYRHLSAGDVAVQKKLRSSLNCKSFKWFMTKIAWDLPKFYPPVEPPAAAWGEIRNVGTGLCADTKHGALGSPLRLEGCVRGRGEAAWNNMQVFTFTWREDIRPGDPQHTKKFCFDAISHTSPVTLYDCHSMKGNQLWKYRKDKTLYHPVSGSCMDCSESDHRIFMNTCNPSSLTQQWLFEHTNSTVLEKFNRN

SEQ ID NO: 5757 - protein, 603 aa, Homo Sapiens
MRRKEKRLLQAVALVLAALVLLPNVGLWALYRERQPDGTPGGSGAAVAPAAGQGSHSRQKKTFFLGDGQKLKDWHDKEAIRRDAQRVGNGEQGRPYPMTDAERVDQAYRENGFNIYVSDKISLNRSLPDIRHPNCNSKRYLETLPNTSIIIPFHNEGWSSLLRTVHSVLNRSPPELVAEIVLVDDFSDREHLKKPLEDYMALFPSVRILRTKKREGLIRTRMLGASVATGDVITFLDSHCEANVNWLPPLLDRIARNRKTIVCPMIDVIDHDDFRYETQAGDAMRGAFDWEMYYKRIPIPPELQKADPSDPFESPVMAGGLFAVDRKWFWELGGYDPGLEIWGGEQYEISFKVWMCGGRMEDIPCSRVGHIYRKYVPYKVPAGVSLARNLKRVAEVWMDEYAEYIYQRRPEYRHLSAGDVAVQKKLRSSLNCKSFKWFMTKIAWDLPKFYPPVEPPAAAWGEIRNVGTGLCADTKHGALGSPLRLEGCVRGRGEAAWNNMQVFTFTWREDIRPGDPQHTKKFCFDAISHTSPVTLYDCHSMKGNQLWKYRKDKTLYHPVSGSCMDCSESDHRIFMNTCNPSSLTQQWLFEHTNSTVLEKFNRN

SEQ ID NO: 5758 - protein, 366 aa, Homo Sapiens
MRRKEKRLLQAVALVLAALVLLPNVGLWALYRERQPDGTPGGSGAAVAPAAGQGSHSRQKKTFFLGDGQKLKDWHDKEAIRRDAQRVGNGEQGRPYPMTDAERVDQAYRENGFNIYVSDKISLNRSLPDIRHPNCNSKRYLETLPNTSIIIPFHNEGWSSLLRTVHSVLNRSPPELVAEIVLVDDFSDREHLKKPLEDYMALFPSVRILRTKKREGLIRTRMLGASVATGDVITFLDSHCEANVNWLPPLLDRIARNRKTIVCPMIDVIDHDDFRYETQAGDAMRGAFDWEMYYKRIPIPPELQKADPSDPFESPVMAGGLFAVDRKWFWELGGYDPGLEIWGGEQYEISFKVSQLSRRPVLGTAS

SEQ ID NO: 5759 - protein, 581 aa, Homo Sapiens [sequence omitted]

SEQ ID NO: 5760 - protein, 31 aa, Homo Sapiens
  misc_feature (1)..(1): Xaa can be any naturally occurring amino acid
XINIYLSDRISLHRRLPERWNPLAPEGALGQ

SEQ ID NO: 5761 - protein, 141 aa, Homo Sapiens
ALPEVRHPLCLQQHPQDSLPTASVILCFHDEAWSTLLRTVHSILDTVPRAFLKEIILVDDLSQQGSHGFPPGSSGTTQVCSQRICGQAGGGEVTQEQQEAGCHQGPDAGGHQSHRGCARLHGCPLRVPPRLAGAPPQQNSW

SEQ ID NO: 5762 - protein, 196 aa, Homo Sapiens
MERLQLQRRLGCRTFHWFLANVYPELYPSEPRPSFSGKLHNTGLGLCADCQAEGDILGCPMVLAPCSDSRQQQYLQHTSRKEIHFGSPQHLCFAVRQEQVILQNCTEEGLAIHQQHWDFQENGMIVHILSGKCMEAVVQENNKDLYLRPCDEKPASSGVLTRSMLWMNDECQCQKEKRILAIKIQLQVNLKSLYIS

SEQ ID NO: 5763 - protein, 639 aa, Homo Sapiens
MLLRKRYRHRPCRLQFLLLLLMLGCVLMMVAMLHPPHHTLHQTVTAQASKHSPEARYRLDFGESQDWVLEAEDEGEEYSPLEGLPPFISLREDQLLVAVALPQARRNQSQGRRGGSYRLIKQPRRQDKEAPKRDWGADEDGEVSEEEELTPFSLDPRGLQEALSARIPLQRALPEVRHPLCLQQHPQDSLPTASVILCFHDEAWSTLLRTVHSILDTVPRAFLKEIILVDDLSQQGQLKSALSEYVARLEGVKLLRSNKRLGAIRARMLGATRATGDVLVFMDAHCECHPGWLEPLLSRIAGDRSRVVSPVIDVIDWKTFQYYPSKDLQRGVLDWKLDFHWEPLPEHVRKALQSPISPIRSPVVPGEVVAMDRHYFQNTGAYDSLMSLRGGENLELSFKAWLCGGSVEILPCSRVGHIYQNQDSHSPLDQEATLRNRVRIAETWLGSFKETFYKHSPEAFSLSKAEKPDCMERLQLQRRLGCRTFHWFLANVYPELYPSEPRPSFSGKLHNTGLGLCADCQAEGDILGCPMVLAPCSDSRQQQYLQHTSRKEIHFGSPQHLCFAVRQEQVILQNCTEEGLAIHQQHWDFQENGMIVHILSGKCMEAVVQENNKDLYLRPCDGKARQQWRFDQINAVDER

SEQ ID NO: 5764 - protein, 617 aa, Homo Sapiens
MLLRKRYRHRPCRLQFLLLLLMLGCVLMMVAMLHPPHHTLHQTVTAQASKHSPEARYRLDFGESQDWVLEAEDEGEEYSPLEGLPPFISLREDQLLVAVALPQARRNQSQGRRGGSYRLIKQPRRQDKEAPKRDWGADEDGEVSEEEELTPFSLDPRGLQEALSARIPLQRALPEVRHPLCLQQHPQDSLPTASVILCFHDEAWSTLLRTVHSILDTVPRAFLKEIILVDDLSQQGQLKSALSEYVARLEGVKLLRSNKRLGAIRARMLGATRATGDVLVFMDAHCECHPGWLEPLLSRIAGDRSRVVSPVIDVIDWKTFQYYPSKDLQRGVLDWKLDFHWEPLPEHVRKALQSPISPIRSPVVPGEVVAMDRHYFQNTGAYDSLMSLRGGENLELSFKAWLCGGSVEILPCSRVGHIYQNQDSHSPLDQEATLRNRVRIAETWLGSFKETFYKHSPEAFSLSKAEKPDCMERLQLQRRLGCRTFHWFLANVYPELYPSEPRPSFSGKLHNTGLGLCADCQAEGDILGCPMVLAPCSDSRQQQYLQHTSRKEIHFGSPQHLCFAVRQEQVILQNCTEEGLAIHQQHWDFQEDENRANSAAAEAYQRPLTFQQIVNNG

SEQ ID NO: 5765 - protein, 571 aa, Homo Sapiens
MRRRSRMLLCFAFLWVLGIAYYMYSGGGSALAGGAGGGAGRKEDWNEIDPIKKKDLHHSNGEEKAQSMETLPPGKVRWPDFNQEAYVGGTMVRSGQDPYARNKFNQVESDKLRMDRAIPDTRHDQCQRKQWRVDLPATSVVITFHNEARSALLRTVVSVLKKSPPHLIKEIILVDDYSNDPEDGALLGKIEKVRVLRNDRREGLMRSRVRGADAAQAKVLTFLDSHCECNEHWLEPLLERVAEDRTRVVSPIIDVINMDNFQYVGASADLKGGFDWNLVFKWDYMTPEQRRSRQGNPVAPIKTPMIAGGLFVMDKFYFEELGKYDMMMDVWGGENLEISFRVWQCGGSLEIIPCSRVGHVFRKQHPYTFPGGSGTVFARNTRRAAEVWMDEYKNFYYAAVPSARNVPYGNIQSRLELRKKLSCKPFKWYLENVYPELRVPDHQDIAFGALQQGTNCLDTLGHFADGVVGVYECHNAGGNQEWALTKEKSVKHMDLCLTVVDRAPGSLIKLQGCRENDSRQKWEQIEGNSKLRHVGSNLCLDSRTAKSGGLSVEVCGPALSQQWKFTLNLQQ

SEQ ID NO: 5766 - protein, 23 aa, Homo Sapiens
MRLLRRRHMPLRLAMVGCAFVLF

SEQ ID NO: 5767 - protein, 23 aa, Homo Sapiens
MRLLRRRHMPLRLAMVGCAFVLF

SEQ ID NO: 5768 - protein, 39 aa, Homo Sapiens
MRLLRRRHMPLRLAMVGCAFVLFLFLLHRDVSSREEATE

SEQ ID NO: 5769 - protein, 55 aa, Homo Sapiens
MRLLRRRHMPLRLAMVGCAFVLFLFLLHRDVSSREEATEKPWLKSLVSRKDHVLD

SEQ ID NO: 5770 - protein, 62 aa, Homo Sapiens
MRLLRRRHMPLRLAMVGCAFVLFLFLLHRDVSSREEATEKPWLKSLVSRKDHVLDLMLEAMN

SEQ ID NO: 5771 - protein, 69 aa, Homo Sapiens
MRLLRRRHMPLRLAMVGCAFVLFLFLLHRDVSSREEATEKPWLKSLVSRKDHVLDLMLEAMNNLRDSMP

SEQ ID NO: 5772 - protein, 78 aa, Homo Sapiens
MRLLRRRHMPLRLAMVGCAFVLFLFLLHRDVSSREEATEKPWLKSLVSRKDHVLDLMLEAMNNLRDSMPKLQIRAPEA

SEQ ID NO: 5773 - protein, 123 aa, Homo Sapiens
MRLLRRRHMPLRLAMVGCAFVLFLFLLHRDVSSREEATEKPWLKSLVSRKDHVLDLMLEAMNNLRDSMPKLQIRAPEAQQTLFSINQSCLPGFYTPAELKPFWERPPQDPNAPGADGKAFQKS

SEQ ID NO: 5774 - protein, 137 aa, Homo Sapiens
MRLLRRRHMPLRLAMVGCAFVLFLFLLHRDVSSREEATEKPWLKSLVSRKDHVLDLMLEAMNNLRDSMPKLQIRAPEAQQTLFSINQSCLPGFYTPAELKPFWERPPQDPNAPGADGKAFQKSKWTPLETQEKEEGY

SEQ ID NO: 5775 - protein, 622 aa, Homo Sapiens
MRLLRRRHMPLRLAMVGCAFVLFLFLLHRDVSSREEATEKPWLKSLVSRKDHVLDLMLEAMNNLRDSMPKLQIRAPEAQQTLFSINQSCLPGFYTPAELKPFWERPPQDPNAPGADGKAFQKSKWTPLETQEKEEGYKKHCFNAFASDRISLQRSLGPDTRPPECVDQKFRRCPPLATTSVIIVFHNEAWSTLLRTVYSVLHTTPAILLKEIILVDDASTEEHLKEKLEQYVKQLQVVRVVRQEERKGLITARLLGASVAQAEVLTFLDAHCECFHGWLEPLLARIAEDKTVVVSPDIVTIDLNTFEFAKPVQRGRVHSRGNFDWSLTFGWETLPPHEKQRRKDETYPIKSPTFAGGLFSISKSYFEHIGTYDNQMEIWGGENVEMSFRVWQCGGQLEIIPCSVVGHVFRTKSPHTFPKGTSVIARNQVRLAEVWMDSYKKIFYRRNLQAAKMAQEKSFGDISERLQLREQLHCHNFSWYLHNVYPEMFVPDLTPTFYGAIKNLGTNQCLDVGENNRGGKPLIMYSCHGLGGNQYFEYTTQRDLRHNIAKQLCLHVSKGALGLGSCHFTGKNSQVPKDEEWELAQDQLIRNSGSGTCLTSQDKKPAMAPCNPSDPHQLWLFV

SEQ ID NO: 5776 - protein, 365 aa, Homo Sapiens
MRLLRRRHMPLRLAMVGCAFVLFLFLLHRDVSSREEATEKPWLKSLVSRKDHVLDLMLEAMNNLRDSMPKLQIRAPEAQQTLFSINQSCLPGFYTPAELKPFWERPPQDPNAPGADGKAFQKSKWTPLETQEKEEGYKKHCFNAFASDRISLQRSLGPDTRPPECVDQKFRRCPPLATTSVIIVFHNEAWSTLLRTVYSVLHTTPAILLKEIILVDDASTEEHLKEKLEQYVKQLQVVRVVRQEERKGLITARLLGASVAQAEVLTFLDAHCECFHGWLEPLLARIAEDKTVVVSPDIVTIDLNTFEFAKPVQRGRVHSRGNFDWSLTFGWETLPPHEKQRRKDETYPIKCGSVGASWRSSPALS

SEQ ID NO: 5777 - protein, 622 aa, Homo Sapiens; identical to SEQ ID NO: 5775

SEQ ID NO: 5778 - protein, 637 aa, Homo Sapiens
MMFWRKLPKALFIGLTLAIAVNLLLVFSSKGTLQNLFTGGLHRELPLHLNKRYGAVIKRLSHLEVELQDLKESMKLALRQQENVNSTLKRAKDEVRPLLKAMETKVNETKKHKTQMKLFPHSQLFRQWGEDLSEAQQKAAQDLFRKFGYNAYLSNQLPLNRTIPDTRDYRCLRKTYPSQLPSLSVILIFVNEALSIIQRAITSIINRTPSRLLKEIILVDDFSSNGELKVHLDEKIKLYNQKYPGLLKIIRHPERKGLAQARNTGWEAATADVVAILDAHIEVNVGWAEPILARIQEDRTVIVSPVFDNIRFDTFKLDKYELAVDGFNWELWCRYDALPQAWIDLHDVTAPVKSPSIMGILAANRHFLGEIGSLDGGMLIYGGENVELSLRVWQCGGKVEILPCSRIAHLERHHKPYALDLTAALKRNALRVAEIWMDEHKHMVYLAWNIPLQNSGIDFGDVSSRMALREKLKCKTFDWYLKNVYPLLKPLHTIVGYGRMKNLLDENVCLDQGPVPGNTPIMYYCHEFSSQNVYYHLTGELYVGQLIAEASASDRCLTDPGKAEKPTLEPCSKAAKNRLHIYWDFKPGGAVINRDTKRCLEMKKDLLGSHVLVLQTCSTQVWEIQHTVRDWGQTNSQ

SEQ ID NO: 5779 - protein, 529 aa, Homo Sapiens
MRSEKSLTLAAPGEVRGPEGEQQDAGDFPEAGGGGGCCSSERLVINISGLRFETQLRTLSLFPDTLLGDPGRRVRFFDPLRNEYFFDRNRPSFDAILYYYQSGGRLRRPVNVPLDIFLEEIRFYQLGDEALAAFREDEGCLPEGGEDEKPLPSQPFQRQVWLLFEYPESSGPARGIAIVSVLVILISIVIFCLETLPQFRVDGRGGNNGGVSRVSPVSRGSQEEEEDEDDSYTFHHGITPGEMGTGGSSSLSTLGGSFFTDPFFLVETLCIVWFTFELLVRFSACPSKPAFFRNIMNIIDLVAIFPYFITLGTELVQQQEQQPASGGGGQNGQQAMSLAILRVIRLVRVFRIFKLSRHSKGLQILGKTLQASMRELGLLIFFLFIGVILFSSAVYFAEADDDDSLFPSIPDAFWWAVVTMTTVGYGDMYPMTVGGKIVGSLCAIAGVLTIALPVPVIVSNFNYFYHRETEQEEQGQYTHVTCGQPAPDLRATDNGLGKPDFPEANRERRPSYLPTPHRAYAEKRMLTEV

SEQ ID NO: 5780 - protein, 88 aa, Homo Sapiens
  misc_feature (1)..(1): Xaa can be any naturally occurring amino acid
XENVCLDQGPVPGNTPIMYYCHEFSSQNVYYHLTGELYVGQLIAEASASDRCLTDPGKAEKPTLEPCSKAAKNRLHIYWDFKPPTITK

SEQ ID NO: 5781 - protein, 161 aa, Homo Sapiens
  misc_feature (1)..(1): Xaa can be any naturally occurring amino acid
XYPLLKPLHTIVGYGRMKNLLDENVCLDQGPVPGNTPIMYYCHEFSSQNVYYHLTGELYVGQLIAEASASDRCLTDPGKAEKPTLEPCSKAAKNRLHIYWDFKPEKCWQVVQARTSMHRILTAAGPSTSSEDENPAWHRWQASGLTPLWRPPTSSNQARKS

SEQ ID NO: 5782 - protein, 417 aa, Homo Sapiens
EHLKDKLEEYMARFSKVRIVRTKKREGLIRTRLLGASMARGEVLTFLDSHCEVNVNWLPPLLNQIALNHKTIVCPMIDVIDHNHFGYEAQAGDAMRGAFDWEMYYKRIPIPPELQRADPSDPFESPVMAGGLFAVDRKWFWELGGYDPGLEIWGGEQYEISFKVWMCGGEMFDVPCSRVGHIYRKYVPYKVPSGTSLARNLKRVAETWMDEFAEYIYQRRPEYRHLSTGDISAQKELRKQLKCKDFKWFMAAVAWDVPKYYPPVEPPPAAWGEIRNVAANLCVDSKHGATGTELRLDICVKDGSERTWSHEQLFTFGWREDIRPGEPLHTRKFCFDAISHNSPVTLYDCHGMKGNQLWGYRKDRTLFHPVSNSCMDCNPAEKKIFMARCDPLSETQQWIFEHINMTVLEKFNHHANS

SEQ ID NO: 5783 - protein, 601 aa, Homo Sapiens
MKRKQKRFLQMTLLFTVALIFLPNVGLWSLYKDKHLVKSAEPGEQQTFPLGLGDGQFYSWTDGLRRKDWHDYESIQKEAMRSGKGEHGKPYPLTEEDHDDSAYRENGFNIFVSNNIALERSLPDIRHANCKHKMYLERLPNTSIIIPFHNEGWTSLLRTIHSIINRTPGSLIAEIILVDDFSEREHLKDKLEEYMARFSKVRIVRTKKREGLIRTRLLGASMARGEVLTFLDSHCEVNVNWLPPLLNQIALNHKTIVCPMIDVIDHNHFGYEAQAGDAMRGAFDWEMYYKRIPIPPELQRADPSDPFESPVMAGGLFAVDRKWFWELGGYDPGLEIWGGEQYEISFKVWMCGGEMFDVPCSRVGHIYRKYVPYKVPSGTSLARNLKRVAETWMDEFAEYIYQRRPEYRHLSTGDISAQKELRKQLKCKDFKWFMAAVAWDVPKYYPPVEPPPAAWGEIRNVAANLCVDSKHGATGTELRLDICVKDGSERTWSHEQLFTFGWREDIRPGEPLHTRKFCFDAISHNSPVTLYDCHGMKGNQLWGYRKDRTLFHPVSNSCMDCNPAEKKIFMARCDPLSETQQWIFEHINMTVLEKFNHHANS

SEQ ID NO: 5784 - protein, 61 aa, Homo Sapiens
MKRKQKRFLQMTLLFTVALIFLPNVGLWSLYKDKHLVKSAEPGEQQVSATQRKITQGLVRQ

SEQ ID NO: 5785 - protein, 584 aa, Homo Sapiens
MRAKFRAGAGHQRNPSISADHGVHELVYQTFPLGLGDGQFYSWTDGLRRKDWHDYESIQKEAMRSGKGEHGKPYPLTEEDHDDSAYRENGFNIFVSNNIALERSLPDIRHANCKHKMYLERLPNTSIIIPFHNEGWTSLLRTIHSIINRTPGSLIAEIILVDDFSEREHLKDKLEEYMARFSKVRIVRTKKREGLIRTRLLGASMARGEVLTFLDSHCEVNVNWLPPLLNQIALNHKTIVCPMIDVIDHNHFGYEAQAGDAMRGAFDWEMYYKRIPIPPELQRADPSDPFESPVMAGGLFAVDRKWFWELGGYDPGLEIWGGEQYEISFKVWMCGGEMFDVPCSRVGHIYRKYVPYKVPSGTSLARNLKRVAETWMDEFAEYIYQRRPEYRHLSTGDISAQKELRKQLKCKDFKWFMAAVAWDVPKYYPPVEPPPAAWGEIRNVAANLCVDSKHGATGTELRLDICVKDGSERTWSHEQLFTFGWREDIRPGEPLHTRKFCFDAISHNSPVTLYDCHGMKGNQLWGYRKDRTLFHPVSNSCMDCNPAEKKIFMARCDPLSETQQWIFEHINMTVLEKFNHHANS

SEQ ID NO: 5786 - protein, 116 aa, Homo Sapiens
MAPPSVPLVLLLVLLLSLAETPASAPAHRGRGGWTLNSAGYLLGPVLHLPQMGDQDGKRETALEILDLWKAIDGLPYSHPPQPSKRNVMETFAKPEIGDLGMLSMKIPKEEDVLKS

SEQ ID NO: 5787 - protein, 49 aa, Homo Sapiens
MAPPSVPLVLLLVLLLSLAETPASAPAHRSSTFPKWVTKTERGRQPLRS

SEQ ID NO: 5788 - protein, 49 aa, Homo Sapiens; identical to SEQ ID NO: 5787

SEQ ID NO: 5789 - protein, 119 aa, Homo Sapiens
MAAVAAVAARRRRLSVSGRDENSVELTMAEGPYKIILTARPFRLDLLEDRSLLLSVNARGLLEFEHQRAPRVSFSDKVNLTLGSIWDKIKNLFSRQGSKDPAEGDGAQPEETPRDGDKA

SEQ ID NO: 5790 - protein, 852 aa, Homo Sapiens
MAAVAAVAARRRRLSVSGRDENSVELTMAEGPYKIILTARPFRLDLLEDRSLLLSVNARGLLEFEHQRAPRVSFSDKVNLTLGSIWDKIKNLFSRQGSKDPAEGDGAQPEETPRDGDKPEETQGKAEKDEPGAWEETFKTHSDSKPYGPMSVGLDFSLPGMEHVYGIPEHADNLRLKVTEGGEPYRLYNLDVFQYELYNPMALYGSVPVLLAHNPHRDLGIFWLNAAETWVDISSNTAGKTLFGKMMDYLQGSGETPQTDVRWMSETGIIDVFLLLGPSISDVFRQYASLTGTQALPPLFSLGYHQSRWNYRDEADVLEVDQGFDDHNLPCDVIWLDIEHADGKRYFTWDPSRFPQPRTMLERLASKRRKLVAIVDPHIKVDSGYRVHEELRNLGLYVKTRDGSDYEGWCWPGSAGYPDFTNPTMRAWWANMFSYDNYEGSAPNLFVWNDMNEPSVFNGPEVTMLKDAQHYGGWEHRDVHNIYGLYVHMATADGLRQRSGGMERPFVLARAFFAGSQRFGAVWTGDNTAEWDHLKISIPMCLSLGLVGLSFCGADVGGFFKNPEPELLVRWYQMGAYQPFFRAHAHLDTGRREPWLLPSQHNDIIRDALGQRYSLLPFWYTLLYQAHREGIPVMRPLWVQYPQDVTTFNIDDQYLLGDALLVHPVSDSGAHGVQVYLPGQGEVWYDIQSYQKHHGPQTLYLPVTLSSIPVFQRGGTIVPRWMRVRRSSECMKDDPITLFVALSPQGTAQGELFLDDGHTFNYQTRQEFLLRRFSFSGNTLVSSSADPEGHFETPIWIERVVIIGAGKPAAVVLQTKGSPESRLSFQHDPETSVLVLRKPGINVASDWSIHLR

SEQ ID NO: 5791 - protein, 76 aa, Homo Sapiens
MAAVAAVAARRRRSWASLVLAFLGVCLGITLAVDRSNFKTCEESSFCDREAYGQASLHTEPCWTLYSLVLIPSRSI

SEQ ID NO: 5792 - protein, 52 aa, Homo Sapiens
MAAVAAVAARRRRSWASLVLAFLGVCLGITLAVDRSNFKTCEESSFCKCCWC

SEQ ID NO: 5793 - protein, 52 aa, Homo Sapiens; identical to SEQ ID NO: 5792

SEQ ID NO: 5794 - protein, 52 aa, Homo Sapiens; identical to SEQ ID NO: 5792

SEQ ID NO: 5795 - protein, 966 aa, Homo Sapiens
MAAVAAVAARRRRSWASLVLAFLGVCLGITLAVDRSNFKTCEESSFCKRQRSIRPGLSPYRALLDSLQLGPDSLTVHLIHEVTKVLLVLELQGLQKNMTRFRIDELEPRRPRYRVPDVLVADPPIARLSVSGRDENSVELTMAEGPYKIILTARPFRLDLLEDRSLLLSVNARGLLEFEHQRAPRVSFSDKVNLTLGSIWDKIKNLFSRQGSKDPAEGDGAQPEETPRDGDKPEETQGKAEKDEPGAWEETFKTHSDSKPYGPMSVGLDFSLPGMEHVYGIPEHADNLRLKVTEGGEPYRLYNLDVFQYELYNPMALYGSVPVLLAHNPHRDLGIFWLNAAETWVDISSNTAGKTLFGKMMDYLQGSGETPQTDVRWMSETGIIDVFLLLGPSISDVFRQYASLTGTQALPPLFSLGYHQSRWNYRDEADVLEVDQGFDDHNLPCDVIWLDIEHADGKRYFTWDPSRFPQPRTMLERLASKRRKLVAIVDPHIKVDSGYRVHEELRNLGLYVKTRDGSDYEGWCWPGSAGYPDFTNPTMRAWWANMFSYDNYEGSAPNLFVWNDMNEPSVFNGPEVTMLKDAQHYGGWEHRDVHNIYGLYVHMATADGLRQRSGGMERPFVLARAFFAGSQRFGAVWTGDNTAEWDHLKISIPMCLSLGLVGLSFCGADVGGFFKNPEPELLVRWYQMGAYQPFFRAHAHLDTGRREPWLLPSQHNDIIRDALGQRYSLLPFWYTLLYQAHREGIPVMRPLWVQYPQDVTTFNIDDQYLLGDALLVHPVSDSGAHGVQVYLPGQGEVWYDIQSYQKHHGPQTLYLPVTLSSIPVFQRGGTIVPRWMRVRRSSECMKDDPITLFVALSPQGTAQGELFLDDGHTFNYQTRQEFLLRRFSFSGNTLVSSSADPEGHFETPIWIERVVIIGAGKPAAVVLQTKGSPESRLSFQHDPETSVLVLRKPGINVASDWSIHLR

SEQ ID NO: 5796 - protein, 944 aa, Homo Sapiens
MAAVAAVAARRRRSWASLVLAFLGVCLGITLAVDRSNFKTCEESSFCKRQRSIRPGLSPYRALLDSLQLGPDSLTVHLIHEVTKVLLVLELQGLQKNMTRFRIDELEPRRPRYRVPDVLVADPPIARLSVSGRDENSVELTMAEGPYKIILTARPFRLDLLEDRSLLLSVNARGLLEFEHQRAPRVSQGSKDPAEGDGAQPEETPRDGDKPEETQGKAEKDEPGAWEETFKTHSDSKPYGPMSVGLDFSLPGMEHVYGIPEHADNLRLKVTEGGEPYRLYNLDVFQYELYNPMALYGSVPVLLAHNPHRDLGIFWLNAAETWVDISSNTAGKTLFGKMMDYLQGSGETPQTDVRWMSETGIIDVFLLLGPSISDVFRQYASLTGTQALPPLFSLGYHQSRWNYRDEADVLEVDQGFDDHNLPCDVIWLDIEHADGKRYFTWDPSRFPQPRTMLERLASKRRKLVAIVDPHIKVDSGYRVHEELRNLGLYVKTRDGSDYEGWCWPGSAGYPDFTNPTMRAWWANMFSYDNYEGSAPNLFVWNDMNEPSVFNGPEVTMLKDAQHYGGWEHRDVHNIYGLYVHMATADGLRQRSGGMERPFVLARAFFAGSQRFGAVWTGDNTAEWDHLKISIPMCLSLGLVGLSFCGADVGGFFKNPEPELLVRWYQMGAYQPFFRAHAHLDTGRREPWLLPSQHNDIIRDALGQRYSLLPFWYTLLYQAHREGIPVMRPLWVQYPQDVTTFNIDDQYLLGDALLVHPVSDSGAHGVQVYLPGQGEVWYDIQSYQKHHGPQTLYLPVTLSSIPVFQRGGTIVPRWMRVRRSSECMKDDPITLFVALSPQGTAQGELFLDDGHTFNYQTRQEFLLRRFSFSGNTLVSSSADPEGHFETPIWIERVVIIGAGKPAAVVLQTKGSPESRLSFQHDPETSVLVLRKPGINVASDWSIHLR

SEQ ID NO: 5797 - protein, 847 aa, Homo Sapiens
MTRFRIDELEPRRPRYRVPDVLVADPPIARLSVSGRDENSVELTMAEGPYKIILTARPFRLDLLEDRSLLLSVNARGLLEFEHQRAPRVSQGSKDPAEGDGAQPEETPRDGDKPEETQGKAEKDEPGAWEETFKTHSDSKPYGPMSVGLDFSLPGMEHVYGIPEHADNLRLKVTEGGEPYRLYNLDVFQYELYNPMALYGSVPVLLAHNPHRDLGIFWLNAAETWVDISSNTAGKTLFGKMMDYLQGSGETPQTDVRWMSETGIIDVFLLLGPSISDVFRQYASLTGTQALPPLFSLGYHQSRWNYRDEADVLEVDQGFDDHNLPCDVIWLDIEHADGKRYFTWDPSRFPQPRTMLERLASKRRKLVAIVDPHIKVDSGYRVHEELRNLGLYVKTRDGSDYEGWCWPGSAGYPDFTNPTMRAWWANMFSYDNYEGSAPNLFVWNDMNEPSVFNGPEVTMLKDAQHYGGWEHRDVHNIYGLYVHMATADGLRQRSGGMERPFVLARAFFAGSQRFGAVWTGDNTAEWDHLKISIPMCLSLGLVGLSFCGADVGGFFKNPEPELLVRWYQMGAYQPFFRAHAHLDTGRREPWLLPSQHNDIIRDALGQRYSLLPFWYTLLYQAHREGIPVMRPLWVQYPQDVTTFNIDDQYLLGDALLVHPVSDSGAHGVQVYLPGQGEVWYDIQSYQKHHGPQTLYLPVTLSSIPVFQRGGTIVPRWMRVRRSSECMKDDPITLFVALSPQGTAQGELFLDDGHTFNYQTRQEFLLRRFSFSGNTLVSSSADPEGHFETPIWIERVVIIGAGKPAAVVLQTKGSPESRLSFQHDPETSVLVLRKPGINVASDWSIHLR

SEQ ID NO: 5798 - protein, 79 aa, Homo Sapiens
MPSPRPVLLRGARAALLLLLPPRLLARPSLLLRRSLSAASCPPISLPAAASRSSMDGAGAEEVLAPLRLAVRQQAVWNQ

SEQ ID NO: 5799 - protein, 79 aa, Homo Sapiens; identical to SEQ ID NO: 5798

SEQ ID NO: 5800 - protein, 739 aa, Homo Sapiens
MPSPRPVLLRGARAALLLLLPPRLLARPSLLLRRSLSAASCPPISLPAAASRSSMDGAGAEEVLAPLRLAVRQQGDLVRKLKEDKAPQVDVDKAVAELKARKRVLEAKELALQPKDDIVDRAKMEDTLKRRFFYDQAFAIYGGVSGLYDFGPVGCALKNNIIQTWRQHFIQEEQILEIDCTMLTPEPVLKTSGHVDKFADFMVKDVKNGECFRADHLLKAHLQKLMSDKKCSVEKKSEMESVLAQLDNYGQQELADLFVNYNVKSPITGNDLSPPVSFNLMFKTFIGPGGNMPGYLRPETAQGIFLNFKRLLEFNQGKLPFAAAQIGNSFRNEISPRSGLIRVREFTMAEIEHFVDPSEKDHPKFQNVADLHLYLYSAKAQVSGQSARKMRLGDAVEQGVINNTVLGYFIGRIYLYLTKVGISPDKLRFRQHMENEMAHYACDCWDAESKTSYGWIEIVGCADRSCYDLSCHARATKVPLVAEKPLKEPKTVNVVQFEPSKGAIGKAYKKDAKLVMEYLAICDECYITEMEMLLNEKGEFTIETEGKTFQLTKDMINVKRFQKTLYVEEVVPNVIEPSFGLGRIMYTVFEHTFHVREGDEQRTFFSFPAVVAPFKCSVLPLSQNQEFMPFVKELSEALTRHGVSHKVDDSSGSIGRRYARTDEIGVAFGVTIDFDTVNKTPHTATLRDRDSMRQIRAEISELPSIVQDLANGNITWADVEARYPLFEGQETGKKETIEE

SEQ ID NO: 5801 - protein, 77 aa, Homo Sapiens
VVQFEPSKGAIGKAYKKDAKLVMEYLAICDECYITEMEMLLNEKGEFTIETEGKTFQLTKDMINVKRFQKTLYEQIL

SEQ ID NO: 5802 - protein, 345 aa, Homo Sapiens
MVAALLGGGGEARGGTVPGAWLCLMALLQLLGSAPRGSGLAHGRRLICWQALLQCQGEPECSYAYNQYAEACAPVLAQHGGGDAPGAAAAAFPASAASFSSRWRCPSHCISALIQLNHTRRGPALEDCDCAQDENCKSTKRAIEPCLPRTSGGGAGGPGAGGVMGCTEARRRCDRDSRCNLALSRYLTYCGKVFNGLRCTDECRTVIEDMLAMPKAALLNDCVCDGLERPICESVKENMARLCFGAELGNGPGSSGSDGGLDDYYDEDYDDEQRTGGAGGEQPLDDDDGVPHPPRPGSGAAASGGRGDLPYGPGRRSSGGGGRLAPRGAWTPLASILLLLLGPLF

SEQ ID NO: 5803 - protein, 678 aa, Homo Sapiens
MAPSLSPGPAALRRAPQLLLLLLAAECALAALLPAREATQFLRPRQRRAFQVFEEAKQGHLERECVEELCSREEAREVFENDPETDYFYPRYLDCINKYGSPYTKNSGFATCVQNLPDQCTPNPCDRKGTQACQDLMGNFFCLCKAGWGGRLCDKDVNECSQENGGCLQICHNKPGSFHCSCHSGFELSSDGRTCQDIDECADSEACGEARCKNLPGSYSCLCDEGFAYSSQEKACRDVDECLQGRCEQVCVNSPGSYTCHCDGRGGLKLSQDMDTCEDILPCVPFSVAKSVKSLYLGRMFSGTPVIRLRFKRLQPTRLVAEFDFRTFDPEGILLFAGGHQDSTWIVLALRAGRLELQLRYNGVGRVTSSGPVINHGMWQTISVEELARNLVIKVNRDAVMKIAVAGDLFQPERGLYHLNLTVGGIPFHEKDLVQPINPRLDGCMRSWNWLNGEDTTIQETVKVNTRMQCFSVTERGSFYPGSGFAFYSLDYMRTPLDVGTESTWEVEVVAHIRPAADTGVLFALWAPDLRAVPLSVALVDYHSTKKLKKQLVVLAVEHTALALMEIKVCDGQEHVVTVSLRDGEATLEVDGTRGQSEVSAAQLQERLAVLERHLRSPVLTFAGGLPDVPVTSAPVTAFYRGCMTLEVNRRLLDLDEAAYKHSDITAHSCPPVEPAAA

SEQ ID NO: 5804 - protein, 101 aa, Homo Sapiens
MQRLCVYVLIFALALAAFSEASWKPRSQQPDAPLGTGANRDLELPWLEQQGPASHHRRQLGPQGPPHLVADPSKKQGPWLEEEEEAYGWMDFGRRSAEDEN

SEQ ID NO: 5805 - protein, 144 aa, Homo Sapiens
KLESIDGARYHALLIPSCPGALTDLASSGSLARILQHFHSESKPICAVGHGVAALCCATNEDRSWVFDSYSLTGPSVCELVRAPGFARLPLVVEDFVKDSGACFSGLGAAPGWGRGGKQEDRPPEEQRRAGEDFPIYQCVFIYP

SEQ ID NO: 5806 - protein, 184 aa, Homo Sapiens
MASERLPNRPACLLVASGAAEGVSAQSFLHCFTMASTAFNLQVATPGGKAMEFVDVTESNARWVQDFRLKAYASPAKLESIDEPICAVGHGVAALCCATNEDRSWVFDSYSLTGPSVCELVRAPGFARLPLVVEDFVKDSGACFSASEPDAVHVVLDRHLVTGQNASSTVPAVQNLLFLCGSRK

SEQ ID NO: 5807 - protein, 184 aa, Homo Sapiens; identical to SEQ ID NO: 5806

SEQ ID NO: 5808 - protein, 186 aa, Homo Sapiens
MASERLPNRPACLLVASGAAEGVSAQSFLHCFTMASTAFNLQVATPGGKAMEFVDVTESNARWVQDFRLKAYASPAKLESIDGARYHALLIPSCPGALTDLASSGSLARILQHFHSESKPICAVGHGVAALCCATNEDRSWVFDSYSLTGGLGLSQEPPPRSRSPLCVSSSGPPASPACRSWWRTS

SEQ ID NO: 5809 - protein, 220 aa, Homo Sapiens
MASERLPNRPACLLVASGAAEGVSAQSFLHCFTMASTAFNLQVATPGGKAMEFVDVTESNARWVQDFRLKAYASPAKLESIDGARYHALLIPSCPGALTDLASSGSLARILQHFHSESKPICAVGHGVAALCCATNEDRSWVFDSYSLTGPSVCELVRAPGFARLPLVVEDFVKDSGACFSASEPDAVHVVLDRHLVTGQNASSTVPAVQNLLFLCGSRK

SEQ ID NO: 5810 - protein, 250 aa, Homo Sapiens
MASERLPNRPACLLVASGAAEGVSAQSFLHCFTMASTAFNLQVATPGGKAMEFVDVTESNARWVQDFRLKAYASPAKLESIDGARYHALLIPSCPGALTDLASSGSLARILQHFHSESKPICAVGHGVAALCCATNEDRSWVFDSYSLTGPSVCELVRAPGFARLPLVVEDFVKDSGACFSGAAASCPKADRHWQHFPVEEIFLACGFKVAGLGAAPGWGRGGKQEDRPPEEQRRAGEDFPIYQCVFIYP

SEQ ID NO: 5811 - protein, 120 aa, Homo Sapiens
MASERLPNRPACLLVASGAAEGVSAQSFLHCFTMASTAFNLQVATPGGKAMEFVDVTESNARWVQDFRLKAYASPAKLESIDGARYHALLIPSCPGALTDLASSGSLARILQHFHSESSR

SEQ ID NO: 5812 - protein, 162 aa, Homo Sapiens
WVQDFRLKAYASPAKLESIDGARYHALLIPSCPGALTDLASSGSLARILQHFHSESKPICAVGHGVAALCCATNEDRSWVFDSYSLTGPSVCELVRAPGFARLPLVVEDFVKDSGACFSGQGLGQHQAGAEEESKRTDLQKSSGGRVRISPYTSVCSSTHEE

SEQ ID NO: 5813 - protein, 87 aa, Homo Sapiens
  misc_feature (1)..(1): Xaa can be any naturally occurring amino acid
XPSVCELVRAPGFARLPLVVEDFVKDSGACFSASEPDAVHVVLDRHLVTGQNASSTVPAVQNLLFLCGSRSSSLLPQGRPALAALSC

SEQ ID NO: 5814 - protein, 487 aa, Homo Sapiens
MEFSSPSREECPKPLSRVSIMAGSLTGLLLLQAVSWASGARPCIPKSFGYSSVVCVCNATYCDSFDPPTFPALGTFSRYESTRSGRRMELSMGPIQANHTGTGIGYNIIRVPMASCDFSIRTYTYADTPDDFQLHNFSLPEEDTKLKIPLIHRALQLAQRPVSLLASPWTSPTWLKTNGAVNGKGSLKGQPGDIYHQTWARYFVKFLDAYAEHKLQFWAVTAENEPSAGLLSGYPFQCLGFTPEHQRDFIARDLGPTLANSTHHNVRLLMLDDQRLLLPHWAKVVLTDPEAAKYVHGIAVHWYLDFLAPAKATLGETHRLFPNTMLFASEACVGSKFWEQSVRLGSWDRGMQYSHSIITNLLYHVVGWTDWNLALNPEGGPNWVRNFVDSPIIVDITKDTFYKQPMFYHLGHFSKFIPEGSQRVGLVASQKNDLDAVALMHPDGSAVVVVLNRSSKDVPLTIKDPAVGFLETISPGYSIHTYLWRRQ

SEQ ID NO: 5815 - protein, 536 aa, Homo Sapiens
MEFSSPSREECPKPLSRVSIMAGSLTGLLLLQAVSWASGARPCIPKSFGYSSVVCVCNATYCDSFDPPTFPALGTFSRYESTRSGRRMELSMGPIQANHTGTGLLLTLQPEQKFQKVKGFGGAMTDAAALNILALSPPAQNLLLKSYFSEEGIGYNIIRVPMASCDFSIRTYTYADTPDDFQLHNFSLPEEDTKLKIPLIHRALQLAQRPVSLLASPWTSPTWLKTNGAVNGKGSLKGQPGDIYHQTWARYFVKFLDAYAEHKLQFWAVTAENEPSAGLLSGYPFQCLGFTPEHQRDFIARDLGPTLANSTHHNVRLLMLDDQRLLLPHWAKVVLTDPEAAKYVHGIAVHWYLDFLAPAKATLGETHRLFPNTMLFASEACVGSKFWEQSVRLGSWDRGMQYSHSIITNLLYHVVGWTDWNLALNPEGGPNWVRNFVDSPIIVDITKDTFYKQPMFYHLGHFSKFIPEGSQRVGLVASQKNDLDAVALMHPDGSAVVVVLNRSSKDVPLTIKDPAVGFLETISPGYSIHTYLWRRQ

SEQ ID NO: 5816 - protein, 536 aa, Homo Sapiens; identical to SEQ ID NO: 5815

SEQ ID NO: 5817 - protein, 449 aa, Homo Sapiens
MELSMGPIQANHTGTGLLLTLQPEQKFQKVKGFGGAMTDAAALNILALSPPAQNLLLKSYFSEEGIGYNIIRVPMASCDFSIRTYTYADTPDDFQLHNFSLPEEDTKLKIPLIHRALQLAQRPVSLLASPWTSPTWLKTNGAVNGKGSLKGQPGDIYHQTWARYFVKFLDAYAEHKLQFWAVTAENEPSAGLLSGYPFQCLGFTPEHQRDFIARDLGPTLANSTHHNVRLLMLDDQRLLLPHWAKVVLTDPEAAKYVHGIAVHWYLDFLAPAKATLGETHRLFPNTMLFASEACVGSKFWEQSVRLGSWDRGMQYSHSIITNLLYHVVGWTDWNLALNPEGGPNWVRNFVDSPIIVDITKDTFYKQPMFYHLGHFSKFIPEGSQRVGLVASQKNDLDAVALMHPDGSAVVVVLNRSSKDVPLTIKDPAVGFLETISPGYSIHTYLWRRQ

SEQ ID NO: 5818 - protein, 54 aa, Homo Sapiens
MHRRRLALGLGFCLLAGTSLSVLWVYLENWLPVSYVPYYLPCPEIFILAAPCMV

SEQ ID NO: 5819 - protein, 160 aa, Homo Sapiens
MHRRRLALGLGFCLLAGTSLSVLWVYLENWLPVSYVPYYLPCPEIFNMKLHYKREKPLQPVVWSQYPQPKLLEHRGGSQCPRPPCCQAHTAADTHTLVGAHRLRGNLQPRASAAHLPATEPDHWGHGVCRGEVHSFHPVLPGVSRGVLHAWVPGALLHLH

SEQ ID NO: 5820 - protein, 120 aa, Homo Sapiens
MHRRRLALGLGFCLLAGTSLSVLWVYLENWLPVSYVPYYLPCPEIFNMKLHYKREKPLQPVVWSQYPQPKLLEHRPTQLLTLTPWLAPIVSEGTFNPELLQHIYQPLNLTIGVTVFAVGK

SEQ ID NO: 5821 - protein, 347 aa, Homo Sapiens
MHRRRLALGLGFCLLAGTSLSVLWVYLENWLPVSYVPYYLPCPEIFNMKLHYKREKPLQPVVWSQYPQPKLLEHRPTQLLTLTPWLAPIVSEGTFNPELLQHIYQPLNLTIGVTVFAVGKYTHFIQSFLESAEEFFMRGYRVHYYIFTDNPAAVPGVPLGPHRLLSSIPIQGHSHWEETSMRRMETISQHIAKRAHREVDYLFCLDVDMVFRNPWGPETLGDLVAAIHPSYYAVPRQQFPYERRRVSTAFVADSEGDFYYGGAVFGGQVARVYEFTRGCHMAILADKANGIMAAWREESHLNRHFISNKPSKVLSPEYLWDDRKPQPPSLKLIRFSTLDKDISCLRS

SEQ ID NO: 5822 - protein, 294 aa, Homo Sapiens
MHRRRLALGLGFCLLAGTSLSVLWVYLENWLPVSYVPYYLPCPEIFNMKLHYKREKPLQPVVWSQYPQPKLLEHRPTQLLTLTPWLAPIVSEGTFNPELLQHIYQPLNLTIGVTVFAVGNPSWSQPRSSSCVGTGCTTTSSLTTLQPFPGSRWVPTGFSAPSPSRVTPTGRRHPCAGWRPSASTLLRGLTGRWTTSSALMWTWCFGTRGALRPWETWWLPFTQATTPFPASSSPMSAGVFPLPLWQTAKGTSIMVGQSSGGRWPGYMSLLGAATWPSWRTRPMASWLPGGRKAT

SEQ ID NO: 5823 - protein, 72 aa, Homo Sapiens
MHRRRLALGLGFCLLAGTSLSVLWVYLENWLPVSYVPYYLPCPEILLEYRGVISAHCNLHLPGSSNCHASAT

SEQ ID NO: 5824 - protein, 72 aa, Homo Sapiens; identical to SEQ ID NO: 5823

SEQ ID NO: 5825 - protein, 160 aa, Homo Sapiens
MHRRRLALGLGFCLLAGTSLSVLWVYLENWLPVSYVPYYLPCPEILPMMMALSCLCHQQHEAALQEGEATPARGMVTVPSAQAAGAQAHTAADTHTLVGAHRLRGNLQPRASAAHLPATEPDHWGHGVCRGEVHSFHPVLPGVSRGVLHAWVPGALLHLH

SEQ ID NO: 5826 - protein, 330 aa, Homo Sapiens
MHRRRLALGLGFCLLAGTSLSVLWVYLENWLPVSYVPYYLPCPEILSQYPQPKLLEHRPTQLLTLTPWLAPIVSEGTFNPELLQHIYQPLNLTIGVTVFAVGKYTHFIQSFLESAEEFFMRGYRVHYYIFTDNPAAVPGVPLGPHRLLSSIPIQGHSHWEETSMRRMETISQHIAKRAHREVDYLFCLDVDMVFRNPWGPETLGDLVAAIHPSYYAVPRQQFPYERRRVSTAFVADSEGDFYYGGAVFGGQVARVYEFTRGCHMAILADKANGIMAAWREESHLNRHFISNKPSKVLSPEYLWDDRKPQPPSLKLIRFSTLDKDISCLRS

SEQ ID NO: 5827 - protein, 145 aa, Homo Sapiens
MKRVLVLLLAVAFGHALERGRDYEKNKVCKEFSHLGKEDFTSLSLVLYSRKFPSGTFEQVSQLVKEVVSLTEACCAEGADPDCYDTRTSALSAKSCESNSPFPVHPGTAECCTKEGLERKLCMAALKHQPQEFPTYVEPTNDEIC

SEQ ID NO: 5828 - protein, 474 aa, Homo Sapiens
MKRVLVLLLAVAFGHALERGRDYEKNKVCKEFSHLGKEDFTSLSLVLYSRKFPSGTFEQVSQLVKEVVSLTEACCAEGADPDCYDTRTSALSAKSCESNSPFPVHPGTAECCTKEGLERKLCMAALKHQPQEFPTYVEPTNDEICEAFRKDPKEYANQFMWEYSTNYGQAPLSLLVSYTKSYLSMVGSCCTSASPTVCFLKERLQLKHLSLLTTLSNRVCSQYAAYGEKKSRLSNLIKLAQKVPTADLEDVLPLAEDITNILSKCCESASEDCMAKELPEHTVKLCDNLSTKNSKFEDCCQEKTAMDVFVCTYFMPAAQLPELPDVELPTNKDVCDPGNTKVMDKYTFELSRRTHLPEVFLSKVLEPTLKSLGECCDVEDSTTCFNAKGPLLKKELSSFIDKGQELCADYSENTFTEYKKKLAERLKAKLPDATPTELAKLVNKHSDFASNCCSINSPPLYCDSEIDAELKNIL

SEQ ID NO: 5829 - protein, 348 aa, Homo Sapiens
MKRVLVLLLAVAFGHALERGRDYEKNKVCKEFSHLGKEDFTSLSLVLYSRKFPSGTFEQVSQLVKEVVSLTEACCAEGADPDCYDTRTSALSAKSCESNSPFPVHPGTAECCTKEGLERKLCMAALKHQPQEFPTYVEPTNDEICEAFRKDPKEYANQFMWEYSTNYGQAPLSLLVSYTKSYLSMVGSCCTSASPTVCFLKERLQLKHLSLLTTLSNRVCSQYAAYGEKKSRLSNLIKLAQKVPTADLEDVLPLAEDITNILSKCCESASEDCMAKELPEHTVKLCDNLSTKNSKFEDCCQEKTAMDVFVCTYFMPAAQLPELPDVELPTNKDVCDPGNTKVMDKALY

SEQ ID NO: 5830 - protein, 476 aa, Homo Sapiens
MKRVLVLLLAVAFGHALERGRDYEKNKVCKEFSHLGKEDFTSLSLVLYSRKFPSGTFEQVSQLVKEVVSLTEACCAEGADPDCYDTRTSALSAKSCESNSPFPVHPGTAECCTKEGLERKLCMAALKHQPQEFPTYVEPTNDEICEAFRKDPKEYANQFMWEYSTNYGQAPLSLLVSYTKSYLSMVGSCCTSASPTVCFLKERLQLKHLSLLTTLSNRVCSQYAAYGEKKSRLSNLIKLAQKVPTADLEDVLPLAEDITNILSKCCESASEDCMAKELPEHTVKLCDNLSTKNSKFEDCCQEKTAMDVFVCTYFMPAAQLPELPDVELPTNKDVCDPGNTKVMDKYTFELSRRTHLPEVFLSKVLEPTLKSLGECCDVEDSTTCFNAKGPLLKKELSSFIDKGQELCADYSENTFTEYKKKLAERLKAKLPDATPTELAKLVNKHSDFASNCCSINSPPLYCDSETRVGATQGNDL

SEQ ID NO: 5831 - protein, 493 aa, Homo Sapiens
MLWSWSEERGGAARLSGRKMKRVLVLLLAVAFGHALERGRDYEKNKVCKEFSHLGKEDFTSLSLVLYSRKFPSGTFEQVSQLVKEVVSLTEACCAEGADPDCYDTRTSALSAKSCESNSPFPVHPGTAECCTKEGLERKLCMAALKHQPQEFPTYVEPTNDEICEAFRKDPKEYANQFMWEYSTNYGQAPLSLLVSYTKSYLSMVGSCCTSASPTVCFLKERLQLKHLSLLTTLSNRVCSQYAAYGEKKSRLSNLIKLAQKVPTADLEDVLPLAEDITNILSKCCESASEDCMAKELPEHTVKLCDNLSTKNSKFEDCCQEKTAMDVFVCTYFMPAAQLPELPDVELPTNKDVCDPGNTKVMDKYTFELSRRTHLPEVFLSKVLEPTLKSLGECCDVEDSTTCFNAKGPLLKKELSSFIDKGQELCADYSENTFTEYKKKLAERLKAKLPDATPTELAKLVNKHSDFASNCCSINSPPLYCDSEIDAELKNIL

SEQ ID NO: 5832 - protein, 180 aa, Homo Sapiens
MKSIYFVAGLFVMLVQGSWQRSLQDTEEKSRSFSASQADPLSDPDQMNEDKRHSQGTFTSDYSKYLDSRRAQDFVQWLMNTKRNRNNIAKRHDEFERHAEGTFTSDVSSYLEGQAAKEFIAWLVKGRGRRDFPEEVAIVEELGRRHADGSFSDEMNTILDNLAARDFINWLIQTKITDRK

SEQ ID NO: 5833 - protein, 180 aa, Homo Sapiens; identical to SEQ ID NO: 5832

SEQ ID NO: 5834 - protein, 80 aa, Homo Sapiens
MPPCQPQRPLLLLLLLLACQPQVPSAQVMDFLFEKWKLYGDQCHHNLSLLPPPTELVCNRTFDKYSCWPDTPANTTANIS

SEQ ID NO: 5835 - protein, 477 aa, Homo Sapiens
MPPCQPQRPLLLLLLLLACQPQVPSAQVMDFLFEKWKLYGDQCHHNLSLLPPPTELVCNRTFDKYSCWPDTPANTTANISCPWYLPWHHKVQHRFVFKRCGPDGQWVRGPRGQPWRDASQCQMDGEEIEVQKEVAKMYSSFQVMYTVGYSLSLGALLLALAILGGLSKLHCTRNAIHANLFASFVLKASSVLVIDGLLRTRYSQKIGDDLSVSTWLSDGAVAGCRVAAVFMQYGIVANYCWLLVEGLYLHNLLGLATLPERSFFSLYLGIGWGAPMLFVVPWAVVKCLFENVQCWTSNDNMGFWWILRFPVFLAILINFFIFVRIVQLLVAKLRARQMHHTDYKFRLAKSTLTLIPLLGVHEVVFAFVTDEHAQGTLRSAKLFFDLFLSSFQGLLVAVLYCFLNKEVQSELRRRWHRWRLGKVLWEERNTSNHRASSSPGHGPPSKELQFGRGGGSQDSSAETPLAGGLPRLAESPF

SEQ ID NO: 5836 - protein, 523 aa, Homo Sapiens
MPPCQPQRPLLLLLLLLACQPQVPSAQVMDFLFEKWKLYGDQCHHNLSLLPPPTELVCNRTFDKYSCWPDTPANTTANISCPWYLPWHHKVQHRFVFKRCGPDGQWVRGPRGQPWRDASQCQMDGEEIEVQKEVAKMYSSFQVMYTVGYSLSLGALLLALAILGGLSKLHCTRNAIHANLFASFVLKASSVLVIDGLLRTRYSQKIGDDLSVSTWLSDGVSPPRRPQAGGWVGSQAGGHVAALTLHLYQAVAGCRVAAVFMQYGIVANYCWLLVEGLYLHNLLGLATLPERSFFSLYLGIGWGAPMLFVVPWAVVKCLFENVQCWTSNDNMGFWWILRFPVFLAILINFFIFVRIVQLLVAKLRARQMHHTDYKFRLAKSTLTLIPLLGVHEVVFAFVTDEHAQGTLRSAKLFFDLFLSSFQVPARPPAPPPGAQCATPDHPVSPGPAGGCPLLLPQQGGAVGAAAALAPLAPGQSAMGGAEHQQPQGLIFARPRPSQQGAAVWEGWWQPGFICGDPLGWWPP

SEQ ID NO: 5837 - protein, 308 aa, Homo Sapiens
MFVQLLRAIYVPQNVYCIHVDEKAPMKYKTAVQTLVNCFENVFISSKTEKVAYAGFTRLQADINCMKVLVHSKFQWNYVINLCGQDFPIKTNREIIHYIRSKWSDKNITPGVIQPLHIKSKTSQSHLEFVPKGSIYAPPNNRFKDKPPHNLTIYFGSAYYVLTRKFVEFILTDIHAKDMLQWSKDIRSPEQHYWVTLNRLKDAPGATPNAGWEGNVRAIKRKSEEGNVHDGCKGRYVEDICVYGPGDLPWLIQSPSLFANKFEPSTDPLVVTCLERRHRLQVLRQAEVPIEPHWHFQQQSHFNMRLNR

SEQ ID NO: 5838 - protein, 429 aa, Homo Sapiens
MSQLRATKSGLVVRAVICIFIFLYLRNPTPAESEEEPAQPEVVECGFYPDELCSALFEGKGAAPIAKFCKTPHKSEIHAHLHTPGNCSRISRGLHFITRPLSAEEGDFSLAYIITIHKELAMFVQLLRAIYVPQNVYCIHVDEKAPMKYKTAVQTLVNCFENVFISSKTEKVAYAGFTRLQADINCMKVLVHSKFQWNYVINLCGQDFPIKTNREIIHYIRSKWSDKNITPGVIQPLHIKSKTSQSHLEFVPKGSIYAPPNNRFKDKPPHNLTIYFGSAYYVLTRKFVEFILTDIHAKDMLQWSKDIRSPEQHYWVTLNRLKDAPGATPNAGWEGNVRAIKRKSEEGNVHDGCKGRYVEDICVYGPGDLPWLIQSPSLFANKFEPSTDPLVVTCLERRHRLQVLRQAEVPIEPHWHFQQQSHFNMRLNR

SEQ ID NO: 5839 - protein, 50 aa, Homo Sapiens
MALRVVRSVRALLCTLRAVPSPAAPCPPRPWQLGVGAVRTLRTGPALLSG

SEQ ID NO: 5840 - protein, 58 aa, Homo Sapiens
MALRVVRSVRALLCTLRAVPSPAAPCPPRPWQLGVGAVRTLRTGPALLSGSVGRCCLL

SEQ ID NO: 5841 - protein, 162 aa, Homo Sapiens
MALRVVRSVRALLCTLRAVPSPAAPCPPRPWQLGVGAVRTLRTGPALLSVRKFTEKHEWVTTENGIGTVGISNFAQEALGDVVYCSLPEVGTKLNKQDEFGALESVKAASELYSPLSGEVTEINEALAENPGLVNKSCYEDGKLLLEISQGITTTVNILSRI

SEQ ID NO: 5842 - protein, 173 aa, Homo Sapiens
MALRVVRSVRALLCTLRAVPSPAAPCPPRPWQLGVGAVRTLRTGPALLSVRKFTEKHEWVTTENGIGTVGISNFAQEALGDVVYCSLPEVGTKLNKQDEFGALESVKAASELYSPLSGEVTEINEALAENPGLVNKSCYEDGWLIKMTLSNPSELDELMSEEAYEKYIKSIEE

SEQ ID NO: 5843 - protein, 118 aa, Homo Sapiens
SVRALLCTLRAVPSPAAPCPPRPWQLGVGAVRTLRTGPALLSDEFGALESVKAASELYSPLSGEVTEINEALAENPGLVNKSCYEDGWLIKMTLSNPSELDELMSEEAYEKYIKSIEE

SEQ ID NO: 5844 - protein, 66 aa, Homo Sapiens
  misc_feature (1)..(1): Xaa can be any naturally occurring amino acid
XCTLRAVPSPAAPCPPRPWQLGVGAVRTLRTGPALLSVRKFTEKHEWVTTENGIGTVGISNFAQVG

SEQ ID NO: 5845 - protein, 100 aa, Homo Sapiens
  misc_feature (1)..(1): Xaa can be any naturally occurring amino acid
XEKHEWVTTENGIGTVGISNFAQEALGDVVYCSLPEVGTKLNKQGEVTEINEALAENPGLVNKSCYEDGWLIKMTLSNPSELDELMSEEAYEKYIKSIEE

SEQ ID NO: 5846 - protein, 105 aa, Homo Sapiens
  misc_feature (1)..(1): Xaa can be any naturally occurring amino acid
XTLRTGPALLSVRKFTEKHEWVTTENGIGTVGISNFAQEALGDVVYCSLPEVGTKLNKQDEFGALESVKAASELYSPLSGEVTEINEALAENPGLVNKSCYEDVS

SEQ ID NO: 5847 - protein, 80 aa, Homo Sapiens
  misc_feature (1)..(1): Xaa can be any naturally occurring amino acid
XVRSVRALLCTLRAVPSPAAPCPPRPWQLGVGAVRTLRTGPALLSVRKFTEKHEWVTTENGIGTVGISNFAQMSLVLWKV

SEQ ID NO: 5848 - protein, 372 aa, Homo Sapiens; identical to SEQ ID NO: 2630

SEQ ID NO: 5849 - protein, 478 aa, Homo Sapiens
MAHVPARTSPGPGPQLLLLLLPLFLLLLRDVAGSHRAPAWSALPAAADGLQGDRDLQRHPGDAAATLGPSAQDMVAVHMHRLYEKYSRQGARPGGGNTVRSFRARLEVVDQKAVYFFNLTSMQDSEMILTATFHFYSEPPRWPRALEVLCKPRAKNASGRPLPLGPPTRQHLLFRSLSQNTATQGLLRGAMALAPPPRGLWQAKDISPIVKAARRDGELLLSAQLDSEERDPGVPRPSPYAPYILVYANDLAISEPNSVAVTLQRYDPFPAGDPEPRAAPNNSADPRVRRAAQATGPLQDNELPGLDERPPRAHAQHFHKHQLWPSPFRALKPRPGRKDRRKKGQEVFMAASQVLDFDEKTMQKARRKQWDEPRVCSRRYLKVDFADIGWNEWIISPKSFDAYYCAGACEFPMPKIVRPSNHATIQSIVRAVGIIPGIPEPCCVPDKMNSLGVLFLDENRNVVLKVYPNMSVDTCACR

SEQ ID NO: 5850 - protein, 407 aa, Homo Sapiens
MVLAAPLLLGFLLLALELRPRGEAAEGPAAAAAAAAAAAAAGVGGERSSRPAPSVAPEPDGCPVCVWRQHSRELRLESIKSQILSKLRLKEAPNISREVVKQLLPKAPPLQQILDLHDFQGDALQPEDFLEEDEYHATTETVISMAQETDPAVQTDGSPLCCHFHFSPKVMFTKVLKAQLWVYLRPVPRPATVYLQILRLKPLTGEGTAGGGGGGRRHIRIRSLKIELHSRSGHWQSIDFKQVLHSWFRQPQSNWGIEINAFDPSGTDLAVTSLGPGAEGLHPFMELRVLENTKRSRRNLGLDCDEHSSESRCCRYPLTVDFEAFGWDWIIAPKRYKANYCSGQCEYMFMQKYPHTHLVQQANPRGSAGPCCTPTKMSPINMLYFNDKQQIIYGKIPGMVVDRCGCS

SEQ ID NO: 5851 - protein, 380 aa, Homo Sapiens
  misc_feature (1)..(1): Xaa can be any naturally occurring amino acid
XAAAAAAAAAAAAAGVGGERSSRPAPSVAPEPDGCPVCVWRQHSRELRLESIKSQILSKLRLKEAPNISREVVKQLLPKAPPLQQILDLHDFQGDALQPEDFLEEDEYHATTETVISMAQETDPAVQTDGSPLCCHFHFSPKVMFTKVLKAQLWVYLRPVPRPATVYLQILRLKPLTGEGTAGGGGGGRRHIRIRSLKIELHSRSGHWQSIDFKQVLHSWFRQPQSNWGIEINAFDPSGTDLAVTSLGPGAEGLHPFMELRVLENTKRSRRNLGLDCDEHSSESRCCRYPLTVDFEAFGWDWIIAPKRYKANYCSGQCEYMFMQKYPHTHLVQQANPRGSAGPCCTPTKMSPINMLYFNDKQQIIYGKIPGMVVDRCGCS

SEQ ID NO: 5852 - protein, 6 aa, Homo Sapiens
MPGQEL

SEQ ID NO: 5853 - protein, 113 aa, Homo Sapiens
MPGQELRTVNGSQMLLVLLVLSWLPHGGALSLAEASRASFPGPSELHSEDSRFRELRKRYEDLLTRLRANQSWEDSNTDLVPAPAVRILTPEVRLGSGGHLHLRISRAALPEG

SEQ ID NO: 5854 - protein, 308 aa, Homo Sapiens
MPGQELRTVNGSQMLLVLLVLSWLPHGGALSLAEASRASFPGPSELHSEDSRFRELRKRYEDLLTRLRANQSWEDSNTDLVPAPAVRILTPEVRLGSGGHLHLRISRAALPEGLPEASRLHRALFRLSPTASRSWDVTRPLRRQLSLARPQAPALHLRLSPPPSQSDQLLAESSSARPQLELHLRPQAARGRRRARARNGDHCPLGPGRCCRLHTVRASLEDLGWADWVLSPREVQVTMCIGACPSQFRAANMHAQIKTSLHRLKPDTVPAPCCVPASYNPMVLIQKTDTGVSLQTYDDLLAKDCHCI

SEQ ID NO: 5855 - protein, 429 aa, Homo Sapiens
MCPGALWVALPLLSLLAGSLQGKPLQSWGRGSAGGNAHSPLGVPGGGLPEHTFNLKMFLENVKVDFLRSLNLSGVPSQDKTRVEPPQYMIDLYNRYTSDKSTTPASNIVRSFSMEDAISITATEDFPFQKHILLFNISIPRHEQITRAELRLYVSCQNHVDPSHDLKGSVVIYDVLDGTDAWDSATETKTFLVSQDIQDEGWETLEVSSAVKRWVRSDSTKSKNKLEVTVESHRKGCDTLDISVPPGSRNLPFFVVFSNDHSSGTKETRLELREMISHEQESVLKKLSKDGSTEAGESSHEEDTDGHVAAGSTLARRKRSAGAGSHCQKTSLRVNFEDIGWDSWIIAPKEYEAYECKGGCFFPLADDVTPTKHAIVQTLVHLKFPTKVGKACCVPTKLSPISVLYKDDMGVPTLKYHYEGMSVAECGCR

SEQ ID NO: 5856 - protein, 364 aa, Homo Sapiens
MLRFLPDLAFSFLLILALGQAVQFQEYVFLQFLGLDKAPSPQKFQPVPYILKKIFQDREAAATTGVSRDLCYVKELGVRGNVLRFLPDQGFFLYPKKISQASSCLQKLLYFNLSAIKEREQLTLAQLGLDLGPNSYYNLGPELELALFLVQEPHVWGQTTPKPGKMFVLRSVPWPQGAVHFNLLDVAKDWNDNPRKNFGLFLEILVKEDRDSGVNFQPEDTCARLRCSLHASLLVVTLNPDQCHPSRKRRAAIPVPKLSCKNLCHRHQLFINFRDLGWHKWIIAPKGFMANYCHGECPFSLTISLNSSNYAFMQALMHAVDPEIPQAVCIPTKLSPISMLYQDNNDNVILRHYEDMVVDECGCG

SEQ ID NO: 5857 - protein, 501 aa, Homo Sapiens
MRLPKLLTFLLWYLAWLDLEFICTVLGAPDLGQRPQGTRPGLAKAEAKERPPLARNVFRPGGHSYGGGATNANARAKGGTGQTGGLTQPKKDEPKKLPPRPGGPEPKPGHPPQTRQATARTVTPKGQLPGGKAPPKAGSVPSSFLLKKAREPGPPREPKEPFRPPPITPHEYMLSLYRTLSDADRKGGNSSVKLEAGLANTITSFIDKGQDDRGPVVRKQRYVFDISALEKDGLLGAELRILRKKPSDTAKPAAPGGGRAAQLKLSSCPSGRQPAALLDVRSVPGLDGSGWEVFDIWKLFRNFKNSAQLCLELEAWERGRAVDLRGLGFDRAARQVHEKALFLVFGRTKKRDLFFNEIKARSGQDDKTVYEYLFSQRRKRRAPLATRQGKRPSKNLKARCSRKALHVNFKDMGWDDWIIAPLEYEAFHCEGLCEFPLRSHLEPTNHAVIQTLMNSMDPESTPPTCCVPTRLSPISILFIDSANNVVYKQYEDMVVESCGCR

SEQ ID NO: 5858 - protein, 501 aa, Homo Sapiens; identical to SEQ ID NO: 5857

SEQ ID NO: 5859 - protein, 271 aa, Homo Sapiens [sequence omitted]

SEQ ID NO: 5860 - protein, 455 aa, Homo Sapiens
MDTPRVLLSAVFLISFLWDLPGFQQASISSSSSSAELGSTKGMRSRKEGKMQRAPRDSDAGREGQEPQPRPQDEPRAQQPRAQEPPGRGPRVVPHEYMLSIYRTYSIAEKLGINASFFQSSKSANTITSFVDRGLDDLSHTPLRRQKYLFDVSMLSDKEELVGAELRLFRQAPSAPWGPPAGPLHVQLFPCLSPLLLDARTLDPQGAPPAGWEVFDVWQGLRHQPWKQLCLELRAAWGELDAGEAEARARGPQQPPPPDLRSLGFGRRVRPPQERALLVVFTRSQRKNLFAEMREQLGSAEAAGPGAGAEGSWPPPSGAPDARPWLPSPGRRRRRTAFASRHGKRHGKKSRLRCSKKPLHVNFKELGWDDWIIAPLEYEAYHCEGVCDFPLRSHLEPTNHAIIQTLMNSMDPGSTPPSCCVPTKLTPISILYIDAGNNVVYKQYEDMVVESCGCR

SEQ ID NO: 5861 - protein, 353 aa, Homo Sapiens [sequence omitted]

SEQ ID NO: 5862 - protein, 450 aa, Homo Sapiens
MDLSAAAALCLWLLSACRPRDGLEAAAVLRAAGAGPVRSPGGGGGGGGGGRTLAQAAGAAAVPAAAVPRARAARRAAGSGFRNGSVVPHHFMMSLYRSLAGRAPAGAAAVSASGHGRADTITGFTDQATQDESAAETGQSFLFDVSSLNDADEVVGAELRVLRRGSPESGPGSWTSPPLLLLSTCPGAARAPRLLYSRAAEPLVGQRWEAFDVADAMRRHRREPRPPRAFCLLLRAVAGPVPSPLALRRLGFGWPGGGGSAAEERAVLVVSSRTQRKESLFREIRAQARALGAALASEPLPDPGTGTASPRAVIGGRRRRRTALAGTRTAQGSGGGAGRGHGRRGRSRCSRKPLHVDFKELGWDDWIIAPLDYEAYHCEGLCDFPLRSHLEPTNHAIIQTLLNSMAPDAAPASCCVPARLSPISILYIDAANNVVYKQYEDMVVEACGCR

SEQ ID NO: 5863 - protein, 454 aa, Homo Sapiens
MARPNKFLLWFCCFAWLCFPISLGSQASGGEAQIAASAELESGAMPWSLLQHIDERDRAGLLPALFKVLSVGRGGSPRLQPDSRALHYMKKLYKTYATKEGIPKSNRSHLYNTVRLFTPCTRHKQAPGDQVTGILPSVELLFNLDRITTVEHLLKSVLLYNINNSVSFSSAVKCVCNLMIKEPKSSSRTLGRAPYSFTFNSQFEFGKKHKWIQIDVTSLLQPLVASNKRSIHMSINFTCMKDQLEHPSAQNGLFNMTLVSPSLILYLNDTSAQAYHSWYSLHYKRRPSQGPDQERSLSAYPVGEEAAEDGRSSHHRHRRGQETVSSELKKPLGPASFNLSEYFRQFLLPQNECELHDFRLSFSQLKWDNWIVAPHRYNPRYCKGDCPRAVGHRYGSPVHTMVQNIIYEKLDSSVPRPSCVPAKYSPLSVLTIEPDGSIAYKEYEDMIATKCTCR

SEQ ID NO: 5864 - protein, 366 aa, Homo Sapiens
MKKLYKTYATKEGIPKSNRSHLYNTVRLFTPCTRHKQAPGDQVTGILPSVELLFNLDRITTVEHLLKSVLLYNINNSVSFSSAVKCVCNLMIKEPKSSSRTLGRAPYSFTFNSQFEFGKKHKWIQIDVTSLLQPLVASNKRSIHMSINFTCMKDQLEHPSAQNGLFNMTLVSPSLILYLNDTSAQAYHSWYSLHYKRRPSQGPDQERSLSAYPVGEEAAEDGRSSHHRHRRGQETVSSELKKPLGPASFNLSEYFRQFLLPQNECELHDFRLSFSQLKWDNWIVAPHRYNPRYCKGDCPRAVGHRYGSPVHTMVQNIIYEKLDSSVPRPSCVPAKYSPLSVLTIEPDGSIAYKEYEDMIATKCTCR

SEQ ID NO: 5865 - protein, 366 aa, Homo Sapiens; identical to SEQ ID NO: 5864

SEQ ID NO: 5866 - protein, 366 aa, Homo Sapiens; identical to SEQ ID NO: 5864

SEQ ID NO: 5867 - protein, 366 aa, Homo Sapiens; identical to SEQ ID NO: 5864

SEQ ID NO: 5868 - protein, 61 aa, Homo Sapiens
MKLWDVVAVCLVLLHTASAFPLPAANMPEDYPDQFDDVMDFIQATIKRLKRSPDKQMAVLP

SEQ ID NO: 5869 - protein, 61 aa, Homo Sapiens; identical to SEQ ID NO: 5868

SEQ ID NO: 5870 - protein, 185 aa, Homo Sapiens
MKLWDVVAVCLVLLHTASAFPLPAANMPEDYPDQFDDVMDFIQATIKRLKRSPDKQMAVLPRRERNRQAAAANPENSRGKGRRGQRGKNRGCVLTAIHLNVTDLGLGYETKEELIFRYCSGSCDAAETTYDKILKNLSRNRRLVSDKVGQACCRPIAFDDDLSFLDDNLVYHILRKHSAKRCGCI

SEQ ID NO: 5871 - protein, 185 aa, Homo Sapiens; identical to SEQ ID NO: 5870

SEQ ID NO: 5872 - protein, 211 aa, Homo Sapiens
MKLWDVVAVCLVLLHTASAFPLPAGKRPPEAPAEDRSLGRRRAPFALSSDSNMPEDYPDQFDDVMDFIQATIKRLKRSPDKQMAVLPRRERNRQAAAANPENSRGKGRRGQRGKNRGCVLTAIHLNVTDLGLGYETKEELIFRYCSGSCDAAETTYDKILKNLSRNRRLVSDKVGQACCRPIAFDDDLSFLDDNLVYHILRKHSAKRCGCI

SEQ ID NO: 5873 - protein, 159 aa, Homo Sapiens
MPEDYPDQFDDVMDFIQATIKRLKRSPDKQMAVLPRRERNRQAAAANPENSRGKGRRGQRGKNRGCVLTAIHLNVTDLGLGYETKEELIFRYCSGSCDAAETTYDKILKNLSRNRRLVSDKVGQACCRPIAFDDDLSFLDDNLVYHILRKHSAKRCGCI

SEQ ID NO: 5874 - protein, 202 aa, Homo Sapiens
MQSLPNSNGAAAGRDFKMKLWDVVAVCLVLLHTASAFPLPAANMPEDYPDQFDDVMDFIQATIKRLKRSPDKQMAVLPRRERNRQAAAANPENSRGKGRRGQRGKNRGCVLTAIHLNVTDLGLGYETKEELIFRYCSGSCDAAETTYDKILKNLSRNRRLVSDKVGQACCRPIAFDDDLSFLDDNLVYHILRKHSAKRCGCI

SEQ ID NO: 5875 - protein, 228 aa, Homo Sapiens
MQSLPNSNGAAAGRDFKMKLWDVVAVCLVLLHTASAFPLPAGKRPPEAPAEDRSLGRRRAPFALSSDSNMPEDYPDQFDDVMDFIQATIKRLKRSPDKQMAVLPRRERNRQAAAANPENSRGKGRRGQRGKNRGCVLTAIHLNVTDLGLGYETKEELIFRYCSGSCDAAETTYDKILKNLSRNRRLVSDKVGQACCRPIAFDDDLSFLDDNLVYHILRKHSAKRCGCI

SEQ ID NO: 5876 - protein, 90 aa, Homo Sapiens
MKMLPGVGVFGTGSSARVLVPLLRAEGFTVEALWGKTEEEAKQLAEEMNIAFYTSRTDDILLHQDVDLVCISIPPPLTRQISVKALESSL

SEQ ID NO: 5877 - protein, 385 aa, Homo Sapiens
MKMLPGVGVFGTGSSARVLVPLLRAEGFTVEALWGKTEEEAKQLAEEMNIAFYTSRTDDILLHQDVDLVCISIPPPLTRQISVKALGIGKNVVCEKAATSVDAFRMVTASRYYPQLMSLVGNVLRFLPAFVRMKQLISEHYVGAVMICDARIYSGSLLSPSYGWICDELMGGGGLHTMGTYIVDLLTHLTGRRAEKVHGLLKTFVRQNAAIRGIRHVTSDDFCFFQMLMGGGVCSTVTLNFNMPGAFVHEVMVVGSAGRLVARGADLYGQKNSATQEELLLRDSLAVGAGLPEQGPQDVPLLYLKGMVYMVQALRQSFQGQGDRRTWDRTPVSMAASFEDGLYMQSVVDAIKRSSRSGEWEAVEVLTEEPDTNQNLCEALQRNNL

SEQ ID NO: 5878 - protein, 112 aa, Homo Sapiens
MKMLPGVGVFGTGSSARVLVPLLRAEGFTVEALWGKTEEEAKQLAEEMNIAFYTSRTDDILLHQDVDLVCISIPPPLTRQISVKALGTPGRPQQGQIMSLPLGSPLRVTPLL

SEQ ID NO: 5879 - protein, 112 aa, Homo Sapiens; identical to SEQ ID NO: 5878

SEQ ID NO: 5880 - protein, 88 aa, Homo Sapiens
MKMLPGVGVFGTGSSARVLVPLLRAEGFTVEALWGKTEEEAKQLAEEMNIAFYTSRTDDILLHQDVDLVLGRMWFARRQQHRWMPSGW

SEQ ID NO: 5881 - protein, 103 aa, Homo Sapiens
  misc_feature (1)..(1): Xaa can be any naturally occurring amino acid
XKTEEEAKQLAEEMNIAFYTSRTDDILLHQDVDLVCISIPPPLTRQISVKALGSTCGVPEWSLDGCGGEAQVHTLPRWASTRRVLGRMWFARRQQHRWMPSGW

SEQ ID NO: 5882 - protein, 682 aa, Homo Sapiens
MCGIFAYMNYRVPRTRKEIFETLIKGLQRLEYRGYDSAGVAIDGNNHEVKERHIQLVKKRGKVKALDEELYKQDSMDLKVEFETHFGIAHTRWATHGVPSAVNSHPQRSDKGNEFVVIHNGIITNYKDLRKFLESKGYEFESETDTETIAKLIKYVFDNRETEDITFSTLVERVIQQLEGAFALVFKSVHYPGEAVATRRGSPLLIGVRSKYKLSTEQIPILYRTCTLENVKNICKTRMKRLDSSACLHAVGDKAVEFFFASDASAIIEHTNRVIFLEDDDIAAVADGKLSIHRVKRSASDDPSRAIQTLQMELQQIMKGNFSAFMQKEIFEQPESVFNTMRGRVNFETNTVLLGGLKDHLKEIRRCRRLIVIGCGTSYHAAVATRQVLEELTELPVMVELASDFLDRNTPVFRDDVCFFISQSGETADTLLALRYCKDRGALTVGVTNTVGSSISRETDCGVHINAGPEIGVASTKAYTSQFISLVMFGLMMSEDRISLQNRRQEIIRGLRSLPELIKEVLSLEEKIHDLALELYTQRSLLVMGRGYNYATCLEGALKIKEITYMHSEGILAGELKHGPLALIDKQMPVIMVIMKDPCFAKCQNALQQVTARQGRPIILCSKDDTESSKFAYKTIELPHTVDCLQGILSVIPLQLLSFHLAVLRGYDVDFPRNLAKSVTVE

SEQ ID NO: 5883 - protein, 216 aa, Homo Sapiens
MNLLLNSISLLTFLSEFVVIHNGIITNYKDLRKFLESKGYEFESETDTETIAKLIKYVFDNRETEDITFSTLVERVIQQLEGAFALVFKSVHYPGEAVATRRGSPLLIGVRSKYKLSTEQIPILYRTCTLENVKNICKTRMKRLDSSACLHAVGDKAVEFFFASDASAIIEHTNRVIFLEDDDIAAVADGKLSIHRVKRSASDDPSRAIQTLQMEL

SEQ ID NO: 5884 - protein, 179 aa, Homo Sapiens [sequence omitted]

SEQ ID NO: 5885 - protein, 464 aa, Homo Sapiens
MILANVFCLFFFLDETLRSLASPSSLQGPELHGWRPPVDCVRANELCAAESNCSSRYRTLRQCLAGRDRNTMLANKECQAALEVLQESPLYDCRCKRGMKKELQCLQIYWSIHLGLTEGEEFYEASPYEPVTSRLSDIFRLASIFSGTGADPVVSAKSNHCLDAAKACNLNDNCKKLRSSYISICNREISPTERCNRRKCHKALRQFFDRVPSEYTYRMLFCSCQDQACAERRRQTILPSCSYEDKEKPNCLDLRGVCRTDHLCRSRLADFHANCRASYQTVTSCPADNYQACLGSYAGMIGFDMTPNYVDSSPTGIVVSPWCSCRGSGNMEEECEKFLRDFTENPCLRNAIQAFGNGTDVNVSPKGPSFQATQAPRVEKTPSLPDDLSDSTSLGTSVITTCTSVQEQGLKANNSKELSMCFTELTTNIIPGSNKVIKPNSGPSRARPSAALTVLSVLMLKLAL

SEQ ID NO: 5886 - protein, 265 aa, Homo Sapiens
MILANVFCLFFFLDETLRSLASPSSLQGPELHGWRPPVDCVRANELCAAESNCSSRYRTLRQCLAGRDRNTMLANKECQAALEVLQESPLYDCRCKRGMKKELQCLQIYWSIHLGLTEGEEFYEASPYEPVTSRLSDIFRLASIFSGTGADPVVSAKSNHCLDAAKACNLNDNCKKLRSSYISICNREISPTERCNRRKCHKALRQFFDRVPSEYTYRMLFCSCQDQACAERRRQTILPSCSYEDKEKPNCLDLRGVCRTDHLCR

SEQ ID NO: 5887 - protein, 464 aa, Homo Sapiens; identical to SEQ ID NO: 5885

SEQ ID NO: 5888 - protein, 359 aa, Homo Sapiens
MILANVFCLFFFLGEEFYEASPYEPVTSRLSDIFRLASIFSGTGADPVVSAKSNHCLDAAKACNLNDNCKKLRSSYISICNREISPTERCNRRKCHKALRQFFDRVPSEYTYRMLFCSCQDQACAERRRQTILPSCSYEDKEKPNCLDLRGVCRTDHLCRSRLADFHANCRASYQTVTSCPADNYQACLGSYAGMIGFDMTPNYVDSSPTGIVVSPWCSCRGSGNMEEECEKFLRDFTENPCLRNAIQAFGNGTDVNVSPKGPSFQATQAPRVEKTPSLPDDLSDSTSLGTSVITTCTSVQEQGLKANNSKELSMCFTELTTNIIPGSNKVIKPNSGPSRARPSAALTVLSVLMLKLAL

SEQ ID NO: 5889 - protein, 62 aa, Homo Sapiens
MILANVFCLFFFLGPGPLLRRNGVQREKTCSYIQGRMMPEFSLGYEEGCPTESPWCALAKWV

SEQ ID NO: 5890 - protein, 331 aa, Homo Sapiens
MILANVFCLFFFLGTGADPVVSAKSNHCLDAAKACNLNDNCKKLRSSYISICNREISPTERCNRRKCHKALRQFFDRVPSEYTYRMLFCSCQDQACAERRRQTILPSCSYEDKEKPNCLDLRGVCRTDHLCRSRLADFHANCRASYQTVTSCPADNYQACLGSYAGMIGFDMTPNYVDSSPTGIVVSPWCSCRGSGNMEEECEKFLRDFTENPCLRNAIQAFGNGTDVNVSPKGPSFQATQAPRVEKTPSLPDDLSDSTSLGTSVITTCTSVQEQGLKANNSKELSMCFTELTTNIIPGSNKVIKPNSGPSRARPSAALTVLSVLMLKLAL

SEQ ID NO: 5891 - protein, 74 aa, Homo Sapiens
MLANKECQAALEVLQESPLYDCRCKRGMKKELQCLQIYWSIHLGLTEGEEFYEASPYEPVTSRLSDIFRLASIF

SEQ ID NO: 5892 - protein, 299 aa, Homo Sapiens
MVRCLGPALLLLLLLGSASSVGGNRCVDAAEACTADARCQRLRSEYVAQCLGRAAQGGCPRARCRRALRRFFARGPPALTHALLFCPCAGPACAERRRQTFVPSCAFSGPGPAPPSCLEPLNFCERSRVCRCARAAAGPWRGWGRGLSPAHRPPAAQASPPGLSGLVHPSAQRPRRLPAGPGRPLPARLRGPRGVPAGTAVTPNYVDNVSARVAPWCDCGASGNRREDCEAFRGLFTRNRCLDGAIQAFASGWPPVLLDQLNPQGDPEHSLLQVSSTGRALERRSLLSILPVLALPALL

SEQ ID NO: 5893 - protein, 182 aa, Homo Sapiens
MVRCLGPALLLLLLLGSASSVGGNRCVDAAEACTADARCQRLRSEYVAQCLGRAAQGGCPRARCRRALRRFFARGPPALTHALLFCPCAGPACAERRRQTFVPSCAFSGPGPAPPSCLEPLNFCERSRVCRPRLLAFQVSCTPAPSAPDGCLLDQGARCLRAYAGLVGSPQAPPSPLTTWTT

SEQ ID NO: 5894 - protein, 269 aa, Homo Sapiens
MVRCLGPALLLLLLLGSASSVGGNRCVDAAEACTADARCQRLRSEYVAQCLGRAAQGGCPRARCRRALRRFFARGPPALTHALLFCPCAGPACAERRRQTFVPSCAFSGPGPAPPSCLEPLNFCERSRVCRPRLLAFQVSCTPAPSAPDGCLLDQGARCLRAYAGLVGTAVTPNYVDNVSARVAPWCDCGASGNRREDCEAFRGLFTRNRCLDGAIQAFASGWPPVLLDQLNPQGDPEHSLLQVSSTGRALERRSLLSILPVLALPALL

SEQ ID NO: 5895 - protein, 59 aa, Homo Sapiens
MAATAVAAAVAGTESAQGPPGPAASLELWLNKATDPSMSEQDWSAIQNFCEQVNTDPNG

SEQ ID NO: 5896 - protein, 59 aa, Homo Sapiens; identical to SEQ ID NO: 5895

SEQ ID NO: 5897 - protein, 59 aa, Homo Sapiens; identical to SEQ ID NO: 5895

SEQ ID NO: 5898 - protein, 117 aa, Homo Sapiens
MAATAVAAAVAGTESAQGPPGPAASLELWLNKATDPSMSEQDWSAIQNFCEQVNTDPNGPTHAPWLLAHKIQSPQEKEALYALTPGGEPGTTGFPPSPGGPVSVQVLEMCMNHCGEK

SEQ ID NO: 5899 - protein, 613 aa, Homo Sapiens
MAATAVAAAVAGTESAQGPPGPAASLELWLNKATDPSMSEQDWSAIQNFCEQVNTDPNGPTHAPWLLAHKIQSPQEKEALYALTVLEMCMNHCGEKFHSEVAKFRFLNELIKVLSPKYLGSWATGKVKGRVIEILFSWTVWFPEDIKIRDAYQMLKKQGIIKQDPKLPVDKILPPPSPWPKSSIFDADEEKSKLLTRLLKSNHPEDLQAANRLIKNLVKEEQEKSEKVSKRVSAVEEVRSHVKVLQEMLSMYRRPGQAPPDQEALQVVYERCEKLRPTLFRLASDTTDDDDALAEILQANDLLTQGVLLYKQVMEGRVTFGNRVTSSLGDIPVSRVFQNPAGCMKTCPLIDLEVDNGPAQMGTVVPSLLHQDLAALGISDAPVTGMVSGQNCCEEKRNPSSSTLPGGGVQNPSADRNLLDLLSAQPAPCPLNYVSQKSVPKEVPPGTKSSPGWSWEAGPLAPSPSSQNTPLAQVFVPLESVKPSSLPPLIVYDRNGFRILLHFSQTGAPGHPEVQVLLLTMMSTAPQPVWDIMFQVAVPKSMRVKLQPASSSKLPAFSPLMPPAVISQMLLLDNPHKEPIRLRYKLTFNQGGQPFSEVGEVKDFPDLAVLGAA

SEQ ID NO: 5900 - protein, 223 aa, Homo Sapiens
MAATAVAAAVAGTESAQGPPGPAASLELWLNKATDPSMSEQDWSAIQNFCEQVNTDPNGPTHAPWLLAHKIQSPQEKEALYALTVLEMCMNHCGEKFHSEVAKFRFLNELIKVLSPKYLGSWATGKVKGRVIEILFSWTVWFPEDIKIRDAYQMLKKQGIIKQDPKLPVDKILPPPSPWPKSSIFDADEEKSKLLTRLLKSNHPEDLQAAVLKVAVVYGITPF

SEQ ID NO: 5901 - protein, 49 aa, Homo Sapiens
MAATAVAAAVAGTESAQGPPGPAASLELWLSDHRPKHVGTGLVSYPEFL

SEQ ID NO: 5902 - protein, 125 aa, Homo Sapiens
MVKLPFSLSLQLANSCPSPEDKATDPSMSEQDWSAIQNFCEQVNTDPNGPTHAPWLLAHKIQSPQEKEALYALTVLEMCMNHCGEKFHSEVAKFRFLNELIKVLSPKYLGSWATGKVKGRVIEIL

SEQ ID NO: 5903 - protein, 129 aa, Homo Sapiens
  misc_feature (1)..(1): Xaa can be any naturally occurring amino acid
XAVAGTESAQGPPGPAASLELWLNKATDPSMSEQDWSAIQNFCEQVNTDPNGPTHAPWLLAHKIQSPQEKEALYALTCPHRLEAGLALVPAQSPASDYQPGGEPGTTGFPPSPGGPVSVQVLEMCMNHC

SEQ ID NO: 5904 - protein, 318 aa, Homo Sapiens
MASPGCLLCVLGLLLCGAASLELSRPHGDTAKKPIIGILMQKCRNKVMKNYGRYYIAASYVKYLESAGARVVPVRLDLTEKDYEILFKSINGILFPGGSVDLRRSDYAKVAKIFYNLSIQSFDDGDYFPVWGTCLGFEELSLLISGECLLTATDTVDVAMPLNFTGGQLHSRMFQNFPTELLLSLAVEPLTANFHKWSLSVKNFTMNEKLKKFFNVLTTNTDGKIEFISTMEGYKYPVYGVQWHPEKAPYEWKNLDGISHAPNAVKTAFYLAEFFVNEARKNNHHFKSESEEEKALIYQFSPIYTGNISSFQQCYIFD

SEQ ID NO: 5905 - protein, 30 aa, Homo Sapiens
MKKKLVVLGLLAVVLVLVIVGLCLWLPSAS

SEQ ID NO: 5906 - protein, 37 aa, Homo Sapiens
MKKKLVVLGLLAVVLVLVIVGLCLWLPSASKEPDNHV

SEQ ID NO: 5907 - protein, 68 aa, Homo Sapiens
MKKKLVVLGLLAVVLVLVIVGLCLWLPSASKEPDNHVYTRAAVAADAKQCSKIGRDALRDGGSAVDAA

SEQ ID NO: 5908 - protein, 80 aa, Homo Sapiens
MKKKLVVLGLLAVVLVLVIVGLCLWLPSASKEPDNHVYTRAAVAADAKQCSKIGRDALRDGGSAVDAAIAALLCVGLMNA

SEQ ID NO: 5909 - protein, 98 aa, Homo Sapiens
MKKKLVVLGLLAVVLVLVIVGLCLWLPSASKEPDNHVYTRAAVAADAKQCSKIGRDALRDGGSAVDAAIAALLCVGLMNAHSMGIGGGLFLTIYNSTT

SEQ ID NO: 5910 - protein, 109 aa, Homo Sapiens
MKKKLVVLGLLAVVLVLVIVGLCLWLPSASKEPDNHVYTRAAVAADAKQCSKIGRDALRDGGSAVDAAIAALLCVGLMNAHSMGIGGGLFLTIYNSTTRKAEVINAREV

SEQ ID NO: 5911 - protein, 111 aa, Homo Sapiens
MKKKLVVLGLLAVVLVLVIVGLCLWLPSASKEPDNHVYTRAAVAADAKQCSKIGRDALRDGGSAVDAAIAALLCVGLMNAHSMGIGGGLFLTIYNSTTRKAEVINAREVAP

SEQ ID NO: 5912 - protein, 116 aa, Homo Sapiens
MKKKLVVLGLLAVVLVLVIVGLCLWLPSASKEPDNHVYTRAAVAADAKQCSKIGRDALRDGGSAVDAAIAALLCVGLMNAHSMGIGGGLFLTIYNSTTRKAEVINAREVAPRLAFA

SEQ ID NO: 5913 - protein, 120 aa, Homo Sapiens
MKKKLVVLGLLAVVLVLVIVGLCLWLPSASKEPDNHVYTRAAVAADAKQCSKIGRDALRDGGSAVDAAIAALLCVGLMNAHSMGIGGGLFLTIYNSTTRKAEVINAREVAPRLAFATMFN

SEQ ID NO: 5914 - protein, 126 aa, Homo Sapiens
MKKKLVVLGLLAVVLVLVIVGLCLWLPSASKEPDNHVYTRAAVAADAKQCSKIGRDALRDGGSAVDAAIAALLCVGLMNAHSMGIGGGLFLTIYNSTTRKAEVINAREVAPRLAFATMFNSSEQSQ

SEQ ID NO: 5915 - protein, 126 aa, Homo Sapiens; identical to SEQ ID NO: 5914

SEQ ID NO: 5916 - protein, 127 aa, Homo Sapiens
MKKKLVVLGLLAVVLVLVIVGLCLWLPSASKEPDNHVYTRAAVAADAKQCSKIGRDALRDGGSAVDAAIAALLCVGLMNAHSMGIGGGLFLTIYNSTTRKAEVINAREVAPRLAFATMFNSSEQSQK

SEQ ID NO: 5917 - protein, 174 aa, Homo Sapiens
MKKKLVVLGLLAVVLVLVIVGLCLWLPSASKEPDNHVYTRAAVAADAKQCSKIGRDALRDGGSAVDAAIAALLCVGLMNAHSMGIGGGLFLTIYNSTTRKAEVINAREVAPRLAFATMFNSSEQSQKGGLSVAVPGEIRGYELAHQRHGRLPWARLFQPSIQLARQGFPVGKGL

SEQ ID NO: 5918 - protein, 569 aa, Homo Sapiens
MKKKLVVLGLLAVVLVLVIVGLCLWLPSASKEPDNHVYTRAAVAADAKQCSKIGRDALRDGGSAVDAAIAALLCVGLMNAHSMGIGGGLFLTIYNSTTRKAEVINAREVAPRLAFATMFNSSEQSQKGGLSVAVPGEIRGYELAHQRHGRLPWARLFQPSIQLARQGFPVGKGLAAALENKRTVIEQQPVLCEVFCRDRKVLREGERLTLPQLADTYETLAIEGAQAFYNGSLTAQIVKDIQAAGGIVTAEDLNNYRAELIEHPLNISLGDVVLYMPSAPLSGPVLALILNILKGYNFSRESVESPEQKGLTYHRIVEAFRFAYAKRTLLGDPKFVDVTEVVRNMTSEFFAAQLRAQISDDTTHPISYYKPEFYTPDDGGTAHLSVVAEDGSAVSATSTINLYFGSKVRSPVSGILFNNEMDDFSSPSITNEFGVPPSPANFIQPGKQPLSSMCPTIMVGQDGQVRMVVGAAGGTQITTATALAIIYNLWFGYDVKRAVEEPRLHNQLLPNVTTVERNIDQAVTAALETRHHHTQIASTFIAVVQAIVRTAGGWAAASDSRKGGEPAGY

SEQ ID NO: 5919 - protein, 366 aa, Homo Sapiens
MKKKLVVLGLLAVVLVLVIVGLCLWLPSASKEPDNHVYTRAAVAADAKQCSKIGRDALRDGGSAVDAAIAALLCVGLMNAHSMGIGGGLFLTIYNSTTRKAEVINAREVAPRLAFATMFNSSEQSQKGGLSVAVPGEIRGYELAHQRHGRLPWARLFQPSIQLARQGFPVGKGLAAALENKRTVIEQQPVLCEVFCRDRKVLREGERLTLPQLADTYETLAIEGAQAFYNGSLTAQIVKDIQAAGGIVTAEDLNNYRAELIEHPLNISLGDVVLYMPSAPLSGPVLALILNILKGYNFSRESVESPEQKGLTYHRIVEAFRFAYAKRTLLGDPKFVDVTEASSGVSAGGPQHDLRVLRCPAPGPDL

SEQ ID NO: 5920 - protein, 463 aa, Homo Sapiens
MKKKLVVLGLLAVVLVLVIVGLCLWLPSASKEPDNHVYTRAAVAADAKQCSKIGRDALRDGGSAVDAAIAALLCVGLMNAHSMGIGGGLFLTIYNSTTRKAEVINAREVAPRLAFATMFNSSEQSQKGGLSVAVPGEIRGYELAHQRHGRLPWARLFQPSIQLARQGFPVGKGLAAALENKRTVIEQQPVLCEVFCRDRKVLREGERLTLPQLADTYETLAIEGAQAFYNGSLTAQIVKDIQAAGGIVTAEDLNNYRAELIEHPLNISLGDVVLYMPSAPLSGPVLALILNILKGYNFSRESVESPEQKGLTYHRIVEAFRFAYAKRTLLGDPKFVDVTEVVRNMTSEFFAAQLRAQISDDTTHPISYYKPEFYTPDDGGTAHLSVVAEDGSAVSATSTINLYFGSKVRSPVSGILFNNEMDDFSSPSITNEFGVPPSPANFIQPGKQPLSSMCPTIMVGQDG

SEQ ID NO: 5921 - protein, 569 aa, Homo Sapiens; identical to SEQ ID NO: 5918

SEQ ID NO: 5922 - protein, 569 aa, Homo Sapiens; identical to SEQ ID NO: 5918

SEQ ID NO: 5923 - protein, 218 aa, Homo Sapiens
MTSEFFAAQLRAQISDDTTHPISYYKPEFYTPDDGGTAHLSVVAEDGSAVSATSTINLYFGSKVRSPVSGILFNNEMDDFSSPSITNEFGVPPSPANFIQPGKQPLSSMCPTIMVGQDGQPPSHADHTPMPQAIIYNLWFGYDVKRAVEEPRLHNQLLPNVTTVERNIDQAVTAALETRHHHTQIASTFIAVVQAIVRTAGGWAAASDSRKGGEPAGY

SEQ ID NO: 5924 - protein, 225 aa, Homo Sapiens
MTSEFFAAQLRAQISDDTTHPISYYKPEFYTPDDGGTAHLSVVAEDGSAVSATSTINLYFGSKVRSPVSGILFNNEMDDFSSPSITNEFGVPPSPANFIQPGKQPLSSMCPTIMVGQDGQVRMVVGAAGGTQITTATALAIIYNLWFGYDVKRAVEEPRLHNQLLPNVTTVERNIDQAVTAALETRHHHTQIASTFIAVVQAIVRTAGGWAAASDSRKGGEPAGY

SEQ ID NO: 5925 - protein, 225 aa, Homo Sapiens; identical to SEQ ID NO: 5924

SEQ ID NO: 5926 - protein, 225 aa, Homo Sapiens; identical to SEQ ID NO: 5924

SEQ ID NO: 5927 - protein, 252 aa, Homo Sapiens
MTSEFFAAQLRAQISDDTTHPISYYKPEFYTPDDGGTAHLSVVAEDGSAVSATSTINLYFGSKVRSPVSGILFNNEMDDFSSPSITNEFGVPPSPANFIQPGKQPLSSMCPTIMVGQDGQVRMVVGAAGGTQITTATALVCVTPFLPGRAHPAQPPSHADHTPMPQAIIYNLWFGYDVKRAVEEPRLHNQLLPNVTTVERNIDQAVTAALETRHHHTQIASTFIAVVQAIVRTAGGWAAASDSRKGGEPAGY

SEQ ID NO: 5928 - protein, 554 aa, Homo Sapiens
MARGYGATVSLVLLGLGLALAVIVLAVVLSRHQAPCGPQAFAHAAVAADSKVCSDIGRAILQQQGSPVDATIAALVCTSVVNPQSMGLGGGVIFTIYNVTTGAQWIGVPGELRGYAEAHRRHGRLPWAQLFQPTIALLRGGHVVAPVLSRFLHNSILRPSLQASTLRQLFFNGTEPLRPQDPLPWPALATTLETVATEGVEVFYTGRLGQMLVEDIAKEGSQLTLQDLAKFQPEVVDALEVPLGDYTLYSPPPPAGGAILSFILNVLRGFNFSTESMARPEGRVNVYHHLVETLKFAKGQRWRLGDPRSHPKLQNASRDLLGETLAQLIRQQIDGRGDHQLSHYSLAEAWGHGTGTSHVSVLGEDGSAVAATSTINTPFGAMVYSPRTGIILNNELLDLCERCPRGSGTTPSPVSGDRVGGAPGRCWPPVPGERSPSSMVPSILINKAQGSKLVIGGAGGELIISAVAQAIMSKLWLGFDLRAAIAAPILHVNSKGCVEYEPNFSQEVQRGLQDRGQNQTQRPFFLNVVQAVSQEGACVYAVSDLRKSGEAAGY

SEQ ID NO: 5929 - protein, 586 aa, Homo Sapiens
MARGYGATVSLVLLGLGLALAVIVLAVVLSRHQAPCGPQAFAHAAVAADSKVCSDIGRAILQQQGSPVDATIAALVCTSVVNPQSMGLGGGVIFTIYNVTTGKVEVINARETVPASHAPSLLDQCAQALPLGTGAQWIGVPGELRGYAEAHRRHGRLPWAQLFQPTIALLRGGHVVAPVLSRFLHNSILRPSLQASTLRQLFFNGTEPLRPQDPLPWPALATTLETVATEGVEVFYTGRLGQMLVEDIAKEGSQLTLQDLAKFQPEVVDALEVPLGDYTLYSPPPPAGGAILSFILNVLRGFNFSTESMARPEGRVNVYHHLVETLKFAKGQRWRLGDPRSHPKLQNASRDLLGETLAQLIRQQIDGRGDHQLSHYSLAEAWGHGTGTSHVSVLGEDGSAVAATSTINTPFGAMVYSPRTGIILNNELLDLCERCPRGSGTTPSPVSGDRVGGAPGRCWPPVPGERSPSSMVPSILINKAQGSKLVIGGAGGELIISAVAQAIMSKLWLGFDLRAAIAAPILHVNSKGCVEYEPNFSQEVQRGLQDRGQNQTQRPFFLNVVQAVSQEGACVYAVSDLRKSGEAAGY

SEQ ID NO: 5930 - protein, 587 aa, Homo Sapiens
MARGYGATVSLVLLGLGLALAVIVLAVVLSRHQAPCGPQAFAHAAVAADSKVCSDIGRAILQQQGSPVDATIAALVCTSVVNPQSMGLGGGVIFTIYNVTTGKVEVINARETVPASHAPSLLDQCAQALPLGTGAQWIGVPGELRGYAEAHRRHGRLPWAQLFQPTIALLRGGHVVAPVLSRFLHNSILRPSLQASTLRQLFFNGTEPLRPQDPLPWPALATTLETVATEGVEVFYTGRLGQMLVEDIAKEGSQLTLQDLAKFQPEVVDALEVPLGDYTLYSPPPPAGGAILSFILNVLRGFNFSTESMARPEGRVNVYHHLVETLKFAKGQRWRLGDPRSHPKLQNASRDLLGETLAQLIRQQIDGRGDHQLSHYSLAEAWGHGTGTSHVSVLGEDGSAVAATSTINTPFGAMVYSPRTGIILNNELLDLCERCPRGSGTTPSPAVSGDRVGGAPGRCWPPVPGERSPSSMVPSILINKAQGSKLVIGGAGGELIISAVAQAIMSKLWLGFDLRAAIAAPILHVNSKGCVEYEPNFSQEVQRGLQDRGQNQTQRPFFLNVVQAVSQEGACVYAVSDLRKSGEAAGY

SEQ ID NO: 5931 - protein, 73 aa, Homo Sapiens
MARGYGATVSLVLLGLGLALAVIVLAVVLSRHQAPCGPQAFAHAAVAADSKVCSDIGRGPVDRGARGAPWLCR

SEQ ID NO: 5932 - protein, 220 aa, Homo Sapiens
  misc_feature (1)..(1): Xaa can be any naturally occurring amino acid
XSAVAATSTINTPFGAMVYSPRTGIILNNELLDLCERCPRGSGTTPSPVSGDRVGGAPGRCWPPVPGERSPSSMVPSILINKAQGSKLVIGGAGGELIISAVAQAIMSKLWLGFDLRAAIAAPILHVNSKGCVEYEPNFSQKQDLAALPRLVSNSWPQVILLPQPPKLLALQEVQRGLQDRGQNQTQRPFFLNVVQAVSQEGACVYAVSDLRKSGEAAGY

SEQ ID NO: 5933 - protein, 30 aa, Homo Sapiens
MATEAGRWQPPDWADLQADLQQVRHKLTQR

SEQ ID NO: 5934 - protein, 217 aa, Homo Sapiens
MATGSRTSLLLAFGLLCLPWLQEGSAFPTIPLSRLFDNAMLRAHRLHQLAFDTYQEFEEAYIPKEQKYSFLQNPQTSLCFSESIPTPSNREETQQKSNLELLRISLLLIQSWLEPVQFLRSVFANSLVYGASDSNVYDLLKDLEEGIQTLMGRLEDGSPRTGQIFKQTYSKFDTNSHNDDALLKNYGLLYCFRKDMDKVETFLRIVQCRSVEGSCGF

SEQ ID NO: 5935 - protein, 177 aa, Homo Sapiens
MATGSRTSLLLAFGLLCLPWLQEGSAFPTIPLSRLFDNAMLRAHRLHQLAFDTYQEFNLELLRISLLLIQSWLEPVQFLRSVFANSLVYGASDSNVYDLLKDLEEGIQTLMGRLEDGSPRTGQIFKQTYSKFDTNSHNDDALLKNYGLLYCFRKDMDKVETFLRIVQCRSVEGSCGF

SEQ ID NO: 5936 - protein, 202 aa, Homo Sapiens
MATGSRTSLLLAFGLLCLPWLQEGSAFPTIPLSRLFDNAMLRAHRLHQLAFDTYQEFNPQTSLCFSESIPTPSNREETQQKSNLELLRISLLLIQSWLEPVQFLRSVFANSLVYGASDSNVYDLLKDLEEGIQTLMGRLEDGSPRTGQIFKQTYSKFDTNSHNDDALLKNYGLLYCFRKDMDKVETFLRIVQCRSVEGSCGF

SEQ ID NO: 5937 - protein, 122 aa, Homo Sapiens
MATGSRTSLLLAFGLLCLPWLQEGSAFPTIPLSRLFDNAMLRAHRLHQLAFDTYQEFRLEDGSPRTGQIFKQTYSKFDTNSHNDDALLKNYGLLYCFRKDMDKVETFLRIVQCRSVEGSCGF

SEQ ID NO: 5938 - protein, 245 aa, Homo Sapiens
MAAGSRTSLLLAFGLLCLSWLQEGSAFPTIPLSRLFDNAMLRARRLYQLAYDTYQEFEEAYILKEQKYSFLQNPQTSLCFSESIPTPSNRVKTQQKSNLELLRISLLLIQSWLEPVQLLRSVFANSLVYGASDSNVYRHLKDLEEGIQTLIGWKMAAPGLGRSSISPTASLTQNRTTMTHCSRTTGCSTASGRTWTRSRHSCASCSAALWRAAVASSCPGGIPVTPPQCLSWSWKVLLQCPPALS

SEQ ID NO: 5939 - protein, 217 aa, Homo Sapiens
MAAGSRTSLLLAFGLLCLSWLQEGSAFPTIPLSRLFDNAMLRARRLYQLAYDTYQEFEEAYILKEQKYSFLQNPQTSLCFSESIPTPSNRVKTQQKSNLELLRISLLLIQSWLEPVQLLRSVFANSLVYGASDSNVYRHLKDLEEGIQTLMWRLEDGSPRTGQIFNQSYSKFDTKSHNDDALLKNYGLLYCFRKDMDKVETFLRIVQCRSVEGSCGF

SEQ ID NO: 5940 - protein, 256 aa, Homo Sapiens
MAAGSRTSLLLAFGLLCLSWLQEGSAFPTIPLSRLFDNAMLRARRLYQLAYDTYQEFEEAYILKEQKYSFLQNPQTSLCFSESIPTPSNRVKTQQKSNLELLRISLLLIQSWLEPVQLLRSVFANSLVYGASDSNVYRHLKDLEEGIQTLMWVRVAPGIPNPGAPLASRDWGEKHCCPLFSSQALTQENSPYSSFPLVNPPGLSLQPGGEGGKWMNERGREQCPSAWPLLLFLHFAEAGRWQPPDWADLQSVLQQV

SEQ ID NO: 5941 - protein, 177 aa, Homo Sapiens
MAAGSRTSLLLAFGLLCLSWLQEGSAFPTIPLSRLFDNAMLRARRLYQLAYDTYQEFNLELLRISLLLIQSWLEPVQLLRSVFANSLVYGASDSNVYRHLKDLEEGIQTLMWRLEDGSPRTGQIFNQSYSKFDTKSHNDDALLKNYGLLYCFRKDMDKVETFLRIVQCRSVEGSCGF

SEQ ID NO: 5942 - protein, 202 aa, Homo Sapiens
MAAGSRTSLLLAFGLLCLSWLQEGSAFPTIPLSRLFDNAMLRARRLYQLAYDTYQEFNPQTSLCFSESIPTPSNRVKTQQKSNLELLRISLLLIQSWLEPVQLLRSVFANSLVYGASDSNVYRHLKDLEEGIQTLMWRLEDGSPRTGQIFNQSYSKFDTKSHNDDALLKNYGLLYCFRKDMDKVETFLRIVQCRSVEGSCGF

SEQ ID NO: 5943 - protein, 130 aa, Homo Sapiens
MLLWPLLLLLLLLPTLALLRQQRSQDARLSWLAGLQHRVAWGALVWAATWQRRRLEQSTLHVHQSQQQALRWCLQGAQRPHCSLRRSTDISTFRNHLPLTKASQTQQEDSGEQPLPPTSNQDLGEASLQA

SEQ ID NO: 5944 - protein, 146 aa, Homo Sapiens
MLLWPLLLLLLLLPTLALLRQQRSQDARLSWLAGLQHRVAWGALVWAATWQRRRLEQSTLHVHQSQQQALRWCLQGAQRPHCSLRRSTDISTFRNHLPLTKASQTQQEDSGEQPLPPTSNQDLGEASLQATLLGLAALNKAYPEVL

SEQ ID NO: 5945 - protein, 530 aa, Homo Sapiens
MLLWPLLLLLLLLPTLALLRQQRSQDARLSWLAGLQHRVAWGALVWAATWQRRRLEQSTLHVHQSQQQALRWCLQGAQRPHCSLRRSTDISTFRNHLPLTKASQTQQEDSGEQPLPPTSNQDLGEASLQATLLGLAALNKAYPEVLAQGRTARVTLTSPWPRPLPWPGNTLGQVGTPGTKDPRALLLDALRSPGLRALEAGTAVELLDVFLGLETDGEELAGAIAAGNPGAPLRERAAELREALEQGPRGLALRLWPKLQVVVTLDAGGQAEAVAALGALWCQGLAFFSPAYAASGGVLGLNLQPEQPHGLYLLPPGAPFIELLPVKEGTQEEAASTLLLAEAQQGKEYELVLTDRASLTRCRLGDVVRVVGAYNQCPVVRFICRLDQTLSVRGEDIGEDLFSEALGRAVGQWAGAKLLDHGCVESSILDSSAGSAPHYEVFVALRGLRNLSEENRDKLDHCLQEASPRYKSLRFWGSVGPARVHLVGQGAFRALRAALAACPSSPFPPAMPRVLRHRHLAQCLQERVVS

SEQ ID NO: 5946 - protein, 474 aa, Homo Sapiens
MLLWPLLLLLLLLPTLALLRQQRSQDARLSWLAGLQHRVAWGALVWAATWQRRRLEQSTLHVHQSQQQALRWCLQGAQRPHCSLRRSTDISTFRNHLPLTKASQTQQEDSGEQPLPPTSNQDLGEASLQATLLGLAALNKAYPEVLAQGRTARVTLTSPWPRPLPWPGNTLGQVGTPGTKDPRALLLDALRSPGLRALEAGTAVELLDVFLGLETDGEELAGAIAAGNPGAPLRERAAELREALEQGPRGLALRLWPKLQVVVTLDAGGQAEAVAALGALWCQGLAFFSPAYAASGGVLGLNLQPEQPHGLYLLPPGAPFIELLPVKEGTQEEAASTLLLAEAQQGKEYELVLTDRASLTRCRLGDVVRVVGAYNQCPVVRFICRLDQTLSVRGEDIGEDLFSEALGRAVGQWAGAKLLDHGCVESSILEWGRTDRAEDTRLGSCPFTGSMCAHGVYSQIPLRALLPTTRCLWR

SEQ ID NO: 5947 - protein, 474 aa, Homo Sapiens; identical to SEQ ID NO: 5946

SEQ ID NO: 5948 - protein, 530 aa, Homo Sapiens; identical to SEQ ID NO: 5945

SEQ ID NO: 5949 - protein, 479 aa, Homo Sapiens
MLLWPLLLLLLLLPTLALLRQQRSQDARLSWLAGLQHRVAWGALVWAATWQRRRLEQSTLHVHQSQQQALRWCLQGAQRPHCSLRRSTDISTFRNHLPLTKASQTQQEDSGEQPLPPTSNQDLGEASLQATLLGLAALNKAYPEVLAQGRTARVTLTSPWPRPLPWPGNTLGQVGTPGTKDPRALLLDALRSPGLRALEAGTAVELLDVFLGLETDGEELAGAIAAGNPGAPLRERAAELREALEQGPRGLALRLWPKLQVVVTLDAGGQAEAVAALGALWCQGLAFFSPAYAASGGVLGLNLQPEQPHGLYLLPPGAPFIELLPVKEGTQEEAASTLLLAEAQQGKEYELVLTDRASLTRCRLGDVVRVVGAYNQCPVVRFICRLDQTLSVRGEDIGEDLFSEALGRAVGQWAGAKLLDHGCVESSILDSSAGSAPHYEVFVALRGLRNLSEENRDKILASGSALGKREWTPAQPFPH

SEQ ID NO: 5950 - protein, 112 aa, Homo Sapiens
MLLWPLLLLLLLLPTLALLRQQRSQDARLSWLAGLQHRVAWGALVWAATWQRRRLEQSTLHVHQSQQQALRWCLQGAQRPHCSLRRSTGSHQSCLKLLGNWLPEAFLLSLGL

SEQ ID NO: 5951 - protein, 107 aa, Homo Sapiens
MPLWVFFFVILTLSNSSHCSPPPPLTLRMRRYADAIFTNSYRKVLGQLSARKLLQDIMSRQQGESNQERGARARLGRQVDSMWAEQKQMELESILVALLQKHRNSQG

SEQ ID NO: 5952 - protein, 108 aa, Homo Sapiens
MPLWVFFFVILTLSNSSHCSPPPPLTLRMRRYADAIFTNSYRKVLGQLSARKLLQDIMSRQQGESNQERGARARLGRQVDSMWAEQKQMELESILVALLQKHSRNSQG

SEQ ID NO: 5953 - protein, 108 aa, Homo Sapiens; identical to SEQ ID NO: 5952

SEQ ID NO: 5954 - protein, 207 aa, Homo Sapiens
MAMGEGAGQVGERGGSMQGLCGRLPFRHHDQLQLAVGRSRLPELPPGLHLPQLKESLLVAGSRWLGAARALHWHVGELQTGLRGHRVLGPGRHLPLLVDHQRAHCPLGRGELWAFSQYYPHPGEETGASSGQPPYPVSVLASLQVDTFPDPTLWNSLHHLQLPARQCWPGHPPPPGAGTGFLPGIRRLGLRCRFLGRSFDCQPPRGS

SEQ ID NO: 5955 - protein, 423 aa, Homo Sapiens
MDRRMWGAHVFCVLSPLPTVLGHMHPECDFITQLREDESACLQAAEEMPNTTLGCPATWDGLLCWPTAGSGEWVTLPCPDFFSHFSSESGAVKRDCTITGWSEPFPPYPVACPVPLELLAEEESYFSTVKIIYTVGHSISIVALFVAITILVALRRLHCPRNYVHTQLFTTFILKAGAVFLKDAALFHSDDTDHCSFSTVLCKVSVAASHFATMTNFSWLLAEAVYLNCLLASTSPSSRRAFWWLVLAGWGLPVLFTGTWVSCKLAFEDIACWDLDDTSPYWWIIKGPIVLSVGVNFGLFLNIIRILVRKLEPAQGSLHTQSQYWRLSKSTLFLIPLFGIHYIIFNFLPDNAGLGIRLPLELGLGSFQGFIVAILYCFLNQEVRTEISRKWHGHDPELLPAWRTRAKWTTPSRSAAKVLTSMC

SEQ ID NO: 5956 - protein, 151 aa, Homo Sapiens
MLPFSTATTLTTAASPLAARALHWHVGELQTGLRGHRVLGPGRHLPLLVDHQRAHCPLGRGELWAFSQYYPHPGEETGASSGQPPYPVSVLASLQVDTFPDPTLWNSLHHLQLPARQCWPGHPPPPGAGTGFLPGLHCCHPLLLPQPRGED

SEQ ID NO: 5957 - protein, 145 aa, Homo Sapiens
MVPGTPSPLLGRGKELWLESLACLPGAVKRDCTITGWSEPFPPYPVACPVPLELLAEEESYFSTVKIIYTVGHSISIVALFVAITILVALRRLHCPRNYVHTQLFTTFILKAGAVFLKDAALFHSDDTDHCSFSTGCPCSSLARG

SEQ ID NO: 5958 - protein, 359 aa, Homo Sapiens
MVPGTPSPLLGRGKELWLESLACLPGAVKRDCTITGWSEPFPPYPVACPVPLELLAEEESYFSTVKIIYTVGHSISIVALFVAITILVALRRLHCPRNYVHTQLFTTFILKAGAVFLKDAALFHSDDTDHCSFSTVLCKVSVAASHFATMTNFSWLLAEAVYLNCLLASTSPSSRRAFWWLVLAGWGLPVLFTGTWVSCKLAFEDIACWDLDDTSPYWWIIKGPIVLSVGVNFGLFLNIIRILVRKLEPAQGSLHTQSQYWRLSKSTLFLIPLFGIHYIIFNFLPDNAGLGIRLPLELGLGSFQGFIVAILYCFLNQEVRTEISRKWHGHDPELLPAWRTRAKWTTPSRSAAKVLTSMC

SEQ ID NO: 5959 - protein, 68 aa, Homo Sapiens
MVPGTPSPLLGRGKELWLESLACLPGAVKRDCTITGWSEPFPPYPVACPVPLELLAEEGCPCSSLARG

SEQ ID NO: 5960 - protein, 66 aa, Homo Sapiens
MFTCWWSYLRSTLAAVPGEASRVQFNAPFDVGIKLSGVQYQQHSQALGKFLQDILWEEAKEAPADK

SEQ ID NO: 5961 - protein, 105 aa, Homo Sapiens
MFTCWWSYLRSTLAAVPGEASRVQQRKESKKPPAKLQPRALAGWLRPEDGGQAEGAEDELEVRFNAPFDVGIKLSGVQYQQHSQALGKFLQDILWEEAKEAPADK

SEQ ID NO: 5962 - protein, 104 aa, Homo Sapiens
MFTCWWSYLRSTLAAVPGEASRVQRKESKKPPAKLQPRALAGWLRPEDGGQAEGAEDELEVRFNAPFDVGIKLSGVQYQQHSQALGKFLQDILWEEAKEAPADK

SEQ ID NO: 5963 - protein, 40 aa, Homo Sapiens
MFTCWWSYLRSTLAAVPGEASRVQRPQPTSDRPQALLTSL

SEQ ID NO: 5964 - protein, 33 aa, Homo Sapiens
MPSPGTVCSLLLLGMLWLDLAMAGSSFLSPEHQ

SEQ ID NO: 5965 - protein, 117 aa, Homo Sapiens
MPSPGTVCSLLLLGMLWLDLAMAGSSFLSPEHQRVQQRKESKKPPAKLQPRALAGWLRPEDGGQAEGAEDELEVRFNAPFDVGIKLSGVQYQQHSQALGKFLQDILWEEAKEAPADK

SEQ ID NO: 5966 - protein, 117 aa, Homo Sapiens; identical to SEQ ID NO: 5965

SEQ ID NO: 5967 - protein, 117 aa, Homo Sapiens; identical to SEQ ID NO: 5965

SEQ ID NO: 5968 - protein, 91 aa, Homo Sapiens
MPSPGTVCSLLLLGMLWLDLAMAGSSFLSPEHQRVQQRKESKKPPAKLQPRALAGWLRPEDGGQAEGAEDELEVRRPQPTSDRPQALLTSL

SEQ ID NO: 5969 - protein, 116 aa, Homo Sapiens
MPSPGTVCSLLLLGMLWLDLAMAGSSFLSPEHQRVQRKESKKPPAKLQPRALAGWLRPEDGGQAEGAEDELEVRFNAPFDVGIKLSGVQYQQHSQALGKFLQDILWEEAKEAPADK

SEQ ID NO: 5970 - protein, 116 aa, Homo Sapiens; identical to SEQ ID NO: 5969

SEQ ID NO: 5971 - protein, 48 aa, Homo Sapiens
MAWFALYLLSLLWATAGTSTQTQSSCCEYDVFPRRSGKQLPWGRGCDL

SEQ ID NO: 5972 - protein, 417 aa, Homo Sapiens
MAWFALYLLSLLWATAGTSTQTQSSCSVPSAQEPLVNGIQVLMENSVTSSAYPNPSILIAMNLAGAYNLKAQKLLTYQLMSSDNNDLTIGQLGLTIMALTSSCRDPGDKVSILQRQMENWAPSSPNAEASAFYGPSLAILALCQKNSEATLPIAVRFAKTLLANSSPFNVDTGAMATLALTCMYNKIPVGSEEGYRSLFGQVLKDIVEKISMKIKDNGIIGDIYSTGLAMQALSVTPEPSKKEWNCKKTTDMILNEIKQGKFHNPMSIAQILPSLKGKTYLDVPQVTCSPDHEVQPTLPSNPGPGPTSASNITVIYTINNQLRGVELLFNETINVSVKSGSVLLVVLEEAQRKNPMFKFETTMTSWGLVVSSINNIAENVNHKTYWQFLSGVTPLNEGVADYIPFNHEHITANFTQY

SEQ ID NO: 5973 - protein, 153 aa, Homo Sapiens
MVATKTFALLLLSLFLAVGLGEKKEGHFSALPSLPVGSHAKVSSPQPRGPRYAEGTFISDYSIAMDKIHQQDFVNWLLAQKGKKNDWKHNITQREARALELASQANRKEEEAVEPQSSPAKNPSDEDLLRDLLIQELLACLLDQTNLCRLRSR

SEQ ID NO: 5974 - protein, 199 aa, Homo Sapiens
MLAYSSVHCFREDKMKFTIVFAGLLGVFLAPALANYNINVNDDNNNAGSGQQSVSVNNEHNVANVDNNNGWDSWNSIWDYGNGFAATRLFQKKTCIVHKMNKEVMPSIQSLDALVKEKKLQGKGPGGPPPKGLMYSVNPNKVDDLSKFGKNIANMCRGIPTYMAEEMQEASLFFYSGTCYTTSVLWIVDISFCGDTVEN

SEQ ID NO: 5975 - protein, 184 aa, Homo Sapiens
MKILVAFLVVLTIFGIQSHGYEVFNIISPSNNGGNVQETVTIDNEKNTAIINIHAGSCSSTTIFDYKHGYIASRVLSRRACFILKMDHQNIPPLNNLQWYIYEKQALDNMFSSKYTWVKYNPLESLIKDVDWFLLGSPIEKLCKHIPLYKGEVVENTHNVGAGGCAKAGLLGILGISICADIHV

SEQ ID NO: 5976 - protein, 161 aa, Homo Sapiens
MKILVAFLVVLTIFGIQSHGYEVFNIISPSNNGGNVQETVTIDNEKNTAIINIHAGSCSSTTIFDYKHGYIASRVLSRRACFILKMDHQNIPPLNNLQWYIYEKQALDNMFSSKYTWVKYNPLESLIKDVDWFLLGSPIEKLCKHIPLYKGEVVENTREYQ

SEQ ID NO: 5977 - protein, 429 aa, Homo Sapiens
MQLRNPELHLGCALALRFLALVSWDIPGARALDNGLARTPTMGWLHWERFMCNLDCQEEPDSCISEKLFMEMAELMVSEGWKDAGYEYLCIDDCWMAPQRDSEGRLQADPQRFPHGIRQLANYVHSKGLKLGIYADVGNKTCAGFPGSFGYYDIDAQTFADWGVDLLKFDGCYCDSLENLADGYKHMSLALNRTGRSIVYSCEWPLYMWPFQKPNYTEIRQYCNHWRNFADIDDSWKSIKSILDWTSFNQERIVDVAGPGGWNDPDMLVIGNFGLSWNQQVTQMALWAIMAAPLFMSNDLRHISPQAKALLQDKDVIAINQDPLGKQGYQLRQGDNFEVWERPLSGLAWAVAMINRQEIGGPRSYTIAVASLGKGVACNPACFITQLLPVKRKLGFYEWTSRLRSHINPTGTVLLQLENTMQMSLKDLL

SEQ ID NO: 5978 - protein, 222 aa, Homo Sapiens
MQLRNPELHLGCALALRFLALVSWDIPGARALDNGLARTPTMGWLHWERFMCNLDCQEEPDSCISEKLFMEMAELMVSEGWKDAGYEYLCIDDCWMAPQRDSEGRLQADPQRFPHGIRQLANYVHSKGLKLGIYADVGNKTCAGFPGSFGYYDIDAQTFADWGVDLLKFDGCYCDSLENLADGYKHMSLALNRTGRSIVYSCEWPLYMWPFQKSSTLFGSIC

SEQ ID NO: 5979 - protein, 84 aa, Homo Sapiens
MFEIDYSRDSFLKDGQPFRYISGSIHYSRVPRFYWKDRLLKMKMAGLNAIQTLPGSCGQVVGSPSAQDEASPLSEWRASYNSAG

SEQ ID NO: 5980 - protein, 102 aa, Homo Sapiens
MFEIDYSRDSFLKDGQPFRYISGSIHYSRVPRFYWKDRLLKMKMAGLNAIQTYVPWNFHEPWPGQYQFSEDHDVEYFLRLAHELGLLVILRPGPYICAEWEM

SEQ ID NO: 5981 - protein, 647 aa, Homo Sapiens
MFEIDYSRDSFLKDGQPFRYISGSIHYSRVPRFYWKDRLLKMKMAGLNAIQTYVPWNFHEPWPGQYQFSEDHDVEYFLRLAHELGLLVILRPGPYICAEWEMGGLPAWLLEKESILLRSSDPDYLAAVDKWLGVLLPKMKPLLYQNGGPVITVQVENEYGSYFACDFDYLRFLQKRFRHHLGDDVVLFTTDGAHKTFLKCGALQGLYTTVDFGTGSNITDAFLSQRKCEPKGPLINSEFYTGWLDHWGQPHSTIKTEAVASSLYDILARGASVNLYMFIGGTNFAYWNGANSPYAAQPTSYDYDAPLSEAGDLTEKYFALRNIIQKFEKVPEGPIPPSTPKFAYGKVTLEKLKTVGAALDILCPSGPIKSLYPLTFIQVKQHYGFVLYRTTLPQDCSNPAPLSSPLNGVHDRAYVAVDGIPQGVLERNNVITLNITGKAGATLDLLVENMGRVNYGAYINDFKGLVSNLTLSSNILTDWTIFPLDTEDAVCSHLGGWGHRDSGHHDEAWAHNSSNYTLPAFYMGNFSIPSGIPDLPQDTFIQFPGWTKGQVWINGFNLGRYWPARGPQLTLFVPQHILMTSAPNTITVLELEWAPCSSDDPELCAVTFVDRPVIGSSVTYDHPSKPVEKRLMPPPPQKNKDSWLDHV

SEQ ID NO: 5982 - protein, 114 aa, Homo Sapiens
MGGLPAWLLEKESILLRSSDPDYLAAVDKWLGVLLPKMKPLLYQNGGPVITVQVENEYGSYFACDFDYLRFLQKRFRHHLGDDVVLFTTDGAHKTFLKCGALQGLYTTVDFGTG

SEQ ID NO: 5983 - protein, 41 aa, Homo Sapiens
MPGFLVRILPLLLVLLLLGPTRGLRITWQLWTSGWESFCPR

SEQ ID NO: 5984 - protein, 546 aa, Homo Sapiens
MPGFLVRILPLLLVLLLLGPTRGLRNATQRMFEIDYSRDSFLKDGQPFRYISGSIHYSRVPRFYWKDRLLKMKMAGLNAIQTLPGSCGQVVGSPSAQDEASPLSEWRASYNSAGSNITDAFLSQRKCEPKGPLINSEFYTGWLDHWGQPHSTIKTEAVASSLYDILARGASVNLYMFIGGTNFAYWNGANSPYAAQPTSYDYDAPLSEAGDLTEKYFALRNIIQKFEKVPEGPIPPSTPKFAYGKVTLEKLKTVGAALDILCPSGPIKSLYPLTFIQVKQHYGFVLYRTTLPQDCSNPAPLSSPLNGVHDRAYVAVDGIPQGVLERNNVITLNITGKAGATLDLLVENMGRVNYGAYINDFKGLVSNLTLSSNILTDWTIFPLDTEDAVCSHLGGWGHRDSGHHDEAWAHNSSNYTLPAFYMGNFSIPSGIPDLPQDTFIQFPGWTKGQVWINGFNLGRYWPARGPQLTLFVPQHILMTSAPNTITVLELEWAPCSSDDPELCAVTFVDRPVIGSSVTYDHPSKPVEKRLMPPPPQKNKDSWLDHV

SEQ ID NO: 5985 - protein, 677 aa, Homo Sapiens
MPGFLVRILPLLLVLLLLGPTRGLRNATQRMFEIDYSRDSFLKDGQPFRYISGSIHYSRVPRFYWKDRLLKMKMAGLNAIQTYVPWNFHEPWPGQYQFSEDHDVEYFLRLAHELGLLVILRPGPYICAEWEMGGLPAWLLEKESILLRSSDPDYLAAVDKWLGVLLPKMKPLLYQNGGPVITVQVENEYGSYFACDFDYLRFLQKRFRHHLGDDVVLFTTDGAHKTFLKCGALQGLYTTVDFGTGSNITDAFLSQRKCEPKGPLINSEFYTGWLDHWGQPHSTIKTEAVASSLYDILARGASVNLYMFIGGTNFAYWNGANSPYAAQPTSYDYDAPLSEAGDLTEKYFALRNIIQKFEKVPEGPIPPSTPKFAYGKVTLEKLKTVGAALDILCPSGPIKSLYPLTFIQVKQHYGFVLYRTTLPQDCSNPAPLSSPLNGVHDRAYVAVDGIPQGVLERNNVITLNITGKAGATLDLLVENMGRVNYGAYINDFKGLVSNLTLSSNILTDWTIFPLDTEDAVCSHLGGWGHRDSGHHDEAWAHNSSNYTLPAFYMGNFSIPSGIPDLPQDTFIQFPGWTKGQVWINGFNLGRYWPARGPQLTLFVPQHILMTSAPNTITVLELEWAPCSSDDPELCAVTFVDRPVIGSSVTYDHPSKPVEKRLMPPPPQKNKDSWLDHV

SEQ ID NO: 5986 - protein, 147 aa, Homo Sapiens
MPGFLVRILPLLLVLLLLGPTRGLRSRFLPWAFHLPRQAPKSQLPLHKRGTKTAPNEHASSNRSGRRRRRQQWNATQRMFEIDYSRDSFLKDGQPFRYISGSIHYSRVPRFYWKDRLLKMKMAGLNAIQTYVPWNFHEPWPGQYQFS

SEQ ID NO: 5987 - protein, 185 aa, Homo Sapiens
MPGFLVRILPLLLVLLLLGPTRGLRVENEYGSYFACDFDYLRFLQKRFRHHLGDDVVLFTTDGAHKTFLKCGALQGLYTTVDFGTGSNITDAFLSQRKCEPKGPLINSEFYTGWLDHWGQPHSTIKTEAVASSLYDILARGASVNLYMFIGGTNFAYWNGANSPYAAQPTSYDYDAPLSEAGDLT

SEQ ID NO: 5988 - protein, 9 aa, Homo Sapiens
MAPKKLSCL

SEQ ID NO: 5989 - protein, 26 aa, Homo Sapiens
MAPKKLSCLRSLLLPLSLTLLLPQAD

SEQ ID NO: 5990 - protein, 114 aa, Homo Sapiens
MAPKKLSCLRSLLLPLSLTLLLPQADTRSFVVDRGHDRFLLDGAPFRYVSGSLHYFRVPRVLWADRLLKMRWSGLNAIQFYVPWNYHEPQPGVYNFNGSRDLIAFLNEAALANL

SEQ ID NO: 5991 - protein, 564 aa, Homo Sapiens
MAPKKLSCLRSLLLPLSLTLLLPQADTRSFVVDRGHDRFLLDGAPFRYVSGSLHYFRVPRVLWADRLLKMRWSGLNAIQFYVPWNYHEPQPGVYNFNGSRDLIAFLNEAALANLLVILRPGPYICAEWEMGGLPSWLLRKPEIHLRTSDPADNMTKIFTLLRKYEPHGPLVNSEYYTGWLDYWGQNHSTRSVSAVTKGLENMLKLGASVNMYMFHGGTNFGYWNGADKKGRFLPITTSYDYDAPISEAGDPTPKLFALRDVISKFQEVPLGPLPPPSPKMMLGPVTLHLVGHLLAFLDLLCPRGPIHSILPMTFEAVKQDHGFMLYRTYMTHTIFEPTPFWVPNNGVHDRAYVMVDGVFQGVVERNMRDKLFLTGKLGSKLDILVENMGRLSFGSNSSDFKGLLKPPILGQTILTQWMMFPLKIDNLVKWWFPLQLPKWPYPQAPSGPTFYSKTFPILGSVGDTFLYLPGWTKGQVWINGFNLGRYWTKQGPQQTLYVPRFLLFPRGALNKITLLELEDVPLQPQVQFLDKPILNSTSTLHRTHINSLSADTLSASEPMELSGH

SEQ ID NO: 5992 - protein, 654 aa, Homo Sapiens
MAPKKLSCLRSLLLPLSLTLLLPQADTRSFVVDRGHDRFLLDGAPFRYVSGSLHYFRVPRVLWADRLLKMRWSGLNAIQFYVPWNYHEPQPGVYNFNGSRDLIAFLNEAALANLLVILRPGPYICAEWEMGGLPSWLLRKPEIHLRTSDPDFLAAVDSWFKVLLPKIYPWLYHNGGNIISIQVENEYGSYRACDFSYMRHLAGLFRALLGEKILLFTTDGPEGLKCGSLRGLYTTVDFGPADNMTKIFTLLRKYEPHGPLVNSEYYTGWLDYWGQNHSTRSVSAVTKGLENMLKLGASVNMYMFHGGTNFGYWNGADKKGRFLPITTSYDYDAPISEAGDPTPKLFALRDVISKFQEVPLGPLPPPSPKMMLGPVTLHLVGHLLAFLDLLCPRGPIHSILPMTFEAVKQDHGFMLYRTYMTHTIFEPTPFWVPNNGVHDRAYVMVDGVFQGVVERNMRDKLFLTGKLGSKLDILVENMGRLSFGSNSSDFKGLLKPPILGQTILTQWMMFPLKIDNLVKWWFPLQLPKWPYPQAPSGPTFYSKTFPILGSVGDTFLYLPGWTKGQVWINGFNLGRYWTKQGPQQTLYVPRFLLFPRGALNKITLLELEDVPLQPQVQFLDKPILNSTSTLHRTHINSLSADTLSASEPMELSGH

SEQ ID NO: 5993 - protein, 654 aa, Homo Sapiens; identical to SEQ ID NO: 5992

SEQ ID NO: 5994 - protein, 50 aa, Homo Sapiens
MAPKKLSCLRSLLLPLSLTLLLPQTGPRSAMCLAACTTFGYRGCFGPTGF

SEQ ID NO: 5995 - protein, 185 aa, Homo Sapiens
  misc_feature (1)..(1): Xaa can be any naturally occurring amino acid
XKMRWSGLNAIQFYVPWNYHEPQPGVYNFNGSRDLIAFLNEAALANLLVILRPGPYICAEWEMGGLPSWLLRKPEIHLRTSDPDFLAAVDSWFKVLLPKIYPWLYHNGGNIISIQVENEYGSYRACDFSYMRHLAGLFRALLGEKILLFTTDGPEGLKCGSLRGLYTTVDFGPGLKQGLGVESGE

SEQ ID NO: 5996 - protein, 636 aa, Homo Sapiens
MTTWSLRRRPARTLGLLLLVVLGFLVLRRLDWSTLVPLRLRHRQLGLQAKGWNFMLEDSTFWIFGGSIHYFRVPREYWRDRLLKMKACGLNTLTTYVPWNLHEPERGKFDFSGNLDLEAFVLMAAEIGLWVILRPGPYICSEMDLGGLPSWLLQDPGMRLRTTYKGFTEAVDLYFDHLMSRVVPLQYKRGGPIIAVQVENEYGSYNKDPAYMPYVKKALEDRGIVELLLTSDNKDGLSKGIVQGVLATINLQSTHELQLLTTFLFNVQGTQPKMVMEYWTGWFDSWGGPHNILDSSEVLKTVSAIVDAGSSINLYMFHGGTNFGFMNGAMHFHDYKSDVTSYDYDAVLTEAGDYTAKYMKLRDFFGSISGIPLPPPPDLLPKMPYEPLTPVLYLSLWDALKYLGEPIKSEKPINMENLPVNGGNGQSFGYILYETSITSSGILSGHVHDRGQVFVNTVSIGFLDYKTTKIAVPLIQGYTVLRILVENRGRVNYGENIDDQRKGLIGNLYLNDSPLKNFRIYSLDMKKSFFQRFGLDKWSSLPETPTLPAFFLGSLSISSTPCDTFLKLEGWEKGVVFINGQNLGRYWNIGPQKTLYLPGPWLSSGINQVIVFEETMAGPALQFTETPHLGRNQYIK

SEQ ID NO: 5997 - protein, 636 aa, Homo Sapiens; identical to SEQ ID NO: 5996

SEQ ID NO: 5998 - protein, 553 aa, Homo Sapiens
MNHVAKQQSEEAFPQEQQKAPPVVGGFNSNVGSKVLGLKYEEIDCLINDEHTIKGRREGNEVFLPFTWVEKYFDVYGKVVQYDGYDRFEFSHSYSKVYAQRAPYHPDGVFMSFEGYNVEVRDRVKCISGVEGVPLSTQWGPQGYFYPIQIAQYGLSHYSKNLTEKPPHIEVYETAEDRDKNKPNDWTVPKGCFMANVADKSRFTNVKQFIAPETSEGVSLQLGNTKDFIISFDLKFLTNGSVSVVLETTEKNQLFTIHYVSNAQLIAFKERDIYYGIGPRTSWSTVTRDLVTDLRKGVGLSNTKAVKPTKIMPKKVVRLIAKGKGFLDNITISTTAHMAAFFAASDWLVRNQDEKGGWPIMVTRKLGEGFKSLEPGWYSAMAQGQAISTLVRAYLLTKDHIFLNSALRATAPYKFLSEQHGVKAVFMNKHDWYEEYPTTPSSFVLNGFMYSLIGLYDLKETAGEKLGKEARSLYERGMESLKAMLPLYDTGSGTIYDLRHFMLGIAPNLARWDYHTTHINQLQLLSTIDESPVFKEFVKRWKSYLKGSRAKHN

SEQ ID NO: 5999 - protein, 617 aa, Homo Sapiens
MRCLAARVNYKTLIIICALFTLVTVLLWNKCSSDKAIQFPRRSSSGFRVDGFEKRAAASESNNYMNHVAKQQSEEAFPQEQQKAPPVVGGFNSNVGSKVLGLKYEEIDCLINDEHTIKGRREGNEVFLPFTWVEKYFDVYGKVVQYDGYDRFEFSHSYSKVYAQRAPYHPDGVFMSFEGYNVEVRDRVKCISGVEGVPLSTQWGPQGYFYPIQIAQYGLSHYSKNLTEKPPHIEVYETAEDRDKNKPNDWTVPKGCFMANVADKSRFTNVKQFIAPETSEGVSLQLGNTKDFIISFDLKFLTNGSVSVVLETTEKNQLFTIHYVSNAQLIAFKERDIYYGIGPRTSWSTVTRDLVTDLRKGVGLSNTKAVKPTKIMPKKVVRLIAKGKGFLDNITISTTAHMAAFFAASDWLVRNQDEKGGWPIMVTRKLGEGFKSLEPGWYSAMAQGQAISTLVRAYLLTKDHIFLNSALRATAPYKFLSEQHGVKAVFMNKHDWYEEYPTTPSSFVLNGFMYSLIGLYDLKETAGEKLGKEARSLYERGMESLKAMLPLYDTGSGTIYDLRHFMLGIAPNLARWDYHTTHINQLQLLSTIDESPVFKEFVKRWKSYLKGSRAKHN

SEQ ID NO: 6000 - protein, 1192 aa, Homo Sapiens
MAACGRVRRMFRLSAALHLLLLFAAGAEKLPGQGVHSQGQGPGANFVSFVGQAGGGGPAGQQLPQLPQSSQLQQQQQQQQQQQQPQPPQPPFPAGGPPARRGGAGAGGGWKLAEEESCREDVTRVCPKHTWSNNLAVLECLQDVRELLWNYKLNLTTDPKFESVAREVCKSTITEIKECADEPVGKGYMVSCLVDHRGNITEYQCHQYITKMTAIIFSDYRLICGFMDDCKNDINILKCGSIRLGEKDAHSQGEVVSCLEKGLVKEAEEREPKIQVSELCKKAILRVAELSSDDFHLDRHLYFACRDDRERFCENTQAGEGRVYKCLFNHKFEESMSEKCREALTTRQKLIAQDYKVSYSLAKSCKSDLKKYRCNVENLPRSREARLSYLLMCLESAVHRGRQVSSECQGEMLDYRRMLMEDFSLSPEIILSCRGEIEHHCSGLHRKGRTLHCLMKVVRGEKGNLGMNCQQALQTLIQETDPGADYRIDRALNEACESVIQTACKHIRSGDPMILSCLMEHLYTEKMVEDCEHRLLELQYFISRDWKLDPVLYRKCQGDASRLCHTHGWNETSEFMPQGAVFSCLYRHAYRTEEQGRRLSRECRAEVQRILHQRAMDVKLDPALQDKCLIDLGKWCSEKTETGQELECLQDHLDDLVVECRDIVGNLTELESEDIQIEALLMRACEPIIQNFCHDVADNQIDSGDLMECLIQNKHQKDMNEKCAIGVTHFQLVQMKDFRFSYKFKMACKEDVLKLCPNIKKKVDVVICLSTTVRNDTLQEAKEHRVSLKCRRQLRVEELEMTEDIRLEPDLYEACKSDIKNFCSAVQYGNAQIIECLKENKKQLSTRCHQKVFKLQETEMMDPELDYTLMRVCKQMIKRFCPEADSKTMLQCLKQNKNSELMDPKCKQMITKRQITQNTDYRLNPMLRKACKADIPKFCHGILTKAKDDSELEGQVISCLKLRYADQRLSSDCEDQIRIIIQESALDYRLDPQLQLHCSDEISSLCAEEAAAQEQTGQVEECLKVNLLKIKTELCKKEVLNMLKESKADIFVDPVLHTACALDIKHHCAAITPGRGRQMSCLMEALEDKRVRLQPECKKRLNDRIEMWSYAAKVAPADGFSDLAMQVMTSPSKNYILSVISGSICILFLIGLMCGRITKRVTRELKDRLQYRSETMAYKGLVWSQDVTGSPA

SEQ ID NO: 6001 - protein, 1203 aa, Homo Sapiens
MAACGRVRRMFRLSAALHLLLLFAAGAEKLPGQGVHSQGQGPGANFVSFVGQAGGGGPAGQQLPQLPQSSQLQQQQQQQQQQQQPQPPQPPFPAGGPPARRGGAGAGGGWKLAEEESCREDVTRVCPKHTWSNNLAVLECLQDVREPENEISSDCNHLLWNYKLNLTTDPKFESVAREVCKSTITEIKECADEPVGKGYMVSCLVDHRGNITEYQCHQYITKMTAIIFSDYRLICGFMDDCKNDINILKCGSIRLGEKDAHSQGEVVSCLEKGLVKEAEEREPKIQVSELCKKAILRVAELSSDDFHLDRHLYFACRDDRERFCENTQAGEGRVYKCLFNHKFEESMSEKCREALTTRQKLIAQDYKVSYSLAKSCKSDLKKYRCNVENLPRSREARLSYLLMCLESAVHRGRQVSSECQGEMLDYRRMLMEDFSLSPEIILSCRGEIEHHCSGLHRKGRTLHCLMKVVRGEKGNLGMNCQQALQTLIQETDPGADYRIDRALNEACESVIQTACKHIRSGDPMILSCLMEHLYTEKMVEDCEHRLLELQYFISRDWKLDPVLYRKCQGDASRLCHTHGWNETSEFMPQGAVFSCLYRHAYRTEEQGRRLSRECRAEVQRILHQRAMDVKLDPALQDKCLIDLGKWCSEKTETGQELECLQDHLDDLVVECRDIVGNLTELESEDIQIEALLMRACEPIIQNFCHDVADNQIDSGDLMECLIQNKHQKDMNEKCAIGVTHFQLVQMKDFRFSYKFKMACKEDVLKLCPNIKKKVDVVICLSTTVRNDTLQEAKEHRVSLKCRRQLRVEELEMTEDIRLEPDLYEACKSDIKNFCSAVQYGNAQIIECLKENKKQLSTRCHQKVFKLQETEMMDPELDYTLMRVCKQMIKRFCPEADSKTMLQCLKQNKNSELMDPKCKQMITKRQITQNTDYRLNPMLRKACKADIPKFCHGILTKAKDDSELEGQVISCLKLRYADQRLSSDCEDQIRIIIQESALDYRLDPQLQLHCSDEISSLCAEEAAAQEQTGQVEECLKVNLLKIKTELCKKEVLNMLKESKADIFVDPVLHTACALDIKHHCAAITPGRGRQMSCLMEALEDKRVRLQPECKKRLNDRIEMWSYAAKVAPADGFSDLAMQVMTSPSKNYILSVISGSICILFLIGLMCGRITKRVTRELKDRLQYRSETMAYKGLVWSQDVTGSPA

SEQ ID NO: 6002 - protein, 1179 aa, Homo Sapiens
MAACGRVRRMFRLSAALHLLLLFAAGAEKLPGQGVHSQGQGPGANFVSFVGQAGGGGPAGQQLPQLPQSSQLQQQQQQQQQQQQPQPPQPPFPAGGPPARRGGAGAGGGWKLAEEESCREDVTRVCPKHTWSNNLAVLECLQDVREPENEISSDCNHLLWNYKLNLTTDPKFESVAREVCKSTITEIKECADEPVGKGYMVSCLVDHRGNITEYQCHQYITKMTAIIFSDYRLICGFMDDCKNDINILKCGSIRLGEKDAHSQGEVVSCLEKGLVKEAEEREPKIQVSELCKKAILRVAELSSDDFHLDRHLYFACRDDRERFCENTQAGEGRVYKCLFNHKFEESMSEKCREALTTRQKLIAQDYKVSYSLAKSCKSDLKKYRCNVENLPRSREARLSYLLMCLESAVHRGRQVSSECQGEMLDYRRMLMEDFSLSPEIILSCRGEIEHHCSGLHRKGRTLHCLMKVVRGEKGNLGMNCQQALQTLIQETDPGADYRIDRALNEACESVIQTACKHIRSGDPMILSCLMEHLYTEKMVEDCEHRLLELQYFISRDWKLDPVLYRKCQGDASRLCHTHGWNETSEFMPQGAVFSCLYRHAYRTEEQGRRLSRECRAEVQRILHQRAMDVKLDPALQDKCLIDLGKWCSEKTETGQELECLQDHLDDLVVECRDIVGNLTELESEDIQIEALLMRACEPIIQNFCHDVADNQIDSGDLMECLIQNKHQKDMNEKCAIGVTHFQLVQMKDFRFSYKFKMACKEDVLKLCPNIKKKVDVVICLSTTVRNDTLQEAKEHRVSLKCRRQLRVEELEMTEDIRLEPDLYEACKSDIKNFCSAVQYGNAQIIECLKENKKQLSTRCHQKVFKLQETEMMDPELDYTLMRVCKQMIKRFCPEADSKTMLQCLKQNKNSELMDPKCKQMITKRQITQNTDYRLNPMLRKACKADIPKFCHGILTKAKDDSELEGQVISCLKLRYADQRLSSDCEDQIRIIIQESALDYRLDPQLQLHCSDEISSLCAEEAAAQEQTGQVEECLKVNLLKIKTELCKKEVLNMLKESKADIFVDPVLHTACALDIKHHCAAITPGRGRQMSCLMEALEDKRVRLQPECKKRLNDRIEMWSYAAKVAPADGFSDLAMQVMTSPSKNYILSVISGSICILFLIGLMCGRITKRVTRELKDR

SEQ ID NO: 6003 - protein, 698 aa, Homo Sapiens
MAACGRVRRMFRLSAALHLLLLFAAGAEKLPGQGVHSQGQGPGANFVSFVGQAGGGGPAGQQLPQLPQSSQLQQQQQQQQQQQQPQPPQPPFPAGGPPARRGGAGAGGGWKLAEEESCREDVTRVCPKHTWSNNLAVLECLQDVREPENEISSDCNHLLWNYKLNLTTDPKFESVAREVCKSTITEIKECADEPVGKGYMVSCLVDHRGNITEYQCHQYITKMTAIIFSDYRLICGFMDDCKNDINILKCGSIRLGEKDAHSQGEVVSCLEKGLVKEAEEREPKIQVSELCKKAILRVAELSSDDFHLDRHLYFACRDDRERFCENTQAGEGRVYKCLFNHKFEESMSEKCREALTTRQKLIAQDYKVSYSLAKSCKSDLKKYRCNVENLPRSREARLSYLLMCLESAVHRGRQVSSECQGEMLDYRRMLMEDFSLSPEIILSCRGEIEHHCSGLHRKGRTLHCLMKVVRGEKGNLGMNCQQALQTLIQETDPGADYRIDRALNEACESVIQTACKHIRSGDPMILSCLMEHLYTEKMVEDCEHRLLELQYFISRDWKLDPVLYRKCQGDASRLCHTHGWNETSEFMPQGAVFSCLYRHAYRTEEQGRRLSRECRAEVQRILHQRAMDVKLDPALQDKCLIDLGKWCSEKTETGQELECLQDHLDDLVVECRDIVGNLTELESEAEREYVFKNLPFKV

SEQ ID NO: 6004 - protein, 305 aa, Homo Sapiens
MAACGRVRRMFRLSAALHLLLLFAAGAEKLPGQGVHSQGQGPGANFVSFVGQAGGGGPAGQQLPQLPQSSQLQQQQQQQQQQQQPQPPQPPFPAGGPPARRGGAGAGGGWKLAEEESCREDVTRVCPKHTWSNNLAVLECLQDVREPENEISSDCNHLLWNYKLNLTTDPKFESVAREVCKSTITEIKECADEPVGKGYMVSCLVDHRGNITEYQCHQYITKMTAIIFSDYRLICGFMDDCKNDINILKCGSIRLGEKDAHSQDTPTALRNREGGSHGSAELKSKGSYTSVPWMSSWILPSRISA

SEQ ID NO: 6005 - protein, 698 aa, Homo Sapiens; identical to SEQ ID NO: 6003

SEQ ID NO: 6006 - protein, 152 aa, Homo Sapiens
MAACGRVRRMFRLSAALHLLLLFAAGAEKLPGQGVHSQGQGPGANFVSFVGQPPFPAGGPPARRGGAGAGGGWKLAEEESCREDVTRVCPKHTWSNNLAVLECLQDVREPENEISSDCNHLLWNYKLNLTTDPKFESVAREVCKSTITEIKE

SEQ ID NO: 6007 - protein, 74 aa, Homo Sapiens
MVSCLVDHRGNITEYQCHQYITKMTAIIFSDYRLICGFMDDCKNDINILKCGSIRLGEKDAHSQGEVVSCLEKG

SEQ ID NO: 6008 - protein, 148 aa, Homo Sapiens
MRVTLATIAWMVSFVSNYSHTANILPDIENEDFIKDCVRIHNKFRSEVKPTASDMLYMTWDPALAQIAKAWASNCQFSHNTRLKPPHKLHPNFTSLGENIWTGSVPIFSVSSAITNWYDEIQDYDFKTRICKKVCGHYTQRELPNLAI

SEQ ID NO: 6009 - protein, 238 aa, Homo Sapiens
MRVTLATIAWMVSFVSNYSHTANILPDIENEDFIKDCVRIHNKFRSEVKPTASDMLYMTWDPALAQIAKAWASNCQFSHNTRLKPPHKLHPNFTSLGENIWTGSVPIFSVSSAITNWYDEIQDYDFKTRICKKVCGHYTQVSQERGRDPNPKRGFLNLARENPGLFGQIVTKLAAQFNFALKFLALTLFPMEHILYATTDQEGITQLGHIREEPPAVPAPIMTSVWTISVLTDSETKS

SEQ ID NO: 6010 - protein, 266 aa, Homo Sapiens
MRVTLATIAWMVSFVSNYSHTANILPDIENEDFIKDCVRIHNKFRSEVKPTASDMLYMTWDPALAQIAKAWASNCQFSHNTRLKPPHKLHPNFTSLGENIWTGSVPIFSVSSAITNWYDEIQDYDFKTRICKKVCGHYTQVVWADSYKVGCAVQFCPKVSGFDALSNGAHFICNYGPGGNYPTWPYKRGATCSACPNNDKCLDNLCVNRQRDQVKRYYSVVYPGWPIYPRNRYTSLFLIVNSVILILSVIITILVQHKYPNLVLLD

SEQ ID NO: 6011 - protein, 89 aa, Homo Sapiens
MTKSRTMTSRLGYAKKSVATTLRLFGQIVTKLAAQFNFALKFLALTLFPMEHILYATTDQEGITQLGHIREEPPAVPAPIMTSVWTISV

SEQ ID NO: 6012 - protein, 233 aa, Homo Sapiens
MALKNKFSCLWILGLCLVATTSSKIPSITDPHFIDNCIEAHNEWRGKVNPPAADMKYMIWDKGLAKMAKAWANQCKFEHNDCLDKSYKCYAAFEYVGENIWLGGIKSFTPRHAITAWYNETQFYDFDSLSCSRVCGHYTQLVWANSFYVGCAVAMCPNLGGASTAIFVCNYGPAGNFANMPPYVRGESCSLCSKEEKCVKNLCKNPFLKPTGRAPQQTAFNPFSLGFLLLRIF

SEQ ID NO: 6013 - protein, 242 aa, Homo Sapiens
MALKNKFSCLWILGLCLVATTSSKIPSITDPHFIDNCIEAHNEWRGKVNPPAADMKYMIWDKGLAKMAKAWANQCKFEHNDCLDKSYKCYAAFEYVGENIWLGGIKSFTPRHAITAWYNETQFYDFDSLSCSRVCGHYTQLVWANSFYVGCAVAMCPNLGGASTAIFVCNYGPAGNFANMPPYVRGESCSLCSKEEKCVKNLCRTPQLIIPNQNPFLKPTGRAPQQTAFNPFSLGFLLLRIF

SEQ ID NO: 6014 - protein, 57 aa, Homo Sapiens
MSLLKLILLRVPCRATACQKGLTTQTFPLSPQSPKGQLAACSNKMSFLFRAEEKIHF

SEQ ID NO: 6015 - protein, 39 aa, Homo Sapiens
  misc_feature (1)..(1): Xaa can be any naturally occurring amino acid
XLSPQSPKGQLAACSNKMSFLFRAEEGLHNLLYLTKIHF

SEQ ID NO: 6016 - protein, 56 aa, Homo Sapiens
MMVQRLGLISPPASQVSTACNQISPSLQRAMNAANLNIPPSDTRKCGKHGKVPSTK

SEQ ID NO: 6017 - protein, 89 aa, Homo Sapiens
MMVQRLGLISPPASQVSTACNQISPSLQRAMNAANLNIPPSDTRSLISRESLASTTLSLTESQSASSMKQEWSQGYRALPSLSNHGSQN

SEQ ID NO: 6018 - protein, 89 aa, Homo Sapiens; identical to SEQ ID NO: 6017

SEQ ID NO: 6019 - protein, 89 aa, Homo Sapiens; identical to SEQ ID NO: 6017

SEQ ID NO: 6020 - protein, 775 aa, Homo Sapiens
MMVQRLGLISPPASQVSTACNQISPSLQRAMNAANLNIPPSDTRSLISRESLASTTLSLTESQSASSMKQEWSQGYRALPSLSNHGSQNGLDLGDLLSLPPGTSMSSNSVSNSLPSYLFGTESSHSPYPSPRHSSTRSHSARSKKRALSLSPLSDGIGIDFNTIIRTSPTSLVAYINGSRASPANLSPQPEVYGHFLGVRGSCIPQPRPVPGSQKGVLVAPGGLALPAYGEDGALEHERMQQLEHGGLQPGLVNHMVVQHGLPGPDSQSAGLFKTERLEEFPGSTVDLPPAPPLPPLPPPPGPPPPYHAHAHLHHPELGPHAQQLALPQATLDDDGEMDGIGGKHCCRWIDCSALYDQQEELVRHIEKVHIDQRKGEDFTCFWAGCPRRYKPFNARYKLLIHMRVHSGEKPNKCTFEGCEKAFSRLENLKIHLRSHTGEKPYLCQHPGCQKAFSNSSDRAKHQRTHLDTKPYACQIPGCTKRYTDPSSLRKHVKAHSSKEQQARKKLRSSTELHPDLLTDCLTVQSLQPATSPRDAAAEGTVGRSPGPGPDLYSAPIFSSNYSSRSGTAAGAVPPPHPVSHPSPGHNVQGSPHNPSSQLPPLTAVDAGAERFAPSAPSPHHISPRRVPAPSSILQRTQPPYTQQPSGSHLKSYQPETNSSFQPNGIHVHGFYGQLQKFCPPHYPDSQRIVPPVSSCSVVPSFEDCLVPTSMGQASFDVFHRAFSTHSGITVYDLPSSSSSLFGESLRSGAEDATFLQISTVDRCPSQLSSVYTEG

SEQ ID NO: 6021 - protein, 244 aa, Homo Sapiens
MNGRSCSMSLHRTSGTPQGPRMVSGHHIPAIRAHSGTPGPSPCGSTSSPTMASLANNLHLKMPSGGGMAPQNNVAESRIHLPALSPRRQMLTNGKPRFQVTQAGGMSGSHTLKPKQQEFGSPFPPNPGKGALGFGPQCKSIGKGSCNNLVVTSSPMMVQRLGLISPPASQVSTACNQISPSLQRAMNAANLNIPPSDTRSLISRESLASTTLSLTESQSASSMKQEWSQGYRALPSLSNHGSQN

SEQ ID NO: 6022 - protein, 244 aa, Homo Sapiens; identical to SEQ ID NO: 6021

SEQ ID NO: 6023 - protein, 930 aa, Homo Sapiens
MNGRSCSMSLHRTSGTPQGPRMVSGHHIPAIRAHSGTPGPSPCGSTSSPTMASLANNLHLKMPSGGGMAPQNNVAESRIHLPALSPRRQMLTNGKPRFQVTQAGGMSGSHTLKPKQQEFGSPFPPNPGKGALGFGPQCKSIGKGSCNNLVVTSSPMMVQRLGLISPPASQVSTACNQISPSLQRAMNAANLNIPPSDTRSLISRESLASTTLSLTESQSASSMKQEWSQGYRALPSLSNHGSQNGLDLGDLLSLPPGTSMSSNSVSNSLPSYLFGTESSHSPYPSPRHSSTRSHSARSKKRALSLSPLSDGIGIDFNTIIRTSPTSLVAYINGSRASPANLSPQPEVYGHFLGVRGSCIPQPRPVPGSQKGVLVAPGGLALPAYGEDGALEHERMQQLEHGGLQPGLVNHMVVQHGLPGPDSQSAGLFKTERLEEFPGSTVDLPPAPPLPPLPPPPGPPPPYHAHAHLHHPELGPHAQQLALPQATLDDDGEMDGIGGKHCCRWIDCSALYDQQEELVRHIEKVHIDQRKGEDFTCFWAGCPRRYKPFNARYKLLIHMRVHSGEKPNKCTFEGCEKAFSRLENLKIHLRSHTGEKPYLCQHPGCQKAFSNSSDRAKHQRTHLDTKPYACQIPGCTKRYTDPSSLRKHVKAHSSKEQQARKKLRSSTELHPDLLTDCLTVQSLQPATSPRDAAAEGTVGRSPGPGPDLYSAPIFSSNYSSRSGTAAGAVPPPHPVSHPSPGHNVQGSPHNPSSQLPPLTAVDAGAERFAPSAPSPHHISPRRVPAPSSILQRTQPPYTQQPSGSHLKSYQPETNSSFQPNGIHVHGFYGQLQKFCPPHYPDSQRIVPPVSSCSVVPSFEDCLVPTSMGQASFDVFHRAFSTHSGITVYDLPSSSSSLFGESLRSGAEDATFLQISTVDRCPSQLSSVYTEG

SEQ ID NO: 6024 - protein, 142 aa, Homo Sapiens
MNGRSCSMSLHRTSGTPQGPRMVSGHHIPAIRAHSGTPGPSPCGSTSSPTMASLANNLHLKMPSGGGMAPQNNVAESRIHLPALSPRRQMLTNGKPRFQVTQAGGMSGSHTLKPKQQEFGSPFPPNPGKGPLFRVSLWRPRP

SEQ ID NO: 6025 - protein, 75 aa, Homo Sapiens
FNLTFGASTGPGYWDQHYLSWSMLLGVGFPPVDGLSPLVLGIMAVALGAPGLMLLGGGLVLLLHHKKYSEYQSIN

SEQ ID NO: 6026 - protein, 320 aa, Homo Sapiens
MRGSVECTWGWGHCAPSPLLLWTLLLFAAPFGLLGEKTRQLLEFDSTNVSDTAAKPLGRPYPPYSLADFSWNNITDSLDPATLSATFQGHPMNDPTRTFANGSLAFRVQAFSRSSRPAQPPRLLHTADTCQLEVALIGASPRGNRSLFGLEVATLGQGPDCPSMQEQHSIDDEYAPAVFQLDQLLWGSLPSGFAQWRPVAYSQKPGGRESALPCQASPLHPALAYSLPQSPIVRAFFGSQNNFCAFNLTFGASTGPGYWDQHYLSWSMLLGVGFPPVDGLSPLVLGIMAVALGAPGLMLLGGGLVLLLHHKKYSEYQSIN

SEQ ID NO: 6027 - protein, 183 aa, Homo Sapiens [sequence omitted]

SEQ ID NO: 6028 - protein, 89 aa, Homo Sapiens
MRGSVECTWGWGHCAPSPLLLWTLLLFAAPFGLLGEKTRQVRRLGENQGEECRGESSSQLEGGTKDWGKAFGKTISSILLGRFLLEQHH

SEQ ID NO: 6029 - protein, 130 aa, Homo Sapiens
MRGSVECTWGWGHCAPSPLLLWTLLLFAAPFGLLGEKTRQVSLEVIPNWLGPLQNLLHIRAVGTNSTLHYVWSSLGPLAVVMVATNTPHSTLSVNWSLLLSPEPDGGLMVLPKDSIQFSSALVFTRGSCC

SEQ ID NO: 6030 - protein, 406 aa, Homo Sapiens
MRGSVECTWGWGHCAPSPLLLWTLLLFAAPFGLLGEKTRQVSLEVIPNWLGPLQNLLHIRAVGTNSTLHYVWSSLGPLAVVMVATNTPHSTLSVNWSLLLSPEPDGGLMVLPKDSIQFSSALVFTRLLEFDSTNVSDTAAKPLGRPYPPYSLADFSWNNITDSLDPATLSATFQGHPMNDPTRTFANGSLAFRVQAFSRSSRPAQPPRLLHTADTCQLEVALIGASPRGNRSLFGLEVATLGQGPDCPSMQEQHSIDDEYAPAVFQLDQLLWGSLPSGFAQWRPVAYSQKPGGRESALPCQASPLHPALAYSLPQSPIVRAFFGSQNNFCAFNLTFGASTGPGYWDQHYLSWSMLLGVGFPPVDGLSPLVLGIMAVALGAPGLMLLGGGLVLLLHHKKYSEYQSIN

SEQ ID NO: 6031 - protein, 331 aa, Homo Sapiens
MRGSVECTWGWGHCAPSPLLLWTLLLFAAPFGLLGEKTRQVSLEVIPNWLGPLQNLLHIRAVGTNSTLHYVWSSLGPLAVVMVATNTPHSTLSVNWSLLLSPEPDGGLMVLPKDSIQFSSALVFTRLLEFDSTNVSDTAAKPLGRPYPPYSLADFSWNNITDSLDPATLSATFQGHPMNDPTRTFANGSLAFRVQAFSRSSRPAQPPRLLHTADTCQLEVALIGASPRGNRSLFGLEVATLGQGPDCPSMQEQHSIDDEYAPAVFQVDAPGCGLPSSGRLVPTSPGHHGSGPGCPRAHAARGRLGSAAAPQEVLRVPVHKLRPALWREGHY

SEQ ID NO: 6032 - protein, 325 aa, Homo Sapiens
MVATNTPHSTLSVNWSLLLSPEPDGGLMVLPKDSIQFSSALVFTRLLEFDSTNVSDTAAKPLGRPYPPYSLADFSWNNITDSLDPATLSATFQGHPMNDPTRTFANGSLAFRVQAFSRSSRPAQPPRLLHTADTCQLEVALIGASPRGNRSLFGLEVATLGQGPDCPSMQEQHSIDDEYAPAVFQLDQLLWGSLPSGFAQWRPVAYSQKPGGRESALPCQASPLHPALAYSLPQSPIVRAFFGSQNNFCAFNLTFGASTGPGYWDQHYLSWSMLLGVGFPPVDGLSPLVLGIMAVALGAPGLMLLGGGLVLLLHHKKYSEYQSIN

SEQ ID NO: 6033 - protein, 111 aa, Homo Sapiens
  misc_feature (1)..(1): Xaa can be any naturally occurring amino acid
XPSMQEQHSIDDEYAPAVFQSPIVRAFFGSQNNFCAFNLTFGASTGPGYWDQHYLSWSMLLGVGFPPVDGLSPLVLGIMAVALGAPGLMLLGGGLVLLLHHKKYSEYQSIN

SEQ ID NO: 6034 - protein, 46 aa, Homo Sapiens
MKFLLTTAFLILISLWVEEAYSKEKSSKKGKGKKKQYLCPSERLYH

SEQ ID NO: 6035 - protein, 46 aa, Homo Sapiens; identical to SEQ ID NO: 6034

SEQ ID NO: 6036 - protein, 56 aa, Homo Sapiens
MKFLLTTAFLILISLWVEEAYSKEKSSKKGKGKKKQYLCPSLVRPDAKKFVLLSLI

SEQ ID NO: 6037 - protein, 497 aa, Homo Sapiens
MKFLLTTAFLILISLWVEEAYSKEKSSKKGKGKKKQYLCPSQQSAEDLARVPANSTSNILNRLLVSYDPRIRPNFKGIPVDVVVNIFINSFGSIQETTMDYRVNIFLRQKWNDPRLKLPSDFRGSDALTVDPTMYKCLWKPDLFFANEKSANFHDVTQENILLFIFRDGDVLVSMRLSITLSCPLDLTLFPMDTQRCKMQLESFGYTTDDLRFIWQSGDPVQLEKIALPQFDIKKEDIEYGNCTKYYKGTGYYTCVEVIFTLRRQVGFYMMGVYAPTLLIVVLSWLSFWINPDASAARVPLGIFSVLSLASECTTLAAELPKVSYVKALDVWLIACLLFGFASLVEYAVVQVMLNNPKRVEAEKARIAKAEQADGKGGNVAKKNTVNGTGTPVHISTLQVGETRCKKVCTSKSDLRSNDFSIVGSLPRDFELSNYDCYGKPIEVNNGLGKSQAKNNKKPPPAKPVIPTAAKRIDLYARALFPFCFLFFNVIYWSIYL

SEQ ID NO: 6038 - protein, 497 aa, Homo Sapiens; identical to SEQ ID NO: 6037

SEQ ID NO: 6039 - protein, 303 aa, Homo Sapiens
MKFLLTTAFLILISLWVEEAYSKEKSSKKGKGKKKQYLCPSQQSAEDLARVPANSTSNILNRLLVSYDPRIRPNFKGIPVDVVVNIFINSFGSIQETTMDYRVNIFLRQKWNDPRLKLPSDFRGSDALTVDPTMYKCLWKPDLFFANEKSANFHDVTQENILLFIFRDGDVLVSMRLSITLSCPLDLTLFPMDTQRCKMQLESFGYTTDDLRFIWQSGDPVQLEKIALPQFDIKKEDIEYGNCTKYYKGTGYYTCVEVIFTLRRQVGFYMMGVYAPTLLIVVLSWLSFWINPDASAARVPLGW

SEQ ID NO: 6040 - protein, 182 aa, Homo Sapiens
AKSGVAGGILLVVPNVMGMMCWSPPLDKMGNSVKGIHFCHDLVSLCNFHNYDNLRHFAKKLDPRREGGDQRVKSVINLLFAAYTGDVSALRRFALSAMDMEQRDYDSRTALHVAAAEGGITLPWMKHCTLDTMMYLKFSKNTKSSTHLKEILTTGRKIKPSIRILMDCCNGLKSQDLNHLPI

SEQ ID NO: 6041 - protein, 114 aa, Homo Sapiens
ESAKKQSGGKVADYIPQLAKFSPDLWGVSVCTVDGQRHSTGDTKVPFCLQSCVKPLKYAIAVNDLGTEYVHRYVGKEPSGLRFNKLFLNEDDKPHNPMVNAGAIVVTSLIKDWW

SEQ ID NO: 6042 - protein, 169 aa, Homo Sapiens
MAATLANGGFCPITGERVLSPEAVRNTLSLMHSCGMYDFSGQFAFHVGLPAKSGVAGGILLVVPNVMGMMCWSPPLDKMGNSVKGIHFCHDLVSLCNFHNYDNLRHFAKKLDPRREGGDQRHSFGPLDYESLQQELALKETVWKKVSPESNEDISTTVVYRMESLGEKS

SEQ ID NO: 6043 - protein, 164 aa, Homo Sapiens
MAATLANGGFCPITGERVLSPEAVRNTLSLMHSCGMYDFSGQFAFHVGLPAKSGVAGGILLVVPNVMGMMCWSPPLDKMGNSVKGIHFCHDLVSLCNFHNYDNLRHFAKKLDPRREGGDQRVKSVINLLFAAYTGDVSALRRFALSAMDMEQRDYDSRTALHVA

SEQ ID NO: 6044 - protein, 103 aa, Homo Sapiens
MGMMCWSPPLDKMGNSVKGIHFCHDLVSLCNFHNYDNLRHFAKKLDPRREGGDQRHSFGPLDYESLQQELALKETVWKKVSPESNEDISTTVVYRMESLGEKS

SEQ ID NO: 6045 - protein, 174 aa, Homo Sapiens
MGMMCWSPPLDKMGNSVKGIHFCHDLVSLCNFHNYDNLRHFAKKLDPRREGGDQRVKSVINLLFAAYTGDVSALRRFALSAMDMEQRDYDSRTALHVAAAEGHVEVVKFLLEACKVNPFPKDRWNNTPMDEALHFGHHDVFKILQEYQVQYTPQGDSDNGKENQTVHKNLDGLL

SEQ ID NO: 6046 - protein, 669 aa, Homo Sapiens
MMRLRGSGMLRDLLLRSPAGVSATLRRAQPLVTLCRRPRGGGRPAAGPAAAARLHPWWGGGGWPAEPLARGLSSSPSEILQELGKGSTHPQPGVSPPAAPAAPGPKDGPGETDAFGNSEGKELVASGENKIKQGLLPSLEDLLFYTIAEGQEKIPVHKFITALKSTGLRTSDPRLKECMDMLRLTLQTTSDGVMLDKDLFKKCVQSNIVLLTQAFRRKFVIPDFMSFTSHIDELYESAKKQSGGKVADYIPQLAKFSPDLWGVSVCTVDGQRHSTGDTKVPFCLQSCVKPLKYAIAVNDLGTEYVHRYVGKEPSGLRFNKLFLNEDDKPHNPMVNAGAIVVTSLIKQGVNNAEKFDYVMQFLNKMAGNEYVGFSNATFQSERESGDRNFAIGYYLKEKKCFPEGTDMVGILDFYFQLCSIEVTCESASVMAATLANGGFCPITGERVLSPEAVRNTLSLMHSCGMYDFSGQFAFHVGLPAKSGVAGGILLVVPNVMGMMCWSPPLDKMGNSVKGIHFCHDLVSLCNFHNYDNLRHFAKKLDPRREGGDQRVKSVINLLFAAYTGDVSALRRFALSAMDMEQRDYDSRTALHVAAAEGHVEVVKFLLEACKVNPFPKDRWNNTPMDEALHFGHHDVFKILQEYQVQYTPQGDSDNGKENQTVHKNLDGLL

SEQ ID NO: 6047 - protein, 598 aa, Homo Sapiens
MMRLRGSGMLRDLLLRSPAGVSATLRRAQPLVTLCRRPRGGGRPAAGPAAAARLHPWWGGGGWPAEPLARGLSSSPSEILQELGKGSTHPQPGVSPPAAPAAPGPKDGPGETDAFGNSEGKELVASGENKIKQGLLPSLEDLLFYTIAEGQEKIPVHKFITALKSTGLRTSDPRLKECMDMLRLTLQTTSDGVMLDKDLFKKCVQSNIVLLTQAFRRKFVIPDFMSFTSHIDELYESAKKQSGGKVADYIPQLAKFSPDLWGVSVCTVDGQRHSTGDTKVPFCLQSCVKPLKYAIAVNDLGTEYVHRYVGKEPSGLRFNKLFLNEDDKPHNPMVNAGAIVVTSLIKQGVNNAEKFDYVMQFLNKMAGNEYVGFSNATFQSERESGDRNFAIGYYLKEKKCFPEGTDMVGILDFYFQLCSIEVTCESASVMAATLANGGFCPITGERVLSPEAVRNTLSLMHSCGMYDFSGQFAFHVGLPAKSGVAGGILLVVPNVMGMMCWSPPLDKMGNSVKGIHFCHDLVSLCNFHNYDNLRHFAKKLDPRREGGDQRHSFGPLDYESLQQELALKETVWKKVSPESNEDISTTVVYRMESLGEKS

SEQ ID NO: 6048 - protein, 276 aa, Homo Sapiens
MNSKRMLLLVLFAFSLMLVERYFRNHQVEELRLSDWFHPRKRPDVITKTDWLAPVLWEGTFDRRVLEKHYRRRNITVGLAVFATGRFAEEYLRPFLHSANKHFMTGYRVIFYIMVDAFFKLPDIEPSPLRTFKAFKVGTERWWLDGPLVHVKSLGEHIASHIQDEVDFLFSMAANQVFQNEFGVETLGPLVAQLHAWWYFRNTKNFPYERRPTSAACIPFGQGDFYYGNLMVGGTPHNILDFIKEYLNGVIHDIKNGLNSTYEKHLNKYFYLNKPT

SEQ ID NO: 6049 - protein, 307 aa, Homo Sapiens
MNSKRMLLLVLFAFSLMLVERYFRNHQVEELRLSDWFHPRKRPDVITKTDWLAPVLWEGTFDRRVLEKHYRRRNITVGLAVFATGRFAEEYLRPFLHSANKHFMTGYRVIFYIMVDAFFKLPDIEPSPLRTFKAFKVGTERWWLDGPLVHVKSLGEHIASHIQDEVDFLFSMAANQVFQNEFGVETLGPLVAQLHAWWYFRNTKNFPYERRPTSAACIPFGQGDFYYGNLMVGGTPHNILDFIKEYLNGVIHDIKNGLNSTYEKHLNKYFYLNKPTLLSPAYSWDLAFSPPPQIQYVKVAHDSQRKL

SEQ ID NO: 6050 - protein, 291 aa, Homo Sapiens
MGVAARPPALRHWFSHSIPLAIFALLLLYLSVRSLGARSGCGPRAQPCVPGETAPFQVRQESGTLEAPERKQPPCLGPRGMLGRMMRRFHASLKPEGDVGLSPYLAGWRALVEFLTPLGSVFAFATREAFTKVTDLEARVHGPDAEHYWSLVAMAAWERRAGLLEQPGAAPRDPTRSSGSRTLLLLHRALRWSQLCLHRVATGALGGPDAGVQCSDAYRAALGPHHPWLVRQTARLAFLAFPGRRRLLELACPGATEAEARAALVRAAGTLEDVYNRTQSLLAERGLLQLA

SEQ ID NO: 6051 - protein, 558 aa, Homo Sapiens
MYRYLGEALLLSRAGPAALGSASADSAALLGWARGQPAAAPQPGLALAARRHYSEAVADREDDPNFFKMVEGFFDRGASIVEDKLVEDLRTRESEEQKRNRVRGILRIIKPCNHVLSLSFPIRRDDGSWEVIEGYRAQHSQHRTPCKGGIRYSTDVSVDEVKALASLMTYKCAVVDVPFGGAKAGVKINPKNYTDNELEKITRRFTMELAKKGFIGPGIDVPAPDMSTGEREMSWIADTYASTIGHYDINAHACVTGKPISQGGIHGRISATGRGVFHGIENFINEASYMSILGMTPGFGDKTFVVQGFGNVGLHSMRYLHRFGAKCIAVGESDGSIWNPDGIDPKELEDFKLQHGSILGFPKAKPYEGSILEADCDILIPAASEKQLTKSNAPRVKAKIIAEGANGPTTPEADKIFLERNIMVIPDLYLNAGGVTVSYFEWLKNLNHVSYGRLTFKYERDSNYHLLMSVQESLERKFGKHGGTIPIVPTAEFQDRISGASEKDIVHSGLAYTMERSARQIMRTAMKYNLGLDLRTAAYVNAIEKVFKVYNEAGVTFT

SEQ ID NO: 6052 - protein, 193 aa, Homo Sapiens
MQSLMQAPLLIALGLLLAAPAQAHLKKPSQLSSFSWDNCDEGKDPAVIRSLTLEPDPIIVPGNVTLSVMGSTSVPLSSPLKVDLVLEKEVAGLWIKIPCTDYIGSCTFEHFCDVLDMLIPTGEPCPEPLRTYGLPCHCPFKEGTYSLPKSEFVVPDLELPSWLTTGNYRIESVLSSSGKRLGCIKIAASLKGI

SEQ ID NO: 6053 - protein, 146 aa, Homo Sapiens
MSWVEAAGVSSTALEDRIVAKHEEVPEVSVQYEEKFQNHHKLPSQLSSFSWDNCDEGKDPAVIRSLTLEPDPIIVPGNVTLSVMGSTSVPLSSPLKVDLVLEKEVAGLWIKIPCTDYIGSCTFEHFCDVLDMLIPTGEPCPEPLRT

SEQ ID NO: 6054 - protein, 104 aa, Homo Sapiens
  misc_feature (1)..(1): Xaa can be any naturally occurring amino acid
XKDPAVIRSLTLEPDPIIVPGNVTLSVMGSTSVPLSSPLKVDLVLEKEVAGLWIKIPCTDYIGSCTFEHFCDVLDMLIPTGEPCPEPLRTYGLPCHCPFKEVST

SEQ ID NO: 6055 - protein, 118 aa, Homo Sapiens
MLLFALLLAMELPLVAASATMRAQWTYSLRCHDCAVINDFNCPNIRVCPYHIRRCMTISIQLSSGDRAAVCPGPHPTFFQPGAWIPTQVTDSKHQPLPAHLTRRHPLHGPGNILPSAI

SEQ ID NO: 6056 - protein, 158 aa, Homo Sapiens
MLLFALLLAMELPLVAASATMRAQWTYSLRCHDCAVINDFNCPNIRVCPYHIRRCMTISIRINSRELLVYKNCTNNCTFVYAAEQPPEAPGKIFKTNSFYWVCCCNSMVCNAGGPTNLERDMLPDEVTEEELPEGTVRLGVSKLLLSFASIIVSNILP

SEQ ID NO: 6057 - protein, 625 aa, Homo Sapiens
MARPVDPQRSPDPTFRSSTRHSGKLEPMEATAHLLRKQCPSRLNSPAWEASGLHWSSLDSPVGSMQALRPSAQHSWSPEPSVVPDQAWEDTALHQKKLCPLSLTSLPREAAVNFSYRSQTLLQEAQVLQGSPELLPRSPKPSGLQRLAPEEATALPLRRLCHLSLMEKDLGTTAHPRGFPELSHKSTAAASSRQSRPRVRSASLPPRTRLPSGSQAPSAAHPKRLSDLLLTSRAAAPGWRSPDPRSRLAAPPLGSTTLPSTWTAPQSRLTARPSRSPEPQIRESEQRDPQLRRKQQRWKEPLMPRREEKYPLRGTDPLPPGQPQRIPLPGQPLQPQPILTPGQPQKIPTPGQHQPILTPGHSQPIPTPGQPLPPQPIPTPGRPLTPQPIPTPGRPLTPQPIQMPGRPLRLPPPLRLLRPGQPMSPQLRQTQGLPLPQPLLPPGQPKSAGRPLQPLPPGPDARSISDPPAPRSRLPIRLLRGLLARLPGGASPRAAAAAACTTMKGWPAATMTPAETSPTMGPPDASAGFSIGEIAAAESPSATYSATFSCKPSGAASVDLRVPSPKPRALSRSRRYPWRRSADRCAKKPWRSGPRSAQRRNAVSSSTNNSRTKRWATCVRTACCF

SEQ ID NO: 6058 - protein, 245 aa, Homo Sapiens
MDRRSRAQQWRRARHNYNDLCPPIGRRAATALLWLSCSIALLRALATSNARAQQRAAAQQRRSFLNAHHRSGAQVFPESPESESDHEHEEADLELSLPECLEYEEEFDYETESETESEIESETDFETEPETAPTTEPETEPEDDRGPVVPKHSTFGQSLTQRLHALKLRSPDASPSRAPPSTQEPQSPREGEELKPEDKDPRDPEESKEPKEEKQRRRCKPKKPTRRDASPESPSKKGPIPIRRH

SEQ ID NO: 6059 - protein, 245 aa, Homo Sapiens; identical to SEQ ID NO: 6058

SEQ ID NO: 6060 - protein, 245 aa, Homo Sapiens; identical to SEQ ID NO: 6058

SEQ ID NO: 6061 - protein, 158 aa, Homo Sapiens
MGCLGNSKTEDQRNEEKAQREANKKIEKQLQEALNLFKSIWNNRWLRTISVILFLNKQDLLAEKVLAGKSKIEDYFPEFARYTTPEDATPEPGEDPRVTRAKYFIRDEFLRISTASGDGRHYCYPHFTCAVDTENIRRVFNDCRDIIQRMHLRQYELL

SEQ ID NO: 6062 - protein, 379 aa, Homo Sapiens
MGCLGNSKTEDQRNEEKAQREANKKIEKQLQKDKQVYRATHRLLLLGAGESGKSTIVKQMRILHVNGFNGDEKATKVQDIKNNLKEAIETIVAAMSNLVPPVELANPENQFRVDYILSVMNVPDFDFPPEFYEHAKALWEDEGVRACYERSNEYQLIDCAQYFLDKIDVIKQADYVPSDQDLLRCRVLTSGIFETKFQVDKVNFHMFDVGGQRDERRKWIQCFNDVTAIIFVVASSSYNMVIREDNQTNRLQEALNLFKSIWNNRWLRTISVILFLNKQDLLAEKVLAGKSKIEDYFPEFARYTTPEDATPEPGEDPRVTRAKYFIRDEFLRISTASGDGRHYCYPHFTCAVDTENIRRVFNDCRDIIQRMHLRQYELL

SEQ ID NO: 6063 - protein, 380 aa, Homo Sapiens
MGCLGNSKTEDQRNEEKAQREANKKIEKQLQKDKQVYRATHRLLLLGAGESGKSTIVKQMRILHVNGFNGDSEKATKVQDIKNNLKEAIETIVAAMSNLVPPVELANPENQFRVDYILSVMNVPDFDFPPEFYEHAKALWEDEGVRACYERSNEYQLIDCAQYFLDKIDVIKQADYVPSDQDLLRCRVLTSGIFETKFQVDKVNFHMFDVGGQRDERRKWIQCFNDVTAIIFVVASSSYNMVIREDNQTNRLQEALNLFKSIWNNRWLRTISVILFLNKQDLLAEKVLAGKSKIEDYFPEFARYTTPEDATPEPGEDPRVTRAKYFIRDEFLRISTASGDGRHYCYPHFTCAVDTENIRRVFNDCRDIIQRMHLRQYELL

SEQ ID NO: 6064 - protein, 394 aa, Homo Sapiens
MGCLGNSKTEDQRNEEKAQREANKKIEKQLQKDKQVYRATHRLLLLGAGESGKSTIVKQMRILHVNGFNGEGGEEDPQAARSNSDGEKATKVQDIKNNLKEAIETIVAAMSNLVPPVELANPENQFRVDYILSVMNVPDFDFPPEFYEHAKALWEDEGVRACYERSNEYQLIDCAQYFLDKIDVIKQADYVPSDQDLLRCRVLTSGIFETKFQVDKVNFHMFDVGGQRDERRKWIQCFNDVTAIIFVVASSSYNMVIREDNQTNRLQEALNLFKSIWNNRWLRTISVILFLNKQDLLAEKVLAGKSKIEDYFPEFARYTTPEDATPEPGEDPRVTRAKYFIRDEFLRISTASGDGRHYCYPHFTCAVDTENIRRVFNDCRDIIQRMHLRQYELL

SEQ ID NO: 6065 - protein, 87 aa, Homo Sapiens
MGCLGNSKTEDQRNEEKAQREANKKIEKQLQKDKQVYRATHRLLLLGAGESGKSTIVKQMRILHVNGFNGEGGEEDPQAARSNSDGI

SEQ ID NO: 6066 - protein, 395 aa, Homo Sapiens
MGCLGNSKTEDQRNEEKAQREANKKIEKQLQKDKQVYRATHRLLLLGAGESGKSTIVKQMRILHVNGFNGEGGEEDPQAARSNSDGSEKATKVQDIKNNLKEAIETIVAAMSNLVPPVELANPENQFRVDYILSVMNVPDFDFPPEFYEHAKALWEDEGVRACYERSNEYQLIDCAQYFLDKIDVIKQADYVPSDQDLLRCRVLTSGIFETKFQVDKVNFHMFDVGGQRDERRKWIQCFNDVTAIIFVVASSSYNMVIREDNQTNRLQEALNLFKSIWNNRWLRTISVILFLNKQDLLAEKVLAGKSKIEDYFPEFARYTTPEDATPEPGEDPRVTRAKYFIRDEFLRISTASGDGRHYCYPHFTCAVDTENIRRVFNDCRDIIQRMHLRQYELL

SEQ ID NO: 6067 - protein, 1023 aa, Homo Sapiens
MGVRNCLYGNNMSGQRDIPPEIGEQPEQPPLEAPGAAAPGAGPSPAEEMETEPPHNEPIPVENDGEACGPPEVSRPNFQVLNPAFREAGAHGSYSPPPEEAMPFEAEQPSLGGFWPTLEQPGFPSGVHAGLEAFGPALMEPGAFSGARPGLGGYSPPPEEAMPFEFDQPAQRGCSQLLLQVPDLAPGGPGAAGVPGAPPEEPQALRPAKAGSRGGYSPPPEETMPFELDGEGFGDDSPPPGLSRVIAQVDGSSQFAAVAASSAVRLTPAANAPPLWVPGAIGSPSQEAVRPPSNFTGSSPWMEISGPPFEIGSAPAGVDDTPVNMDSPPIALDGPPIKVSGAPDKRERAERPPVEEEAAEMEGAADAAEGGKVPSPGYGSPAAGAASADTAARAAPAAPADPDSGATPEDPDSGTAPADPDSGAFAADPDSGAAPAAPADPDSGAAPDAPADPDSGAAPDAPADPDAGAAPEAPAAPAAAETRAAHVAPAAPDAGAPTAPAASATRAAQVRRAASAAPASGARRKIHLRPPSPEIQAADPPTPRPTRASAWRGKSESSRGRRVYYDEGVASSDDDSSGDESDDGTSGCLRWFQHRRNRRRRKPQRNLLRNFLVQAFGGCFGRSESPQPKASRSLKVKKVPLAEKRRQMRKEALEKRAQKRAEKKRSKLIDKQLQDEKMGYMCTHRLLLLGAGESGKSTIVKQMRILHVNGFNGDSEKATKVQDIKNNLKEAIETIVAAMSNLVPPVELANPENQFRVDYILSVMNVPDFDFPPEFYEHAKALWEDEGVRACYERSNEYQLIDCAQYFLDKIDVIKQADYVPSDQDLLRCRVLTSGIFETKFQVDKVNFHMFDVGGQRDERRKWIQCFNDVTAIIFVVASSSYNMVIREDNQTNRLQEALNLFKSIWNNRWLRTISVILFLNKQDLLAEKVLAGKSKIEDYFPEFARYTTPEDATPEPGEDPRVTRAKYFIRDEFLRISTASGDGRHYCYPHFTCAVDTENIRRVFNDCRDIIQRMHLRQYELL

SEQ ID NO: 6068 - protein, 720 aa, Homo Sapiens [sequence omitted]

SEQ ID NO: 6069 - protein, 1037 aa, Homo Sapiens
MGVRNCLYGNNMSGQRDIPPEIGEQPEQPPLEAPGAAAPGAGPSPAEEMETEPPHNEPIPVENDGEACGPPEVSRPNFQVLNPAFREAGAHGSYSPPPEEAMPFEAEQPSLGGFWPTLEQPGFPSGVHAGLEAFGPALMEPGAFSGARPGLGGYSPPPEEAMPFEFDQPAQRGCSQLLLQVPDLAPGGPGAAGVPGAPPEEPQALRPAKAGSRGGYSPPPEETMPFELDGEGFGDDSPPPGLSRVIAQVDGSSQFAAVAASSAVRLTPAANAPPLWVPGAIGSPSQEAVRPPSNFTGSSPWMEISGPPFEIGSAPAGVDDTPVNMDSPPIALDGPPIKVSGAPDKRERAERPPVEEEAAEMEGAADAAEGGKVPSPGYGSPAAGAASADTAARAAPAAPADPDSGATPEDPDSGTAPADPDSGAFAADPDSGAAPAAPADPDSGAAPDAPADPDSGAAPDAPADPDAGAAPEAPAAPAAAETRAAHVAPAAPDAGAPTAPAASATRAAQVRRAASAAPASGARRKIHLRPPSPEIQAADPPTPRPTRASAWRGKSESSRGRRVYYDEGVASSDDDSSGDESDDGTSGCLRWFQHRRNRRRRKPQRNLLRNFLVQAFGGCFGRSESPQPKASRSLKVKKVPLAEKRRQMRKEALEKRAQKRAEKKRSKLIDKQLQDEKMGYMCTHRLLLLGAGESGKSTIVKQMRILHVNGFNGEGGEEDPQAARSNSDGEKATKVQDIKNNLKEAIETIVAAMSNLVPPVELANPENQFRVDYILSVMNVPDFDFPPEFYEHAKALWEDEGVRACYERSNEYQLIDCAQYFLDKIDVIKQADYVPSDQDLLRCRVLTSGIFETKFQVDKVNFHMFDVGGQRDERRKWIQCFNDVTAIIFVVASSSYNMVIREDNQTNRLQEALNLFKSIWNNRWLRTISVILFLNKQDLLAEKVLAGKSKIEDYFPEFARYTTPEDATPEPGEDPRVTRAKYFIRDEFLRISTASGDGRHYCYPHFTCAVDTENIRRVFNDCRDIIQRMHLRQYELL

SEQ ID NO: 6070 - protein, 120 aa, Homo Sapiens
MRILHVNGFNGEGGEEDPQAARSNSDGEKATKVQDIKNNLKEAIETIVAAMSNLVPPVELANPENQFRVDYILSVMNVPDFDFPPEFYEHAKALWEDEGVRACYERSNEYQLIDCAQYFL

SEQ ID NO: 6071 - protein, 160 aa, Homo Sapiens
MRILHVNGFNGEGGEEDPQAARSNSDGEKATKVQDIKNNLKEAIETIVAAMSNLVPPVELANPENQFRVDYILSVMNVPDFDFPPEFYEHAKALWEDEGVRACYERSNEYQLIDCAQYFLDKIDVIKQADYVPSDQDLLRCRVLTSGIFETKFQVDKVNF

SEQ ID NO: 6072 - protein, 166 aa, Homo Sapiens
PESESDHEHEEADLELSLPECLEYEEEFDYETESETESEIESETDFETEPETAPTTEPETEPEDDRGPVVPKHSTFGQSLTQRLHALKLRSPDASPSRAPPSTQEPQSPREGEELKPEDKDPRDPEESKEPKEEKQRRRCKPKKPTRRDASPESPSKKGPIPIRRH

SEQ ID NO: 6073 - protein, 193 aa, Homo Sapiens
PKASRSLKVKKVPLAEKRRQMRKEALEKRAQKRAEKKRSKLIDKQLQDEKMGYMCTHRLLLLGAGESGKSTIVKQMRILHVNGFNGEGGEEDPQAARSNSDGSEKATKVQDIKNNLKEAIETIVAAMSNLVPPVELANPENQFRVDYILSVMNVPDFDFPPEFYEHAKALWEDEGVRACYERSNEYQLIDCAQ

SEQ ID NO: 6074 - protein, 61 aa, Homo Sapiens
QRNEEKAQREANKKIEKQLQKDKQVYRATHRLLLLGAGESGKSTIVKQMRILHVNGFNGEI

SEQ ID NO: 6075 - protein, 199 aa, Homo Sapiens
  misc_feature (1)..(1): Xaa can be any naturally occurring amino acid
XAFGGCFGRSESPQPKASRSLKVKKVPLAEKRRQMRKEALEKRAQKRAEKKRSKLIDKQLQDEKMGYMCTHRLLLLGAGESGKSTIVKQMRILHVNGFNGDEKATKVQDIKNNLKEAIETIVAAMSNLVPPVELANPENQFRVDYILSVMNVPDFDFPPEFYEHAKALWEDEGVRACYERSNEYQLIDCAQYFLDKIDV

SEQ ID NO: 6076 - protein, 184 aa, Homo Sapiens
  misc_feature (1)..(1): Xaa can be any naturally occurring amino acid
XGRRVYYDEGVASSDDDSSGDESDDGTSGCLRWFQHRRNRRRRKPQRNLLRNFLVQAFGGCFGRSESPQPKASRSLKVKKVPLAEKRRQMRKEALEKRAQKRAEKKRSKLIDKQLQDEKMGYMCTHRLLLLGRKVVPSDTEGRFRLDRPAPATVSWTGRGFSVSSLLIRSPNPPAFTVEKPDTQ

SEQ ID NO: 6077 - protein, 113 aa, Homo Sapiens
  misc_feature (1)..(1): Xaa can be any naturally occurring amino acid
XTTEPETEPEDDRGPVVPKHSTFGQSLTQRLHALKLRSPDASPSRAPPSTQEPQSPREGEELKPEDKDPRDPEESKEPKEEKQRRRCKPKKPTRRDASPESPSKKGPIPIRRH

SEQ ID NO: 6078 - protein, 93 aa, Homo Sapiens
  misc_feature (1)..(1): Xaa can be any naturally occurring amino acid
XVPLAEKRRQMRKEALEKRAQKRAEKKRSKLIDKQLQDEKMGYMCTHRLLLLGAGESGKSTIVKQMRILHVNGFNGEGGEEDPQAARSNSDGI

SEQ ID NO: 6079 - protein, 172 aa, Homo Sapiens
MATWALLLLAAMLLGNPGLEVSVSPKGKNTSGRESGFGWAIWMEGLVFSRLSPEYYDLARAHLRDEEKSCPCLAQEGPQGDLLTKTQELGRDYRTCLTIVQKLKKMVDKPTQRSVSNAATRVCRTGRSRWRDVCRNFMRRYQSRVTQGLVAGETAQQICEDLRLCIPSTGPL

SEQ ID NO: 6080 - protein, 145 aa, Homo Sapiens
MATWALLLLAAMLLGNPGLVFSRLSPEYYDLARAHLRDEEKSCPCLAQEGPQGDLLTKTQELGRDYRTCLTIVQKLKKMVDKPTQRSVSNAATRVCRTGRSRWRDVCRNFMRRYQSRVTQGLVAGETAQQICEDLRLCIPSTGPL

SEQ ID NO: 6081 - protein, 130 aa, Homo Sapiens
MEGLVFSRLSPEYYDLARAHLRDEEKSCPCLAQEGPQGDLLTKTQELGRDYRTCLTIVQKLKKMVDKPTQRSVSNAATRVCRTGRSRWRDVCRNFMRRYQSRVTQGLVAGETAQQICEDLRLCIPSTGPL

SEQ ID NO: 6082 - protein, 187 aa, Homo Sapiens
  misc_feature (1)..(1): Xaa can be any naturally occurring amino acid
XHLRDEEKSCPCLAQEGPQGDLLTKTQELGRDYRTCLTIVQKLKKMVDKPTQRSVSNAATRVCRTGRSRWRDVCRNFMRRYQSRVTQGLVAGETAQQICEDLRLCIPSTGPTTCSGCRLASRMCLWVPSEPSHLVLWKKHRLLSSDPGNLSNLCRLLASSIQNPLSSLPPLTPSAVLPSHENKVSSK

SEQ ID NO: 6083 - protein, 76 aa, Homo Sapiens
MAAGLARLLLLLGLSAGGPAPAGAAKMKVVEEPNAFGVNNPFLPQASRLQAKRDPSPVSETGFHRVSQDGLDLLTS

SEQ ID NO: 6084 - protein, 76 aa, Homo Sapiens; identical to SEQ ID NO: 6083

SEQ ID NO: 6085 - protein, 61 aa, Homo Sapiens
MAAGLARLLLLLGLSAGGPAPAGAAKMKVVEEPNAFGVNNPFLPQASRLQAKRDPSPVSGE

SEQ ID NO: 6086 - protein, 305 aa, Homo Sapiens
MAAGLARLLLLLGLSAGGPAPAGAAKMKVVEEPNAFGVNNPFLPQASRLQAKRDPSPVSGPVHLFRLSGKCFSLVESTYKYEFCPFHNVTQHEQTFRWNAYSGILGIWHEWEIANNTFTGMWMRDGDACRSRSRQSKVELACGKSNRLAHVSEPSTCVYALTFETPLVCHPHALLVYPTLPEALQRQWDQVEQDLADELITPQGHEKLLRTLFEDAGYLKTPEENEPTQLEGGPDSLGFETLENCRKAHKELSKEIKRLKGLLTQHGIPYTRPTETSNLEHLGHETPRAKSPEQLRGDPGLRGSL

SEQ ID NO: 6087 - protein, 185 aa, Homo Sapiens
  misc_feature (1)..(1): Xaa can be any naturally occurring amino acid
XRLLLLLGLSAGGEWPGRPRPQAPRALCTPASPLTVSLPVGPAPAGAAKMKVVEEPNAFGVNNPFLPQASRLQAKRDPSPVSGPVHLFRLSGKCFSLVESTYKYEFCPFHNVTQHEQTFRWNAYSGILGIWHEWEIANNTFTGMWMRDGDACRSRSRQSKVELACGKSNRLAHVSEPSTCVYALT

SEQ ID NO: 6088 - protein, 92 aa, Homo Sapiens
MKPIQKLLAGLILLTWCVEGCSSQHWSYGLRPGGKRDAENLIDSFQEIVKEVGQLAETQRFECTTHQPRSPLRDLKGALESLIEEETGQKKI

SEQ ID NO: 6089 - protein, 92 aa, Homo Sapiens; identical to SEQ ID NO: 6088

SEQ ID NO: 6090 - protein, 113 aa, Homo Sapiens
MASSRRGLLLLLLLTAHLGPSEAQHWSHGWYPGGKRALSSAQDPQNALRPPAGSPVQTAHGLPSDALAPLDDSMPWEGRTTAQWSLHRKRHLARTLLTAAREPRPAPPSSNKV

SEQ ID NO: 6091 - protein, 113 aa, Homo Sapiens; identical to SEQ ID NO: 6090

SEQ ID NO: 6092 - protein, 120 aa, Homo Sapiens
MASSRRGLLLLLLLTAHLGPSEAQHWSHGWYPGGKRALSSAQDPQNALRPPGRALDTAAGSPVQTAHGLPSDALAPLDDSMPWEGRTTAQWSLHRKRHLARTLLTAAREPRPAPPSSNKV

SEQ ID NO: 6093 - protein, 112 aa, Homo Sapiens
MASSRRGLLLLLLLTAHLGPSEAQHWSHGWYPGGKRALSSAQDPQNALRPPGSPVQTAHGLPSDALAPLDDSMPWEGRTTAQWSLHRKRHLARTLLTAAREPRPAPPSSNKV

SEQ ID NO: 6094 - protein, 496 aa, Homo Sapiens
MDNYLLLQTPLKKTKALIGEMGMTFSSAYVPSALCCPSRASILTGKYPHNHHVVNNTLEGNCSSKSWQKIQEPNTFPAILRSMCGYQTFFAGKYLNEYGAPDAGGLEHVPLGWSYWYALEKNSKYYNYTLSINGKARKHGENYSVDYLTDVLANVSLDFLDYKSNFEPFFMMIATPAPHSPWTAAPQYQKAFQNVFAPRNKNFNIHGTNKHWLIRQAKTPMTNSSIQFLDNAFRKRWQTLLSVDDLVEKLVKRLEFTGELNNTYIFYTSDNGYHTGQFSLPIDKRQLYEFDIKVPLLVRGPGIKPNQTSKMLVANIDLGPTILDIAGYDLNKTQMDGMSLLPILRGASNLTWRSDVLVEYQGEGRNVTDPTCPSLSPGVSQCFPDCVCEDAYNNTYACVRTMSALWNLQYCEFDDQEVFVEVYNLTADPDQITNIAKTIDPELLGKMNYRLMMLQSCSGPTCRTPGVFDPGYRFDPRLMFSNRGSVRTRRFSKHLL

SEQ ID NO: 6095 - protein, 248 aa, Homo Sapiens
MGMTFSSAYVPSALCCPSRASILTGKYPHNHHVVNNTLEGNCSSKSWQKIQEPNTFPAILRSMCGYQTFFAGKYLNEYGAPDAGGLEHVPLGWSYWYALEKNSKYYNYTLSINGKARKHGENYSVDYLTDVLANVSLDFLDYKSNFEPFFMMIATPAPHSPWTAAPQYQKAFQNVFAPRNKNFNIHGTNKHWLIRQAKTPMTNSSIQFLDNAFRKRWQTLLSVDDLVEKLVKRLEFTGELNNTYIFYT

SEQ ID NO: 6096 - protein, 584 aa, Homo Sapiens
MRLLPLAPGRLRRGSPRHLPSCSPALLLLVLGGCLGVFGVAAGTRRPNVVLLLTDDQDEVLGGMAFSEYSTTNCQTGLQGEELGQEHLRTYLEPSRTPLKKTKALIGEMGMTFSSAYVPSALCCPSRASILTGKYPHNHHVVNNTLEGNCSSKSWQKIQEPNTFPAILRSMCGYQTFFAGKYLNEYGAPDAGGLEHVPLGWSYWYALEKNSKYYNYTLSINGKARKHGENYSVDYLTDVLANVSLDFLDYKSNFEPFFMMIATPAPHSPWTAAPQYQKAFQNVFAPRNKNFNIHGTNKHWLIRQAKTPMTNSSIQFLDNAFRKRWQTLLSVDDLVEKLVKRLEFTGELNNTYIFYTSDNGYHTGQFSLPIDKRQLYEFDIKVPLLVRGPGIKPNQTSKMLVANIDLGPTILDIAGYDLNKTQMDGMSLLPILRGASNLTWRSDVLVEYQGEGRNVTDPTCPSLSPGVSQCFPDCVCEDAYNNTYACVRTMSALWNLQYCEFDDQEVFVEVYNLTADPDQITNIAKTIDPELLGKMNYRLMMLQSCSGPTCRTPGVFDPGYRFDPRLMFSNRGSVRTRRFSKHLL

SEQ ID NO: 6097 - protein, 552 aa, Homo Sapiens
MRLLPLAPGRLRRGSPRHLPSCSPALLLLVLGGCLGVFGVAAGTRRPNVVLLLTDDQDEVLGGMTPLKKTKALIGEMGMTFSSAYVPSALCCPSRASILTGKYPHNHHVVNNTLEGNCSSKSWQKIQEPNTFPAILRSMCGYQTFFAGKYLNEYGAPDAGGLEHVPLGWSYWYALEKNSKYYNYTLSINGKARKHGENYSVDYLTDVLANVSLDFLDYKSNFEPFFMMIATPAPHSPWTAAPQYQKAFQNVFAPRNKNFNIHGTNKHWLIRQAKTPMTNSSIQFLDNAFRKRWQTLLSVDDLVEKLVKRLEFTGELNNTYIFYTSDNGYHTGQFSLPIDKRQLYEFDIKVPLLVRGPGIKPNQTSKMLVANIDLGPTILDIAGYDLNKTQMDGMSLLPILRGASNLTWRSDVLVEYQGEGRNVTDPTCPSLSPGVSQCFPDCVCEDAYNNTYACVRTMSALWNLQYCEFDDQEVFVEVYNLTADPDQITNIAKTIDPELLGKMNYRLMMLQSCSGPTCRTPGVFDPGYRFDPRLMFSNRGSVRTRRFSKHLL

SEQ ID NO: 6098 - protein, 532 aa, Homo Sapiens
MRLLPLAPGRLRRGSPRHLPSCSPALLLLVLGGCLGVFGVAAGTRRPNVVLLLTDDQDEVLGGMYVPSALCCPSRASILTGKYPHNHHVVNNTLEGNCSSKSWQKIQEPNTFPAILRSMCGYQTFFAGKYLNEYGAPDAGGLEHVPLGWSYWYALEKNSKYYNYTLSINGKARKHGENYSVDYLTDVLANVSLDFLDYKSNFEPFFMMIATPAPHSPWTAAPQYQKAFQNVFAPRNKNFNIHGTNKHWLIRQAKTPMTNSSIQFLDNAFRKRWQTLLSVDDLVEKLVKRLEFTGELNNTYIFYTSDNGYHTGQFSLPIDKRQLYEFDIKVPLLVRGPGIKPNQTSKMLVANIDLGPTILDIAGYDLNKTQMDGMSLLPILRGASNLTWRSDVLVEYQGEGRNVTDPTCPSLSPGVSQCFPDCVCEDAYNNTYACVRTMSALWNLQYCEFDDQEVFVEVYNLTADPDQITNIAKTIDPELLGKMNYRLMMLQSCSGPTCRTPGVFDPGYRFDPRLMFSNRGSVRTRRFSKHLL

SEQ ID NO: 6099 - protein, 303 aa, Homo Sapiens
  misc_feature (1)..(1): Xaa can be any naturally occurring amino acid
XYNYTLSINGKARKHGENYSVDYLTDVLANVSLDFLDYKSNFEPFFMMIATPAPHSPWTAAPQYQKAFQNVFAPRNKNFNIHGTNKHWLIRQAKTPMTNSSIQFLDNAFRKRWQTLLSVDDLVEKLVKRLEFTGELNNTYIFYTSDNGYHTGQFSLPIDKRQLYEFDIKVPLLVRGPGIKPNQTSKRGASNLTWRSDVLVEYQGEGRNVTDPTCPSLSPGVSQCFPDCVCEDAYNNTYACVRTMSALWNLQYCEFDDQEVFVEVYNLTADPDQITNIAKTIDPELLGKMNYRLMMLQSCSGPT

SEQ ID NO: 6100 - protein, 80 aa, Homo Sapiens
MMGLGNGRRSMKSPPLVLAALVACIIVLGFNYWIASSRSVDLQTRIMELEGRVRRAAAERGAVELKKNEFQGELEKQREQ

SEQ ID NO: 6101 - protein, 121 aa, Homo Sapiens
MMGLGNGRRSMKSPPLVLAALVACIIVLGFNYWIASSRSVDLQTRIMELEGRVRRAAAERGAVELKKNEFQGELEKQREQLDKIQSSHNFQLESVNKLYQDEKAVLVNNITTGERLIRVLQ

SEQ ID NO: 6102 - protein, 401 aa, Homo Sapiens
MMGLGNGRRSMKSPPLVLAALVACIIVLGFNYWIASSRSVDLQTRIMELEGRVRRAAAERGAVELKKNEFQGELEKQREQLDKIQSSHNFQLESVNKLYQDEKAVLVNNITTGERLIRVLQDQLKTLQRNYGRLQQDVLQFQKNQTNLERKFSYDLSQCINQMKEVKEQCEERIEEVTKKGNEAVASRDLSENNDQRQQLQALSEPQPRLQAAGLPHTEVPQGKGNVLGNSKSQTPAPSSEVVLDSKRQVEKEETNEIQVVNEEPQRDRLPQEPGREQVVEDRPVGGRGFGGAGELGQTPQVQAALSVSQENPEMEGPERDQLVIPDGQEEEQEAAGEGRNQQKLRGEDDYNMDENEAESETDKQAALAGNDRNIDVFNVEDQKRDTINLLDQREKRNHTL

SEQ ID NO: 6103 - protein, 401 aa, Homo Sapiens; identical to SEQ ID NO: 6102

SEQ ID NO: 6104 - protein, 105 aa, Homo Sapiens
MMGLGNGRRSMKSPPLVLAALVACIIVLGFNYWIASSRSVDLQTRIMELEGRVRRAAAERGAVELKKNEFQGELEKQREQLDKIQSSHNFQLESVNKLYQDEKTS

SEQ ID NO: 6105 - protein, 246 aa, Homo Sapiens
MSWAAVLAVAAARFGHFWGCRWPGPMAQGWAGFSEEELRRLKQTKDPFEPQRRLPAKKSRQQLQREKALVEQSQKLGLQDGSTSLLPEQLLSAPKQRVNVQKPPFSSPTLPSHFTLTSPVGDGQPQGIESQPKELGLENSHDGHNNVEILPPKPDCKLEKKKVELQEKSRWEVLQQEQRLMEEKNKRKKALLAKAIAERSKRTQAETMKLKRIQKELQALDDMVSADIGILRNRIDQASLDYSYAR

SEQ ID NO: 6106 - protein, 394 aa, Homo Sapiens
MSWAAVLAVAAARFGHFWGCRWPGPMAQGWAGFSEEELRRLKQTKDPFEPQRRLPAKKSRQQLQREKALVEQSQKLGLQDGSTSLLPEQLLSAPKQRVNVQKPPFSSPTLPSHFTLTSPVGDGQPQGIESQPKELGLENSHDGHNNVEILPPKPDCKLEKKKVELQEKSRWEVLQQEQRLMEEKNKRKKALLAKAIAERSKRTQAETMKLKRIQKELQALDDMVSADIGILRNRIDQASLDYSYARKRFDRAEAEYIAAKLDIQRKTEIKEQLTEHLCTIIQQNELRKAKKLEELMQQLDVEADEETLELEVEVERLLHEQEVESRRPVVRLERPFQPAEESVTLEFAKENRKCQEQAVSPKVDDQCGNSSSIPFLSPNCPNQEGNDISAALAT

SEQ ID NO: 6107 - protein, 126 aa, Homo Sapiens
  misc_feature (1)..(1): Xaa can be any naturally occurring amino acid
XSWAAVLAVAAARFGHFWGCRWPGPMAQGWAGFSEEELRRLKQTKGYKCPGLWSDSSRLMRRQTTKLCDSRYCKNLLQRQEEPHSAGDWMELGKISQSLCVSRGAFSRTKEKSTKDMNRYFLEKEI

SEQ ID NO: 6108 - protein, 59 aa, Homo Sapiens
MALLHSGRVLPGIAAAFHPGLAAAASARARQRPRLPQKIWTRNTCPLGDWLNFARHLQN

SEQ ID NO: 6109 - protein, 430 aa, Homo Sapiens
MALLHSGRVLPGIAAAFHPGLAAAASARASSWWTHVEMGPPDPILGVTEAFKRDTNSKKMNLGVGAYRDDNGKPYVLPSVRKAEAQIAAKNLDKEYLPIGGLAEFCKASAELALGENSEVLKSGRFVTVQTISGTGALRIGASFLQRFFKFSRDVFLPKPTWGNHTPIFRDAGMQLQGYRYYDPKTCGFDFTGAVEDISKIPEQSVLLLHACAHNPTGVDPRPEQWKEIATVVKKRNLFAFFDMAYQGFASGDGDKDAWAVRHFIEQGINVCLCQSYAKNMGLYGERVGAFTMVCKDADEAKRVESQLKILIRPMYSNPPLNGARIAAAILNTPDLRKQWLQEVKVMADRIIGMRTQLVSNLKKEGSTHNWQHITDQIGMFCFTGLKPEQVERLIKEFSIYMTKDGRISVAGVTSSNVGYLAHAIHQVTK

SEQ ID NO: 6110 - protein, 387 aa, Homo Sapiens
MALLHSGRVLPGIAAAFHPGLAAAASARASSWWTHVEMGPPDPILGVTEAFKRDTNSKKMNLGVGAYRDDNGKPYVLPSVRKFVTVQTISGTGALRIGASFLQRFFKFSRDVFLPKPTWGNHTPIFRDAGMQLQGYRYYDPKTCGFDFTGAVEDISKIPEQSVLLLHACAHNPTGVDPRPEQWKEIATVVKKRNLFAFFDMAYQGFASGDGDKDAWAVRHFIEQGINVCLCQSYAKNMGLYGERVGAFTMVCKDADEAKRVESQLKILIRPMYSNPPLNGARIAAAILNTPDLRKQWLQEVKVMADRIIGMRTQLVSNLKKEGSTHNWQHITDQIGMFCFTGLKPEQVERLIKEFSIYMTKDGRISVAGVTSSNVGYLAHAIHQVTK

SEQ ID NO: 6111 - protein, 145 aa, Homo Sapiens
MPHLMERMVGSGLLWLALVSCILTQASAVQRDPSTVEDKCEKACRPEEECLALNSTWGCFCRQDLNSSDVHSLQPQLDCGPREIKVKVDKCLLGGLGLGEEVIAYLRDPNCSSILQTEERNWVSVTSPVQASACRNILERNQTHA

SEQ ID NO: 6112 - protein, 387 aa, Homo Sapiens
MPHLMERMVGSGLLWLALVSCILTQASAVQRDPSTVEDKCEKACRPEEECLALNSTWGCFCRQDLNSSDVHSLQPQLDCGPREIKVKVDKCLLGGLGLGEEVIAYLRDPNCSSILQTEERNWVSVTSPVQASACRNILERNQTHAIYKNTLSLVNDFIIRDTILNINFQCAYPLDMKVSLQAALQPIVSSLNVSVDGNGEFIVRMALFQDQNYTNPYEGDAVELSVESVLYVGAILEQGDTSRFNLVLRNCYATPTEDKADLVKYFIIRNSCSNQRDSTIHVEENGQSSESRFSVQMFMFAGHYDLVFLHCEIHLCDSLNEQCQPSCSRSQVRSEVPAIDLARVLDLGPITRRGAQSPGVMNGTPSTAGFLVAWPMVLLTVLLAWLF

SEQ ID NO: 6113 - protein, 163 aa, Homo Sapiens
MPHLMERMVGSGLLWLALVSCILTQASAVQRGEGGVRMSETCVQVHRCQTDAPMWLNGTHPALGDGITNHTACAHWSGNCCFWKTEVLVKACPGGYHVYRLEGTPWCNLRYCTDPSTVEDKCEKACRPEEECLALNSTWGCFCRQDLNSSDVHSLQPQLDCGP

SEQ ID NO: 6114 - protein, 128 aa, Homo Sapiens
MPHLMERMVGSGLLWLALVSCILTQASAVQRGYGNPIEASSYGLDLDCGAPGTPEAHVCFDPCQNYTLLDEPFRSTENSAGSQGCDKNMSGWYRFVGEGGVRMSETCVQVHRCQTDAPMWLNGTHPAL

SEQ ID NO: 6115 - protein, 534 aa, Homo Sapiens
MPHLMERMVGSGLLWLALVSCILTQASAVQRGYGNPIEASSYGLDLDCGAPGTPEAHVCFDPCQNYTLLDEPFRSTENSAGSQGCDKNMSGWYRFVGEGGVRMSETCVQVHRCQTDAPMWLNGTHPALGDGITNHTACAHWSGNCCFWKTEVLVKACPGGYHVYRLEGTPWCNLRYCTDPSTVEDKCEKACRPEEECLALNSTWGCFCRQDLNSSDVHSLQPQLDCGPREIKVKVDKCLLGGLGLGEEVIAYLRDPNCSSILQTEERNWVSVTSPVQASACRNILERNQTHAIYKNTLSLVNDFIIRDTILNINFQCAYPLDMKVSLQAALQPIVSSLNVSVDGNGEFIVRMALFQDQNYTNPYEGDAVELSVESVLYVGAILEQGDTSRFNLVLRNCYATPTEDKADLVKYFIIRNSCSNQRDSTIHVEENGQSSESRFSVQMFMFAGHYDLVFLHCEIHLCDSLNEQCQPSCSRSQVRSEVPAIDLARVLDLGPITRRGAQSPGVMNGTPSTAGFLVAWPMVLLTVLLAWLF

SEQ ID NO: 6116 - protein, 537 aa, Homo Sapiens
MPHLMERMVGSGLLWLALVSCILTQASAVQRGYGNPIEASSYGLDLDCGAPGTPEAHVCFDPCQNYTLLDEPFRSTENSAGSQGCDKNMSGWYRFVGEGGVRMSETCVQVHRCQTDAPMWLNGTHPALGDGITNHTACAHWSGNCCFWKTEVLVKACPGGYHVYRLEGTPWCNLRYCTVPRDPSTVEDKCEKACRPEEECLALNSTWGCFCRQDLNSSDVHSLQPQLDCGPREIKVKVDKCLLGGLGLGEEVIAYLRDPNCSSILQTEERNWVSVTSPVQASACRNILERNQTHAIYKNTLSLVNDFIIRDTILNINFQCAYPLDMKVSLQAALQPIVSSLNVSVDGNGEFIVRMALFQDQNYTNPYEGDAVELSVESVLYVGAILEQGDTSRFNLVLRNCYATPTEDKADLVKYFIIRNSCSNQRDSTIHVEENGQSSESRFSVQMFMFAGHYDLVFLHCEIHLCDSLNEQCQPSCSRSQVRSEVPAIDLARVLDLGPITRRGAQSPGVMNGTPSTAGFLVAWPMVLLTVLLAWLF

SEQ ID NO: 6117 - protein, 390 aa, Homo Sapiens
MPHLMERMVGSGLLWLALVSCILTQASAVQRVPRDPSTVEDKCEKACRPEEECLALNSTWGCFCRQDLNSSDVHSLQPQLDCGPREIKVKVDKCLLGGLGLGEEVIAYLRDPNCSSILQTEERNWVSVTSPVQASACRNILERNQTHAIYKNTLSLVNDFIIRDTILNINFQCAYPLDMKVSLQAALQPIVSSLNVSVDGNGEFIVRMALFQDQNYTNPYEGDAVELSVESVLYVGAILEQGDTSRFNLVLRNCYATPTEDKADLVKYFIIRNSCSNQRDSTIHVEENGQSSESRFSVQMFMFAGHYDLVFLHCEIHLCDSLNEQCQPSCSRSQVRSEVPAIDLARVLDLGPITRRGAQSPGVMNGTPSTAGFLVAWPMVLLTVLLAWLF

SEQ ID NO: 6118 - protein, 141 aa, Homo Sapiens
MSGWYRFVGEGGVRMSETCVQVHRCQTDAPMWLNGTHPALGDGITNHTACAHWSGNCCFWKTEVLVKACPGGYHVYRLEGTPWCNLRYCTDPSTVEDKCEKACRPEEECLALNSTWGCFCRQDLNSSDVHSLQPQLDCGPR

SEQ ID NO: 6119 - protein, 42 aa, Homo Sapiens
  misc_feature (1)..(1): Xaa can be any naturally occurring amino acid
XERMVGSGLLWLALVSCILTQASAVQRGKYSAHLASQMSRKT

SEQ ID NO: 6120 - protein, 117 aa, Homo Sapiens
MKRSLAGRYRCSYQNGSLWSLPSDQLELVATGVFAKPSLSAQPGPAVSSGGDVTLQCQTRYGFDQFALYKEGDPAPYKNPERWYRASFPIITVTAAHSGTYRCYSFSSRDPYLWSAP

SEQ ID NO: 6121 - protein, 321 aa, Homo Sapiens
MSPSPTALFCLGLCLGRVPAQSGPLPKPSLQALPSSLVPLEKPVTLRCQGPPGVDLYRLEKLSSSRYQDQAVLFIPAMKRSLAGRYRCSYQNGSLWSLPSDQLELVATGVFAKPSLSAQPGPAVSSGGDVTLQCQTRYGFDQFALYKEGDPAPYKNPERWYRASFPIITVTAAHSGTYRCYSFSSRDPYLWSAPSDPLELVVTEFSEATAELTVSFTNEVFTTETSRSITASPKESDSPAGPARQYYTKGNLVRICLGAVILIILAGFLAEDWHSRRKRLRHRGRAVQRPLPPLPPLPLTRKSNGGQDGGRQDVHSRGLCS

SEQ ID NO: 6122 - protein, 620 aa, Homo Sapiens
MSPSPTALFCLGLCLGRVPAQSGPLPKPSLQALPSSLVPLEKPVTLRCQGPPGVDLYRLEKLSSSRYQDQAVLFIPAMKRSLAGRYRCSYQNGSLWSLPSDQLELVATGVFAKPSLSAQPGPAVSSGGDVTLQCQTRYGFDQFALYKEGDPAPYKNPERWYRASFPIITVTAAHSGTYRCYSFSSRDPYLWSAPSDPLELVVTGTSVTPSRLPTEPPSPVAEFSEATAELTVSFTNEVFTTETSRSITASPKESDSPAGESCPPVLHQGQPGPDMPRGCDPNNPGGVSGRGLAQPEEAPAAQGQGCAEAASAPPAPPADPEIKRGSGWRPTGCSQPRVMFMTAEPQARSYPREGSWHGRRLKDWRVWSVEAGGQRLQLWKRGHAASSWCSIREPFGQCLSVCLPLCLRAPSIWDGRNLWRPHPPPCTLWMTWYPGWTTYWPLSSTSLIWAPDGSLRFPALRVDSVPSSVQNPPVLPFGPLCSCLVFPRNSHPHSISHCGLTNLLSSLRTGLAGSLGMSFIFLSVKLARCPLPFTLENKISLCNMVKPHLYQQNKKTQKLARCGGASLYSQQLRGLRWENGLSLGGRGCSELRSHHCTLARVTKPDFVSKNTGMNMSITLI

SEQ ID NO: 6123 - protein, 339 aa, Homo Sapiens
MSPSPTALFCLGLCLGRVPAQSGPLPKPSLQALPSSLVPLEKPVTLRCQGPPGVDLYRLEKLSSSRYQDQAVLFIPAMKRSLAGRYRCSYQNGSLWSLPSDQLELVATGVFAKPSLSAQPGPAVSSGGDVTLQCQTRYGFDQFALYKEGDPAPYKNPERWYRASFPIITVTAAHSGTYRCYSFSSRDPYLWSAPSDPLELVVTGTSVTPSRLPTEPPSPVAEFSEATAELTVSFTNEVFTTETSRSITASPKESDSPAGPARQYYTKGNLVRICLGAVILIILAGFLAEDWHSRRKRLRHRGRAVQRPLPPLPPLPLTRKSNGGQDGGRQDVHSRGLCS

SEQ ID NO: 6124 - protein, 134 aa, Homo Sapiens
MSALRPLLLLLLPLCPGPGPGPGSEAKVTRSCAETRQVLGARGYSLNLIPPALISGEHLRVCPQEYTCCSSETEQRLIRETEATFRGLVEDSGSFLVHTLAARHRKFDDNPDPGGCPSLCAGPGDWKKCGQRSA

SEQ ID NO: 6125 - protein, 579 aa, Homo Sapiens
MSALRPLLLLLLPLCPGPGPGPGSEAKVTRSCAETRQVLGARGYSLNLIPPALISGEHLRVCPQEYTCCSSETEQRLIRETEATFRGLVEDSGSFLVHTLAARHRKFDEFFLEMLSVAQHSLTQLFSHSYGRLYAQHALIFNGLFSRLRDFYGESGEGLDDTLADFWAQLLERVFPLLHPQYSFPPDYLLCLSRLASSTDGSLQPFGDSPRRLRLQITRTLVAARAFVQGLETGRNVVSEALKVPVSEGCSQALMRLIGCPLCRGVPSLMPCQGFCLNVVRGCLSSRGLEPDWGNYLDGLLILADKLQGPFSFELTAESIGVKISEGLMYLQENSAKVSAQVFQECGPPDPVPARNRRAPPPREEAGRLWSMVTEEERPTTAAGTNLHRLVWELRERLARMRGFWARLSLTVCGDSRMAADASLEAAPCWTGAGRGRYLPPVVGGSPAEQVNNPELKVDASGPDVPTRRRRLQLRAATARMKTAALGHDLDGQDADEDASGSGGGQQYADDWMAGAVAPPARPPRPPYPPRRDGSGGKGGGGSARYNQGRSRSGGASIGFHTQTILILSLSALALLGPR

SEQ ID NO: 6126 - protein, 320 aa, Homo Sapiens [sequence omitted]

SEQ ID NO: 6127 - protein, 572 aa, Homo Sapiens
MDAQTWPVGFRCLLLLALVGSARSEGVQTCEEVRKLFQWRLLGAVRGLPDSPRAGPDLQVCISKKPTCCTRKMEERYQIAARQDMQQFLQTSSSTLKFLISRNAAAFQETLETLIKQAENYTSILFCSTYRNMALEAAASVQEFFTDVGLYLFGADVNPEEFVNRFFDSLFPLVYNHLINPGVTDSSLEYSECIRMARRDVSPFGNIPQRVMGQMGRSLLPSRTFLQALNLGIEVINTTDYLHFSKECSRALLKMQYCPHCQGLALTKPCMGYCLNVMRGCLAHMAELNPHWHAYIRSLEELSDAMHGTYDIGHVLLNFHLLVNDAVLQAHLNGQKLLEQVNRICGRPVRTPTQSPRCSFDQSKEKHGMKTTTRNSEETLANRRKEFINSLRLYRSFYGGLADQLCANELAAADGLPCWNGEDIVKSYTQRVVGNGIKAQSGNPEVKVKGIDPVINQIIDKLKHVVQLLQGRSPKPDKWELLQLGSGGGMVEQVSGDCDDEDGCGGSGSGEVKRTLKITDWMPDDMNFSDVKQIHQTDTGSTLDTTGAGCAVATESMTFTLISVVMLLPGIW

SEQ ID NO: 6128 - protein, 51 aa, Homo Sapiens
  misc_feature (1)..(1): Xaa can be any naturally occurring amino acid
XMPDDMNFSDVKQIHQTDTGSTLDTTGAGCAVATESMTFTLISVVMLLPGI

SEQ ID NO: 6129 - protein, 263 aa, Homo Sapiens
DAMLLVAERLEGPFNIESVMDPIDVKISEAIMNMQENSMQVSAKVFQGCGQPKPAPALRSARSAPENFNTRFRPYNPEERPTTAAGTSLDRLVTDIKEKLKLSKKVWSALPYTICKDESVTAGTSNEEECWNGHSKARYLPEIMNDGLTNQINNPEVDVDITRPDTFIRQQIMALRVMTNKLKNAYNGNDVNFQDTSDESSGSGSGSGCMDDVCPTEFEFVTTEAPAVDPDRREVDSSAAQRGHSLLSWSLTCIVLALQRLCR

SEQ ID NO: 6130 - protein, 555 aa, Homo Sapiens
MPSWIGAVILPLLGLLLSLPAGADVKARSCGEVRQAYGAKGFSLADIPYQEIAGEHLRICPQEYTCCTTEMEDKLSQQSKLEFENLVEETSHFVRTTFVSRHKKFDEFFRELLENAEKSLNDMFVRTYGMLYMQNSEVFQDLFTELKRYYTGGNVNLEEMLNDFWARLLERMFQLINPQYHFSEDYLECVSKYTDQLKPFGDVPRKLKIQVTRAFIAARTFVQGLTVGREVANRVSKVSPTPGCIRALMKMLYCPYCRGLPTVRPCNNYCLNVMKGCLANQADLDTEWNLFIDAMLLVAERLEGPFNIESVMDPIDVKISEAIMNMQENSMQVSAKVFQGCGQPKPAPALRSARSAPENFNTRFRPYNPEERPTTAAGTSLDRLVTDIKEKLKLSKKVWSALPYTICKDESVTAGTSNEEECWNGHSKARYLPEIMNDGLTNQINNPEVDVDITRPDTFIRQQIMALRVMTNKLKNAYNGNDVNFQDTSDESSGSGSGSGCMDDVCPTEFEFVTTEAPAVDPDRREVDSSAAQRGHSLLSWSLTCIVLALQRLCR

SEQ ID NO: 6131 - protein, 109 aa, Homo Sapiens
MAFQKAVKGTILVGGGALATVLGLSQFAHYRRKQMNLAYVKAADCISEPVNREPPSREAQLLTLQNTSEFDILVIGGGATGSGCALDAVTRGLKTALVERDDFSSGTSS

SEQ ID NO: 6132 - protein, 727 aa, Homo Sapiens
MAFQKAVKGTILVGGGALATVLGLSQFAHYRRKQMNLAYVKAADCISEPVNREPPSREAQLLTLQNTSEFDILVIGGGATGSGCALDAVTRGLKTALVERDDFSSGTSSRSTKLIHGGVRYLQKAIMKLDIEQYRMVKEALHERANLLEIAPHLSAPLPIMLPVYKWWQLPYYWVGIKLYDLVAGSNCLKSSYVLSKSRALEHFPMLQKDKLVGAIVYYDGQHNDARMNLAIALTAARYGAATANYMEVVSLLKKTDPQTGKVRVSGARCKDVLTGQEFDVRAKCVINATGPFTDSVRKMDDKDAAAICQPSAGVHIVMPGYYSPESMGLLDPATSDGRVIFFLPWQKMTIAGTTDTPTDVTHHPIPSEEDINFILNEVRNYLSCDVEVRRGDVLAAWSGIRPLVTDPKSADTQSISRNHVVDISESGLITIAGGKWTTYRSMAEDTINAAVKTHNLKAGPSRTVGLFLQGGKDWSPTLYIRLVQDYGLESEVAQHLAATYGDKAFEVAKMASVTGKRWPIVGVRLVSEFPYIEAEVKYGIKEYACTAVDMISRRTRLAFLNVQAAEEALPRIVELMGRELNWDDYKKQEQLETARKFLYYEMGYKSRSEQLTDRSEISLLPSDIDRYKKRFHKFDADQKGFITIVDVQRVLESINVQMDENTLHEILNEVDLNKNGQVELNEFLQLMSAIQKGRVSGSRLAILMKTAEENLDRRVPIPVDRSCGGL

SEQ ID NO: 6133 - protein, 727 aa, Homo Sapiens; identical to SEQ ID NO: 6132

SEQ ID NO: 6134 - protein, 727 aa, Homo Sapiens; identical to SEQ ID NO: 6132

SEQ ID NO: 6135 - protein, 727 aa, Homo Sapiens; identical to SEQ ID NO: 6132

SEQ ID NO: 6136 - protein, 379 aa, Homo Sapiens
MAFQKAVKGTILVGGGALATVLGLSQFAHYRRKQMNLAYVKAADCISEPVNREPPSREAQLLTLQNTSEFDILVIGGGATGSGCALDAVTRGLKTALVERDDFSSGTSSRSTKLIHGGVRYLQKAIMKLDIEQYRMVKEALHERANLLEIAPHLSAPLPIMLPVYKWWQLPYYWVGIKLYDLVAGSNCLKSSYVLSKSRALEHFPMLQKDKLVGAIVYYDGQHNDARMNLAIALTAARYGAATANYMEVVSLLKKTDPQTGKVRVSGARCKDVLTGQEFDVRAKCVINATGPFTDSVRKMDDKDAAAICQPSAGVHIVMPGYYSPESMGLLDPATSDGRVIFFLPWQKMTIAGTTDTPTDVTHHPIPSEEDINFILNEV

SEQ ID NO: 6137 - protein, 56 aa, Homo Sapiens
MAFQKAVKGTILVGGGALATVLGLSQFAHYRRKQNIVLSGELRNEECILLRKCGKT

SEQ ID NO: 6138 - protein, 56 aa, Homo Sapiens; identical to SEQ ID NO: 6137

SEQ ID NO: 6139 - protein, 601 aa, Homo Sapiens
MKLDIEQYRMVKEALHERANLLEIAPHLSAPLPIMLPVYKWWQLPYYWVGIKLYDLVAGSNCLKSSYVLSKSRALEHFPMLQKDKLVGAIVYYDGQHNDARMNLAIALTAARYGAATANYMEVVSLLKKTDPQTGKVRVSGARCKDVLTGQEFDVRAKCVINATGPFTDSVRKMDDKDAAAICQPSAGVHIVMPGYYSPESMGLLDPATSDGRVIFFLPWQKMTIAGTTDTPTDVTHHPIPSEEDINFILNEVRNYLSCDVEVRRGDVLAAWSGIRPLVTDPKSADTQSISRNHVVDISESGLITIAGGKWTTYRSMAEDTINAAVKTHNLKAGPSRTVGLFLQGGKDWSPTLYIRLVQDYGLESEVAQHLAATYGDKAFEVAKMASVTGKRWPIVGVRLVSEFPYIEAEVKYGIKEYACTAVDMISRRTRLAFLNVQAAEEALPRIVELMGRELNWDDYKKQEQLETARKFLYYEMGYKSRSEQLTDRSEISLLPSDIDRYKKRFHKFDADQKGFITIVDVQRVLESINVQMDENTLHEILNEVDLNKNGQVELNEFLQLMSAIQKGRVSGSRLAILMKTAEENLDRRVPIPVDRSCGGL

SEQ ID NO: 6140 - protein, 73 aa, Homo Sapiens
MDVTSQARGVGLEMYPGTAQPAAPNTTSPELNLSHPLLGTALANGTGELSEHQQYVIGLFLSCLYTIFLFPIG

SEQ ID NO: 6141 - protein, 375 aa, Homo Sapiens
MDVTSQARGVGLEMYPGTAQPAAPNTTSPELNLSHPLLGTALANGTGELSEHQQYVIGLFLSCLYTIFLFPIGFVGNILILVVNISFREKMTIPDLYFINLAVADLILVADSLIEVFNLHERYYDIAVLCTFMSLFLQVNMYSSVFFLTWMSFDRYIALARAMRCSLFRTKHHARLSCGLIWMASVSATLVPFTAVHLQHTDEACFCFADVREVQWLEVTLGFIVPFAIIGLCYSLIVRVLVRAHRHRGLRPRRQKALRMILAVVLVFFVCWLPENVFISVHLLQRTQPGAAPCKQSFRHAHPLTGHIVNLAAFSNSCLNPLIYSFLGETFRDKLRLYIEQKTNLPALNRFCHAALKAVIPDSTEQSDVRFSSAV

SEQ ID NO: 6142 - protein, 375 aa, Homo Sapiens; identical to SEQ ID NO: 6141

SEQ ID NO: 6143 - protein, 375 aa, Homo Sapiens; identical to SEQ ID NO: 6141

SEQ ID NO: 6144 - protein, 375 aa, Homo Sapiens; identical to SEQ ID NO: 6141

SEQ ID NO: 6145 - protein, 408 aa, Homo Sapiens
MDVTSQARGVGLEMYPGTAQPAAPNTTSPELNLSHPLLGTALANGTGELSEHQQYVIGLFLSCLYTIFLFPIGFVGNILILVVNISFREKMTIPDLYFINLAVADLILVADSLIEVFNLHERYYDIAVLCTFMSLFLQVNMYSSVFFLTWMSFDRYIALARAMRCSLFRTKHHARLSCGLIWMASVSATLVPFTAVHLQHTDEACFCFADVREVQWLEVTLGFIVPFAIIGLCYSLIVRVLVRAHRHRGLRPRRQKALRMILAVVLVFFVCWLPENVFISVHLLQRTQPGAAPCKQSFRHAHPLTHGHVMSLNCGQMWLLAPRGLARVTLAWSPWGCLGNLTTGHLALLTQNCYNPKALAPQGPKASGDQPVTQLLPANPACRCTCLPLQETFLTPSTRKATRRGHCG

SEQ ID NO: 6146 - protein, 176 aa, Homo Sapiens
MSLNCGQMWLLAPRGLARVTLAWSPWGCLGNLTTGHLALLTQNCYNPKALAPQGPKASGDQPVTQLLPANPACRCTCLPLQETFLSVLHLPGWQQWRCAASPGPRGAAALGPEQQEGPSVERPPSAPGWFSHCLLTSTWQLHSCGLGPCELPCGLVGCQDNEILQHLWLTNLFLQK

SEQ ID NO: 6147 - protein, 129 aa, Homo Sapiens
MPMASPQTLVLYLLVLAVTEAWGQEAVIPGCHLHPFNVTVRSDRQGTCQGSHVAQACVGHCESSAFPSRYSVLVASGYRHNITSVSQCCTISGLKKVKVQLQCVGSRREELEIFTARACQCDMCRLSRY

SEQ ID NO: 6148 - protein, 129 aa, Homo Sapiens; identical to SEQ ID NO: 6147

SEQ ID NO: 6149 - protein, 118 aa, Homo Sapiens
MPMASPQTLVLYLLVLAVTEAWGQEAVIPGCHLHPFNVTVRSDRQGTCQGSHVAQACVGHCESSAFPSRYSVLVASGYRHNITSVSQCCTISGLKKVRRARARWMDAGVAGRPERWRS

SEQ ID NO: 6150 - protein, 130 aa, Homo Sapiens
MKLAFLFLGPMALLLLAGYGCVLGASSGNLRTFVGCAVREFTFLAKKPGCRGLRITTDACWGRCETWEKPILEPPYIEAHHRVCTYNETKQVTVKLPNCAPGVDPFYTYPVAIRCDCGACSTATTECETI

SEQ ID NO: 6151 - protein, 130 aa, Homo Sapiens; identical to SEQ ID NO: 6150

SEQ ID NO: 6152 - protein, 184 aa, Homo Sapiens
MKALGAVLLALLLFGRPGRGQTQQEEEEEDEDHGPDDYDEEDEDEVEEEETNRLPGGRSRVLLRCYTCKSLPRDERCNLTQNCSHGQTCTTLIAHGNTESGLLTTHSTWCTDSCQPITKTVEGTQVTMTCCQSSLCNVPPWQSSRVQDPTGKGAGGPRGSSETVGAALLLNLLAGLGAMGARRP

SEQ ID NO: 6153 - protein, 840 aa, Homo Sapiens
MSAFRLWPGLLIMLGSLCHRGSPCGLSTHVEIGHRALEFLQLHNGRVNYRELLLEHQDAYQAGIVFPDCFYPSICKGGKFHDVSESTHWTPFLNASVHYIRENYPLPWEKDTEKLVAFLFGITSHMAADVSWHSLGLEQGFLRTMGAIDFHGSYSEAHSAGDFGGDVLSQFEFNFNYLARRWYVPVKDLLGIYEKLYGRKVITENVIVDCSHIQFLEMYGEMLAVSKLYPTYSTKSPFLVEQFQEYFLGGLDDMAFWSTNIYHLTSFMLENGTSDCNLPENPLFIACGGQQNHTQGSKMQKNDFHRNLTTSLTESVDRNINYTERGVFFSVNSWTPDSMSFIYKALERNIRTMFIGGSQLSQKHVSSPLASYFLSFPYARLGWAMTSADLNQDGHGDLVVGAPGYSRPGHIHIGRVYLIYGNDLGLPPVDLDLDKEAHRILEGFQPSGRFGSALAVLDFNVDGVPDLAVGAPSVGSEQLTYKGAVYVYFGSKQGGMSSSPNITISCQDIYCNLGWTLLAADVNGDSEPDLVIGSPFAPGGGKQKGIVAAFYSGPSLSDKEKLNVEAANWTVRGEEDFSWFGYSLHGVTVDNRTLLLVGSPTWKNASRLGHLLHIRDEKKSLGRVYGYFPPNGQSWFTISGDKAMGKLGTSLSSGHVLMNGTLKQVLLVGAPTYDDVSKVAFLTVTLHQGGATRMYALTSDAQPLLLSTFSGDRRFSRFGGVLHLSDLDDDGLDEIIMAAPLRIADVTSGLIGGEDGRVYVYNGKETTLGDMTGKCKSWITPCPEEKAQYVLISPEASSRFGSSLITVRSKAKNQVVIAAGRSSLGARLSGALHVYSLGSD

SEQ ID NO: 6154 - protein, 560 aa, Homo Sapiens
MECLYYFLGFLLLAARLPLDAAKRFHDVLGNERPSAYMREHNQLNGWSSDENDWNEKLYPVWKRGDMRWKNSWKGGRVQAVLTSDSPALVGSNITFAVNLIFPRCQKEDANGNIVYEKNCRNEAGLSADPYVYNWTAWSEDSDGENGTGQSHHNVFPDGKPFPHHPGWRRWNFIYVFHTLGQYFQKLGRCSVRVSVNTANVTLGPQLMEVTVYRRHGRAYVPIAQVKDVYVVTDQIPVFVTMFQKNDRNSSDETFLKDLPIMFDVLIHDPSHFLNYSTINYKWSFGDNTGLFVSTNHTVNHTYVLNGTFSLNLTVKAAAPGPCPPPPPPPRPSKPTPSLGPAGDNPLELSRIPDENCQINRYGHFQATITIVEGILEVNIIQMTDVLMPVPWPESSLIDFVVTCQGSIPTEVCTIISDPTCEITQNTVCSPVDVDEMCLLTVRRTFNGSGTYCVNLTLGDDTSLALTSTLISVPDRDPASPLRMANSALISVGCLAIFVTVISLLVYKKHKEYNPIENSPGNVVRSKGLSVFLNRAKAVFFPGNQEKDPLLKNQEFKGVS

SEQ ID NO: 6155 - protein, 572 aa, Homo Sapiens
MECLYYFLGFLLLAARLPLDAAKRFHDVLGNERPSAYMREHNQLNGWSSDENDWNEKLYPVWKRGDMRWKNSWKGGRVQAVLTSDSPALVGSNITFAVNLIFPRCQKEDANGNIVYEKNCRNEAGLSADPYVYNWTAWSEDSDGENGTGQSHHNVFPDGKPFPHHPGWRRWNFIYVFHTLGQYFQKLGRCSVRVSVNTANVTLGPQLMEVTVYRRHGRAYVPIAQVKDVYVVTDQIPVFVTMFQKNDRNSSDETFLKDLPIMFDVLIHDPSHFLNYSTINYKWSFGDNTGLFVSTNHTVNHTYVLNGTFSLNLTVKAAAPGPCPPPPPPPRPSKPTPSLATTLKSYDSNTPGPAGDNPLELSRIPDENCQINRYGHFQATITIVEGILEVNIIQMTDVLMPVPWPESSLIDFVVTCQGSIPTEVCTIISDPTCEITQNTVCSPVDVDEMCLLTVRRTFNGSGTYCVNLTLGDDTSLALTSTLISVPDRDPASPLRMANSALISVGCLAIFVTVISLLVYKKHKEYNPIENSPGNVVRSKGLSVFLNRAKAVFFPGNQEKDPLLKNQEFKGVS

SEQ ID NO: 6156 - protein, 206 aa, Homo Sapiens
MECLYYFLGFLLLAARLPLDAAKRFHDVLGNERPSAYMREHNQLNGWSSDENDWNEKLYPVWKRGDMRWKNSWKGGRVQAVLTSDSPALVGSNITFAVNLIFPRCQKEDANGNIVYEKNCRNEAGLSADPYVYNWTAWSEDSDGENGTGQSHHNVFPDGKPFPHHPGWRRWNFIYVFHTLGWLLQTPKLLLYLSLKFQPSLFLLYN

SEQ ID NO: 6157 - protein, 588 aa, Homo Sapiens
MARGGAGAEEASLRSNALSWLACGLLALLANAWIILSISAKQQKHKPLELLLCFLAGTHILMAAVPLTTFAVVQLRRQASSDYDWNESICKVFVSTYYTLALATCFTVASLSYHRMWMVRWPVNYRLSNAKKQALHAVMGIWMVSFILSTLPSIGWHNNGERYYARGCQFIVSKIGLGFGVCFSLLLLGGIVMGLVCVAITFYQTLWARPRRARQARRVGGGGGTKAGGPGALGTRPAFEVPAIVVEDARGKRRSSLDGSESAKTSLQVTNLVSAIVFLYDSLTGVPILVVSFFSLKSDSAPPWMVLAVLWCSMAQTLLLPSFIWSCERYRADVRTVWEQCVAIMSEEDGDDDGGCDDYAEGRVCKVRFDANGATGPGSRDPAQVKLLPGRHMLFPPLERVHYLQVPLSRRLSHDETNIFSTPREPGSFLHKWSSSDDIRVLPAQSRALGGPPEYLGQRHRLEDEEDEEEAEGGGLASLRQFLESGVLGSGGGPPRGPGFFREEITTFIDETPLPSPTASPGHSPRRPRPLGLSPRRLSLGSPESRAVGLPLGLSAGRRCSLTGGEESARAWGGSWGPGNPIFPQLTL

SEQ ID NO: 6158 - protein, 304 aa, Homo Sapiens
MLSTGVVSFFSLKSDSAPPWMVLAVLWCSMAQTLLLPSFIWSCERYRADVRTVWEQCVAIMSEEDGDDDGGCDDYAEGRVCKVRFDANGATGPGSRDPAQVKLLPGRHMLFPPLERVHYLQVPLSRRLSHDETNIFSTPREPGSFLHKWSSSDDIRVLPAQSRALGGPPEYLGQRHRLEDEEDEEEAEGGGLASLRQFLESGVLGSGGGPPRGPGFFREEITTFIDETPLPSPTASPGHSPRRPRPLGLSPRRLSLGSPESRAVGLPLGLSAGRRCSLTGGEESARAWGGSWGPGNPIFPQLTL

SEQ ID NO: 6159 - protein, 284 aa, Homo Sapiens
MVLAVLWCSMAQTLLLPSFIWSCERYRADVRTVWEQCVAIMSEEDGDDDGGCDDYAEGRVCKVRFDANGATGPGSRDPAQVKLLPGRHMLFPPLERVHYLQVPLSRRLSHDETNIFSTPREPGSFLHKWSSSDDIRVLPAQSRALGGPPEYLGQRHRLEDEEDEEEAEGGGLASLRQFLESGVLGSGGGPPRGPGFFREEITTFIDETPLPSPTASPGHSPRRPRPLGLSPRRLSLGSPESRAVGLPLGLSAGRRCSLTGGEESARAWGGSWGPGNPIFPQLTL

SEQ ID NO: 6160 - protein, 228 aa, Homo Sapiens
  misc_feature (1)..(1): Xaa can be any naturally occurring amino acid
XITFYQTLWARPRRARQARRVGGGGGTKAGGPGALGTRPAFEVPAIVVEDARGKRRSSLDGSESAKTSLQVTNLVVSFFSLKSDSAPPWMVLAVLWCSMAQTLLLPSFIWSCERYRADVRTVWEQCVAIMSEEDGDDDGGCDDYAEGRVCKVRFDANGATGPGSRDPAQVKLLPGRHMLFPPLERVHYLQLKKLDLAAAAAHTFFVANPMHLQMREDMAKYRRMSGVR

SEQ ID NO: 6161 - protein, 138 aa, Homo Sapiens
MARLLQASCLLSLLLAGFVSQSRGQEKSKAPRQMGNPQMDCHGGISGTIYEYGALTIDGEEYIPFKQYAGKYVLFVNVASYGLTGQYIELNALQEELAPFGLVILGFPCNQFGKQEPGENSEILPTLKYVRPGGGFVP

SEQ ID NO: 6162 - protein, 62 aa, Homo Sapiens
MARLLQASCLLSLLLAGFVSQSRGQEKSKAPRQMGNPQVRETSTPFAAPSAAGTPPPTVVVS

SEQ ID NO: 6163 - protein, 72 aa, Homo Sapiens
MARLLQASCLLSLLLAGFVSQSRGQEKSKMDCHGGISGTIYEYGALTIDGEEYIPFKQYAGKYVLFVNVASY

SEQ ID NO: 6164 - protein, 225 aa, Homo Sapiens
MARLLQASCLLSLLLAGFVSQSRGQEKSKMDCHGGISGTIYEYGALTIDGEEYIPFKQYAGKYVLFVNVASYGLTGQYIELNALQEELAPFGLVILGFPCNQFGKQEPGENSEILPTLKYVRPGGGFVPNFQLFEKGDVNGEKEQKFYTFLKNSCPPTSELLGTSDRLFWEPMKVHDIRWNFEKFLVGPDGIPIMRWHHRTTVSNVKMDILSYMRRQAALGVKRK

SEQ ID NO: 6165 - protein, 225 aa, Homo Sapiens; identical to SEQ ID NO: 6164

SEQ ID NO: 6166 - protein, 99 aa, Homo Sapiens
MARLLQASCLLSLLLAGFVSQSRGQEKSKNMHYRKSLHHSVWSFWAFPATNLENRNQERTQRSFLPSSMSDQVEALSLISSSLRKGMSMERKSRNSTLS

SEQ ID NO: 6167 - protein, 170 aa, Homo Sapiens
  misc_feature (1)..(1): Xaa can be any naturally occurring amino acid
XCHGGISGTIYEYGALTIDGEEYIPFKQYAGKYVLFVNVASYGLTGQYIELNALQEELAPFGLVILGFPCNQFGKQEPGENSEILPTLKTPVLPPRSSWVHLTASSGNPRFTTSAGTLRSSWWGQMVYPSCAGTTGPRSATSRWTSCPTGGRQPWGSRGSNRPSHPMSTM

SEQ ID NO: 6168 - protein, 79 aa, Homo Sapiens
  misc_feature (1)..(1): Xaa can be any naturally occurring amino acid
XFGKQEPGENSEILPTLKYVRPGGGFVPNFQLFEKGDVNGEKEQKFYTFLKGQAIPQEGLGRKRVRGPQARLTLLLSLL

SEQ ID NO: 6169 - protein, 174 aa, Homo Sapiens
MCASRDDWRCARSMHEFSAKDIDGHMVNLDKYRGFVCIVTNVASQGKTEVNYTQLVDLHARYAECGLRILAFPCNQFGKQEPGSNEEIKEFAAGYNVKFDMFSKICVNGDDAHPLWKWMKIQPKGKGILGKTAWGLWGAAGDAHVHVLLFQCHQVELHQVPHRQERLRGEALRT

SEQ ID NO: 6170 - protein, 240 aa, Homo Sapiens
MCASRDDWRCARSMHEFSAKDIDGHMVNLDKYRGFVCIVTNVASQGKTEVNYTQLVDLHARYAECGLRILAFPCNQFGKQEPGSNEEIKEFAAGYNVKFDMFSKICVNGDDAHPLWKWMKIQPKGKGILGNAIKWNFTKFGHRLSTVPHRQERLRGEALRTHGGAPGDREGPAPLFLAPQVCGPARAPAHALGAFHRHSRPACKPAGGADPKIQRAPRRRKVPWPAGLGSAPPPLATLWE

SEQ ID NO: 6171 - protein, 169 aa, Homo Sapiens
MCASRDDWRCARSMHEFSAKDIDGHMVNLDKYRGFVCIVTNVASQGKTEVNYTQLVDLHARYAECGLRILAFPCNQFGKQEPGSNEEIKEFAAGYNVKFDMFSKICVNGDDAHPLWKWMKIQPKGKGILGNAIKWNFTKFLIDKNGCVVKRYGPMEEPLVIEKDLPHYF

SEQ ID NO: 6172 - protein, 133 aa, Homo Sapiens
MGRAGAGSPGRRRQRCQSRGRRRPRAPRRRKAPACRRRRARRRRKKPCPRSLRPEIHECPKSQDPCASRDDWRCARSMHEFSAKDIDGHMVNLDKGFVCIVTNVASQGKTEVNYTQLVDLHARYAECGLRILA

SEQ ID NO: 6173 - protein, 233 aa, Homo Sapiens
MGRAGAGSPGRRRQRCQSRGRRRPRAPRRRKAPACRRRRARRRRKKPCPRSLRPEIHECPKSQDPCASRDDWRCARSMHEFSAKDIDGHMVNLDKYRGFVCIVTNVASQGKTEVNYTQLVDLHARYAECGLRILAFPCNQFGKQEPGSNEEIKEFAAGYNVKFDMFSKICVNGDDAHPLWKWMKIQPKGKGILGNAIKWNFTKFLIDKNGCVVKRYGPMEEPLVIEKDLPHYF

SEQ ID NO: 6174 - protein, 179 aa, Homo Sapiens
MGRAGAGSPGRRRQRCQSRGRRRPRAPRRRKAPACRRRRARRRRKKPCPRSLRPEIHECPKSQDPCASRDDWRCARSMHEFSAKDIDGHMVNLDKYRGFVCIVTNVASQGKTEVNYTQLVDLHARYAECGLRILAFPCNQFGKQEPGSNEEIKEFAAGYNVKFDMFSKICVNGDDAHPL

SEQ ID NO: 6175 - protein, 154 aa, Homo Sapiens
MHEFSAKDIDGHMVNLDKYRGFVCIVTNVASQGKTEVNYTQLVDLHARYAECGLRILAFPCNQFGKQEPGSNEEIKEFAAGYNVKFDMFSKICVNGDDAHPLWKWMKIQPKGKGILGNAIKWNFTKFLIDKNGCVVKRYGPMEEPLVIEKDLPH

SEQ ID NO: 6176 - protein, 196 aa, Homo Sapiens
MSLGRLCRLLKPALLCGALAAPGLAGTMCASRDDWRCARSMHEFSAKDIDGHMVNLDKYRGFVCIVTNVASQGKTEVNYTQLVDLHARYAECGLRILAFPCNQFGKQEPGSNEEIKEFAAGYNVKFDMFSKICVNGDDAHPLWKWMKIQPKGKGILGNAIKWNFTKFLIDKNGCVVKRYGPMEEPLVIEKDLPHYF

SEQ ID NO: 6177 - protein, 196 aa, Homo Sapiens; identical to SEQ ID NO: 6176

SEQ ID NO: 6178 - protein, 177 aa, Homo Sapiens
MSLGRLCRLLKPALLCGALAAPGLAGTMCASRDDWRCARSMHEFSAKDIDGHMVNLDKYRGFVCIVTNVASQGKTEVNYTQLVDLHARYAECGLRILAFPCNQFGKQEPGSNEEIKEFAAGYNVKFDMFSKICVNGDDAHPLWKWMKIQPKGKGILGNSSSTRTAAWSATDPWRSPW

SEQ ID NO: 6179 - protein, 166 aa, Homo Sapiens
YAECGLRILAFPCNQFGKQEPGSNEEIKEFAAGYNVKFDMFSKICVNGDDAHPLWKWMKIQPKGKGILGNAIKWNFTKFLIDKNGCVVKRYGPMEEPLLHKCVAPPEPLPTPLEPSTGTHDGLPANLLVGQTRKSSVHPAGGRSHGLLGLARRPHPWLPCGNKQTN

SEQ ID NO: 6180 - protein, 221 aa, Homo Sapiens
MTTQLRVVHLLPLLLACFVQTSPKQEKMKMDCHKDEKGTIYDYEAIALNKNEYVSFKQYVGKHILFVNVATYCGLTAQYPELNALQEELKPYGLVVLGFPCNQFGKQEPGDNKEILPGLKYVRPGGGFVPSFQLFEKGDVNGEKEQKVFSFLKHSCPHPSEILGTFKSISWDPVKVHDIRWNFEKFLVGPDGIPVMRWSHRATVSSVKTDILAYLKQFKTK

SEQ ID NO: 6181 - protein, 100 aa, Homo Sapiens
MTTQLRVVHLLPLLLACFVQTSPKQEKMKMDCHKDEKGTIYDYEAIALNKNEYVSFKQYVGKHILFVNVATYCGLTAQYPGMSVQGEDLYLVSSFLRKGM

SEQ ID NO: 6182 - protein, 220 aa, Homo Sapiens
MFQQFQASCLVLFFLVGFAQQTLKPQNRKVDCNKGVTGTIYEYGALTLNGEEYIQFKQFAGKHVLFVNVAAYGLAAQYPELNALQEELKNFGVIVLAFPCNQFGKQEPGTNSEILLGLKYVCPGSGFVPSFQLFEKGDVNGEKEQKVFTFLKNSCPPTSDLLGSSSQLFWEPMKVHDIRWNFEKFLVGPDGVPVMHWFHQAPVSTVKSDILEYLKQFNTH

SEQ ID NO: 6183 - protein, 179 aa, Homo Sapiens
MFQQFQASCLVLFFLVGFAQQTLKPQNRKVDCNKGVTGTIYEYGALTLNGEEYIQFKQFAGKHVLFVNVAAYGLAAQYPELNALQEELKNFGVIVLAFPCNQFGKQEPGTNSEILLGLKTPALRPLIFWAHQANSSGSPRSMISAGTLRNFWWGPMESLSCIGSTRLQSAQSSQTSWST

SEQ ID NO: 6184 - protein, 220 aa, Homo Sapiens; identical to SEQ ID NO: 6182

SEQ ID NO: 6185 - protein, 187 aa, Homo Sapiens
MVAATVAAAWLLLWAAACAQQEQDFYDFKAVNIRGKLVSLEKYRGSVSLVVNVASECGFTDQHYRALQQLQRDLGPHHFNVLAFPCNQFGQQEPDSNKEIESFARRTYSVSFPMFSKIAVTGTGAHPAFKYLAQTSGKEPTWNFWKYLVAPDGKVVGAWDPTVSVEEVRPQITALVRKLILLKREDL

SEQ ID NO: 6186 - protein, 42 aa, Homo Sapiens
MSRTAYTVGALLLLLGTLLPAAEGKKKGSQGAIPPPAKRPCM

SEQ ID NO: 6187 - protein, 143 aa, Homo Sapiens
MSRTAYTVGALLLLLGTLLPAAEGKKKGSQGAIPPPDKALHVTERKYLKRDWCKTQPLKQTIHEEGCNSRTIINRFCYGQCNSFYIPRHIRKEEGSFQSCSFCKPKKFTTMMVTLNCPELQPPTKKKRVTRVKQCRCISIDLD

SEQ ID NO: 6188 - protein, 184 aa, Homo Sapiens
MSRTAYTVGALLLLLGTLLPAAEGKKKGSQGAIPPPDKAQHNDSEQTQSPQQPGSRNRGRGQGRGTAMPGEEVLESSQEALHVTERKYLKRDWCKTQPLKQTIHEEGCNSRTIINRFCYGQCNSFYIPRHIRKEEGSFQSCSFCKPKKFTTMMVTLNCPELQPPTKKKRVTRVKQCRCISIDLD

SEQ ID NO: 6189 - protein, 168 aa, Homo Sapiens
MFWKLSLSLFLVAVLVKVAEARKNRPAGAIPSPYKDGSSNNSERWQHQIKEVLASSQEALVVTERKYLKSDWCKTQPLRQTVSEEGCRSRTILNRFCYGQCNSFYIPRHVKKEEESFQSCAFCKPQRVTSVLVELECPGLDPPFRLKKIQKVKQCRCMSVNLSDSDKQ

SEQ ID NO: 6190 - protein, 81 aa, Homo Sapiens
MMRVNGDDDSVAALSFLYDYYMGPKEKRILSSSTGGRNDQGKRYYHGMEYETDLTPLESPTHLMKFLTENVSGTPEYPDLL

SEQ ID NO: 6191 - protein, 556 aa, Homo Sapiens
MMRVNGDDDSVAALSFLYDYYMGPKEKRILSSSTGGRNDQGKRYYHGMEYETDLTPLESPTHLMKFLTENVSGTPEYPDLLKKNNLMSLEGALPTPGKAAPLPAGPSKLEAGSVDSYLLPTTDMYDNGSLNSLFESIHGVPPTQRWQPDSTFKDDPQESMLFPDILKTSPEPPCPEDYPSLKSDFEYTLGSPKAIHIKSGESPMAYLNKGQFYPVTLRTPAGGKGLALSSNKVKSVVMVVFDNEKVPVEQLRFWKHWHSRQPTAKQRVIDVADCKENFNTVEHIEEVAYNALSFVWNVNEEAKVFIGVNCLSTDFSSQKGVKGVPLNLQIDTYDCGLGTERLVHRAVCQIKIFCDKGAERKMRDDERKQFRRKVKCPDSSNSGVKGCLLSGFRGNETTYLRPETDLETPPVLFIPNVHFSSLQRSGGAAPSAGPSSSNRLPLKRTCSPFTEEFEPLPSKQAKEGDLQRVLLYVRRETEEVFDALMLKTPDLKGLRNAISEKYGFPEENIYKVYKKCKRGILVNMDNNIIQHYSNHVAFLLDMGELDGKIQIILKEL

SEQ ID NO: 6192 - protein, 626 aa, Homo Sapiens
MSNELDFRSVRLLKNDPVNLQKFSYTSEDEAWKTYLENPLTAATKAMMRVNGDDDSVAALSFLYDYYMGPKEKRILSSSTGGRNDQGKRYYHGMEYETDLTPLESPTHLMKFLTENVSGTPEYPDLLKKNNLMSLEGALPTPGKAAPLPAGPSKLEAGSVDSYLLPTTDMYDNGSLNSLFESIHGVPPTQRWQPDSTFKDDPQESMLFPDILKTSPEPPCPEDYPSLKSDFEYTLGSPKAIHIKSGESPMAYLNKGQFYPVTLRTPAGGKGLALSSNKVKSVVMVVFDNEKVPVEQLRFWKHWHSRQPTAKQRVIDVADCKENFNTVEHIEEVAYNALSFVWNVNEEAKVFIGVNCLSTDFSSQKGVKGVPLNLQIDTYDCGLGTERLVHRAVCQIKIFCDKGAERKMRDDERKQFRRKVKCPDSSNSGVKGCLLSGFRGNETTYLRPETDLETPPVLFIPNVHFSSLQRSGGAAPSAGPSSSNRLPLKRTCSPFTEEFEPLPSKQAKEGDLQRVLLYVRRETEEVFDALMLKTPDLKGLRNAISEKYGFPEENIYKVYKKCKRGETSLLHPRLSRHPPPDCLECSHPVTQVRNMGFGDGFWRQRDLDSNPSPTTVNSLHFTVNSE

SEQ ID NO: 6193 - protein, 602 aa, Homo Sapiens
MSNELDFRSVRLLKNDPVNLQKFSYTSEDEAWKTYLENPLTAATKAMMRVNGDDDSVAALSFLYDYYMGPKEKRILSSSTGGRNDQGKRYYHGMEYETDLTPLESPTHLMKFLTENVSGTPEYPDLLKKNNLMSLEGALPTPGKAAPLPAGPSKLEAGSVDSYLLPTTDMYDNGSLNSLFESIHGVPPTQRWQPDSTFKDDPQESMLFPDILKTSPEPPCPEDYPSLKSDFEYTLGSPKAIHIKSGESPMAYLNKGQFYPVTLRTPAGGKGLALSSNKVKSVVMVVFDNEKVPVEQLRFWKHWHSRQPTAKQRVIDVADCKENFNTVEHIEEVAYNALSFVWNVNEEAKVFIGVNCLSTDFSSQKGVKGVPLNLQIDTYDCGLGTERLVHRAVCQIKIFCDKGAERKMRDDERKQFRRKVKCPDSSNSGVKGCLLSGFRGNETTYLRPETDLETPPVLFIPNVHFSSLQRSGGAAPSAGPSSSNRLPLKRTCSPFTEEFEPLPSKQAKEGDLQRVLLYVRRETEEVFDALMLKTPDLKGLRNAISEKYGFPEENIYKVYKKCKRGILVNMDNNIIQHYSNHVAFLLDMGELDGKIQIILKEL

SEQ ID NO: 6194 - protein, 607 aa, Homo Sapiens
MWMNSILPIFLFRSVRLLKNDPVNLQKFSYTSEDEAWKTYLENPLTAATKAMMRVNGDDDSVAALSFLYDYYMGPKEKRILSSSTGGRNDQGKRYYHGMEYETDLTPLESPTHLMKFLTENVSGTPEYPDLLKKNNLMSLEGALPTPGKAAPLPAGPSKLEAGSVDSYLLPTTDMYDNGSLNSLFESIHGVPPTQRWQPDSTFKDDPQESMLFPDILKTSPEPPCPEDYPSLKSDFEYTLGSPKAIHIKSGESPMAYLNKGQFYPVTLRTPAGGKGLALSSNKVKSVVMVVFDNEKVPVEQLRFWKHWHSRQPTAKQRVIDVADCKENFNTVEHIEEVAYNALSFVWNVNEEAKVFIGVNCLSTDFSSQKGVKGVPLNLQIDTYDCGLGTERLVHRAVCQIKIFCDKGAERKMRDDERKQFRRKVKCPDSSNSGVKGCLLSGFRGNETTYLRPETDLETPPVLFIPNVHFSSLQRSGGAAPSAGPSSSNRLPLKRTCSPFTEEFEPLPSKQAKEGDLQRVLLYVRRETEEVFDALMLKTPDLKGLRNAISEKYGFPEENIYKVYKKCKRGILVNMDNNIIQHYSNHVAFLLDMGELDGKIQIILKEL

SEQ ID NO: 6195 - protein, 52 aa, Homo Sapiens
MWMNSILPIFLVPRRSGYCPPALGAGMTKERGTTMAWNMRRTSLPLKAPHTS

SEQ ID NO: 6196 - protein, 48 aa, Homo Sapiens
MQKIMHISVLLSPVLWGLIFGVSSNSIQIGGLFPRGADQEYSAFRVGM

SEQ ID NO: 6197 - protein, 125 aa, Homo Sapiens
MQKIMHISVLLSPVLWGLIFGVSSNSIQIGGLFPRGADQEYSAFRVGMVQFSTSEFRLTPHIDNLEVANSFAVTNAFCSQFSRGVYAIFGFYDKKSVNTITSFCGTLHVSFITPSFPTDGTHPFV

SEQ ID NO: 6198 - protein, 883 aa, Homo Sapiens
MQKIMHISVLLSPVLWGLIFGVSSNSIQIGGLFPRGADQEYSAFRVGMVQFSTSEFRLTPHIDNLEVANSFAVTNAFCSQFSRGVYAIFGFYDKKSVNTITSFCGTLHVSFITPSFPTDGTHPFVIQMRPDLKGALLSLIEYYQWDKFAYLYDSDRGLSTLQAVLDSAAEKKWQVTAINVGNINNDKKDEMYRSLFQDLELKKERRVILDCERDKVNDIVDQVITIGKHVKGYHYIIANLGFTDGDLLKIQFGGANVSGFQIVDYDDSLVSKFIERWSTLEEKEYPGAHTTTIKYTSALTYDAVQVMTEAFRNLRKQRIEISRRGNAGDCLANPAVPWGQGVEIERALKQVQVEGLSGNIKFDQNGKRINYTINIMELKTNGPRKIGYWSEVDKMVVTLTELPSGNDTSGLENKTVVVTTILESPYVMMKKNHEMLEGNERYEGYCVDLAAEIAKHCGFKYKLTIVGDGKYGARDADTKIWNGMVGELVYGKADIAIAPLTITLVREEVIDFSKPFMSLGISIMIKKPQKSKPGVFSFLDPLAYEIWMCIVFAYIGVSVVLFLVSRFSPYEWHTEEFEDGRETQSSESTNEFGIFNSLWFSLGAFMQQGCDISPRSLSGRIVGGVWWFFTLIIISSYTANLAAFLTVERMVSPIESAEDLSKQTEIAYGTLDSGSTKEFFRRSKIAVFDKMWTYMRSAEPSVFVRTTAEGVARVRKSKGKYAYLLESTMNEYIEQRKPCDTMKVGGNLDSKGYGIATPKGSSLRNAVNLAVLKLNEQGLLDKLKNKWWYDKGECGSGGGDSKEKTSALSLSNVAGVFYILVGGLGLAMLVALIEFCYKSRAEAKRMKVAKNAQNINPSSSQNSQNFATYKEGYNVYGIESVKI

SEQ ID NO: 6199 - protein, 883 aa, Homo Sapiens
MQKIMHISVLLSPVLWGLIFGVSSNSIQIGGLFPRGADQEYSAFRVGMVQFSTSEFRLTPHIDNLEVANSFAVTNAFCSQFSRGVYAIFGFYDKKSVNTITSFCGTLHVSFITPSFPTDGTHPFVIQMRPDLKGALLSLIEYYQWDKFAYLYDSDRGLSTLQAVLDSAAEKKWQVTAINVGNINNDKKDEMYRSLFQDLELKKERRVILDCERDKVNDIVDQVITIGKHVKGYHYIIANLGFTDGDLLKIQFGGANVSGFQIVDYDDSLVSKFIERWSTLEEKEYPGAHTTTIKYTSALTYDAVQVMTEAFRNLRKQRIEISRRGNAGDCLANPAVPWGQGVEIERALKQVQVEGLSGNIKFDQNGKRINYTINIMELKTNGPRKIGYWSEVDKMVVTLTELPSGNDTSGLENKTVVVTTILESPYVMMKKNHEMLEGNERYEGYCVDLAAEIAKHCGFKYKLTIVGDGKYGARDADTKIWNGMVGELVYGKADIAIAPLTITLVREEVIDFSKPFMSLGISIMIKKPQKSKPGVFSFLDPLAYEIWMCIVFAYIGVSVVLFLVSRFSPYEWHTEEFEDGRETQSSESTNEFGIFNSLWFSLGAFMQQGCDISPRSLSGRIVGGVWWFFTLIIISSYTANLAAFLTVERMVSPIESAEDLSKQTEIAYGTLDSGSTKEFFRRSKIAVFDKMWTYMRSAEPSVFVRTTAEGVARVRKSKGKYAYLLESTMNEYIEQRKPCDTMKVGGNLDSKGYGIATPKGSSLRTPVNLAVLKLSEQGVLDKLKNKWWYDKGECGAKDSGSKEKTSALSLSNVAGVFYILVGGLGLAMLVALIEFCYKSRAEAKRMKVAKNAQNINPSSSQNSQNFATYKEGYNVYGIESVKI

SEQ ID NO: 6200 - protein, 901 aa, Homo Sapiens
MQKIMHISVLLSPVLWGLIFGVSSNSIQIGGLFPRGADQEYSAFRVGMVQFSTSEFRLTPHIDNLEVANSFAVTNAFCSQFSRGVYAIFGFYDKKSVNTITSFCGTLHVSFITPSFPTDGTHPFVIQMRPDLKGALLSLIEYYQWDKFAYLYDSDRGLSTLQAVLDSAAEKKWQVTAINVGNINNDKKDEMYRSLFQDLELKKERRVILDCERDKVNDIVDQVITIGKHVKGYHYIIANLGFTDGDLLKIQFGGANVSGFQIVDYDDSLVSKFIERWSTLEEKEYPGAHTTTIKYTSALTYDAVQVMTEAFRNLRKQRIEISRRGNAGDCLANPAVPWGQGVEIERALKQVQVEGLSGNIKFDQNGKRINYTINIMELKTNGPRKIGYWSEVDKMVVTLTELPSGNDTSGLENKTVVVTTILESPYVMMKKNHEMLEGNERYEGYCVDLAAEIAKHCGFKYKLTIVGDGKYGARDADTKIWNGMVGELVYGKADIAIAPLTITLVREEVIDFSKPFMSLGISIMIKKPQKSKPGVFSFLDPLAYEIWMCIVFAYIGVSVVLFLVSRFSPYEWHTEEFEDGRETQSSESTNEFGIFNSLWFSLGAFMQQGCDISPRSLSGRIVGGVWWFFTLIIISSYTANLAAFLTVERMVSPIESAEDLSKQTEIAYGTLDSGSTKEFFRRSKIAVFDKMWTYMRSAEPSVFVRTTAEGVARVRKSKGKYAYLLESTMNEYIEQRKPCDTMKVGGNLDSKGYGIATPKGSSLRNAVNLAVLKLNEQGLLDKLKNKWWYDKGECGSGGGDSKEKTSALSLSNVAGVFYILVGGLGLAMLVALIEFCYKSRAEAKRMKMTLNDAMRNKARLSITGSTGENGRVMTPEFPKAVHAVPYVSPGMGMNVSVTDLS

SEQ ID NO: 6201 - protein, 105 aa, Homo Sapiens
MRPDLKGALLSLIEYYQWDKFAYLYDSDRGLSTLQAVLDSAAEKKWQVTAINVGNINNDKKDEMYRSLFQDLELKKERRVILDCERDKVNDIVDQVITIGKHVKG

SEQ ID NO: 6202 - protein, 57 aa, Homo Sapiens
MVQFSTSEFRLTPHIDNLEVANSFAVTNAFCSQFSRGVYAIFGFYDKKSVNTITSFC

SEQ ID NO: 6203 - protein, 145 aa, Homo Sapiens
MVQFSTSEFRLTPHIDNLEVANSFAVTNAFCSQFSRGVYAIFGFYDKKSVNTITSFCGTLHVSFITPSFPTDGTHPFVIQMRPDLKGALLSLIEYYQWDKFAYLYDSDRGLSTLQAVLDSAAEKKWQVTAINVGNINNDKKDEMY

SEQ ID NO: 6204 - protein, 730 aa, Homo Sapiens
MVQFSTSEFRLTPHIDNLEVANSFAVTNAFCSQFSRGVYAIFGFYDKKSVNTITSFCGTLHVSFITPSFPTDGTHPFVIQMRPDLKGALLSLIEYYQWDKFAYLYDSDRGLSTLQAVLDSAAEKKWQVTAINVGNINNDKKDEMYRSLFQDLELKKERRVILDCERDKVNDIVDQVITIGKHVKGYHYIIANLGFTDGDLLKIQFGGANVSGFQIVDYDDSLVSKFIERWSTLEEKEYPGAHTTTIKYTSALTYDAVQVMTEAFRNLRKQRIEISRRGNAGDCLANPAVPWGQGVEIERALKQVQVEGLSGNIKFDQNGKRINYTINIMELKTNGPRKIGYWSEVDKMVVTLTELPSGNDTSGLENKTVVVTTILESPYVMMKKNHEMLEGNERYEGYCVDLAAEIAKHCGFKYKLTIVGDGKYGARDADTKIWNGMVGELVYGKADIAIAPLTITLVREEVIDFSKPFMSLGISIMIKKPQKSKPGVFSFLDPLAYEIWMCIVFAYIGVSVVLFLVSRFSPYEWHTEEFEDGRETQSSESTNEFGIFNSLWFSLGAFMQQGCDISPRSLSGRIVGGVWWFFTLIIISSYTANLAAFLTVERMVSPIESAEDLSKQTEIAYGTLDSGSTKEFFRRSKIAVFDKMWTYMRSAEPSVFVRTTAEGVARVRKSKGKYAYLLESTMNEYIEQRKPCDTMKVGGNLDSKGYGIATPKGSSLSGVTFKTLLFVCCG

SEQ ID NO: 6205 - protein, 836 aa, Homo Sapiens
MVQFSTSEFRLTPHIDNLEVANSFAVTNAFCSQFSRGVYAIFGFYDKKSVNTITSFCGTLHVSFITPSFPTDGTHPFVIQMRPDLKGALLSLIEYYQWDKFAYLYDSDRGLSTLQAVLDSAAEKKWQVTAINVGNINNDKKDEMYRSLFQDLELKKERRVILDCERDKVNDIVDQVITIGKHVKGYHYIIANLGFTDGDLLKIQFGGANVSGFQIVDYDDSLVSKFIERWSTLEEKEYPGAHTTTIKYTSALTYDAVQVMTEAFRNLRKQRIEISRRGNAGDCLANPAVPWGQGVEIERALKQVQVEGLSGNIKFDQNGKRINYTINIMELKTNGPRKIGYWSEVDKMVVTLTELPSGNDTSGLENKTVVVTTILESPYVMMKKNHEMLEGNERYEGYCVDLAAEIAKHCGFKYKLTIVGDGKYGARDADTKIWNGMVGELVYGKADIAIAPLTITLVREEVIDFSKPFMSLGISIMIKKPQKSKPGVFSFLDPLAYEIWMCIVFAYIGVSVVLFLVSRFSPYEWHTEEFEDGRETQSSESTNEFGIFNSLWFSLGAFMQQGCDISPRSLSGRIVGGVWWFFTLIIISSYTANLAAFLTVERMVSPIESAEDLSKQTEIAYGTLDSGSTKEFFRRSKIAVFDKMWTYMRSAEPSVFVRTTAEGVARVRKSKGKYAYLLESTMNEYIEQRKPCDTMKVGGNLDSKGYGIATPKGSSLRTPVNLAVLKLSEQGVLDKLKNKWWYDKGECGAKDSGSKEKTSALSLSNVAGVFYILVGGLGLAMLVALIEFCYKSRAEAKRMKVAKNAQNINPSSSQNSQNFATYKEGYNVYGIESVKI

SEQ ID NO: 6206 - protein, 836 aa, Homo Sapiens; identical to SEQ ID NO: 6205

SEQ ID NO: 6207 - protein, 214 aa, Homo Sapiens
  misc_feature (1)..(1): Xaa can be any naturally occurring amino acid
XLDSGSTKEFFRRSKIAVFDKMWTYMRSAEPSVFVRTTAEGVARVRKSKGKYAYLLESTMNEYIEQRKPCDTMKVGGNLDSKGYGIATPKGSSLRTPVNLAVLKLSEQGVLDKLKNKWWYDKGECGAKDSGSKEKTSALSLSNVAGVFYILVGGLGLAMLVALIEFCYKSRAEAKRMKVAKNAQNINPSSSQNSQNFATYKEGYNVYGIESVKI

SEQ ID NO: 6208 - protein, 144 aa, Homo Sapiens
MARQKKMGQSVLRAVFFLVLGLLGHSHGGFPNTISIGGLFMRNTVQEHSAFRFAVQLYNTNQNTTEKPFHLNYHVDHLDSSNSFSVTNACPAERDYLPWPGSIRENNWTALPCCKDHGLLHLKCSPGGARQNWAYCIWGVTGEL

SEQ ID NO: 6209 - protein, 144 aa, Homo Sapiens; identical to SEQ ID NO: 6208

SEQ ID NO: 6210 - protein, 894 aa, Homo Sapiens
MARQKKMGQSVLRAVFFLVLGLLGHSHGGFPNTISIGGLFMRNTVQEHSAFRFAVQLYNTNQNTTEKPFHLNYHVDHLDSSNSFSVTNAFCSQFSRGVYAIFGFYDQMSMNTLTSFCGALHTSFVTPSFPTDADVQFVIQMRPALKGAILSLLGHYKWEKFVYLYDTERGFSILQAIMEAAVQNNWQVTARSVGNIKDVQEFRRIIEEMDRRQEKRYLIDCEVERINTILEQVVILGKHSRGYHYMLANLGFTDILLERVMHGGANITGFQIVNNENPMVQQFIQRWVRLDEREFPEAKNAPLKYTSALTHDAILVIAEAFRYLRRQRVDVSRRGSAGDCLANPAVPWSQGIDIERALKMVQVQGMTGNIQFDTYGRRTNYTIDVYEMKVSGSRKAGYWNEYERFVPFSDQQISNDSASSENRTIVVTTILESPYVMYKKNHEQLEGNERYEGYCVDLAYEIAKHVRIKYKLSIVGDGKYGARDPETKIWNGMVGELVYGRADIAVAPLTITLVREEVIDFSKPFMSLGISIMIKKPQKSKPGVFSFLDPLAYEIWMCIVFAYIGVSVVLFLVSRFSPYEWHLEDNNEEPRDPQSPPDPPNEFGIFNSLWFSLGAFMQQGCDISPRSLSGRIVGGVWWFFTLIIISSYTANLAAFLTVERMVSPIESAEDLAKQTEIAYGTLDSGSTKEFFRRSKIAVYEKMWSYMKSAEPSVFTKTTADGVARVRKSKGKFAFLLESTMNEYIEQRKPCDTMKVGGNLDSKGYGVATPKGSALRTPVNLAVLKLSEQGILDKLKNKWWYDKGECGAKDSGSKDKTSALSLSNVAGVFYILVGGLGLAMMVALIEFCYKSRAESKRMKLTKNTQNFKPAPATNTQNYATYREGYNVYGTESVKI

SEQ ID NO: 6211 - protein, 824 aa, Homo Sapiens
MARQKKMGQSVLRAVFFLVLGLLGHSHGGFPNTISIGGLFMRNTVQEHSAFRFAVQLYNTNQNTTEKPFHLNYHVDHLDSSNSFSVTNAFCSQFSRGVYAIFGFYDQMSMNTLTSFCGALHTSFVTPSFPTDADVQFVIQMRPALKGAILSLLGHYKWEKFVYLYDTERGFSILQAIMEAAVQNNWQVTARSVGNIKDVQEFRRIIEEMDRRQEKRYLIDCEVERINTILEQVVILGKHSRGYHYMLANLGFTDILLERVMHGGANITGFQIVNNENPMVQQFIQRWVRLDEREFPEAKNAPLKYTSALTHDAILVIAEAFRYLRRQRVDVSRRGSAGDCLANPAVPWSQGIDIERALKMVQVQGMTGNIQFDTYGRRTNYTIDVYEMKVSGSRKAGYWNEYERFVPFSDQQISNDSASSENRTIVVTTILESPYVMYKKNHEQLEGNERYEGYCVDLAYEIAKHVRIKYKLSIVGDGKYGARDPETKIWNGMVGELVYGRADIAVAPLTITLVREEVIDFSKPFMSLGISIMIKKPQKSKPGVFSFLDPLAYEIWMCIVFAYIGVSVVLFLVSRFSPYEWHLEDNNEEPRDPQSPPDPPNEFGIFNSLWFSLGAFMQQGCDISPRSLSGRIVGGVWWFFTLIIISSYTANLAAFLTVERMVSPIESAEDLAKQTEIAYGTLDSGSTKEFFRRSKIAVYEKMWSYMKSAEPSVFTKTTADGVARVRKSKGKFAFLLESTMNEYIEQRKPCDTMKVGGNLDSKGYGVATPKGSALRNAVNLAVLKLNEQGLLDKLKNKWWYDKGECGSGGGDSKNACKPCSIETQ

SEQ ID NO: 6212 - protein, 894 aa, Homo Sapiens
MARQKKMGQSVLRAVFFLVLGLLGHSHGGFPNTISIGGLFMRNTVQEHSAFRFAVQLYNTNQNTTEKPFHLNYHVDHLDSSNSFSVTNAFCSQFSRGVYAIFGFYDQMSMNTLTSFCGALHTSFVTPSFPTDADVQFVIQMRPALKGAILSLLGHYKWEKFVYLYDTERGFSILQAIMEAAVQNNWQVTARSVGNIKDVQEFRRIIEEMDRRQEKRYLIDCEVERINTILEQVVILGKHSRGYHYMLANLGFTDILLERVMHGGANITGFQIVNNENPMVQQFIQRWVRLDEREFPEAKNAPLKYTSALTHDAILVIAEAFRYLRRQRVDVSRRGSAGDCLANPAVPWSQGIDIERALKMVQVQGMTGNIQFDTYGRRTNYTIDVYEMKVSGSRKAGYWNEYERFVPFSDQQISNDSASSENRTIVVTTILESPYVMYKKNHEQLEGNERYEGYCVDLAYEIAKHVRIKYKLSIVGDGKYGARDPETKIWNGMVGELVYGRADIAVAPLTITLVREEVIDFSKPFMSLGISIMIKKPQKSKPGVFSFLDPLAYEIWMCIVFAYIGVSVVLFLVSRFSPYEWHLEDNNEEPRDPQSPPDPPNEFGIFNSLWFSLGAFMQQGCDISPRSLSGRIVGGVWWFFTLIIISSYTANLAAFLTVERMVSPIESAEDLAKQTEIAYGTLDSGSTKEFFRRSKIAVYEKMWSYMKSAEPSVFTKTTADGVARVRKSKGKFAFLLESTMNEYIEQRKPCDTMKVGGNLDSKGYGVATPKGSALRNAVNLAVLKLNEQGLLDKLKNKWWYDKGECGSGGGDSKDKTSALSLSNVAGVFYILVGGLGLAMMVALIEFCYKSRAESKRMKLTKNTQNFKPAPATNTQNYATYREGYNVYGTESVKI

SEQ ID NO: 6213 - protein, 894 aa, Homo Sapiens; identical to SEQ ID NO: 6212

SEQ ID NO: 6214 - protein, 82 aa, Homo Sapiens
MRIISRQIVLLFSGFWGLAMGAFPSSVQIGGLFIRNTDQEYTAFRLAIFLHNTSPNASEAPFNLVPHVDNIETANSFAVTNA

SEQ ID NO: 6215 - protein, 82 aa, Homo Sapiens; identical to SEQ ID NO: 6214

SEQ ID NO: 6216 - protein, 82 aa, Homo Sapiens; identical to SEQ ID NO: 6214

SEQ ID NO: 6217 - protein, 84 aa, Homo Sapiens
MRIISRQIVLLFSGFWGLAMGAFPSSVQIGGLFIRNTDQEYTAFRLAIFLHNTSPNASEAPFNLVPHVDNIETANSFAVTNACK

SEQ ID NO: 6218 - protein, 225 aa, Homo Sapiens
MRIISRQIVLLFSGFWGLAMGAFPSSVQIGGLFIRNTDQEYTAFRLAIFLHNTSPNASEAPFNLVPHVDNIETANSFAVTNAFCSQYSRGVFAIFGLYDKRSVHTLTSFCSALHISLITPSFPTEGESQFVLQLRPSLRGALLSLLDHYEWNCFVFLYDTDRGLVISTTPLASNCMPSSVVHSWLYVLYNKSINSITACLLGPSTELNVFNYLIADSNLNNGNYI

SEQ ID NO: 6219 - protein, 902 aa, Homo Sapiens
MRIISRQIVLLFSGFWGLAMGAFPSSVQIGGLFIRNTDQEYTAFRLAIFLHNTSPNASEAPFNLVPHVDNIETANSFAVTNAFCSQYSRGVFAIFGLYDKRSVHTLTSFCSALHISLITPSFPTEGESQFVLQLRPSLRGALLSLLDHYEWNCFVFLYDTDRGYSILQAIMEKAGQNGWHVSAICVENFNDVSYRQLLEELDRRQEKKFVIDCEIERLQNILEQIVSVGKHVKGYHYIIANLGFKDISLERFIHGGANVTGFQLVDFNTPMVIKLMDRWKKLDQREYPGSETPPKYTSALTYDGVLVMAETFRSLRRQKIDISRRGNAGDCLANPAAPWGQGIDMERTLKQVRIQGLTGNVQFDHYGRRVNYTMDVFELKSTGPRKVGYWNDMDKLVLIQDVPTLGNDTAAIENRTVVVTTIMESPYVMYKKNHEMFEGNDKYEGYCVDLASEIAKHIGIKYKIAIVPDGKYGARDADTKIWNGMVGELVYGKAEIAIAPLTITLVREEVIDFSKPFMSLGISIMIKKPQKSKPGVFSFLDPLAYEIWMCIVFAYIGVSVVLFLVSRFSPYEWHTEEPEDGKEGPSDQPPNEFGIFNSLWFSLGAFMQQGCDISPRSLSGRIVGGVWWFFTLIIISSYTANLAAFLTVERMVSPIESAEDLAKQTEIAYGTLDSGSTKEFFRRSKIAVYEKMWTYMRSAEPSVFTRTTAEGVARVRKSKGKFAFLLESTMNEYIEQRKPCDTMKVGGNLDSKGYGVATPKGSSLRTPVNLAVLKLSEAGVLDKLKNKWWYDKGECGPKDSGSKDKTSALSLSNVAGVFYILVGGLGLAMLVALIEFCYKSRAEAKRMKLTFSEAIRNKARLSITGSVGENGRVLTPDCPKAVHTGTAIRQSSGLAVIASDLP

SEQ ID NO: 6220 - protein, 433 aa, Homo Sapiens
MRIISRQIVLLFSGFWGLAMGAFPSSVQIGGLFIRNTDQEYTAFRLAIFLHNTSPNASEAPFNLVPHVDNIETANSFAVTNAFCSQYSRGVFAIFGLYDKRSVHTLTSFCSALHISLITPSFPTEGESQFVLQLRPSLRGALLSLLDHYEWNCFVFLYDTDRGYSILQAIMEKAGQNGWHVSAICVENFNDVSYRQLLEELDRRQEKKFVIDCEIERLQNILEQIVSVGKHVKGYHYIIANLGFKDISLERFIHGGANVTGFQLVDFNTPMVIKLMDRWKKLDQREYPGSETPPKYTSALTYDGVLVMAETFRSLRRQKIDISRRGNAGDCLANPAAPWGQGIDMERTLKQVRIQGLTGNVQFDHYGRRVNYTMDVFELKSTGPRKVGYWNDMDKLVLIQDVPTLGNDTAAIENRTVVVTTIMPLMKNPILRN

SEQ ID NO: 6221 - protein, 884 aa, Homo Sapiens
MRIISRQIVLLFSGFWGLAMGAFPSSVQIGGLFIRNTDQEYTAFRLAIFLHNTSPNASEAPFNLVPHVDNIETANSFAVTNAFCSQYSRGVFAIFGLYDKRSVHTLTSFCSALHISLITPSFPTEGESQFVLQLRPSLRGALLSLLDHYEWNCFVFLYDTDRGYSILQAIMEKAGQNGWHVSAICVENFNDVSYRQLLEELDRRQEKKFVIDCEIERLQNILEQIVSVGKHVKGYHYIIANLGFKDISLERFIHGGANVTGFQLVDFNTPMVIKLMDRWKKLDQREYPGSETPPKYTSALTYDGVLVMAETFRSLRRQKIDISRRGNAGDCLANPAAPWGQGIDMERTLKQVRIQGLTGNVQFDHYGRRVNYTMDVFELKSTGPRKVGYWNDMDKLVLIQDVPTLGNDTAAIENRTVVVTTIMESPYVMYKKNHEMFEGNDKYEGYCVDLASEIAKHIGIKYKIAIVPDGKYGARDADTKIWNGMVGELVYGKAEIAIAPLTITLVREEVIDFSKPFMSLGISIMIKKPQKSKPGVFSFLDPLAYEIWMCIVFAYIGVSVVLFLVSRFSPYEWHTEEPEDGKEGPSDQPPNEFGIFNSLWFSLGAFMQQGCDISPRSLSGRIVGGVWWFFTLIIISSYTANLAAFLTVERMVSPIESAEDLAKQTEIAYGTLDSGSTKEFFRRSKIAVYEKMWTYMRSAEPSVFTRTTAEGVARVRKSKGKFAFLLESTMNEYIEQRKPCDTMKVGGNLDSKGYGVATPKGSSLRNAVNLAVLKLNEQGLLDKLKNKWWYDKGECGSGGGDSKDKTSALSLSNVAGVFYILVGGLGLAMLVALIEFCYKSRAEAKRMKVAKSAQTFNPTSSQNTQNLATYREGYNVYGTESIKI

SEQ ID NO: 6222 - protein, 433 aa, Homo Sapiens; identical to SEQ ID NO: 6220

SEQ ID NO: 6223 - protein, 902 aa, Homo Sapiens; identical to SEQ ID NO: 6219

SEQ ID NO: 6224 - protein, 884 aa, Homo Sapiens; identical to SEQ ID NO: 6221

SEQ ID NO: 6225 - protein, 104 aa, Homo Sapiens
  misc_feature (1)..(1): Xaa can be any naturally occurring amino acid
XVARVRKSKGKFAFLLESTMNEYIEQRKPCDTMKVGGNLDSKGYGVATPKGSSLRNAVNLAVLKLNEQGLLDKLKNKWWYDKGECGSGGGDSKNSCKPCRFETQ

SEQ ID NO: 6226 - protein, 180 aa, Homo Sapiens
CSHEMAAGILKQALAMGMMTEYYHYIFTTLTDAALMYDAVHVVSVAVQQFPQMTVSSLQCNRHKPWRFGTRFMSLIKEAHWEGLTGRITFNKTNGLRTDFDLDVISLKEEGLEKIGTWDPASGLNMTESQKGKPANITDSLSNRSLIVTTILEEPYVLFKKSDKPLYGNDRFEGYCIDLL

SEQ ID NO: 6227 - protein, 854 aa, Homo Sapiens
GGIFEYVESGPMGAEELAFRFAVNTINRNRTLLPNTTLTYDTQKINLYDSFEASKKACDQLSLGVAAIFGPSHSSSANAVQSICNALGVPHIQTRWKHQVSDNKDSFYVSLYPDFSSLSRAILDLVQFFKWKTVTVVYDDSTGLIRLQELIKAPSRYNLRLKIRQLPADTKDAKPLLKEMKRGKEFHVIFDCSHEMAAGILKQALAMGMMTEYYHYIFTTLDLFALDVEPYRYSGVNMTGFRILNTENTQVSSIIEKWSMERLQAPPKPDSGLLDGFMTTDAALMYDAVHVVSVAVQQFPQMTVSSLQCNRHKPWRFGTRFMSLIKEAHWEGLTGRITFNKTNGLRTDFDLDVISLKEEGLEKIGTWDPASGLNMTESQKGKPANITDSLSNRSLIVTTILEEPYVLFKKSDKPLYGNDRFEGYCIDLLRELSTILGFTYEIRLVEDGKYGAQDDANGQWNGMVRELIDHKADLAVAPLAITYVREKVIDFSKPFMTLGISILYRKPNGTNPGVFSFLNPLSPDIWMYILLAYLGVSCVLFVIARFSPYEWYNPHPCNPDSDVVENNFTLLNSFWFGVGALMQQGSELMPKALSTRIVGGIWWFFTLIIISSYTANLAAFLTVERMESPIDSADDLAKQTKIEYGAVEDGATMTFFKKSKISTYDKMWAFMSSRRQSVLVKSNEEGIQRVLTSDYAFLMESTTIEFVTQRNCNLTQIGGLIDSKGYGVGTPMGSPYRDKITIAILQLQEEGKLHMMKEKWWRGNGCPEEESKEASALGVQNIGGIFIVLAAGLVLSVFVAVGEFLYKSKKNAQLEKRAKTKLPQDYVFLPILESVSISTVLSSSPSSSSLSSCS

SEQ ID NO: 6228 - protein, 870 aa, Homo Sapiens
GGIFEYVESGPMGAEELAFRFAVNTINRNRTLLPNTTLTYDTQKINLYDSFEASKKACDQLSLGVAAIFGPSHSSSANAVQSICNALGVPHIQTRWKHQVSDNKDSFYVSLYPDFSSLSRAILDLVQFFKWKTVTVVYDDSTGLIRLQELIKAPSRYNLRLKIRQLPADTKDAKPLLKEMKRGKEFHVIFDCSHEMAAGILKQALAMGMMTEYYHYIFTTLDLFALDVEPYRYSGVNMTGFRILNTENTQVSSIIEKWSMERLQAPPKPDSGLLDGFMTTDAALMYDAVHVVSVAVQQFPQMTVSSLQCNRHKPWRFGTRFMSLIKEAHWEGLTGRITFNKTNGLRTDFDLDVISLKEEGLEKIGTWDPASGLNMTESQKGKPANITDSLSNRSLIVTTILEEPYVLFKKSDKPLYGNDRFEGYCIDLLRELSTILGFTYEIRLVEDGKYGAQDDANGQWNGMVRELIDHKADLAVAPLAITYVREKVIDFSKPFMTLGISILYRKPNGTNPGVFSFLNPLSPDIWMYILLAYLGVSCVLFVIARFSPYEWYNPHPCNPDSDVVENNFTLLNSFWFGVGALMQQGSELMPKALSTRIVGGIWWFFTLIIISSYTANLAAFLTVERMESPIDSADDLAKQTKIEYGAVEDGATMTFFKKSKISTYDKMWAFMSSRRQSVLVKSNEEGIQRVLTSDYAFLMESTTIEFVTQRNCNLTQIGGLIDSKGYGVGTPMGSPYRDKITIAILQLQEEGKLHMMKEKWWRGNGCPEEESKEASALGVQNIGGIFIVLAAGLVLSVFVAVGEFLYKSKKNAQLEKRSFCSAMVEELRMSLKCQRRLKHKPQAPVIVKTEEVINMHTFNDRRLPGKETMA

SEQ ID NO: 6229 - protein, 831 aa, Homo Sapiens
GGIFEYVESGPMGAEELAFRFAVNTINRNRTLLPNTTLTYDTQKINLYDSFEASKKACDQLSLGVAAIFGPSHSSSANAVQSICNALGVPHIQTRWKHQVSDNKDSFYVSLYPDFSSLSRAILDLVQFFKWKTVTVVYDDSTGLIRLQELIKAPSRYNLRLKIRQLPADTKDAKPLLKEMKRGKEFHVIFDCSHEMAAGILKQALAMGMMTEYYHYIFTTLDLFALDVEPYRYSGVNMTGFRILNTENTQVSSIIEKWSMERLQAPPKPDSGLLDGFMTTDAALMYDAVHVVSVAVQQFPQMTVSSLQCNRHKPWRFGTRFMSLIKEAHWEGLTGRITFNKTNGLRTDFDLDVISLKEEGLEKIGTWDPASGLNMTESQKGKPANITDSLSNRSLIVTTILEEPYVLFKKSDKPLYGNDRFEGYCIDLLRELSTILGFTYEIRLVEDGKYGAQDDANGQWNGMVRELIDHKADLAVAPLAITYVREKVIDFSKPFMTLGISILYRKPNGTNPGVFSFLNPLSPDIWMYILLAYLGVSCVLFVIARFSPYEWYNPHPCNPDSDVVENNFTLLNSFWFGVGALMQQGSELMPKALSTRIVGGIWWFFTLIIISSYTANLAAFLTVERMESPIDSADDLAKQTKIEYGAVEDGATMTFFKKSKISTYDKMWAFMSSRRQSVLVKSNEEGIQRVLTSDYAFLMESTTIEFVTQRNCNLTQIGGLIDSKGYGVGTPMGSPYRDKITIAILQLQEEGKLHMMKEKWWRGNGCPEEESKEASALGVQNIGGIFIVLAAGLVLSVFVAVGEFLYKSKKNAQLEKESSIWLVPPYHPDTV

SEQ ID NO: 6230 - protein, 182 aa, Homo Sapiens
IGTWDPASGLNMTESQKGKPANITDSLSNRSLIVTTILEEPYVLFKKSDKPLYGNDRFEGYCIDLLRELSTILGFTYEIRLVEDGKYGAQDDANGQWNGMVRELIDHKADLAVAPLAITYVREKVIDFSKPFMTLGISILYRKPNGTNPGVFSFLNPLSPDIWMYILLAYLGVSCVLFVIAR

SEQ ID NO: 6231 - protein, 892 aa, Homo Sapiens
MKIIFPILSNPVFRRTVKLLLCLLWIGYSQGTTHVLRFGGIFEYVESGPMGAEELAFRFAVNTINRNRTLLPNTTLTYDTQKINLYDSFEASKKACDQLSLGVAAIFGPSHSSSANAVQSICNALGVPHIQTRWKHQVSDNKDSFYVSLYPDFSSLSRAILDLVQFFKWKTVTVVYDDSTGLIRLQELIKAPSRYNLRLKIRQLPADTKDAKPLLKEMKRGKEFHVIFDCSHEMAAGILKQALAMGMMTEYYHYIFTTLDLFALDVEPYRYSGVNMTGFRILNTENTQVSSIIEKWSMERLQAPPKPDSGLLDGFMTTDAALMYDAVHVVSVAVQQFPQMTVSSLQCNRHKPWRFGTRFMSLIKEAHWEGLTGRITFNKTNGLRTDFDLDVISLKEEGLEKIGTWDPASGLNMTESQKGKPANITDSLSNRSLIVTTILEEPYVLFKKSDKPLYGNDRFEGYCIDLLRELSTILGFTYEIRLVEDGKYGAQDDANGQWNGMVRELIDHKADLAVAPLAITYVREKVIDFSKPFMTLGISILYRKPNGTNPGVFSFLNPLSPDIWMYILLAYLGVSCVLFVIARFSPYEWYNPHPCNPDSDVVENNFTLLNSFWFGVGALMQQGSELMPKALSTRIVGGIWWFFTLIIISSYTANLAAFLTVERMESPIDSADDLAKQTKIEYGAVEDGATMTFFKKSKISTYDKMWAFMSSRRQSVLVKSNEEGIQRVLTSDYAFLMESTTIEFVTQRNCNLTQIGGLIDSKGYGVGTPMGSPYRDKITIAILQLQEEGKLHMMKEKWWRGNGCPEEESKEASALGVQNIGGIFIVLAAGLVLSVFVAVGEFLYKSKKNAQLEKRAKTKLPQDYVFLPILESVSISTVLSSSPSSSSLSSCS

SEQ ID NO: 6232 - protein, 353 aa, Homo Sapiens
MKIIFPILSNPVFRRTVKLLLCLLWIGYSQGTTHVLRFGGIFEYVESGPMGAEELAFRFAVNTINRNRTLLPNTTLTYDTQKINLYDSFEASKKACDQLSLGVAAIFGPSHSSSANAVQSICNALGVPHIQTRWKHQVSDNKDSFYVSLYPDFSSLSRAILDLVQFFKWKTVTVVYDDSTGLIRLQELIKAPSRYNLRLKIRQLPADTKDAKPLLKEMKRGKEFHVIFDCSHEMAAGILKQALAMGMMTEYYHYIFTTLDLFALDVEPYRYSGVNMTGFRILNTENTQVSSIIEKWSMERLQAPPKPDSGLLDGFMTMEFHSCCPGWSAMARSQLTATSASWVQAILLPQPPE

SEQ ID NO: 6233 - protein, 869 aa, Homo Sapiens
MKIIFPILSNPVFRRTVKLLLCLLWIGYSQGTTHVLRFGGIFEYVESGPMGAEELAFRFAVNTINRNRTLLPNTTLTYDTQKINLYDSFEASKKACDQLSLGVAAIFGPSHSSSANAVQSICNALGVPHIQTRWKHQVSDNKDSFYVSLYPDFSSLSRAILDLVQFFKWKTVTVVYDDSTGLIRLQELIKAPSRYNLRLKIRQLPADTKDAKPLLKEMKRGKEFHVIFDCSHEMAAGILKQALAMGMMTEYYHYIFTTLDLFALDVEPYRYSGVNMTGFRILNTENTQVSSIIEKWSMERLQAPPKPDSGLLDGFMTTDAALMYDAVHVVSVAVQQFPQMTVSSLQCNRHKPWRFGTRFMSLIKEAHWEGLTGRITFNKTNGLRTDFDLDVISLKEEGLEKIGTWDPASGLNMTESQKGKPANITDSLSNRSLIVTTILEEPYVLFKKSDKPLYGNDRFEGYCIDLLRELSTILGFTYEIRLVEDGKYGAQDDANGQWNGMVRELIDHKADLAVAPLAITYVREKVIDFSKPFMTLGISILYRKPNGTNPGVFSFLNPLSPDIWMYILLAYLGVSCVLFVIARFSPYEWYNPHPCNPDSDVVENNFTLLNSFWFGVGALMQQGSELMPKALSTRIVGGIWWFFTLIIISSYTANLAAFLTVERMESPIDSADDLAKQTKIEYGAVEDGATMTFFKKSKISTYDKMWAFMSSRRQSVLVKSNEEGIQRVLTSDYAFLMESTTIEFVTQRNCNLTQIGGLIDSKGYGVGTPMGSPYRDKITIAILQLQEEGKLHMMKEKWWRGNGCPEEESKEASALGVQNIGGIFIVLAAGLVLSVFVAVGEFLYKSKKNAQLEKESSIWLVPPYHPDTV

SEQ ID NO: 6234 - protein, 908 aa, Homo Sapiens
MKIIFPILSNPVFRRTVKLLLCLLWIGYSQGTTHVLRFGGIFEYVESGPMGAEELAFRFAVNTINRNRTLLPNTTLTYDTQKINLYDSFEASKKACDQLSLGVAAIFGPSHSSSANAVQSICNALGVPHIQTRWKHQVSDNKDSFYVSLYPDFSSLSRAILDLVQFFKWKTVTVVYDDSTGLIRLQELIKAPSRYNLRLKIRQLPADTKDAKPLLKEMKRGKEFHVIFDCSHEMAAGILKQALAMGMMTEYYHYIFTTLDLFALDVEPYRYSGVNMTGFRILNTENTQVSSIIEKWSMERLQAPPKPDSGLLDGFMTTDAALMYDAVHVVSVAVQQFPQMTVSSLQCNRHKPWRFGTRFMSLIKEAHWEGLTGRITFNKTNGLRTDFDLDVISLKEEGLEKIGTWDPASGLNMTESQKGKPANITDSLSNRSLIVTTILEEPYVLFKKSDKPLYGNDRFEGYCIDLLRELSTILGFTYEIRLVEDGKYGAQDDANGQWNGMVRELIDHKADLAVAPLAITYVREKVIDFSKPFMTLGISILYRKPNGTNPGVFSFLNPLSPDIWMYILLAYLGVSCVLFVIARFSPYEWYNPHPCNPDSDVVENNFTLLNSFWFGVGALMQQGSELMPKALSTRIVGGIWWFFTLIIISSYTANLAAFLTVERMESPIDSADDLAKQTKIEYGAVEDGATMTFFKKSKISTYDKMWAFMSSRRQSVLVKSNEEGIQRVLTSDYAFLMESTTIEFVTQRNCNLTQIGGLIDSKGYGVGTPMGSPYRDKITIAILQLQEEGKLHMMKEKWWRGNGCPEEESKEASALGVQNIGGIFIVLAAGLVLSVFVAVGEFLYKSKKNAQLEKRSFCSAMVEELRMSLKCQRRLKHKPQAPVIVKTEEVINMHTFNDRRLPGKETMA

SEQ ID NO: 6235 - protein, 46 aa, Homo Sapiens
ANLAAFMIQEEYVDQVSGLSDKKMRTLRLRRSIFPKVTKLVTEPGF

SEQ ID NO: 6236 - protein, 35 aa, Homo Sapiens
MKPRAECCSPKFWLVLAVLAVSGSRARSQKSPPSI

SEQ ID NO: 6237 - protein, 35 aa, Homo Sapiens; identical to SEQ ID NO: 6236

SEQ ID NO: 6238 - protein, 1484 aa, Homo Sapiens [sequence omitted]

SEQ ID NO: 6239 - protein, 70 aa, Homo Sapiens [sequence omitted]

SEQ ID NO: 6240 - protein, 435 aa, Homo Sapiens
MGSLLALLALLLLWGAVAEGPAKKVLTLEGDLVLGGLFPVHQKGGPAEDCGPVNEHRGIQRLEAMLFALDRINRDPHLLPGVRLGAHILDSCSKDTHALEQALDFVRASLSRGADGSRHICPDGSYATHGDAPTAITGVIGGSYSDVSIQVANLLRLFQIPQISYASTSAKLSDKSRYDYFARTVPPDFFQAKAMAEILRFFNWTYVSTVASEGDYGETGIEAFELEARARNICVATSEKVGRAMSRAAFEGVVRALLQKPSARVAVLFTRSEDARELLAASQRLNASFTWVASDGWGALESVVAGSEGAAEGAITIELASYPISDFASYFQSLDPWNNSRNPWFREFWEQRFRCSFRQRDCAAHSLRAVPFEQESKIMFVVNAVYAMAHALHNMHRALCPNTTRLCDAMRPVNGRRLYKDFVLNVKFDGDLKVS

SEQ ID NO: 6241 - protein, 872 aa, Homo Sapiens [sequence omitted]

SEQ ID NO: 6242 - protein, 594 aa, Homo Sapiens
MGSLLALLALLLLWGAVAEGPAKKVLTLEGDLVLGGLFPVHQKGGPAEDCGPVNEHRGIQRLEAMLFALDRINRDPHLLPGVRLGAHILDSCSKDTHALEQALDFVRASLSRGADGSRHICPDGSYATHGDAPTAITGVIGGSYSDVSIQVANLLRLFQIPQISYASTSAKLSDKSRYDYFARTVPPDFFQAKAMAEILRFFNWTYVSTVASEGDYGETGIEAFELEARARNICVATSEKVGRAMSRAAFEGVVRALLQKPSARVAVLFTRSEDARELLAASQRLNASFTWVASDGWGALESVVAGSEGAAEGAITIELASYPISDFASYFQSLDPWNNSRNPWFREFWEQRFRCSFRQRDCAAHSLRAVPFEQESKIMFVVNAVYAMAHALHNMHRALCPNTTRLCDAMRPVNGRRLYKDFVLNVKFDAPFRPADTHNEVRFDRFGDGIGRYNIFTYLRAGSGRYRYQKTRKCPENFNEAKFIGFTMYTTCIIWLAFLPIFYVTSSDYRVQTTTMCVSVSLSGSVVLGCLFAPKLHIILFQPQKNVVSHRAPTSRFGSAAARASSSLGQGSGSQFVPTVCNGREVVDSTTSSL

SEQ ID NO: 6243 - protein, 81 aa, Homo Sapiens
MKMLTRLQVLTLALFSKGFLLSLGDHNFLRREIKIEGDLVLGGLFPINEKGTGTEECGRINEDRGIQRLEAMLFAIDEINK

SEQ ID NO: 6244 - protein, 87 aa, Homo Sapiens
MKMLTRLQVLTLALFSKGFLLSLGDHNFLRREIKIEGDLVLGGLFPINEKGTGTEECGRINEDRGIQRLEAMLFAIDEINKDDYLLP

SEQ ID NO: 6245 - protein, 879 aa, Homo Sapiens
MKMLTRLQVLTLALFSKGFLLSLGDHNFLRREIKIEGDLVLGGLFPINEKGTGTEECGRINEDRGIQRLEAMLFAIDEINKDDYLLPGVKLGVHILDTCSRDTYALEQSLEFVRASLTKVDEAEYMCPDGSYAIQENIPLLIAGVIGGSYSSVSIQVANLLRLFQIPQISYASTSAKLSDKSRYDYFARTVPPDFYQAKAMAEILRFFNWTYVSTVASEGDYGETGIEAFEQEARLRNICIATAEKVGRSNIRKSYDSVIRELLQKPNARVVVLFMRSDDSRELIAAASRANASFTWVASDGWGAQESIIKGSEHVAYGAITLELASQPVRQFDRYFQSLNPYNNHRNPWFRDFWEQKFQCSLQNKRNHRRVCDKHLAIDSSNYEQESKIMFVVNAVYAMAHALHKMQRTLCPNTTKLCDAMKILDGKKLYKDYLLKINFTAPFNPNKDADSIVKFDTFGDGMGRYNVFNFQNVGGKYSYLKVGHWAETLSLDVNSIHWSRNSVPTSQCSDPCAPNEMKNMQPGDVCCWICIPCEPYEYLADEFTCMDCGSGQWPTADLTGCYDLPEDYIRWEDAWAIGPVTIACLGFMCTCMVVTVFIKHNNTPLVKASGRELCYILLFGVGLSYCMTFFFIAKPSPVICALRRLGLGSSFAICYSALLTKTNCIARIFDGVKNGAQRPKFISPSSQVFICLGLILVQIVMVSVWLILEAPGTRRYTLAEKRETVILKCNVKDSSMLISLTYDVILVILCTVYAFKTRKCPENFNEAKFIGFTMYTTCIIWLAFLPIFYVTSSDYRVQTTTMCISVSLSGFVVLGCLFAPKVHIILFQPQKNVVTHRLHLNRFSVSGTGTTYSQSSASTYVPTVCNGREVLDSTTSSL

SEQ ID NO: 6246 - protein, 537 aa, Homo Sapiens
MKMLTRLQVLTLALFSKGFLLSLGDHNFLRREIKIEGDLVLGGLFPINEKGTGTEECGRINEDRGIQRLEAMLFAIDEINKDDYLLPGVKLGVHILDTCSRDTYALEQSLEFVRASLTKVDEAEYMCPDGSYAIQENIPLLIAGVIGGSYSSVSIQVANLLRLFQIPQISYASTSAKLSDKSRYDYFARTVPPDFYQAKAMAEILRFFNWTYVSTVASEGDYGETGIEAFEQEARLRNICIATAEKVGRSNIRKSYDSVIRELLQKPNARVVVLFMRSDDSRELIAAASRANASFTWVASDGWGAQESIIKGSEHVAYGAITLELASQPVRQFDRYFQSLNPYNNHRNPWFRDFWEQKFQCSLQNKRNHRRVCDKHLAIDSSNYEQESKIMFVVNAVYAMAHALHKMQRTLCPNTTKLCDAMKILDGKKLYKDYLLKINFTGADDNHVHLCQPEWLCGLGLFVCTQGSHHPVSTPEECCHTQTAPQQVQCQWNWDHILSVLCKHVCANGVQWAGSPRLHHLISVIVNCSSVLVFLDC

SEQ ID NO: 6247 - protein, 171 aa, Homo Sapiens
MSQSPGAGSPPPLPPRSAPVPARSCRCEVANLLRLFQIPQISYASTSAKLSDKSRYDYFARTVPPDFYQAKAMAEILRFFNWTYVSTVASEGDYGETGIEAFEQEARLRNICIATAEKVGRSNIRKSYDSVIRELLQKPNARVVVLFMRSDDSRELIAAASRANASFTWVA

SEQ ID NO: 6248 - protein, 1212 aa, Homo Sapiens
MVLLLILSVLLLKEDVRGSAQSSERRVVAHMPGDIIIGALFSVHHQPTVDKVHERKCGAVREQYGIQRVEAMLHTLERINSDPTLLPNITLGCEIRDSCWHSAVALEQSIEFIRDSLISSEEEEGLVRCVDGSSSSFRSKKPIVGVIGPGSSSVAIQVQNLLQLFNIPQIAYSATSMDLSDKTLFKYFMRVVPSDAQQARAMVDIVKRYNWTYVSAVHTEGNYGESGMEAFKDMSAKEGICIAHSYKIYSNAGEQSFDKLLKKLTSHLPKARVVACFCEGMTVRGLLMAMRRLGLAGEFLLLGSDGWADRYDVTDGYQREAVGGITIKLQSPDVKWFDDYYLKLRPETNHRNPWFQEFWQHRFQCRLEGFPQENSKYNKTCNSSLTLKTHHVQDSKMGFVINAIYSMAYGLHNMQMSLCPGYAGLCDAMKPIDGRKLLESLMKTNFTGVSGDTILFDENGDSPGRYEIMNFKEMGKDYFDYINVGSWDNGELKMDDDEVWSKKSNIIRSVCSEPCEKGQIKVIRKGEVSCCWTCTPCKENEYVFDEYTCKACQLGSWPTDDLTGCDLIPVQYLRWGDPEPIAAVVFACLGLLATLFVTVVFIIYRDTPVVKSSSRELCYIILAGICLGYLCTFCLIAKPKQIYCYLQRIGIGLSPAMSYSALVTKTNRIARILAGSKKKICTKKPRFMSACAQLVIAFILICIQLGIIVALFIMEPPDIMHDYPSIREVYLICNTTNLGVVTPLGYNGLLILSCTFYAFKTRNVPANFNEAKYIAFTMYTTCIIWLAFVPIYFGSNYKIITMCFSVSLSATVALGCMFVPKVYIILAKPERNVRSAFTTSTVVRMHVGDGKSSSAASRSSSLVNLWKRRGSSGETLRYKDRRLAQHKSEIECFTPKGSMGNGGRATMSSSNGKSVTWAQNEKSSRGQHLWQRLSIHINKKENPNQTAVIKPFPKSTESRGLGAGAGAGGSAGGVGATGGAGCAGAGPGGPESPDAGPKALYDVAEAEEHFPAPARPRSPSPISTLSHRAGSASRTDDDVPSLHSEPVARSSSSQGSLMEQISSVVTRFTANISELNSMMLSTAAPSPGVGAPLCSSYLIPKEIQLPTTMTTFAEIQPLPAIEVTGGAQPAAGAQAAGDAARESPAAGPEAAAAKPDLEELVALTPPSPFRDSVDSGSTTPNSPVSESALCIPSSPKYDTLIIRDYTQSSSSL

SEQ ID NO: 6249 - protein, 1180 aa, Homo Sapiens
MVLLLILSVLLLKEDVRGSAQSSERRVVAHMPGDIIIGALFSVHHQPTVDKVHERKCGAVREQYGIQRVEAMLHTLERINSDPTLLPNITLGCEIRDSCWHSAVALEQSIEFIRDSLISSEEEEGLVRCVDGSSSSFRSKKPIVGVIGPGSSSVAIQVQNLLQLFNIPQIAYSATSMDLSDKTLFKYFMRVVPSDAQQARAMVDIVKRYNWTYVSAVHTEGNYGESGMEAFKDMSAKEGICIAHSYKIYSNAGEQSFDKLLKKLTSHLPKARVVACFCEGMTVRGLLMAMRRLGLAGEFLLLGSDGWADRYDVTDGYQREAVGGITIKLQSPDVKWFDDYYLKLRPETNHRNPWFQEFWQHRFQCRLEGFPQENSKYNKTCNSSLTLKTHHVQDSKMGFVINAIYSMAYGLHNMQMSLCPGYAGLCDAMKPIDGRKLLESLMKTNFTGVSGDTILFDENGDSPGRYEIMNFKEMGKDYFDYINVGSWDNGELKMDDDEVWSKKSNIIRSVCSEPCEKGQIKVIRKGEVSCCWTCTPCKENEYVFDEYTCKACQLGSWPTDDLTGCDLIPVQYLRWGDPEPIAAVVFACLGLLATLFVTVVFIIYRDTPVVKSSSRELCYIILAGICLGYLCTFCLIAKPKQIYCYLQRIGIGLSPAMSYSALVTKTNRIARILAGSKKKICTKKPRFMSACAQLVIAFILICIQLGIIVALFIMEPPDIMHDYPSIREVYLICNTTNLGVVTPLGYNGLLILSCTFYAFKTRNVPANFNEAKYIAFTMYTTCIIWLAFVPIYFGSNYKIITMCFSVSLSATVALGCMFVPKVYIILAKPERNVRSAFTTSTVVRMHVGDGKSSSAASRSSSLVNLWKRRGSSGETLSSNGKSVTWAQNEKSSRGQHLWQRLSIHINKKENPNQTAVIKPFPKSTESRGLGAGAGAGGSAGGVGATGGAGCAGAGPGGPESPDAGPKALYDVAEAEEHFPAPARPRSPSPISTLSHRAGSASRTDDDVPSLHSEPVARSSSSQGSLMEQISSVVTRFTANISELNSMMLSTAAPSPGVGAPLCSSYLIPKEIQLPTTMTTFAEIQPLPAIEVTGGAQPAAGAQAAGDAARESPAAGPEAAAAKPDLEELVALTPPSPFRDSVDSGSTTPNSPVSESALCIPSSPKYDTLIIRDYTQSSSSL

SEQ ID NO: 6250 - protein, 1180 aa, Homo Sapiens; identical to SEQ ID NO: 6249

SEQ ID NO: 6251 - protein, 298 aa, Homo Sapiens
MVLLLILSVLLLKEDVRGSAQSSERRVVAHMPGDIIIGALFSVHHQPTVDKVHERKCGAVREQYGIQRVEAMLHTLERINSDPTLLPNITLGCEIRDSCWHSAVALEQSIEFIRDSLISSEEEEGLVRCVDGSSSSFRSKKPIVGVIGPGSSSVAIQVQNLLQLFNIPQIAYSATSMDLSDKTLFKYFMRVVPSDAQQARAMVDIVKRYNWTYVSAVHTEGRGTKKEEMRKRDQTLMLSFMRCVFLRFEEIRWNDSLVYDALENENIQVLSLCFPSSAVIQINTFLSPIALINRLNVT

SEQ ID NO: 6252 - protein, 87 aa, Homo Sapiens
  misc_feature (1)..(1): Xaa can be any naturally occurring amino acid
XQIAYSATSMDLSDKTLFKYFMRVVPSDAQQARAMVDIVKRYNWTYVSAVHTEGRGTKKEEMRKRDQTLMLSFMRFKLFSCLSLQRS

SEQ ID NO: 6253 - protein, 37 aa, Homo Sapiens
MWTLVSWVALTAGLVAGTRCPDGQFCPVACCLDPGGA

SEQ ID NO: 6254 - protein, 62 aa, Homo Sapiens
MWTLVSWVALTAGLVAGTRCPDGQFCPVACCLDPGGASYSCCRPLLDKWPTTLSRHLGGPCQ

SEQ ID NO: 6255 - protein, 172 aa, Homo Sapiens
MWTLVSWVALTAGLVAGTRCPDGQFCPVACCLDPGGASYSCCRPLLDKWPTTLSRHLGGPCQVDAHCSAGHSCIFTVSGTSSCCPFPEASCCEDRVHCCPHGAFCDLVHTRCITPTGTHPLAKKLPAQRTNRAVALSSSVMCPDARSRCPDGSTCCELPSGKYGCCPMPNAT

SEQ ID NO: 6256 - protein, 111 aa, Homo Sapiens
MWTLVSWVALTAGLVAGTRCPDGQFCPVACCLDPGGASYSCCRPLLDKWPTTLSRHLGGPCQVDAHCSAGHSCIFTVSGTSSCCPFPEAVACGDGHHCCPRGFHCSADGRS

SEQ ID NO: 6257 - protein, 135 aa, Homo Sapiens
MWTLVSWVALTAGLVAGTRCPDGQFCPVACCLDPGGASYSCCRPLLDKWPTTLSRHLGGPCQVDAHCSAGHSCIFTVSGTSSCCPFPEAVACGDGHHCCPRGFHCSADGRSCFQRSGNNSVGAIQCPDSQFECPD

SEQ ID NO: 6258 - protein, 136 aa, Homo Sapiens
MWTLVSWVALTAGLVAGTRCPDGQFCPVACCLDPGGASYSCCRPLLDKWPTTLSRHLGGPCQVDAHCSAGHSCIFTVSGTSSCCPFPEAVACGDGHHCCPRGFHCSADGRSCFQRSGNNSVGAIQCPDSQFECPDF

SEQ ID NO: 6259 - protein, 142 aa, Homo Sapiens
MWTLVSWVALTAGLVAGTRCPDGQFCPVACCLDPGGASYSCCRPLLDKWPTTLSRHLGGPCQVDAHCSAGHSCIFTVSGTSSCCPFPEAVACGDGHHCCPRGFHCSADGRSCFQRSGNNSVGAIQCPDSQFECPDFSTCCVM

SEQ ID NO: 6260 - protein, 149 aa, Homo Sapiens
MWTLVSWVALTAGLVAGTRCPDGQFCPVACCLDPGGASYSCCRPLLDKWPTTLSRHLGGPCQVDAHCSAGHSCIFTVSGTSSCCPFPEAVACGDGHHCCPRGFHCSADGRSCFQRSGNNSVGAIQCPDSQFECPDFSTCCVMVDGSWGC

SEQ ID NO: 6261 - protein, 163 aa, Homo Sapiens
MWTLVSWVALTAGLVAGTRCPDGQFCPVACCLDPGGASYSCCRPLLDKWPTTLSRHLGGPCQVDAHCSAGHSCIFTVSGTSSCCPFPEAVACGDGHHCCPRGFHCSADGRSCFQRSGNNSVGAIQCPDSQFECPDFSTCCVMVDGSWGCCPMPQASCCEDRVH

SEQ ID NO: 6262 - protein, 593 aa, Homo Sapiens
MWTLVSWVALTAGLVAGTRCPDGQFCPVACCLDPGGASYSCCRPLLDKWPTTLSRHLGGPCQVDAHCSAGHSCIFTVSGTSSCCPFPEAVACGDGHHCCPRGFHCSADGRSCFQRSGNNSVGAIQCPDSQFECPDFSTCCVMVDGSWGCCPMPQASCCEDRVHCCPHGAFCDLVHTRCITPTGTHPLAKKLPAQRTNRAVALSSSVMCPDARSRCPDGSTCCELPSGKYGCCPMPNATCCSDHLHCCPQDTVCDLIQSKCLSKENATTDLLTKLPAHTVGDVKCDMEVSCPDGYTCCRLQSGAWGCCPFTQAVCCEDHIHCCPAGFTCDTQKGTCEQGPHQVPWMEKAPAHLSLPDPQALKRDVPCDNVSSCPSSDTCCQLTSGEWGCCPIPEAVCCSDHQHCCPQGYTCVAEGQCQRGSEIVAGLEKMPARRASLSHPRDIGCDQHTSCPVGQTCCPSLGGSWACCQLPHAVCCEDRQHCCPAGYTCNVKARSCEKEVVSAQPATFLARSPHVGVKDVECGEGHFCHDNQTCCRDNRQGWACCPYRQGVCCADRRHCCPAGFRCAARGTKCLRREAPRWDAPLRDPALRQLL

SEQ ID NO: 6263 - protein, 438 aa, Homo Sapiens
MWTLVSWVALTAGLVAGTRCPDGQFCPVACCLDPGGASYSCCRPLLDKWPTTLSRHLGGPCQVDAHCSAGHSCIFTVSGTSSCCPFPEAVACGDGHHCCPRGFHCSADGRSCFQRSGNNSVGAIQCPDSQFECPDFSTCCVMVDGSWGCCPMPQASCCEDRVHCCPHGAFCDLVHTRCITPTGTHPLAKKLPAQRTNRAVALSSSVMCPDARSRCPDGSTCCELPSGKYGCCPMPNATCCSDHLHCCPQDTVCDLIQSKCLSKENATTDLLTKLPAHTVGDVKCDMEVSCPDGYTCCRLQSGAWGCCPFTQAVCCEDHIHCCPAGFTCDTQKGTCEQGPHQVPWMEKAPAHLSLPDPQALKRDVPCDNVSSCPSSDTCCRDNRQGWACCPYRQGVCCADRRHCCPAGFRCAARGTKCLRREAPRWDAPLRDPALRQLL

SEQ ID NO: 6264 - protein, 436 aa, Homo Sapiens
MWTLVSWVALTAGLVAGTRCPDGQFCPVACCLDPGGASYSCCRPLLDKWPTTLSRHLGGPCQVDAHCSAGHSCIFTVSGTSSCCPFPEAVACGDGHHCCPRGFHCSADGRSCFQRSGNNSVGAIQCPDSQFECPDFSTCCVMVDGSWGCCPMPQAVCCEDHIHCCPAGFTCDTQKGTCEQGPHQVPWMEKAPAHLSLPDPQALKRDVPCDNVSSCPSSDTCCQLTSGEWGCCPIPEAVCCSDHQHCCPQGYTCVAEGQCQRGSEIVAGLEKMPARRASLSHPRDIGCDQHTSCPVGQTCCPSLGGSWACCQLPHAVCCEDRQHCCPAGYTCNVKARSCEKEVVSAQPATFLARSPHVGVKDVECGEGHFCHDNQTCCRDNRQGWACCPYRQGVCCADRRHCCPAGFRCAARGTKCLRREAPRWDAPLRDPALRQLL

SEQ ID NO: 6265 - protein, 189 aa, Homo Sapiens
MWTLVSWVALTAGLVAGTRCPDGQFCPVACCLDPGGASYSCCRPLLDKWPTTLSRHLGGPCQVDAHCSAGHSCIFTVSGTSSCCPFPEAVACGDGHHCCPRGFHCSADGRSCFQRSGNNSVGAIQCPDSQFECPDFSTCCVMVDGSWGCCPMPQGALLSARCLLRPGSHPLHHTHGHPPPGKEAPCPED

SEQ ID NO: 6266 - protein, 191 aa, Homo Sapiens
MWTLVSWVALTAGLVAGTRCPDGQFCPVACCLDPGGASYSCCRPLLDKWPTTLSRHLGGPCQVDAHCSAGHSCIFTVSGTSSCCPFPEIKGPCQCRFLCVPQAVACGDGHHCCPRGFHCSADGRSCFQRSGNNSVGAIQCPDSQFECPDFSTCCVMVDGSWGCCPMPQASCCEDRVHCCPHGAFCDLVHTR

SEQ ID NO: 6267 - protein, 388 aa, Homo Sapiens
  misc_feature (1)..(1): Xaa can be any naturally occurring amino acid
XAKKLPAQRTNRAVALSSSVMCPDARSRCPDGSTCCELPSGKYGCCPMPNATCCSDHLHCCPQDTVCDLIQSKCLSKENATTDLLTKLPAHTVGDVKCDMEVSCPDGYTCCRLQSGAWGCCPFTQAVCCEDHIHCCPAGFTCDTQKGTCEQGPHQVPWMEKAPAHLSLPDPQALKRDVPCDNVSSCPSSDTCCQLTSGEWGCCPIPEAVCCSDHQHCCPQGYTCVAEGQCQRGSEIVAGLEKMPARRASLSHPRDIGCDQHTSCPVGQTCCPSLGGSWACCQLPHAVCCEDRQHCCPAGYTCNVKARSCEKEVVSAQPATFLARSPHVGVKDVECGEGHFCHDNQTCCRDNRQGWACCPYRQVSANPHPGAGYGQGPGPTSSNPLAPL

SEQ ID NO: 6268 - protein, 110 aa, Homo Sapiens
  misc_feature (1)..(1): Xaa can be any naturally occurring amino acid
XCPSLGGSWACCQLPHAVCCEDRQHCCPAGYTCNVKARSCEKEVVSAQPATFLARSPHVGVKDVECGEGHFCHDNQTCCRDNRQGWACCPYRQPGVPSVCAGRPRAGTPL

SEQ ID NO: 6269 - protein, 138 aa, Homo Sapiens
MRGRELPLVLLALVLCLAPRGRAVPLPAGGGTVLTKMYPRGNHWAVGHLMGKKSTGESSSVSERGSLKQQLREYIRWEEAARNLLGLIEAKENRNHQPPQPKALGNQQPSWDSEDSSNFKDLVDSLLQVLNVKEGTPS

SEQ ID NO: 6270 - protein, 141 aa, Homo Sapiens
MRGRELPLVLLALVLCLAPRGRAVPLPAGGGTVLTKMYPRGNHWAVGHLMGKKSTGESSSVSERGSLKQQLREYIRWEEAARNLLGLIEAKENRNHQPPQPKALGNQQPSWDSEDSSNFKDVGSKGKGSQREGRNPQLNQQ

SEQ ID NO: 6271 - protein, 148 aa, Homo Sapiens
MRGRELPLVLLALVLCLAPRGRAVPLPAGGGTVLTKMYPRGNHWAVGHLMGKKSTGESSSVSERGSLKQQLREYIRWEEAARNLLGLIEAKENRNHQPPQPKALGNQQPSWDSEDSSNFKDVGSKGKVGRLSAPGSQREGRNPQLNQQ

SEQ ID NO: 6272 - protein, 96 aa, Homo Sapiens
  misc_feature (1)..(1): Xaa can be any naturally occurring amino acid
XHLMGKKSTGESSSVSERGSLKQQLREYIRWEEAARNLLGLIEAKENRNHQPPQPKALGNQQPSWDSEDSSNFKDVGSKGKDSLLQVLNVKEGTPS

SEQ ID NO: 6273 - protein, 35 aa, Homo Sapiens
  misc_feature (1)..(1): Xaa can be any naturally occurring amino acid
XISSLRGIQRIAATSKILSAPGSQREGRNPQLNQQ

SEQ ID NO: 6274 - protein, 496 aa, Homo Sapiens
MFAKATRNFLREVDADGDLIAVSNLNDSDKLQLLSLVTKKKRFWCWQRPKYQFLSLTLGDVLIEDQFPSPVVVESDFVKYEGKFANHVSGTLETALGKVKLNLGGSSRVESQSSFGTLRKQEVDLQQLIRDSAERTINLRNPVLQQVLEGRNEVLCVLTQKITTMQKCVISEHMQVEEKCGGIVGIQTKTVQVSATEDGNVTKDSNVVLEIPAATTIAYGVIELYVKLDGQFEFCLLRGKQGGFENKKRIDSVYLDPLVFREFAFIDMPDAAHGISSQDGPLSVLKQATLLLERNFHPFAELPEPQQTALSDIFQAVLFDDELLMVLEPVCDDLVSGLSPTVAVLGELKPRQQQDLVAFLQLVGCSLQGGCPGPEDAGSKQLFMTAYFLVSALAEMPDSAAALLGTCCKLQIIPTLCHLLRALSDDGVSDLEDPTLTPLKDTERFGIVQRLFASADISLERLKSSVKAVILKDSKVFPLLLCITLNGLCALGREHS

SEQ ID NO: 6275 - protein, 356 aa, Homo Sapiens
MFAKATRNFLREVDADGDLIAVSNLNDSDKLQLLSLVTKKKRFWCWQRPKYQFLSLTLGDVLIEDQFPSPVVVESDFVKYEGKFANHVSGTLETALGKVKLNLGGSSRVESQSSFGTLRKQEVDLQQLIRDSAERTINLRNPVLQQVLEGRNEVLCVLTQKITTMQKCVISEHMQVEEKCGGIVGIQTKTVQVSATEDGNVTKDSNVVLEIPAATTIAYGVIELYVKLDGQFEFCLLRGKQGGFENKKRIDSVYLDPLVFREFAFIDMPDAAHGISSQDGPLSVLKQATLLLERNFHPFAELPEPQQTALSDIFQAVLFDDELLMVLEPVVSPETSQGSVFTGVFWNRGGGRMELC

SEQ ID NO: 6276 - protein, 496 aa, Homo Sapiens; identical to SEQ ID NO: 6274

SEQ ID NO: 6277 - protein, 496 aa, Homo Sapiens; identical to SEQ ID NO: 6274

SEQ ID NO: 6278 - protein, 332 aa, Homo Sapiens
MQKCVISEHMQVEEKCGGIVGIQTKTVQVSATEDGNVTKDSNVVLEIPAATTIAYGVIELYVKLDGQFEFCLLRGKQGGFENKKRIDSVYLDPLVFREFAFIDMPDAAHGISSQDGPLSVLKQATLLLERNFHPFAELPEPQQTALSDIFQAVLFDDELLMVLEPVCDDLVSGLSPTVAVLGELKPRQQQDLVAFLQLVGCSLQGGCPGPEDAGSKQLFMTAYFLVSALAEMPDSAAALLGTCCKLQIIPTLCHLLRALSDDGVSDLEDPTLTPLKDTERFGIVQRLFASADISLERLKSSVKAVILKDSKVFPLLLCITLNGLCALGREHS

SEQ ID NO: 6279 - protein, 332 aa, Homo Sapiens; identical to SEQ ID NO: 6278

SEQ ID NO: 6280 - protein, 55 aa, Homo Sapiens
QLFMTAYFLVSALAEMPDSAAALLGTCCKLQIIPTLCHLVSNLPGGTLEWIGMGK

SEQ ID NO: 6281 - protein, 155 aa, Homo Sapiens
  misc_feature (1)..(1): Xaa can be any naturally occurring amino acid
XAATTIAYGVIELYVKLDGQFEFCLLRGKQGGFENKKRIDSVYLDPLVFREFAFIDMPDAAHGISSQDGPLSVLKQATLLLERNFHPFAELPEPQQTALSDIFQAVLFDDELLMVLEPVKDILGRSSSLTLSCTNGESHTSCQPSSHPDSVSSLS

SEQ ID NO: 6282 - protein, 192 aa, Homo Sapiens
  misc_feature (1)..(1): Xaa can be any naturally occurring amino acid
XEEKCGGIVGIQTKTVQVSATEDGNVTKDSNVVLEIPAATTIAYGVIELYVKLDGQFEFCLLRGKQGGFENKKRIDSVYLDPLVFREFAFIDMPDAAHGISSQDGPLSVLKQATLLLERNFHPFAELPEPQQTALSDIFQAVLFDDELLMVLEPVQKDILGRSSSLTLSCTNGESHTSCQPSSHPDSVSSLS

SEQ ID NO: 6283 - protein, 211 aa, Homo Sapiens
MAKMELSKAFSGQRTLLSAILSMLSLSFSTTSLLSNYWFVGTQKVPKPLCEKGLAAKCFDMPVSLDGDTNTSTQEVVQYNWETGDDRFSFRSFRSGMWLSCEETVEEPAKSEMEEELKKCVYLHLYLLLCHLALLHPQSWKQFRALRSSGTAAAKGERCRSFIELTPPAKRGEKGLLEFATLQGPCHPTLRFGGKRLMEKASLPSPPLGLC

SEQ ID NO: 6284 - protein, 298 aa, Homo Sapiens
MAKMELSKAFSGQRTLLSAILSMLSLSFSTTSLLSNYWFVGTQKVPKPLCEKGLAAKCFDMPVSLDGDTNTSTQEVVQYNWETGDDRFSFRSFRSGMWLSCEETVEEPALLHPQSWKQFRALRSSGTAAAKGERCRSFIELTPPAKRGLLGMVAHMMYSQVFQATVNLGPEDWRPHVWNYGWAFYMAWLSFTCCMASAVTTFNTYTRMVLEFKCKHSKSFKENPNCLPHHHQCFPRRLSSAAPTVGPLTSYHQYHNQPIHSVSEGVDFYSELRNKGFQRGASQELKEAVRSSVEEEQC

SEQ ID NO: 6285 - protein, 326 aa, Homo Sapiens
MAKMELSKAFSGQRTLLSAILSMLSLSFSTTSLLSNYWFVGTQKVPKPLCEKGLAAKCFDMPVSLDGDTNTSTQEVVQYNWETGDDRFSFRSFRSGMWLSCEETVEEPGERCRSFIELTPPAKREILWLSLGTQITYIGLQFISFLLLLTDLLLTGNPACGLKLSAFAAVSSVLSGLLGMVAHMMYSQVFQATVNLGPEDWRPHVWNYGWAFYMAWLSFTCCMASAVTTFNTYTRMVLEFKCKHSKSFKENPNCLPHHHQCFPRRLSSAAPTVGPLTSYHQYHNQPIHSVSEGVDFYSELRNKGFQRGASQELKEAVRSSVEEEQC

SEQ ID NO: 6286 - protein, 285 aa, Homo Sapiens
MAKMELSKAFSGQRTLLSAILSMLSLSFSTTSLLSNYWFVGTQKVPKPLCEKGLAAKCFDMPVSLDGDTNTSTQEVVQYNWETGDDRFSFRSFRSGMWLSCEETVEEPGERCRSFIELTPPAKRGEKGLLEFATLQGPCHPTLRFGGKRLMEKASLPSPPLGLCGKNPMVIPGNADHLHRTSIHQLPPATNRLATHWEPCLWAQTERLCCCFLCPVRSPGDGGPHDVFTSLPSDCQLGSRRLETTCLELWLGLLHGLALLHLLHGVGCHHLQHVHQDGAGVQVQA

SEQ ID NO: 6287 - protein, 275 aa, Homo Sapiens
MAKMELSKAFSGQRTLLSAILSMLSLSFSTTSLLSNYWFVGTQKVPKPLCEKGLAAKCFDMPVSLDGDTNTSTQEVVQYNWETGDDRFSFRSFRSGMWLSCEETVEEPGERCRSFIELTPPAKRGLLGMVAHMMYSQVFQATVNLGPEDWRPHVWNYGWAFYMAWLSFTCCMASAVTTFNTYTRMVLEFKCKHSKSFKENPNCLPHHHQCFPRRLSSAAPTVGPLTSYHQYHNQPIHSVSEGVDFYSELRNKGFQRGASQELKEAVRSSVEEEQC

SEQ ID NO: 6288 - protein, 220 aa, Homo Sapiens
MSDPSQLTQNVCLTQEMELSKAFSGQRTLLSAILSMLSLSFSTTSLLSNYWFVGTQKVPKPLCEKGLAAKCFDMPVSLDGDTNTSTQEVVQYNWETGDDRFSFRSFRSGMWLSCEETVEEPAKSEMEEELKKCVYLHLYLLLCHLALLHPQSWKQFRALRSSGTAAAKGERCRSFIELTPPAKREILWLSLGTQITYIGLQFISFLLLLTDLLLTGNPAC

SEQ ID NO: 6289 - protein, 321 aa, Homo Sapiens
MSDPSQLTQNVCLTQEMELSKAFSGQRTLLSAILSMLSLSFSTTSLLSNYWFVGTQKVPKPLCEKGLAAKCFDMPVSLDGDTNTSTQEVVQYNWETGDDRFSFRSFRSGMWLSCEETVEEPALLHPQSWKQFRALRSSGTAAAKGERCRSFIELTPPAKRGEKGLLEFATLQGPCHPTLRFGGKRLMEKASLPSPPLGLCGKNPMVIPGNADHLHRTSIHQLPPATNRLATHWEPCLWAQTERLCCCFLCPVRSPGDGGPHDVFTSLPSDCQLGSRRLETTCLELWLGLLHGLALLHLLHGVGCHHLQHVHQDGAGVQVQA

SEQ ID NO: 6290 - protein, 339 aa, Homo Sapiens
MSDPSQLTQNVCLTQEMELSKAFSGQRTLLSAILSMLSLSFSTTSLLSNYWFVGTQKVPKPLCEKGLAAKCFDMPVSLDGDTNTSTQEVVQYNWETGDDRFSFRSFRSGMWLSCEETVEEPGERCRSFIELTPPAKREILWLSLGTQITYIGLQFISFLLLLTDLLLTGNPACGLKLSAFAAVSSVLSGLLGMVAHMMYSQVFQATVNLGPEDWRPHVWNYGWAFYMAWLSFTCCMASAVTTFNTYTRMVLEFKCKHSKSFKENPNCLPHHHQCFPRRLSSAAPTVGPLTSYHQYHNQPIHSVSEGVDFYSELRNKGFQRGASQELKEAVRSSVEEEQC

SEQ ID NO: 6291 - protein, 236 aa, Homo Sapiens
MSDPSQLTQNVCLTQEMELSKAFSGQRTLLSAILSMLSLSFSTTSLLSNYWFVGTQKVPKPLCEKGLAAKCFDMPVSLDGDTNTSTQEVVQYNWETGDDRFSFRSFRSGMWLSCEETVEEPGERCRSFIELTPPAKRGEKGLLEFATLQGPCHPTLRFGGKRLMEKASLPSPPLGLCGKNPMVIPGNADHLHRTSIHQLPPATNRLATHWEPCLWAQTERLCCCFLCPVRSPGDGG

SEQ ID NO: 6292 - protein, 748 aa, Homo Sapiens
MAEEEALRGNSDPWPNSMVVEHPEFLKAGKEPGLQIWRVEKFDLVPVPTNLYGDFFTGDAYVILKTVQLRNGNLQYDLHYWLGNECSQDESGAAAIFTVQLDDYLNGRAVQHREVQGFESATFLGYFKSGLKYKKGGVASGFKHVVPNEVVVQRLFQVKGRRVVRATEVPVSWESFNNGDCFILDLGNNIHQWCGSNSNRYERLKATQVSKGIRDNERSGRARVHVSEEGTEPEAMLQVLGPKPALPAGTEDTAKEDAANRKLAKLYKVSNGAGTMSVSLVADENPFAQGALKSEDCFILDHGKDGKIFVWKGKQANTEERKAALKTASDFITKMDYPKQTQVSVLPEGGETPLFKQFFKNWRDPDQTDGLGLSYLSSHIANVERVPFDAATLHTSTAMAAQHGMDDDGTGQKQIWRIEGSNKVPVDPATYGQFYGGDSYIILYNYRHGGRQGQIIYNWQGAQSTQDEVAASAILTAQLDEELGGTPVQSRVVQGKEPAHLMSLFGGKPMIIYKGGTSREGGQTAPASTRLFQVRANSAGATRAVEVLPKAGALNSNDAFVLKTPSAAYLWVGTGASEAEKTGAQELLRVLRAQPVQVAEGSEPDGFWEALGGKAAYRTSPRLKDKKMDAHPPRLFACSNKIGRFVIEEVPGELMQEDLATDDVMLLDTWDQVFVWVGKDSQEEEKTEALTSAKRYIETDPANRDRRTPITVVKQGFEPPSFVGWFLGWDDDYWSVDPLDRAMAELAA

SEQ ID NO: 6293 - protein, 782 aa, Homo Sapiens
MAPHRPAPALLCALSLALCALSLPVRAATASRGASQAGAPQGRVPEARPNSMVVEHPEFLKAGKEPGLQIWRVEKFDLVPVPTNLYGDFFTGDAYVILKTVQLRNGNLQYDLHYWLGNECSQDESGAAAIFTVQLDDYLNGRAVQHREVQGFESATFLGYFKSGLKYKKGGVASGFKHVVPNEVVVQRLFQVKGRRVVRATEVPVSWESFNNGDCFILDLGNNIHQWCGSNSNRYERLKATQVSKGIRDNERSGRARVHVSEEGTEPEAMLQVLGPKPALPAGTEDTAKEDAANRKLAKLYKVSNGAGTMSVSLVADENPFAQGALKSEDCFILDHGKDGKIFVWKGKQANTEERKAALKTASDFITKMDYPKQTQVSVLPEGGETPLFKQFFKNWRDPDQTDGLGLSYLSSHIANVERVPFDAATLHTSTAMAAQHGMDDDGTGQKQIWRIEGSNKVPVDPATYGQFYGGDSYIILYNYRHGGRQGQIIYNWQGAQSTQDEVAASAILTAQLDEELGGTPVQSRVVQGKEPAHLMSLFGGKPMIIYKGGTSREGGQTAPASTRLFQVRANSAGATRAVEVLPKAGALNSNDAFVLKTPSAAYLWVGTGASEAEKTGAQELLRVLRAQPVQVAEGSEPDGFWEALGGKAAYRTSPRLKDKKMDAHPPRLFACSNKIGRFVIEEVPGELMQEDLATDDVMLLDTWDQVFVWVGKDSQEEEKTEALTSAKRYIETDPANRDRRTPITVVKQGFEPPSFVGWFLGWDDDYWSVDPLDRAMAELAA

SEQ ID NO: 6294 - protein, 232 aa, Homo Sapiens
MEKLFCCFPNSMVVEHPEFLKAGKEPGLQIWRVEKFDLVPVPTNLYGDFFTGDAYVILKTVQLRNGNLQYDLHYWLGNECSQDESGAAAIFTVQLDDYLNGRAVQHREVQGFESATFLGYFKSGLKYKKGGVASGFKHVVPNEVVVQRLFQVKGRRVVRATEVPVSWESFNNGDCFILDLGNNIHQWCGSNSNRYERLKATQVSKGIRDNERSGRARVHVSEEGTEPEAMLQ

SEQ ID NO: 6295 - protein, 742 aa, Homo Sapiens
MEKLFCCFPNSMVVEHPEFLKAGKEPGLQIWRVEKFDLVPVPTNLYGDFFTGDAYVILKTVQLRNGNLQYDLHYWLGNECSQDESGAAAIFTVQLDDYLNGRAVQHREVQGFESATFLGYFKSGLKYKKGGVASGFKHVVPNEVVVQRLFQVKGRRVVRATEVPVSWESFNNGDCFILDLGNNIHQWCGSNSNRYERLKATQVSKGIRDNERSGRARVHVSEEGTEPEAMLQVLGPKPALPAGTEDTAKEDAANRKLAKLYKVSNGAGTMSVSLVADENPFAQGALKSEDCFILDHGKDGKIFVWKGKQANTEERKAALKTASDFITKMDYPKQTQVSVLPEGGETPLFKQFFKNWRDPDQTDGLGLSYLSSHIANVERVPFDAATLHTSTAMAAQHGMDDDGTGQKQIWRIEGSNKVPVDPATYGQFYGGDSYIILYNYRHGGRQGQIIYNWQGAQSTQDEVAASAILTAQLDEELGGTPVQSRVVQGKEPAHLMSLFGGKPMIIYKGGTSREGGQTAPASTRLFQVRANSAGATRAVEVLPKAGALNSNDAFVLKTPSAAYLWVGTGASEAEKTGAQELLRVLRAQPVQVAEGSEPDGFWEALGGKAAYRTSPRLKDKKMDAHPPRLFACSNKIGRFVIEEVPGELMQEDLATDDVMLLDTWDQVFVWVGKDSQEEEKTEALTSAKRYIETDPANRDRRTPITVVKQGFEPPSFVGWFLGWDDDYWSVDPLDRAMAELAA

SEQ ID NO: 6296 - protein, 767 aa, Homo Sapiens
MNTGLTRLLWPSWLPDGDMSHPQPELFLFPKAQPNSMVVEHPEFLKAGKEPGLQIWRVEKFDLVPVPTNLYGDFFTGDAYVILKTVQLRNGNLQYDLHYWLGNECSQDESGAAAIFTVQLDDYLNGRAVQHREVQGFESATFLGYFKSGLKYKKGGVASGFKHVVPNEVVVQRLFQVKGRRVVRATEVPVSWESFNNGDCFILDLGNNIHQWCGSNSNRYERLKATQVSKGIRDNERSGRARVHVSEEGTEPEAMLQVLGPKPALPAGTEDTAKEDAANRKLAKLYKVSNGAGTMSVSLVADENPFAQGALKSEDCFILDHGKDGKIFVWKGKQANTEERKAALKTASDFITKMDYPKQTQVSVLPEGGETPLFKQFFKNWRDPDQTDGLGLSYLSSHIANVERVPFDAATLHTSTAMAAQHGMDDDGTGQKQIWRIEGSNKVPVDPATYGQFYGGDSYIILYNYRHGGRQGQIIYNWQGAQSTQDEVAASAILTAQLDEELGGTPVQSRVVQGKEPAHLMSLFGGKPMIIYKGGTSREGGQTAPASTRLFQVRANSAGATRAVEVLPKAGALNSNDAFVLKTPSAAYLWVGTGASEAEKTGAQELLRVLRAQPVQVAEGSEPDGFWEALGGKAAYRTSPRLKDKKMDAHPPRLFACSNKIGRFVIEEVPGELMQEDLATDDVMLLDTWDQVFVWVGKDSQEEEKTEALTSAKRYIETDPANRDRRTPITVVKQGFEPPSFVGWFLGWDDDYWSVDPLDRAMAELAA

SEQ ID NO: 6297 - protein, 739 aa, Homo Sapiens
MPLCTPNSMVVEHPEFLKAGKEPGLQIWRVEKFDLVPVPTNLYGDFFTGDAYVILKTVQLRNGNLQYDLHYWLGNECSQDESGAAAIFTVQLDDYLNGRAVQHREVQGFESATFLGYFKSGLKYKKGGVASGFKHVVPNEVVVQRLFQVKGRRVVRATEVPVSWESFNNGDCFILDLGNNIHQWCGSNSNRYERLKATQVSKGIRDNERSGRARVHVSEEGTEPEAMLQVLGPKPALPAGTEDTAKEDAANRKLAKLYKVSNGAGTMSVSLVADENPFAQGALKSEDCFILDHGKDGKIFVWKGKQANTEERKAALKTASDFITKMDYPKQTQVSVLPEGGETPLFKQFFKNWRDPDQTDGLGLSYLSSHIANVERVPFDAATLHTSTAMAAQHGMDDDGTGQKQIWRIEGSNKVPVDPATYGQFYGGDSYIILYNYRHGGRQGQIIYNWQGAQSTQDEVAASAILTAQLDEELGGTPVQSRVVQGKEPAHLMSLFGGKPMIIYKGGTSREGGQTAPASTRLFQVRANSAGATRAVEVLPKAGALNSNDAFVLKTPSAAYLWVGTGASEAEKTGAQELLRVLRAQPVQVAEGSEPDGFWEALGGKAAYRTSPRLKDKKMDAHPPRLFACSNKIGRFVIEEVPGELMQEDLATDDVMLLDTWDQVFVWVGKDSQEEEKTEALTSAKRYIETDPANRDRRTPITVVKQGFEPPSFVGWFLGWDDDYWSVDPLDRAMAELAA

SEQ ID NO: 6298 - protein, 731 aa, Homo Sapiens
MVVEHPEFLKAGKEPGLQIWRVEKFDLVPVPTNLYGDFFTGDAYVILKTVQLRNGNLQYDLHYWLGNECSQDESGAAAIFTVQLDDYLNGRAVQHREVQGFESATFLGYFKSGLKYKKGGVASGFKHVVPNEVVVQRLFQVKGRRVVRATEVPVSWESFNNGDCFILDLGNNIHQWCGSNSNRYERLKATQVSKGIRDNERSGRARVHVSEEGTEPEAMLQVLGPKPALPAGTEDTAKEDAANRKLAKLYKVSNGAGTMSVSLVADENPFAQGALKSEDCFILDHGKDGKIFVWKGKQANTEERKAALKTASDFITKMDYPKQTQVSVLPEGGETPLFKQFFKNWRDPDQTDGLGLSYLSSHIANVERVPFDAATLHTSTAMAAQHGMDDDGTGQKQIWRIEGSNKVPVDPATYGQFYGGDSYIILYNYRHGGRQGQIIYNWQGAQSTQDEVAASAILTAQLDEELGGTPVQSRVVQGKEPAHLMSLFGGKPMIIYKGGTSREGGQTAPASTRLFQVRANSAGATRAVEVLPKAGALNSNDAFVLKTPSAAYLWVGTGASEAEKTGAQELLRVLRAQPVQVAEGSEPDGFWEALGGKAAYRTSPRLKDKKMDAHPPRLFACSNKIGRFVIEEVPGELMQEDLATDDVMLLDTWDQVFVWVGKDSQEEEKTEALTSAKRYIETDPANRDRRTPITVVKQGFEPPSFVGWFLGWDDDYWSVDPLDRAMAELAA

SEQ ID NO: 6299 - protein, 260 aa, Homo Sapiens
MVVEHPEFLKAGKEPGLQIWRVEKFDLVPVPTNLYGDFFTGDAYVILKTVQLRNGNLQYDLHYWLGNECSQDESGAAAIFTVQLDDYLNGRAVQHREVQGFESATFLGYFKSGLKYKKGGVASGFKHVVPNEVVVQRLFQVKGRRVVRATEVPVSWESFNNGDCFILDLGNNIHQWCGSNSNRYERLKATQVSKGIRDNERSGRARVHVSEEGTEPEAMLQVLGPKPALPAGTEDTAKEDAANRKLAKLYKVSNGAGTMS

SEQ ID NO: 6300 - protein, 67 aa, Homo Sapiens
  misc_feature (1)..(1): Xaa can be any naturally occurring amino acid
XKGGTSREGGQTAPASTRLFQVRANSAGATRAVEVISRSWNTEGIGLPETSQLNDQISRHRNGGRGW

SEQ ID NO: 6301 - protein, 329 aa, Homo Sapiens
MESFLTSMGKFMKLIPDHRPKDLESIIRPKCQVIYFPIRFPDVSRFMPKHKTTHLKKMLGLKGNGGAVLSMALPFQPEQRDSEDLLKNFNSECDTHCGLDTARQEYLGNSLRQESDLKKSTSSDNSSSHHGENKQNLTVDPCDILGGVDNQQRLLHIVWPHRWEHDKDPESFFKVLMHLKDLGLNFHVSVLGETFTDVPDIFSEAKKALGSSVLHWGYLPSKDDYFQVLCMADVVISTAKHEFFGVAMLEAVYCGCYPLCPKDLVYPEIFPAEYLYSTPEQLSKRLQNFCKRPDIIRKHLYKGEIAPFSWAALHGKFRSLLTTEPREDL

SEQ ID NO: 6302 - protein, 426 aa, Homo Sapiens
MLTLHVWIWFGFMPCPNLMQNYNHQCCRTLFASSVLNLTELAALRPDLGKLKKILYFHENQLIYPVKKCQERDFQYGYNQILSCLVADVVVFNSVFNMESFLTSMGKFMKLIPDHRPKDLESIIRPKCQVIYFPIRFPDVSRFMPKHKTTHLKKMLGLKGNGGAVLSMALPFQPEQRDSEDLLKNFNSECDTHCGLDTARQEYLGNSLRQESDLKKSTSSDNSSSHHGENKQNLTVDPCDILGGVDNQQRLLHIVWPHRWEHDKDPESFFKVLMHLKDLGLNFHVSVLGETFTDVPDIFSEAKKALGSSVLHWGYLPSKDDYFQVLCMADVVISTAKHEFFGVAMLEAVYCGCYPLCPKDLVYPEIFPAEYLYSTPEQLSKRLQNFCKRPDIIRKHLYKGEIAPFSWAALHGKFRSLLTTEPREDL

SEQ ID NO: 6303 - protein, 66 aa, Homo Sapiens
MSILIIEAFYGGSHKQLVDLLQEELGDCVVYTLPAKKWHWRARTSALYFSQTIPISEHYRQSEITN

SEQ ID NO: 6304 - protein, 66 aa, Homo Sapiens; identical to SEQ ID NO: 6303

SEQ ID NO: 6305 - protein, 99 aa, Homo Sapiens
MSILIIEAFYGGSHKQLVDLLQEELGDCVVYTLPAKKWHWRARTSALYFSQTIPISEHYRTLFASSVLNLTELAALRPDLGKLKKILYFHENQLIYPVK

SEQ ID NO: 6306 - protein, 173 aa, Homo Sapiens
MSILIIEAFYGGSHKQLVDLLQEELGDCVVYTLPAKKWHWRARTSALYFSQTIPISEHYRTLFASSVLNLTELAALRPDLGKLKKILYFHENQLIYPVKKCQERDFQYGYNQILSCLVADVVVFNSVFNMESFLTSMGKFMKLIPDHRPKDLESIIRPKCQVIYFPIRFPDVS

SEQ ID NO: 6307 - protein, 340 aa, Homo Sapiens
MSILIIEAFYGGSHKQLVDLLQEELGDCVVYTLPAKKWHWRARTSALYFSQTIPISEHYRTLFASSVLNLTELAALRPDLGKLKKILYFHENQLIYPVKKCQERDFQYGYNQILSCLVADVVVFNSVFNMESFLTSMGKFMKLIPDHRPKDLESIIRPKCQVIYFPIRFPDVSREHDKDPESFFKVLMHLKDLGLNFHVSVLGETFTDVPDIFSEAKKALGSSVLHWGYLPSKDDYFQVLCMADVVISTAKHEFFGVAMLEAVYCGCYPLCPKDLVYPEIFPAEYLYSTPEQLSKRLQNFCKRPDIIRKHLYKGEIAPFSWAALHGKFRSLLTTEPREDL

SEQ ID NO: 6308 - protein, 376 aa, Homo Sapiens
MSILIIEAFYGGSHKQLVDLLQEELGDCVVYTLPAKKWHWRARTSALYFSQTIPISEHYRTLFASSVLNLTELAALRPDLGKLKKILYFHENQLIYPVKKCQERDFQYGYNQILSCLVADVVVFNSVFNMESFLTSMGKFMKLIPDHRPKDLESIIRPKCQVIYFPIRFPDVSRFMPKHKTTHLKKMLGLKGNGGAVLSMALPFQPEQRDSEDLLKNFNSECDTHCGLDTARQEYLGNSLRQESDLKKSTSSDNSSSHHGENKQNLTVDPCDILGGVDNQQRLLHIVWPHRWEHDKDPESFFKVLMHLKDLGLNFHVSVLGETFTDVPGWKLCTVGVTHFVLKIWFIPKYFQLNICILHLNSFQKGSRISARDQIL

SEQ ID NO: 6309 - protein, 458 aa, Homo Sapiens
MSILIIEAFYGGSHKQLVDLLQEELGDCVVYTLPAKKWHWRARTSALYFSQTIPISEHYRTLFASSVLNLTELAALRPDLGKLKKILYFHENQLIYPVKKCQERDFQYGYNQILSCLVADVVVFNSVFNMESFLTSMGKFMKLIPDHRPKDLESIIRPKCQVIYFPIRFPDVSRFMPKHKTTHLKKMLGLKGNGGAVLSMALPFQPEQRDSEDLLKNFNSECDTHCGLDTARQEYLGNSLRQESDLKKSTSSDNSSSHHGENKQNLTVDPCDILGGVDNQQRLLHIVWPHRWEHDKDPESFFKVLMHLKDLGLNFHVSVLGETFTDVPDIFSEAKKALGSSVLHWGYLPSKDDYFQVLCMADVVISTAKHEFFGVAMLEAVYCGCYPLCPKDLVYPEIFPAEYLYSTPEQLSKRLQNFCKRPDIIRKHLYKGEIAPFSWAALHGKFRSLLTTEPREDL

SEQ ID NO: 6310 - protein, 373 aa, Homo Sapiens
MSILIIEAFYGGSHKQLVDLLQEELGDCVVYTLPAKKWHWRARTSALYFSQTIPISEHYRTLFASSVLNLTELAALRPDLGKLKKILYFHENQLIYPVKKCQERDFQYGYNQILSCLVADVVVFNSVFNMESFLTSMGKFMKLIPDHRPKDLESIIRPKCQVIYFPIRFPDVSRFMPKHKTTHLKKMLGLKGNGGAVLSMALPFQPEQRDSEDLLKNFNSECDTHCGLDTARQEYLGNSLRQESDLKKSTSSDNSSSHHGENKQNLTVDPCDILGGVDNQQRLLHIVWPHRWLEAVYCGCYPLCPKDLVYPEIFPAEYLYSTPEQLSKRLQNFCKRPDIIRKHLYKGEIAPFSWAALHGKFRSLLTTEPREDL

SEQ ID NO: 6311 - protein, 376 aa, Homo Sapiens; identical to SEQ ID NO: 6308

SEQ ID NO: 6312 - protein, 458 aa, Homo Sapiens; identical to SEQ ID NO: 6309

SEQ ID NO: 6313 - protein, 458 aa, Homo Sapiens; identical to SEQ ID NO: 6309

SEQ ID NO: 6314 - protein, 458 aa, Homo Sapiens; identical to SEQ ID NO: 6309

SEQ ID NO: 6315 - protein, 236 aa, Homo Sapiens
MRTVSLCHPDWSALASSWLTAASTSWAQYGNFIDKLRLFTRGGSGGMGYPRLGGEGGKGGDVWVVAQNRMTLKQLKDRYPRKRFVAGVGANSKISALKGSKGKDCEIPVPVGISVTDENGKIIGELNKENDRILVAQGGLGGKLLTNFLPLKGQKRIIHLDLKLIADVGLVGFPNAGKSSLLSCVSHAKPAIADYAFTTLKPELGKIMYSDFKQISVADLPGLIEGAHMNKGMGHK

SEQ ID NO: 6316 - protein, 107 aa, Homo Sapiens
MRYGNFIDKLRLFTRGGSGGMGYPRLGGEGGKGGDVWVVAQNRMTLKQLKDRYPRKRFVAGVGANSKISALKGSKGKDCEIPVPVGISVTDENGKIIDSQMLENPLC

SEQ ID NO: 6317 - protein, 210 aa, Homo Sapiens
MRYGNFIDKLRLFTRGGSGGMGYPRLGGEGGKGGDVWVVAQNRMTLKQLKDRYPRKRFVAGVGANSKISALKGSKGKDCEIPVPVGISVTDENGKIIGELNKENDRILVAQGGLGGKLLTNFLPLKGQKRIIHLDLKLIADVGLVGFPNAGKSSLLSCVSHAKPAIADYAFTTLKPELGKIMYSDFKQISVADLPGLIEGAHMNKGMGHK

SEQ ID NO: 6318 - protein, 70 aa, Homo Sapiens
MRYGNFIDKLRLFTRGGSGGMGYPRLGGEGGKGGDVWVVAQNRMTLKQLKDRYPRKRFVAGVGANSKRTQ

SEQ ID NO: 6319 - protein, 308 aa, Homo Sapiens
MVHCSCVLFRKYGNFIDKLRLFTRGGSGGMGYPRLGGEGGKGGDVWVVAQNRMTLKQLKDRYPRKRFVAGVGANSKFPNAGKSSLLSCVSHAKPAIADYAFTTLKPELGKIMYSDFKQISVADLPGLIEGAHMNKGMGHKFLKHIERTRQLLFVVDISGFQLSSHTQYRTAFETIILLTKELELYKEELQTKPALLAVNKMDLPDAQDKFHELMSQLQNPKDFLHLFEKNMIPERTVEFQHIIPISAVTGEGIEELKNCIRKSLDEQANQENDALHKKQLLNLWISDTMSSTEPPSKHAVTTSKMDII

SEQ ID NO: 6320 - protein, 116 aa, Homo Sapiens
MVHCSCVLFRKYGNFIDKLRLFTRGGSGGMGYPRLGGEGGKGGDVWVVAQNRMTLKQLKDRYPRKRFVAGVGANSKISALKGSKGKDCEIPVPVGISVTDENGKIIDSQMLENPLC

SEQ ID NO: 6321 - protein, 387 aa, Homo Sapiens
MVHCSCVLFRKYGNFIDKLRLFTRGGSGGMGYPRLGGEGGKGGDVWVVAQNRMTLKQLKDRYPRKRFVAGVGANSKISALKGSKGKDCEIPVPVGISVTDENGKIIGELNKENDRILVAQGGLGGKLLTNFLPLKGQKRIIHLDLKLIADVGLVGFPNAGKSSLLSCVSHAKPAIADYAFTTLKPELGKIMYSDFKQISVADLPGLIEGAHMNKGMGHKFLKHIERTRQLLFVVDISGFQLSSHTQYRTAFETIILLTKELELYKEELQTKPALLAVNKMDLPDAQDKFHELMSQLQNPKDFLHLFEKNMIPERTVEFQHIIPISAVTGEGIEELKNCIRKSLDEQANQENDALHKKQLLNLWISDTMSSTEPPSKHAVTTSKMDII

SEQ ID NO: 6322 - protein, 243 aa, Homo Sapiens
MVHCSCVLFRKYGNFIDKLRLFTRGGSGGMGYPRLGGEGGKGGDVWVVAQNRMTLKQLKDRYPRKRFVAGVGANSKISALKGSKGKDCEIPVPVGISVTDENGKIIVTTLKPELGKIMYSDFKQISVADLPGLIEGAHMNKGMGHKFLKHIERTRQLLFVVDISGFQLSSHTQYRTAFETIILLTKELELYKEELQTKPALLAVNKMDLPDAQDKFHELMSQLQNPKDFLHLFEKNMIPERTV

SEQ ID NO: 6323 - protein, 79 aa, Homo Sapiens
MVHCSCVLFRKYGNFIDKLRLFTRGGSGGMGYPRLGGEGGKGGDVWVVAQNRMTLKQLKDRYPRKRFVAGVGANSKRTQ

SEQ ID NO: 6324 - protein, 115 aa, Homo Sapiens
MNAFLLSALCLLGAWAALAGGVTVQDGNFSFSLESVKKLKDLQEPQEPRVGKLRNFAPIPGEPVVPILCSNPNFPEELKPLCKEPNAQEILQRLEEIAEDPGTCEICAYAACTGC

SEQ ID NO: 6325 - protein, 112 aa, Homo Sapiens
MGCRAASGLLPGVAVVLLLLLQSTQSVYIQYQGFRVQLESMKKLSDLEAQWAPSPRLQAQSLLPAVCHHPALPQDLQPVCASQEASSIFKTLRTIANDDCELCVNVACTGCL

SEQ ID NO: 6326 - protein, 134 aa, Homo Sapiens
MARGSAVAWAALGPLLWGCALGLQGGMLYPQESPSRECKELDGLWSFRADFSDNRRRGFEEQWYRRPLWESGPTVDMPVPSSFNDISQDWRLRHFVGWVWYEREVILPERWTQDLRTRVVLRIGSAHSYAIVGW

SEQ ID NO: 6327 - protein, 144 aa, Homo Sapiens
MARGSAVAWAALGPLLWGCALGLQGGMLYPQESPSRECKELDGLWSFRADFSDNRRRGFEEQWYRRPLWESGPTVDMPVPSSFNDISQDWRLRHFVGWVWYEREVILPERWTQDLRTRVVLRIGSAHSYAIVVSQGLLCPEHIF

SEQ ID NO: 6328 - protein, 144 aa, Homo Sapiens; identical to SEQ ID NO: 6327

SEQ ID NO: 6329 - protein, 651 aa, Homo Sapiens
MARGSAVAWAALGPLLWGCALGLQGGMLYPQESPSRECKELDGLWSFRADFSDNRRRGFEEQWYRRPLWESGPTVDMPVPSSFNDISQDWRLRHFVGWVWYEREVILPERWTQDLRTRVVLRIGSAHSYAIVWVNGVDTLEHEGGYLPFEADISNLVQVGPLPSRLRITIAINNTLTPTTLPPGTIQYLTDTSKYPKGYFVQNTYFDFFNYAGLQRSVLLYTTPTTYIDDITVTTSVEQDSGLVNYQISVKGSNLFKLEVRLLDAENKVVANGTGTQGQLKVPGVSLWWPYLMHERPAYLYSLEVQLTAQTSLGPVSDFYTLPVGIRTVAVTKSQFLINGKPFYFHGVNKHEDADIRGKGFDWPLLVKDFNLLRWLGANAFRTSHYPYAEEVMQMCDRYGIVVIDECPGVGLALPQFFNNVSLHHHMQVMEEVVRRDKNHPAVVMWSVANEPASHLESAGYYLKMVIAHTKSLDPSRPVTFVSNSNYAADKGAPYVDVICLNSYYSWYHDYGHLELIQLQLATQFENWYKKYQKPIIQSEYGAETIAGFHQDPPLMFTEEYQKSLLEQYHLGLDQKRRKYVVGELIWNFADFMTEQSPTRVLGNKKGIFTRQRQPKSAAFLLRERYWKIANETRYPHSVAKSQCLENSLFT

SEQ ID NO: 6330 - protein, 505 aa, Homo Sapiens
MARGSAVAWAALGPLLWGCALGLQGGMLYPQESPSRECKELDGLWSFRADFSDNRRRGFEEQWYRRPLWESGPTVDMPVPSSFNDISQDWRLRHFVGWVWYEREVILPERWTQDLRTRVVLRIGSAHSYAIVWVNGVDTLEHEGGYLPFEADISNLVQVQLTAQTSLGPVSDFYTLPVGIRTVAVTKSQFLINGKPFYFHGVNKHEDADIRGKGFDWPLLVKDFNLLRWLGANAFRTSHYPYAEEVMQMCDRYGIVVIDECPGVGLALPQFFNNVSLHHHMQVMEEVVRRDKNHPAVVMWSVANEPASHLESAGYYLKMVIAHTKSLDPSRPVTFVSNSNYAADKGAPYVDVICLNSYYSWYHDYGHLELIQLQLATQFENWYKKYQKPIIQSEYGAETIAGFHQDPPLMFTEEYQKSLLEQYHLGLDQKRRKYVVGELIWNFADFMTEQSPTRVLGNKKGIFTRQRQPKSAAFLLRERYWKIANETRYPHSVAKSQCLENSLFT

SEQ ID NO: 6331 - protein, 195 aa, Homo Sapiens; identical to SEQ ID NO: 73

SEQ ID NO: 6332 - protein, 440 aa, Homo Sapiens
MRRYLRVVVLCVACGFCSLLYAFSQLAVSLEEGTGGGGGKPQAAVASWLAGGGRGAVRGAGVAGPAAHPGVSDRCKDFSLCYWNPYWMLPSDVCGMNCFWEAAFRYSLKIQPVEKMHLAVVACGERLEETMTMLKSAIIFSIKPLQFHIFAEDQLHHSFKGRLDNWSFLQTFNYTLYPITFPSENAAEWKKLFKPCASQRLFLPLILKEVDSLLYVDTDILFLRPVDDIWSLLKKFNSTQIAAMAPEHEEPRIGWYNRFARHPYYGKTGVNSGVMLMNMTRMRRKYFKNDMTTVRLQWGDILMPLLKKYKLNITWGDQDLLNIVFFHNPESLFVFPCQWNYRPDHCIYGSNCQEAEEGGIFILHGNRGVYHDDKQPAFRAVYEALRNCSFEDDNIRSLLKPLELELQKTVHTYCGKIYKIFIKQLAKSVRDRYARSPKEK

SEQ ID NO: 6333 - protein, 409 aa, Homo Sapiens
MRRYLRVVVLCVACGFCSLLYAFSQLAVSLEEGTGGGGGKPQAAVASWLAGGGRGAVRGAGVAGPAAHPGVSDRYSLKIQPVEKMHLAVVACGERLEETMTMLKSAIIFSIKPLQFHIFAEDQLHHSFKGRLDNWSFLQTFNYTLYPITFPSENAAEWKKLFKPCASQRLFLPLILKEVDSLLYVDTDILFLRPVDDIWSLLKKFNSTQIAAMAPEHEEPRIGWYNRFARHPYYGKTGVNSGVMLMNMTRMRRKYFKNDMTTVRLQWGDILMPLLKKYKLNITWGDQDLLNIVFFHNPESLFVFPCQWNYRPDHCIYGSNCQEAEEGGIFILHGNRGVYHDDKQPAFRAVYEALRNCSFEDDNIRSLLKPLELELQKTVHTYCGKIYKIFIKQLAKSVRDRYARSPKEK

SEQ ID NO: 6334 - protein, 164 aa, Homo Sapiens
MAPEHEIPKIGWYSRFARHPFYGSAGVNSGVMLMNLTRIRSTQFKNSMIPTGLAWEDMLYPLYQKYKNAITWGDQDLLNIIFYFNPECLYVFPCQWNYRPDHCMYGSNCREAEHEGVSVLHGNRGVYHDDKQPTFRALYEAIRDILRRGGKRKFVLSWISFFVM

SEQ ID NO: 6335 - protein, 443 aa, Homo Sapiens
MKLRSKAAALLLLALAALLLALLSLRAGRAEPPALPARPASAPQRHPAPVPARWPGPGALPGASPGVRRRRPPRPRPRAGRRGAARLEKLARRPGEPRSFQAVLPPELWIHLAVVACGNRLEETLVMLKSAVLFSHRKIQFHIFTEDSLKPEFDKQLRQWPDSYTKKFEHRIYPITFSVGNPQEWKKLFKPCAAQRLFLPVILKDVDSLLYVDTDVLFLRPVDDIWKLLRLFNSTQLAAMAPEHEIPKIGWYSRFARHPFYGSAGVNSGVMLMNLTRIRSTQFKNSMIPTGLAWEDMLYPLYQKYKNAITWGDQDLLNIIFYFNPECLYVFPCQWNYRPDHCMYGSNCREAEHEGVSVLHGNRGVYHDDKQPTFRALYEAIRDFPFQDNLFQSMYYPLQLKFLETVHTLCGRIPQVFLKQIEKTMKRAYEKHVIIHVGPNQMH

SEQ ID NO: 6336 - protein, 102 aa, Homo Sapiens
MLKSAVLFSHRKIQFHIFTEDSLKPEFDKQLRQWPDSYTKKFEHRIYPITFSVGNPQEWKKLFKPCAAQRLFLPVILKDVDSLLYVDTDVLFLRPVDDIWKL

SEQ ID NO: 6337 - protein, 65 aa, Homo Sapiens
MHTSTSSSVTKSYISSQTNGETGQLVHRFTVPAPVVIILIILCVMAGIIGTILLISYSIRRLIKA

SEQ ID NO: 6338 - protein, 121 aa, Homo Sapiens
MYGKIIFVLLLSEIVSISALSTTEVAMHTSTSSSVTKSYISSQTNDKHKRDTCPAHTANEVSEISVTTVSPPEKKNGETGQLVHRFTVPAPVVIILIILCVMAGIIGTILLISYSIRRLIK

SEQ ID NO: 6339 - protein, 91 aa, Homo Sapiens
MYGKIIFVLLLSEIVSISALSTTEVAMHTSTSSSVTKSYISSQTNGETGQLVHRFTVPAPVVIILIILCVMAGIIGTILLISYSIRRLIKA

SEQ ID NO: 6340 - protein, 62 aa, Homo Sapiens
MYGKIIFVLLLSEIVSISALSTTEVAMHTSTSSSVTKSYISSQTNGETGQLVHRFTVPVFAD

SEQ ID NO: 6341 - protein, 42 aa, Homo Sapiens
MYGKIIFVLLLSGDGANPENSGRRGQKAEGRARAKILKQEKL

SEQ ID NO: 6342 - protein, 58 aa, Homo Sapiens
MYGKIIFVLLLSGETGQLVHRFTVPAPVVIILIILCVMAGIIGTILLISYSIRRLIKA

SEQ ID NO: 6343 - protein, 45 aa, Homo Sapiens
MYGKIIFVLLLSGNFEHSAEGPSWLPLRRSPSTSTPLHLGAIPLI

SEQ ID NO: 6344 - protein, 45 aa, Homo Sapiens; identical to SEQ ID NO: 6343

SEQ ID NO: 6345 - protein, 45 aa, Homo Sapiens; identical to SEQ ID NO: 6343

SEQ ID NO: 6346 - protein, 262 aa, Homo Sapiens
MRNSYRFLASSLSVVVSLLLIPEDVCEKIIGGNEVTPHSRPYMVLLSLDRKTICAGALIAKDWVLTAAHCNLNKRSQVILGAHSITREEPTKQIMLVKKEFPYPCYDPATREGDLKLLQLMEKAKINKYVTILHLPKKGDDVKPGTMCQVAGWGRTHNSASWSDTLREVNITIIDRKVCNDRNHYNFNPVIGMNMVCAGSLRGGRDSCNGDSGSPLLCEGVFRGVTSFGLENKCGDPRGPGVYILLSKKHLNWIIMTIKGAV

SEQ ID NO: 6347 - protein, 44 aa, Homo Sapiens
MQECSELQLPFYQDPPSVMLDKLSAGMAEQQAILKKSQGDHRGT

SEQ ID NO: 6348 - protein, 35 aa, Homo Sapiens
MQPILLLLAFLLLPRADAAGEKGQADQSCAAPQAT

SEQ ID NO: 6349 - protein, 202 aa, Homo Sapiens
MQPILLLLAFLLLPRADAGEIIGGHEAKPHSRPYMAYLMIWDQKSLKRCGGFLIRDDFVLTAAHCWGRLERKAKRTRAVQPLRLPSNKAQVKPGQTCSVAGWGQTAPLGKHSHTLQEVKMTVQEDRKCESDLRHYYDSTIELCVGDPEIKKTSFKGDSGGPLVCNKVAQGIVSYGRNNGMPPRACTKVSSFVHWIKKTMKRY

SEQ ID NO: 6350 - protein, 202 aa, Homo Sapiens; identical to SEQ ID NO: 6349

SEQ ID NO: 6351 - protein, 247 aa, Homo Sapiens
MQPILLLLAFLLLPRADAGEIIGGHEAKPHSRPYMAYLMIWDQKSLKRCGGFLIRDDFVLTAAHCWGSSINVTLGAHNIKEQEPTQQFIPVKRPIPHPAYNPKNFSNDIMLLQLERKAKRTRAVQPLRLPSNKAQVKPGQTCSVAGWGQTAPLGKHSHTLQEVKMTVQEDRKCESDLRHYYDSTIELCVGDPEIKKTSFKGDSGGPLVCNKVAQGIVSYGRNNGMPPRACTKVSSFVHWIKKTMKRY

SEQ ID NO: 6352 - protein, 90 aa, Homo Sapiens
MQPILLLLAFLLLPRADAGEIIGGHEAKPHSRPYMAYLMIWDQKSLKRCGGFLIRDDFVLTAAHCWGSWRERPSGPELCSPSGYLATRPR

SEQ ID NO: 6353 - protein, 90 aa, Homo Sapiens; identical to SEQ ID NO: 6352

SEQ ID NO: 6354 - protein, 152 aa, Homo Sapiens
MQPILLLLAFLLLPRADQLERKAKRTRAVQPLRLPSNKAQVKPGQTCSVAGWGQTAPLGKHSHTLQEVKMTVQEDRKCESDLRHYYDSTIELCVGDPEIKKTSFKGDSGGPLVCNKVAQGIVSYGRNNGMPPRACTKVSSFVHWIKKTMKRY

SEQ ID NO: 6355 - protein, 235 aa, Homo Sapiens
MQTFPSGEIIGGHEAKPHSRPYMAYLMIWDQKSLKRCGGFLIRDDFVLTAAHCWGSSINVTLGAHNIKEQEPTQQFIPVKRPIPHPAYNPKNFSNDIMLLQLERKAKRTRAVQPLRLPSNKAQVKPGQTCSVAGWGQTAPLGKHSHTLQEVKMTVQEDRKCESDLRHYYDSTIELCVGDPEIKKTSFKGDSGGPLVCNKVAQGIVSYGRNNGMPPRACTKVSSFVHWIKKTMKRY

SEQ ID NO: 6356 - protein, 115 aa, Homo Sapiens
MQPFLLLLAFLLTPGAGTEEIIGGHEAKPHSRPYMAFVQFLQEKSRKRCGGILVRKDFVLTAAHCQGRGDSGGPLVCKDVAQGILSYGNKKGTPPGVYIKVSHFLPWIKRTMKRL

SEQ ID NO: 6357 - protein, 160 aa, Homo Sapiens
MQPFLLLLAFLLTPGAGTEEIIGGHEAKPHSRPYMAFVQFLQEKSRKRCGGILVRKDFVLTAAHCQGSSINVTLGAHNIKEQERTQQFIPVKRPIPHPAYNPKNFSNDIMLLQGDSGGPLVCKDVAQGILSYGNKKGTPPGVYIKVSHFLPWIKRTMKRL

SEQ ID NO: 6358 - protein, 246 aa, Homo Sapiens
MQPFLLLLAFLLTPGAGTEEIIGGHEAKPHSRPYMAFVQFLQEKSRKRCGGILVRKDFVLTAAHCQGSSINVTLGAHNIKEQERTQQFIPVKRPIPHPAYNPKNFSNDIMLLQLERKAKWTTAVRPLRLPSSKAQVKPGQLCSVAGWGYVSMSTLATTLQEVLLTVQKDCQCERLFHGNYSRATEICVGDPKKTQTGFKGDSGGPLVCKDVAQGILSYGNKKGTPPGVYIKVSHFLPWIKRTMKRL

SEQ ID NO: 6359 - protein, 264 aa, Homo Sapiens
MTKFSSFSLFFLIVGAYMTHVCFNMEIIGGKEVSPHSRPFMASIQYGGHHVCGGVLIDPQWVLTAAHCQYRFTKGQSPTVVLGAHSLSKNEASKQTLEIKKFIPFSRVTSDPQSNDIMLVKLQTAAKLNKHVKMLHIRSKTSLRSGTKCKVTGWGATDPDSLRPSDTLREVTVTVLSRKLCNSQSYYNGDPFITKDMVCAGDAKGQKDSCKGDSGGPLICKGVFHAIVSGGHECGVATKPGIYTLLTKKYQTWIKSNLVPPHTN

SEQ ID NO: 6360 - protein, 218 aa, Homo Sapiens
MASLQRNGSHLCGGVLVHPKWVLTAAHCLAQRMAQLRLVLGLHTLDSPGLTFHIKAAIQHPRYKPVPALENDLALLQLDGKVKPSRTIRPLALPSKRQVVAAGTRCSMAGWGLTHQGGRLSRVLRELDLQVLDTRMCNNSRFWNGSLSPSMVCLAADSKDQAPCKGDSGGPLVCGKGRVLARVLSFSSRVCTDIFKPPVATAVAPYVSWIRKVTGRSA

SEQ ID NO: 6361 - protein, 257 aa, Homo Sapiens
MEACVSSLLVLALGALSVGSSFGTQIIGGREVIPHSRPYMASLQRNGSHLCGGVLVHPKWVLTAAHCLAQRMAQLRLVLGLHTLDSPGLTFHIKAAIQHPRYKPVPALENDLALLQLDGKVKPSRTIRPLALPSKRQVVAAGTRCSMAGWGLTHQGGRLSRVLRELDLQVLDTRMCNNSRFWNGSLSPSMVCLAADSKDQAPCKGDSGGPLVCGKGRVLARVLSFSSRVCTDIFKPPVATAVAPYVSWIRKVTGRSA

SEQ ID NO: 6362 - protein, 802 aa, Homo Sapiens
MLAEPFNWHPGMWNMLIVAMCLALLGCLQAQELQGHVSIILLGATGDLAKKYLWQGLFQLYLDEAGRGHSFSFHGAALTAPKQGQELMAKALESLSCPKDMAPSHCAEHKDQFLQLSQYRQLKTAEDYQALNKDIEAQLQHAGLREAGRIFYFSVPPFAYEDIARNINSSCRPGPGAWLRVVLEKPFGHDHFSAQQLATELGTFFQEEEMYRVDHYLGKQAVAQILPFRDQNRKALDGLWNRHHVERVEIIMKETVDAEGRTSFYEEYGVIRDVLQNHLTEVLTLVAMELPHNVSSAEAVLRHKLQVFQALRGLQRGSAVVGQYQSYSEQVRRELQKPDSFHSLTPTFAAVLVHIDNLRWEGVPFILMSGKALDERVGYARILFKNQACCVQSEKHWAAAQSQCLPRQLVFHIGHGDLGSPAVLVSRNLFRPSLPSSWKEMEGPPGLRLFGSPLSDYYAYSPVRERDAHSVLLSHIFHGRKNFFITTENLLASWNFWTPLLESLAHKAPRLYPGGAENGRLLDFEFSSGRLFFSQQQPEQLVPGPGPAPMPSDFQVLRAKYRESPLVSAWSEELISKLANDIEATAVRAVRRFGQFHLALSGGSSPVALFQQLATAHYGFPWAHTHLWLVDERCVPLSDPESNFQGLQAHLLQHVRIPYYNIHPMPVHLQQRLCAEEDQGAQIYAREISALVANSSFDLVLLGMGADGHTASLFPQSPTGLDGEQLVVLTTSPSQPHRRMSLSLPLINRAKKVAVLVMGRMKREITTLVSRVGHEPKKWPISGVLPHSGQLVWYMDYDAFLG

SEQ ID NO: 6363 - protein, 791 aa, Homo Sapiens
MWNMLIVAMCLALLGCLQAQELQGHVSIILLGATGDLAKKYLWQGLFQLYLDEAGRGHSFSFHGAALTAPKQGQELMAKALESLSCPKDMAPSHCAEHKDQFLQLSQYRQLKTAEDYQALNKDIEAQLQHAGLREAGRIFYFSVPPFAYEDIARNINSSCRPGPGAWLRVVLEKPFGHDHFSAQQLATELGTFFQEEEMYRVDHYLGKQAVAQILPFRDQNRKALDGLWNRHHVERVEIIMKETVDAEGRTSFYEEYGVIRDVLQNHLTEVLTLVAMELPHNVSSAEAVLRHKLQVFQALRGLQRGSAVVGQYQSYSEQVRRELQKPDSFHSLTPTFAAVLVHIDNLRWEGVPFILMSGKALDERVGYARILFKNQACCVQSEKHWAAAQSQCLPRQLVFHIGHGDLGSPAVLVSRNLFRPSLPSSWKEMEGPPGLRLFGSPLSDYYAYSPVRERDAHSVLLSHIFHGRKNFFITTENLLASWNFWTPLLESLAHKAPRLYPGGAENGRLLDFEFSSGRLFFSQQQPEQLVPGPGPAPMPSDFQVLRAKYRESPLVSAWSEELISKLANDIEATAVRAVRRFGQFHLALSGGSSPVALFQQLATAHYGFPWAHTHLWLVDERCVPLSDPESNFQGLQAHLLQHVRIPYYNIHPMPVHLQQRLCAEEDQGAQIYAREISALVANSSFDLVLLGMGADGHTASLFPQSPTGLDGEQLVVLTTSPSQPHRRMSLSLPLINRAKKVAVLVMGRMKREITTLVSRVGHEPKKWPISGVLPHSGQLVWYMDYDAFLG

SEQ ID NO: 6364 - protein, 560 aa, Homo Sapiens
MFARMSDLHVLLLMALVGKTACGFSLMSLLESLDPDWTPDQYDYSYEDYNQEENTSSTLTHAENPDWYYTEDQADPCQPNPCEHGGDCLVHGSTFTCSCLAPFSGNKCQKVQNTCKDNPCGRGQCLITQSPPYYRCVCKHPYTGPSCSQVVPVCRPNPCQNGATCSRHKRRSKFTCACPDQFKGKFCEIGSDDCYVGDGYSYRGKMNRTVNQHACLYWNSHLLLQENYNMFMEDAETHGIGEHNFCRNPDADEKPWCFIKVTNDKVKWEYCDVSACSAQDVAYPEESPTEPSTKLPGFDSCGKTEIAERKIKRIYGGFKSTAGKHPWQASLQSSLPLTISMPQGHFCGGALIHPCWVLTAAHCTDIKTRHLKVVLGDQDLKKEEFHEQSFRVEKIFKYSHYNERDEIPHNDIALLKLKPVDGHCALESKYVKTVCLPDGSFPSGSECHISGWGVTETGKGSRQLLDAKVKLIANTLCNSRQLYDHMIDDSMICAGNLQKPGQDTCQGDSGGPLTCEKDGTYYVYGIVSWGLECGKRPGVYTQVTKFLNWIKATIKSESGF

SEQ ID NO: 6365 - protein, 534 aa, Homo Sapiens
MSLLESLDPDWTPDQYDYSYEDYNQEENTSSTLTHAENPDWYYTEDQADPCQPNPCEHGGDCLVHGSTFTCSCLAPFSGNKCQKVQNTCKDNPCGRGQCLITQSPPYYRCVCKHPYTGPSCSQVVPVCRPNPCQNGATCSRHKRRSKFTCACPDQFKGKFCEIGSDDCYVGDGYSYRGKMNRTVNQHACLYWNSHLLLQENYNMFMEDAETHGIGEHNFCRNPDADEKPWCFIKVTNDKVKWEYCDVSACSAQDVAYPEESPTEPSTKLPGFDSCGKTEIAERKIKRIYGGFKSTAGKHPWQASLQSSLPLTISMPQGHFCGGALIHPCWVLTAAHCTDIKTRHLKVVLGDQDLKKEEFHEQSFRVEKIFKYSHYNERDEIPHNDIALLKLKPVDGHCALESKYVKTVCLPDGSFPSGSECHISGWGVTETGKGSRQLLDAKVKLIANTLCNSRQLYDHMIDDSMICAGNLQKPGQDTCQGDSGGPLTCEKDGTYYVYGIVSWGLECGKRPGVYTQVTKFLNWIKATIKSESGF

SEQ ID NO: 6366 - protein, 459 aa, Homo Sapiens
MTILTYPFKNLPTASKWALRFSIRPLSCSSQLRAAPAVQTKTKKTLAKPNIRNVVVVDGVRTPFLLSGTSGLLHRTSVPKEVVDYIIFGTVIQEVKTSNVAREAALGAGFSDKTPAHTVTMACISANQAMTTGVGLIASGQCDVIVAGGVELMSDVPIRHSRKMRKLMLDLNKAKSMGQRLSLISKFRFNFLAPELPAVSEFSTSETMGHSADRLAAAFAVSRLEQDEYALRSHSLAKKAQDEGLLSDVVPFKVPGKDTVTKDNGIRPSSLEQMAKLKPAFIKPYGTVTAANSSFLTDGASAMLIMAEEKALAMGYKPKAYLRDFMYVSQDPKDQLLLGPTYATPKVLEKAGLTMNDIDAFEFHEAFSGQILANFKAMDSDWFAENYMGRKTKVGLPPLEKFNNWGGSLSLGHPFGATGCRLVMAAANRLRKEGGQYGLVAACAAGGQGHAMIVEAYPK

SEQ ID NO: 6367 - protein, 85 aa, Homo Sapiens
MTILTYPFKNLPTASKWALRFSIRPLSCSSQLRAAPAVQTKTKKTLAKPNIRNVVVVDGVRTPFLLSGTSYKDLMPHDLARAALT

SEQ ID NO: 6368 - protein, 351 aa, Homo Sapiens
MTILTYPFKNLPTASKWALRFSIRPLSCSSQLRAAPAVQTKTKKTLAKPNIRNVVVVDGVRTPFLLSGTSYKDLMPHDLARAALTGLLHRTSVPKEVVDYIIFGTVIQEVKTSNVAREAALGAGFSDKTPAHTVTMACISANQAMTTGKDTVTKDNGIRPSSLEQMAKLKPAFIKPYGTVTAANSSFLTDGASAMLIMAEEKALAMGYKPKAYLRDFMYVSQDPKDQLLLGPTYATPKVLEKAGLTMNDIDAFEFHEAFSGQILANFKAMDSDWFAENYMGRKTKVGLPPLEKFNNWGGSLSLGHPFGATGCRLVMAAANRLRKEGGQYGLVAACAAGGQGHAMIVEAYPK

SEQ ID NO: 6369 - protein, 150 aa, Homo Sapiens
MTILTYPFKNLPTASKWALRFSIRPLSCSSQLRAAPAVQTKTKKTLAKPNIRNVVVVDGVRTPFLLSGTSYKDLMPHDLARAALTGLLHRTSVPKEVVDYIIFGTVIQEVKTSNVAREAALGAGFSDKTPAHTVTMACISANQAMTTGVG

SEQ ID NO: 6370 - protein, 176 aa, Homo Sapiens
MTILTYPFKNLPTASKWALRFSIRPLSCSSQLRAAPAVQTKTKKTLAKPNIRNVVVVDGVRTPFLLSGTSYKDLMPHDLARAALTGLLHRTSVPKEVVDYIIFGTVIQEVKTSNVAREAALGAGFSDKTPAHTVTMACISANQAMTTGVGLIASGQCDVIVAGGVELMSDVPIRHS

SEQ ID NO: 6371 - protein, 474 aa, Homo Sapiens
MTILTYPFKNLPTASKWALRFSIRPLSCSSQLRAAPAVQTKTKKTLAKPNIRNVVVVDGVRTPFLLSGTSYKDLMPHDLARAALTGLLHRTSVPKEVVDYIIFGTVIQEVKTSNVAREAALGAGFSDKTPAHTVTMACISANQAMTTGVGLIASGQCDVIVAGGVELMSDVPIRHSRKMRKLMLDLNKAKSMGQRLSLISKFRFNFLAPELPAVSEFSTSETMGHSADRLAAAFAVSRLEQDEYALRSHSLAKKAQDEGLLSDVVPFKVPGKDTVTKDNGIRPSSLEQMAKLKPAFIKPYGTVTAANSSFLTDGASAMLIMAEEKALAMGYKPKAYLRDFMYVSQDPKDQLLLGPTYATPKVLEKAGLTMNDIDAFEFHEAFSGQILANFKAMDSDWFAENYMGRKTKVGLPPLEKFNNWGGSLSLGHPFGATGCRLVMAAANRLRKEGGQYGLVAACAAGGQGHAMIVEAYPK

SEQ ID NO: 6372 - protein, 452 aa, Homo Sapiens
MTLVSGWLLYGWIIAVQTKTKKTLAKPNIRNVVVVDGVRTPFLLSGTSYKDLMPHDLARAALTGLLHRTSVPKEVVDYIIFGTVIQEVKTSNVAREAALGAGFSDKTPAHTVTMACISANQAMTTGVGLIASGQCDVIVAGGVELMSDVPIRHSRKMRKLMLDLNKAKSMGQRLSLISKFRFNFLAPELPAVSEFSTSETMGHSADRLAAAFAVSRLEQDEYALRSHSLAKKAQDEGLLSDVVPFKVPGKDTVTKDNGIRPSSLEQMAKLKPAFIKPYGTVTAANSSFLTDGASAMLIMAEEKALAMGYKPKAYLRDFMYVSQDPKDQLLLGPTYATPKVLEKAGLTMNDIDAFEFHEAFSGQILANFKAMDSDWFAENYMGRKTKVGLPPLEKFNNWGGSLSLGHPFGATGCRLVMAAANRLRKEGGQYGLVAACAAGGQGHAMIVEAYPK

SEQ ID NO: 6373 - protein, 84 aa, Homo Sapiens
MALSSQIWAACLLLLLLLASLTSGSVFPQQTGQLAELQPQDRAGARASWMPMFQRRRRRDTHFPICIFCCGCCHRSKCGMCCKT

SEQ ID NO: 6374 - protein, 84 aa, Homo Sapiens; identical to SEQ ID NO: 6373

SEQ ID NO: 6375 - protein, 153 aa, Homo Sapiens
MKSLLLLVLISICWADHLSDNYTLDHDRAIHIQAENGPHLLVEAEQAKVFSHRGGNVTLPCKFYRDPTAFGSGIHKIRIKWTKLTSDYLKEVDVFVSMGYHKKTYGGYQGRVFLKGGSDSDASLVITDLTLEDYGRYKCEVIEGLEDDTVVVA

SEQ ID NO: 6376 - protein, 161 aa, Homo Sapiens
MKSLLLLVLISICWADHLSDNYTLDHDRAIHIQAENGPHLLVEAEQAKVFSHRGGNVTLPCKFYRDPTAFGSGIHKIRIKWTKLTSDYLKEVDVFVSMGYHKKTYGGYQGRVFLKGGSDSDASLVITDLTLEDYGRYKCEVIEGLEDDTVVVALDLQGMYL

SEQ ID NO: 6377 - protein, 169 aa, Homo Sapiens
MKSLLLLVLISICWADHLSDNYTLDHDRAIHIQAENGPHLLVEAEQAKVFSHRGGNVTLPCKFYRDPTAFGSGIHKIRIKWTKLTSDYLKEVDVFVSMGYHKKTYGGYQGRVFLKGGSDSDASLVITDLTLEDYGRYKCEVIEGLEDDTVVVALDLQGVVFPYFPRLGR

SEQ ID NO: 6378 - protein, 199 aa, Homo Sapiens
MKSLLLLVLISICWADHLSDNYTLDHDRAIHIQAENGPHLLVEAEQAKVFSHRGGNVTLPCKFYRDPTAFGSGIHKIRIKWTKLTSDYLKEVDVFVSMGYHKKTYGGYQGRVFLKGGSDSDASLVITDLTLEDYGRYKCEVIEGLEDDTVVVALDLQGVVFPYFPRLGRYNLNFHEAQQACLDQDAVIASFDQLYDAWR

SEQ ID NO: 6379 - protein, 354 aa, Homo Sapiens
MKSLLLLVLISICWADHLSDNYTLDHDRAIHIQAENGPHLLVEAEQAKVFSHRGGNVTLPCKFYRDPTAFGSGIHKIRIKWTKLTSDYLKEVDVFVSMGYHKKTYGGYQGRVFLKGGSDSDASLVITDLTLEDYGRYKCEVIEGLEDDTVVVALDLQGVVFPYFPRLGRYNLNFHEAQQACLDQDAVIASFDQLYDAWRGGLDWCNAGWLSDGSVQYPITKPREPCGGQNTVPGVRNYGFWDKDKSRYDVFCFTSNFNGRFYYLIHPTKLTYDEAVQACLNDGAQIAKVGQIFAAWKILGYDRCDAGWLADGSVRYPISRPRRRCSPTEAAVRFVGFPDKKHKLYGVYCFRAYN

SEQ ID NO: 6380 - protein, 258 aa, Homo Sapiens
MKSLLLLVLISICWADHLSDNYTLDHDRAIHIQAENGPHLLVEAEQAKVFSHRGGNVTLPCKFYRDPTAFGSGIHKIRIKWTKLTSDYLKEVDVFVSMGYHKKTYGGYQGRVFLKGGSDSDASLVITDLTLEDYGRYKCEVIEGLEDDTVVVALDLQGVVFPYFPRLGRYNLNFHEAQQACLDQDAVIASFDQLYDAWRGGLDWCNAGWLSDGSVQYPITKPREPCGGQNTVPGVRNYGFWDKDKSRYDVFCFTSNFN

SEQ ID NO: 6381 - protein, 182 aa, Homo Sapiens
MKSLLLLVLISICWADHLSDNYTLDHDRAIHIQENGPHLLVEAEQAKVFSHRGGNVTLPCKFYRDPTAFGSGIHKIRIKWTKLTSDYLKEVDVFVSMGYHKKTYGGYQGRVFLKGGSDSDASLVITDLTLEDYGRYKCEVIEGLEDDTVVVALDLQGVVFPYFPRLGRYNLNFHEAQQACLD

SEQ ID NO: 6382 - protein, 185 aa, Homo Sapiens
MPGWLTLPTLCRFLLWAFTIFHKAQGDPASHPGPHYLLPPIHEVIHSHRGATATLPCVLGTTPPSYKVRWSKVEPGELRETLILITNGLHARGYGPLGGRARMRRGHRLDASLVIAGVRLEDEGRYRCELINGIEDESVALTLSLEGVVFPYQPSRGRYQFNYYEAKQACEEQDGRLATYSQLYQ

SEQ ID NO: 6383 - protein, 340 aa, Homo Sapiens
MPGWLTLPTLCRFLLWAFTIFHKAQGDPASHPGPHYLLPPIHEVIHSHRGATATLPCVLGTTPPSYKVRWSKVEPGELRETLILITNGLHARGYGPLGGRARMRRGHRLDASLVIAGVRLEDEGRYRCELINGIEDESVALTLSLEGVVFPYQPSRGRYQFNYYEAKQACEEQDGRLATYSQLYQAWTEGLDWCNAGWLLEGSVRYPVLTARAPCGGRGRPGIRSYGPRDRMRDRYDAFCFTSALAGQVFFVPGRLTLSEAHAACRRRGAVVAKVGHLYAAWKFSGLDQCDGGWLADGSVRFPITTPRPRCGGLPDPGVRSFGFPRPQQAAYGTYCYAEN

SEQ ID NO: 6384 - protein, 226 aa, Homo Sapiens
MGLLLLVPLLLLPGSYGLPFYNGFYYSNSANDQNLGNGHGKDLLNGVKLVVETPEETLFTYQGASVILPCRYRYEPALVSPRRVRVKWWKLSENGAPEKDVLVAIGLRHRSFGDYQGRVHLRQDKEHDVSLEIQDLRLEDYGRYRCEVIDGLEDESGLVELELRAESQERGGNGQEVWSFLTSPPTGATSSTSTRASRSVQSRLRWWPPLSSSSGPGRRAWTGATR

SEQ ID NO: 6385 - protein, 360 aa, Homo Sapiens
MGLLLLVPLLLLPGSYGLPFYNGFYYSNSANDQNLGNGHGKDLLNGVKLVVETPEETLFTYQGASVILPCRYRYEPALVSPRRVRVKWWKLSENGAPEKDVLVAIGLRHRSFGDYQGRVHLRQDKEHDVSLEIQDLRLEDYGRYRCEVIDGLEDESGLVELELRGVVFPYQSPNGRYQFNFHEGQQVCAEQAAVVASFEQLFRAWEEGLDWCNAGWLQDATVQYPIMLPRQPCGGPGLAPGVRSYGPRHRRLHRYDVFCFATALKGRVYYLEHPEKLTLTEAREACQEDDATIAKVGQLFAAWKFHGLDRCDAGWLADGSVRYPVVHPHPNCGPPEPGVRSFGFPDPQSRLYGVYCYRQH

SEQ ID NO: 6386 - protein, 186 aa, Homo Sapiens
MGLLLLVPLLLLPGSYGLPFYNGFYYSNSANDQNLGNGHGKDLLNGVKLVVETPEETLFTYQGASVILPCRYRYEPALVSPRRVRVKWWKLSENGAPEKDVLVAIGLRHRSFGDYQGRVHLRQDKEHDVSLEIQDLRLEDYGRYRCEVIDGLEDESGLVELELRGWGCVSSHLSHMLGRQFGDRGR

SEQ ID NO: 6387 - protein, 422 aa, Homo Sapiens
MRKWRHREVNLPEVTQQDAVCPAPIPSPGLSAQTGLQKIWGTIHCQVCPGAPAWPGSPWHEEMGLLLLVPLLLLPGSYGLPFYNGFYYSNSANDQNLGNGHGKDLLNGVKLVVETPEETLFTYQGASVILPCRYRYEPALVSPRRVRVKWWKLSENGAPEKDVLVAIGLRHRSFGDYQGRVHLRQDKEHDVSLEIQDLRLEDYGRYRCEVIDGLEDESGLVELELRGVVFPYQSPNGRYQFNFHEGQQVCAEQAAVVASFEQLFRAWEEGLDWCNAGWLQDATVQYPIMLPRQPCGGPGLAPGVRSYGPRHRRLHRYDVFCFATALKGRVYYLEHPEKLTLTEAREACQEDDATIAKVGQLFAAWKFHGLDRCDAGWLADGSVRYPVVHPHPNCGPPEPGVRSFGFPDPQSRLYGVYCYRQH

SEQ ID NO: 6388 - protein, 402 aa, Homo Sapiens
MVCARAALGPGALWAAAWGVLLLTAPAGAQRGRKKVVHVLEGESGSVVVQTAPGQVVSHRGGTIVLPCRYHYEAAAHGHDGVRLKWTKVVDPLAFTDVFVALGPQHRAFGSYRGRAELQGDGPGDASLVLRNVTLQDYGRYECEVTNELEDDAGMVKLDLEGVVFPYHPRGGRYKLTFAEAQRACAEQDGILASAEQLHAAWRDGLDWCNAGWLRDGSVQYPVNRPREPCGGLGGTGSAGGGGDANGGLRNYGYRHNAEERYDAFCFTSNLPGRVFFLKPLRPVPFSGAARACAARGAAVAKVGQLFAAWKLQLLDRCTAGWLADGSARYPIVNPRARCGGRRPGVRSLGFPDATRRLFGVYCYRAPGAPDPAPGGWGWGWAGGGGWAGGARDPAAWTPLHV

SEQ ID NO: 6389 - protein, 334 aa, Homo Sapiens
MPLLGLLPRRAWASLLSQLLRPPCASCTGAVRCQSQDFDIAGQFDPMIPDAECLKIMCEILSGLQLGDFLIKMAWKDVRHEMVVKKGLAPEVADRIGDYVQCHGGVSLVEQMFQDPRLSQNKQALEGLGDLKLLFEYLTLFGIADKISFDLSLARGLDYYTGVIYEAVLLQTPTQAGEEPLNVGSVAAGGRYDGLVGMFDPKGHKVPCVGLSIGVERIFYIVEQRMKTKGEKVRTTETQVFVATPQKNFLQERLKLIAELWDSGIKAEMLYKNNPKLLTQLHYCESTGIPLVVIIGEQELKEGVIKIRSVASREEVAIKRENFVAEIQKRLSES

SEQ ID NO: 6390 - protein, 512 aa, Homo Sapiens
MPLLGLLPRRAWASLLSQLLRPPCASCTGAVRCQSQGEESLQVAEAVLTSQLKAHQEKPNFIIKTPKGTRDLSPQHMVVREKILDLVISCFKRHGAKGMDTPAFELKETLTEKYGEDSGLMYDLKDQGGELLSLRYDLTVPFARYLAMNKVKKMKRYHVGKVWRRESPTIVQGRYREFCQCDFDIAGQFDPMIPDAECLKIMCEILSGLQLGDFLIKVNDRRIVDGMFAVCGVPESKFRAICSSIDKLDKMAWKDVRHEMVVKKGLAPEVADRIGDYVQCHGGVSLVEQMFQDPRLSQNKQALEGLGDLKLLFEYLTLFGIADKISFDLSLARGLDYYTGVIYEAVLLQTPTQAGEEPLNVGSVAAGGRYDGLVGMFDPKGHKVPCVGLSIGVERIFYIVEQRMKTKGEKVRTTETQVFVATPQKNFLQERLKLIAELWDSGIKAEMLYKNNPKLLTQLHYCESTGIPLVVIIGEQELKEGVIKIRSVASREEVAIKRENFVAEIQKRLSES

SEQ ID NO: 6391 - protein, 512 aa, Homo Sapiens; identical to SEQ ID NO: 6390

SEQ ID NO: 6392 - protein, 99 aa, Homo Sapiens
MPLLGLLPRRAWASLLSQLLRPPCASCTGAVRCQSQGEESLQVGGQQGQRCHRSGQCPEKPHLTFILLPGCRGSVNIPTESTSRETKFYYQDPKGYQGS

SEQ ID NO: 6393 - protein, 99 aa, Homo Sapiens; identical to SEQ ID NO: 6392

SEQ ID NO: 6394 - protein, 481 aa, Homo Sapiens
MPLLGLLPRRAWASLLSQLLRPPCASCTGAVRCQSQGTRDLSPQHMVVREKILDLVISCFKRHGAKGMDTPAFELKETLTEKYGEDSGLMYDLKDQGGELLSLRYDLTVPFARYLAMNKVKKMKRYHVGKVWRRESPTIVQGRYREFCQCDFDIAGQFDPMIPDAECLKIMCEILSGLQLGDFLIKVNDRRIVDGMFAVCGVPESKFRAICSSIDKLDKMAWKDVRHEMVVKKGLAPEVADRIGDYVQCHGGVSLVEQMFQDPRLSQNKQALEGLGDLKLLFEYLTLFGIADKISFDLSLARGLDYYTGVIYEAVLLQTPTQAGEEPLNVGSVAAGGRYDGLVGMFDPKGHKVPCVGLSIGVERIFYIVEQRMKTKGEKVRTTETQVFVATPQKNFLQERLKLIAELWDSGIKAEMLYKNNPKLLTQLHYCESTGIPLVVIIGEQELKEGVIKIRSVASREEVAIKRENFVAEIQKRLSES

SEQ ID NO: 6395 - protein, 399 aa, Homo Sapiens
MPLLGLLPRRAWASLLSQLLRPPCASCTGAVRCQSQVAEAVLTSQLKAHQEKPNFIIKTPKGTRDLSPQHMVVREKILDLVISCFKRHGAKGMDTPAFELKDFDIAGQFDPMIPDAECLKIMCEILSGLQLGDFLIKMAWKDVRHEMVVKKGLAPEVADRIGDYVQCHGGVSLVEQMFQDPRLSQNKQALEGLGDLKLLFEYLTLFGIADKISFDLSLARGLDYYTGVIYEAVLLQTPTQAGEEPLNVGSVAAGGRYDGLVGMFDPKGHKVPCVGLSIGVERIFYIVEQRMKTKGEKVRTTETQVFVATPQKNFLQERLKLIAELWDSGIKAEMLYKNNPKLLTQLHYCESTGIPLVVIIGEQELKEGVIKIRSVASREEVAIKRENFVAEIQKRLSES

SEQ ID NO: 6396 - protein, 473 aa, Homo Sapiens
MPLLGLLPRRAWASLLSQLLRPPCASCTGAVRCQSQVAEAVLTSQLKAHQEKPNFIIKTPKGTRDLSPQHMVVREKILDLVISCFKRHGAKGMDTPAFELKETLTEKYGEDSGLMYDLKDQGGELLSLRYDLTVPFARYLAMNKVKKMKRYHVGKVWRRESPTIVQGRYREFCQCDFDIAGQFDPMIPDAECLKIMCEILSGLQLGDFLIKMAWKDVRHEMVVKKGLAPEVADRIGDYVQCHGGVSLVEQMFQDPRLSQNKQALEGLGDLKLLFEYLTLFGIADKISFDLSLARGLDYYTGVIYEAVLLQTPTQAGEEPLNVGSVAAGGRYDGLVGMFDPKGHKVPCVGLSIGVERIFYIVEQRMKTKGEKVRTTETQVFVATPQKNFLQERLKLIAELWDSGIKAEMLYKNNPKLLTQLHYCESTGIPLVVIIGEQELKEGVIKIRSVASREEVAIKRENFVAEIQKRLSES

SEQ ID NO: 6397 - protein, 506 aa, Homo Sapiens
MPLLGLLPRRAWASLLSQLLRPPCASCTGAVRCQSQVAEAVLTSQLKAHQEKPNFIIKTPKGTRDLSPQHMVVREKILDLVISCFKRHGAKGMDTPAFELKETLTEKYGEDSGLMYDLKDQGGELLSLRYDLTVPFARYLAMNKVKKMKRYHVGKVWRRESPTIVQGRYREFCQCDFDIAGQFDPMIPDAECLKIMCEILSGLQLGDFLIKVNDRRIVDGMFAVCGVPESKFRAICSSIDKLDKMAWKDVRHEMVVKKGLAPEVADRIGDYVQCHGGVSLVEQMFQDPRLSQNKQALEGLGDLKLLFEYLTLFGIADKISFDLSLARGLDYYTGVIYEAVLLQTPTQAGEEPLNVGSVAAGGRYDGLVGMFDPKGHKVPCVGLSIGVERIFYIVEQRMKTKGEKVRTTETQVFVATPQKNFLQERLKLIAELWDSGIKAEMLYKNNPKLLTQLHYCESTGIPLVVIIGEQELKEGVIKIRSVASREEVAIKRENFVAEIQKRLSES

SEQ ID NO: 6398 - protein, 506 aa, Homo Sapiens; identical to SEQ ID NO: 6397

SEQ ID NO: 6399 - protein, 506 aa, Homo Sapiens; identical to SEQ ID NO: 6397

SEQ ID NO: 6400 - protein, 160 aa, Homo Sapiens
MVVREKILDLVISCFKRHGAKGMDTPAFELKETLTEKYGEDSGLMYDLKDQGGELLSLRYDLTVPFARYLAMNKVKKMKRYHVGKVWRRESPTIVQGRYREFCQCDFDIAGQFDPMIPDAECLKIMCEILSGLQLGDFLIKESRYCHCFEWKGIDKHLGH

SEQ ID NO: 6401 - protein, 436 aa, Homo Sapiens
MVVREKILDLVISCFKRHGAKGMDTPAFELKETLTEKYGEDSGLMYDLKDQGGELLSLRYDLTVPFARYLAMNKVKKMKRYHVGKVWRRESPTIVQGRYREFCQCDFDIAGQFDPMIPDAECLKIMCEILSGLQLGDFLIKVNDRRIVDGMFAVCGVPESKFRAICSSIDKLDKMAWKDVRHEMVVKKGLAPEVADRIGDYVQCHGGVSLVEQMFQDPRLSQNKQALEGLGDLKLLFEYLTLFGIADKISFDLSLARGLDYYTGVIYEAVLLQTPTQAGEEPLNVGSVAAGGRYDGLVGMFDPKGHKVPCVGLSIGVERIFYIVEQRMKTKGEKVRTTETQVFVATPQKNFLQERLKLIAELWDSGIKAEMLYKNNPKLLTQLHYCESTGIPLVVIIGEQELKEGVIKIRSVASREEVAIKRENFVAEIQKRLSES

SEQ ID NO: 6402 - protein, 293 aa, Homo Sapiens
MVVREKILDLVISCFKRHGAKGMDTPAFELKETLTEKYGEDSGLMYDLKDQGGELLSLRYDLTVPFARYLAMNKVKKMKRYHVGKVWRRESPTIVQGRYREFCQCDFDIAGQFDPMIPDAECLKIMCEILSGLQLGDFLIKVNDRRIVDGMFAVCGVPESKFRAICSSIDKLDKMAWKDVRHEMVVKKGLAPEVADRIGDYVQCHGGVSLVEQMFQDPRLSQNKQALEGLGDLKLLFEYLTLFGIADKISFDLSLARGLDYYTGVIYEAVLLQTPTQAGEEPLNVGSVAAGGR

SEQ ID NO: 6403 - protein, 436 aa, Homo Sapiens; identical to SEQ ID NO: 6401

SEQ ID NO: 6404 - protein, 219 aa, Homo Sapiens
  misc_feature (1)..(1): Xaa can be any naturally occurring amino acid
XASLLSQLLRPPCASCTGAVRCQSQVAEAVLTSQLKAHQEKPNFIIKTPKGTRDLSPQHMVVREKILDLVISCFKRHGAKGMDTPAFELKETLTEKYGEDSGLMYDLKDQGGELLSLRYDLTVPFARYLAMNKVKKMKRYHVGKVWRRESPTIVQGRYREFCQCDFDIAGQFDPMIPDAECLKIMCEILSGLQLGDFLIKESRYCHCFEWKGIDKHLGH

SEQ ID NO: 6405 - protein, 223 aa, Homo Sapiens
MHPQVVILSLILHLADSVAGSVKVGGEAGPSVTLPCHYSGAVTSMCWNRGSCSLFTCQNGIVWTNGTHVTYRKDTRYKLLGDLSRRDVSLTIENTAVSDSGVYCCRVEHRGWFNDMKITVSLEIVPPKVTTTPIVTTVPTVTTVRTSTTVPTTTTVPMTTVPTTTVPTTMSIPTTTTVLTTMTVSTTTSVPTTTSIPTTTSVPVTTTVSTFVPPMPLPRQNHE

SEQ ID NO: 6406 - protein, 364 aa, Homo Sapiens
MHPQVVILSLILHLADSVAGSVKVGGEAGPSVTLPCHYSGAVTSMCWNRGSCSLFTCQNGIVWTNGTHVTYRKDTRYKLLGDLSRRDVSLTIENTAVSDSGVYCCRVEHRGWFNDMKITVSLEIVPPKVTTTPIVTTVPTVTTVRTSTTVPTTTTVPMTTVPTTTVPTTMSIPTTTTVLTTMTVSTTTSVPTTTSIPTTTSVPVTTTVSTFVPPMPLPRQNHEPVATSPSSPQPAETHPTTLQGAIRREPTSSPLYSYTTDGNDTVTESSDGLWNNNQTQLFLEHSLLTANTTKGIYAGVCISVLVLLALLGVIIAKKYFFKKEVQQLSVSFSSLQIKALQNAVEKEVQAEDNIYIENSLYATD

SEQ ID NO: 6407 - protein, 401 aa, Homo Sapiens
MHPQVVILSLILHLADSVAGSVKVGGEAGPSVTLPCHYSGAVTSMCWNRGSCSLFTCQNGIVWTNGTHVTYRKDTRYKLLGDLSRRDVSLTIENTAVSDSGVYCCRVEHRGWFNDMKITVSLEIVPPKVTTTPIVTTVPTVTTVRTSTTVPTTTTVPMTTVPTTTVPTTMSIPTTTTVLTTMTVSTTTSVPTTTSIPTTTSVPVTTTVSTFVPPMPLPRQNHEPVATSPSSPQPAETHPTTLQGAIRREPTSSPLYSYTTDGNDTVTESSDGLWNNNQTQLFLEHSLLTANTTKGIYAGVCISVLVLLALLGVIIAKMFHLAAFKLKLCKMQLKRKSKQKTISTLRIVFMPRTKTQWCSLRVYAHECRRLNRHQHIRRLLDPKTIFLFQFHLAFQHVSDTG

SEQ ID NO: 6408 - protein, 364 aa, Homo Sapiens; identical to SEQ ID NO: 6406

SEQ ID NO: 6409 - protein, 401 aa, Homo Sapiens; identical to SEQ ID NO: 6407

SEQ ID NO: 6410 - protein, 268 aa, Homo Sapiens
MGLSPSAPAVAVQASNASASPPSGCPMHEGKMKGCPVNTEPSGPTCEKKTYSVPAHQERAYEYVECPIRGTAAENKENLDPSNLMPPPNQTPAPDQPFALSTVREESSIPRADSEKKWVYPSEQMFWNAMLKKGWKWKDEDISQKDMYNIIRIHNQNNEQAWKEILKWEALHAAECPCGPSLIRFGGKAKEYSPRARIRSWMGYELPFDRHDWIINRCGTEVRYVIDYYDGGEVNKDYQFTILDVRPALDSLSAVWDRMKVAWWRWTS

SEQ ID NO: 6411 - protein, 268 aa, Homo Sapiens; identical to SEQ ID NO: 6410

SEQ ID NO: 6412 - protein, 268 aa, Homo Sapiens; identical to SEQ ID NO: 6410

SEQ ID NO: 6413 - protein, 131 aa, Homo Sapiens
MNLPSTKVSWAAVTLLLLLLLLPPALLSSGAAAQPLPDCCRQKTCSCRLYELLHGAGNHAAGILTLGKRRSGPPGLQGRLQRLLQASGNHAAGILTMGRRAGAEPAPRPCLGRRCSAPAAASVAPGGQSGI

SEQ ID NO: 6414 - protein, 223 aa, Homo Sapiens
MAAWGCVAALGAARGLCWRAARAAAGLQGRPARRCYAVGPAQPLPRNDFPRIEGVLLLGEPVRWETSLQLIMDVLLSNGSPGAGLATPPYPHLPVLASNMDLLWMAEAKMPSDNPMSDVYGANLFHQYLQKATHDGAPELGAGGTRQQQPSASQSCISILVCTGVYNPRNPQSTEPVLGGGEPPFHGHRDLCFSPGLMEASHVVNDVNEAVQLVFRKEGWALE

SEQ ID NO: 6415 - protein, 423 aa, Homo Sapiens
MAAWGCVAALGAARGLCWRAARAAAGLQGRPARRCYAVGPAQSPPTFGFLLDIDGVLVRGHRVIPAALKAFRRLVNSQGQLRVPVVFVTNAGNILQHSKAQELSALLGCEVDADQVILSHSPMKLFSEYHEKRMLVSGQGPVMENAQGLGFRNVVTVDELRMAFPLLDMVDLERRLKTTPLPRNDFPRIEGVLLLGEPVRWETSLQLIMDVLLSNGSPGAGLATPPYPHLPVLASNMDLLWMAEAKMPRFGHGTFLLCLETIYQKVTGKELRYEGLMGKPSILTYQYAEDLIRRQAERRGWAAPIRKLYAVGDNPMSDVYGANLFHQYLQKATHDGAPELGAGGTRQQQPSASQSCISILVCTGVYNPRNPQSTEPVLGGGEPPFHGHRDLCFSPGLMEASHVVNDVNEAVQLVFRKEGWALE

SEQ ID NO: 6416 - protein, 393 aa, Homo Sapiens
MYAWFFLPSFSQSPPTFGFLLDIDGVLVRGHRVIPAALKAFRRLVNSQGQLRVPVVFVTNAGNILQHSKAQELSALLGCEVDADQVILSHSPMKLFSEYHEKRMLVSGQGPVMENAQGLGFRNVVTVDELRMAFPLLDMVDLERRLKTTPLPRNDFPRIEGVLLLGEPVRWETSLQLIMDVLLSNGSPGAGLATPPYPHLPVLASNMDLLWMAEAKMPRFGHGTFLLCLETIYQKVTGKELRYEGLMGKPSILTYQYAEDLIRRQAERRGWAAPIRKLYAVGDNPMSDVYGANLFHQYLQKATHDGAPELGAGGTRQQQPSASQSCISILVCTGVYNPRNPQSTEPVLGGGEPPFHGHRDLCFSPGLMEASHVVNDVNEAVQLVFRKEGWALE

SEQ ID NO: 6417 - protein, 87 aa, Homo Sapiens
MELAHSLLLNEEAYNQLGEVQKAEFIFEWLRYLEKLLLATSRNDVREKQKTLVEQLLSLLNSSPGPPTRKLLAKNLAILYSIGDTFS

SEQ ID NO: 6418 - protein, 113 aa, Homo Sapiens
MELAHSLLLNEEAYNQLGEVQKAEFIFEWLRYLEKLLLATSRNDVREKQKTLVEQLLSLLNSSPGPPTRKLLAKNLAILYSIGDTFSVHEAIDKCNDLIRSKDDSPSYLPTKL

SEQ ID NO: 6419 - protein, 2046 aa, Homo Sapiens
MELAHSLLLNEEAYNQLGEVQKAEFIFEWLRYLEKLLLATSRNDVREKQKTLVEQLLSLLNSSPGPPTRKLLAKNLAILYSIGDTFSVHEAIDKCNDLIRSKDDSPSYLPTKLAAVVCLGSLYKKLGRILGNTFTDTVGNILKAMKSAESQGRYEIMLSLQNILNGLGAAAAPCHRDVYKAARSCLTDRSMAVRCAAAKCLLELQNEAIFMWSTDLDSVATLCFKSFEGSNYDVRISVSKLLGIILAKAVISKHPGTAASRQSIRRVSLEEVLELLGTGFLRGSSGFLRASGDMLKGTSSVSRDVRVGVTQAYVVFVSTLGGAWLEKNFAAFFSHILSLASPSHPKATQTQIDAVCCRRCVSFILRTTIGGLLGEKAQLAAVKDICQAIWKLKKVMDAVMSDGNLETRLGSTDVAASQHMLVCALQELGNLIHNLGTTAAPLLQDSSTGLLDSILSVILHPSISVRLAAAWCLHCIAVALPSYLTPLLDRCLERLTGHKSSPEAVTGFSFAVAALLGAVKHCPLGIPHGKGKIIMTLAEDLLCSAAQNSRLSAQRTQAGWLLISALMTLGPAVVSHHLARVLLLWKCVFPASPKDLETEKSRGDSFTWQVTLEGRAGALCAIKSFVSHCGDLLTEEVTQRLLPPLPCAVDLLTQLSSILKMYGSPLKTPSVVYRQRLYELLILLPPETYEGNLCAILRELAADLTAPDIQVAASTFLLPPLCHQDDLLILSPFLQETDHRFIEEQLLLGNGVACGSLEYDPYSIYEKDVEGDSVPKPLPPALSVISSASKLFGVVCAHVGETQRLLILEQLLDSIKHTKGARQQVVQLHVVSSVSSFLKYVAGSKGCLGPEEMKRFALTLVMGALESPNPLLRCAAAESWARLAQVVDDGAFTAGLAQVSFDKLKSARDVVTRTGHSLALGSLHRYLGGISSSQHLNSCIGILYTLAQDSTSPDVQTWALHSLSLIIDSAGPLYYVHVEPTLSLIIMLLLNVPPTHAEVHQSLGRCLNALITTLGPELQGNSTSISTLRTSCLLGCAVMQDNPDCLVQAQAISCLQQLHMFAPRHVNLSSLVSCLCVNLCSPYLLLRRAVLACLRQLVQREAAEVSEHAVMLAKDSREELTPDANIREVGLEGALLILLDKETDERLCHDIKETLNYMLTSMAVEKLSLWLKLCKDVLAASADFTAVTCVDTMQEEEGDKGDDASVLTTRRDEKSHPFTNPRWATRVFAAECVCRIINQCENANSAHFDIALAQEMKKRDSRNDFLVLHLADLIRMAFMAATDHSDQLRLSGLEMLLVVIRRFATVPEPEFPGHVILEQYQANVGAALRPAFTSETPPDVTAKACQVCSAWIASGVVSDLNDLRRVHQLLVSSLTKIQAGKEALSHLYNESASTMEILAVLKAWAEVYIIAVQRHKNHRQPLKTTTCLEDGIRNGSCSSDGLLDLVYADLGTLSRLWLAALQDFALLTLPSEFASQLPAEGGAFYTAETSENAKLHYYNSWALILHATALWLTSTGFVVADPDEGASNLSRPVTPTSMCQGSSSGATIKSPEDVYTDRFHLILGISVEFLCSLRSDATMESITACLHALQALLDVPWPRSKIGSDQDLGIELLNVLHRVILTRESPSIQLASLEVVRQIICAAQEHVKEKRRSAEVDDGAAEKETLPEFGEGKDTGGLVPGKSLVFATLELCVCILVRQLPELNPKLTGSPGVKATKPQILLEDGSRLVSAALVILSELPAVCSPEGSISILPTILYLTIGVLRETAVKLPGGQLSSTVAASLQALKGILSSPMARAEKSRTAWTDLLRSALTTILDCWDPVDETHQELDEVSLLTAITVFILSTSPEVTTIPCLQKRCIDKFKATLEIKDPVVQIKTYQLLHSIFQYPNPAVSYPYIYSLASCIMEKLQEIDKRKPENTAELEIFQEGIKVLETLVTVAEEHHRAQLVACLLPILISFLLDENSLGSATSIMRNLHDFALQNLMQIGPQYSSVFKSLVASSPALKARLEAAIKGNQESVKVKIPTSKYTKSPGKNSSIQLKTSFL

SEQ ID NO: 6420 - protein, 1599 aa, Homo Sapiens
  misc_feature (1)..(1): Xaa can be any naturally occurring amino acid
XGEKAQLAAVKDICQAIWKLKKVMDAVMSDGNLETRLGSTDVAASQHMLVCALQELGNLIHNLGTTAAPLLQDSSTGLLDSILSVILHPSISVRLAAAWCLHCIAVALPSYLTPLLDRCLERLTGHKSSPEAVTGFSFAVAALLGAVKHCPLGIPHGKGKIIMTLAEDLLCSAAQNSRLSAQRTQAGWLLISALMTLGPAVVSHHLARVLLLWKCVFPASPKDLETEKSRGDSFTWQVTLEGRAGALCAIKSFVSHCGDLLTEEVTQRLLPPLPCAVDLLTQLSSILKMYGSPLKTPSVVYRQRLYELLILLPPETYEGNLCAILRELAADLTAPDIQVAASTFLLPPLCHQDDLLILSPFLQETDHRFIEEQLLLGNGVACGSLEYDPYSIYEKDVEGDSVPKPLPPALSVISSASKLFGVVCAHVGETQRLLILEQLLDSIKHTKGARQQVVQLHVVSSVSSFLKYVAGSKGCLGPEEMKRFALTLVMGALESPNPLLRCAAAESWARLAQVVDDGAFTAGLAQVSFDKLKSARDVVTRTGHSLALGSLHRYLGGISSSQHLNSCIGILYTLAQDSTSPDVQTWALHSLSLIIDSAGPLYYVHVEPTLSLIIMLLLNVPPTHAEVHQSLGRCLNALITTLGPELQGNSTSISTLRTSCLLGCAVMQDNPDCLVQAQAISCLQQLHMFAPRHVNLSSLVSCLCVNLCSPYLLLRRAVLACLRQLVQREAAEVSEHAVMLAKDSREELTPDANIREVGLEGALLILLDKETDERLCHDIKETLNYMLTSMAVEKLSLWLKLCKDVLAASADFTAVTCVDTMQEEEGDKGDDASVLTTRRDEKSHPFTNPRWATRVFAAECVCRIINQCENANSAHFDIALAQEMKKRDSRNDFLVLHLADLIRMAFMAATDHSDQLRLSGLEMLLVVIRRFATVPEPEFPGHVILEQYQANVGAALRPAFTSETPPDVTAKACQVCSAWIASGVVSDLNDLRRVHQLLVSSLTKIQAGKEALSHLYNESASTMEILAVLKAWAEVYIIAVQRHKNHRQPLKTTTCLEDGIRNGSCSSDGLLDLVYADLGTLSRLWLAALQDFALLTLPSEFASQLPAEGGAFYTAETSENAKLHYYNSWALILHATALWLTSTGFVVADPDEGASNLSRPVTPTSMCQGSSSGATIKSPEDVYTDRFHLILGISVEFLCSLRSDATMESITACLHALQALLDVPWPRSKIGSDQDLGIELLNVLHRVILTRESPSIQLASLEVVRQIICAAQEHVKEKRRSAEVDDGAAEKETLPEFGEGKDTGGLVPGKSLVFATLELCVCILVRQLPELNPKLTGSPGVKATKPQILLEDGSRLVSAALVILSELPAVCSPEVDETHQELDEVSLLTAITVFILSTSPEVTTIPCLQKRCIDKFKATLEIKDPVVQIKTYQLLHSIFQYPNPAVSYPYIYSLASCIMEKLQEIDKRKPENTAELEIFQEGIKVLETLVTVAEEHHRAQLVACLLPILISFLLDENSLGSATSIMRNLHDFALQNLMQIGPQYSSVFKSLVASSPALKARLEAAIKGNQESVKVKIPTSKYTKSPGKNSSIQLKTSFL

SEQ ID NO: 6421 - protein, 124 aa, Homo Sapiens
  misc_feature (1)..(1): Xaa can be any naturally occurring amino acid
XLLLRRAVLACLRQLVQREAAEVSEHAVMLAKDSREELTPDANIREVGLEGALLILLDKETDERLCHDIKETLNYMLTSMAVEKLSLWLKLCKDVLAASAGKYWTLSVKIIKLKFETLHKIVYH

SEQ ID NO: 6422 - protein, 896 aa, Homo Sapiens
  misc_feature (1)..(1): Xaa can be any naturally occurring amino acid
XSHPKATQTQIDAVCCRRCVSFILRTTIGGLLGEKAQLAAVKDICQAIWKLKKVMDVAASQHMLVCALQELGNLIHNLGTTAAPLLQDSSTGLLDSILSVILHPSISVRLAAAWCLHCIAVALPSYLTPLLDRCLERLTGHKSSPEAVTGFSFAVAALLGAVKHCPLGIPHGKGKIIMTLAEDLLCSAAQNSRLSAQRTQAGWLLISALMTLGPAVVSHHLARVLLLWKCVFPASPKDLETEKSRGDSFTWQVTLEGRAGALCAIKSFVSHCGDLLTEEVTQRLLPPLPCAVDLLTQLSSILKMYGSPLKTPSVVYRQRLYELLILLPPETYEGNLCAILRELAADLTAPDIQVAASTFLLPPLCHQDDLLILSPFLQETDHRFIEEQLLLGNGVACGSLEYDPYSIYEKDVEGDSVPKPLPPALSVISSASKLFGVVCAHVGETQRLLILEQLLDSIKHTKGARQQVVQLHVVSSVSSFLKYVAGSKGCLGPEEMKRFALTLVMGALESPNPLLRCAAAESWARLAQVVDDGAFTAGLAQVSFDKLKSARDVVTRTGHSLALGSLHRYLGGISSSQHLNSCIGILYTLAQDSTSPDVQTWALHSLSLIIDSAGPLYYVHVEPTLSLIIMLLLNVPPTHAEVHQSLGRCLNALITTLGPELQGNSTSISTLRTSCLLGCAVMQDNPDCLVQAQAISCLQQLHMFAPRHVNLSSLVSCLCVNLCSPYLLLRRAVLACLRQLVQREAAEVSEHAVMLAKDSREELTPDANIREVGLEGALLILLDKETDERLCHDIKETLNYMLTSMAVEKLSLWLKLCKDVLAASADFTAVTCVDTMQEEEGDKGDDASVLTTRRDEKSHPFTNPRWATRVFAAECVCRIINQCENANSAHFDIALA

SEQ ID NO: 6423 - protein, 199 aa, Homo Sapiens
  misc_feature (1)..(1): Xaa can be any naturally occurring amino acid
XSLIIMLLLNVPPTHAEVHQSLGRCLNALITTLGPELQGNSTSISTLRTSCLLGCAVMQDNPDCLVQAQAISCLQQLHMFAPRHVNLSSLVSCLCEILLDNSVLVNLCSPYLLLRRAVLACLRQLVQREAAEVSEHAVMLAKDSREELTPDANIREVGLEGALLILLDKETDERLCHDIKETLNYMLTSMAVEKLSLWL

SEQ ID NO: 6424 - protein, 208 aa, Homo Sapiens
MESGHLLWALLFMQSLWPQLTDGATRVYYLGIRDVQWNYAPKGRNVITNQPLDSDIVASSFLKSDKNRIGGTYKKTIYKEYKDDSYTDEVAQPAWLGFLGPVLQAEVGDVILIHLKNFATRPYTIHPHGVFYEKDSEGSLYPDGSSGPLKADDSVPPGGSHIYNWTIPEGHAPTDADPACLTWIYHSHVDAPRDIATGLIGPLITCKR

SEQ ID NO: 6425 - protein, 1158 aa, Homo Sapiens
MESGHLLWALLFMQSLWPQLTDGATRVYYLGIRDVQWNYAPKGRNVITNQPLDSDIVASSFLKSDKNRIGGTYKKTIYKEYKDDSYTDEVAQPAWLGFLGPVLQAEVGDVILIHLKNFATRPYTIHPHGVFYEKDSEGSLYPDGSSGPLKADDSVPPGGSHIYNWTIPEGHAPTDADPACLTWIYHSHVDAPRDIATGLIGPLITCKRGALDGNSPPQRQDVDHDFFLLFSVVDENLSWHLNENIATYCSDPASVDKEDETFQESNRMHAINGFVFGNLPELNMCAQKRVAWHLFGMGNEIDVHTAFFHGQMLTTRGHHTDVANIFPATFVTAEMVPWEPGTWLISCQVNSHFRDGMQALYKVKSCSMAPPVDLLTGKVRQYFIEAHEIQWDYGPMGHDGSTGKNLREPGSISDKFFQKSSSRIGGTYWKVRYEAFQDETFQEKMHLEEDRHLGILGPVIRAEVGDTIQVVFYNRASQPFSMQPHGVFYEKDYEGTVYNDGSSYPGLVAKPFEKVTYRWTVPPHAGPTAQDPACLTWMYFSAADPIRDTNSGLVGPLLVCRAGALGADGKQKGVDKEFFLLFTVLDENKSWYSNANQAAAMLDFRLLSEDIEGFQDSNRMHAINGFLFSNLPRLDMCKGDTVAWHLLGLGTETDVHGVMFQGNTVQLQGMRKGAAMLFPHTFVMAIMQPDNLGTFEIYCQAGSHREAGMRAIYNVSQCPGHQATPRQRYQAARIYYIMAEEVEWDYCPDRSWEREWHNQSEKDSYGYIFLSNKDGLLGSRYKKAVFREYTDGTFRIPRPRTGPEEHLGILGPLIKGEVGDILTVVFKNNASRPYSVHAHGVLESTTVWPLAAEPGEVVTYQWNIPERSGPGPNDSACVSWIYYSAVDPIKDMYSGLVGPLAICQKGILEPHGGRSDMDREFALLFLIFDENKSWYLEENVATHGSQDPGSINLQDETFLESNKMHAINGKLYANLRGLTMYQGERVAWYMLAMGQDVDLHTIHFHAESFLYRNGENYRADVVDLFPGTFEVVEMVASNPGTWLMHCHVTDHVHAGMETLFTVFSRTEHLSPLTVITKETEKAVPPRDIEEGNVKMLGMQIPIKNVEMLASVLVAISVTLLLVVLALGGVVWYQHRQRKLRRNRRSILDDSFKLLSFKQ

SEQ ID NO: 6426 - protein, 811 aa, Homo Sapiens
MESGHLLWALLFMQSLWPQLTDGATRVYYLGIRDVQWNYAPKGRNVITNQPLDSDIVASSFLKSDKNRIGGTYKKTIYKEYKDDSYTDEVAQPAWLGFLGPVLQAEVGDVILIHLKNFATRPYTIHPHGVFYEKDSEGSLYPDGSSGPLKADDSVPPGGSHIYNWTIPEGHAPTDADPACLTWIYHSHVDAPRDIATGLIGPLITCKRGALDGNSPPQRQDVDHDFFLLFSVVDENLSWHLNENIATYCSDPASVDKEDETFQESNRMHAINGFVFGNLPELNMCAQKRVAWHLFGMGNEIDVHTAFFHGQMLTTRGHHTDVANIFPATFVTAEMVPWEPGTWLISCQVNSHFRDGMQALYKVKSCSMAPPVDLLTGKVRQYFIEAHEIQWDYGPMGHDGSTGKNLREPGSISDKFFQKSSSRIGGTYWKVRYEAFQDETFQEKMHLEEDRHLGILGPVIRAEVGDTIQVVFYNRASQPFSMQPHGVFYEKDYEGTVYNDDPIRDTNSGLVGPLLVCRAGALGADGKQKGVDKEFFLLFTVLDENKSWYSNANQAAAMLDFRLLSEDIEGFQDSNRMHAINGFLFSNLPRLDMCKGDTVAWHLLGLGTETDVHGVMFQGNTVQLQGMRKGAAMLFPHTFVMAIMQPDNLGTFEIYCQAGSHREAGMRAIYNVSQCPGHQATPRQRYQAARIYYIMAEEVEWDYCPDRSWEREWHNQSEKDSYGYIFLSNKDGLLGSRYKKAVFREYTDGTFRIPRPRTGPEEHLGILGPLIKGEVGDILTVVFKNNASRPYSVHAHGVLESTTVWPLAAEP

SEQ ID NO: 6427 - protein, 891 aa, Homo Sapiens
MHAINGFVFGNLPELNMCAQKRVAWHLFGMGNEIDVHTAFFHGQMLTTRGHHTDVANIFPATFVTAEMVPWEPGTWLISCQVNSHFRDGMQALYKVKSCSMAPPVDLLTGKVRQYFIEAHEIQWDYGPMGHDGSTGKNLREPGSISDKFFQKSSSRIGGTYWKVRYEAFQDETFQEKMHLEEDRHLGILGPVIRAEVGDTIQVVFYNRASQPFSMQPHGVFYEKDYEGTVYNDGSSYPGLVAKPFEKVTYRWTVPPHAGPTAQDPACLTWMYFSAADPIRDTNSGLVGPLLVCRAGALGADGKQKGVDKEFFLLFTVLDENKSWYSNANQAAAMLDFRLLSEDIEGFQDSNRMHAINGFLFSNLPRLDMCKGDTVAWHLLGLGTETDVHGVMFQGNTVQLQGMRKGAAMLFPHTFVMAIMQPDNLGTFEIYCQAGSHREAGMRAIYNVSQCPGHQATPRQRYQAARIYYIMAEEVEWDYCPDRSWEREWHNQSEKDSYGYIFLSNKDGLLGSRYKKAVFREYTDGTFRIPRPRTGPEEHLGILGPLIKGEVGDILTVVFKNNASRPYSVHAHGVLESTTVWPLAAEPGEVVTYQWNIPERSGPGPNDSACVSWIYYSAVDPIKDMYSGLVGPLAICQKGILEPHGGRSDMDREFALLFLIFDENKSWYLEENVATHGSQDPGSINLQDETFLESNKMHAINGKLYANLRGLTMYQGERVAWYMLAMGQDVDLHTIHFHAESFLYRNGENYRADVVDLFPGTFEVVEMVASNPGTWLMHCHVTDHVHAGMETLFTVFSRTEHLSPLTVITKETEKAVPPRDIEEGNVKMLGMQIPIKNVEMLASVLVAISVTLLLVVLALGGVVWYQHRQRKLRRNRRSILDDSFKLLSFKQ

SEQ ID NO: 6428 - protein, 1212 aa, Homo Sapiens
MTQTLPYHLSLLNVLFPGPCSRHFKFRRGKCAQPAWRKVSAPSQDLLITKVMWAMESGHLLWALLFMQSLWPQLTDGATRVYYLGIRDVQWNYAPKGRNVITNQPLDSDIVASSFLKSDKNRIGGTYKKTIYKEYKDDSYTDEVAQPAWLGFLGPVLQAEVGDVILIHLKNFATRPYTIHPHGVFYEKDSEGSLYPDGSSGPLKADDSVPPGGSHIYNWTIPEGHAPTDADPACLTWIYHSHVDAPRDIATGLIGPLITCKRGALDGNSPPQRQDVDHDFFLLFSVVDENLSWHLNENIATYCSDPASVDKEDETFQESNRMHAINGFVFGNLPELNMCAQKRVAWHLFGMGNEIDVHTAFFHGQMLTTRGHHTDVANIFPATFVTAEMVPWEPGTWLISCQVNSHFRDGMQALYKVKSCSMAPPVDLLTGKVRQYFIEAHEIQWDYGPMGHDGSTGKNLREPGSISDKFFQKSSSRIGGTYWKVRYEAFQDETFQEKMHLEEDRHLGILGPVIRAEVGDTIQVVFYNRASQPFSMQPHGVFYEKDYEGTVYNDGSSYPGLVAKPFEKVTYRWTVPPHAGPTAQDPACLTWMYFSAADPIRDTNSGLVGPLLVCRAGALGADGKQKGVDKEFFLLFTVLDENKSWYSNANQAAAMLDFRLLSEDIEGFQDSNRMHAINGFLFSNLPRLDMCKGDTVAWHLLGLGTETDVHGVMFQGNTVQLQGMRKGAAMLFPHTFVMAIMQPDNLGTFEIYCQAGSHREAGMRAIYNVSQCPGHQATPRQRYQAARIYYIMAEEVEWDYCPDRSWEREWHNQSEKDSYGYIFLSNKDGLLGSRYKKAVFREYTDGTFRIPRPRTGPEEHLGILGPLIKGEVGDILTVVFKNNASRPYSVHAHGVLESTTVWPLAAEPGEVVTYQWNIPERSGPGPNDSACVSWIYYSAVDPIKDMYSGLVGPLAICQKGILEPHGGRSDMDREFALLFLIFDENKSWYLEENVATHGSQDPGSINLQDETFLESNKMHAINGKLYANLRGLTMYQGERVAWYMLAMGQDVDLHTIHFHAESFLYRNGENYRADVVDLFPGTFEVVEMVASNPGTWLMHCHVTDHVHAGMETLFTVFSRTEHLSPLTVITKETEKAVPPRDIEEGNVKMLGMQIPIKNVEMLASVLVAISVTLLLVVLALGGVVWYQHRQRKLRRNRRSILDDSFKLLSFKQ

SEQ ID NO: 6429 - protein, 1160 aa, Homo Sapiens
MWAMESGHLLWALLFMQSLWPQLTDGATRVYYLGIRDVQWNYAPKGRNVITNQPLDSDIVASSFLKSDKNRIGGTYKKTIYKEYKDDSYTDEVAQPAWLGFLGPVLQAEVGDVILIHLKNFATRPYTIHPHGVFYEKDSEGSLYPDGSSGPLKADDSVPPGGSHIYNWTIPEGHAPTDADPACLTWIYHSHVDAPRDIATGLIGPLITCKRGALDGNSPPQRQDVDHDFFLLFSVVDENLSWHLNENIATYCSDPASVDKEDETFQESNRMHAINGFVFGNLPELNMCAQKRVAWHLFGMGNEIDVHTAFFHGQMLTTRGHHTDVANIFPATFVTAEMVPWEPGTWLISCQVNSHFRDGMQALYKVKSCSMAPPVDLLTGKVRQYFIEAHEIQWDYGPMGHDGSTGKNLREPGSISDKFFQKSSSRIGGTYWKVRYEAFQDETFQEKMHLEEDRHLGILGPVIRAEVGDTIQVVFYNRASQPFSMQPHGVFYEKDYEGTVYNDGSSYPGLVAKPFEKVTYRWTVPPHAGPTAQDPACLTWMYFSAADPIRDTNSGLVGPLLVCRAGALGADGKQKGVDKEFFLLFTVLDENKSWYSNANQAAAMLDFRLLSEDIEGFQDSNRMHAINGFLFSNLPRLDMCKGDTVAWHLLGLGTETDVHGVMFQGNTVQLQGMRKGAAMLFPHTFVMAIMQPDNLGTFEIYCQAGSHREAGMRAIYNVSQCPGHQATPRQRYQAARIYYIMAEEVEWDYCPDRSWEREWHNQSEKDSYGYIFLSNKDGLLGSRYKKAVFREYTDGTFRIPRPRTGPEEHLGILGPLIKGEVGDILTVVFKNNASRPYSVHAHGVLESTTVWPLAAEPGEVVTYQWNIPERSGPGPNDSACVSWIYYSAVDPIKDMYSGLVGPLAICQKGILEPHGGRSDMDREFALLFLIFDENKSWYLEENVATHGSQDPGSINLQDETFLESNKMHAINGKLYANLRGLTMYQGERVAWYMLAMGQDVDLHTIHFHAESFLYRNGENYRADVVDLFPGTFEVVEMVASNPGTWLMHCHVTDHVHAGMETLFTVFSRTEHLSPLTVITKETEKVPPRDIEEGNVKMLGMQIPIKNVEMLASVLVAISVTLLLVVLALGGVVWYQHRQRKLRRNRRSILDDSFKLLSFKQ

SEQ ID NO: 6430 - protein, 969 aa, Homo Sapiens
MWAMESGHLLWALLFMQSLWPQLTDGATRVYYLGIRDVQWNYAPKGRNVITNQPLDSDIVASSFLKSDKNRIGGTYKKTIYKEYKDDSYTDEVAQPAWLGFLGPVLQAEVGDVILIHLKNFATRPYTIHPHGVFYEKDSEGSLYPDGSSGPLKADDSVPPGGSHIYNWTIPEGHAPTDADPACLTWIYHSHVDAPRDIATGLIGPLITCKRGALDGNSPPQRQDVDHDFFLLFSVVDENLSWHLNENIATYCSDPASVDKEDETFQESNRMHAINGFVFGNLPELNMCAQKRVAWHLFGMGNEIDVHTAFFHGQMLTTRGHHTDVANIFPATFVTAEMVPWEPGTWLISCQVNSHFRDGMQALYKVKSCSMAPPVDLLTGKVRQYFIEAHEIQWDYGPMGHDGSTGKNLREPGSISDKFFQKSSSRIGGTYWKVRYEAFQDETFQEKMHLEEDRHLGILGPVIRAEVGDTIQVVFYNRASQPFSMQPHGVFYEKDYEGTVYNDGTFEIYCQAGSHREAGMRAIYNVSQCPGHQATPRQRYQAARIYYIMAEEVEWDYCPDRSWEREWHNQSEKDSYGYIFLSNKDGLLGSRYKKAVFREYTDGTFRIPRPRTGPEEHLGILGPLIKGEVGDILTVVFKNNASRPYSVHAHGVLESTTVWPLAAEPGEVVTYQWNIPERSGPGPNDSACVSWIYYSAVDPIKDMYSGLVGPLAICQKGILEPHGGRSDMDREFALLFLIFDENKSWYLEENVATHGSQDPGSINLQDETFLESNKMHAINGKLYANLRGLTMYQGERVAWYMLAMGQDVDLHTIHFHAESFLYRNGENYRADVVDLFPGTFEVVEMVASNPGTWLMHCHVTDHVHAGMETLFTVFSRTEHLSPLTVITKETEKAVPPRDIEEGNVKMLGMQIPIKNVEMLASVLVAISVTLLLVVLALGGVVWYQHRQRKLRRNRRSILDDSFKLLSFKQ

SEQ ID NO: 6431 - protein, 63 aa, Homo Sapiens
MWAMESGHLLWALLFMQSLWPQLTDGATRVYYLGIRDVQWNYAPKGRNVITNQPLDSDIYVKM

SEQ ID NO: 6432 - protein, 88 aa, Homo Sapiens
MTSSRLWFSLLLAAAFAGRATALWPWPQNFQTSDQRYVLYPNNFQFQYDVSSAAQPGCSVLDEAFQRYRDLLFGSGSWPRPYLTANMY

SEQ ID NO: 6433 - protein, 143 aa, Homo Sapiens
MTSSRLWFSLLLAAAFAGRATALWPWPQNFQTSDQRYVLYPNNFQFQYDVSSAAQPGCSVLDEAFQRYRDLLFGSGSWPRPYLTGKRHTLEKNVLVVSVVTPGCNQLPTLESVENYTLTINDDQCLLLSETVWGALRGCHGVQ

SEQ ID NO: 6434 - protein, 529 aa, Homo Sapiens
MTSSRLWFSLLLAAAFAGRATALWPWPQNFQTSDQRYVLYPNNFQFQYDVSSAAQPGCSVLDEAFQRYRDLLFGSGSWPRPYLTGKRHTLEKNVLVVSVVTPGCNQLPTLESVENYTLTINDDQCLLLSETVWGALRGLETFSQLVWKSAEGTFFINKTEIEDFPRFPHRGLLLDTSRHYLPLSSILDTLDVMAYNKLNVFHWHLVDDPSFPYESFTFPELMRKGSYNPVTHIYTAQDVKEVIEYARLRGIRVLAEFDTPGHTLSWGPGIPGLLTPCYSGSEPSGTFGPVNPSLNNTYEFMSTFFLEVSSVFPDFYLHLGGDEVDFTCWKSNPEIQDFMRKKGFGEDFKQLESFYIQTLLDIVSSYGKGYVVWQEVFDNKVKIQPDTIIQVWREDIPVNYMKELELVTKAGFRALLSAPWYLNRISYGPDWKDFYIVEPLAFEGTPEQKALVIGGEACMWGEYVDNTNLVPRLWPRAGAVAERLWSNKLTSDLTFAYERLSHFRCELLRRGVQAQPLNVGFCEQEFEQT

SEQ ID NO: 6435 - protein, 509 aa, Homo Sapiens
MTSSRLWFSLLLAAAFAGRATALWPWPQNFQTSDQRYVLYPNNFQFQYDVSSAAQPGCSVLDEAFQRYRDLLFGSGSWPRPYLTGKRHTLEKNVLVVSVVTPGCNQLPTLESVENYTLTINDDQCLLLSETVWGALRGLETFSQLVWKSAEGTFFINKTEIEDFPRFPHRGLLLDTSRHYLPLSSILDTLDVMAYNKLNVFHWHLVDDPSFPYESFTFPELMRKGSYNPVTHIYTAQDVKEVIEYARLRGIRVLAEFDTPGHTLSWGPGIPGLLTPCYSGSEPSGTFGPVNPSLNNTYEFMSTFFLEVSSVFPDFYLHLGGDEVDFTCWKSNPEIQDFMRKKGFGEDFKQLESFYIQTLLDIVSSYGKGYVVWQEVFDNKVKIQPDTIIQVWREDIPVNYMKELELVTKAGFRALLSAPWYLNRISYGPDWKDFYIVEPLAFEGTPEQKALVIGGEACMWGEYVDNTNLVPRLWPRAGAVAERLWSNKLTSDLTFAYERLSHFRCELLR

SEQ ID NO: 6436 - protein, 373 aa, Homo Sapiens
MTSSRLWFSLLLAAAFAGRATALWPWPQNFQTSDQRYVLYPNNFQFQYDVSSAAQPGCSVLDEAFQRYRDLLFGSGSWPRPYLTGKRHTLEKNVLVVSVVTPGCNQLPTLESVENYTLTINDDQCLLLSETVWGALRGLETFSQLVWKSAEGTFFINKTEIEDFPRFPHRGLLLDTSRHYLPLSSILDTLDVMAYNKLNVFHWHLVDDPSFPYESFTFPELMRKGSYNPVTHIYTAQDVKEVIEYARLRGIRVLAEFDTPGHTLSWGPGIPGLLTPCYSGSEPSGTFGPVNPSLNNTYEFMSTFFLEVSSVFPDFYLHLGGDEVDFTCWKSNPEIQDFMRKKGFGEDFKQLESFYIQTFSQTQSYRCGERIFQ

SEQ ID NO: 6437 - protein, 143 aa, Homo Sapiens
MTSSRLWFSLLLAAAFAGRATALWPWPQNFQTSDQRYVLYPNNFQFQYDVSSAAQPGCSVLDEAFQRYRDLLFGSGSWPRPYLTGKRHTLEKNVLVVSVVTPGCNQLPTLESVENYTLTINDDQCLLLSETVWGALRVLYQQD

SEQ ID NO: 6438 - protein, 119 aa, Homo Sapiens
MTSSRLWFSLLLAAAFAGRATALWPWPQNFQTSDQRYVLYPNNFQFQYDVSSAAQPGCSVLDEAFQRYRDLLFGSGSWPRPYLTGLSLSFRLECSGVITAYSNLELQDSSSLPASLMSS

SEQ ID NO: 6439 - protein, 540 aa, Homo Sapiens
MTSSRLWFSLLLAAAFAGRATALWPWPQNFQTSDQRYVLYPNNFQFQYDVSSAAQPGCSVLDEAFQRYRDLLFGSGSWPRPYLTGWPHQAYPVFLGKRHTLEKNVLVVSVVTPGCNQLPTLESVENYTLTINDDQCLLLSETVWGALRGLETFSQLVWKSAEGTFFINKTEIEDFPRFPHRGLLLDTSRHYLPLSSILDTLDVMAYNKLNVFHWHLVDDPSFPYESFTFPELMRKGSYNPVTHIYTAQDVKEVIEYARLRGIRVLAEFDTPGHTLSWGPGIPGLLTPCYSGSEPSGTFGPVNPSLNNTYEFMSTFFLEVSSVFPDFYLHLGGDEVDFTCWKSNPEIQDFMRKKGFGEDFKQLESFYIQTLLDIVSSYGKGYVVWQEVFDNKVKIQPDTIIQVWREDIPVNYMKELELVTKAGFRALLSAPWYLNRISYGPDWKDFYIVEPLAFEGTPEQKALVIGGEACMWGEYVDNTNLVPRLWPRAGAVAERLWSNKLTSDLTFAYERLSHFRCELLRRGVQAQPLNVGFCEQEFEQT

SEQ ID NO: 6440 - protein, 318 aa, Homo Sapiens
  misc_feature (1)..(1): Xaa can be any naturally occurring amino acid
XFQFQYDVSSAAQPGCSVLDEAFQRYRDLLFGSGSWPRPYLTGKRHTLEKNVLVVSVVTPGCNQLPTLESVENYTLTINDDQCLLLSETVWGALRGLETFSQLVWKSAEGTFFINKTEIEDFPRFPHRGLLLDTSRHYLPLSSILDTLDVMAYNKLNVFHWHLVDDPSFPYESFTFPELMRKGSYNPVTHIYTAQDVKEVIEYARLRGIRVLAEFDTPGHTLSWGPGIPGLLTPCYSGSEPSGTFGPVNPSLNNTYEFMSTFFLEVSSVFPDFYLHLGGDEVDFTCWKSNPEIQDFMRKKGFGEDFKQLESFYIQTYP

SEQ ID NO: 6441 - protein, 128 aa, Homo Sapiens
  misc_feature (1)..(1): Xaa can be any naturally occurring amino acid
XFSLLLAAAFAGRATALWPWPQNFQTSDQRYVLYPNNFQFQYDVSSAAQPGCSVLDEAFQRYRDLLFGSGSWPRPYLTGKRHTLEKNVLVVSVVTPGCNQLPTLESVENCIPVPFARRRLLSSFCCGN

SEQ ID NO: 6442 - protein, 331 aa, Homo Sapiens
MAFNKFNVLHWHIVDDQSFPYQSITFPELSNKGSYSLSHVYTPNDVRMVIEYARLRGIRVLPEFDTPGHTLSWGKGQKDLLTPCYSRQNKLDSFGPINPTLNTTYSFLTTFFKEISEVFPDQFIHLGGDEVEFKCWESNPKIQDFMRQKGFGTDFKKLESFYIQKVLDIIATINKGSIVWQEVFDDKAKLAPGTIVEVWKDSAYPEELSRVTASGFPVILSAPWYLDLISYGQDWRKYYKVEPLDFGGTQKQKQLFIGGEACLWGEYVDATNLTPRLWPRASAVGERLWSSKDVRDMDDAYDRLTRHRCRMVERGIAAQPLYAGYCNHENM

SEQ ID NO: 6443 - protein, 35 aa, Homo Sapiens
MDDAYDRLTRHRCRMVERGIAAQPLYAGYCNHENM

SEQ ID NO: 6444 - protein, 556 aa, Homo Sapiens
MELCGLGLPRPPMLLALLLATLLAAMLALLTQVALVVQVAEAARAPSVSAKPGPALWPLPLLVKMTPNLLHLAPENFYISHSPNSTAGPSCTLLEEAFRRYHGYIFGFYKWHHEPAEFQAKTQVQQLLVSITLQSECDAFPNISSDESYTLLVKEPVAVLKANRVWGALRGLETFSQLVYQDSYGTFTINESTIIDSPRFSHRGILIDTSRHYLPVKIILKTLDAMAFNKFNVLHWHIVDDQSFPYQSITFPELSNKGSYSLSHVYTPNDVRMVIEYARLRGIRVLPEFDTPGHTLSWGKGQKDLLTPCYSRQNKLDSFGPINPTLNTTYSFLTTFFKEISEVFPDQFIHLGGDEVEFKCWESNPKIQDFMRQKGFGTDFKKLESFYIQKVLDIIATINKGSIVWQEVFDDKAKLAPGTIVEVWKDSAYPEELSRVTASGFPVILSAPWYLDLISYGQDWRKYYKVEPLDFGGTQKQKQLFIGGEACLWGEYVDATNLTPRLWPRASAVGERLWSSKDVRDMDDAYDRLTRHRCRMVERGIAAQPLYAGYCNHENM

SEQ ID NO: 6445 - protein, 52 aa, Homo Sapiens
  misc_feature (1)..(1): Xaa can be any naturally occurring amino acid
XDATNLTPRLWPRASAVGERLWSSKDVRDMDDAYDRLTRHRCRMVEGLASFL

SEQ ID NO: 6446 - protein, 170 aa, Homo Sapiens
  misc_feature (1)..(1): Xaa can be any naturally occurring amino acid
XFGTDFKKLESFYIQKVLDIIATINKGSIVWQEVFDDKAKLAPGTIVEVWKDSAYPEELSRVTASGFPVILSAPWYLDLISYGQDWRKYYKVEPLDFGGTQKQKQLFIGGEACLWGEYVDATNLTPRLWPRASAVGERLWSSKDVRDMDDAYDRLTRHRCRMVEGLASFL

SEQ ID NO: 6447 - protein, 202 aa, Homo Sapiens
  misc_feature (1)..(1): Xaa can be any naturally occurring amino acid
XNTTYSFLTTFFKEISEVFPDQFIHLGGDEVEFKCWVLDIIATINKGSIVWQEVFDDKAKLAPGTIVEVWKDSAYPEELSRVTASGFPVILSAPWYLDLISYGQDWRKYYKVEPLDFGGTQKQKQLFIGGEACLWGEYVDATNLTPRLWPRASAVGERLWSSKDVRDMDDAYDRLTRHRCRMVERGIAAQPLYAGYCNHENM

SEQ ID NO: 6448 - protein, 70 aa, Homo Sapiens
MGEPGQSPSPRSSHGSPPTLSTLTLLLLLCGHAHSQCKILRCNADSPSYLRTCRNALIRRCIRLRWIIFL

SEQ ID NO: 6449 - protein, 93 aa, Homo Sapiens
MGEPGQSPSPRSSHGSPPTLSTLTLLLLLCGHAHSQCKILRCNAEYVSSTLSLRGGGSSGALRGGGGGGRGGGVGSGGLCRALRSYALCTRRT

SEQ ID NO: 6450 - protein, 426 aa, Homo Sapiens
MGEPGQSPSPRSSHGSPPTLSTLTLLLLLCGHAHSQCKILRCNAEYVSSTLSLRGGGSSGALRGGGGGGRGGGVGSGGLCRALRSYALCTRRTARTCRGDLAFHSAVHGIEDLMIQHNCSRQGPTAPPPPRGPALPGAGSGLPAPDPCDYEGRFSRLHGRPPGFLHCASFGDPHVRSFHHHFHTCRVQGAWPLLDNDFLFVQATSSPMALGANATATRKLTIIFKNMQECIDQKVYQAEVDNLPVAFEDGSINGGDRPGGSSLSIQTANPGNHVEIQAAYIGTTIIIRQTAGQLSFSIKVAEDVAMAFSAEQDLQLCVGGCPPSQRLSRSERNRRGAITIDTARRLCKEGLPVEDAYFHSCVFDVLISGDPNFTVAAQAALEDARAFLPDLEKLHLFPSDAGVPLSSATLLAPLLSGLFVLWLCIQ

SEQ ID NO: 6451 - protein, 313 aa, Homo Sapiens
MIQHNCSRQGPTAPPPPRGPALPGAGSGLPAPDPCDYEGRFSRLHGRPPGFLHCASFGDPHVRSFHHHFHTCRVQGAWPLLDNDFLFVQATSSPMALGANATATRKLTIIFKNMQECIDQKVYQAEVDNLPVAFEDGSINGGDRPGGSSLSIQTANPGNHVEIQAAYIGTTIIIRQTAGQLSFSIKVAEDVAMAFSAEQDLQLCVGGCPPSQRLSRSERNRRGAITIDTARRLCKEGLPVEDAYFHSCVFDVLISGDPNFTVAAQAALEDARAFLPDLEKLHLFPSDAGVPLSSATLLAPLLSGLFVLWLCIQ

SEQ ID NO: 6452 - protein, 200 aa, Homo Sapiens
MQECIDQKVYQAEVDNLPVAFEDGSINGGDRPGGSSLSIQTANPGNHVEIQAAYIGTTIIIRQTAGQLSFSIKVAEDVAMAFSAEQDLQLCVGGCPPSQRLSRSERNRRGAITIDTARRLCKEGLPVEDAYFHSCVFDVLISGDPNFTVAAQAALEDARAFLPDLEKLHLFPSDAGVPLSSATLLAPLLSGLFVLWLCIQ

SEQ ID NO: 6453 - protein, 200 aa, Homo Sapiens; identical to SEQ ID NO: 6452

SEQ ID NO: 6454 - protein, 200 aa, Homo Sapiens; identical to SEQ ID NO: 6452

SEQ ID NO: 6455 - protein, 118 aa, Homo Sapiens
MWVTKLLPALLLQHVLLHLLLLPIAIPYAEGQRKRRNTIHEFKKSAKTTLIKIDPALKIKTKKVNTADQCANRCTRNKGLPFTCKAFVFDKARKQCLWFPFNSMSSGVKKEFGHEFDL

SEQ ID NO: 6456 - protein, 141 aa, Homo Sapiens
MWVTKLLPALLLQHVLLHLLLLPIAIPYAEGQRKRRNTIHEFKKSAKTTLIKIDPALKIKTKKVNTADQCANRCTRNKGLPFTCKAFVFDKARKQCLWFPFNSMSSGVKKEFGHEFDLYENKDYIRNCIIGKGRSYKGTVS

SEQ ID NO: 6457 - protein, 161 aa, Homo Sapiens
MWVTKLLPALLLQHVLLHLLLLPIAIPYAEGQRKRRNTIHEFKKSAKTTLIKIDPALKIKTKKVNTADQCANRCTRNKGLPFTCKAFVFDKARKQCLWFPFNSMSSGVKKEFGHEFDLYENKDYIRNCIIGKGRSYKGTVSITKSGIKCQPWSSMIPHEHR

SEQ ID NO: 6458 - protein, 210 aa, Homo Sapiens
MWVTKLLPALLLQHVLLHLLLLPIAIPYAEGQRKRRNTIHEFKKSAKTTLIKIDPALKIKTKKVNTADQCANRCTRNKGLPFTCKAFVFDKARKQCLWFPFNSMSSGVKKEFGHEFDLYENKDYIRNCIIGKGRSYKGTVSITKSGIKCQPWSSMIPHEHSFLPSSYRGKDLQENYCRNPRGEEGGPWCFTSNPEVRYEVCDIPQCSEGK

SEQ ID NO: 6459 - protein, 728 aa, Homo Sapiens
MWVTKLLPALLLQHVLLHLLLLPIAIPYAEGQRKRRNTIHEFKKSAKTTLIKIDPALKIKTKKVNTADQCANRCTRNKGLPFTCKAFVFDKARKQCLWFPFNSMSSGVKKEFGHEFDLYENKDYIRNCIIGKGRSYKGTVSITKSGIKCQPWSSMIPHEHSFLPSSYRGKDLQENYCRNPRGEEGGPWCFTSNPEVRYEVCDIPQCSEVECMTCNGESYRGLMDHTESGKICQRWDHQTPHRHKFLPERYPDKGFDDNYCRNPDGQPRPWCYTLDPHTRWEYCAIKTCADNTMNDTDVPLETTECIQGQGEGYRGTVNTIWNGIPCQRWDSQYPHEHDMTPENFKCKDLRENYCRNPDGSESPWCFTTDPNIRVGYCSQIPNCDMSHGQDCYRGNGKNYMGNLSQTRSGLTCSMWDKNMEDLHRHIFWEPDASKLNENYCRNPDDDAHGPWCYTGNPLIPWDYCPISRCEGDTTPTIVNLDHPVISCAKTKQLRVVNGIPTRTNIGWMVSLRYRNKHICGGSLIKESWVLTARQCFPSRDLKDYEAWLGIHDVHGRGDEKCKQVLNVSQLVYGPEGSDLVLMKLARPAVLDDFVSTIDLPNYGCTIPEKTSCSVYGWGYTGLINYDGLLRVAHLYIMGNEKCSQHHRGKVTLNESEICAGAEKIGSGPCEGDYGGPLVCEQHKMRMVLGVIVPGRGCAIPNRPGIFVRVAYYAKWIHKIILTYKVPQS

SEQ ID NO: 6460 - protein, 290 aa, Homo Sapiens
MWVTKLLPALLLQHVLLHLLLLPIAIPYAEGQRKRRNTIHEFKKSAKTTLIKIDPALKIKTKKVNTADQCANRCTRNKGLPFTCKAFVFDKARKQCLWFPFNSMSSGVKKEFGHEFDLYENKDYIRNCIIGKGRSYKGTVSITKSGIKCQPWSSMIPHEHSFLPSSYRGKDLQENYCRNPRGEEGGPWCFTSNPEVRYEVCDIPQCSEVECMTCNGESYRGLMDHTESGKICQRWDHQTPHRHKFLPERYPDKGFDDNYCRNPDGQPRPWCYTLDPHTRWEYCAIKTCET

SEQ ID NO: 6461 - protein, 728 aa, Homo Sapiens; identical to SEQ ID NO: 6459

SEQ ID NO: 6462 - protein, 184 aa, Homo Sapiens
MWVTKLLPALLLQHVLLHLLLLPIAIPYAEGQRKRRNTIHEFKKSAKTTLIKIDPALKIKTKKVNTADQCANRCTRNKGLPFTCKAFVFDKARKQCLWFPFNSMSSGVKKEFGHEFDLYENKDYIRNCIIGKGRSYKGTVSITKSGIKCQPWSSMIPHEHSGGDDCLVESTFYSIPFWGHNSAR

SEQ ID NO: 6463 - protein, 205 aa, Homo Sapiens
MWVTKLLPALLLQHVLLHLLLLPIAIPYAEGQRKRRNTIHEFKKSAKTTLIKIDPALKIKTKKVNTADQCANRCTRNKGLPFTCKAFVFDKARKQCLWFPFNSMSSGVKKEFGHEFDLYENKDYIRNCIIGKGRSYKGTVSITKSGIKCQPWSSMIPHEHSYRGKDLQENYCRNPRGEEGGPWCFTSNPEVRYEVCDIPQCSEGK

SEQ ID NO: 6464 - protein, 285 aa, Homo Sapiens
MWVTKLLPALLLQHVLLHLLLLPIAIPYAEGQRKRRNTIHEFKKSAKTTLIKIDPALKIKTKKVNTADQCANRCTRNKGLPFTCKAFVFDKARKQCLWFPFNSMSSGVKKEFGHEFDLYENKDYIRNCIIGKGRSYKGTVSITKSGIKCQPWSSMIPHEHSYRGKDLQENYCRNPRGEEGGPWCFTSNPEVRYEVCDIPQCSEVECMTCNGESYRGLMDHTESGKICQRWDHQTPHRHKFLPERYPDKGFDDNYCRNPDGQPRPWCYTLDPHTRWEYCAIKTCET

SEQ ID NO: 6465 - protein, 723 aa, Homo Sapiens
MWVTKLLPALLLQHVLLHLLLLPIAIPYAEGQRKRRNTIHEFKKSAKTTLIKIDPALKIKTKKVNTADQCANRCTRNKGLPFTCKAFVFDKARKQCLWFPFNSMSSGVKKEFGHEFDLYENKDYIRNCIIGKGRSYKGTVSITKSGIKCQPWSSMIPHEHSYRGKDLQENYCRNPRGEEGGPWCFTSNPEVRYEVCDIPQCSEVECMTCNGESYRGLMDHTESGKICQRWDHQTPHRHKFLPERYPDKGFDDNYCRNPDGQPRPWCYTLDPHTRWEYCAIKTCADNTMNDTDVPLETTECIQGQGEGYRGTVNTIWNGIPCQRWDSQYPHEHDMTPENFKCKDLRENYCRNPDGSESPWCFTTDPNIRVGYCSQIPNCDMSHGQDCYRGNGKNYMGNLSQTRSGLTCSMWDKNMEDLHRHIFWEPDASKLNENYCRNPDDDAHGPWCYTGNPLIPWDYCPISRCEGDTTPTIVNLDHPVISCAKTKQLRVVNGIPTRTNIGWMVSLRYRNKHICGGSLIKESWVLTARQCFPSRDLKDYEAWLGIHDVHGRGDEKCKQVLNVSQLVYGPEGSDLVLMKLARPAVLDDFVSTIDLPNYGCTIPEKTSCSVYGWGYTGLINYDGLLRVAHLYIMGNEKCSQHHRGKVTLNESEICAGAEKIGSGPCEGDYGGPLVCEQHKMRMVLGVIVPGRGCAIPNRPGIFVRVAYYAKWIHKIILTYKVPQS

SEQ ID NO: 6466 - protein, 655 aa, Homo Sapiens
MGRWAWVPSPWPPPGLGPFLLLLLLLLLLPRGFQPQPGGNRTESPEPNATATPAIPTILVTSVTSETPATSAPEAEGPQSGGLPPPPRAVPSSSSPQAQALTEDGRPCRFPFRYGGRMLHACTSEGSAHRKWCATTHNYDRDRAWGYCVEATPPPGGPAALDPCASGPCLNGGSCSNTQDPQSYHCSCPRAFTGKDCGTEKCFDETRYEYLEGGDRWARVRQGHVEQCECFGGRTWCEGTRHTACLSSPCLNGGTCHLIVATGTTVCACPPGFAGRLCNIEPDERCFLGNGTGYRGVASTSASGLSCLAWNSDLLYQELHVDSVGAAALLGLGPHAYCRNPDNDERPWCYVVKDSALSWEYCRLEACESLTRVQLSPDLLATLPEPASPGRQACGRRHKKRTFLRPRIIGGSSSLPGSHPWLAAIYIGDSFCAGSLVHTCWVVSAAHCFSHSPPRDSVSVVLGQHFFNRTTDVTQTFGIEKYIPYTLYSVFNPSDHDLVLIRLKKKGDRCATRSQFVQPICLPEPGSTFPAGHKCQIAGWGHLDENVSGYSSSLREALVPLVADHKCSSPEVYGADISPNMLCAGYFDCKSDACQGDSGGPLACEKNGVAYLYGIISWGDGCGRLHKPGVYTRVANYVDWINDRIRPPRRLVAPS

SEQ ID NO: 6467 - protein, 662 aa, Homo Sapiens
MGRWAWVPSPWPPPGLGPFLLLLLLLLLLPRGFQPQPGGNRTESPEPNATATPAIPTILVTSVTSETPATSAPEAEGPQSGGLPPPPRAVPSSSSPQAQALTEDGRPCRFPFRYGGRMLHACTSEGSAHRKWCATTHNYDRDRAWGYCVEATPPPGGPAALDPCASGPCLNGGSCSNTQDPQSYHCSCPRAFTGKDCGTEKCFDETRYEYLEGGDRWARVRQGHVEQCECFGGRTWCEGTRHTACLSSPCLNGGTCHLIVATGTTVCACPPGFAGRLCNIEPDERCFLGNGTGYRGVASTSASGLSCLAWNSDLLYQELHVDSVGAAALLGLGPHAYCRNPDNDERPWCYVVKDSALSWEYCRLEACDLETEGRESLTRVQLSPDLLATLPEPASPGRQACGRRHKKRTFLRPRIIGGSSSLPGSHPWLAAIYIGDSFCAGSLVHTCWVVSAAHCFSHSPPRDSVSVVLGQHFFNRTTDVTQTFGIEKYIPYTLYSVFNPSDHDLVLIRLKKKGDRCATRSQFVQPICLPEPGSTFPAGHKCQIAGWGHLDENVSGYSSSLREALVPLVADHKCSSPEVYGADISPNMLCAGYFDCKSDACQGDSGGPLACEKNGVAYLYGIISWGDGCGRLHKPGVYTRVANYVDWINDRIRPPRRLVAPS

SEQ ID NO: 6468 - protein, 700 aa, Homo Sapiens
MLKMLSFKLLLLAVALGFFEGDAKFGERNEGSGARRRRCLNGNPPKRLKRRDRRMMSQLELLSGGEMLCGGFYPRLSCCLRSDSPGLGRLENKIFSVTNNTECGKLLEEIKCALCSPHSQSLFHSPEREVLERDLVLPLLCKDYCKEFFYTCRGHIPGFLQTTADEFCFYYARKDGGLCFPDFPRKQVRGPASNYLDQMEEYDKVEEISRKHKHNCFCIQEVVSGLRQPVGALHSGDGSQRLFILEKEGYVKILTPEGEIFKEPYLDIHKLVQSGIKGGDERGLLSLAFHPNYKKNGKLYVSYTTNQERWAIGPHDHILRVVEYTVSRKNPHQVDLRTARVFLEVAELHRKHLGGQLLFGPDGFLYIILGDGMITLDDMEEMDGLSDFTGSVLRLDVDTDMCNVPYSIPRSNPHFNSTNQPPEVFAHGLHDPGRCAVDRHPTDININLTILCSDSNGKNRSSARILQIIKGKDYESEPSLLEFKPFSNGPLVGGFVYRGCQSERLYGSYVFGDRNGNFLTLQQSPVTKQWQEKPLCLGTSGSCRGYFSGHILGFGEDELGEVYILSSSKSMTQTHNGKLYKIVDPKRPLMPEECRATVQPAQTLTSECSRLCRNGYCTPTGKCCCSPGWEGDFCRTAKCEPACRHGGVCVRPNKCLCKKGYLGPQCEQVDRNIRRVTRAGILDQIIDMTSYLLDLTSYIV

SEQ ID NO: 6469 - protein, 320 aa, Homo Sapiens
MLKMLSFKLLLLAVALGFFEGDAKFGERNEGSGARRRRCLNGNPPKRLKRRDRRMMSQLELLSGGEMLCGGFYPRLSCCLRSDSPGLGRLENKIFSVTNNTECGKLLEEIKCALCSPHSQSLFHSPEREVLERDLVLPLLCKDYCKEFFYTCRGHIPGFLQTTADEFCFYYARKDGGLCFPDFPRKQVRGPASNYLDQMEEYDKVEEISRKHKHNCFCIQEVVSGLRQPVGALHSGDGSQRLFILEKEGYVKILTPEGEIFKEPYLDIHKLVQSGIKVGFLNFIYFCAGYVNFILVLPSSLKVFLCNKRKNLAGENKGAT

SEQ ID NO: 6470 - protein, 782 aa, Homo Sapiens
MARARAGALLALWVLGAAAHPQCLDFRPPFRPTQPLRLCAQYSDFGCCDEGRDAELTRRFWALASRVDAAEWAACAGYARDLLCQECSPYAAHLYDAEDPFTPLRTVPGLCQDYCLDMWHKCRGLFRHLSTDQELWALEGNLARFCRYLSLDDTDYCFPYLLVNKNLNSNLGHVVADAKGCLQLCLEEVANGLRNPVAMVHARDGTHRFFVAEQVGLVWAYLPDRSRLGKPFLNISRVVLTSPWEGDERGFLGIAFHPSFQHNRRLYVYYSVGIRSSEWIRISEFRVSEDDENAVDHSSERIILEVKEPASNHNGGQLLFGDDGYLYIFTGDGGMAGDPFGTFGNAQNKSALLGKVLRIDVDRKERGLPYGIPPDNPFVGDPAAQPEVYALGVRNMWRCSFDRGDPSSGTGRGRLFCGDVGQNKFEEVDVVERGGNYGWRAREGFECYDRSLCANTSLNDLLPIFAYPHTVGKSVTGGYVYRGCEYPNLNGLYIFGDFMSGRLMSLQENPGTGQWQYSEICMGHGQTCEFPGLINNYYPYIISFGEDEAGELYFMSTGEPSATAPRGVVYKIIDASRRAPPGKCQIQPAQVKIRSRLIPFVPKEKFIPKTRSTPRPTARAPTRAPRRGRPTAAPPAPTPRPARPTQQPGSRRGGGRRRGRLNSASRAFRDGEVRLVRPAGLSSGSGRVEVFVGGRWGTVCDDSWNISGAAVVCRQLGFAYAVRAVKRAEFGQGGSLPILLDDVRCAGWERNLLECQHNGVGTHNCEHDEDAGVVCSHQNPDL

SEQ ID NO: 6471 - protein, 608 aa, Homo Sapiens
MARARAGALLALWVLGAAAHPQCLDFRPPFRPTQPLRLCAQYSDFGCCDEGRDAELTRRFWALASRVDAAEWAACAGYARDLLCQECSPYAAHLYDAEDPFTPLRTVPGLCQDYCLDMWHKCRGLFRHLSTDQELWALEGNLARFCRYLSLDDTDYCFPYLLVNKNLNSNLGHVVADAKGCLQLCLEEVANGLRNPVAMVHARDGTHRFFVAEQVGLVWAYLPDRSRLGKPFLNISRVVLTSPWEGDERGFLGIAFHPSFQHNRRLYVYYSVGIRSSEWIRISEFRVSEDDENAVDHSSERIILEVKEPASNHNGGQLLFGDDGYLYIFTGDGGMAGDPFGTFGNAQNKSALLGKVLRIDVDRKERGLPYGIPPDNPFVGDPAAQPEVYALGVRNMWRCSFDRGDPSSGTGRGRLFCGDVGQNKFEEVDVVERGGNYGWRAREGFECYDRSLCANTSLNDLLPIFAYPHTVGKSVTGGYVYRGCEYPNLNGLYIFGDFMSGRLMSLQENPGTGQWQYSEICMGHGQTCEFPGLINNYYPYIISFGEDEAGELYFMSTGEPSATAPRGVVYKIIDASSCKARSAMPGYVPAPSVCSSLTSQPFILQWWK

SEQ ID NO: 6472 - protein, 724 aa, Homo Sapiens
MLRTSTPNLCGGLHCRAPWLSSGILCLCLIFLLGQVGLLQGHPQCLDYGPPFQPPLHLEFCSDYESFGCCDQHKDRRIAARYWDIMEYFDLKRHELCGDYIKDILCQECSPYAAHLYDAENTQTPLRNLPGLCSDYCSAFHSNCHSAISLLTNDRGLQESHGRDGTRFCHLLDLPDKDYCFPNVLRNDYLNRHLGMVAQDPQGCLQLCLSEVANGLRNPVSMVHAGDGTHRFFVAEQVGVVWVYLPDGSRLEQPFLDLKNIVLTTPWIGDERGFLGLAFHPKFRHNRKFYIYYSCLDKKKVEKIRISEMKVSRADPNKADLKSERVILEIEEPASNHNGGQLLFGLDGYMYIFTGDGGQAGDPFGLFGNAQNKSSLLGKVLRIDVNRAGSHGKRYRVPSDNPFVSEPGAHPAIYAYGIRNMWRCAVDRGDPITRQGRGRIFCGDVGQNRFEEVDLILKGGNYGWRAKEGFACYDKKLCHNASLDDVLPIYAYGHAVGKSVTGGYVYRGCESPNLNGLYIFGDFMSGRLMALQEDRKNKKWKKQDLCLGSTTSCAFPGLISTHSKFIISFAEDEAGELYFLATSYPSAYAPRGSIYKFVDPSRRAPPGKCKYKPVPVRTKSKRIPFRPLAKTVLDLLKEQSEKAARKSSSATLASGPAQGLSEKGSSKKLASPTSSKNTLRGPGTKKKARVGPHVRQGKRRKSLKSHSGRMRPSAEQKRAGRSLP

SEQ ID NO: 6473 - protein, 543 aa, Homo Sapiens
MLGFLSRGPSMKLCMGLACVLSLWNTVSGIKGEAKKEKGMTFLPTTGKWVIRAPFQLTCLEIKMLRRKKMGHSRAALNPDLLLSGLREEERKEKGVAFLATTELPARSIDLSALNLTELVNGMLSRALKDSKKFFSLLSVTSYSSFAFHKFSVAVYNISNLKTVDPAKFPTRYCYCLNNRTNDLSDFTALLVDIIGNSTSYLTEIFKSTSILSVNQSNESDCIFICVMTGKSGRNLSDFWEIEEKYPIINYTFTSGLSGVLGAATRGTARTSKPTTKSQKTLPSTSPGHWTQSTPWASALRSSPWTETAAPSETEETLNTGRPPELPARATATWFSASHTLPALATRRVARTQWLTADRQTWASISSVPWAQTISEKKPGGSLWETRSSPPTTAGTEEAMNTTSLLAPAAEIMATPGSPSQASPTLGAFTHGTQTPSPTKATAPRYPQTGDLSAEWPFTAGEEPVLVPRPHQVSRCPQPLFKVGAMAAAPLTLAIQRLNPCLMELCQFFQQCLCMSQRSPRTEDMSSFINPYQSSTSKISWKT

SEQ ID NO: 6474 - protein, 531 aa, Homo Sapiens
MLGFLSRGPSMKLCMGLACVLSLWNTVSGIKGEAKKEKGMTFLPTTVSGLREEERKEKGVAFLATTELPARSIDLSALNLTELVNGMLSRALKDSKKFFSLLSVTSYSSFAFHKFSVAVYNISNLKTVDPAKFPTRYCYCLNNRTNDLSDFTALLVDIIGNSTSYLTEIFKSTSILSVNQSNESDCIFICVMTGKSGRNLSDFWEIEEKYPIINYTFTSGLSGVLGAATRGTARTSKPTTKSQKTLPSTSPGHWTQSTPWASALRSSPWTETAAPSETEETLNTGRPPELPARATATWFSASHTLPALATRRVARTQWLTADRQTWASISSVPWAQTISEKKPGGSLWETRSSPPTTAGTEEAMNTTSLLAPAAEIMATPGSPSQASPTLGAFTHGTQTPSPTKATAPRYPQTGDLSAEWPFTAGEEPVLVPRPHQVSRCPQPLFKVGAMAAAPLTLAIQRLNPCLMELCQFFQQCLCMSQRSPRTEDMRYCLEYYSWFLKNATYICQRVKRVSHSHTLKQKCLENICKSV

SEQ ID NO: 6475 - protein, 97 aa, Homo Sapiens
MKAQTALSFFLILITSLSGSQGIFPLAFFIYVPMNEQIVIGRLDEDIILPSSFERGSEVVIHWKYQDSYKVHSYYKGSDHLESQDPRYANRTSLFYN

SEQ ID NO: 6476 - protein, 136 aa, Homo Sapiens
MKAQTALSFFLILITSLSGSQGIFPLAFFIYVPMNEQIVIGRLDEDIILPSSFERGSEVVIHWKYQDSYKVHSYYKGSDHLESQDPRYANRTSLFYNEIQNGNASLFFRRVSLLDEGIYTCYVGTAIQVITNKVVL

SEQ ID NO: 6477 - protein, 145 aa, Homo Sapiens
MKAQTALSFFLILITSLSGSQGIFPLAFFIYVPMNEQIVIGRLDEDIILPSSFERGSEVVIHWKYQDSYKVHSYYKGSDHLESQDPRYANRTSLFYNEIQNGNASLFFRRVSLLDEGIYTCYVGTAIQVITNKVVLKVGVFLTPV

SEQ ID NO: 6478 - protein, 414 aa, Homo Sapiens
MKAQTALSFFLILITSLSGSQGIFPLAFFIYVPMNEQIVIGRLDEDIILPSSFERGSEVVIHWKYQDSYKVHSYYKGSDHLESQDPRYANRTSLFYNEIQNGNASLFFRRVSLLDEGIYTCYVGTAIQVITNKVVLKVGVFLTPVMKYEKRNTNSFLICSVLSVYPRPIITWKMDNTPISENNMEETGSLDSFSINSPLNITGSNSSYECTIENSLLKQTWTGRWTMKDGLHKMQSEHVSLSCQPVNDYFSPNQDFKVTWSRMKSGTFSVLAYYLSSSQNTIINESRFSWNKELINQSDFSMNLMDLNLSDSGEYLCNISSDEYTLLTIHTVHVEPSQETASHNKGLWILVPSAILAAFLLIWSVKCCRAQLEARRSRHPADGAQQERCCVPPGERCPSAPDNGEENVPLSGKV

SEQ ID NO: 6479 - protein, 414 aa, Homo Sapiens; identical to SEQ ID NO: 6478

SEQ ID NO: 6480 - protein, 397 aa, Homo Sapiens
MKAQTALSFFLILITSLSGSQGIFPLAFFIYVPMNEQIVIGRLDEDIILPSSFERGSEVVIHWKYQDSYKVHSYYKGSDHLESQDPRYANRTSLFYNEIQNGNASLFFRRVSLLDEGIYTCYVGTAIQVITNKVVLKVGVFLTPVMKYEKRNTNSFLICSVLSVYPRPIITWKMDNTPISENNMEETGSLDSFSINSPLNITGSNSSYECTIENSLLKQTWTGRWTMKDGLHKMQSEHVSLSCQPVNDYFSPNQDFKVTWSRMKSGTFSVLAYYLSSSQNTIINESRFSWNKELINQSDFSMNLMDLNLSDSGEYLCNISSDEYTLLTIHTVHVEPSQETASHNKGLWILVPSAILAAFLLIWSVKCCRERCCVPPGERCPSAPDNGEENVPLSGKV

SEQ ID NO: 6481 - protein, 414 aa, Homo Sapiens; identical to SEQ ID NO: 6478

SEQ ID NO: 6482 - protein, 414 aa, Homo Sapiens; identical to SEQ ID NO: 6478

SEQ ID NO: 6483 - protein, 128 aa, Homo Sapiens
MNEQIVIGRLDEDIILPSSFERGSEVVIHWKYQDSYKVHSYYKGSDHLESQDPRYANRTSLFYNEIQNGNASLFFRRVSLLDEGIYTCYVGTAIQVITNKVVLKVGVFLTPVMKYEKRNTNSFLICSV

SEQ ID NO: 6484 - protein, 350 aa, Homo Sapiens
MVMWNILKPRTHLLCMTNMFCTRHEGTDSTVFLPHSHNISEWISRRVSLLDEGIYTCYVGTAIQVITNKVVLKVGVFLTPVMKYEKRNTNSFLICSVLSVYPRPIITWKMDNTPISENNMEETGSLDSFSINSPLNITGSNSSYECTIENSLLKQTWTGRWTMKDGLHKMQSEHVSLSCQPVNDYFSPNQDFKVTWSRMKSGTFSVLAYYLSSSQNTIINESRFSWNKELINQSDFSMNLMDLNLSDSGEYLCNISSDEYTLLTIHTVHVEPSQETASHNKGLWILVPSAILAAFLLIWSVKCCRAQLEARRSRHPADGAQQERCCVPPGERCPSAPDNGEENVPLSGKV

SEQ ID NO: 6485 - protein, 328 aa, Homo Sapiens
  misc_feature (1)..(1): Xaa can be any naturally occurring amino acid
XIQNGNASLFFRRVSLLDEGIYTCYVGTAIQVITNKVVLKVGVFLTPVMKYEKRNTNSFLICSVLSVYPRPIITWKMDNTPISENNMEETGSLDSFSINSPLNITGSNSSYECTIENSLLKQTWTGRWTMKDGLHKMQSEHVSLSCQPVNDYFSPNQDFKVTWSRMKSGTFSVLAYYLSSSQNTIINESRFSWNKELINQSDFSMNLMDLNLSDSGEYLCNISSDEYTLLTIHTVHVEPSQETASHNKGLWILVPSAILAAFLLIWSVKCCRAQLEARRSRHPADGAQQERCCVPPGERCPSAPDNGEENVVRHYFLYQTIYSIKMLL

SEQ ID NO: 6486 - protein, 39 aa, Homo Sapiens
MAASLRLLGAASGLRYWSRRLRPAAGSFAAGSIFPSRCC

SEQ ID NO: 6487 - protein, 336 aa, Homo Sapiens
MAASLRLLGAASGLRYWSRRLRPAAGSFAAVCSRSVASKTPVGFIGLGNMGNPMAKNLMKHGYPLIIYDVFPDACKEFQDAGEQVVSSPADVAEKADRIITMLPTSINAIEAYSGANGILKKVKKGSLLIDSSTIDPAVSKELAKEVEKMGAVFMDAPVSGGVGAARSGNLTFMVGGVEDEFAAAQELLGCMGSNVVYCGAVGTGQAAKICNNMLLAISMIGTAEAMNLGIRLGLDPKLLAKILNMSSGRCWSSDTYNPVPGVMDGVPSANNYQGGFGTTLMAKDLGLAQDSATSTKSPILLGSLAHQIYRMMCAKGYSKKDFSSVFQFLREEETF

SEQ ID NO: 6488 - protein, 206 aa, Homo Sapiens
  misc_feature (1)..(1): Xaa can be any naturally occurring amino acid
XELPHTLKLPGLPLFPNKFLISLVLLILVSSPADVAEKADRIITMLPTSINAIEAYSGANGILKKVKKGSLLIDSSTIDPAVSKELAKEVEKMGAVFMDAPVSGGVGAARSGNLTFMVGGVEDEFAAAQELLGCMGSNVVYCGAVGTGQAAKICNNMLLAISMIGTAEAMNLGIRLGLDPKLLAKILNMSSGRCWSSDTYNPVPGV

SEQ ID NO: 6489 - protein, 163 aa, Homo Sapiens
MAAAVVLAAGLRAARRAVAATGVRGGQVRGAAGVTDGNEVAKAQQATPGGAAPTIFSRILDKSLPADILYEDQQCLVFRDVAPQAPVHFLVIPKKPIPRISQAEEEDQQLLGHLLLVAKQTAKAEGLGDGYRLVINDGKLGAQSVYHLHIHVLGGRQLQWPPG

SEQ ID NO: 6490 - protein, 365 aa, Homo Sapiens
MAVMAPRTLLLLLSGALALTQTWAGSHSMRYFFTSVSRPGRGEPRFIAVGYVDDTQFVRFDSDAASQRMEPRAPWIEQEGPEYWDQETRNVKAQSQTDRVDLGTLRGYYNQSEAGSHTIQIMYGCDVGSDGRFLRGYRQDAYDGKDYIALNEDLRSWTAADMAAQITKRKWEAAHEAEQLRAYLDGTCVEWLRRYLENGKETLQRTDPPKTHMTHHPISDHEATLRCWALGFYPAEITLTWQRDGEDQTQDTELVETRPAGDGTFQKWAAVVVPSGEEQRYTCHVQHEGLPKPLTLRWELSSQPTIPIVGIIAGLVLLGAVITGAVVAAVMWRRKSSDRKGGSYTQAASSDSAQGSDVSLTACKV

SEQ ID NO: 6491 - protein, 299 aa, Homo Sapiens
MAVMAPRTLLLLLSGALALTQTWAGSHSMRYFFTSVSRPGRGEPRFIAVGYVDDTQFVRFDSDAASQRMEPRAPWIEQEGPEYWDQETRNVKAQSQTDRVDLGTLRGYYNQSEAGSHTIQIMYGCDVGSDGRFLRGYRQDAYDGKDYIALNEDLRSWTAADMAAQITKRKWEAAHEAEQLRAYLDGTCVEWLRRYLENGKETLQRTDPPKTHMTHHPISDHEATLRCWALGFYPAEITLTWQRDGEDQTQDTELVETRPAGDGTFQKWAAVVVPSGEEQRYTCHVQHEGLPKPLTLRWV

SEQ ID NO: 6492 - protein, 365 aa, Homo Sapiens; identical to SEQ ID NO: 6490

SEQ ID NO: 6493 - protein, 371 aa, Homo Sapiens
MAVMAPRTLLLLLSGALALTQTWAGSHSMRYFFTSVSRPGRGEPRFIAVGYVDDTQFVRFDSDAASQRMEPRAPWIEQEGPEYWDQETRNVKAQSQTDRVDLGTLRGYYNQSEAGSHTIQIMYGCDVGSDGRFLRGYRQDAYDGKDYIALNEDLRSWTAADMAAQITKRKWEAAHEAEQLRAYLDGTCVEWLRRYLENGKETLQRTDPPKTHMTHHPISDHEATLRCWALGFYPAEITLTWQRDGEDQTQDTELVETRPAGDGTFQKWAAVVVPSGEEQRYTCHVQHEGLPKPLTLRWELSSQPTIPIVGIIAGLVLLGAVITGAVVAAVMWRRKSSGGEGVKDRKGGSYTQAASSDSAQGSDVSLTACKV

SEQ ID NO: 6494 - protein, 325 aa, Homo Sapiens
MAVMAPRTLLLLLSGALALTQTWAGSHSMRYFFTSVSRPGRGEPRFIAVGYVDDTQFVRFDSDAASQRMEPRAPWIEQEGPEYWDQETRNVKAQSQTDRVDLGTLRGYYNQSEAGSHTIQIMYGCDVGSDGRFLRGYRQDAYDGKDYIALNEDLRSWTAADMAAQITKRKWEAAHEAEQLRAYLDGTCVEWLRRYLENGKETLQRTDPPKTHMTHHPISDHEATLRCWALGFYPAEITLTWQRDGEDQTQDTELVETRPAGDGTFQKWAAVVVPSGEEQRYTCHVQHEGLPKPLTLRWDRKGGSYTQAASSDSAQGSDVSLTACK

SEQ ID NO: 6495 - protein, 131 aa, Homo Sapiens
MRVMAPRALLLLLSGGLALTETWACSHSMRYFDTAVSRPGRGEPRFISVGYVDDTQFVRFDSDAASPRGEPRAPWVEQEGPEYWDRETQKYKRQAQADRVSLRNLRGYYNQSEDEDVWLRPGARRAPPPRV

SEQ ID NO: 6496 - protein, 366 aa, Homo Sapiens
MRVMAPRALLLLLSGGLALTETWACSHSMRYFDTAVSRPGRGEPRFISVGYVDDTQFVRFDSDAASPRGEPRAPWVEQEGPEYWDRETQKYKRQAQADRVSLRNLRGYYNQSEDGSHTLQRMSGCDLGPDGRLLRGYDQSAYDGKDYIALNEDLRSWTAADTAAQITQRKLEAARAAEQLRAYLEGTCVEWLRRYLENGKETLQRAEPPKTHVTHHPLSDHEATLRCWALGFYPAEITLTWQRDGEDQTQDTELVETRPAGDGTFQKWAAVVVPSGQEQRYTCHMQHEGLQEPLTLSWEPSSQPTIPIMGIVAGLAVLVVLAVLGAVVTAMMCRRKSSGGKGGSCSQAACSNSAQGSDESLITCKA

SEQ ID NO: 6497 - protein, 372 aa, Homo Sapiens
MRVMAPRALLLLLSGGLALTETWACSHSMRYFDTAVSRPGRGEPRFISVGYVDDTQFVRFDSDAASPRGEPRAPWVEQEGPEYWDRETQKYKRQAQADRVSLRNLRGYYNQSEDGSHTLQRMSGCDLGPDGRLLRGYDQSAYDGKDYIALNEDLRSWTAADTAAQITQRKLEAARAAEQLRAYLEGTCVEWLRRYLENGKETLQRAEPPKTHVTHHPLSDHEATLRCWALGFYPAEITLTWQRDGEDQTQDTELVETRPAGDGTFQKWAAVVVPSGQEQRYTCHMQHEGLQEPLTLSWEPSSQPTIPIMGIVAGLAVLVVLAVLGAVVTAMMCRRKSSGHFLPTGGKGGSCSQAACSNSAQGSDESLITCKA

SEQ ID NO: 6498 - protein, 244 aa, Homo Sapiens
MSGCDLGPDGRLLRGYDQSAYDGKDYIALNEDLRSWTAADTAAQITQRKLEAARAAEQLRAYLEGTCVEWLRRYLENGKETLQRAEPPKTHVTHHPLSDHEATLRCWALGFYPAEITLTWQRDGEDQTQDTELVETRPAGDGTFQKWAAVVVPSGQEQRYTCHMQHEGLQEPLTLSWEPSSQPTIPIMGIVAGLAVLVVLAVLGAVVTAMMCRRKSSGGKGGSCSQAACSNSAQGSDESLITCK

SEQ ID NO: 6499 - protein, 261 aa, Homo Sapiens
  misc_feature (1)..(1): Xaa can be any naturally occurring amino acid
XRVMAPRALLLLLSGGLALTETWACSHSMRYFDTAVSRPGRGEPRFISVGYVDDTQFVRFDSDAASPRGEPRAPWVEQEGPEYWDRETQKYKRQAQADRVSLRNLRGYYNQSEDGSHTLQRMSGCDLGPDGRLLRGYDQSAYDGKDYIALNEDLRSWTAADTAAQITQRKLEAARAAEQLRAYLEGTCVEWLRRYLENGKETLQRAEPPKTHVTHHPLSDHEASRRWNLPEVGSCGGAFWTRAEIHVPYAARGAARAPHPE

SEQ ID NO: 6500 - protein, 250 aa, Homo Sapiens
MALRAGLVLGFHTLMTLLSPQEAGATKADHMGSYGPAFYQSYGASGQFTHEFDEEQLFSVDLKKSEAVWRLPEFGDFARFDPQGGLAGIAAIKAHLDILVERSNRSRAINVPPRVTVLPKSRVELGQPNILICIVDNIFPPVINITWLRNGQTVTEGVAQTSFYSQPDHLFRKFHYLPFVPSAEDVYDCQVEHWGLDAPLLRHWELQVPIPPPDAMETLVCALGLAIGLVGFLVGTVLIIMGTYVSSVPR

SEQ ID NO: 6501 - protein, 86 aa, Homo Sapiens
MALRAGLVLGFHTLMTLLSPQEAGATKGRAGRHRRNQSPSGHPGGALQPQQSHQRASTGDRAPQVSGGAGPAQHPHLHRGQHLPPC

SEQ ID NO: 6502 - protein, 23 aa, Homo Sapiens
MRPEDRMFHIRAVILRALSLAFL

SEQ ID NO: 6503 - protein, 209 aa, Homo Sapiens
MRPEDRMFHIRAVILRALSLAFLLSLRGAGAIKADHVSTYAAFVQTHRPTGEFMFEFDEDEMFYVDLDKKETVWHLEEFGQAFSFEAQGGLANIAILNNNLNTLIQRSNHTQATNDPPEVTVFPKEPVELGQPNTLICHIDKFFPPVLNVTWLCNGELVTEGVAESLFLPRTDYSFHKFHYLTFVPSAEDFYDCRVEHWGLDQPLLKHW

SEQ ID NO: 6504 - protein, 260 aa, Homo Sapiens
MRPEDRMFHIRAVILRALSLAFLLSLRGAGAIKADHVSTYAAFVQTHRPTGEFMFEFDEDEMFYVDLDKKETVWHLEEFGQAFSFEAQGGLANIAILNNNLNTLIQRSNHTQATNDPPEVTVFPKEPVELGQPNTLICHIDKFFPPVLNVTWLCNGELVTEGVAESLFLPRTDYSFHKFHYLTFVPSAEDFYDCRVEHWGLDQPLLKHWEAQEPIQMPETTETVLCALGLVLGLVGIIVGTVLIIKSLRSGHDPRAQGTL

SEQ ID NO: 6505 - protein, 128 aa, Homo Sapiens
  misc_feature (1)..(1): Xaa can be any naturally occurring amino acid
XNTLICHIDKFFPPVLNVTWLCNGELVTEGVAESLFLPRTDYSFHKFHYLTFVPSAEDFYDCRVEHWGLDQPLLKHWEAQEPIQMPETTETVLCALGLVLGLVGIIVGTVLIIKSLRSGHDPRAQGTL

SEQ ID NO: 6506 - protein, 24 aa, Homo Sapiens
MILNKALLLGALALTTVMSPCGGE

SEQ ID NO: 6507 - protein, 255 aa, Homo Sapiens
MILNKALLLGALALTTVMSPCGGEDIVADHVASCGVNLYQFYGPSGQYTHEFDGDEQFYVDLERKETAWRWPEFSKFGGFDPQGALRNMAVAKHNLNIMIKRYNSTAATNEVPEVTVFSKSPVTLGQPNTLICLVDNIFPPVVNITWLSNGQSVTEGVSETSFLSKSDHSFFKISYLTFLPSADEIYDCKVEHWGLDQPLLKHWEPEIPAPMSELTETVVCALGLSVGLMGIVVGTVFIIQGLRSVGASRHQGPL

SEQ ID NO: 6508 - protein, 255 aa, Homo Sapiens; identical to SEQ ID NO: 6507

SEQ ID NO: 6509 - protein, 255 aa, Homo Sapiens; identical to SEQ ID NO: 6507

SEQ ID NO: 6510 - protein, 214 aa, Homo Sapiens
MILNKALLLGALALTTVMSPCGGEDIVADHVASCGVNLYQFYGPSGQYTHEFDGDEQFYVDLERKETAWRWPEFSKFGGFDPQGALRNMAVAKHNLNIMIKRYNSTAATNEVPEVTVFSKSPVTLGQPNTLICLVDNIFPPVVNITWLSNGQSVTEGVSETSFLSKSDHSFFKISYLTFLPSADEIYDCKVEHWGLDQPLLKHWGASPSTGAEE

SEQ ID NO: 6511 - protein, 53 aa, Homo Sapiens
MILNKALLLGALALTTVMSPCGGEDIVGSISDSLLLYRDGQWVCKTKVEKSDS

SEQ ID NO: 6512 - protein, 136 aa, Homo Sapiens
MSWKKALRIPGDLRVATVTLMLAMLSSLLAEGRDSPEDFVFQFKGMCYFTNGTERVRLVTRYIYNREEYARFDSDVGVYRAVTPQGRPDAEYWNSQKEVLEGTRAELDTVCRHNYEVAFRGILQRRGMVTGLSRSW

SEQ ID NO: 6513 - protein, 269 aa, Homo Sapiens
MSWKKALRIPGDLRVATVTLMLAMLSSLLAEGRDSPEDFVFQFKGMCYFTNGTERVRLVTRYIYNREEYARFDSDVGVYRAVTPQGRPDAEYWNSQKEVLEGTRAELDTVCRHNYEVAFRGILQRRVEPTVTISPSRTEALNHHNLLVCSVTDFYPGQIKVRWFRNDQEETAGVVSTPLIRNGDWTFQILVMLEMTPQRGDVYTCHVEHPSLQSPITVEWRAQSESAQSKMLSGVGGFVLGLIFLGLGLIIRQRSQKGPQGPPPAGLLH

SEQ ID NO: 6514 - protein, 261 aa, Homo Sapiens
MSWKKALRIPGDLRVATVTLMLAMLSSLLAEGRDSPEDFVFQFKGMCYFTNGTERVRLVTRYIYNREEYARFDSDVGVYRAVTPQGRPDAEYWNSQKEVLEGTRAELDTVCRHNYEVAFRGILQRRVEPTVTISPSRTEALNHHNLLVCSVTDFYPGQIKVRWFRNDQEETAGVVSTPLIRNGDWTFQILVMLEMTPQRGDVYTCHVEHPSLQSPITVEWRAQSESAQSKMLSGVGGFVLGLIFLGLGLIIRQRSQKGLLH

SEQ ID NO: 6515 - protein, 261 aa, Homo Sapiens; identical to SEQ ID NO: 6514

SEQ ID NO: 6516 - protein, 224 aa, Homo Sapiens
MSWKKALRIPGDLRVATVTLMLAMLSSLLAEGRDSPEDFVFQFKGMCYFTNGTERVRLVTRYIYNREEYARFDSDVGVYRAVTPQGRPDAEYWNSQKEVLEGTRAELDTVCRHNYEVAFRGILQRRVEPTVTISPSRTEALNHHNLLVCSVTDFYPGQIKVRWFRNDQEETAGVVSTPLIRNGDWTFQILVMLEMTPQRGDVYTCHVEHPSLQSPITVEWRLLH

SEQ ID NO: 6517 - protein, 134 aa, Homo Sapiens
MSWKKALRIPGDLRVATVTLMLAMLSSLLAEGRDSPVEPTVTISPSRTEALNHHNLLVCSVTDFYPGQIKVRWFRNDQEETAGVVSTPLIRNGDWTFQILVMLEMTPQRGDVYTCHVEHPSLQSPITVEWRLLH

SEQ ID NO: 6518 - protein, 275 aa, Homo Sapiens
MALQIPGGFWAAAVTVMLVMLSTPVAEARDFPKDFLVQFKGMCYFTNGTERVRGVARYIYNREEYGRFDSDVGEFQAVTELGRSIEDWNNYKDFLEQERAAVDKVCRHNYEAELRTTLQRQVEPTVTISPSRTEALNHHNLLVCSVTDFYPAQIKVRWFRNDQEETAGVVSTSLIRNGDWTFQILVMLEITPQRGDIYTCQVEHPSLQSPITVEWRAQSESAQSKMLSGIGGFVLGLIFLGLGLIIRHRGQKGPRGPPPAGNISAMIQSGERAQA

SEQ ID NO: 6519 - protein, 264 aa, Homo Sapiens
MALQIPGGFWAAAVTVMLVMLSTPVAEARDFPKDFLVQFKGMCYFTNGTERVRGVARYIYNREEYGRFDSDVGEFQAVTELGRSIEDWNNYKDFLEQERAAVDKVCRHNYEAELRTTLQRQVEPTVTISPSRTEALNHHNLLVCSVTDFYPAQIKVRWFRNDQEETAGVVSTSLIRNGDWTFQILVMLEITPQRGDIYTCQVEHPSLQSPITVEWRAQSESAQSKMLSGIGGFVLGLIFLGLGLIIRHRGQKGPRGPPPAGLLH

SEQ ID NO: 6520 - protein, 227 aa, Homo Sapiens
MALQIPGGFWAAAVTVMLVMLSTPVAEARDFPKDFLVQFKGMCYFTNGTERVRGVARYIYNREEYGRFDSDVGEFQAVTELGRSIEDWNNYKDFLEQERAAVDKVCRHNYEAELRTTLQRQVEPTVTISPSRTEALNHHNLLVCSVTDFYPAQIKVRWFRNDQEETAGVVSTSLIRNGDWTFQILVMLEITPQRGDIYTCQVEHPSLQSPITVEWRPRGPPPAGLLH

SEQ ID NO: 6521 - protein, 218 aa, Homo Sapiens
  misc_feature (1)..(1): Xaa can be any naturally occurring amino acid
XLQIPGGFWAAAVTVMLVMLSTPVAEARDFPKDFLVQFKGMCYFTNGTERVRGVARYIYNREEYGRFDSDVGEFQAVTELGRSIEDWNNYKDFLEQERAAVDKVCRHNYEAELRTTLQRQVEPTVTISPSRTEALNHHNLLVCSVTDFYPAQIKVRWFRNDQEETAGVVSTSLIRNGDWTFQILVMLEITPQRGDIYTCQVEHPSLQSPITVEWRLLH

SEQ ID NO: 6522 - protein, 240 aa, Homo Sapiens
AIGSFHCGCEPGYQLKGRKCMDVNECRQNVCRPDQHCKNTRGGYKCIDLCPNGMTKAENGTCIDIDECKDGTHQCRYNQICENTRGSYRCVCPRGYRSQGVGRPCMDIDECENTDACQHECKNTFGSYQCICPPGYQLTHNGKTCQDIDECLEQNVHCGPNRMCFNMRGSYQCIDTPCPPNYQRDPVSGFCLKNCPPNDLECALSPYALEYKLVSLPFGIATNQDLIRLVAYTQDGVMHP

SEQ ID NO: 6523 - protein, 5635 aa, Homo Sapiens
MISWEVVHTVFLFALLYSSLAQDASPQSEIRAEEIPEGASTLAFVFDVTGSMYDDLVQVIEGASKILETSLKRPKRPLFNFALVPFHDPEIGPVTITTDPKKFQYELRELYVQGGGDCPEMSIGAIKIALEISLPGSFIYVFTDARSKDYRLTHEVLQLIQQKQSQVVFVLTGDCDDRTHIGYKVYEEIASTSSGQVFHLDKKQVNEVLKWVEEAVQASKVHLLSTDHLEQAVNTWRIPFDPSLKEVTVSLSGPSPMIEIRNPLGKLIKKGFGLHELLNIHNSAKVVNVKEPEAGMWTVKTSSSGRHSVRITGLSTIDFRAGFSRKPTLDFKKTVSRPVQGIPTYVLLNTSGISTPARIDLLELLSISGSSLKTIPVKYYPHRKPYGIWNISDFVPPNEAFFLKVTGYDKDDYLFQRVSSVSFSSIVPDAPKVTMPEKTPGYYLQPGQIPCSVDSLLPFTLSFVRNGVTLGVDQYLKESASVNLDIAKVTLSDEGFYECIAVSSAGTGRAQTFFDVSEPPPVIQVPNNVTVTPGERAVLTCLIISAVDYNLTWQRNDRDVRLAEPARIRTLANLSLELKSVKFNDAGEYHCMVSSEGGSSAASVFLTVQEPPKVTVMPKNQSFTGGSEVSIMCSATGYPKPKIAWTVNDMFIVGSHRYRMTSDGTLFIKNAAPKDAGIYGCLASNSAGTDKQNSTLRYIEAPKLMVVQSELLVALGDITVMECKTSGIPPPQVKWFKGDLELRPSTFLIIDPLLGLLKIQETQDLDAGDYTCVAINEAGRATGKITLDVGSPPVFIQEPADVSMEIGSNVTLPCYVQGYPEPTIKWRRLDNMPIFSRPFSVSSISQLRTGALFILNLWASDKGTYICEAENQFGKIQSETTVTVTGLVAPLIGISPSVANVIEGQQLTLPCTLLAGNPIPERRWIKNSAMLLQNPYITVRSDGSLHIERVQLQDGGEYTCVASNVAGTNNKTTSVVVHVLPTIQHGQQILSTIEGIPVTLPCKASGNPKPSVIWSKKGELISTSSAKFSAGADGSLYVVSPGGEESGEYVCTATNTAGYAKRKVQLTVYVRPRVFGDQRGLSQDKPVEISVLAGEEVTLPCEVKSLPPPIITWAKETQLISPFSPRHTFLPSGSMKITETRTSDSGMYLCVATNIAGNVTQAVKLNVHVPPKIQRGPKHLKVQVGQRVDIPCNAQGTPLPVITWSKGGSTMLVDGEHHVSNPDGTLSIDQATPSDAGIYTCVATNIAGTDETEITLHVQEPPTVEDLEPPYNTTFQERVANQRIEFPCPAKGTPKPTIKWLHNGRELTGREPGISILEDGTLLVIASVTPYDNGEYICVAVNEAGTTERKYNLKVHVPPVIKDKEQVTNVSVLLNQLTNLFCEVEGTPSPIIMWYKDNVQVTESSTIQTVNNGKILKLFRATPEDAGRYSCKAINIAGTSQKYFNIDVLVPPTIIGTNFPNEVSVVLNRDVALECQVKGTPFPDIHWFKDGKPLFLGDPNVELLDRGQVLHLKNARRNDKGRYQCTVSNAAGKQAKDIKLTIYIPPSIKGGNVTTDISVLINSLIKLECETRGLPMPAITWYKDGQPIMSSSQALYIDKGQYLHIPRAQVSDSATYTCHVANVAGTAEKSFHVDVYVPPMIEGNLATPLNKQVVIAHSLTLECKAAGNPSPILTWLKDGVPVKANDNIRIEAGGKKLEIMSAQEIDRGQYICVATSVAGEKEIKYEVDVLVPPAIEGGDETSYFIVMVNNLLELDCHVTGSPPPTIMWLKDGQLIDERDGFKILLNGRKLVIAQAQVSNTGLYRCMAANTAGDHKKEFEVTVHVPPTIKSSGLSERVVVKYKPVALQCIANGIPNPSITWLKDDQPVNTAQGNLKIQSSGRVLQIAKTLLEDAGRYTCVATNAAGETQQHIQLHVHEPPSLEDAGKMLNETVLVSNPVQLECKAAGNPVPVITWYKDNRLLSGSTSMTFLNRGQIIDIESAQISDAGIYKCVAINSAGATELFYSLQVHVAPSISGSNNMVAVVVNNPVRLECEARGIPAPSLTWLKDGSPVSSFSNGLQVLSGGRILALTSAQISDTGRYTCVAVNAAGEKQRDIDLRVYVPPNIMGEEQNVSVLISQAVELLCQSDAIPPPTLTWLKDGHPLLKKPGLSISENRSVLKIEDAQVQDTGRYTCEATNVAGKTEKNYNVNIWVPPNIGGSDELTQLTVIEGNLISLLCESSGIPPPNLIWKKKGSPVLTDSMGRVRILSGGRQLQISIAEKSDAALYSCVASNVAGTAKKEYNLQVYIRPTITNSGSHPTEIIVTRGKSISLECEVQGIPPPTVTWMKDGHPLIKAKGVEILDEGHILQLKNIHVSDTGRYVCVAVNVAGMTDKKYDLSVHAPPSIIGNHRSPENISVVEKNSVSLTCEASGIPLPSITWFKDGWPVSLSNSVRILSGGRMLRLMQTTMEDAGQYTCVVRNAAGEERKIFGLSVLVPPHIVGENTLEDVKVKEKQSVTLTCEVTGNPVPEITWHKDGQPLQEDEAHHIISGGRFLQITNVQVPHTGRYTCLASSPAGHKSRSFSLNVFVSPTIAGVGSDGNPEDVTVILNSPTSLVCEAYSYPPATITWFKDGTPLESNRNIRILPGGRTLQILNAQEDNAGRYSCVATNEAGEMIKHYEVKVYIPPIINKGDLWGPGLSPKEVKIKVNNTLTLECEAYAIPSASLSWYKDGQPLKSDDHVNIAANGHTLQIKEAQISDTGRYTCVASNIAGEDELDFDVNIQVPPSFQKLWEIGNMLDTGRNGEAKDVIINNPISLYCETNAAPPPTLTWYKDGHPLTSSDKVLILPGGRVLQIPRAKVEDAGRYTCVAVNEAGEDSLQYDVRVLVPPIIKGANSDLPEEVTVLVNKSALIECLSSGSPAPRNSWQKDGQPLLEDDHHKFLSNGRILQILNTQITDIGRYVCVAENTAGSAKKYFNLNVHVPPSVIGPKSENLTVVVNNFISLTCEVSGFPPPDLSWLKNEQPIKLNTNTLIVPGGRTLQIIRAKVSDGGEYTCIAINQAGESKKKFSLTVYVPPSIKDHDSESLSVVNVREGTSVSLECESNAVPPPVITWYKNGRMITESTHVEILADGQMLHIKKAEVSDTGQYVCRAINVAGRDDKNFHLNVYVPPSIEGPEREVIVETISNPVTLTCDATGIPPPTIAWLKNHKRIENSDSLEVRILSGGSKLQIARSQHSDSGNYTCIASNMEGKAQKYYFLSIQVPPSVAGAEIPSDVSVLLGENVELVCNANGIPTPLIQWLKDGKPIASGETERIRVSANGSTLNIYGALTSDTGKYTCVATNPAGEEDRIFNLNVYVTPTIRGNKDEAEKLMTLVDTSINIECRATGTPPPQINWLKNGLPLPLSSHIRLLAAGQVIRIVRAQVSDVAVYTCVASNRAGVDNKHYNLQVFAPPNMDNSMGTEEITVLKGSSTSMACITDGTPAPSMAWLRDGQPLGLDAHLTVSTHGMVLQLLKAETEDSGKYTCIASNEAGEVSKHFILKVLEPPHINGSEEHEEISVIVNNPLELTCIASGIPAPKMTWMKDGRPLPQTDQVQTLGGGEVLRISTAQVEDTGRYTCLASSPAGDDDKEYLVRVHVPPNIAGTDEPRDITVLRNRQVTLECKSDAVPPPVITWLRNGERLQATPRVRILSGGRYLQINNADLGDTANYTCVASNIAGKTTREFILTVNVPPNIKGGPQSLVILLNKSTVLECIAEGVPTPRITWRKDGAVLAGNHARYSILENGFLHIQSAHVTDTGRYLCMATNAAGTDRRRIDLQVHVPPSIAPGPTNMTVIVNVQTTLACEATGIPKPSINWRKNGHLLNVDQNQNSYRLLSSGSLVIISPSVDDTATYECTVTNGAGDDKRTVDLTVQVPPSIADEPTDFLVTKHAPAVITCTASGVPFPSIHWTKNGIRLLPRGDGYRILSSGAIEILATQLNHAGRYTCVARNAAGSAHRHVTLHVHEPPVIQPQPSELHVILNNPILLPCEATGTPSPFITWQKEGINVNTSGRNHAVLPSGGLQISRAVREDAGTYMCVAQNPAGTALGKIKLNVQVPPVISPHLKEYVIAVDKPITLSCEADGLPPPDITWHKDGRAIVESIRQRVLSSGSLQIAFVQPGDAGHYTCMAANVAGSSSTSTKLTVHVPPRIRSTEGHYTVNENSQAILPCVADGIPTPAINWKKDNVLLANLLGKYTAEPYGELILENVVLEDSGFYTCVANNAAGEDTHTVSLTVHVLPTFTELPGDVSLNKGEQLRLSCKATGIPLPKLTWTFNNNIIPAHFDSVNGHSELVIERVSKEDSGTYVCTAENSVGFVKAIGFVYVKEPPVFKGDYPSNWIEPLGGNAILNCEVKGDPTPTIQWNRKGVDIEISHRIRQLGNGSLAIYGTVNEDAGDYTCVATNEAGVVERSMSLTLQSPPIITLEPVETVINAGGKIILNCQATGEPQPTITWSRQGHSISWDDRVNVLSNNSLYIADAQKEDTSEFECVARNLMGSVLVRVPVIVQVHGGFSQWSAWRACSVTCGKGIQKRSRLCNQPLPANGGKPCQGSDLEMRNCQNKPCPVDGSWSEWSLWEECTRSCGRGNQTRTRTCNNPSVQHGGRPCEGNAVEIIMCNIRPCPVHGAWSAWQPWGTCSESCGKGTQTRARLCNNPPPAFGGSYCDGAETQMQVCNERNCPIHGKWATWASWSACSVSCGGGARQRTRGCSDPVPQYGGRKCEGSDVQSDFCNSDPCPTHGNWSPWSGWGTCSRTCNGGQMRRYRTCDNPPPSNGGRACGGPDSQIQRCNTDMCPVDGSWGSWHSWSQCSASCGGGEKTRKRLCDHPVPVKGGRPCPGDTTQVTRCNVQACPGGPQRARGSVIGNINDVEFGIAFLNATITDSPNSDTRIIRAKITNVPRSLGSAMRKIVSILNPIYWTTAKEIGEAVNGFTLTNAVFKRETQVEFATGEILQMSHIARGLDSDGSLLLDIVVSGYVLQLQSPAEVTVKDYTEDYIQTGPGQLYAYSTRLFTIDGISIPYTWNHTVFYDQAQGRMPFLVETLHASSVESDYNQIEETLGFKIHASISKGDRSNQCPSGFTLDSVGPFCADEDECAAGNPCSHSCHNAMGTYYCSCPKGLTIAADGRTCQDIDECALGRHTCHAGQDCDNTIGSYRCVVRCGSGFRRTSDGLSCQDINECQESSPCHQRCFNAIGSFHCGCEPGYQLKGRKCMDVNECRQNVCRPDQHCKNTRGGYKCIDLCPNGMTKAENGTCIDIDECKDGTHQCRYNQICENTRGSYRCVCPRGYRSQGVGRPCMDINECEQVPKPCAHQCSNTPGSFKCICPPGQHLLGDGKSCAGLERLPNYGTQYSSYNLARFSPVRNNYQPQQHYRQYSHLYSSYSEYRNSRTSLSRTRRTIRKTCPEGSEASHDTCVDIDECENTDACQHECKNTFGSYQCICPPGYQLTHNGKTCQDIDECLEQNVHCGPNRMCFNMRGSYQCIDTPCPPNYQRDPVSGFCLKNCPPNDLECALSPYALEYKLVSLPFGIATNQDLIRLVAYTQDGVMHPRTTFLMVDEEQTVPFALRDENLKGVVYTTRPLREAETYRMRVRASSYSANGTIEYQTTFIVYIAVSAYPY

SEQ ID NO: 6524 - protein, 595 aa, Homo Sapiens
MILAPEGSSSGKLRIPAAQERDAGTYTCRAVNELGDASAEIQLAVGHAPQLTELPRDVTVELGRSALLACRATGRPPPTVTWRRGDGQPLGLRLGAGRGSRSRQPDSGVLFFESVAPEDQAPYVCEARNVFGKVQAEARLIVTGHAPPQIASSAPTVRVLEGQPVSLPCIVLAGRPLPERHWLKDGRPLPPGSRHSIRADGSLHLDRALQEHAGRYSCVATNTAGSQHRDVELVVQVPPRIHPTATHHITNEGVAASLPCVASGVPAPTITWTKETNALTSRGPHYNVSKEGTLLIAQPSAQDAGAYVCTATNTVGFSSQEMRLSVNTKPRIHMNGSRNADVPLQVTAKAGEEVTLDCEAKGSPPPLVTWTKDSRPVPPITNRYGLLPSGSLRLAQVQVGDSGHYECTASNPAGSASHRYVLGVQGRTSWQPQSLPVPHHPACLSGLSVPLLQPTPRSVRLCHLSLRAPLPPPFATPTSCLSQACLSSSTLSLHLSPYPLRGPGDAVQRPPTTQGRAQWGLGFGRTGVRGEPMKVGLRGSLPGTRGPAGSPGCGDGKRPVRCHRAPPAGSILMPPRGPSEPLLPPLPSTRHFVHL

SEQ ID NO: 6525 - protein, 5059 aa, Homo Sapiens
MPGAPLLRLLTAVSAAVAVAVAGAPGTVMPPTTGDATLAFVFDVTGSMWDELMQVIDGASRILERSLSRRSQAIANYALVPFHDPDIGPVTLTADPTVFQRELRELYVQGGGDCPEMSVGAIKAAVEVANPGSFIYVFSDARAKDYHKKEELLRLLQLKQSQVVFVLTGDCGDRTHPGYLAYEEIAATSSGQVFHLDKQQVTEVLKWVESAIQASKVHLLSTDHEEEGEHTWRLPFDPSLKEVTISLSGPGPEIEVQDPLGRILQEDEGLNVLLNIPDSAKVVAFKPEHPGLWSIKVYSSGRHSVRITGVSNIDFRAGFSTQPLLDLNHTLEWPLQGVPISLVINSTGLKAPGRLDSVELAQSSGKPLLTLPTKPLSNGSTHQLWGGPPFHTPKERFYLKVKGKDHEGNPLLRVSGVSYSGVAPGAPLVSMAPRIHGYLHQPLLVSCSVHSALPFRLQLRRGEARLGEERHFQESGNSSWEILRASKAEEGTYECTAVSRAGTGRAKAQIVVTDPPPQLVPAPNVTVSPGETAVLSCRVLGEAPYNLTWVRDWRVLPASTGRVAQLADLSLEISGIIPTDGGRYQCVASNANGVTRASVWLLVREAPQVSIHTSSQHFSQGVEVKVSCSASGYPTPHISWSRESQALQEDSRIHVDAQGTLIIQGVAPEDAGNYSCQATNEVGTDQETVTLYYTDPPSVSAVNAVVLVAVGEEAVLVCEASGVPPPRVIWYRGGLEMILAPEGSSSGKLRIPAAQERDAGTYTCRAVNELGDASAEIQLAVGHAPQLTELPRDVTVELGRSALLACRATGRPPPTVTWRRGDGQPLGLRLGAGRGSRSRQPDSGVLFFESVAPEDQAPYVCEARNVFGKVQAEARLIVTGHAPPQIASSAPTVRVLEGQPVSLPCIVLAGRPLPERHWLKDGRPLPPGSRHSIRADGSLHLDRALQEHAGRYSCVATNTAGSQHRDVELVVQVPPRIHPTATHHITNEGVAASLPCVASGVPAPTITWTKETNALTSRGPHYNVSKEGTLLIAQPSAQDAGAYVCTATNTVGFSSQEMRLSVNTKPRIHMNGSRNADVPLQVTAKAGEEVTLDCEAKGSPPPLVTWTKDSRPVPPITNRYGLLPSGSLRLAQVQVGDSGHYECTASNPAGSASHRYVLGVQVPPQVQPGPRVLKVLVGEALDLNCVAEGNPEPQLSWSKDGVVLQGRGPQGSVHFAAIRTSDAGRYRCEASNSAGVDAWEVELRVLEPPHWGADETSGLLERVAGENASLPCPARGTPKPQVTWRKGPSSEPLHGQPGVAVLEEGSLFLASVSPADSGDYECQATNEVGSTSRRAKLVVYVPPSIREDGRKANVSGMAGQSLTLECDANGFPVPEIVWLKDAQLIPKVGGHRLLDEGQSLHFPRIQEGDSGLYSCRAENQAGTAQRDFHLLVLTPPSVLGAGAAQEVLGLAGADVELQCWTSGVPTPQVEWTKDRQPVLPGGPHLQVQEDGQVLRITGSHVGDEGRYQCVAFSPAGQQARDFQLRVHAPPTIWGSNETGEVAVMEDHLVQLLCEARGVPTPNITWFKDGALLPTSTKVVYTRGGRQLQLGRAQSSDAGVYTCKASNAVGAAEKATRLDVYVPPTIEGAGGRPYVVKAVAGRPVALECVARGHPSPTLSWHHEGLPVAESNESRLETDGSVLRLESPGEASSGLYSCVASSPAGEAVLQYSVEVQVPPQLLVAEGLGQVTTIVGQPLELPCQASGSPVPTIQWLQNGRPAEELAGVQVASQGTTLHIDHVELDHSGLFACQATNEAGTAGAEVEVSVHEFPSVSIIGGENITAPFLQPVTLQCIGDGVPTPSLRWWKDGVALAAFGGNLQIEKVDLRDEGIYTCAATNLAGESKREVALKVLVPPNIEPGPVNKAVLENASVTLECLASGVPPPDVSWFKGHQPVSSWMGVTVSVDGRVLRIEQAQLSDAGSYRCVASNVAGSTELRYGLRVNVPPRITLPPSLPGPVLVNTPVRLTCNATGAPSPTLMWLKDGNPVSPAGTPGLQVFPGGRVLTLASARASDSGRYSCVAVSAVGEDRQDVVLQVHMPPSILGEELNVSVVANESVALECQSHAMPPPVLSWWKDGRPLEPRPGVHLSADKALLQVDRADVWDAGHYTCEALNQAGHSEKHYNLNVWVAPVFPLRESHTLTVREGHPTRLSCECRGVPFPKISWRKDGQPLPGEGAGLQHVSAVGRLLYLGQAQLAQEGTYTCECSNVVGNSSQDLQLEVHVPPQIAGPREPPTQVSVVQDGVATLECNATGKPPPTVTWERDGQPVGAELGLQLQNQGQSLHVERAQAAHTGRYSCVAENLAGRAERKFELSVLVPPELIGDLDPLTNITAALHSPLTLLCEAMGIPPPAIRWFRGEEPVSPGEDTYLLAGGWMLKMTQTQEQDSGLYSCLASNEAGEARRNFSVEVLVPPSIENEDLEEVIKVLDGQTAHLMCNVTGHPQPKLTWFKDGRPLARGDAHHISPDGVLLQVLQANLSSAGHYSCIAANAVGEKTKHFQLSVLLAPTILGGAEDSADEEVTVTVNNPISLICEALAFPSPNITWMKDGAPFEASRNIQLLPGTHGLQILNAQKEDAGQYTCVVTNELGEAVKNYHVEVLIPPSISKDDPLAEVGVKEVKTKVNSTLTLECESWAVPPPTIRWYKDGQPVTPSSRLQVLGEGRLLQIQPTQVSDSGRYLCVATNVAGEDDQDFNVLIQVPPMFQKVGDFSAAFEILSREEEARGGVTEYREIVENNPAYLYCDTNAIPPPDLTWYREDQPLSAGDEVSVLQGGRVLQIPLVRAENAGRYSCKASNEVGEDWLHYELLVLTPPVILGDTEELVEEVTVNASSTVSLQCPALGNPVPTISWLQNGLPFSPSPRLQVLEDGQVLQVSTAEVADAASYMCVAENQAGSAEKLFTLRVQVPPRIAGLDLEQVTAILNSSVSLPCDVHAHPNPEVTWYKDSQALSLGEEVFLLPGTHTLQLGRARLSDSGMYTCEALNAAGRDQKLVQLSVLVPPAFRQAPRGPQDAVLVRVGDKAVLSCETDALPEPTVTWYKDGQPLVLAQRTQALRGGQRLEIQEAQVSDKGLYSCKVSNVAGEAVRTFTLTVQVPPTFENPKTETVSQVAGSPLVLTCDVSGVPAPTVTWLKDRMPVESSAVHGVVSRGGRLQLSRLQPAQAGTYTCVAENTQAEARKDFVVAVLVAPRIRSSGVAREHHVLEGQEVRLDCEADGQPPPDVAWLKDGSPLGQDMGPHLRFYLDGGSLVLKGLRASDAGAYTCVAHNPAGEDARLHTVNVLVPPTIKQGADGSGTLVSRPGELVTMVCPVRGSPPIHVSWLKDGLPLPLSQRTLLHGSGHTLRISKVQLADAGIFTCVAASPAGVADRNFTLQVQVPPVLEPVEFQNDVVVVRGSLVELPCEARGVPLPLVSWMKDGEPLLSQSLEQGPSLQLEAVGAGDSGTYSCVAVSEAGEARRHFQLTVMEPPHIEDSGQPTELSLTPGAPMELLCDAQGTPQPNITWHKDGQALTRLENNSRATRVLRVENVQVRDAGLYTCLAESPAGAIEKSFRVRVQAPPNIVGPRGPRFVVGLAPGQLVLECSVEAEPAPKITWHRDGIVLQEDAHTQFPERGRFLQLQALSTADSGDYSCTARNAAGSTSVAFRVEIHTVPTIRSGPPAVNVSVNQTALLPCQADGVPAPLVSWRKDRVPLDPRSPRFEILPEGSLRIQPVLAQDAGHYLCLASNSAGSDRQGRDLRVLALLPCEASGSPKPLVVWWKDGQKLDFRLQQGAYRLLPSNALLLTAPGPQDSAQFECVVSNEVGEAHRLYQVTVHVPPTIADDQTDFTVTMMAPVVLTCHSTGIPAPTVSWSKAGAQLGARGSGYRVSPSGALEIGQALPIHAGRYTCSARNSAGVAHKHVFLTVQASPVVKPLPSVVRAVAEEEVLLPCEASGIPRPTITWQKEGLNVATGVSTQVLPGGQLRIAHASPEDAGNYLCIAKNSAGSAMGKTRLVVQVPPVIENGLPDLSTTEGSHAFLPCKARGSPEPNITWDKDGQPVSGAEGKFTIQPSGELLVKNLEGQDAGTYTCTAENAVGRARRRVHLTILVLPVFTTLPGDRSLRLGDRLWLRCAARGSPTPRIGWTVNDRPVTEGVSEQDGGSTLQRAAVSREDSGTYVCWAENRVGRTQAVSFVHVKEAPVLQGEAFSYLVEPVGGSIQLDCVVRGDPVPDIHWIKDGLPLRGSHLRHQLQNGSLTIRRTERDDAGRYQCLAENEMGVAKKVVILVLQSAPVFQVEPQDMTVRSGDDVALRCQATGEPTPTIEWLQAGQPLRASRRLRTLPDGSLWLENVETGDAGTYDCVAHNLLGSATARAFLVVRGEPQGSWGSMTGVINGRKFGVATLNTSVMQEAHSGVSSIHSSIRHVPANVGPLMRVLVVTIAPIYWALARESGEALNGHSLTGGRFRQESHVEFATGELLTMTQVARGLDPDGLLLLDVVVNGVVPESLADADLQVQDFEEHYVQTGPGQLFVGSTQRFFQGGLPSFLRCNHSIQYNAARGPQPQLVQHLRASAISSAFDPEAEALRFQLATALQAEENEVGCPEGFELDSQGAFCVDRDECSGGPSPCSHACLNAPGRFSCTCPTGFALAWDDRNCRDVDECAWDAHLCREGQRCVNLLGSYRCLPDCGPGFRVADGAGCEDVDECLEGLDDCHYNQLCENTPGGHRCSCPRGYRMQGPSLPCLDVNECLQLPKACAYQCHNLQGSYRCLCPPGQTLLRDGKACTSLERNGQNVTTVSHRGPLLPWLRPWASIPGTSYHAWVSLRPGPMALSSVGRAWCPPGFIRQNGVCTDLDECRVRNLCQHACRNTEGSYQCLCPAGYRLLPSGKNCQDINECEEESIECGPGQMCFNTRGSYQCVDTPCPATYRQGPSPGTCFRRCSQDCGTGGPSTLQYRLLPLPLGVRAHHDVARLTAFSEVGVPANRTELSMLEPDPRSPFALRPLRAGLGAVYTRRALTRAGLYRLTVRAAAPRHQSVFVLLIAVSPYPY

SEQ ID NO: 6526 - protein, 309 aa, Homo Sapiens
  misc_feature (1)..(1): Xaa can be any naturally occurring amino acid
XPGQLFVGSTQRFFQGGLPSFLRCNHSIQYNAARGPQPQLVQHLRASAISSAFDPEAEALRFQLATALQAEENEVGCPEGFELDSQGAFCVDVDECAWDAHLCREGQRCVNLLGSYRCLPDCGPGFRVADGAGCEDVDECLEGLDDCHYNQLCENTPGGHRCSCPRGYRMQGPSLPCLDVNECLQLPKACAYQCHNLQGSYRCLCPPGQTLLRDGKACTSLERNGQNVTTVSHRGPLLPWLRPWASIPGTSYHAWVSLRPGPMALSSVGRAWCPPGFIRQNGVCTDLDECRVRNLCQHACRNTEGSYQC

SEQ ID NO: 6527 - protein, 479 aa, Homo Sapiens
  misc_feature (1)..(1): Xaa can be any naturally occurring amino acid
XVHAHPNPEVTWYKDSQALSLGEEVFLLPGTHTLQLGRARLSDSGMYTCEALNAAGRDQKLVQLSVLVPPAFRQAPRGPQDAVLVRVGDKAVLSCETDALPEPTVTWYKDGQPLVLAQRTQALRGGQRLEIQEAQVSDKGLYSCKVSNVAGEAVRTFTLTVQVPPTFENPKTETVSQVAGSPLVLTCDVSGVPAPTVTWLKDRMPVESSAVHGVVSRGGRLQLSRLQPAQAGTYTCVAENTQAEARKDFVVAVLVAPRIRSSGVAREHHVLEGQEVRLDCEADGQPPPDVAWLKDGSPLGQDMGPHLRFYLDGGSLVLKGLRASDAGAYTCVAHNPAGEDARLHTVNVLVPPTIKQGADGSGTLVSRPGELVTMVCPVRGSPPIHVSWLKDGLPLPLSQRTLLHGSGHTLRISKVQLADAGIFTCVAASPAGVADRNFTLQCPLSWSRWSSRMTWWWFVAPWWNSRARPGAFPCLSCRG

SEQ ID NO: 6528 - protein, 325 aa, Homo Sapiens
MAAMRKALPRRLVGLASLRAVSTSSMGTLPKRVKIVEVGPRDGLQNEKNIVSTPVKIKLIDMLSEAGLSVIETTSFVSPKWVPQMGDHTEVLKGIQKFPGINYPVLTPNLKGFEAAVAAGAKEVVIFGAASELFTKKNINCSIEESFQRFDAILKAAQSANISVRGYVSCALGCPYEGKISPAKVAEVTKKFYSMGCYEISLGDTIGVGTPGIMKDMLSAVMQEVPLAALAVHCHDTYGQALANTLMALQMGVSVVDSSVAGLGGCPYAQGASGNLATEDLVYMLEGLGIHTGVNLQKLLEAGNFICQALNRKTSSKVAQATCKL

SEQ ID NO: 6529 - protein, 254 aa, Homo Sapiens
MAAMRKALPRRLVGLASLRAVSTSSMGTLPKRVKIVEVGPRDGLQNEKNIVSTPVKIKLIDMLSEAGLSVIETTSFVSPKWVPQMGDHTEVLKGIQKFPGINYPVLTPNLKGFEAAVTKKFYSMGCYEISLGDTIGVGTPGIMKDMLSAVMQEVPLAALAVHCHDTYGQALANTLMALQMGVSVVDSSVAGLGGCPYAQGASGNLATEDLVYMLEGLGIHTGVNLQKLLEAGNFICQALNRKTSSKVAQATCKL

SEQ ID NO: 6530 - protein, 77 aa, Homo Sapiens
MLEARREWSRKVFPWSGATQQPGTPFHSPSQTLRRSAGQRPAGVPVPADVLLWTSSRLCVPPLMCSSPCPATCVSAC

SEQ ID NO: 6531 - protein, 182 aa, Homo Sapiens
  misc_feature (1)..(1): Xaa can be any naturally occurring amino acid
XKALPRRLVGLASLRAVSTSSMGTLPKRVKIVEVGPRDGLQNEKVTKKFYSMGCYEISLGDTIGVGTPGIMKDMLSAVMQEVPLAALAVHCHDTYGQALANTLMALQMGVSVVDSSVAGLGGCPYAQGASGNLATEDLVYMLEGLGIHTGVNLQKLLEAGNFICQALNRKTSSKVAQATCKL

SEQ ID NO: 6532 - protein, 53 aa, Homo Sapiens
MEIFIEVFSHFLLQLTELTLNMCLELPTGSLEKSLMISSQVLQIPVANSTKQR

SEQ ID NO: 6533 - protein, 139 aa, Homo Sapiens
MSISSALAMVFMGAKGNTAAQMSQALCFSKIGGEDGDIHRGFQSLLVAINRTDTEYVLRTANGLFGEKSYDFLTGFTDSCGKFYQATIKQLDFVNDTEKSTTRVNSWVADKTKGENILLFYFDNILNSFIVSSLQNCQI

SEQ ID NO: 6534 - protein, 442 aa, Homo Sapiens
MSALGAVIALLLWGQLFAVDSGNDVTDIADDGCPKPPEIAHGYVEHSVRYQCKNYYKLRTEGDGVYTLNDKKQWINKAVGDKLPECEADDGCPKPPEIAHGYVEHSVRYQCKNYYKLRTEGDGEAMPCSLPHVNLRVTFTSPADVGKEGMLMMMSPSPRVYTLNNEKQWINKAVGDKLPECEAVCGKPKNPANPVQRILGGHLDAKGSFPWQAKMVSHHNLTTGATLINEQWLLTTAKNLFLNHSENATAKDIAPTLTLYVGKKQLVEIEKVVLHPNYSQVDIGLIKLKQKVSVNERVMPICLPSKDYAEVGRVGYVSGWGRNANFKFTDHLKYVMLPVADQDQCIRHYEGSTVPEKKTPKSPVGVQPILNEHTFCAGMSKYQEDTCYGDAGSAFAVHDLEEDTWYATGILSFDKSCAVAEYGVYVKVTSIQDWVQKTIAEN

SEQ ID NO: 6535 - protein, 406 aa, Homo Sapiens
MSALGAVIALLLWGQLFAVDSGNDVTDIADDGCPKPPEIAHGYVEHSVRYQCKNYYKLRTEGDGVYTLNDKKQWINKAVGDKLPECEADDGCPKPPEIAHGYVEHSVRYQCKNYYKLRTEGDGVYTLNNEKQWINKAVGDKLPECEAVCGKPKNPANPVQRILGGHLDAKGSFPWQAKMVSHHNLTTGATLINEQWLLTTAKNLFLNHSENATAKDIAPTLTLYVGKKQLVEIEKVVLHPNYSQVDIGLIKLKQKVSVNERVMPICLPSKDYAEVGRVGYVSGWGRNANFKFTDHLKYVMLPVADQDQCIRHYEGSTVPEKKTPKSPVGVQPILNEHTFCAGMSKYQEDTCYGDAGSAFAVHDLEEDTWYATGILSFDKSCAVAEYGVYVKVTSIQDWVQKTIAEN

SEQ ID NO: 6536 - protein, 347 aa, Homo Sapiens
MSALGAVIALLLWGQLFAVDSGNDVTDIADDGCPKPPEIAHGYVEHSVRYQCKNYYKLRTEGDGVYTLNDKKQWINKAVGDKLPECEAVCGKPKNPANPVQRILGGHLDAKGSFPWQAKMVSHHNLTTGATLINEQWLLTTAKNLFLNHSENATAKDIAPTLTLYVGKKQLVEIEKVVLHPNYSQVDIGLIKLKQKVSVNERVMPICLPSKDYAEVGRVGYVSGWGRNANFKFTDHLKYVMLPVADQDQCIRHYEGSTVPEKKTPKSPVGVQPILNEHTFCAGMSKYQEDTCYGDAGSAFAVHDLEEDTWYATGILSFDKSCAVAEYGVYVKVTSIQDWVQKTIAEN

SEQ ID NO: 6537 - protein, 88 aa, Homo Sapiens
MSALGAVIALLLWGQLFAVDSGNDVTDIADDGCPKPPEIAHGYVEHSVRYQCKNYYKLRTEGDGVYTLNNEKQWINKAVGDKLPECEA

SEQ ID NO: 6538 - protein, 92 aa, Homo Sapiens
MSALGAVIALLLWGQLFAVDSGNDVTDIADDGCPKPPEIAHGYVEHSVRYQCKNYYKLRTEGDGVYTLNNEKQWINKAVGDKLPECEAAHTE

SEQ ID NO: 6539 - protein, 222 aa, Homo Sapiens
MSALGAVIALLLWGQLFAVDSGNDVTDIADDGCPKPPEIAHGYVEHSVRYQCKNYYKLRTEGDGVYTLNNEKQWINKAVGDKLPECEAGATLINEQWLLTTAKNLFLNHSENATAKDIAPTLTLYVGKKQLVEIEKVVLHPNYSQVDIGLIKLKQKVSVNERVMPICLPSKDYAEVGRVGYVSGWGRNANFKFTDHLKYVMLPVADQDQCIRHYEGSTVPEK

SEQ ID NO: 6540 - protein, 91 aa, Homo Sapiens
MSALGAVIALLLWGQLFAVDSGNDVTDIADDGCPKPPEIAHGYVEHSVRYQCKNYYKLRTEGDGVYTLNNEKQWINKAVGDKLPECEAGGC

SEQ ID NO: 6541 - protein, 347 aa, Homo Sapiens
MSALGAVIALLLWGQLFAVDSGNDVTDIADDGCPKPPEIAHGYVEHSVRYQCKNYYKLRTEGDGVYTLNNEKQWINKAVGDKLPECEAVCGKPKNPANPVQRILGGHLDAKGSFPWQAKMVSHHNLTTGATLINEQWLLTTAKNLFLNHSENATAKDIAPTLTLYVGKKQLVEIEKVVLHPNYSQVDIGLIKLKQKVSVNERVMPICLPSKDYAEVGRVGYVSGWGRNANFKFTDHLKYVMLPVADQDQCIRHYEGSTVPEKKTPKSPVGVQPILNEHTFCAGMSKYQEDTCYGDAGSAFAVHDLEEDTWYATGILSFDKSCAVAEYGVYVKVTSIQDWVQKTIAEN

SEQ ID NO: 6542 - protein, 347 aa, Homo Sapiens; identical to SEQ ID NO: 6541

SEQ ID NO: 6543 - protein, 281 aa, Homo Sapiens
MSRISQMTAARSPPRLHMAMWSTRFATSVRTNPVQRILGGHLDAKGSFPWQAKMVSHHNLTTGATLINEQWLLTTAKNLFLNHSENATAKDIAPTLTLYVGKKQLVEIEKVVLHPNYSQVDIGLIKLKQKVSVNERVMPICLPSKDYAEVGRVGYVSGWGRNANFKFTDHLKYVMLPVADQDQCIRHYEGSTVPEKKTPKSPVGVQPILNEHTFCAGMSKYQEDTCYGDAGSAFAVHDLEEDTWYATGILSFDKSCAVAEYGVYVKVTSIQDWVQKTIAEN

SEQ ID NO: 6544 - protein, 281 aa, Homo Sapiens; identical to SEQ ID NO: 6543

SEQ ID NO: 6545 - protein, 365 aa, Homo Sapiens
  misc_feature (1)..(1): Xaa can be any naturally occurring amino acid
XALGAVIALLLWGQLFAVDSGNDVTDIADDGCPKPPEIAHGYVEHSVRYQCKNYYKLRTEGDGVYTLNDKKQWINKAVGDKLPECEADDGCPKPPEIAHGYVEHSVRYQCKNYYKLRTEGDGVYTLNNEKQWINKAVGDKLPECEAGATLINEQWLLTTAKNLFLNHSENATAKDIAPTLTLYVGKKQLVEIEKVVLHPNYSQVDIGLIKLKQKVSVNERVMPICLPSKDYAEVGRVGYVSGWGRNANFKFTDHLKYVMLPVADQDQCIRHYEGSTVPEKKTPKSPVGVQPILNEHTFCAGMSKYQEDTCYGDAGSAFAVHDLEEDTWYATGILSFDKSCAVAEYGVYVKVTSIQDWVQKTIAEN

SEQ ID NO: 6546 - protein, 149 aa, Homo Sapiens
  misc_feature (1)..(1): Xaa can be any naturally occurring amino acid
XALGAVIALLLWGQLFAVDSGNDVTDIADDGCPKPPEIAHGYVEHSVRYQCKNYYKLRTEGDGVYTLNDKKQWINKAVGDKLPECEADDGCPKPPEIAHGYVEHSVRYQCKNYYKLRTEGDGVYTLNNEKQWINKAVGDKLPECEAGGC

SEQ ID NO: 6547 - protein, 404 aa, Homo Sapiens
  misc_feature (1)..(1): Xaa can be any naturally occurring amino acid
XALGAVIALLLWGQLFAVDSGNDVTDIADDGCPKPPEIAHGYVEHSVRYQCKNYYKLRTEGDGVYTLNDKKQWINKAVGDKLPECEADDGCPKPPEIAHGYVEHSVRYQCKNYYKLRTEGDVYTLNNEKQWINKAVGDKLPECEAVCGKPKNPANPVQRILGGHLDAKGSFPWQAKMVSHHNLTTGATLINEQWLLTTAKNLFLNHSENATAKDIAPTLTLYVGKKQLVEIEKVVLHPNYSQVDIGLIKLKQKVSVNERVMPICLPSKDYAEVGRVGYVSGWGRNANFKFTDHLKYVMLPVADQDQCIRHYEGSTVPEKKTPKSPVGVQPILNEHTFCAGMSKYQEDTCYGDAGSAFAVHDLEEDTWYATGILSFDKSCAVAEYGVYVKVTSIQDWVQKTIAEN

SEQ ID NO: 6548 - protein, 348 aa, Homo Sapiens
MSDLGAVISLLLWGRQLFALYSGNDVTDISDDRFPKPPEIANGYVEHLFRYQCKNYYRLRTEGDGVYTLNDKKQWINKAVGDKLPECEAVCGKPKNPANPVQRILGGHLDAKGSFPWQAKMVSHHNLTTGATLINEQWLLTTAKNLFLNHSENATAKDIAPTLTLYVGKKQLVEIEKVVLHPNYHQVDIGLIKLKQKVLVNERVMPICLPSKNYAEVGRVGYVSGWGQSDNFKLTDHLKYVMLPVADQYDCITHYEGSTCPKWKAPKSPVGVQPILNEHTFCVGMSKYQEDTCYGDAGSAFAVHDLEEDTWYAAGILSFDKSCAVAEYGVYVKVTSIQHWVQKTIAEN

SEQ ID NO: 6549 - protein, 117 aa, Homo Sapiens
MSDLGAVISLLLWGRQLFALYSGNDVTDISDDRFPKPPEIANGYVEHLFRYQCKNYYRLRTEGDGVYTLNDKKQWINKAVGDKLPECEAVCGKPKNPANPVQRILGGHLVRGWDPKL

SEQ ID NO: 6550 - protein, 281 aa, Homo Sapiens
MSRIFQMTASRSPLRLQMAMWSTCFATSVRTNPVQRILGGHLDAKGSFPWQAKMVSHHNLTTGATLINEQWLLTTAKNLFLNHSENATAKDIAPTLTLYVGKKQLVEIEKVVLHPNYHQVDIGLIKLKQKVLVNERVMPICLPSKNYAEVGRVGYVSGWGQSDNFKLTDHLKYVMLPVADQYDCITHYEGSTCPKWKAPKSPVGVQPILNEHTFCVGMSKYQEDTCYGDAGSAFAVHDLEEDTWYAAGILSFDKSCAVAEYGVYVKVTSIQHWVQKTIAEN

SEQ ID NO: 6551 - protein, 485 aa, Homo Sapiens
MLLRSKPALPPPLMLLLLGPLGPLSPGALPRPAQAQDVVDLDFFTQEPLHLVSPSFLSVTIDANLATDPRFLILLGSPKLRTLARGLSPAYLRFGGTKTDFLIFDPKKESTFEERSYWQSQVNQDICKYGSIPPDVEEKLRLEWPYQEQLLLREHYQKKFKNSTYSKPNSFLKKADIFINGSQLGEDFIQLHKLLRKSTFKNAKLYGPDVGQPRRKTAKMLKSFLKAGGEVIDSVTWHHYYLNGRTATKEDFLNPDVLDIFISSVQKVFQVVESTRPGKKVWLGETSSAYGGGAPLLSDTFAAGFMWLDKLGLSARMGIEVVMRQVFFGAGNYHLVDENFDPLPDYWLSLLFKKLVGTKVLMASVQGSKRRKLRVYLHCTNTDNPRYKEGDLTLYAINLHNVTKYLRLPYPFSNKQVDKYLLRPLGPHGLLSKSVQLNGLTLKMVDDQTLPPLMEKPLRPGSSLGLPAFSYSFFVIRNAKVAACI

SEQ ID NO: 6552 - protein, 226 aa, Homo Sapiens
MLLRSKPALPPPLMLLLLGPLGPLSPGALPRPAQAQDVVDLDFFTQEPLHLVSPSFLSVTIDANLATDPRFLILLGSPKLRTLARGLSPAYLRFGGTKTDFLIFDPKKESTFEERSYWQSQVNQDICKYGSIPPDVEEKLRLEWPYQEQLLLREHYQKKFKNSTYSRSSVDVLYTFANCSGLDLIFGLNALLRTADLQWNSSNAQLLLDYCSSKGYNISWELGNAS

SEQ ID NO: 6553 - protein, 543 aa, Homo Sapiens
MLLRSKPALPPPLMLLLLGPLGPLSPGALPRPAQAQDVVDLDFFTQEPLHLVSPSFLSVTIDANLATDPRFLILLGSPKLRTLARGLSPAYLRFGGTKTDFLIFDPKKESTFEERSYWQSQVNQDICKYGSIPPDVEEKLRLEWPYQEQLLLREHYQKKFKNSTYSRSSVDVLYTFANCSGLDLIFGLNALLRTADLQWNSSNAQLLLDYCSSKGYNISWELGNEPNSFLKKADIFINGSQLGEDFIQLHKLLRKSTFKNAKLYGPDVGQPRRKTAKMLKSFLKAGGEVIDSVTWHHYYLNGRTATKEDFLNPDVLDIFISSVQKVFQVVESTRPGKKVWLGETSSAYGGGAPLLSDTFAAGFMWLDKLGLSARMGIEVVMRQVFFGAGNYHLVDENFDPLPDYWLSLLFKKLVGTKVLMASVQGSKRRKLRVYLHCTNTDNPRYKEGDLTLYAINLHNVTKYLRLPYPFSNKQVDKYLLRPLGPHGLLSKSVQLNGLTLKMVDDQTLPPLMEKPLRPGSSLGLPAFSYSFFVIRNAKVAACI

SEQ ID NO: 6554 - protein, 543 aa, Homo Sapiens; identical to SEQ ID NO: 6553

SEQ ID NO: 6555 - protein, 380 aa, Homo Sapiens
MLLRSKPALPPPLMLLLLGPLGPLSPGALPRPAQAQDVVDLDFFTQEPLHLVSPSFLSVTIDANLATDPRFLILLGSPKLRTLARGLSPAYLRFGGTKTDFLIFDPKKESTFEERSYWQSQVNQDICKYGSIPPDVEEKLRLEWPYQEQLLLREHYQKKFKNSTYSRSSVDVLYTFANCSGLDLIFGLNALLRTADLQWNSSNAQLLLDYCSSKGYNISWELGNEPNSFLKKADIFINGSQLGEDFIQLHKLLRKSTFKNAKLYGPDVGQPRRKTAKMLKSFLKAGGEVIDSVTWHHYYLNGRTATKEDFLNPDVLDIFISSVQKVFQVVESTRPGKKVWLGETSSAYGGGAPLLSDTFAAGFMIIGYLFCSRNWWAPRC

SEQ ID NO: 6556 - protein, 469 aa, Homo Sapiens
MLLRSKPALPPPLMLLLLGPLGPLSPGALPRPAQAQDVVDLDFFTQEPLHLVSPSFLSVTIDANLATDPRFLILLGSPKLRTLARGLSPAYLRFGGTKTDFLIFDPKKESTFEERSYWQSQVNQDICKYGSIPPDVEEKLRLEWPYQEQLLLREHYQKKFKNSTYSRSSVDVLYTFANCSGLDLIFGLNALLRTADLQWNSSNAQLLLDYCSSKGYNISWELGNEPNSFLKKADIFINGSQLGEDFIQLHKLLRKSTFKNAKLYGPDVGQPRRKTAKMLKSFLKAGGEVIDSVTWHHYYLNGRTATKEDFLNPDVLDIFISSVQKVFQDYWLSLLFKKLVGTKVLMASVQGSKRRKLRVYLHCTNTDNPRYKEGDLTLYAINLHNVTKYLRLPYPFSNKQVDKYLLRPLGPHGLLSKSVQLNGLTLKMVDDQTLPPLMEKPLRPGSSLGLPAFSYSFFVIRNAKVAACI

SEQ ID NO: 6557 - protein, 168 aa, Homo Sapiens
MLLRSKPALPPPLMLLLLGPLGPLSPGALPRPAQAQDVVDLDFFTQEPLHLVSPSFLSVTIDANLATDPRFLILLGSPKLRTLARGLSPAYLRFGGTKTDFLIFDPKKESTFEERSYWQSQVNQDICKYGSIPPDVEEKLRLEWPYQEQLLLREHYQKKFKNSTYSTS

SEQ ID NO: 6558 - protein, 389 aa, Homo Sapiens
ARSLDKLYNFADCSGLHLIFALNALRRNPNNSWNSSSALSLLKYSASKKYNISWELGNEPNNYRTMHGRAVNGSQLGKDYIQLKSLLQPIRIYSRASLYGPNIGRPRKNVIALLDGFMKVAGSTVDAVTWQHCYIDGRVVKVMDFLKTRLLDTLSDQIRKIQKVVNTYTPGKKIWLEGVVTTSAGGTNNLSDSYAAGFLWLNTLGMLANQGIDVVIRHSFFDHGYNHLVDQNFNPLPDYWLSLLYKRLIGPKVLAVHVAGLQRKPRPGRVIRDKLRIYAHCTNHHNHNYVRGSITLFIINLHRSRKKIKLAGTLRDKLVHQYLLQPYGQEGLKSKSVQLNGQPLVMVDDGTLPELKPRPLRAGRTLVIPPVTMGFYVVKNVNALACRYR

SEQ ID NO: 6559 - protein, 149 aa, Homo Sapiens
MRVLCAFPEAMPSSNSRPPACLAPGALYLALLLHLSLSSQAGDRRPLPVDRAAGLKEKTLILLDVSTKNPVRTVNENFLSLQLDPSIIHDGWLDFLSSKRLVTLARGLSPAFLRFGGKRTDFLQFQNLRNPAKSRGGPGPDYYLKNYED

SEQ ID NO: 6560 - protein, 592 aa, Homo Sapiens
MRVLCAFPEAMPSSNSRPPACLAPGALYLALLLHLSLSSQAGDRRPLPVDRAAGLKEKTLILLDVSTKNPVRTVNENFLSLQLDPSIIHDGWLDFLSSKRLVTLARGLSPAFLRFGGKRTDFLQFQNLRNPAKSRGGPGPDYYLKNYEDDIVRSDVALDKQKGCKIAQHPDVMLELQREKAAQMHLVLLKEQFSNTYSNLILTARSLDKLYNFADCSGLHLIFALNALRRNPNNSWNSSSALSLLKYSASKKYNISWELGNEPNNYRTMHGRAVNGSQLGKDYIQLKSLLQPIRIYSRASLYGPNIGRPRKNVIALLDGFMKVAGSTVDAVTWQHCYIDGRVVKVMDFLKTRLLDTLSDQIRKIQKVVNTYTPGKKIWLEGVVTTSAGGTNNLSDSYAAGFLWLNTLGMLANQGIDVVIRHSFFDHGYNHLVDQNFNPLPDYWLSLLYKRLIGPKVLAVHVAGLQRKPRPGRVIRDKLRIYAHCTNHHNHNYVRGSITLFIINLHRSRKKIKLAGTLRDKLVHQYLLQPYGQEGLKSKSVQLNGQPLVMVDDGTLPELKPRPLRAGRTLVIPPVTMGFYVVKNVNALACRYR

SEQ ID NO: 6561 - protein, 548 aa, Homo Sapiens
MRVLCAFPEAMPSSNSRPPACLAPGALYLALLLHLSLSSQAGDRRPLPVDRAAGLKEKTLILLDVSTKNPVRTVNENFLSLQLDPSIIHDGWLDFLSSKRLVTLARGLSPAFLRFGGKRTDFLQFQNLRNPAKSRGGPGPDYYLKNYEDDIVRSDVALDKQKGCKIAQHPDVMLELQREKAAQMHLVLLKEQFSNTYSNLILTARSLDKLYNFADCSGLHLIFALNALRRNPNNSWNSSSALSLLKYSASKKYNISWELGNEPNNYRTMHGRAVNGSQLGKDYIQLKSLLQPIRIYSRASLYGPNIGRPRKNVIALLDGFMKVAGSTVDAVTWQHCYIDGRVVKVMDFLKTRLLDTLSDQIRKIQKVVNTYTPGKKIWLEGVVTTSAGGTNNLSDSYAAGFLWLNTLGMLANQGIDVVIRHSFFDHGYNHLVDQNFNPLPDYWLSLLYKRLIGPKVLAVHVAGLQRKPRPGRVIRDKLRIYAHCTNHHNHNYVRGSITLFIINLHRSRKKIKLAGTLRDKLVHQYLLQPYGQEGLKSKTQRCQYCGII

SEQ ID NO: 6562 - protein, 534 aa, Homo Sapiens
MRVLCAFPEAMPSSNSRPPACLAPGALYLALLLHLSLSSQAGDRRPLPVDRAAGLKEKTLILLDVSTKNPVRTVNENFLSLQLDPSIIHDGWLDFLSSKRLVTLARGLSPAFLRFGGKRTDFLQFQNLRNPAKSRGGPGPDYYLKNYEDDIVRSDVALDKQKGCKIAQHPDVMLELQREKAAQMHLVLLKEQFSNTYSNLILTEPNNYRTMHGRAVNGSQLGKDYIQLKSLLQPIRIYSRASLYGPNIGRPRKNVIALLDGFMKVAGSTVDAVTWQHCYIDGRVVKVMDFLKTRLLDTLSDQIRKIQKVVNTYTPGKKIWLEGVVTTSAGGTNNLSDSYAAGFLWLNTLGMLANQGIDVVIRHSFFDHGYNHLVDQNFNPLPDYWLSLLYKRLIGPKVLAVHVAGLQRKPRPGRVIRDKLRIYAHCTNHHNHNYVRGSITLFIINLHRSRKKIKLAGTLRDKLVHQYLLQPYGQEGLKSKSVQLNGQPLVMVDDGTLPELKPRPLRAGRTLVIPPVTMGFYVVKNVNALACRYR

SEQ ID NO: 6563 - protein, 480 aa, Homo Sapiens
MRVLCAFPEAMPSSNSRPPACLAPGALYLALLLHLSLSSQAGDRRPLPVDRAAGLKEKTLILLDVSTKNPVRTVNENFLSLQLDPSIIHDGWLDFLSSKRLVTLARGLSPAFLRFGGKRTDFLQFQNLRNPAKSRGGPGPDYYLKNYEDEPNNYRTMHGRAVNGSQLGKDYIQLKSLLQPIRIYSRASLYGPNIGRPRKNVIALLDGFMKVAGSTVDAVTWQHCYIDGRVVKVMDFLKTRLLDTLSDQIRKIQKVVNTYTPGKKIWLEGVVTTSAGGTNNLSDSYAAGFLWLNTLGMLANQGIDVVIRHSFFDHGYNHLVDQNFNPLPDYWLSLLYKRLIGPKVLAVHVAGLQRKPRPGRVIRDKLRIYAHCTNHHNHNYVRGSITLFIINLHRSRKKIKLAGTLRDKLVHQYLLQPYGQEGLKSKSVQLNGQPLVMVDDGTLPELKPRPLRAGRTLVIPPVTMGFYVVKNVNALACRYR

SEQ ID NO: 6564 - protein, 254 aa, Homo Sapiens [sequence omitted]

SEQ ID NO: 6565 - protein, 462 aa, Homo Sapiens
MARVLGAPVALGLWSLCWSLAIATPLPPTSAHGNVAEGETKPDPDVTERCSDGWSFDATTLDDNGTMLFFKGEFVWKSHKWDRELISERWKNFPSPVDAAFRQGHNSVFLIKGDKVWVYPPEKKEKGYPKLLQDEFPGIPSPLDAAVECHRGECQAEGVLFFQGDREWFWDLATGTMKERSWPAVGNCSSALRWLGRYYCFQGNQFLRFDPVRGEVPPRYPRDVRDYFMPCPGRGHGHRNGTGHGNSTHHGPEYMRCSPHLVLSALTSDNHGATYAFSGTHYWRLDTSRDGWHSWPIAHQWPQGPSAVDAAFSWEEKLYLVQGTQVYVFLTKGGYTLVSGYPKRLEKEVGTPHGIILDSVDAAFICPGSSRLHIMAGRRLWWLDLKSGAQATWTELPWPHEKVDGALCMEKSLGPNSCSANGPGLYLIHGPNLYCYSDVEKLNAAKALPQPQNVTSLLGCTH

SEQ ID NO: 6566 - protein, 699 aa, Homo Sapiens
MGHHRPWLHASVLWAGVASLLLPPAMTQQLRGDGLGFRNRNNSTGVAGLSEEASAELRHHLHSPRDHPDENKDVSTENGHHFWSHPDREKEDEDVSKEYGHLLPGHRSQDHKVGDEGVSGEEVFAEHGGQARGHRGHGSEDTEDSAEHRHHLPSHRSHSHQDEDEDEVVSSEHHHHILRHGHRGHDGEDDEGEEEEEEEEEEEEASTEYGHQAHRHRGHGSEEDEDVSDGHHHHGPSHRHQGHEEDDDDDDDDDDDDDDDDVSIEYRHQAHRHQGHGIEEDEDVSDGHHHRDPSHRHRSHEEDDNDDDDVSTEYGHQAHRHQDHRKEEVEAVSGEHHHHVPDHRHQGHRDEEEDEDVSTERWHQGPQHVHHGLVDEEEEEEEITVQFGHYVASHQPRGHKSDEEDFQDEYKTEVPHHHHHRVPREEDEEVSAELGHQAPSHRQSHQDEETGHGQRGSIKEMSHHPPGHTVVKDRSHLRKDDSEEEKEKEEDPGSHEEDDESSEQGEKGTHHGSRDQEDEEDEEEGHGLSLNQEEEEEEDKEEEEEEEDEERREERAEVGAPLSPDHSEEEEEEEEGLEEDEPRFTIIPNPLDRREEAGGASSEEESGEDTGPQDAQEYGNYQPGSLCGYCSFCNRCTECESCHCDEENMGEHCDQCQHCQFCYLCPLVCETVCAPGSYVDYFSSSLYQALADMLETPEP

SEQ ID NO: 6567 - protein, 676 aa, Homo Sapiens
MGHHRPWLHASVLWAGVASLLLPPAMTQQLRGDGLGFRNRNNSTGVAGLSEEASAELRHHLHSPRDHPDENKDVSTENGHHFWSHPDREKEDEDVSKEYGHLLPGHRSQDHKVGDEGVSGEEVFAEHGGQARGHRGHGSEDTEDSAEHRHHLPSHRSHSHQDEDEDEVVSSEHHHHILRHGHRGHDGEDDEGEEEEEEEEEEEEASTEYGHQAHRHRGHGSEEDEDVSDGHHHHGPSHRHQGHEEDDDDDDDDDDDDDDDDVSIEYRHQAHRHQGHGIEEDEDVSDGHHHRDPSHRHRSHEEDDNDDDDVSTEYGHQAHRHQDHRKEEVEAVSGEHHHHVPDHRHQGHRDEEEDEDVSTERWHQGPQHVHHGLVDEEEEEEEITVQFGHYVASHQPRGHKSDEEDFQDEYKTEVPHHHHHRVPREEDEEVSAELGHQAPSHRQSHQDEETGHGQRGSIKEMSHHPPGHTVVKDRSHLRKDDSEEEKEKEEDPGSHEEDDESSEQGEKGTHHGSRDQEDEEDEEEGHGLSLNQEEEEEEDKEEEEEEEDEERREERAEVGAPLSPDHSEEEEEEEEGLEEDEPRFTIIPNPLDRREEAGGASSEEESGEDTGPQDAQEYGNYQPGSLCGYCSFCNHCQFCYLCPLVCETVCAPGSYVDYFSSSLYQALADMLETPEP

SEQ ID NO: 6568 - protein, 96 aa, Homo Sapiens
  misc_feature (1)..(1): Xaa can be any naturally occurring amino acid
XSEEESGEDTGPQDAQEYGNYQPGSLCGYCSFCNRCTECESCHCDEENMGEHCDQCQGPGRHAGNAGTLTQSLDCDAGVPPPAFQPLSTSYIYFSE

SEQ ID NO: 6569 - protein, 525 aa, Homo Sapiens
MKALIAALLLITLQYSCAVSPTDCSAVEPEAEKALDLINKRRRDGYLFQLLRIADAHLDRVENTTVYYLVLDVQESDCSVLSRKYWNDCEPPDSRRPSEIVIGQCKVIATRHSHESQDLRVIDFNCTTSSVSSALANTKDSPVLIDFFEDTERYRKQANKALEKYKEENDDFASFRVDRIERVARVRGGEGTGYFVDFSVRNCPRHHFPRHPNVFGFCRADLFYDVEALDLESPKNLVINCEVFDPQEHENINGVPPHLGHPFHWGGHERSSTTKPPFKPHGSRDHHHPHKPHEHGPPPPPDERDHSHGPPLPQGPPPLLPMSCSSCQHATFGTNGAQRHSHNNNSSDLHPHKHHSHEQHPHGHHPHAHHPHEHDTHRQHPHGHHPHGHHPHGHHPHGHHPHGHHPHCHDFQDYGPCDPPPHNQGHCCHGHGPPPGHLRRRGPGKGPRPFHCRQIGSVYRLPPLRKGEVLPLPEANFPSFPLPHHKHPLKPDNQPFPQSVSESCPGKFKSGFPQVSMFFTHTFPK

SEQ ID NO: 6570 - protein, 111 aa, Homo Sapiens
MDGPRQDATLDEEEDMVIIYNRVPKTASTSFTNIAYDLCAKNKYHVLHINTTKNNPVMSLQDQVRFVKNITSWKEMKPGFYHGHVSYLDFAKFGVKKKPIYINVIRDPIER

SEQ ID NO: 6571 - protein, 229 aa, Homo Sapiens
MGLLRIMMPPKLQLLAVVAFAVAMLFLENQIQKLEESRSKLERAIARHEVREIEQRHTMDGPRQDATLDEEEDMVIIYNRVPKTASTSFTNIAYDLCAKNKYHVLHINTTKNNPVMSLQDQVRFVKNITSWKEMKPGFYHGHVSYLDFAKFGVKKKPIYINVIRDPIERLVSYYYFLRFGDDYRPGLRRRKQGDKKTFDECVAEGGSDCAPEKLWLQIPFFCGHSSECW

SEQ ID NO: 6572 - protein, 356 aa, Homo Sapiens
MGLLRIMMPPKLQLLAVVAFAVAMLFLENQIQKLEESRSKLERAIARHEVREIEQRHTMDGPRQDATLDEEEDMVIIYNRVPKTASTSFTNIAYDLCAKNKYHVLHINTTKNNPVMSLQDQVRFVKNITSWKEMKPGFYHGHVSYLDFAKFGVKKKPIYINVIRDPIERLVSYYYFLRFGDDYRPGLRRRKQGDKKTFDECVAEGGSDCAPEKLWLQIPFFCGHSSECWNVGSRWAMDQAKYNLINEYFLVGVTEELEDFIMLLEAALPRFFRGATELYRTGKKSHLRKTTEKKLPTKQTIAKLQQSDIWKMENEFYEFALEQFQFIRAHAVREKDGDLYILAQNFFYEKIYPKSN

SEQ ID NO: 6573 - protein, 83 aa, Homo Sapiens
MAALLLGAVLLVAQPQLVPSRPAELGQQELLRKAGTLQDDVRDGVAPNGSAQQLPQTIIIGVRKGGTRALLEMLSLHPDVAAA

SEQ ID NO: 6574 - protein, 83 aa, Homo Sapiens; identical to SEQ ID NO: 6573

SEQ ID NO: 6575 - protein, 307 aa, Homo Sapiens
MAALLLGAVLLVAQPQLVPSRPAELGQQELLRKAGTLQDDVRDGVAPNGSAQQLPQTIIIGVRKGGTRALLEMLSLHPDVAAAENEVHFFDWEEHYSHGLGWYLSQMPFSWPHQLTVEKTPAYFTSPKVPERVYSMNPSIRLLLILRDPSERVLSDYTQVFYNHMQKHKPYPSIEEFLVRDGRLNVDYKALNRSLYHVHMQNWLRFFPLRHIHIVDGDRLIRDPFPEIQKVERFLKLSPQINASNFYFNKTKGFYCLRDSGRDRCLHESKGRAHPQVDPKLLNKLHEYFHEPNKKFFELVGRTFDWH

SEQ ID NO: 6576 - protein, 411 aa, Homo Sapiens
MRRRRAGGRTMVERASKFVLVVAGSVCFMLILYQYAGPGLSLGAPGGRAPPDDLDLFPTPDPHYEKKYYFPVRELERSLRFDMKGDDVIVFLHIQKTGGTTFGRHLVQNVRLEVPCDCRPGQKKCTCYRPNRRETWLFSRFSTGWSCGLHADWTELTNCVPGVLDRRDSAALRTPRKFYYITLLRDPVSRYLSEWRHVQRGATWKTSLHMCDGRTPTPEELPPCYEGTDWSGCTLQEFMDCPYNLANNRQVRMLADLSLVGCYNLSFIPEGKRAQLLLESAKKNLRGMAFFGLTEFQRKTQYLFERTFNLKFIRPFMQYNSTRAGGVEVDEDTIRRIEELNDLDMQLYDYAKDLFQQRYQYKRQLERREQRLRSREERLLHRAKEALPREDADEPGRVPTEDYMSHIIEKW

SEQ ID NO: 6577 - protein, 471 aa, Homo Sapiens
MDERFNKWLLTPVLTLLFVVIMYQYVSPSCTSSCTNFGEQPRAGEAGPPAVPGPARRAQAPPEEWERRPQLPPPPRGPPEGPRGAAAPEEEDEEPGDPREGEEEEEEDEPDPEAPENGSLPRFVPRFNFSLKDLTRFVDFNIKGRDVIVFLHIQKTGGTTFGRHLVKNIRLEQPCSCKAGQKKCTCHRPGKKETWLFSRFSTGWSCGLHADWTELTNCVPAIMEKKDCPRNHSHTRNFYYITMLRDPVSRYLSEWKHVQRGATWKTSLHMCDGRSPTPDELPTCYPGDDWSGVSLREFMDCTYNLANNRQVRMLADLSLVGCYNLTFMNESERNTILLQSAKNNLKNMAFFGLTEFQRKTQFLFERTFNLKFISPFTQFNITRASNVEINEGARQRIEDLNFLDMQLYEYAKDLFQQRYHHTKQLEHQRDRQKRREERRLQREHRDHQWPKEDGAAEGTVTEDYNSQVVRW

SEQ ID NO: 6578 - protein, 236 aa, Homo Sapiens
RNFYYITMLRDPVSRYLSEWKHVQRGATWKTSLHMCDGRSPTPDELPTCYPGDDWSGVSLREFMDCTYNLANNRQVRMLADLSLVGCYNLTFMNESERNTILLQSAKNNLKNMAFFGLTEFQRKTQFLFERTFNLKFISPFTQFNITRASNVEINEGARQRIEDLNFLDMQLYEYAKDLFQQRYHHTKQLEHQRDRQKRREERRLQREHRDHQWPKEDGAAEGTVTEDYNSQVVRW

SEQ ID NO: 6579 - protein, 333 aa, Homo Sapiens
MANLGTLQLLPPRFKRFSCLSLPNIWITGMPVPATSVPCPSAGPHRTMKVLLLTGLGALFFAYYWDDNFDPASLQGARVLLTGANAGVGEELAYHYARLGSHLVLTAHTEALLQKVVGNCRKLGAPKVFYIAADMASPEAPESVVQFALDKLGGLDYLVLNHIGGAPAGTRARSPQATRWLMQVNFVSYVQLTSRALPSLTDSKGSLVVVSSLLGRVPTSFSTPYSAAKFALDGFFGSLRRELDVQDVNVAITMCVLGLRDRASAAEAVRGVTRVKAAPGPKAALAVIRGGATRAAGVFYPWRFRLLCLLRRWLPRPRAWFIRQELNVTAAAA

SEQ ID NO: 6580 - protein, 199 aa, Homo Sapiens
MASPEAPESVVQFALDKLGGLDYLVLNHIGGAPAGTRARSPQATRWLMQVNFVSYVQLTSRALPSLTDSKGSLVVVSSLLGRVPTSFSTPYSAAKFALDGFFGSLRRELDVQDVNVAITMCVLGLRDRASAAEAVRGVTRVKAAPGPKAALAVIRGGATRAAGVFYPWRFRLLCLLRRWLPRPRAWFIRQELNVTAAAA

SEQ ID NO: 6581 - protein, 75 aa, Homo Sapiens
MKVLLLTGLGALFFAYYWDDNFDPASLQGARVLLTGANAGVGEELAYHYARLGSHLVLTAHTEALLQKAGWTTSC

SEQ ID NO: 6582 - protein, 75 aa, Homo Sapiens; identical to SEQ ID NO: 6581

SEQ ID NO: 6583 - protein, 87 aa, Homo Sapiens
MKVLLLTGLGALFFAYYWDDNFDPASLQGARVLLTGANAGVGEELAYHYARLGSHLVLTAHTEALLQKARWLTLVVSTLGGRGKWIT

SEQ ID NO: 6584 - protein, 143 aa, Homo Sapiens
MKVLLLTGLGALFFAYYWDDNFDPASLQGARVLLTGANAGVGEELAYHYARLGSHLVLTAHTEALLQKVVGNCRKLGAPKVFYIAADMASPEAPESVVQFALDKLGGLDYLVLNHIGGAPAGTRARSPQATRWLMQVNFVSYV

SEQ ID NO: 6585 - protein, 286 aa, Homo Sapiens
MKVLLLTGLGALFFAYYWDDNFDPASLQGARVLLTGANAGVGEELAYHYARLGSHLVLTAHTEALLQKVVGNCRKLGAPKVFYIAADMASPEAPESVVQFALDKLGGLDYLVLNHIGGAPAGTRARSPQATRWLMQVNFVSYVQLTSRALPSLTDSKGSLVVVSSLLGRVPTSFSTPYSAAKFALDGFFGSLRRELDVQDVNVAITMCVLGLRDRASAAEAVRGVTRVKAAPGPKAALAVIRGGATRAAGVFYPWRFRLLCLLRRWLPRPRAWFIRQELNVTAAAA

SEQ ID NO: 6586 - protein, 286 aa, Homo Sapiens; identical to SEQ ID NO: 6585

SEQ ID NO: 6587 - protein, 286 aa, Homo Sapiens; identical to SEQ ID NO: 6585

SEQ ID NO: 6588 - protein, 315 aa, Homo Sapiens
MKVLLLTGLGALFFAYYWDDNFDPASLQGARVLLTGANAGVGEELAYHYARLGSHLVLTAHTEALLQKVVGNCRKLGAPKVFYIAADMASPEAPESVVQFALDKLGGLDYLVLNHIGGAPAGTRARSPQATRWLMQVNFVSYVQLTSRALPSLTDSKGSLVVVSSLLGRVPTSFSTPYSAAKFALDGFFGSLRRELDVQDVNVAITMCVLGLRDRASAAEAVRSSTSRPRQPEHRGVPLQSQTAMFLPPTVPGARTLTETPLRGWPQPKMKSSRQKSKTEKNDGHLEPVTAWEVQVPRVRRLCRGLARPHLFGHD

SEQ ID NO: 6589 - protein, 32 aa, Homo Sapiens
MKVLLLTGLGALFFAYYWDDNFDPASRERECC

SEQ ID NO: 6590 - protein, 205 aa, Homo Sapiens
MKVLLLTGLGALFFAYYWDDNFDPGGLDYLVLNHIGGAPAGTRARSPQATRWLMQVNFVSYVQLTSRALPSLTDSKGSLVVVSSLLGRVPTSFSTPYSAAKFALDGFFGSLRRELDVQDVNVAITMCVLGLRDRASAAEAVRGVTRVKAAPGPKAALAVIRGGATRAAGVFYPWRFRLLCLLRRWLPRPRAWFIRQELNVTAAAA

SEQ ID NO: 6591 - protein, 234 aa, Homo Sapiens
MKVLLLTGLGALFFAYYWDDNFDPGGLDYLVLNHIGGAPAGTRARSPQATRWLMQVNFVSYVQLTSRALPSLTDSKGSLVVVSSLLGRVPTSFSTPYSAAKFALDGFFGSLRRELDVQDVNVAITMCVLGLRDRASAAEAVRSSTSRPRQPEHRGVPLQSQTAMFLPPTVPGARTLTETPLRGWPQPKMKSSRQKSKTEKNDGHLEPVTAWEVQVPRVRRLCRGLARPHLFGHD

SEQ ID NO: 6592 - protein, 47 aa, Homo Sapiens
MKVLLLTGLGALFFAYYWDDNFDPGGRELPEAGRPQGLLHRGGHGLP

SEQ ID NO: 6593 - protein, 189 aa, Homo Sapiens
MKVLLLTGLGALFFAYYWDDNFDPGKLCELRATDVAGAAQPDGQQGLPGGGVLAARPRAHVVLHSLLGGQVCAGRLLRLPAAGAGRAGRERGHHHVRPGPPRSRLRRRGSQGSHEGQGGPGAQGSPGRDPRRRHARGRRLLPVAFPPAVLAPALATAPAGLVYPPGAQRHGRGSLSTGGCPSSPRRQCS

SEQ ID NO: 6594 - protein, 152 aa, Homo Sapiens
MQVNFVSYVQLTSRALPSLTDSKGSLVVVSSLLGRVPTSFSTPYSAAKFALDGFFGSLRRELDVQDVNVAITMCVLGLRDRASAAEAVRGVTRVKAAPGPKAALAVIRGGATRAAGVFYPWRFRLLCLLRRWLPRPRAWFIRQELNVTAAAA

SEQ ID NO: 6595 - protein, 152 aa, Homo Sapiens; identical to SEQ ID NO: 6594

SEQ ID NO: 6596 - protein, 181 aa, Homo Sapiens
MQVNFVSYVQLTSRALPSLTDSKGSLVVVSSLLGRVPTSFSTPYSAAKFALDGFFGSLRRELDVQDVNVAITMCVLGLRDRASAAEAVRSSTSRPRQPEHRGVPLQSQTAMFLPPTVPGARTLTETPLRGWPQPKMKSSRQKSKTEKNDGHLEPVTAWEVQVPRVRRLCRGLARPHLFGHD

SEQ ID NO: 6597 - protein, 135 aa, Homo Sapiens
  misc_feature (1)..(1): Xaa can be any naturally occurring amino acid
XLGALFFAYYWDDNFDPGGLDYLVLNHIGGAPAGTRARSPQATRWLMQVNFVSYVQLTSRALPSLTDSKGSLVVVSSLLGRVPTSFSTPYSAAKFALDGFFGSLRRELDVQDVNVAITMCVLGLRDRASAAEAVR

SEQ ID NO: 6598 - protein, 256 aa, Homo Sapiens
MKFLLDILLLLPLLIVCSLESFVKLFIPKRRKSVTGEIVLITGAGHGIGRLTAYEFAKLKSKLVLWDINKHGLEETAAKCKGLGAKVHTFVVDCSNREDIYSSAKKTTKAFLPAMTKNNHGHIVTVASAAGHVSVPFLLAYCSSKFAAVGFHKTLTDELAALQITGVKTTCLCPNFVNTGFIKNPSTSLGPTLEPEEVVNRLMHGILTEQKMIFIPSSIAFLTTLERILPERFLAVLKRKISVKFDAVIGYKMKAQ

SEQ ID NO: 6599 - protein, 300 aa, Homo Sapiens
MKFLLDILLLLPLLIVCSLESFVKLFIPKRRKSVTGEIVLITGAGHGIGRLTAYEFAKLKSKLVLWDINKHGLEETAAKCKGLGAKVHTFVVDCSNREDIYSSAKKVKAEIGDVSILVNNAGVVYTSDLFATQDPQIEKTFEVNVLAHFWTTKAFLPAMTKNNHGHIVTVASAAGHVSVPFLLAYCSSKFAAVGFHKTLTDELAALQITGVKTTCLCPNFVNTGFIKNPSTSLGPTLEPEEVVNRLMHGILTEQKMIFIPSSIAFLTTLERILPERFLAVLKRKISVKFDAVIGYKMKAQ

SEQ ID NO: 6600 - protein, 341 aa, Homo Sapiens
MRKVVLITGASSGIGLALCKRLLAEDDELHLCLACRNMSKAEAVCAALLASHPTAEVTIVQVDVSNLQSVFRASKELKQRFQRLDCIYLNAGIMPNPQLNIKALFFGLFSRKVIHMFSTAEGLLTQGDKITADGLQEVFETNVFGHFILIRELEPLLCHSDNPSQLIWTSSRSARKSNFSLEDFQHSKGKEPYSSSKYATDLLSVALNRNFNQQGLYSNVACPGTALTNLTYGILPPFIWTLLMPAILLLRFFANAFTLTPYNGTEALVWLFHQKPESLNPLIKYLSATTGFGRNYIMTQKMDLDEDTAEKFYQKLLELEKHIRVTIQKTDNQARLSGSCL

SEQ ID NO: 6601 - protein, 111 aa, Homo Sapiens
MRKVVLITGASSGIGLALCKRLLAEDDELHLCLACRNMSKAEAVCAALLASHPTAEVTIVQVDVSNLQSVFRASKELKQRFQRLDCIYLNAGIMPNPQLNIKALFFGLFSS

SEQ ID NO: 6602 - protein, 109 aa, Homo Sapiens
MRKVVLITGASSGIGLALCKRLLAEDDELHLCLACRNMSKAEAVCAALLASHPTAEVTIVQVDVSNLQSVFRASKELKQRMIKKWLYVICVEDHVSEIRLYISKCWDHA

SEQ ID NO: 6603 - protein, 84 aa, Homo Sapiens
MRKVVLITGASSGIGLALCKRLLAEDDELHLCLACRNMSKAEAVCAALLASHPTAEVTIVQVDVSNLQSVFRASKELKQRYISC

SEQ ID NO: 6604 - protein, 62 aa, Homo Sapiens
  misc_feature (1)..(1): Xaa can be any naturally occurring amino acid
XSLEDFQHSKGKEPYSSSKYATDLLSVALNRNFNQQVLYSSVYVIKYLPHYMEVGLSITIFR

SEQ ID NO: 6605 - protein, 49 aa, Homo Sapiens
MMKLIINSLYKNKEIFLRELISNASDALDKIRLISLTDENALSGNEELT

SEQ ID NO: 6606 - protein, 803 aa, Homo Sapiens
MRALWVLGLCCVLLTFGSVRADDEVDVDGTVEEDLGKSREGSRTDDEVVQREEEAIQLDGLNASQIRELREKSEKFAFQAEVNRMMKLIINSLYKNKEIFLRELISNASDALDKIRLISLTDENALSGNEELTVKIKCDKEKNLLHVTDTGVGMTREELVKNLGTIAKSGTSEFLNKMTEAQEDGQSTSELIGQFGVGFYSAFLVADKVIVTSKHNNDTQHIWESDSNEFSVIADPRGNTLGRGTTITLVLKEEASDYLELDTIKNLVKKYSQFINFPIYVWSSKTETVEEPMEEEEAAKEEKEESDDEAAVEEEEEEKKPKTKKVEKTVWDWELMNDIKPIWQRPSKEVEEDEYKAFYKSFSKESDDPMAYIHFTAEGEVTFKSILFVPTSAPRGLFDEYGSKKSDYIKLYVRRVFITDDFHDMMPKYLNFVKGVVDSDDLPLNVSRETLQQHKLLKVIRKKLVRKTLDMIKKIADDKYNDTFWKEFGTNIKLGVIEDHSNRTRLAKLLRFQSSHHPTDITSLDQYVERMKEKQDKIYFMAGSSRKEAESSPFVERLLKKGYEVIYLTEPVDEYCIQALPEFDGKRFQNVAKEGVKFDESEKTKESREAVEKEFEPLLNWMKDKALKDKIEKAVVSQRLTESPCALVASQYGWSGNMERIMKAQAYQTGKDISTNYYASQKKTFEINPRHPLIRDMLRRIKEDEDDKTVLDLAVVLFETATLRSGYLLPDTKAYGDRIERMLRLSLNIDPDAKVEEEPEEEPEETAEDTTEDTEQDEDEEMDVGTDEEEETAKESTAEKDEL

SEQ ID NO: 6607 - protein, 315 aa, Homo Sapiens [sequence omitted]

SEQ ID NO: 6608 - protein, 315 aa, Homo Sapiens [sequence omitted]

SEQ ID NO: 6609 - protein, 53 aa, Homo Sapiens
MRALWVLGLCCVLLTFGSVRADDEVDVDGTVEEDLGKSREGSRTDDEVVQRSR

SEQ ID NO: 6610 - protein, 147 aa, Homo Sapiens
  misc_feature (1)..(1): Xaa can be any naturally occurring amino acid
XQYGWSGNMERIMKAQAYQTGKDISTNYYASQKKTFEINPRHPLIRDMLRRIKEDEDDKTVLDLAVVLFETATLRSGYLLPDTKAYGDRIERMLRLSLNIDPDAKVEEEPEEEPEETAEDTTEDTEQDEDEEMDVGTDEEEETAKMS

SEQ ID NO: 6611 - protein, 471 aa, Homo Sapiens
MAREMTILGSAVLTLLLAGYLAQQYLPLPTPKVIGIDLGTTYCSVGVFFPGTGKVKVIPDENGHISIPSMVSFTDNDVYVGYESVELADSNPQNTIYDAKRFIGKIFTAEELEAEIGRYPFKVLNKNGMVEFSVTSNETITVSPEYVGSRLLLKLKEMAEAYLGMPVANAVISVPAEFDLKQRNSTIEAANLAGLKILRVINEPTAAAMAYGLHKADVFHVLVIDLGGGTLDVSLLNKQGGMFLTRAMSGNNKLGGQDFNQRLLQYLYKQIYQTYGFVPSRKEEIHRLRQAVEMVKLNLTLHQSAQLSVLLTVEEQDRKEPHSSDTELPKDKLSSADDHRVNSGFGRGLSDKKSGESQVLFETEISRKLFDTLNEDLFQKILVPIQQVLKEGHLEKTEIDEVVLVGGSTRIPRIRQVIQEFFGKDPNTSVDPDLAVVTGVAIQAGIDGGSWPLQVSALEIPNKHLQKTNFN

SEQ ID NO: 6612 - protein, 654 aa, Homo Sapiens
MKLSLVAAMLLLLSAARAEEEDKKEDVGTVVGIDLGTTYSCVGVFKNGRVEIIANDQGNRITPSYVAFTPEGERLIGDAAKNQLTSNPENTVFDAKRLIGRTWNDPSVQQDIKFLPFKVVEKKTKPYIQVDIGGGQTKTFAPEEISAMVLTKMKETAEAYLGKKVTHAVVTVPAYFNDAQRQATKDAGTIAGLNVMRIINEPTAAAIAYGLDKREGEKNILVFDLGGGTFDVSLLTIDNGVFEVVATNGDTHLGGEDFDQRVMEHFIKLYKKKTGKDVRKDNRAVQKLRREVEKAKRALSSQHQARIEIESFYEGEDFSETLTRAKFEELNMDLFRSTMKPVQKVLEDSDLKKSDIDEIVLVGGSTRIPKIQQLVKEFFNGKEPSRGINPDEAVAYGAAVQAGVLSGDQDTGDLVLLDVCPLTLGIETVGGVMTKLIPRNTVVPTKKSQIFSTASDNQPTVTIKVYEGERPLTKDNHLLGTFDLTGIPPAPRGVPQIEVTFEIDVNGILRVTAEDKGTGNKNKITITNDQNRLTPEEIERMVNDAEKFAEEDKKLKERIDTRNELESYAYSLKNQIGDKEKLGGKLSSEDKETMEKAVEEKIEWLESHQDADIEDFKAKKKELEEIVQPIISKLYGSAGPPPTGEEDTAEKDEL

SEQ ID NO: 6613 - protein, 236 aa, Homo Sapiens
ISTHFAPGDFQGFALVNPQRNSRLTGEFTVEPVPEGAQLSFGNFAQLGHESFYWQLPETYQGDKGEAYFARMRRAHQNRTSLSEEQLRAAVTAGRIPEPPEGRDWAQRASQVDEAQRRMDAEIWQLLSSFAAQPQPPPQGLSPHPQPAAALRAAPPPSSSSSSSSSSASLSFSPGSQFSLSYEGFSLLPGSLYYWQLPRAFLGDKVAAYGGKLRYTLSYTAGPQGSPLSDPDVQIT

SEQ ID NO: 6614 - protein, 4391 aa, Homo Sapiens
MGWRAAGALLLALLLHGRLLAVTHGLRAYDGLSLPEDIETVTASQMRWTHSYLSDDEDMLADSISGDDLGSGDLGSGDFQMVYFRALVNFTRSIEYSPQLEDAGSREFREVSEAVVDTLESEYLKIPGDQVVSVVFIKELDGWVFVELDVGSEGNADGAQIQEMLLRVISSGSVASYVTSPQGFQFRRLGTVPQFPRACTEAEFACHSYNECVALEYRCDRRPDCRDMSDELNCEEPVLGISPTFSLLVETTSLPPRPETTIMRQPPVTHAPQPLLPGSVRPLPCGPQEAACRNGHCIPRDYLCDGQEDCEDGSDELDCGPPPPCEPNEFPCGNGHCALKLWRCDGDFDCEDRTDEANCPTKRPEEVCGPTQFRCVSTNMCIPASFHCDEESDCPDRSDEFGCMPPQVVTPPRESIQASRGQTVTFTCVAIGVPTPIINWRLNWGHIPSHPRVTVTSEGGRGTLIIRDVKESDQGAYTCEAMNARGMVFGIPDGVLELVPQRGPCPDGHFYLEHSAACLPCFCFGITSVCQSTRRFRDQIRLRFDQPDDFKGVNVTMPAQPGTPPLSSTQLQIDPSLHEFQLVDLSRRFLVHDSFWALPEQFLGNKVDSYGGSLRYNVRYELARGMLEPVQRPDVVLMGAGYRLLSRGHTPTQPGALNQRQVQFSEEHWVHESGRPVQRAELLQVLQSLEAVLIQTVYNTKMASVGLSDIAMDTTVTHATSHGRAHSVEECRCPIGYSGLSCESCDAHFTRVPGGPYLGTCSGCNCNGHASSCDPVYGHCLNCQHNTEGPQCNKCKAGFFGDAMKATATSCRPCPCPYIDASRRFSDTCFLDTDGQATCDACAPGYTGRRCESCAPGYEGNPIQPGGKCRPVNQEIVRCDERGSMGTSGEACRCKNNVVGRLCNECADGSFHLSTRNPDGCLKCFCMGVSRHCTSSSWSRAQLHGASEEPGHFSLTNAASTHTTNEGIFSPTPGELGFSSFHRLLSGPYFWSLPSRFLGDKVTSYGGELRFTVTQRSQPGSTPLHGQPLVVLQGNNIILEHHVAQEPSPGQPSTFIVPFREQAWQRPDGQPATREHLLMALAGIDTLLIRASYAQQPAESRVSGISMDVAVPEETGQDPALEVEQCSCPPGYRGPSCQDCDTGYTRTPSGLYLGTCERCSCHGHSEACEPETGACQGCQHHTEGPRCEQCQPGYYGDAQRGTPQDCQLCPCYGDPAAGQAAHTCFLDTDGHPTCDACSPGHSGRHCERCAPGYYGNPSQGQPCQRDSQVPGPIGCNCDPQGSVSSQCDAAGQCQCKAQVEGLTCSHCRPHHFHLSASNPDGCLPCFCMGITQQCASSAYTRHLISTHFAPGDFQGFALVNPQRNSRLTGEFTVEPVPEGAQLSFGNFAQLGHESFYWQLPETYQGDKVAAYGGKLRYTLSYTAGPQGSPLSDPDVQITGNNIMLVASQPALQGPERRSYEIMFREEFWRRPDGQPATREHLLMALADLDELLIRATFSSVPLAASISAVSLEVAQPGPSNRPRALEVEECRCPPGYIGLSCQDCAPGYTRTGSGLYLGHCELCECNGHSDLCHPETGACSQCQHNAAGEFCELCAPGYYGDATAGTPEDCQPCACPLTNPENMFSRTCESLGAGGYRCTACEPGYTGQYCEQCGPGYVGNPSVQGGQCLPETNQAPLVVEVHPARSIVPQGGSHSLRCQVSGSPPHYFYWSREDGRPVPSGTQQRHQGSELHFPSVQPSDAGVYICTCRNLHQSNTSRAELLVTEAPSKPITVTVEEQRSQSVRPGADVTFICTAKSKSPAYTLVWTRLHNGKLPTRAMDFNGILTIRNVQLSDAGTYVCTGSNMFAMDQGTATLHVQASGTLSAPVVSIHPPQLTVQPGQLAEFRCSATGSPTPTLEWTGGPGGQLPAKAQIHGGILRLPAVEPTDQAQYLCRAHSSAGQQVARAVLHVHGGGGPRVQVSPERTQVHAGRTVRLYCRAAGVPSATITWRKEGGSLPPQARSERTDIATLLIPAITTADAGFYLCVATSPAGTAQARIQVVVLSASDASPPPVKIESSSPSVTEGQTLDLNCVVAGSAHAQVTWYRRGGSLPPHTQVHGSRLRLPQVSPADSGEYVCRVENGSGPKEASITVSVLHGTHSGPSYTPVPGSTRPIRIEPSSSHVAEGQTLDLNCVVPGQAHAQVTWHKRGGSLPARHQTHGSLLRLHQVTPADSGEYVCHVVGTSGPLEASVLVTIEASVIPGPIPPVRIESSSSTVAEGQTLDLSCVVAGQAHAQVTWYKRGGSLPARHQVRGSRLYIFQASPADAGQYVCRASNGMEASITVTVTGTQGANLAYPAGSTQPIRIEPSSSQVAEGQTLDLNCVVPGQSHAQVTWHKRGGSLPVRHQTHGSLLRLYQASPADSGEYVCRVLGSSVPLEASVLVTIEPAGSVPALGVTPTVRIESSSSQVAEGQTLDLNCLVAGQAHAQVTWHKRGGSLPARHQVHGSRLRLLQVTPADSGEYVCRVVGSSGTQEASVLVTIQQRLSGSHSQGVAYPVRIESSSASLANGHTLDLNCLVASQAPHTITWYKRGGSLPSRHQIVGSRLRIPQVTPADSGEYVCHVSNGAGSRETSLIVTIQGSGSSHVPSVSPPIRIESSSPTVVEGQTLDLNCVVARQPQAIITWYKRGGSLPSRHQTHGSHLRLHQMSVADSGEYVCRANNNIDALEASIVISVSPSAGSPSAPGSSMPIRIESSSSHVAEGETLDLNCVVPGQAHAQVTWHKRGGSLPSHHQTRGSRLRLHHVSPADSGEYVCRVMGSSGPLEASVLVTIEASGSSAVHVPAPGGAPPIRIEPSSSRVAEGQTLDLKCVVPGQAHAQVTWHKRGGNLPARHQVHGPLLRLNQVSPADSGEYSCQVTGSSGTLEASVLVTIEPSSPGPIPAPGLAQPIYIEASSSHVTEGQTLDLNCVVPGQAHAQVTWYKRGGSLPARHQTHGSQLRLHLVSPADSGEYVCRAASGPGPEQEASFTVTVPPSEGSSYRLRSPVISIDPPSSTVQQGQDASFKCLIHDGAAPISLEWKTRNQELEDNVHISPNGSIITIVGTRPSNHGTYRCVASNAYGVAQSVVNLSVHGPPTVSVLPEGPVWVKVGKAVTLECVSAGEPRSSARWTRISSTPAKLEQRTYGLMDSHAVLQISSAKPSDAGTYVCLAQNALGTAQKQVEVIVDTGAMAPGAPQVQAEEAELTVEAGHTATLRCSATGSPAPTIHWSKLRSPLPWQHRLEGDTLIIPRVAQQDSGQYICNATSPAGHAEATIILHVESPPYATTVPEHASVQAGETVQLQCLAHGTPPLTFQWSRVGSSLPGRATARNELLHFERAAPEDSGRYRCRVTNKVGSAEAFAQLLVQGPPGSLPATSIPAGSTPTVQVTPQLETKSIGASVEFHCAVPSDRGTQLRWFKEGGQLPPGHSVQDGVLRIQNLDQSCQGTYICQAHGPWGKAQASAQLVIQALPSVLINIRTSVQTVVVGHAVEFECLALGDPKPQVTWSKVGGHLRPGIVQSGGVVRIAHVELADAGQYRCTATNAAGTTQSHVLLLVQALPQISMPQEVRVPAGSAAVFPCIASGYPTPDISWSKLDGSLPPDSRLENNMLMLPSVRPQDAGTYVCTATNRQGKVKAFAHLQVPERVVPYFTQTPYSFLPLPTIKDAYRKFEIKITFRPDSADGMLLYNGQKRVPGSPTNLANRQPDFISFGLVGGRPEFRFDAGSGMATIRHPTPLALGHFHTVTLLRSLTQGSLIVGDLAPVNGTSQGKFQGLDLNEELYLGGYPDYGAIPKAGLSSGFIGCVRELRIQGEEIVFHDLNLTAHGISHCPTCRDRPCQNGGQCHDSESSSYVCVCPAGFTGSRCEHSQALHCHPEACGPDATCVNRPDGRGYTCRCHLGRSGLRCEEGVTVTTPSLSGAGSYLALPALTNTHHELRLDVEFKPLAPDGVLLFSGGKSGPVEDFVSLAMVGGHLEFRYELGSGLAVLRSAEPLALGRWHRVSAERLNKDGSLRVNGGRPVLRSSPGKSQGLNLHTLLYLGGVEPSVPLSPATNMSAHFRGCVGEVSVNGKRLDLTYSFLGSQGIGQCYDSSPCERQPCQHGATCMPAGEYEFQCLCRDGFKGDLCEHEENPCQLREPCLHGGTCQGTRCLCLPGFSGPRCQQGSGHGIAESDWHLEGSGGNDAPGQYGAYFHDDGFLAFPGHVFSRSLPEVPETIELEVRTSTASGLLLWQGVEVGEAGQGKDFISLGLQDGHLVFRYQLGSGEARLVSEDPINDGEWHRVTALREGRRGSIQVDGEELVSGRSPGPNVAVNAKGSVYIGGAPDVATLTGGRFSSGITGCVKNLVLHSARPGAPPPQPLDLQHRAQAGANTRPCPS

SEQ ID NO: 6615 - protein, 109 aa, Homo Sapiens
  misc_feature (1)..(1): Xaa can be any naturally occurring amino acid
XGTPPLTFQWSRVGSSLPGRATARNELLHFERAAPEDSGRYRCRVTNKVGSAEAFAQLLVQESRTWTRAAKGRIYARPMDLGGRPRPVPSWLSKVGGWLQASAKSREQR

SEQ ID NO: 6616 - protein, 307 aa, Homo Sapiens
  misc_feature (1)..(1): Xaa can be any naturally occurring amino acid
XNMLMLPSVRPQDAGTYVCTATNRQGKVKAFAHLQVPERVVPYFTQTPYSFLPLPTIKDAYRKFEIKITFRPDSADGLLLYSGMLLYNGQKRVPGSPTNLANRQPDFISFGLVGGRPEFRFDAGSGMATIRHPTPLALGHFHTVTLLRSLTQGSLIVGDLAPVNGTSQGKFQGLDLNEELYLGGYPDYGAIPKAGLSSGFIGCVRELRIQGEEIVFHDLNLTAHGISHCPTCRDRPCQNGGQCHDSESSSYVCVCPAGFTGSRCEHSQALHCHPEACGPDATCVNRPDGRGYTCRCHLGRSGLRCEE

SEQ ID NO: 6617 - protein, 197 aa, Homo Sapiens
  misc_feature (1)..(1): Xaa can be any naturally occurring amino acid
XTPSGLYLGTCERCSCHGHSEACEPETGACQGCQHHTEGPRCEQCQPGYYGDAQRGTPQDCQLCPCYGDPAAGQAAHTCFLDTDGHPTCDACSPGHSGRHCERCAPGYYGNPSQGQPCQRDSQVPGPIGCNCDPQGSVSSQCDAAGQCQCKVSPNPCPCGACSAPLPRPCGEIRQHLVEAETWAWGAGHGGQGRGCP

SEQ ID NO: 6618 - protein, 242 aa, Homo Sapiens
MAETEALSKLREDFRMQNKSVFILGASGETGRVLLKEILEQGLFSKVTLIGRRKLTFDEEAYKNVNQEVVDFEKLDDYASAFQGHDVGFCCLGTTRGKAGAEGFVRVDRDYVLKSAELAKAGGCKHFNLLSSKGADKSSNFLYLQVKGEVEAKVEELKFDRYSVFRPGVLLCDRQESRPGEWLVRKFFGSLPDSWASGHSVPVVTVVRAMLNNVVRPRDKQMELLENKAIHDLGKAHGSLKP

SEQ ID NO: 6619 - protein, 242 aa, Homo Sapiens; identical to SEQ ID NO: 6618

SEQ ID NO: 6620 - protein, 242 aa, Homo Sapiens; identical to SEQ ID NO: 6618

SEQ ID NO: 6621 - protein, 196 aa, Homo Sapiens
MAETEALSKLREDFRMQNKSVFILGASGETGRVLLKEILEQGLFSKVTLIGRRKLTFDEEAYKNVNQEVVDFEKLDDYASAFQGHDVGFCCLGTTRGKAGAGEVEAKVEELKFDRYSVFRPGVLLCDRQESRPGEWLVRKFFGSLPDSWASGHSVPVVTVVRAMLNNVVRPRDKQMELLENKAIHDLGKAHGSLKP

SEQ ID NO: 6622 - protein, 133 aa, Homo Sapiens
MAETEALSKLREDFRMQNKSVFILGASGETGRVLLKEILEQGLFSKVTLIGRRKLTFDEEAYKNVNQEVVDFEKLDDYASAFQGHDVGFCCLGTTRGKAGAVRKAYALFPFCWPVISRILFLLTLFLCACCNA

SEQ ID NO: 6623 - protein, 133 aa, Homo Sapiens; identical to SEQ ID NO: 6622

SEQ ID NO: 6624 - protein, 133 aa, Homo Sapiens; identical to SEQ ID NO: 6622

SEQ ID NO: 6625 - protein, 276 aa, Homo Sapiens
MAGPAALSAAAAAALAAALLLLRREDPGPGAGPSMAETEALSKLREDFRMQNKSVFILGASGETGRVLLKEILEQGLFSKVTLIGRRKLTFDEEAYKNVNQEVVDFEKLDDYASAFQGHDVGFCCLGTTRGKAGAEGFVRVDRDYVLKSAELAKAGGCKHFNLLSSKGADKSSNFLYLQVKGEVEAKVEELKFDRYSVFRPGVLLCDRQESRPGEWLVRKFFGSLPDSWASGHSVPVVTVVRAMLNNVVRPRDKQMELLENKAIHDLGKAHGSLKP

SEQ ID NO: 6626 - protein, 57 aa, Homo Sapiens
MKFFVFALVLALMISMISADSHEKRHHGYRRKFHEKHHSHREFPFYGDYGSNYLYDN

SEQ ID NO: 6627 - protein, 57 aa, Homo Sapiens; identical to SEQ ID NO: 6626

SEQ ID NO: 6628 - protein, 57 aa, Homo Sapiens; identical to SEQ ID NO: 6626

SEQ ID NO: 6629 - protein, 41 aa, Homo Sapiens
MKFFVFALILALMLSMTGADSHAKEKHHSHRGYRSNYLYDN

SEQ ID NO: 6630 - protein, 51 aa, Homo Sapiens
MKFFVFALILALMLSMTGADSHAKRHHGYKRKFHEKHHSHRGYRSNYLYDN

SEQ ID NO: 6631 - protein, 51 aa, Homo Sapiens; identical to SEQ ID NO: 6630

SEQ ID NO: 6632 - protein, 221 aa, Homo Sapiens
GKLPVLLLGRSSELRPGEFVVAIGSPFSLQNTVTTGIVSTTQRGGKELGLRNSDMDYIQTDAIINYGNSGGPLVNLDGEVIGINTLKVTAGISFAIPSDKIKKFLTESHDRQAKGKAITKKKYIGIRMMSLTSSKAKELKDRHRDFPDVISGAYIIEVIPDTPAEAGGLKENDVIISINGQSVVSANDVSDVIKRESTLNMVVRRGNEDIMITVIPEEIDP

SEQ ID NO: 6633 - protein, 480 aa, Homo Sapiens
MQIPRAALLPLLLLLLAAPASAQLSRAGRSAPLAAGCPDRCEPARCPPQPEHCEGGRARDACGCCEVCGAPEGAACGLQEGPCGEGLQCVVPFGVPASATVRRRAQAGLCVCASSEPVCGSDANTYANLCQLRAASRRSERLHRPPVIVLQRGACGQGQEDPNSLRHKYNFIADVVEKIAPAVVHIELFRKLPFSKREVPVASGSGFIVSEDGLIVTNAHVVTNKHRVKVELKNGATYEAKIKDVDEKADIALIKIDHQGKLPVLLLGRSSELRPGEFVVAIGSPFSLQNTVTTGIVSTTQRGGKELGLRNSDMDYIQTDAIINYGNSGGPLVNLDGEVIGINTLKVTAGISFAIPSDKIKKFLTESHDRQAKGKAITKKKYIGIRMMSLTSSKAKELKDRHRDFPDVISGAYIIEVIPDTPAEAGGLKENDVIISINGQSVVSANDVSDVIKRESTLNMVVRRGNEDIMITVIPEEIDP

SEQ ID NO: 6634 - protein, 453 aa, Homo Sapiens
MQARALLLAALAALALAREPPAAPCPARCDVSRCPSPRCPGGYVPDLCNCCLVCAASEGEPCGGPLDSPCGESLECVRGLCRCRWSHAVCGTDGHTYANVCALQAASRRALQLSGTPVRQLQKGACPLGLHQLSSPRYKFNFIADVVEKIAPAVVHIELFLRHPLFGRNVPLSSGSGFIMSEAGLIITNAHVVSSNSAAPGRQQLKVQLQNGDSYEATIKDIDKKSDIATIKIHPKKKLPVLLLGHSADLRPGEFVVAIGSPFALQNTVTTGIVSTAQREGRELGLRDSDMDYIQTDAIINYGNSGGPLVNLDGEVIGINTLKVTAGISFAIPSDRITRFLTEFQDKQIKDWKKRFIGIRMRTITPSLVDELKASNPDFPEVSSGIYVQEVAPNSPSQRGGIQDGDIIVKVNGRPLVDSSELQEAVLTESPLLLEVRRGNDDLLFSIAPEVVM

SEQ ID NO: 6635 - protein, 357 aa, Homo Sapiens
MQARALLLAALAALALAREPPAAPCPARCDVSRCPSPRCPGGYVPDLCNCCLVCAASEGEPCGGPLDSPCGESLECVRGLCRCRWSHAVCGTDGHTYANVCALQAASRRALQLSGTPVRQLQKGACPLGLHQLSSPRYKFNFIADVVEKIAPAVVHIELFLRHPLFGRNVPLSSGSGFIMSEAGLIITNAHVVSSNSAAPGRQQLKVQLQNGDSYEATIKDIDKKSDIATIKIHPKKKLPVLLLGHSADLRPGEFVVAIGSPFALQNTVTTGIVSTAQREGRELGLRDSDMDYIQTDAIINYGNSGGPLVNLDGEVIGINTLKVTAGISFAIPSDRITRFLTEFQDKQIKAPSLAVH

SEQ ID NO: 6636 - protein, 476 aa, Homo Sapiens
MIRPQLRTAGLGRCLLPGLLLLLVPVLWAGAEKLHTQPSCPAVCQPTRCPALPTCALGTTPVFDLCRCCRVCPAAEREVCGGAQGQPCAPGLQCLQPLRPGFPSTCGCPTLGGAVCGSDRRTYPSMCALRAENRAARRLGKVPAVPVQWGNCGDTGTRSAGPLRRNYNFIAAVVEKVAPSVVHVQLWGRLLHGSRLVPVYSGSGFIVSEDGLIITNAHVVRNQQWIEVVLQNGARYEAVVKDIDLKLDLAVIKIESNAELPVLMLGRSSDLRAGEFVVALGSPFSLQNTATAGIVSTKQRGGKELGMKDSDMDYVQIDATINYGNSGGPLVNLDGDVIGVNSLRVTDGISFAIPSDRVRQFLAEYHEHQMKGKAFSNKKYLGLQMLSLTVPLSEELKMHYPDFPDVSSGVYVCKVVEGTAAQSSGLRDHDVIVNINGKPITTTTDVVKALDSDSLSMAVLRGKDNLLLTVIPETIN

SEQ ID NO: 6637 - protein, 69 aa, Homo Sapiens
MAAHLLPICALFLTLLDMAQGFRGPLLPNRPFTTVWNANTQWCLERHGVDVDVSVFDVVANPGQTFRGP

SEQ ID NO: 6638 - protein, 103 aa, Homo Sapiens
MAAHLLPICALFLTLLDMAQGFRGPLLPNRPFTTVWNANTQWCLERHGVDVDVSVFDVVANPGQTFRGPDMTIFYSSQLGTYPYYTPTGEPVFGGLPQNASLI

SEQ ID NO: 6639 - protein, 435 aa, Homo Sapiens
MAAHLLPICALFLTLLDMAQGFRGPLLPNRPFTTVWNANTQWCLERHGVDVDVSVFDVVANPGQTFRGPDMTIFYSSQLGTYPYYTPTGEPVFGGLPQNASLIAHLARTFQDILAAIPAPDFSGLAVIDWEAWRPRWAFNWDTKDIYRQRSRALVQAQHPDWPAPQVEAVAQDQFQGAARAWMAGTLQLGRALRPRGLWGFYGFPDCYNYDFLSPNYTGQCPSGIRAQNDQLGWLWGQSRALYPSIYMPAVLEGTGKSQMYVQHRVAEAFRVAVAAGDPNLPVLPYVQIFYDTTNHFLPLDELEHSLGESAAQGAAGVVLWVSWENTRTKESCQAIKEYMDTTLGPFILNVTSGALLCSQALCSGHGRCVRRTSHPKALLLLNPASFSIQLTPGGGPLSLRGALSLEDQAQMAVEFKCRCYPGWQAPWCERKSMW

SEQ ID NO: 6640 - protein, 435 aa, Homo Sapiens; identical to SEQ ID NO: 6639

SEQ ID NO: 6641 - protein, 405 aa, Homo Sapiens
MAAHLLPICALFLTLLDMAQGFRGPLLPNRPFTTVWNANTQWCLERHGVDVDVSVFDVVANPGQTFRGPDMTIFYSSQLGTYPYYTPTGEPVFGGLPQNASLIAHLARTFQDILAAIPAPDFSGLAVIDWEAWRPRWAFNWDTKDIYRQRSRALVQAQHPDWPAPQVEAVAQDQFQGAARAWMAGTLQLGRALRPRGLWGFYGFPDCYNYDFLSPNYTGQCPSGIRAQNDQLGWLWGQSRALYPSIYMPAVLEGTGKSQMYVQHRVAEAFRVAVAAGDPNLPVLPYVQIFYDTTNHFLPLESCQAIKEYMDTTLGPFILNVTSGALLCSQALCSGHGRCVRRTSHPKALLLLNPASFSIQLTPGGGPLSLRGALSLEDQAQMAVEFKCRCYPGWQAPWCERKSMW

SEQ ID NO: 6642 - protein, 435 aa, Homo Sapiens; identical to SEQ ID NO: 6639

SEQ ID NO: 6643 - protein, 435 aa, Homo Sapiens; identical to SEQ ID NO: 6639

SEQ ID NO: 6644 - protein, 253 aa, Homo Sapiens
MAGTLQLGRALRPRGLWGFYGFPDCYNYDFLSPNYTGQCPSGIRAQNDQLGWLWGQSRALYPSIYMPAVLEGTGKSQMYVQHRVAEAFRVAVAAGDPNLPVLPYVQIFYDTTNHFLPLDELEHSLGESAAQGAAGVVLWVSWENTRTKESCQAIKEYMDTTLGPFILNVTSGALLCSQALCSGHGRCVRRTSHPKALLLLNPASFSIQLTPGGGPLSLRGALSLEDQAQMAVEFKCRCYPGWQAPWCERKSMW

SEQ ID NO: 6645 - protein, 176 aa, Homo Sapiens
MYVQHRVAEAFRVAVAAGDPNLPVLPYVQIFYDTTNHFLPLDELEHSLGESAAQGAAGVVLWVSWENTRTKESCQAIKEYMDTTLGPFILNVTSGALLCSQALCSGHGRCVRRTSHPKALLLLNPASFSIQLTPGGGPLSLRGALSLEDQAQMAVEFKCRCYPGWQAPWCERKSMW

SEQ ID NO: 6646 - protein, 48 aa, Homo Sapiens
MRAGPGPTVTLALVLAVSWAMELKPTAPPIFTGRPFVVAWDVPTQDCG

SEQ ID NO: 6647 - protein, 76 aa, Homo Sapiens
MRAGPGPTVTLALVLAVSWAMELKPTAPPIFTGRPFVVAWDVPTQDCGPRLKVPLDLNAFDVQASPNEGFVNQNIT

SEQ ID NO: 6648 - protein, 81 aa, Homo Sapiens
MRAGPGPTVTLALVLAVSWAMELKPTAPPIFTGRPFVVAWDVPTQDCGPRLKVPLDLNAFDVQASPNEGFVNQNITIFYRD

SEQ ID NO: 6649 - protein, 117 aa, Homo Sapiens
MRAGPGPTVTLALVLAVSWAMELKPTAPPIFTGRPFVVAWDVPTQDCGPRLKVPLDLNAFDVQASPNEGFVNQNITIFYRDRLGLYPRFDSAGRSVHGGVPQNVSLWAHRKMLQKRV

SEQ ID NO: 6650 - protein, 121 aa, Homo Sapiens
MRAGPGPTVTLALVLAVSWAMELKPTAPPIFTGRPFVVAWDVPTQDCGPRLKVPLDLNAFDVQASPNEGFVNQNITIFYRDRLGLYPRFDSAGRSVHGGVPQNVSLWAHRKMLQKRVEHYI

SEQ ID NO: 6651 - protein, 473 aa, Homo Sapiens
MRAGPGPTVTLALVLAVSWAMELKPTAPPIFTGRPFVVAWDVPTQDCGPRLKVPLDLNAFDVQASPNEGFVNQNITIFYRDRLGLYPRFDSAGRSVHGGVPQNVSLWAHRKMLQKRVEHYIRTQESAGLAVIDWEDWRPVWVRNWQDKDVYRRLSRQLVASRHPDWPPDRIVKQAQYEFEFAAQQFMLETLRYVKAVRPRHLWGFYLFPDCYNHDYVQNWESYTGRCPDVEVARNDQLAWLWAESTALFPSVYLDETLASSRHGRNFVSFRVQEALRVARTHHANHALPVYVFTRPTYSRRLTGLSEMDLISTIGESAALGAAGVILWGDAGYTTSTETCQYLKDYLTRLLVPYVVNVSWATQYCSRAQCHGHGRCVRRNPSASTFLHLSTNSFRLVPGHAPGEPQLRPVGELSWADIDHLQTHFRCQCYLGWSGEQCQWDHRQAAGGASEAWAGSHLTSLLALAALAFTWTL

SEQ ID NO: 6652 - protein, 473 aa, Homo Sapiens; identical to SEQ ID NO: 6651

SEQ ID NO: 6653 - protein, 473 aa, Homo Sapiens; identical to SEQ ID NO: 6651

SEQ ID NO: 6654 - protein, 473 aa, Homo Sapiens; identical to SEQ ID NO: 6651

SEQ ID NO: 6655 - protein, 168 aa, Homo Sapiens
MLPPAHHQAFVRHRLEEAFRVALVGHRHPLPVLAYVRLTHRRSGRFLSQDDLVQSIGVSAALGAAGVVLWGDLSLSSSEEECWHLHDYLVDTLGPYVINVTRAAMACSHQRCHGHGRCARRDPGQMEAFLHLWPDGSLGDWKSFSCHCYWGWAGPTCQEPRPGPKEAV

SEQ ID NO: 6656 - protein, 138 aa, Homo Sapiens
MLPPAHHQAFVRHRLEEAFRVALVGHRHPLPVLAYVRLTHRRSGRFLSQEECWHLHDYLVDTLGPYVINVTRAAMACSHQRCHGHGRCARRDPGQMEAFLHLWPDGSLGDWKSFSCHCYWGWAGPTCQEPRPGPKEAV

SEQ ID NO: 6657 - protein, 160 aa, Homo Sapiens
MTTQLGPALVLGVALCLGCGQPLPQVPERPFSVLWNVPSAHCEARFGVHLPLNALGIIANRGQHFHGQNMTIFYKNQLGLYPYFGPRGTAHNGGIPQALPLDRHLALAAYQIHHSLRPGFAGPAVLDWEEWCPLWAGNWGRRRAYQAASWAWAQQVFPDL

SEQ ID NO: 6658 - protein, 417 aa, Homo Sapiens
MTTQLGPALVLGVALCLGCGQPLPQVPERPFSVLWNVPSAHCEARFGVHLPLNALGIIANRGQHFHGQNMTIFYKNQLGLYPYFGPRGTAHNGGIPQALPLDRHLALAAYQIHHSLRPGFAGPAVLDWEEWCPLWAGNWGRRRAYQAASWAWAQQVFPDLDPQEQLYKAYTGFEQAARALMEDTLRVAQALRPHGLWGFYHYPACGNGWHSMASNYTGRCHAATLARNTQLHWLWAASSALFPSIYLPPRLPPAHHQAFVRHRLEEAFRVALVGHRHPLPVLAYVRLTHRRSGRFLSQDDLVQSIGVSAALGAAGVVLWGDLSLSSSEEECWHLHDYLVDTLGPYVINVTRAAMACSHQRCHGHGRCARRDPGQMEAFLHLWPDGSLGDWKSFSCHCYWGWAGPTCQEPRPGPKEAV

SEQ ID NO: 6659 - protein, 387 aa, Homo Sapiens
MTTQLGPALVLGVALCLGCGQPLPQVPERPFSVLWNVPSAHCEARFGVHLPLNALGIIANRGQHFHGQNMTIFYKNQLGLYPYFGPRGTAHNGGIPQALPLDRHLALAAYQIHHSLRPGFAGPAVLDWEEWCPLWAGNWGRRRAYQAASWAWAQQVFPDLDPQEQLYKAYTGFEQAARALMEDTLRVAQALRPHGLWGFYHYPACGNGWHSMASNYTGRCHAATLARNTQLHWLWAASSALFPSIYLPPRLPPAHHQAFVRHRLEEAFRVALVGHRHPLPVLAYVRLTHRRSGRFLSQEECWHLHDYLVDTLGPYVINVTRAAMACSHQRCHGHGRCARRDPGQMEAFLHLWPDGSLGDWKSFSCHCYWGWAGPTCQEPRPGPKEAV

SEQ ID NO: 6660 - protein, 387 aa, Homo Sapiens; identical to SEQ ID NO: 6659

SEQ ID NO: 6661 - protein, 417 aa, Homo Sapiens; identical to SEQ ID NO: 6658

SEQ ID NO: 6662 - protein, 92 aa, Homo Sapiens
MADKVRRQRPRRRVCWALVAVLLADLLALSDTLAVMSVDLGSESMKVAIVKPGVPMEIVLNKESRRKTPVIVTLKENERFFGDSAASMAIKN

SEQ ID NO: 6663 - protein, 103 aa, Homo Sapiens
MADKVRRQRPRRRVCWALVAVLLADLLALSDTLAVMSVDLGSESMKVAIVKPGVPMEIVLNKESRRKTPVIVTLKENERFFGDSAASMAIKNPKATLRYFQHL

SEQ ID NO: 6664 - protein, 149 aa, Homo Sapiens
MADKVRRQRPRRRVCWALVAVLLADLLALSDTLAVMSVDLGSESMKVAIVKPGVPMEIVLNKESRRKTPVIVTLKENERFFGDSAASMAIKNPKATLRYFQHLLGKQADNPHVALYQARFPEHELTFDPQRQTVHFQISSQLQFSPEEV

SEQ ID NO: 6665 - protein, 154 aa, Homo Sapiens
MADKVRRQRPRRRVCWALVAVLLADLLALSDTLAVMSVDLGSESMKVAIVKPGVPMEIVLNKESRRKTPVIVTLKENERFFGDSAASMAIKNPKATLRYFQHLLGKQADNPHVALYQARFPEHELTFDPQRQTVHFQISSQLQFSPEEVLGMVL

SEQ ID NO: 6666 - protein, 211 aa, Homo Sapiens
MADKVRRQRPRRRVCWALVAVLLADLLALSDTLAVMSVDLGSESMKVAIVKPGVPMEIVLNKESRRKTPVIVTLKENERFFGDSAASMAIKNPKATLRYFQHLLGKQADNPHVALYQARFPEHELTFDPQRQTVHFQISSQLQFSPEEVLGMVLNYSRSLAEDFAEQPIKDAVITVPVFFNQAERRAVLQAARMAGLKVLQLINDNTATAL

SEQ ID NO: 6667 - protein, 224 aa, Homo Sapiens
MADKVRRQRPRRRVCWALVAVLLADLLALSDTLAVMSVDLGSESMKVAIVKPGVPMEIVLNKESRRKTPVIVTLKENERFFGDSAASMAIKNPKATLRYFQHLLGKQADNPHVALYQARFPEHELTFDPQRQTVHFQISSQLQFSPEEVLGMVLNYSRSLAEDFAEQPIKDAVITVPVFFNQAERRAVLQAARMAGLKVLQLINDNTATALSYGVFRRKDINTT

SEQ ID NO: 6668 - protein, 656 aa, Homo Sapiens
MADKVRRQRPRRRVCWALVAVLLADLLALSDTLAVMSVDLGSESMKVAIVKPGVPMEIVLNKESRRKTPVIVTLKENERFFGDSAASMAIKNPKATLRYFQHLLGKQADNPHVALYQARFPEHELTFDPQRQTVHFQISSQLQFSPEEVLGMVLNYSRSLAEDFAEQPIKDAVITVPVFFNQAERRAVLQAARMAGLKVLQLINDNTATALSYGVFRRKDINTTAQNIMFYDMGSGSTVCTIVTYQMVKTKEAGMQPQLQIRGVGFDRTLGGLEMELRLRERLAGLFNEQRKGQRAKDVRENPRAMAKLLREANRLKTVLSANADHMAQIEGLMDDVDFKAKVTRVEFEELCADLFERVPGPVQQALQSAEMSLDEIEQVILVGGATRVPRVQEVLLKAVGKEELGKNINADEAAAMGAVYQAAALSKAFKVKPFVVRDAVVYPILVEFTREVEEEPGIHSLKHNKRVLFSRMGPYPQRKVITFNRYSHDFNFHINYGDLGFLGPEDLRVFGSQNLTTVKLKGVGDSFKKYPDYESKGIKAHFNLDESGVLSLDRVESVFETLVEDSAEEESTLTKLGNTISSLFGGGTTPDAKENGTDTVQEEEESPAEGSKDEPGEQVELKEEAEAPVEDGSQPPPPEPKGDATPEGEKATEKE

SEQ ID NO: 6669 - protein, 937 aa, Homo Sapiens
MADKVRRQRPRRRVCWALVAVLLADLLALSDTLAVMSVDLGSESMKVAIVKPGVPMEIVLNKESRRKTPVIVTLKENERFFGDSAASMAIKNPKATLRYFQHLLGKQADNPHVALYQARFPEHELTFDPQRQTVHFQISSQLQFSPEEVLGMVLNYSRSLAEDFAEQPIKDAVITVPVFFNQAERRAVLQAARMAGLKVLQLINDNTATALSYGVFRRKDINTTAQNIMFYDMGSGSTVCTIVTYQMVKTKEAGMQPQLQIRGVGFDRTLGGLEMELRLRERLAGLFNEQRKGQRAKDVRENPRAMAKLLREANRLKTVLSANADHMAQIEGLMDDVDFKAKVTRVEFEELCADLFERVPGPVQQALQSAEMSLDEIEQVILVGGATRVPRVQEVLLKAVGKEELGKNINADEAAAMGAVYQAAALSKAFKVKPFVVRDAVVYPILVEFTREVEEEPGIHSLKHNKRVLFSRMGPYPQRKVITFNRYSHDFNFHINYGDLGFLGPEDLRVFGSQNLTTVKLKGVGDSFKKYPDYESKGIKAHFNLDESGVLSLDRVESVFETLVEDSAEEESTLTKLGNTISSLFGGGTTPDAKENGTDTVQKPSEKAEAGPEGVAPAPEGEKKQKPARKRRMVEEIGVELVVLDLPDLPEDKLAQSVQKLQDLTLRDLEKQEREKAANSLEAFIFETQDKLYQPEYQEVSTEEQREEISGKLSAASTWLEDEGVGATTVMLKEKLAELRKLCQGLFFRVEERKKWPERLSALDNLLNHSSMFLKGARLIPEMDQIFTEVEMTTLEKVINETWAWKNATLAEQAKLPATEKPVLLSKDIEAKMMALDREVQYLLNKAKFTKPRPRPKDKNGTRAEPPLNASASDQGEKVIPPAGQTEDAEPISEPEKVETGSEPGDTEPLELGGPGAEPEQKEQSTGQKRPLKNDEL

SEQ ID NO: 6670 - protein, 678 aa, Homo Sapiens
MADKVRRQRPRRRVCWALVAVLLADLLALSDTLAVMSVDLGSESMKVAIVKPGVPMEIVLNKESRRKTPVIVTLKENERFFGDSAASMAIKNPKATLRYFQHLLGKQADNPHVALYQARFPEHELTFDPQRQTVHFQISSQLQFSPEEVLGMVLNYSRSLAEDFAEQPIKDAVITVPVFFNQAERRAVLQAARMAGLKVLQLINDNTATALSYGVFRRKDINTTAQNIMFYDMGSGSTVCTIVTYQMVKTKEAGMQPQLQIRGVGFDRTLGGLEMELRLRERLAGLFNEQRKGQRAKDVRENPRAMAKLLREANRLKTVLSANADHMAQIEGLMDDVDFKAKVTRVEFEELCADLFERVPGPVQQALQSAEMSLDEIEQVILVGGATRVPRVQEVLLKAVGKEELGKNINADEAAAMGAVYQAAALSKAFKVKPFVVRDAVVYPILVEFTREVEEEPGIHSLKHNKRVLFSRMGPYPQRKVITFNRYSHDFNFHINYGDLGFLGPEDLRVFGSQNLTTVKLKGVGDSFKKYPDYESKGIKAHFNLDESGVLSLDRVESVFETLVEDSAEEESTLTKLGNTISSLFGGGTTPDAKENGTDTVQEEEESPAEGSKDEPGEQVELKEEAEAPVEDGSQPPPPEPKGDATPEGEKATEKENGDKSEAQKPVVCRASVTRFGF

SEQ ID NO: 6671 - protein, 677 aa, Homo Sapiens
MADKVRRQRPRRRVCWALVAVLLADLLALSDTLAVMSVDLGSESMKVAIVKPGVPMEIVLNKESRRKTPVIVTLKENERFFGDSAASMAIKNPKATLRYFQHLLGKQADNPHVALYQARFPEHELTFDPQRQTVHFQISSQLQFSPEEVLGMVLNYSRSLAEDFAEQPIKDAVITVPVFFNQAERRAVLQAARMAGLKVLQLINDNTATALSYGVFRRKDINTTAQNIMFYDMGSGSTVCTIVTYQMVKTKEAGMQPQLQIRGVGFDRTLGGLEMELRLRERLAGLFNEQRKGQRAKDVRENPRAMAKLLREANRLKTVLSANADHMAQIEGLMDDVDFKAKVTRVEFEELCADLFERVPGPVQQALQSAEMSLDEIEQVILVGGATRVPRVQEVLLKAVGKEELGKNINADEAAAMGAVYQAAALSKAFKVKPFVVRDAVVYPILVEFTREVEEEPGIHSLKHNKRVLFSRMGPYPQRKVITFNRYSHDFNFHINYGDLGFLGPEDLRVFGSQNLTTVKLKGVGDSFKKYPDYESKGIKAHFNLDESGVLSLDRVESVFETLVEDSAEEESTLTKLGNTISSLFGGGTTPDAKENGTDTVQEEEESPAEGSKDEPGEQVELKEEAEAPVEDGSQPPPPEPKGDATPEGEKATEKENGDKSEAQASVCRASVTRFGF

SEQ ID NO: 6672 - protein, 999 aa, Homo Sapiens
MADKVRRQRPRRRVCWALVAVLLADLLALSDTLAVMSVDLGSESMKVAIVKPGVPMEIVLNKESRRKTPVIVTLKENERFFGDSAASMAIKNPKATLRYFQHLLGKQADNPHVALYQARFPEHELTFDPQRQTVHFQISSQLQFSPEEVLGMVLNYSRSLAEDFAEQPIKDAVITVPVFFNQAERRAVLQAARMAGLKVLQLINDNTATALSYGVFRRKDINTTAQNIMFYDMGSGSTVCTIVTYQMVKTKEAGMQPQLQIRGVGFDRTLGGLEMELRLRERLAGLFNEQRKGQRAKDVRENPRAMAKLLREANRLKTVLSANADHMAQIEGLMDDVDFKAKVTRVEFEELCADLFERVPGPVQQALQSAEMSLDEIEQVILVGGATRVPRVQEVLLKAVGKEELGKNINADEAAAMGAVYQAAALSKAFKVKPFVVRDAVVYPILVEFTREVEEEPGIHSLKHNKRVLFSRMGPYPQRKVITFNRYSHDFNFHINYGDLGFLGPEDLRVFGSQNLTTVKLKGVGDSFKKYPDYESKGIKAHFNLDESGVLSLDRVESVFETLVEDSAEEESTLTKLGNTISSLFGGGTTPDAKENGTDTVQEEEESPAEGSKDEPGEQVELKEEAEAPVEDGSQPPPPEPKGDATPEGEKATEKENGDKSEAQKPSEKAEAGPEGVAPAPEGEKKQKPARKRRMVEEIGVELVVLDLPDLPEDKLAQSVQKLQDLTLRDLEKQEREKAANSLEAFIFETQDKLYQPEYQEVSTEEQREEISGKLSAASTWLEDEGVGATTVMLKEKLAELRKLCQGLFFRVEERKKWPERLSALDNLLNHSSMFLKGARLIPEMDQIFTEVEMTTLEKVINETWAWKNATLAEQAKLPATEKPVLLSKDIEAKMMALDREVQYLLNKAKFTKPRPRPKDKNGTRAEPPLNASASDQGEKVIPPAGQTEDAEPISEPEKVETGSEPGDTEPLELGGPGAEPEQKEQSTGQKRPLKNDEL

SEQ ID NO: 6673 - protein, 937 aa, Homo Sapiens; identical to SEQ ID NO: 6669

SEQ ID NO: 6674 - protein, 147 aa, Homo Sapiens
MADKVRRQRPRRRVCWALVAVLLADLLALSDTLAVMSVDLGSESMKVAIVKPGVPMEIVLNKESRRKTPVIVTLKENERFFGDSAASMAIKNPKATLRYFQHLLGKQADNPHVALYQARFPEHELTFDPQRQTVHFQISSQLQFSPL

SEQ ID NO: 6675 - protein, 38 aa, Homo Sapiens
MADKVRRQRPRRRVCWALVAVLLADLLALSGNLGGKHR

SEQ ID NO: 6676 - protein, 38 aa, Homo Sapiens; identical to SEQ ID NO: 6675

SEQ ID NO: 6677 - protein, 79 aa, Homo Sapiens
MGILKLQVFLIVLSVALNHLKATPIERQEWIIPVLSRNILLELRGAKPEHEAGKKSKVIRWKSGNATLPHVQRSAWQIF

SEQ ID NO: 6678 - protein, 79 aa, Homo Sapiens
MGILKLQVFLIVLSVALNHLKATPIESHQVEKRKCNTATCATQRLANFLVHSSNNFGAILSSTNVGSNTYGKRNAVEVL

SEQ ID NO: 6679 - protein, 89 aa, Homo Sapiens
MGILKLQVFLIVLSVALNHLKATPIESHQVEKRKCNTATCATQRLANFLVHSSNNFGAILSSTNVGSNTYGKRNAVEVLKREPLNYLPL

SEQ ID NO: 6680 - protein, 89 aa, Homo Sapiens; identical to SEQ ID NO: 6679

SEQ ID NO: 6681 - protein, 85 aa, Homo Sapiens
  misc_feature (1)..(1): Xaa can be any naturally occurring amino acid
XLKATPIERCLDQIPIFTVFQENHQVEKRKCNTATCATQRLANFLVHSSNNFGAILSSTNVGSNTYGKRNAVEVLKREPLNYLPL

SEQ ID NO: 6682 - protein, 317 aa, Homo Sapiens
MKTALILLSILGMACAFSMKNLHRRVKIEDSEENGVFKYRPRYYLYKHAYFYPHLKRFPVQGSSDSSEENGDDSSEEEEEEEETSNEGENNEESNEDEDSEAENTTLSATTLGYGEDATPGTGYTGLAAIQLPKKAGDITNKATKEKESDEEEEEEEEGNENEESEAEVDENEQGINGTSTNSTEAENGNGSSGGDNGEEGEEESVTGANAEDTTETGRQGKGTSKTTTSPNGGFEPTTPPQVYRTTSPPFGKTTTVEYEGEYEYTGANEYDNGYEIYESENGEPRGDNYRAYEDEYSYFKGQGYDGYDGQNYYHHQ

SEQ ID NO: 6683 - protein, 180 aa, Homo Sapiens
MAPSSPRPALPALLVLLGALFPGPGNAQTSVSPSKVILPRGGSVLVTCSTSCDQPKLLGIETPLPKKELLLPGNNRKVYELSNVQEDSQPMCYSNCPDGQSTAKTFLTVYWTPERVEGGAPRANLTVVLLRGEKELKREPAVGEPAEVTTTVLVRRDHHGANFSCRTELDLRPQGLELFE

SEQ ID NO: 6684 - protein, 532 aa, Homo Sapiens
MAPSSPRPALPALLVLLGALFPGPGNAQTSVSPSKVILPRGGSVLVTCSTSCDQPKLLGIETPLPKKELLLPGNNRKVYELSNVQEDSQPMCYSNCPDGQSTAKTFLTVYWTPERVELAPLPSWQPVGKNLTLRCQVEGGAPRANLTVVLLRGEKELKREPAVGEPAEVTTTVLVRRDHHGANFSCRTELDLRPQGLELFENTSAPYQLQTFVLPATPPQLVSPRVLEVDTQGTVVCSLDGLFPVSEAQVHLALGDQRLNPTVTYGNDSFSAKASVSVTAEDEGTQRLTCAVILGNQSQETLQTVTIYSFPAPNVILTKPEVSEGTEVTVKCEAHPRAKVTLNGVPAQPLGPRAQLLLKATPEDNGRSFSCSATLEVAGQLIHKNQTRELRVLYGPRLDERDCPGNWTWPENSQQTPMCQAWGNPLPELKCLKDGTFPLPIGESVTVTRDLEGTYLCRARSTQGEVTRKVTVNVLSPRYEIVIITVVAAAVIMGTAGLSTYLYNRQRKIKKYRLQQAQKGTPMKPNTQATPP

SEQ ID NO: 6685 - protein, 310 aa, Homo Sapiens
MAPSSPRPALPALLVLLGALFPVSEAQVHLALGDQRLNPTVTYGNDSFSAKASVSVTAEDEGTQRLTCAVILGNQSQETLQTVTIYSFPAPNVILTKPEVSEGTEVTVKCEAHPRAKVTLNGVPAQPLGPRAQLLLKATPEDNGRSFSCSATLEVAGQLIHKNQTRELRVLYGPRLDERDCPGNWTWPENSQQTPMCQAWGNPLPELKCLKDGTFPLPIGESVTVTRDLEGTYLCRARSTQGEVTRKVTVNVLSPRYEIVIITVVAAAVIMGTAGLSTYLYNRQRKIKKYRLQQAQKGTPMKPNTQATPP

SEQ ID NO: 6686 - protein, 174 aa, Homo Sapiens
MNSNVSVYQPPRQVILTLQPTLVAVGKSFTIECRVPTVEPLDSLTLFLFRGNETLHYETFGKAAPAPQEATATFNSTADREDGHRNFSCLAVLDLMSRGGNIFHKHSAPKMLEIYEPVSDSQMVIIVTVVSVLLSLFVTSVLLCFIFGQHLRQQRMGTYGVRAAWRRLPQAFRP

SEQ ID NO: 6687 - protein, 251 aa, Homo Sapiens
MSSFGYRTLTVALFTLICCPGSDEKVFEVHVRPKKLATSLDKILLDEQAQWKHYLVSNISHDTVLQCHFTCSGKQESMNSNVSVYQPPRQVILTLQPTLVAVGKSFTIECRVPTVEPLDSLTLFLFRGNETLHYETFGKAAPAPQEATATFNSTADREDGHRNFSCLAVLDLMSRGGNIFHKHSAPKMLEIYEPVSDSQMVIIVTVVSVLLSLFVTSVLLCFIFGQHLRQQRMGTYGVRAAWRRLPQAFRP

SEQ ID NO: 6688 - protein, 167 aa, Homo Sapiens
MSSFGYRTLTVALFTLICCPGSDEKVFEVHVRPKKLAVEPKGSLEVNCSTTCNQPEVGGLETSLDKILLDEQAQWKHYLVSNISHDTVLQCHFTCSGKQESMNSNVSVYQPPRQVILTLQPTLVAVGKSFTIECRVPTVEPLDSLTLFLFRGNETLHYETFGKAAPA

SEQ ID NO: 6689 - protein, 214 aa, Homo Sapiens
MSSFGYRTLTVALFTLICCPGSDEKVFEVHVRPKKLAVEPKGSLEVNCSTTCNQPEVGGLETSLDKILLDEQAQWKHYLVSNISHDTVLQCHFTCSGKQESMNSNVSVYQPPRQVILTLQPTLVAVGKSFTIECRVPTVEPLDSLTLFLFRGNETLHYETFGKAAPAPQEATATFNSTADREDGHRNFSCLAVLDLMSRGGNIFHKHSAPKMLE

SEQ ID NO: 6690 - protein, 216 aa, Homo Sapiens
MSSFGYRTLTVALFTLICCPGSDEKVFEVHVRPKKLAVEPKGSLEVNCSTTCNQPEVGGLETSLDKILLDEQAQWKHYLVSNISHDTVLQCHFTCSGKQESMNSNVSVYQPPRQVILTLQPTLVAVGKSFTIECRVPTVEPLDSLTLFLFRGNETLHYETFGKAAPAPQEATATFNSTADREDGHRNFSCLAVLDLMSRGGNIFHKHSAPKMLEIY

SEQ ID NO: 6691 - protein, 275 aa, Homo Sapiens
MSSFGYRTLTVALFTLICCPGSDEKVFEVHVRPKKLAVEPKGSLEVNCSTTCNQPEVGGLETSLDKILLDEQAQWKHYLVSNISHDTVLQCHFTCSGKQESMNSNVSVYQPPRQVILTLQPTLVAVGKSFTIECRVPTVEPLDSLTLFLFRGNETLHYETFGKAAPAPQEATATFNSTADREDGHRNFSCLAVLDLMSRGGNIFHKHSAPKMLEIYEPVSDSQMVIIVTVVSVLLSLFVTSVLLCFIFGQHLRQQRMGTYGVRAAWRRLPQAFRP

SEQ ID NO: 6692 - protein, 275 aa, Homo Sapiens; identical to SEQ ID NO: 6691

SEQ ID NO: 6693 - protein, 275 aa, Homo Sapiens; identical to SEQ ID NO: 6691

SEQ ID NO: 6694 - protein, 275 aa, Homo Sapiens; identical to SEQ ID NO: 6691

SEQ ID NO: 6695 - protein, 275 aa, Homo Sapiens; identical to SEQ ID NO: 6691

SEQ ID NO: 6696 - protein, 53 aa, Homo Sapiens
MSSFGYRTLTVALFTLICCPGVNEFQRQRVPASKAGHPDTATHFGGCGQVLHH

SEQ ID NO: 6697 - protein, 271 aa, Homo Sapiens
MGSLFPLSLLFFLAAAYPGVGSALGRRTKRAQSPKGSPLAPSGTSVPFWVRMSPEFVAVQPGKSVQLNCSNSCPQPQNSSLRTPLRQGKTLRGPGWVSYQLLDVRAWSSLAHCLVTCAGKTRWATSRITAYKPPHSVILEPPVLKGRKYTLRCHVTQVFPVGYLVVTLRHGSRVIYSESLERFTGLDLANVTLTYEFAAGPRDFWQPVICHARLNLDGLVVRNSSAPITLMLAWSPAPTALASGSIAALVGILLTVGAAYLCKCLAMKSQA

SEQ ID NO: 6698 - protein, 237 aa, Homo Sapiens
MGSLFPLSLLFFLAAAYPGVGSALGRRTKRAQSPKGSPLAPSGTSVPFWVRMSPEFVAVQPGKSVQLNCSNSCPQPQNSSLRTPLRQGKTLRGPGWVSYQLLDVRAWSSLAHCLVTCAGKTRWATSRITAYKPPHSVILEPPVLKGRKYTLRCHVTQVFPVGYLVVTLRHGSRVIYSESLERFTGLDLANVTLTYEFAAGPRDFWQPVICHARLNLDGLVVRNSSAPITLMLGEAPL

SEQ ID NO: 6699 - protein, 272 aa, Homo Sapiens
MGSLFPLSLLFFLAAAYPGVGSALGRRTKRAQSPKGSPLAPSGTSVPFWVRMSPEFVAVQPGKSVQLNCSNSCPQPQNSSLRTPLRQGKTLRGPGWVSYQLLDVRAWSSLAHCLVTCAGKTRWATSRITAYSVPGGLLGGDPEAWKPGHLFRKPGALHRPGSGQRDLDLRVCCWTPRLLAARDLPRAPQSRRPGGPQQLGTHYTDARLEPRAHSFGLRFHRCPCRDPPHCGRCVPMQVPSYEVPGVKGDVLCRLSEKKRNMKQSGEMAIHGG

SEQ ID NO: 6700 - protein, 155 aa, Homo Sapiens
MKVASGSTATAAAGPSCALKAGKTASGAGEVVRCLSEQSVAISRCAGGAGARLPALLDEQQVNVLLYDMNGCYSRLKELVPTLPQNRKVSKVEILQHVIDYIRDLQLELNSESEVGTPGGRGLPVRAPLSTLNGEISALTAEAACVPADDRILCR

SEQ ID NO: 6701 - protein, 149 aa, Homo Sapiens
MKVASGSTATAAAGPSCALKAGKTASGAGEVVRCLSEQSVAISRCAGGAGARLPALLDEQQVNVLLYDMNGCYSRLKELVPTLPQNRKVSKVEILQHVIDYIRDLQLELNSESEVGTPGGRGLPVRAPLSTLNGEISALTAEVRSRSDH

SEQ ID NO: 6702 - protein, 257 aa, Homo Sapiens
EFIIRGGRVPSHCLHFSRSFQKKTYSKMNNPAIKRIGNHITKSPEDKREYRGLELANGIKVLLISDPTTDKSSAALDVHIGSLSDPPNIAGLSHFCEHMLFLGTKKYPKENEYSQFLSEHAGSSNAFTSGEHTNYYFDVSHEHLEGALDRFAQFFLCPLFDESCKDREVNAVDSEHEKNVMNDAWRLFQLEKATGNPKHPFSKFGTGNKYTLETRPNQEGIDVRQELLKFHSAYYSSNLMAVCVLGRESLDDLTNLV

SEQ ID NO: 6703 - protein, 1019 aa, Homo Sapiens [sequence omitted]

SEQ ID NO: 6704 - protein, 61 aa, Homo Sapiens
MRYRLAWLLHPALPSTFRSVLGARLPPPERLCGNYQVVFQSSGTILHFHQQCVKIPISLYP

SEQ ID NO: 6705 - protein, 464 aa, Homo Sapiens
MSKLWFKQDDKFFLPKACLNFEFFSPFAYVDPLHCNMAYLYLELLKDSLNEYAYAAELAGLSYDLQNTIYGMYLSVKGYNDKQPILLKKIIEKMATFEIDEKRFEIIKEAYMRSLNNFRAEQPHQHAMYYLRLLMTEVAWTKDELKEALDDVTLPRLKAFIPQLLSRLHIEALLHGNITKQAALGIMQMVEDTLIEHAHTKPLLPSQLVRYREVQLPDRGWFVYQQRNEVHNNCGIEIYYQTDMQSTSENMFLELFCQIISEPCFNTLRTKEQLGYIVFSGPRRANGIQGLRFIIQSEKPPHYLESRVEAFLITMEKSIEDMTEEAFQKHIQALAIRRLDKPKKLSAECAKYWGEIISQQYNFDRDNTEVAYLKTLTKEDIIKFYKEMLAVDAPRRHKVSVHVLAREMDSCPVVGEFPCQNDINLSQAPALPQPEVIQNMTEFKRGLPLFPLVKPHINFMAAKL

SEQ ID NO: 6706 - protein, 106 aa, Homo Sapiens
MAAPGALLVMGTLTLSPRLEYSGVISAHCNLCLLSSSDCHASASGVTGVTGVHHHTQLSFVFLVETGFCHVGRASPELLASSDPPASASQSAGIIGVSQGLNLTWS

SEQ ID NO: 6707 - protein, 187 aa, Homo Sapiens
MAAPGALLVMGVSGSGKSTVGALLASELGWKFYDADDYHPEENRRKMGKGIPLNDQDRIPWLCNLHDILLRDVASGQRVVLACSALKKTYRDILTQGKDGVALKCEESGKEAKQAEMQLLVVHLSGSFEVISGRLLKREGHFMPPELLQSQFETLEPPAAPENFIQISVDKNVSEIIATIMETLKMK

SEQ ID NO: 6708 - protein, 90 aa, Homo Sapiens
MAAPGALLVMGVSGSGKSTVGALLASELGWKFYDADDYHPEENRRKMGKGIPLNDQRCSLGTACGSSLFSPEENVQRHINTRKRWCSSEV

SEQ ID NO: 6709 - protein, 59 aa, Homo Sapiens
MAAPGALLVMGVSGSGNWDGNSMMLMIITRRKIEGRWEKAYRSMTRTGFHGSVTCMTFY

SEQ ID NO: 6710 - protein, 90 aa, Homo Sapiens
MGKGIPLNDQDRIPWLCNLHDILLRDVASGQRVVLACSALKKTYRDILTQGKDGVALKCEESGKEAKQAEMQLLVVHLSGSFEVISGRLL

SEQ ID NO: 6711 - protein, 141 aa, Homo Sapiens
MGKGIPLNDQDRIPWLCNLHDILLRDVASGQRVVLACSALKKTYRDILTQGKDGVALKCEESGKEAKQAEMQLLVVHLSGSFEVISGRLLKREGHFMPPELLQSQFETLEPPAAPENFIQISVDKNVSEIIATIMETLKMK

SEQ ID NO: 6712 - protein, 86 aa, Homo Sapiens
MPPPRTGRGLLWLGLVLSSVCVALGSETQANSTTDALNVLLIIVDDLRPSLGCYGDKLVRSPNIDQLASHSLLFQNAFAQQAVCAP

SEQ ID NO: 6713 - protein, 550 aa, Homo Sapiens
MPPPRTGRGLLWLGLVLSSVCVALGSETQANSTTDALNVLLIIVDDLRPSLGCYGDKLVRSPNIDQLASHSLLFQNAFAQQAVCAPSRVSFLTGRRPDTTRLYDFNSYWRVHAGNFSTIPQYFKENGYVTMSVGKVFHPGISSNHTDDSPYSWSFPPYHPSSEKYENTKTCRGPDGELHANLLCPVDVLDVPEGTLPDKQSTEQAIQLLEKMKTSASPFFLAVGYHKPHIPFRYPKEFQKLYPLENITLAPDPEVPDGLPPVAYNPWMDIRQREDVQALNISVPYGPIPVDFQRKIRQSYFASVSYLDTQVGRLLSALDDLQLANSTIIAFTSDHGWALGEHGEWAKYSNFDVATHVPLIFYVPGRTASLPEAGEKLFPYLDPFDSASQLMEPGRQSMDLVELVSLFPTLAGLAGLQVPPRCPVPSFHVELCREGKNLLKHFRFRDLEEDPYLPGNPRELIAYSQYPRPSDIPQWNSDKPSLKDIKIMGYSIRTIDYRYTVWVGFNPDEFLANFSDIHAGELYFVDSDPLQDHNMYNDSQGGDLFQLLMP

SEQ ID NO: 6714 - protein, 343 aa, Homo Sapiens
MPPPRTGRGLLWLGLVLSSVCVALGSETQANSTTDALNVLLIIVDDLRPSLGCYGDKLVRSPNIDQLASHSLLFQNAFAQQAVCAPSRVSFLTGRRPDTTRLYDFNSYWRVHAGNFSTIPQYFKENGYVTMSVGKVFHPGISSNHTDDSPYSWSFPPYHPSSEKYENTKTCRGPDGELHANLLCPVDVLDVPEGTLPDKQSTEQAIQLLEKMKTSASPFFLAVGYHKPHIPFRYPKEFQKLYPLENITLAPDPEVPDGLPPVAYNPWMDIRQREDVQALNISVPYGPIPVDFQRKIRQSYFASVSYLDTQVGRLLSALDDLQLANSTIIAFTSDHGFLMRTNT

SEQ ID NO: 6715 - protein, 312 aa, Homo Sapiens
MPPPRTGRGLLWLGLVLSSVCVALGSETQANSTTDALNVLLIIVDDLRPSLGCYGDKLVRSPNIDQLASHSLLFQNAFAQQAVCAPSRVSFLTGRRPDTTRLYDFNSYWRVHAGNFSTIPQYFKENGYVTMSVGKVFHPGISSNHTDDSPYSWSFPPYHPSSEKYENTKTCRGPDGELHANLLCPVDVLDVPEGTLPDKQSTEQAIQLLEKMKTSASPFFLAVGYHKPHIPFRYPKEFQKLYPLENITLAPDPEVPDGLPPVAYNPWMDIRQREDVQALNISVPYGPIPVDFQEDQSSTGFRLKTSSTRKYK

SEQ ID NO: 6716 - protein, 179 aa, Homo Sapiens
MPPPRTGRGLLWLGLVLSSVCVALGSETQANSTTDALNVLLIIVDDLRPSLGCYGDKLVRSPNIDQLASHSLLFQNAFAQQAVCAPSRVSFLTGRRPDTTRLYDFNSYWRVHAGNFSTIPQYFKENGYVTMSVGKVFHPGTAPCPESGFSWFVVSESSIPILGMGLSLQSPLLAGRVPR

SEQ ID NO: 6717 - protein, 106 aa, Homo Sapiens
RSPNIDQLASHSLLFQNAFAQQAVCAPSRVSFLTGRRPDTTRLYDFNSYWRVHAGNFSTIPQYFKENGYVTMSVGKVFHPALVGTHFSAESLFSRPFSVSIGPASR

SEQ ID NO: 6718 - protein, 232 aa, Homo Sapiens
LAHPGPGIGAGPSPGSAGPSPLPGMDGRWALLDPESIVRGSTGRGLSYNFTHLDGYLDLLRENQLLPGFELMGSASGHFTDFEDKQQVFEWKDLVSSLARRYIGRYGLAHVSKWNFETWNEPDHHDFDNVSMTMQGFLNYYDACSEGLRAASPALRLGGPGDSFHTPPRSPLSWGLLRHCHDGTNFFTGEAGVRLDYISLHRKGARSSISILEQEKVVAQQIRQLFPKFADT

SEQ ID NO: 6719 - protein, 176 aa, Homo Sapiens
MCLPSECHSHWTQVQASLSPAAPCPPPWLPRGSTGRGLSYNFTHLDGYLDLLRENQLLPGFELMGSASGHFTDFEDKQQVFEWKDLVSSLARRYIGRYGLAHVSKWNFETWNEPDHHDFDNVSMTMQGFLNYYDACSEGLRAASPALRLGGPGDSFHTPPRSPLSWGLLRHCHDGT

SEQ ID NO: 6720 - protein, 521 aa, Homo Sapiens
MGSASGHFTDFEDKQQVFEWKDLVSSLARRYIGRYGLAHVSKWNFETWNEPDHHDFDNVSMTMQGFLNYYDACSEGLRAASPALRLGGPGDSFHTPPRSPLSWGLLRHCHDGTNFFTGEAGVRLDYISLHRKGARSSISILEQEKVVAQQIRQLFPKFADTPIYNDEADPLVGWSLPQPWRADVTYAAMVVKVIAQHQNLLLANTTSAFPYALLSNDNAFLSYHPHPFAQRTLTARFQVNNTRPPHVQLLRKPVLTAMGLLALLDEEQLWAEVSQAGTVLDSNHTVGVLASAHRPQGPADAWRAAVLIYASDDTRAHPNRSVAVTLRLRGVPPGPGLVYVTRYLDNGLCSPDGEWRRLGRPVFPTAEQFRRMRAAEDPVAAAPRPLPAGGRLTLRPALRLPSLLLVHVCARPEKPPGQVTRLRALPLTQGQLVLVWSDEHVGSKCLWTYEIQFSQDGKAYTPVSRKPSTFNLFVFSPDTGAVSGSYRVRALDYWARPGPFSDPVPYLEVPVPRGPPSPGNP

SEQ ID NO: 6721 - protein, 653 aa, Homo Sapiens
MRPLRPRAALLALLASLLAAPPVAPAEAPHLVHVDAARALWPLRRFWRSTGFCPPLPHSQADQYVLSWDQQLNLAYVGAVPHRGIKQVRTHWLLELVTTRGSTGRGLSYNFTHLDGYLDLLRENQLLPGFELMGSASGHFTDFEDKQQVFEWKDLVSSLARRYIGRYGLAHVSKWNFETWNEPDHHDFDNVSMTMQGFLNYYDACSEGLRAASPALRLGGPGDSFHTPPRSPLSWGLLRHCHDGTNFFTGEAGVRLDYISLHRKGARSSISILEQEKVVAQQIRQLFPKFADTPIYNDEADPLVGWSLPQPWRADVTYAAMVVKVIAQHQNLLLANTTSAFPYALLSNDNAFLSYHPHPFAQRTLTARFQVNNTRPPHVQLLRKPVLTAMGLLALLDEEQLWAEVSQAGTVLDSNHTVGVLASAHRPQGPADAWRAAVLIYASDDTRAHPNRSVAVTLRLRGVPPGPGLVYVTRYLDNGLCSPDGEWRRLGRPVFPTAEQFRRMRAAEDPVAAAPRPLPAGGRLTLRPALRLPSLLLVHVCARPEKPPGQVTRLRALPLTQGQLVLVWSDEHVGSKCLWTYEIQFSQDGKAYTPVSRKPSTFNLFVFSPDTGAVSGSYRVRALDYWARPGPFSDPVPYLEVPVPRGPPSPGNP

SEQ ID NO: 6722 - protein, 224 aa, Homo Sapiens
MRPLRPRAALLALLASLLAAPPVAPAEAPHLVHVDAARALWPLRRFWRSTGFWGSTGRGLSYNFTHLDGYLDLLRENQLLPGFELMGSASGHFTDFEDKQQVFEWKDLVSSLARRYIGRYGLAHVSKWNFETWNEPDHHDFDNVSMTMQGFLNYYDACSEGLRAASPALRLGGPGDSFHTPPRSPLSWGLLRHCHDGTNFFTGEAGVRLDYISLHRKGARSSIS

SEQ ID NO: 6723 - protein, 196 aa, Homo Sapiens
  misc_feature (1)..(1): Xaa can be any naturally occurring amino acid
XVPCAPAPRCWRSWPRSWPRPRWPRPRPRTWCMWTRPARCGPCGASGGAQASAPRCHTARLTSTSSAGTSSSTSPMWAPSLTAASSRGSTGRGLSYNFTHLDGYLDLLRENQLLPGFELMGSASGHFTDFEDKQQVFEWKDLVSSLARRYIGRYGLAHVSKWNFETWNEPDHHDFDNVSMTMQGFLNYYDACSEGL

SEQ ID NO: 6724 - protein, 105 aa, Homo Sapiens
MGFTGAGIAASSIAAKMMSAAAIANGGGVSAGSLVATLQSVGAAGLSTSSNILLASVGSVLGACLGNSPSSSLPAEPEAKEDEARENVPQGEPPKPPLKSEKHEE

SEQ ID NO: 6725 - protein, 130 aa, Homo Sapiens
MMKRAAAAAVGGALAVGAVPVVLSAMGFTGAGIAASSIAAKMMSAAAIANGGGVSAGSLVATLQSVGAAGLSTSSNILLASVGSVLGACLGNSPSSSLPAEPEAKEDEARENVPQGEPPKPPLKSEKHEE

SEQ ID NO: 6726 - protein, 105 aa, Homo Sapiens
MTLSPLLLFLPPLLLLLDVPTAAVQASPLQALDFFGNGPPVNYKTGNLYLRGPLKKSNAPLVNVTLYYEALCGGCRAFLIRELFPTWLLVMEILNVTLVPYGNAQ

SEQ ID NO: 6727 - protein, 250 aa, Homo Sapiens
MTLSPLLLFLPPLLLLLDVPTAAVQASPLQALDFFGNGPPVNYKTGNLYLRGPLKKSNAPLVNVTLYYEALCGGCRAFLIRELFPTWLLVMEILNVTLVPYGNAQEQNVSGRWEFKCQHGEEECKFNKVEACVLDELDMELAFLTIVCMEEFEDMERSLPLCLQLYAPGLSPDTIMECAMGDRGMQLMHANAQRTDALQPPHEYVPWVTVNGKPLEDQTQLLTLVCQLYQGKKPDVCPSSTSSLRSVCFK

SEQ ID NO: 6728 - protein, 189 aa, Homo Sapiens
MASPFALLMVLVVLSCKSSCSLGCDLPETHSLDNRRTLMLLAQMSRISPSSCLMDRHDFGFPQEEFDGNQFQKAPAISVLHELIQQIFNLFTTKDSSAAWDEDLLDKFCTELYQQLNDLEACVMQEERVGETPLMNADSILAVKKYFRRITLYLTEKKYSPCAWEVVRAEIMRSLSLSTNLQERLRRKE

SEQ ID NO: 6729 - protein, 189 aa, Homo Sapiens
MALSFSLLMAVLVLSYKSICSLGCDLPQTHSLGNRRALILLGQMGRISPFSCLKDRHDFRIPQEEFDGNQFQKAQAISVLHEMIQQTFNLFSTEDSSAAWEQSLLEKFSTELYQQLNDLEACVIQEVGVEETPLMNEDSILAVRKYFQRITLYLIERKYSPCAWEVVRAEIMRSLSFSTNLQKRLRRKD

SEQ ID NO: 6730 - protein, 189 aa, Homo Sapiens
MASPFALLMALVVLSCKSSCSLGCDLPETHSLDNRRTLMLLAQMSRISPSSCLMDRHDFGFPQEEFDGNQFQKAPAISVLHELIQQIFNLFTTKDSSAAWDEDLLDKFCTELYQQLNDLEACVMQEERVGETPLMNADSILAVKKYFRRITLYLTEKKYSPCAWEVVRAEIMRSLSLSTNLQERLRRKE

SEQ ID NO: 6731 - protein, 190 aa, Homo Sapiens
MMASPFALLMALVVLSCKSSCSLGCDLPETHSLDNRRTLMLLAQMSRISPSSCLMDRHDFGFPQEEFDGNQFQKAPAISVLHELIQQIFNLFTTKDSSAAWDEDLLDKFCTELYQQLNDLEACVMQEERVGETPLMNADSILAVKKYFRRITLYLTEKKYSPCAWEVVRAEIMRSLSLSTNLQERLRRKE

SEQ ID NO: 6732 - protein, 189 aa, Homo Sapiens
MALPFALMMALVVLSCKSSCSLGCNLSQTHSLNNRRTLMLMAQMRRISPFSCLKDRHDFEFPQEEFDGNQFQKAQAISVLHEMMQQTFNLFSTKNSSAAWDETLLEKFYIELFQQMNDLEACVIQEVGVEETPLMNEDSILAVKKYFQRITLYLMEKKYSPCAWEVVRAEIMRSLSFSTNLQKRLRRKD

SEQ ID NO: 6733 - protein, 189 aa, Homo Sapiens
MALSFSLLMAVLVLSYKSICSLGCDLPQTHSLGNRRALILLAQMGRISHFSCLKDRYDFGFPQEVFDGNQFQKAQAISAFHEMIQQTFNLFSTKDSSAAWDETLLDKFYIELFQQLNDLEACVTQEVGVEEIALMNEDSILAVRKYFQRITLYLMGKKYSPCAWEVVRAEIMRSFSFSTNLQKGLRRKD

SEQ ID NO: 6734 - protein, 189 aa, Homo Sapiens
MALSFSLLMAVLVLSYKSICSLGCDLPQTHSLGNRRALILLAQMGRISPFSCLKDRHDFGLPQEEFDGNQFQKTQAISVLHEMIQQTFNLFSTEDSSAAWEQSLLEKFSTELYQQLNNLEACVIQEVGMEETPLMNEDSILAVRKYFQRITLYLTEKKYSPCAWEVVRAEIMRSLSFSTNLQKILRRKD

SEQ ID NO: 6735 - protein, 188 aa, Homo Sapiens
MALTFALLVALLVLSCKSSCSVGCDLPQTHSLGSRRTLMLLAQMRRISLFSCLKDRHDFGFPQEEFGNQFQKAETIPVLHEMIQQIFNLFSTKDSSAAWDETLLDKFYTELYQQLNDLEACVIQGVGVTETPLMKEDSILAVRKYFQRITLYLKEKKYSPCAWEVVRAEIMRSFSLSTNLQESLRSKE

SEQ ID NO: 6736 - protein, 189 aa, Homo Sapiens
MALSFSLLMAVLVLSYKSICSLGCDLPQTHSLGNRRALILLAQMGRISPFSCLKDRHDFGFPQEEFDGNQFQKAQAISVLHEMIQQTFNLFSTKDSSATWEQSLLEKFSTELNQQLNDLEACVIQEVGVEETPLMNVDSILAVKKYFQRITLYLTEKKYSPCAWEVVRAEIMRSFSLSKIFQERLRRKE

SEQ ID NO: 6737 - protein, 189 aa, Homo Sapiens
MALSFSLLMAVLVLSYKSICSLGCDLPQTHSLGNRRALILLAQMGRISHFSCLKDRHDFGFPEEEFDGHQFQKAQAISVLHEMIQQTFNLFSTEDSSAAWEQSLLEKFSTELYQQLNDLEACVIQEVGVEETPLMNEDSILAVRKYFQRITLYLTEKKYSPCAWEVVRAEIMRSLSFSTNLQKRLRRKD

SEQ ID NO: 6738 - protein, 189 aa, Homo Sapiens
MALPFVLLMALVVLNCKSICSLGCDLPQTHSLSNRRTLMIMAQMGRISPFSCLKDRHDFGFPQEEFDGNQFQKAQAISVLHEMIQQTFNLFSTKDSSATWDETLLDKFYTELYQQLNDLEACMMQEVGVEDTPLMNVDSILTVRKYFQRITLYLTEKKYSPCAWEVVRAEIMRSFSLSANLQERLRRKE

SEQ ID NO: 6739 - protein, 189 aa, Homo Sapiens
MALPFALLMALVVLSCKSSCSLDCDLPQTHSLGHRRTMMLLAQMRRISLFSCLKDRHDFRFPQEEFDGNQFQKAEAISVLHEVIQQTFNLFSTKDSSVAWDERLLDKLYTELYQQLNDLEACVMQEVWVGGTPLMNEDSILAVRKYFQRITLYLTEKKYSPCAWEVVRAEIMRSFSSSRNLQERLRRKE

SEQ ID NO: 6740 - protein, 190 aa, Homo Sapiens
TMALPFALLMALVVLSCKSSCSLDCDLPQTHSLGHRRTMMLLAQMRRISLFSCLKDRHDFRFPQEEFDGNQFQKAEAISVLHEVIQQTFNLFSTKDSSVAWDERLLDKLYTELYQQLNDLEACVMQEVWVGGTPLMNEDSILAVRKYFQRITLYLTEKKYSPCAWEVVRAEIMRSFSSSRNLQERLRRKE

SEQ ID NO: 6741 - protein, 189 aa, Homo Sapiens
MARSFSLLMVVLVLSYKSICSLGCDLPQTHSLRNRRALILLAQMGRISPFSCLKDRHEFRFPEEEFDGHQFQKTQAISVLHEMIQQTFNLFSTEDSSAAWEQSLLEKFSTELYQQLNDLEACVIQEVGVEETPLMNEDFILAVRKYFQRITLYLMEKKYSPCAWEVVRAEIMRSFSFSTNLKKGLRRKD

SEQ ID NO: 6742 - protein, 189 aa, Homo Sapiens
MALTFYLLVALVVLSYKSFSSLGCDLPQTHSLGNRRALILLAQMRRISPFSCLKDRHDFEFPQEEFDDKQFQKAQAISVLHEMIQQTFNLFSTKDSSAALDETLLDEFYIELDQQLNDLESCVMQEVGVIESPLMYEDSILAVRKYFQRITLYLTEKKYSSCAWEVVRAEIMRSFSLSINLQKRLKSKE

SEQ ID NO: 6743 - protein, 557 aa, Homo Sapiens
MMVVLLGATTLVLVAVAPWVLSAAAGGKNLKSPQKVEVDIIDDNFILRWNRSDESVGNVTFSFDYQKTGMDNWIKLSGCQNITSTKCNFSSLKLNVYEEIKLRIRAEKENTSSWYEVDSFTPFRKAQIGPPEVHLEAEDKAIVIHISPGTKDSVMWALDGLSFTYSLVIWKNSSGVEERIENIYSRHKIYKLSPETTYCLKVKAALLTSWKIGVYSPVHCIKTTVENELPPPENIEVSVQNQNYVLKWDYTYANMTFQVQWLHAFLKRNPGNHLYKWKQIPDCENVKTTQCVFPQNVFQKGIYLLRVQASDGNNTSFWSEEIKFDTEIQAFLLPPVFNIRSLSDSFHIYIGAPKQSGNTPVIQDYPLIYEIIFWENTSNAERKIIEKKTDVTVPNLKPLTVYCVKARAHTMDEKLNKSSVFSDAVCEKTKPGNTSKIWLIVGICIALFALPFVIYAAKVFLRCINYVFFPSLKPSSSIDEYFSEQPLKNLLLSTSEEQIEKCFIIENISTIATVEETNQTDEDHKKYSSQTSQDSGNYSNEDESESKTSEELQQDFV

SEQ ID NO: 6744 - protein, 136 aa, Homo Sapiens
MMVVLLGATTLVLVAVAPWVLSAAAGGKNLKSPQKVEVDIIDDNFILRWNRSDESVGNVTFSFDYQKTGMDNWIKLSGCQNITSTKCNFSSLKLNVYEEIKLRIRAEKENTSSWYEVDSFTPFRKVENELPPPENI

SEQ ID NO: 6745 - protein, 187 aa, Homo Sapiens
MTNKCLLQIALLLCFSTTALSMSYNLLGFLQRSSNFQCQKLLWQLNGRLEYCLKDRMNFDIPEEIKQLQQFQKEDAALTIYEMLQNIFAIFRQDSSSTGWNETIVENLLANVYHQINHLKTVLEEKLEKEDFTRGKLMSSLHLKRYYGRILHYLKAKEYSHCAWTIVRVEILRNFYFINRLTGYLRN

SEQ ID NO: 6746 - protein, 208 aa, Homo Sapiens
MIIKHFFGTVLVLLASTTIFSLDLKLIIFQQRQVNQESLKLLNKLQTLSIQQCLPHRKNFLLPQKSLSPQQYQKGHTLAILHEMLQQIFSLFRANISLDGWEENHTEKFLIQLHQQLEYLEALMGLEAEKLSGTLGSDNLRLQVKMYFRRIHDYLENQDYSTCAWAIVQVEISRCLFFVFSLTEKLSKQGRPLNDMKQELTTEFRSPR

SEQ ID NO: 6747 - protein, 166 aa, Homo Sapiens
MKYTSYILAFQLCIVLGSLGCYCQDPYVKEAENLKKYFNAGHSDVADNGTLFLGILKNWKEESDRKIMQSQIVSFYFKLFKNFKDDQSIQKSVETIKEDMNVKFFNSNKKKRDDFEKLTNYSVTDLNVQRKAIHELIQVMAELSPAAKTGKRKRSQMLFRGRRASQ

SEQ ID NO: 6748 - protein, 30 aa, Homo Sapiens
LLPLVMQGVSRAEMGTADLGPSSVLSTDVF

SEQ ID NO: 6749 - protein, 210 aa, Homo Sapiens
MALLFLLPLVMQGVSRAEMGTADLGPSSVPTPTNVTIESYNMNPIVYWEYQIMPQVPVFTVEVKNYGVKARVGQKESAYAKSEEFAVCRDGKIGPPKLDIRKEEKQIMIDIFHPSVFVNGDEQEVDYDPETTCYIRVYNVYVRMNGSEIQYKILTQKEDDCDEIQCQLAIPVSSLNSQYCVSAEGVLHVWGVTTEKSKEVCITIFNSSIK

SEQ ID NO: 6750 - protein, 489 aa, Homo Sapiens
MALLFLLPLVMQGVSRAEMGTADLGPSSVPTPTNVTIESYNMNPIVYWEYQIMPQVPVFTVEVKNYGVKNSEWIDACINISHHYCNISDHVGDPSNSLWVRVKARVGQKESAYAKSEEFAVCRDGKIGPPKLDIRKEEKQIMIDIFHPSVFVNGDEQEVDYDPETTCYIRVYNVYVRMNGSEIQYKILTQKEDDCDEIQCQLAIPVSSLNSQYCVSAEGVLHVWGVTTEKSKEVCITIFNSSIKGSLWIPVVAALLLFLVLSLVFICFYIKKINPLKEKSIILPKSLISVVRSATLETKPESKYVSLITSYQPFSLEKEVVCEEPLSPATVPGMHTEDNPGKVEHTEELSSITEVVTTEENIPDVVPGSHLTPIERESSSPLSSNQSEPGSIALNSYHSRNCSESDHSRNGFDTDSSCLESHSSLSDSEFPPNNKGEIKTEGQELITVIKAPTSFGYDKPHVLVDLLVDDSGKESLIGYRPTEDSKEFS

SEQ ID NO: 6751 - protein, 470 aa, Homo Sapiens
MCGSIVQSLVPTPTNVTIESYNMNPIVYWEYQIMPQVPVFTVEVKNYGVKNSEWIDACINISHHYCNISDHVGDPSNSLWVRVKARVGQKESAYAKSEEFAVCRDGKIGPPKLDIRKEEKQIMIDIFHPSVFVNGDEQEVDYDPETTCYIRVYNVYVRMNGSEIQYKILTQKEDDCDEIQCQLAIPVSSLNSQYCVSAEGVLHVWGVTTEKSKEVCITIFNSSIKGSLWIPVVAALLLFLVLSLVFICFYIKKINPLKEKSIILPKSLISVVRSATLETKPESKYVSLITSYQPFSLEKEVVCEEPLSPATVPGMHTEDNPGKVEHTEELSSITEVVTTEENIPDVVPGSHLTPIERESSSPLSSNQSEPGSIALNSYHSRNCSESDHSRNGFDTDSSCLESHSSLSDSEFPPNNKGEIKTEGQELITVIKAPTSFGYDKPHVLVDLLVDDSGKESLIGYRPTEDSKEFS

SEQ ID NO: 6752 - protein, 161 aa, Homo Sapiens
MLLKSPENSLLQFQFKYGVPTPTNVTIESYNMNPIVYWEYQIMPQVPVFTVEVKNYGVKNSEWIDACINISHHYCNISDHVGDPSNSLWVRVKARVGQKESAYAKSEEFAVCRDGKIGPPKLDIRKEEKQIMIDIFHPSVFVNGDEQEVDYDPETTCYIRV

SEQ ID NO: 6753 - protein, 479 aa, Homo Sapiens
MLLKSPENSLLQFQFKYGVPTPTNVTIESYNMNPIVYWEYQIMPQVPVFTVEVKNYGVKNSEWIDACINISHHYCNISDHVGDPSNSLWVRVKARVGQKESAYAKSEEFAVCRDGKIGPPKLDIRKEEKQIMIDIFHPSVFVNGDEQEVDYDPETTCYIRVYNVYVRMNGSEIQYKILTQKEDDCDEIQCQLAIPVSSLNSQYCVSAEGVLHVWGVTTEKSKEVCITIFNSSIKGSLWIPVVAALLLFLVLSLVFICFYIKKINPLKEKSIILPKSLISVVRSATLETKPESKYVSLITSYQPFSLEKEVVCEEPLSPATVPGMHTEDNPGKVEHTEELSSITEVVTTEENIPDVVPGSHLTPIERESSSPLSSNQSEPGSIALNSYHSRNCSESDHSRNGFDTDSSCLESHSSLSDSEFPPNNKGEIKTEGQELITVIKAPTSFGYDKPHVLVDLLVDDSGKESLIGYRPTEDSKEFS

SEQ ID NO: 6754 - protein, 479 aa, Homo Sapiens; identical to SEQ ID NO: 6753

SEQ ID NO: 6755 - protein, 448 aa, Homo Sapiens
MNPIVYWEYQIMPQVPVFTVEVKNYGVKNSEWIDACINISHHYCNISDHVGDPSNSLWVRVKARVGQKESAYAKSEEFAVCRDGKIGPPKLDIRKEEKQIMIDIFHPSVFVNGDEQEVDYDPETTCYIRVYNVYVRMNGSEIQYKILTQKEDDCDEIQCQLAIPVSSLNSQYCVSAEGVLHVWGVTTEKSKEVCITIFNSSIKGSLWIPVVAALLLFLVLSLVFICFYIKKINPLKEKSIILPKSLISVVRSATLETKPESKYVSLITSYQPFSLEKEVVCEEPLSPATVPGMHTEDNPGKVEHTEELSSITEVVTTEENIPDVVPGSHLTPIERESSSPLSSNQSEPGSIALNSYHSRNCSESDHSRNGFDTDSSCLESHSSLSDSEFPPNNKGEIKTEGQELITVIKAPTSFGYDKPHVLVDLLVDDSGKESLIGYRPTEDSKEFS

SEQ ID NO: 6756 - protein, 448 aa, Homo Sapiens; identical to SEQ ID NO: 6755

SEQ ID NO: 6757 - protein, 448 aa, Homo Sapiens; identical to SEQ ID NO: 6755

SEQ ID NO: 6758 - protein, 27 aa, Homo Sapiens
  misc_feature (1)..(1): Xaa can be any naturally occurring amino acid
XLLPLVMQGVSRAEMGTADLGPSSDVF

SEQ ID NO: 6759 - protein, 200 aa, Homo Sapiens
MAAAWTVVLVTLVLGLAVAGPVPTSKPTTTGKGCHIGRFKSLSPQELASFKKARDALEESLKLKNWSCSSPVFPGNWDLRLLQVRERPVALEAELALTLKVLEAAAGPALEDVLDQPLHTLHHILSQLQACIQPQPTAGPRPRGRLHHWLHRLQEAPKKESAGCLEASVTFNLFRLLTRDLKYVADGNLCLRTSTHPEST

SEQ ID NO: 6760 - protein, 200 aa, Homo Sapiens
MKLDMTGDCTPVLVLMAAVLTVTGAVPVARLHGALPDARGCHIAQFKSLSPQELQAFKRAKDALEESLLLKDCRCHSRLFPRTWDLRQLQVRERPMALEAELALTLKVLEATADTDPALVDVLDQPLHTLHHILSQFRACIQPQPTAGPRTRGRLHHWLYRLQEAPKKESPGCLEASVTFNLFRLLTRDLNCVASGDLCV

SEQ ID NO: 6761 - protein, 200 aa, Homo Sapiens
MKLDMTGDCMPVLVLMAAVLTVTGAVPVARLRGALPDARGCHIAQFKSLSPQELQAFKRAKDALEESLLLKDCKCRSRLFPRTWDLRQLQVRERPVALEAELALTLKVLEATADTDPALGDVLDQPLHTLHHILSQLRACIQPQPTAGPRTRGRLHHWLHRLQEAPKKESPGCLEASVTFNLFRLLTRDLNCVASGDLCV

SEQ ID NO: 6762 - protein, 196 aa, Homo Sapiens
MTGDCMPVLVLMAAVLTVTGAVPVARLRGALPDARGCHIAQFKSLSPQELQAFKRAKDALEESLLLKDCKCRSRLFPRTWDLRQLQVRERPVALEAELALTLKVLEATADTDPALGDVLDQPLHTLHHILSQLRACIQPQPTAGPRTRGRLHHWLHRLQEAPKKESPGCLEASVTFNLFRLLTRDLNCVASGDLCV

SEQ ID NO: 6763 - protein, 520 aa, Homo Sapiens
MAGPERWGPLLLCLLQAAPGRPRLAPPQNVTLLSQNFSVYLTWLPGLGNPQDVTYFVAYQSSPTRRRWREVEECAGTKELLCSMMCLKKQDLYNKFKGRVRTVSPSSKSPWVESEYLDYLFEVEPAPPVLVLTQTEEILSANATYQLPPCMPPLDLKYEVAFWKEGAGNKTLFPVTPHGQPVQITLQPAASEHHCLSARTIYTFSVPKYSKFSKPTCFLLEVPEANWAFLVLPSLLILLLVIAAGGVIWKTLMGNPWFQRAKMPRALDFSGHTHPVATFQPSRPESVNDLFLCPQKELTRGVRPTPRVRAPATQQTRWKKDLAEDEEEEDEEDTEDGVSFQPYIEPPSFLGQEHQAPGHSEAGGVDSGRPRAPLVPSEGSSAWDSSDRSWASTVDSSWDRAGSSGYLAEKGPGQGPGGDGHQESLPPPEFSKDSGFLEELPEDNLSSWATWGTLPPEPNLVPGGPPVSLQTLTFCWESSPEEEEEARESEIEDSDAGSWGAESTQRTEDRGRTLGHYMAR

SEQ ID NO: 6764 - protein, 491 aa, Homo Sapiens
MAGPERWGPLLLCLLQAAPGRPRLAPPQNVTLLSQNFSVYLTWLPGLGNPQDVTYFVAYQSSPTRRRWREVEECAGTKELLCSMMCLKKQDLYNKFKGRVRTVSPSSKSPWVESEYLDYLFEVEPAPPVLVLTQTEEILSANATYQLPPCMPPLDLKYEVAFWKEGAGNKTLFPVTPHGQPVQITLQPAASEHHCLSARTIYTFSVPKYSKFSKPTCFLLEVPEANWAFLVLPSLLILLLVIAAGGVIWKTLMGNPWFQRAKMPRALELTRGVRPTPRVRAPATQQTRWKKDLAEDEEEEDEEDTEDGVSFQPYIEPPSFLGQEHQAPGHSEAGGVDSGRPRAPLVPSEGSSAWDSSDRSWASTVDSSWDRAGSSGYLAEKGPGQGPGGDGHQESLPPPEFSKDSGFLEELPEDNLSSWATWGTLPPEPNLVPGGPPVSLQTLTFCWESSPEEEEEARESEIEDSDAGSWGAESTQRTEDRGRTLGHYMAR

SEQ ID NO: 6765 - protein, 244 aa, Homo Sapiens
MAGPERWGPLLLCLLQAAPGRPRLAPPQNVTLLSQNFSVYLTWLPGLGNPQDVTYFVAYQSSPTRRRWREVEECAGTKELLCSMMCLKKQDLYNKFKGRVRTVSPSSKSPWVESEYLDYLFEVEPAPPVLVLTQTEEILSANATYQLPPCMPPLDLKYEVAFWKEGAGNKTLFPVTPHGQPVQITLQPAASEHHCLSARTIYTFSVPKYSKFSKPTCFLLEVPGLFWTHTPCGNLSAQQTRVRE

SEQ ID NO: 6766 - protein, 211 aa, Homo Sapiens
MAGPERWGPLLLCLLQAAPGRPRLAPPQNVTLLSQNFSVYLTWLPGLGNPQDVTYFVAYQSSPTRRRWREVEECAGTKELLCSMMCLKKQDLYNKFKGRVRTVSPSSKSPWVESEYLDYLFEVEPAPPVLVLTQTEEILSANATYQLPPCMPPLDLKYEVAFWKEGAGNKVGSSFPAPRLGPLLHPFLLRFFSPSQPAPAPLLQEVFPVHS

SEQ ID NO: 6767 - protein, 185 aa, Homo Sapiens
MMCLKKQDLYNKFKGRVRTVSPSSKSPWVESEYLDYLFEVEPAPPVLVLTQTEEILSANATYQLPPCMPPLDLKYEVAFWKEGAGNKTLFPVTPHGQPVQITLQPAASEHHCLSARTIYTFSVPKYSKFSKPTCFLLEVPEANWAFLVLPSLLILLLVIAAGGVIWKTLMGNPWFQRAKMPRALV

SEQ ID NO: 6768 - protein, 195 aa, Homo Sapiens
MALLFPLLAALVMTSYSPVGSLGCDLPQNHGLLSRNTLVLLHQMRRISPFLCLKDRRDFRFPQEMVKGSQLQKAHVMSVLHEMLQQIFSLFHTERSSAAWNMTLLDQLHTGLHQQLQHLETCLLQVVGEGESAGAISSPALTLRRYFQGIRVYLKEKKYSDCAWEVVRMEIMKSLFLSTNMQERLRSKDRDLGSS

SEQ ID NO: 6769 - protein, 153 aa, Homo Sapiens
MGKISSLPTQLFKCCFCDFLKVKMHTMSSSHLFYLALCLLTFTSSATAGPETLCGAELVDALQFVCGDRGFYFNKPTGYGSSSRRAPQTGIVDECCFRSCDLRRLEMYCAPLKPAKSARSVRAQRHTDMPKTQKEVHLKNASRGSAGNKNYRM

SEQ ID NO: 6770 - protein, 153 aa, Homo Sapiens; identical to SEQ ID NO: 6769

SEQ ID NO: 6771 - protein, 158 aa, Homo Sapiens
MGKISSLPTQLFKCCFCDFLKVKMHTMSSSHLFYLALCLLTFTSSATAGPETLCGAELVDALQFVCGDRGFYFNKPTGYGSSSRRAPQTGIVDECCFRSCDLRRLEMYCAPLKPAKSARSVRAQRHTDMPKTQKYQPPSTNKNTKSQRRKGSTFEERK

SEQ ID NO: 6772 - protein, 158 aa, Homo Sapiens; identical to SEQ ID NO: 6771

SEQ ID NO: 6773 - protein, 195 aa, Homo Sapiens
MGKISSLPTQLFKCCFCDFLKVKMHTMSSSHLFYLALCLLTFTSSATAGPETLCGAELVDALQFVCGDRGFYFNKPTGYGSSSRRAPQTGIVDECCFRSCDLRRLEMYCAPLKPAKSARSVRAQRHTDMPKTQKYQPPSTNKNTKSQRRKGWPKTHPGGEQKEGTEASLQIRGKKKEQRREIGSRNAECRGKKGK

SEQ ID NO: 6774 - protein, 137 aa, Homo Sapiens
MITPTVKMHTMSSSHLFYLALCLLTFTSSATAGPETLCGAELVDALQFVCGDRGFYFNKPTGYGSSSRRAPQTGIVDECCFRSCDLRRLEMYCAPLKPAKSARSVRAQRHTDMPKTQKEVHLKNASRGSAGNKNYRM

SEQ ID NO: 6775 - protein, 183 aa, Homo Sapiens
MGIPMGKSMLVLLTFLAFASCCIAAYRPSETLCGGELVDTLQFVCGDRGFYFRLPGRPASRVSRRSRGIVEECCFRSCDLALLETYCATPAKSERDVSTPPTVLPDNFPRYPVGKFFQYDTWKQSTQRLRRGLPALLRARRGHVLAKELEAFREAKRHRPLIALPTQDPAHGGAPPEMASNRK

SEQ ID NO: 6776 - protein, 183 aa, Homo Sapiens; identical to SEQ ID NO: 6775

SEQ ID NO: 6777 - protein, 180 aa, Homo Sapiens
MGIPMGKSMLVLLTFLAFASCCIAAYRPSETLCGGELVDTLQFVCGDRGFYFSRPASRVSRRSRGIVEECCFRSCDLALLETYCATPAKSERDVSTPPTVLPDNFPRYPVGKFFQYDTWKQSTQRLRRGLPALLRARRGHVLAKELEAFREAKRHRPLIALPTQDPAHGGAPPEMASNRK

SEQ ID NO: 6778 - protein, 180 aa, Homo Sapiens; identical to SEQ ID NO: 6777

SEQ ID NO: 6779 - protein, 180 aa, Homo Sapiens; identical to SEQ ID NO: 6777

SEQ ID NO: 6780 - protein, 180 aa, Homo Sapiens; identical to SEQ ID NO: 6777

SEQ ID NO: 6781 - protein, 180 aa, Homo Sapiens; identical to SEQ ID NO: 6777

SEQ ID NO: 6782 - protein, 236 aa, Homo Sapiens
MVSPDPQIIVVAPETELASMQVQRTEDGVTIIQIFWVGRKGELLRRTPVSSAMQTPMGIPMGKSMLVLLTFLAFASCCIAAYRPSETLCGGELVDTLQFVCGDRGFYFSRPASRVSRRSRGIVEECCFRSCDLALLETYCATPAKSERDVSTPPTVLPDNFPRYPVGKFFQYDTWKQSTQRLRRGLPALLRARRGHVLAKELEAFREAKRHRPLIALPTQDPAHGGAPPEMASNRK

SEQ ID NO: 6783 - protein, 643 aa, Homo Sapiens
MALRKAGDLEPQFTPERRFRLCWYQAHSGRALLGPPPQASPPAGGLALALLLLSWVALGPRSLEGADPGTPGEAEGPACPAACVCSYDDDADELSVFCSSRNLTRLPDGVPGGTQALWLDGNNLSSVPPAAFQNLSSLGFLNLQGGQLGSLEPQALLGLENLCHLHLERNQLRSLALGTFAHTPALASLGLSNNRLSRLEDGLFEGLGSLWDLNLGWNSLAVLPDAAFRGLGSLRELVLAGNRLAYLQPALFSGLAELRELDLSRNALRAIKANVFVQLPRLQKLYLDRNLIAAVAPGAFLGLKALRWLDLSHNRVAGLLEDTFPGLLGLRVLRLSHNAIASLRPRTFKDLHFLEELQLGHNRIRQLAERSFEGLGQLEVLTLDHNQLQEVKAGAFLGLTNVAVMNLSGNCLRNLPEQVFRGLGKLHSLHLEGSCLGRIRPHTFTGLSGLRRLFLKDNGLVGIEEQSLWGLAELLELDLTSNQLTHLPHRLFQGLGKLEYLLLSRNRLAELPADALGPLQRAFWLDVSHNRLEALPNSLLAPLGRLRYLSLRNNSLRTFTPQPPGLERLWLEGNPWDCGCPLKALRDFALQNPSAVPRFVQAICEGDDCQPPAYTYNNITCASPPEVVGLDLRDLSEAHFAPC

SEQ ID NO: 6784 - protein, 605 aa, Homo Sapiens
MALRKGGLALALLLLSWVALGPRSLEGADPGTPGEAEGPACPAACVCSYDDDADELSVFCSSRNLTRLPDGVPGGTQALWLDGNNLSSVPPAAFQNLSSLGFLNLQGGQLGSLEPQALLGLENLCHLHLERNQLRSLALGTFAHTPALASLGLSNNRLSRLEDGLFEGLGSLWDLNLGWNSLAVLPDAAFRGLGSLRELVLAGNRLAYLQPALFSGLAELRELDLSRNALRAIKANVFVQLPRLQKLYLDRNLIAAVAPGAFLGLKALRWLDLSHNRVAGLLEDTFPGLLGLRVLRLSHNAIASLRPRTFKDLHFLEELQLGHNRIRQLAERSFEGLGQLEVLTLDHNQLQEVKAGAFLGLTNVAVMNLSGNCLRNLPEQVFRGLGKLHSLHLEGSCLGRIRPHTFTGLSGLRRLFLKDNGLVGIEEQSLWGLAELLELDLTSNQLTHLPHRLFQGLGKLEYLLLSRNRLAELPADALGPLQRAFWLDVSHNRLEALPNSLLAPLGRLRYLSLRNNSLRTFTPQPPGLERLWLEGNPWDCGCPLKALRDFALQNPSAVPRFVQAICEGDDCQPPAYTYNNITCASPPEVVGLDLRDLSEAHFAPC

SEQ ID NO: 6785 - protein, 131 aa, Homo Sapiens
MTVGRRLPTALHGACQEAWPWRCCCCPGWHWAPAAWREQTPERRGKPRAQRARPPVSAATMTTRMSSASSAAPGTSRACLMESRAAPKPCGWTATTSRPSPRQPSRTSPAWASSTCRAASWAAWSHRRCWA

SEQ ID NO: 6786 - protein, 216 aa, Homo Sapiens
MSEVPVARVWLVLLLLTVQVGVTAGAPWQCAPCSAEKLALCPPVSASCSEVTRSAGCGCCPMCALPLGAACGVATARCARGLSCRALPGEQQPLHALTRGQGACVQESDASAPHAAEAGSPESPESTEITEEELLDNFHLMAPSEEDHSILWDAISTYDGSKALHVTNIKKWKCETSMDGEAGLCWCVYPWNGKRIPGSPEIRGDPNCQIYFNVQN

SEQ ID NO: 6787 - protein, 259 aa, Homo Sapiens
MSEVPVARVWLVLLLLTVQVGVTAGAPWQCAPCSAEKLALCPPVSASCSEVTRSAGCGCCPMCALPLGAACGVATARCARGLSCRALPGEQQPLHALTRGQGACVQESDASAPHAAEAGSPESPESTEITEEELLDNFHLMAPSEEDHSILWDAISTYDGSKALHVTNIKKWKEPCRIELYRVVESLAKAQETSGEEISKFYLPNCNKNGFYHSRQCETSMDGEAGLCWCVYPWNGKRIPGSPEIRGDPNCQIYFNVQN

SEQ ID NO: 6788 - protein, 257 aa, Homo Sapiens
MSEVPVARVWLVLLLLTVQVGVTAGAPWQCAPCSAEKLALCPPVSASCSEVTRSAGCGCCPMCALPLGAACGVATARCARGLSCRALPGEQQPLHALTRGQGACVQESDASAPHAAEAGSPESPESTEITEEELLDNFHLMAPSEEDHSILWDAISTYDGSKALHVTNIKKWKEPCRIELYRVVESLAKAQETSGEEISKFYLPNCNKNGFYHSRQTSMDGEAGLCWCVYPWNGKRIPGSPEIRGDPNCQIYFNVQN

SEQ ID NO: 6789 - protein, 98 aa, Homo Sapiens
KHHLGLEEPKKLRPPPARQLLAELASGACFVGLLSSLRASPAVCACRLPANRNWTRSWSGSPPCAFRMSGALWSTSTPCTSPTVTSMACTTSNSARCL

SEQ ID NO: 6790 - protein, 325 aa, Homo Sapiens
MLPRVGCPALPLPPPPLLPLLLLLLGASGGGGGARAEVLFRCPPCTPERLAACGPPPVAPPAAVAAVAGGARMPCAELVREPGCGCCSVCARLEGEACGVYTPRCGQGLRCYPHPGSELPLQALVMGEGTCEKRRDAEYGASPEQVADNGDDHSEGGLVENHVDSTMNMLGGGGSAGRKPLKSGMKELAVFREKVTEQHRQMGKGGKHHLGLEEPKKLRPPPARTPCQQELDQVLERISTMRLPDERGPLEHLYSLHIPNCDKHGLYNLKQCKMSLNGQRGECWCVNPNTGKLIQGAPTIRGDPECHLFYNEQQEARGVHTQRMQ

SEQ ID NO: 6791 - protein, 78 aa, Homo Sapiens
MNMLGGGGSAGRKPLKSGMKELAVFREKVTEQHRQMGKGGKHHLGLEEPKKLRPPPARTPCQQELDQVLERISTMRLP

SEQ ID NO: 6792 - protein, 181 aa, Homo Sapiens
MPCNNGDDHSEGGLVENHVDSTMNMLGGGGSAGRKPLKSGMKELAVFREKVTEQHRQMGKGGKHHLGLEEPKKLRPPPARTPCQQELDQVLERISTMRLPDERGPLEHLYSLHIPNCDKHGLYNLKQCKMSLNGQRGECWCVNPNTGKLIQGAPTIRGDPECHLFYNEQQEARGVHTQRMQ

SEQ ID NO: 6793 - protein, 194 aa, Homo Sapiens
MQRARPLQALLDGRGLCVNASAVSRLRAYLLPAPPAPGNASESEEDRSAGSVESPSVSSTHRVSDPKFHPLHSKIIIIKKGHAKDSQRYKVDYESQSTDTQNFSSESKRETEYGPCRREMEDTLNHLKFLNVLSPRGVHIPNCDKKGFYKKKQCRPSKGRKRGFCWCVDKYGQPLPGYTTKGKEDVHCYSMQSK

SEQ ID NO: 6794 - protein, 297 aa, Homo Sapiens
MQRARPTLWAAALTLLVLLRGPPVARAGASSAGLGPVVRCEPCDARALAQCAPPPAVCAELVREPGCGCCLTCALSEGQPCGIYTERCGSGLRCQPSPDEARPLQALLDGRGLCVNASAVSRLRAYLLPAPPAPGEPPAPGNASESEEDRSAGSVESPSVSSTHRVSDPKFHPLHSKIIIIKKGHAKDSQRYKVDYESQSTDTQNFSSESKRETEYGPCRREMEDTLNHLKFLNVLSPRGVHIPNCDKKGFYKKKQCRPSKGRKRGFCWCVDKYGQPLPGYTTKGKEDVHCYSMQSK

SEQ ID NO: 6795 - protein, 291 aa, Homo Sapiens
MQRARPTLWAAALTLLVLLRGPPVARAGASSAGLGPVVRCEPCDARALAQCAPPPAVCAELVREPGCGCCLTCALSEGQPCGIYTERCGSGLRCQPSPDEARPLQALLDGRGLCVNASAVSRLRAYLLPAPPAPGNASESEEDRSAGSVESPSVSSTHRVSDPKFHPLHSKIIIIKKGHAKDSQRYKVDYESQSTDTQNFSSESKRETEYGPCRREMEDTLNHLKFLNVLSPRGVHIPNCDKKGFYKKKQCRPSKGRKRGFCWCVDKYGQPLPGYTTKGKEDVHCYSMQSK

SEQ ID NO: 6796 - protein, 270 aa, Homo Sapiens
MQRARPTLWAAALTLLVRCEPCDARALAQCAPPPAVCAELVREPGCGCCLTCALSEGQPCGIYTERCGSGLRCQPSPDEARPLQALLDGRGLCVNASAVSRLRAYLLPAPPAPGNASESEEDRSAGSVESPSVSSTHRVSDPKFHPLHSKIIIIKKGHAKDSQRYKVDYESQSTDTQNFSSESKRETEYGPCRREMEDTLNHLKFLNVLSPRGVHIPNCDKKGFYKKKQCRPSKGRKRGFCWCVDKYGQPLPGYTTKGKEDVHCYSMQSK

SEQ ID NO: 6797 - protein, 263 aa, Homo Sapiens
MQRARPTLWAACEPCDARALAQCAPPPAVCAELVREPGCGCCLTCALSEGQPCGIYTERCGSGLRCQPSPDEARPLQALLDGRGLCVNASAVSRLRAYLLPAPPAPGNASESEEDRSAGSVESPSVSSTHRVSDPKFHPLHSKIIIIKKGHAKDSQRYKVDYESQSTDTQNFSSESKRETEYGPCRREMEDTLNHLKFLNVLSPRGVHIPNCDKKGFYKKKQCRPSKGRKRGFCWCVDKYGQPLPGYTTKGKEDVHCYSMQSK

SEQ ID NO: 6798 - protein, 132 aa, Homo Sapiens
MRSAVCQFPRHRLAAGRPHPESGRGNASESEEDRSAGSVESPSVSSTHRVSDPKFHPLHSKIIIIKKGHAKDSQRYKVDYESQSTDTQNFSSESKRETEYGPCRREMEDTLNHLKFLNVLSPRGVHIPNCDK

SEQ ID NO: 6799 - protein, 143 aa, Homo Sapiens
  misc_feature (1)..(1): Xaa can be any naturally occurring amino acid
XESPSVSSTHRVSDPKFHPLHSKIIIIKKGHAKDSQRYKVDYESQSTDTQNFSSESKRETEYGPCRREMEDTLNHLKFLNVLSPRGVHIPNCDKKGFYKKKQCRPSKGRKRGFCWCVDKYGQPLPGYTTKGKEDVHCYSMQSK

SEQ ID NO: 6800 - protein, 153 aa, Homo Sapiens
  misc_feature (1)..(1): Xaa can be any naturally occurring amino acid
XSEEDRSAGSVESPSVSSTHRVSDPKFHPLHSKIIIIKKGHAKDSQRYKVDYESQSTDTQNFSSESKRETEYGPCRREMEDTLNHLKFLNVLSPRGVHIPNCDKKGFYKKKQCRPSKGRKRGFCWCVDKYGQPLPGYTTKGKEDVHCYSMQSK

SEQ ID NO: 6801 - protein, 258 aa, Homo Sapiens
MLPLCLVAALLLAAGPGPSLGDEAIHCPPCSEEKLARCRPPVGCEELVREPGCGCCATCALGLGMPCGVYTPRCGSGLRCYPPRGVEKPLHTLMHGQGVCMELAEIEAIQESLQPSDKDEGDHPNNSFSPCSAHDRRCLQKHFAKIRDRSTSGGKMKVNGAPREDARPVPQGSCQSELHRALERLAASQSRTHEDLYIIPIPNCDRNGNFHPKQCHPALDGQRGKCWCVDRKTGVKLPGGLEPKGELDCHQLADSFRE

SEQ ID NO: 6802 - protein, 272 aa, Homo Sapiens
MVLLTAVLLLLAAYAGPAQSLGSFVHCEPCDEKALSMCPPSPLGCELVKEPGCGCCMTCALAEGQSCGVYTERCAQGLRCLPRQDEEKPLHALLHGRGVCLNEKSYREQVKIERDSREHEEPTTSEMAEETYSPKIFRPKHTRISELKAEAVKKDRRKKLTQSKFVGGAENTAHPRIISAPEMRQESEQGPCRRHMEASLQELKASPRMVPRAVYLPNCDRKGFYKRKQCKPSRGRKRGICWCVDKYGMKLPGMEYVDGDFQCHTFDSSNVE

SEQ ID NO: 6803 - protein, 233 aa, Homo Sapiens
MVLLTAVLLLLAAYAGPAQSLGSFVHCEPCDEKALSMCPPSPLGCELVKEPGCGCCMTCALAEGQSCGVYTERCAQGLRCLPRQDEEKPLHALLHGRGVCLNEKSYREQVKIGCAPGGQRHICFSLYYSPHPKLPSPGLWPCAPWPTGADPPAPSPAERDSREHEEPTTSEMAEETYSPKIFRPKHTRISELKAEAVKKDRRKKLTQSKFVGGAENTAHPRIISAPEMRQESE

SEQ ID NO: 6804 - protein, 238 aa, Homo Sapiens
MTPHRLLPPLLLLLALLLAASPGGALARCPGCGQGVQAGCPGGCVEEEDGGSPAEGCAEAEGCLRREGQECGVYTPNCAPGLQCHPPKDDEAPLRALLLGRGRCLPARAPAEENPKESKPQAGTARPQDVNRRDQQRNPGTSTTPSQPNSAGVQDTEMGPCRRHLDSVLQQLQTEVYRGAQTLYVPNCDHRGFYRKRQCRSSQGQRRGPCWCVDRMGKSLPGSPDGNGSSSCPTGSSG

SEQ ID NO: 6805 - protein, 240 aa, Homo Sapiens
MTPHRLLPPLLLLLALLLAASPGGALARCPGCGQGVQAGCPGGCVEEEDGGSPAEGCAEAEGCLRREGQECGVYTPNCAPGLQCHPPKDDEAPLRALLLGRGRCLPARAPAVAEENPKESKPQAGTARPQDVNRRDQQRNPGTSTTPSQPNSAGVQDTEMGPCRRHLDSVLQQLQTEVYRGAQTLYVPNCDHRGFYRKRQCRSSQGQRRGPCWCVDRMGKSLPGSPDGNGSSSCPTGSSG

SEQ ID NO: 6806 - protein, 136 aa, Homo Sapiens
MTPHRLLPPLLLLLALLLAASPGGALARCPGCGQGVQAGCPGGCVEEEDGGSPAEGCAEAEGCLRREGQECGVYTPNCAPGLQCHPPKDDEAPLRALLLGRGRCLPARAPAVLSSPRTLRKLSPEPGATCSCRGES

SEQ ID NO: 6807 - protein, 282 aa, Homo Sapiens
MERPSLRALLLGAAGLLLLLLPLSSSSSSDTCGPCEPASCPPLPPLGCLLGETRDACGCCPMCARGEGEPCGGGGAGRGYCAPGMECVKSRKRRKGKAGAAAGGPGVSGVCVCKSRYPVCGSDGTTYPSGCQLRAASQRAESRGEKAITQVSKGTCEQGPSIVTPPKDIWNVTGAQVYLSCEVIGIPTPVLIWNKVKRGHYGVQRTELLPGDRDNLAIQTRGGPEKHEVTGWVLVSPLSKEDAGEYECHASNSQGQASASAKITVVDALHEIPVKKGEGAEL

SEQ ID NO: 6808 - protein, 279 aa, Homo Sapiens
MERPSLRALLLGAAGLLLLLLPLSSSSSSDTCGPCEPASCPPLPPLGCLLGETRDACGCCPMCARGEGEPCGGGGAGRGYCAPGMECVKSRKRRKGKAGAAAGGPGVSGVCVCKSRYPVCGSDGTTYPSGCQLRAASQRAESRGEKAITQVSKGTCEQGPSIVTPPKDIWNVTGAQVYLSCEVIGIPTPVLIWNKVKRGHYGVQRTELLPGDRDNLAIQTRGGPEKHEVTGWVLVSPLSKEDAGEYECHASNSQGQASASAKITVVDALHEIPVKKGTQ

SEQ ID NO: 6809 - protein, 278 aa, Homo Sapiens
MPRLSLLLPLLLLLLLPLLPPLSPSLGIRDVGGRRPKCGPCRPEGCPAPAPCPAPGISALDECGCCARCLGAEGASCGGRAGGRCGPGLVCASQAAGAAPEGTGLCVCAQRGTVCGSDGRSYPSVCALRLRARHTPRAHPGHLHKARDGPCEFAPVVVVPPRSVHNVTGAQVGLSCEVRAVPTPVITWRKVTKSPEGTQALEELPGDHVNIAVQVRGGPSDHEATAWILINPLRKEDEGVYQCHAANMVGEAESHSTVTVLDLSKYRSFHFPAPDDRM

SEQ ID NO: 6810 - protein, 110 aa, Homo Sapiens
MAPRGCIVAVFAIFCISRLLCSHGAPVAPMTPYLMLCQPHKRCGDKFYDPLQHCCYDDAVVPLARTQTCGNCTFRVCFEQCCPWTFMVKLINQNCDSARTSDDRLCRSVS

SEQ ID NO: 6811 - protein, 130 aa, Homo Sapiens
MRFSVSGMRTDYPRSVLAPAYVSVCLLLLCPREVIAPAGSEPWLCQPAPRCGDKIYNPLEQCCYNDAIVSLSETRQCGPPCTFWPCFELCCLDSFGLTNDFVVKLKVQGVNSQCHSSPISSKCESRRRFP

SEQ ID NO: 6812 - protein, 119 aa, Homo Sapiens
MVPRIFAPAYVSVCLLLLCPREVIAPAGSEPWLCQPAPRCGDKIYNPLEQCCYNDAIVSLSETRQCGPPCTFWPCFELCCLDSFGLTNDFVVKLKVQGVNSQCHSSPISSKCESRRRFP

SEQ ID NO: 6813 - protein, 84 aa, Homo Sapiens
QPAPRCGDKIYNPLEQCCYNDAIVSLSETRQCGPPCTFWPCFELCCLDSFGLTNDFVVKLKVQGVNSQCHSSPISSKCERRRFP

SEQ ID NO: 6814 - protein, 125 aa, Homo Sapiens
MRPRCCILALVCWITVFLLQCSKGTTDAPVGSGLWLCQPTPRCGNKIYNPSEQCCYDDAILSLKETRRCGSTCTFWPCFELCCPESFGPQQKFLVKLRVLGMKSQCHLSPISRSCTRNRRHVLYP

SEQ ID NO: 6815 - protein, 16 aa, Homo Sapiens
MGPGRCLLTALLLLAL

SEQ ID NO: 6816 - protein, 132 aa, Homo Sapiens
MGPGRCLLTALLLLALAPPPEASQYCGRLEYWNPDNKCCSSCLQRFGPPPCPDYEFRENCGLNDHGDFVTPPFRKCSSGQCNPDGAELCSPCGGGAVTPTPAAGGGRTPWRCREAGPCQGALPPHTWKPRRP

SEQ ID NO: 6817 - protein, 138 aa, Homo Sapiens
MGPGRCLLTALLLLALAPPPEASQYCGRLEYWNPDNKCCSSCLQRFGPPPCPDYEFRENCGLNDHGDFVTPPFRKCSSGQCNPDGAELCSPCGGGAVTPTPAAGGGRTPWRCRERPVPAKGHCPLTPGNPGAPSSQER

SEQ ID NO: 6818 - protein, 355 aa, Homo Sapiens
MGPGRCLLTALLLLALAPPPEASQYCGRLEYWNPDNKCCSSCLQRFGPPPCPDYEFRENCGLNDHGDFVTPPFRKCSSGQCNPDGAELCSPCGGGAVTPTPAAGGGRTPWRCRERPVPAKGHCPLTPGNPGAPSSQERSSPASSIAWRTPEPVPQQAWPNFLPLVVLVLLLTLAVIAILLFILLWHLCWPKEKADPYPYPGLVCGVPNTHTPSSSHLSSPGALETGDTWKEASLLPLLSRELSSLASQPLSRLLDELEVLEELIVLLDPEPGPGGGMAHGTTRHLAARYGLPAAWSTFAYSLRPSRSPLRALIEMVVAREPSASLGQLGTHLAQLGRADALRVLSKLGSSGVCWA

SEQ ID NO: 6819 - protein, 355 aa, Homo Sapiens; identical to SEQ ID NO: 6818

SEQ ID NO: 6820 - protein, 167 aa, Homo Sapiens
MGPGRCLLTALLLLALAPPPEASQYCGRLEYWNPDNKCCSSCLQRFGPPPCPELSSLASQPLSRLLDELEVLEELIVLLDPEPGPGGGMAHGTTRHLAARYGLPAAWSTFAYSLRPSRSPLRALIEMVVAREPSASLGQLGTHLAQLGRADALRVLSKLGSSGVCWA

SEQ ID NO: 6821 - protein, 187 aa, Homo Sapiens
MGPGRCLLTALLLLALAPPPEASQYCGRLEYWNPDNKCCSSCLQRFGPPPCPGALETGDTWKEASLLPLLSRELSSLASQPLSRLLDELEVLEELIVLLDPEPGPGGGMAHGTTRHLAARYGLPAAWSTFAYSLRPSRSPLRALIEMVVAREPSASLGQLGTHLAQLGRADALRVLSKLGSSGVCWA

SEQ ID NO: 6822 - protein, 60 aa, Homo Sapiens
  misc_feature (1)..(1): Xaa can be any naturally occurring amino acid
XGRLEYWNPDNKCCSSCLQRFGPPPCPGENPRPSLAWAELAEAGPCQGALPPHTWKPRRP

SEQ ID NO: 6823 - protein, 74 aa, Homo Sapiens
  misc_feature (1)..(1): Xaa can be any naturally occurring amino acid
XNCGLNDHGDFVTPPFRKCSSGQCNPDGAELCSPCGGGAVTPTPAAGGGRTPWRCREAPWRQGTHGRRPHYFHS

SEQ ID NO: 6824 - protein, 53 aa, Homo Sapiens
MCSYYHMKKRSVSGCNITIFAVMFSHLSAGKSPCGNQANVLCISRLEFVQYQS

SEQ ID NO: 6825 - protein, 336 aa, Homo Sapiens
MPPPAPGARLRLLAAAALAGLAVISRGLLSQSLEFNSPADNYTVCEGDNATLSCFIDEHVTRVAWLNRSNILYAGNDRWTSDPRVRLLINTPEEFSILITEVGLGDEGLYTCSFQTRHQPYTTQVYLIVHVPARIVNISSPVTVNEGGNVNLLCLAVGRPEPTVTWRQLRDGFTSEGEILEISDIQRGQAGEYECVTHNGVNSAPDSRRVLVTVNYPPTITDVTSARTALGRAALLRCEAMAVPPADFQWYKDDRLLSSGTAEGLKVQTERTRSMLLFANVSARHYGNYTCRAANRLGASSASMRLLRPGSLENSAPRPPGLLALLSALGWLWWRM

SEQ ID NO: 6826 - protein, 1327 aa, Homo Sapiens
MTLDRPGEGATMLKTFTVLLFCILMDPQPELWIESNYPQAPWENITLWCRSPSRISSKFLLLKDKTQMTWIRPSHKTFQVSFLIGALTESNAGLYRCCYWKETGWSKPSKVLELEAPGQLPKPIFWIQAETPALPGCNVNILCHGWLQDLVFMLFKEGYAEPVDYQVPTGTMAIFSIDNLTPEDEGVYICRTHIQMLPTLWSEPSNPLKLVVAGLYPKPTLTAHPGPIMAPGESLNLRCQGPIYGMTFALMRVEDLEKSFYHKKTIKNEANFFFQSLKIQDTGHYLCFYYDASYRGSLLSDVLKIWVTDTFPKTWLLARPSAVVQMGQNVSLRCRGPVDGVGLALYKKGEDKPLQFLDATSIDDNTSFFLNNVTYSDTGIYSCHYLLTWKTSIRMPSHNTVELMVVDKPPKPSLSAWPSTVFKLGKAITLQCRVSHPVLEFSLEWEERETFQKFSVNGDFIISNVDGKGTGTYSCSYRVETHPNIWSHRSEPLKLMGPAGYLTWNYVLNEAIRLSLIMQLVALLLVVLWIRWKCRRLRIREAWLLGTAQGVTMLFIVTALLCCGLCNGVLIEETEIVMPTPKPELWAETNFPLAPWKNLTLWCRSPSGSTKEFVLLKDGTGWIATRPASEQVRAAFPLGALTQSHTGSYHCHSWEEMAVSEPSEALELVGTDILPKPVISASPTIRGQELQLRCKGWLAGMGFALYKEGEQEPVQQLGAVGREAFFTIQRMEDKDEGNYSCRTHTEKRPFKWSEPSEPLELVIKEMYPKPFFKTWASPVVTPGARVTFNCSTPHQHMSFILYKDGSEIASSDRSWASPGASAAHFLIISVGIGDGGNYSCRYYDFSIWSEPSDPVELVVTEFYPKPTLLAQPGPVVFPGKSVILRCQGTFQGMRFALLQEGAHVPLQFRSVSGNSADFLLHTVGAEDSGNYSCIYYETTMSNRGSYLSMPLMIWVTDTFPKPWLFAEPSSVVPMGQNVTLWCRGPVHGVGYILHKEGEATSMQLWGSTSNDGAFPITNISGTSMGRYSCCYHPDWTSSIKIQPSNTLELLVTGLLPKPSLLAQPGPMVAPGENMTLQCQGELPDSTFVLLKEGAQEPLEQQRPSGYRADFWMPAVRGEDSGIYSCVYYLDSTPFAASNHSDSLEIWVTDKPPKPSLSAWPSTMFKLGKDITLQCRGPLPGVEFVLEHDGEEAPQQFSEDGDFVINNVEGKGIGNYSCSYRLQAYPDIWSEPSDPLELVGAAGPVAQECTVGNIVRSSLIVVVVVALGVVLAIEWKKWPRLRTRGSETDGRDQTIALEECNQEGEPGTPANSPSSTSQRISVELPVPI

SEQ ID NO: 6827 - protein, 1327 aa, Homo Sapiens; identical to SEQ ID NO: 6826

SEQ ID NO: 6828 - protein, 242 aa, Homo Sapiens
MTLDRPGEGATMLKTFTVLLFCIRMSLGMTSIVMDPQPELWIESNYPQAPWENITLWCRSPSRISSKFLLLKDKTQMTWIRPSHKTFQVSFLIGALTESNAGLYRCCYWKETGWSKPSKVLELEAPGQLPKPIFWIQAETPALPGCNVNILCHGWLQDLVFMLFKEGYAEPVDYQVPTGTMAIFSIDNLTPEDEGVYICRTHIQMLPTLWSEPSNPLKLVVAGGCGYGCWHLAIVVPGIMAG

SEQ ID NO: 6829 - protein, 242 aa, Homo Sapiens; identical to SEQ ID NO: 6828

SEQ ID NO: 6830 - protein, 1341 aa, Homo Sapiens
MTLDRPGEGATMLKTFTVLLFCIRMSLGMTSIVMDPQPELWIESNYPQAPWENITLWCRSPSRISSKFLLLKDKTQMTWIRPSHKTFQVSFLIGALTESNAGLYRCCYWKETGWSKPSKVLELEAPGQLPKPIFWIQAETPALPGCNVNILCHGWLQDLVFMLFKEGYAEPVDYQVPTGTMAIFSIDNLTPEDEGVYICRTHIQMLPTLWSEPSNPLKLVVAGLYPKPTLTAHPGPIMAPGESLNLRCQGPIYGMTFALMRVEDLEKSFYHKKTIKNEANFFFQSLKIQDTGHYLCFYYDASYRGSLLSDVLKIWVTDTFPKTWLLARPSAVVQMGQNVSLRCRGPVDGVGLALYKKGEDKPLQFLDATSIDDNTSFFLNNVTYSDTGIYSCHYLLTWKTSIRMPSHNTVELMVVDKPPKPSLSAWPSTVFKLGKAITLQCRVSHPVLEFSLEWEERETFQKFSVNGDFIISNVDGKGTGTYSCSYRVETHPNIWSHRSEPLKLMGPAGYLTWNYVLNEAIRLSLIMQLVALLLVVLWIRWKCRRLRIREAWLLGTAQGVTMLFIVTALLCCAISFAGLCNGVLIEETEIVMPTPKPELWAETNFPLAPWKNLTLWCRSPSGSTKEFVLLKDGTGWIATRPASEQVRAAFPLGALTQSHTGSYHCHSWEEMAVSEPSEALELVGTDILPKPVISASPTIRGQELQLRCKGWLAGMGFALYKEGEQEPVQQLGAVGREAFFTIQRMEDKDEGNYSCRTHTEKRPFKWSEPSEPLELVIKEMYPKPFFKTWASPVVTPGARVTFNCSTPHQHMSFILYKDGSEIASSDRSWASPGASAAHFLIISVGIGDGGNYSCRYYDFSIWSEPSDPVELVVTEFYPKPTLLAQPGPVVFPGKSVILRCQGTFQGMRFALLQEGAHVPLQFRSVSGNSADFLLHTVGAEDSGNYSCIYYETTMSNRGSYLSMPLMIWVTDTFPKPWLFAEPSSVVPMGQNVTLWCRGPVHGVGYILHKEGEATSMQLWGSTSNDGAFPITNISGTSMGRYSCCYHPDWTSSIKIQPSNTLELLVTGLLPKPSLLAQPGPMVAPGENMTLQCQGELPDSTFVLLKEGAQEPLEQQRPSGYRADFWMPAVRGEDSGIYSCVYYLDSTPFAASNHSDSLEIWVTDKPPKPSLSAWPSTMFKLGKDITLQCRGPLPGVEFVLEHDGEEAPQQFSEDGDFVINNVEGKGIGNYSCSYRLQAYPDIWSEPSDPLELVGAAGPVAQECTVGNIVRSSLIVVVVVALGVVLAIEWKKWPRLRTRGSETDGRDQTIALEECNQEGEPGTPANSPSSTSQRISVELPVPI

SEQ ID NO: 6831 - protein, 1336 aa, Homo Sapiens
MTLDRPGEGATMLKTFTVLLFCIRMSLGMTSIVMDPQPELWIESNYPQAPWENITLWCRSPSRISSKFLLLKDKTQMTWIRPSHKTFQVSFLIGALTESNAGLYRCCYWKETGWSKPSKVLELEAPGQLPKPIFWIQAETPALPGCNVNILCHGWLQDLVFMLFKEGYAEPVDYQVPTGTMAIFSIDNLTPEDEGVYICRTHIQMLPTLWSEPSNPLKLVVAGLYPKPTLTAHPGPIMAPGESLNLRCQGPIYGMTFALMRVEDLEKSFYHKKTIKNEANFFFQSLKIQDTGHYLCFYYDASYRGSLLSDVLKIWVTDTFPKTWLLARPSAVVQMGQNVSLRCRGPVDGVGLALYKKGEDKPLQFLDATSIDDNTSFFLNNVTYSDTGIYSCHYLLTWKTSIRMPSHNTVELMVVDKPPKPSLSAWPSTVFKLGKAITLQCRVSHPVLEFSLEWEERETFQKFSVNGDFIISNVDGKGTGTYSCSYRVETHPNIWSHRSEPLKLMGPAGYLTWNYVLNEAIRLSLIMQLVALLLVVLWIRWKCRRLRIREAWLLGTAQGVTMLFIVTALLCCGLCNGVLIEETEIVMPTPKPELWAETNFPLAPWKNLTLWCRSPSGSTKEFVLLKDGTGWIATRPASEQVRAAFPLGALTQSHTGSYHCHSWEEMAVSEPSEALELVGTDILPKPVISASPTIRGQELQLRCKGWLAGMGFALYKEGEQEPVQQLGAVGREAFFTIQRMEDKDEGNYSCRTHTEKRPFKWSEPSEPLELVIKEMYPKPFFKTWASPVVTPGARVTFNCSTPHQHMSFILYKDGSEIASSDRSWASPGASAAHFLIISVGIGDGGNYSCRYYDFSIWSEPSDPVELVVTEFYPKPTLLAQPGPVVFPGKSVILRCQGTFQGMRFALLQEGAHVPLQFRSVSGNSADFLLHTVGAEDSGNYSCIYYETTMSNRGSYLSMPLMIWVTDTFPKPWLFAEPSSVVPMGQNVTLWCRGPVHGVGYILHKEGEATSMQLWGSTSNDGAFPITNISGTSMGRYSCCYHPDWTSSIKIQPSNTLELLVTGLLPKPSLLAQPGPMVAPGENMTLQCQGELPDSTFVLLKEGAQEPLEQQRPSGYRADFWMPAVRGEDSGIYSCVYYLDSTPFAASNHSDSLEIWVTDKPPKPSLSAWPSTMFKLGKDITLQCRGPLPGVEFVLEHDGEEAPQQFSEDGDFVINNVEGKGIGNYSCSYRLQAYPDIWSEPSDPLELVGAAGPVAQECTVGNIVRSSLIVVVVVALGVVLAIEWKKWPRLRTRGSETDGRDQTIALEECNQEGEPGTPANSPSSTSQRISVELPVPI

SEQ ID NO: 6832 - protein, 2623 aa, Homo Sapiens
MKVKGRGITCLLVSFAVICLVATPGGKACPRRCACYMPTEVHCTFRYLTSIPDSIPPNVERINLGYNSLVRLMETDFSGLTKLELLMLHSNGIHTIPDKTFSDLQALQVLKMSYNKVRKLQKDTFYGLRSLTRLHMDHNNIEFINPEVFYGLNFLRLVHLEGNQLTKLHPDTFVSLSYLQIFKISFIKFLYLSDNFLTSLPQEMVSYMPDLDSLYLHGNPWTCDCHLKWLSDWIQEKPDVIKCKKDRSPSSAQQCPLCMNPRTSKGKPLAMVSAAAFQCAKPTIDSSLKSKSLTILEDSSSAFISPQGFMAPFGSLTLNMTDQSGNEANMVCSIQKPSRTSPIAFTEENDYIVLNTSFSTFLVCNIDYGHIQPVWQILALYSDSPLILERSHLLSETPQLYYKYKQVAPKPEDIFTNIEADLRADPSWLMQDQISLQLNRTATTFSTLQIQYSSDAQITLPRAEMRPVKHKWTMISRDNNTKLEHTVLVGGTVGLNCPGQGDPTPHVDWLLADGSKVRAPYVSEDGRILIDKSGKLELQMADSFDTGVYHCISSNYDDADILTYRITVVEPLVEAYQENGIHHTVFIGETLDLPCHSTGIPDASISWVIPGNNVLYQSSRDKKVLNNGTLRILQVTPKDQGYYRCVAANPSGVDFLIFQVSVKMKGQRPLEHDGETEGSGLDESNPIAHLKEPPGAQLRTSALMEAEVGKHTSSTSKRHNYRELTLQRRGDSTHRRFRENRRHFPPSARRIDPQHWAALLEKAKKNAMPDKRENTTVSPPPVVTQLPNIPGEEDDSSGMLALHEEFMVPATKALNLPARTVTADSRTISDSPMTNINYGTEFSPVVNSQILPPEEPTDFKLSTAIKTTAMSKNINPTMSSQIQGTTNQHSSTVFPLLLGATEFQDSDQMGRGREHFQSRPPITVRTMIKDVNVKMLSSTTNKLLLESVNTTNSHQTSVREVSEPRHNHFYSHTTQILSTSTFPSDPHTAAHSQFPIPRNSTVNIPLFRRFGRQRKIGGRGRIISPYRTPVLRRHRYSIFRSTTRGSSEKSTTAFSATVLNVTCLSCLPRERLTTATAALSFPSAAPITFPKADIARVPSEESTTLVQNPLLLLENKPSVEKTTPTIKYFRTEISQVTPTGAVMTYAPTSIPMEKTHKVNASYPRVSSTNEAKRDSVITSSLSGAITKPPMTIIAITRFSRRKIPWQQNFVNNHNPKGRLRNQHKVSLQKSTAVMLPKTSPALPRDKVSPFHFTTLSTSVMQIPSNTLTTAHHTTTKTHNPGSLPTKKELPFPPLNPMLPSIISKDSSTKSIISTQTAIPATTPTFPASVITYETQTERSRAQTIQREQEPQKKNRTDPNISPDQSSGFTTPTAMTPPVLTTAETSVKPSVSAFTHSPPENTTGISSTISFHSRTLNLTDVIEELAQASTQTLKSTIASETTLSSKSHQSTTTRKAIIRHSTIPPFLSSSATLMPVPISPPFTQRAVTDNVATPISGLMTNTVVKLHESSRHNAKPQQLVAEVATSPKVHPNAKFTIGTTHFIYSNLLHSTPMPALTTVKSQNSKLTPSPWAENQFWHKPYSEIAEKGKKPEVSMLATTGLSEATTLVSDWDGQKNTKKSDFDKKPVQEATTSKLLPFDSLSRYIFEKPRIVGGKAASFTIPANSDAFLPCEAVGNPLPTIHWTRVPSGLDLSKRKQNSRVQVLPNGTLSIQRVEIQDRGQYLCSASNLFGTDHLHVTLSVVSYPPRILERRTKEITVHSGSTVELKCRAEGRPSPTVTWILANQTVVSESSQGSRQAVVTVDGTLVLHNLSIYDRGFYKCVASNPGGQDSLLVKIQVIAAPPVILEQRRQVIVGTWGESLKLPCTAKGTPQPSVYWVLSDGTEVKPLQFTNSKLFLFSNGTLYIRNLASSDRGTYECIATSSTGSERRVVMLTMEERVTSPRIEAASQKRTEVNFGDKLLLNCSATGEPKPQIMWRLPSKAVVDQQHRVGSWIHVYPNGSLFIGSVTEKDSGVYLCVARNKMGDDLILMHVSLRLKPAKIDHKQYFRKQVLHGKDFQVDCKASGSPVPEISWSLPDGTMINNAMQADDSGHRTRRYTLFNNGTLYFNKVGVAEEGDYTCYAQNTLGKDEMKVHLTVITAAPRIRQSNKTNKRIKAGDTAVLDCEVTGDPKPKIFWLLPSNDMISFSIDRYTFHANGSLTINKVKLLDSGEYVCVARNPSGDDTKMYKLDVVSKPPLINGLYTNRTVIKATAVRHSKKHFDCRAEGTPSPEVMWIMPDNIFLTAPYYGSRITVHKNGTLEIRNVRLSDSADFICVARNEGGESVLVVQLEVLEMLRRPTFRNPFNEKIVAQLGKSTALNCSVDGNPPPEIIWILPNGTRFSNGPQSYQYLIASNGSFIISKTTREDAGKYRCAARNKVGYIEKLVILEIGQKPVILTYAPGTVKGISGESLSLHCVSDGIPKPNIKWTMPSGYVVDRPQINGKYILHDNGTLVIKEATAYDRGNYICKAQNSVGHTLITVPVMIVAYPPRITNRPPRSIVTRTGAAFQLHCVALGVPKPEITWEMPDHSLLSTASKERTHGSEQLHLQGTLVIQNPQTSDSGIYKCTAKNPLGSDYAATYIQVI

SEQ ID NO: 6833 - protein, 86 aa, Homo Sapiens
TMEERVTSPRIEAASQKRTEVNFGDKLLLNCSATGEPKPQIMWRLPSKAVVDQQHRILDFYFSEAEAMPCSCCNHKTEYPAYYCQV

SEQ ID NO: 6834 - protein, 406 aa, Homo Sapiens
MSLVELLLWWNCFSRTGVAASLEVSESPGSIQVARGQPAVLPCTFTTSAALINLNVIWMVTPLSNANQPEQVILYQGGQMFDGAPRFHGRVGFTGTMPATNVSIFINNTQLSDTGTYQCLVNNLPDIGGRNIGVTGLTVLVPPSAPHCQIQGSQDIGSDVILLCSSEEGIPRPTYLWEKLDNTLKLPPTATQDQVQGTVTIRNISALSSAQPRNIGLIAGAIGTGAVIIIFCIALILGAFFYWRSKNKEEEEEEIPNEIREDDLPPKCSSAKAFHTEISSSDNNTLTSSNAYNSRYWSNNPKVHRNTESVSHFSDLGQSFSFHSGNANIPSIYANGTHLVPGQHKTLVVTANRGSSPQVMSRSNGSVSRKPRPPHTHSYTISHATLERIGAVPVMVPAQSRAGSLV

SEQ ID NO: 6835 - protein, 430 aa, Homo Sapiens
MSLVELLLWWNCFSRTGVAASLEVSESPGSIQVARGQPAVLPCTFTTSAALINLNVIWMVTPLSNANQPEQVILYQGGQMFDGAPRFHGRVGFTGTMPATNVSIFINNTQLSDTGTYQCLVNNLPDIGGRNIGVTGLTVLVPPSAPHCQIQGSQDIGSDVILLCSSEEGIPRPTYLWEKLDNTLKLPPTATQDQVQGTVTIRNISALSSGLYQCVASNAIGTSTCLLDLQVISPQPRNIGLIAGAIGTGAVIIIFCIALILGAFFYWRSKNKEEEEEEIPNEIREDDLPPKCSSAKAFHTEISSSDNNTLTSSNAYNSRYWSNNPKVHRNTESVSHFSDLGQSFSFHSGNANIPSIYANGTHLVPGQHKTLVVTANRGSSPQVMSRSNGSVSRKPRPPHTHSYTISHATLERIGAVPVMVPAQSRAGSLV

SEQ ID NO: 6836 - protein, 430 aa, Homo Sapiens; identical to SEQ ID NO: 6835

SEQ ID NO: 6837 - protein, 407 aa, Homo Sapiens
MTSQRSPLAPLLLLSLHGVAASLEVSESPGSIQVARGQPAVLPCTFTTSAALINLNVIWMVTPLSNANQPEQVILYQGGQMFDGAPRFHGRVGFTGTMPATNVSIFINNTQLSDTGTYQCLVNNLPDIGGRNIGVTGLTVLVPPSAPHCQIQGSQDIGSDVILLCSSEEGIPRPTYLWEKLDNTLKLPPTATQDQVQGTVTIRNISALSSAQPRNIGLIAGAIGTGAVIIIFCIALILGAFFYWRSKNKEEEEEEIPNEIREDDLPPKCSSAKAFHTEISSSDNNTLTSSNAYNSRYWSNNPKVHRNTESVSHFSDLGQSFSFHSGNANIPSIYANGTHLVPGQHKTLVVTANRGSSPQVMSRSNGSVSRKPRPPHTHSYTISHATLERIGAVPVMVPAQSRAGSLV

SEQ ID NO: 6838 - protein, 431 aa, Homo Sapiens
MTSQRSPLAPLLLLSLHGVAASLEVSESPGSIQVARGQPAVLPCTFTTSAALINLNVIWMVTPLSNANQPEQVILYQGGQMFDGAPRFHGRVGFTGTMPATNVSIFINNTQLSDTGTYQCLVNNLPDIGGRNIGVTGLTVLVPPSAPHCQIQGSQDIGSDVILLCSSEEGIPRPTYLWEKLDNTLKLPPTATQDQVQGTVTIRNISALSSGLYQCVASNAIGTSTCLLDLQVISPQPRNIGLIAGAIGTGAVIIIFCIALILGAFFYWRSKNKEEEEEEIPNEIREDDLPPKCSSAKAFHTEISSSDNNTLTSSNAYNSRYWSNNPKVHRNTESVSHFSDLGQSFSFHSGNANIPSIYANGTHLVPGQHKTLVVTANRGSSPQVMSRSNGSVSRKPRPPHTHSYTISHATLERIGAVPVMVPAQSRAGSLV

SEQ ID NO: 6839 - protein, 403 aa, Homo Sapiens
MTSQRSPLAPLLLLSLHGVAASLEVSESPGSIQVARGQPAVLPCTFTTSAALINLNVIWMVTPLSNANQPEQVILYQGGQMFDGAPRFHGRVGFTGTMPATNVSIFINNTQLSDTGTYQCLVNNLPDIGGRNIGVTGLTVLVPPSAPHCQIQGSQDIGSDVILLCSSEEGIPRPTYLWEKLDNTLKLPPTATQDQVQGTVTIRNISALSSGLYQCVASNAIGTSTCLLDLQVISRAFFYWRSKNKEEEEEEIPNEIREDDLPPKCSSAKAFHTEISSSDNNTLTSSNAYNSRYWSNNPKVHRNTESVSHFSDLGQSFSFHSGNANIPSIYANGTHLVPGQHKTLVVTANRGSSPQVMSRSNGSVSRKPRPPHTHSYTISHATLERIGAVPVMVPAQSRAGSLV

SEQ ID NO: 6840 - protein, 33 aa, Homo Sapiens
MVTPLSNANQPEQVILYQGGQMFDGAPRFHGRV

SEQ ID NO: 6841 - protein, 59 aa, Homo Sapiens
MVTPLSNANQPEQVILYQGGQMFDGAPRFHGRVGFTGTMPATNVSIFINNTQLSDTGTY

SEQ ID NO: 6842 - protein, 467 aa, Homo Sapiens
MRTAPSLRRCVCLLLAAILDLARGYLTVNIEPLPPVVAGDAVTLKCNFKTDGRMREIVWYRVTDGGTIKQKIFTFDAMFSTNYSHMENYRKREDLVYQSTVRLPEVRISDNGPYECHVGIYDRATREKVVLASGNIFLNVMAPPTSIEVVAADTPAPFSRYQAQNFTLVCIVSGGKPAPMVYFKRDGEPIDAVPLSEPPAASSGPLQDSRPFRSLLHRDLDDTKMQKSLSLLDAENRGGRPYTERPSRGLTPDPNILLQPTTENIPETVVSREFPRWVHSAEPTYFLRHSRTPSSDGTVEVRALLTWTLNPQIDNEALFSCEVKHPALSMPMQAEVTLVAPKGPKIVMTPSRARVGDTVRILVHGFQNEVFPEPMFTWTRVGSRLLDGSAEFDGKELVLERVPAELNGSMYRCTAQNPLGSTDTHTRLIVFENPNIPRGTEDSNGSIGPTGARLTLVLALTVILELT

SEQ ID NO: 6843 - protein, 613 aa, Homo Sapiens
MGALRPTLLPPSLPLLLLLMLGMGCWAREVLVPEGPLYRVAGTAVSISCNVTGYEGPAQQNFEWFLYRPEAPDTALGIVSTKDTQFSYAVFKSRVVAGEVQVQRLQGDAVVLKIARLQAQDAGIYECHTPSTDTRYLGSYSGKVELRVLPDVLQVSAAPPGPRGRQAPTSPPRMTVHEGQELALGCLARTSTQKHTHLAVSFGRSVPEAPVGRSTLQEVVGIRSDLAVEAGAPYAERLAAGELRLGKEGTDRYRMVVGGAQAGDAGTYHCTAAEWIQDPDGSWAQIAEKRAVLAHVDVQTLSSQLAVTVGPGERRIGPGEPLELLCNVSGALPPAGRHAAYSVGWEMAPAGAPGPGRLVAQLDTEGVGSLGPGYEGRHIAMEKVASRTYRLRLEAARPGDAGTYRCLAKAYVRGSGTRLREAASARSRPLPVHVREEGVVLEAVAWLAGGTVYRGETASLLCNISVRGGPPGLRLAASWWVERPEDGELSSVPAQLVGGVGQDGVAELGVRPGGGPVSVELVGPRSHRLRLHSLGPEDEGVYHCAPSAWVQHADYSWYQAGSARSGPVTVYPYMHALDTLFVPLLVGTGVALVTGATVLGTITCCFMKRLRKR

SEQ ID NO: 6844 - protein, 613 aa, Homo Sapiens; identical to SEQ ID NO: 6843

SEQ ID NO: 6845 - protein, 301 aa, Homo Sapiens
MGALRPTLLPPSLPLLLLLMLGMGCWAREVLVPEGPLYRVAGTAVSISCNVTGYEGPAQQNFEWFLYRPEAPDTALGIVSTKDTQFSYAVFKSRVVAGEVQVQRLQGDAVVLKIARLQAQDAGIYECHTPSTDTRYLGSYSGKVELRVLPDVLQVSAAPPGPRGRQAPTSPPRMTVHEGQELALGCLARTSTQKHTHLAVSFGRSVPEAPVGRSTLQEVVGIRSDLAVEAGAPYAERLAAGELRLGKEGTDRYRMVVGGAQAGDAGTYHCTAAEWIQDPDGSWAQIAEKRAVLAHVDVQTL

SEQ ID NO: 6846 - protein, 613 aa, Homo Sapiens; identical to SEQ ID NO: 6843

SEQ ID NO: 6847 - protein, 1163 aa, Homo Sapiens
MVWCLGLAVLSLVISQGADGRGKPEVVSVVGRAGESVVLGCDLLPPAGRPPLHVIEWLRFGFLLPIFIQFGLYSPRIDPDYVGRVRLQKGASLQIEGLRVEDQGWYECRVFFLDQHIPEDDFANGSWVHLTVNSPPQFQETPPAVLEVQELEPVTLRCVARGSPLPHVTWKLRGKDLGQGQGQVQVQNGTLRIRRVERGSSGVYTCQASSTEGSATHATQLLVLGPPVIVVPPKNSTVNASQDVSLACHAEAYPANLTYSWFQDNINVFHISRLQPRVRILVDGSLRLLATQPDDAGCYTCVPSNGLLHPPSASAYLTVLCMPGVIRCPVRANPPLLFVSWTKDGKALQLDKFPGWSQGTEGSLIIALGNEDALGEYSCTPYNSLGTAGPSPVTRVLLKAPPAFIERPKEEYFQEVGRELLIPCSAQGDPPPVVSWTKVGRGLQGQAQVDSNSSLILRPLTKEAHGHWECSASNAVARVATSTNVYVLGTSPHVVTNVSVVALPKGANVSWEPGFDGGYLQRFSVWYTPLAKRPDRMHHDWVSLAVPVGAAHLLVPGLQPHTQYQFSVLAQNKLGSGPFSEIVLSAPEGLPTTPAAPGLPPTEIPPPLSPPRGLVAVRTPRGVLLHWDPPELVPKRLDGYVLEGRQGSQGWEVLDPAVAGTETELLVPGLIKDVLYEFRLVAFAGSFVSDPSNTANVSTSGLEVYPSRTQLPGLLPQPVLAGVVGGVCFLGVAVLVSILAGCLLNRRRAARRRRKRLRQDPPLIFSPTGKSAAPSALGSGSPDSVAKLKLQGSPVPSLRQSLLWGDPAGTPSPHPDPPSSRGPLPLEPICRGPDGRFVMGPTVAAPQERSGREQAEPRTPAQRLARSFDCSSSSPSGAPQPLCIEDISPVAPPPAAPPSPLPGPGPLLQYLSLPFFREMNVDGDWPPLEEPSPAAPPDYMDTRRCPTSSFLRSPETPPVSPRESLPGAVVGAGATAEPPYTALADWTLRERLLPGLLPAAPRGSLTSQSSGRGSASFLRPPSTAPSAGGSYLSPAPGDTSSWASGPERWPRREHVVTVSKRRNTSVDENYEWDSEFPGDMELLETLHLGLASSRLRPEAEPELGVKTPEEGCLLNTAHVTGPEARCAALREEFLAFRRRRDATRARLPAYRQPVPHPEQATLL

SEQ ID NO: 6848 - protein, 1179 aa, Homo Sapiens
MVWCLGLAVLSLVISQGADGRGKPEVVSVVGRAGESVVLGCDLLPPAGRPPLHVIEWLRFGFLLPIFIQFGLYSPRIDPDYVGRVRLQKGASLQIEGLRVEDQGWYECRVFFLDQHIPEDDFANGSWVHLTVNSPPQFQETPPAVLEVQELEPVTLRCVARGSPLPHVTWKLRGKDLGQGQGQVQVQNGTLRIRRVERGSSGVYTCQASSTEGSATHATQLLVLGPPVIVVPPKNSTVNASQDVSLACHAEAYPANLTYSWFQDNINVFHISRLQPRVRILVDGSLRLLATQPDDAGCYTCVPSNGLLHPPSASAYLTVLYPAQVTAMPPETPLPIGMPGVIRCPVRANPPLLFVSWTKDGKALQLDKFPGWSQGTEGSLIIALGNEDALGEYSCTPYNSLGTAGPSPVTRVLLKAPPAFIERPKEEYFQEVGRELLIPCSAQGDPPPVVSWTKVGRGLQGQAQVDSNSSLILRPLTKEAHGHWECSASNAVARVATSTNVYVLGTSPHVVTNVSVVALPKGANVSWEPGFDGGYLQRFSVWYTPLAKRPDRMHHDWVSLAVPVGAAHLLVPGLQPHTQYQFSVLAQNKLGSGPFSEIVLSAPEGLPTTPAAPGLPPTEIPPPLSPPRGLVAVRTPRGVLLHWDPPELVPKRLDGYVLEGRQGSQGWEVLDPAVAGTETELLVPGLIKDVLYEFRLVAFAGSFVSDPSNTANVSTSGLEVYPSRTQLPGLLPQPVLAGVVGGVCFLGVAVLVSILAGCLLNRRRAARRRRKRLRQDPPLIFSPTGKSAAPSALGSGSPDSVAKLKLQGSPVPSLRQSLLWGDPAGTPSPHPDPPSSRGPLPLEPICRGPDGRFVMGPTVAAPQERSGREQAEPRTPAQRLARSFDCSSSSPSGAPQPLCIEDISPVAPPPAAPPSPLPGPGPLLQYLSLPFFREMNVDGDWPPLEEPSPAAPPDYMDTRRCPTSSFLRSPETPPVSPRESLPGAVVGAGATAEPPYTALADWTLRERLLPGLLPAAPRGSLTSQSSGRGSASFLRPPSTAPSAGGSYLSPAPGDTSSWASGPERWPRREHVVTVSKRRNTSVDENYEWDSEFPGDMELLETLHLGLASSRLRPEAEPELGVKTPEEGCLLNTAHVTGPEARCAALREEFLAFRRRRDATRARLPAYRQPVPHPEQATLL

SEQ ID NO: 6849 - protein, 717 aa, Homo Sapiens
MVWCLGLAVLSLVISQGADGRGKPEVVSVVGRAGESVVLGCDLLPPAGRPPLHVIEWLRFGFLLPIFIQFGLYSPRIDPDYVGRVRLQKGASLQIEGLRVEDQGWYECRVFFLDQHIPEDDFANGSWVHLTVNSPPQFQETPPAVLEVQELEPVTLRCVARGSPLPHVTWKLRGKDLGQGQGQVQVQNGTLRIRRVERGSSGVYTCQASSTEGSATHATQLLVLGPPVIVVPPKNSTVNASQDVSLACHAEAYPANLTYSWFQDNINVFHISRLQPRVRILVDGSLRLLATQPDDAGCYTCVPSNGLLHPPSASAYLTVLYPAQVTAMPPETPLPIGMPGVIRCPVRANPPLLFVSWTKDGKALQLDKFPGWSQGTEGSLIIALGNEDALGEYSCTPYNSLGTAGPSPVTRVLLKAPPAFIERPKEEYFQEVGRELLIPCSAQGDPPPAAPPSPLPGPGPLLQYLSLPFFREMNVDGDWPPLEEPSPAAPPDYMDTRRCPTSSFLRSPETPPVSPRESLPGAVVGAGATAEPPYTALADWTLRERLLPGLLPAAPRGSLTSQSSGRGSASFLRPPSTAPSAGGSYLSPAPGDTSSWASGPERWPRREHVVTVSKRRNTSVDENYEWDSEFPGDMELLETLHLGLASSRLRPEAEPELGVKTPEEGCLLNTAHVTGPEARCAALREEFLAFRRRRDATRARLPAYRQPVPHPEQATLL

SEQ ID NO: 6850 - protein, 411 aa, Homo Sapiens
MSPARLRPRLHFCLVLLLLLVVPAAWGCGPGRVVGSRRRPPRKLVPLAYKQFSPNVPEKTLGASGRYEGKIARSSERFKELTPNYNPDIIFKDEENTGADRLMTQRCKDRLNSLAISVMNQWPGVKLRVTEGWDEDGHHSEESLHYEGRAVDITTSDRDRNKYGLLARLAVEAGFDWVYYESKAHVHCSVKSEHSAAAKTGGCFPAGAQVRLESGARVALSAVRPGDRVLAMGEDGSPTFSDVLIFLDREPHRLRAFQVIETQDPPRRLALTPAHLLFTADNHTEPAARFRATFASHVQPGQYVLVAGVPGLQPARVAAVSTHVALGAYAPLTKHGTLVVEDVVASCFAAVADHHLAQLAFWPLRLFHSLAWGSWTPGEGVHWYPQLLYRLGRLLLEEGSFHPLGMSGAGS

SEQ ID NO: 6851 - protein, 178 aa, Homo Sapiens
MHSSALLCCLVLLTGVRASPGQGTQSENSCTHFPGNLPNMLRDLRDAFSRVKTFFQMKDQLDNLLLKESLLEDFKGYLGCQALSEMIQFYLEEVMPQAENQDPDIKAHVNSLGENLKTLRLRLRRCHRFLPCENKSKAVEQVKNAFNKLQEKGIYKAMSEFDIFINYIEAYMTMKIRN

SEQ ID NO: 6852 - protein, 74 aa, Homo Sapiens
MIQFYLEEVMPQAENQDPDIKAHVNSLGENLKTLRLRLRRCHRFLPCENKSKAVEQVKNAFNKLQEKGIYKAMS

SEQ ID NO: 6853 - protein, 199 aa, Homo Sapiens
MNCVCRLVLVVLSLWPDTAVAPGPPPGPPRVSPDPRAELDSTVLLTRSLLADTRQLAAQLRDKFPADGDHNLDSLPTLAMSAGALGALQLPGVLTRLRADLLSYLRHVQWLRRAGGSSLKTLEPELGTLQARLDRLLRRLQLLMSRLALPQPPPDPPAPPLAPPSSAWGGIRAAHAILGGLHLTLDWAVRGLLLLKTRL

SEQ ID NO: 6854 - protein, 199 aa, Homo Sapiens; identical to SEQ ID NO: 6853

SEQ ID NO: 6855 - protein, 40 aa, Homo Sapiens
MSAGALGALQLPGVLTRLRADLLSYLRHVQWLRRAGGSSL

SEQ ID NO: 6856 - protein, 120 aa, Homo Sapiens
MSAGALGALQLPGVLTRLRADLLSYLRHVQWLRRAGGSSLKTLEPELGTLQARLDRLLRRLQLLMSRLALPQPPPDPPAPPLAPPSSAWGGIRAAHAILGGLHLTLDWAVRGLLLLKTRL

SEQ ID NO: 6857 - protein, 152 aa, Homo Sapiens
MSSSCSGLSRVLVAVATALVSASSPCPQAWGPPDPPARPVVSCQAADYENFSCTWSPSQISGLPTRYLTSYRKKTVLGADSQRRSPSTGPWPCPQDPLGAARCVVHGAEFWSQYRINVTEVNPLGASTRLLDVSLQSILRPDPPQGLRVESV

SEQ ID NO: 6858 - protein, 54 aa, Homo Sapiens
MSSSCSGLSRVLVAVATALVSASSPCPQAWGPPGTQCPGFGMGSQSCSRDLTLG

SEQ ID NO: 6859 - protein, 139 aa, Homo Sapiens
MSSSCSGLSRVLVAVATALVSASSPCPQAWGPPGVQYGQPGRSVKLCCPGVTAGDPVSWFRDGEPKLLQGPDSGLGHELVLAQADSTDEGTYICQTLDGALGGTVTLQLGYPPARPVVSCQAADYENFSCTWSPSQISG

SEQ ID NO: 6860 - protein, 167 aa, Homo Sapiens
MSSSCSGLSRVLVAVATALVSASSPCPQAWGPPGVQYGQPGRSVKLCCPGVTAGDPVSWFRDGEPKLLQGPDSGLGHELVLAQADSTDEGTYICQTLDGALGGTVTLQLGYPPARPVVSCQAADYENFSCTWSPSQISGLPTRYLTSYRKKTVLGADSQRRSPSTGP

SEQ ID NO: 6861 - protein, 422 aa, Homo Sapiens
MSSSCSGLSRVLVAVATALVSASSPCPQAWGPPGVQYGQPGRSVKLCCPGVTAGDPVSWFRDGEPKLLQGPDSGLGHELVLAQADSTDEGTYICQTLDGALGGTVTLQLGYPPARPVVSCQAADYENFSCTWSPSQISGLPTRYLTSYRKKTVLGADSQRRSPSTGPWPCPQDPLGAARCVVHGAEFWSQYRINVTEVNPLGASTRLLDVSLQSILRPDPPQGLRVESVPGYPRRLRASWTYPASWPCQPHFLLKFRLQYRPAQHPAWSTVEPAGLEEVITDAVAGLPHAVRVSARDFLDAGTWSTWSPEAWGTPSTGTIPKEIPAWGQLHTQPEVEPQVDSPAPPRPSLQPHPRLLDHRDSVEQVAVLASLGILSFLGLVAGALALGLWLRLRRGGKDGSPKPGFLASVIPVDRRPGAPNL

SEQ ID NO: 6862 - protein, 422 aa, Homo Sapiens; identical to SEQ ID NO: 6861

SEQ ID NO: 6863 - protein, 270 aa, Homo Sapiens
MSSSCSGLSRVLVAVATALVSASSPCPQAWGPPGVQYGQPGRSVKLCCPGVTAGDPVSWFRDGEPKLLQGPDSGLGHELVLAQADSTDEGTYICQTLDGALGGTVTLQLGYPPARPVVSCQAADYENFSCTWSPSQISGLPTRYLTSYRKKTVLGADSQRRSPSTGPWPCPQDPLGAARCVVHGAEFWSQYRINVTEVNPLGASTRLLDVSLQSILRPDPPQGLRVESVPGYPRRLRASWTYPASWPCQPHFLLKFRLQYRPAQHPAWST

SEQ ID NO: 6864 - protein, 390 aa, Homo Sapiens
MSSSCSGLSRVLVAVATALVSASSPCPQAWGPPGVQYGQPGRSVKLCCPGVTAGDPVSWFRDGEPKLLQGPDSGLGHELVLAQADSTDEGTYICQTLDGALGGTVTLQLGYPPARPVVSCQAADYENFSCTWSPSQISGLPTRYLTSYRKKTVLGADSQRRSPSTGPWPCPQDPLGAARCVVHGAEFWSQYRINVTEVNPLGASTRLLDVSLQSILRPDPPQGLRVESVPGYPRRLRASWTYPASWPCQPHFLLKFRLQYRPAQHPAWSTVEPAGLEEVITDAVAGLPHAVRVSARDFLDAGTWSTWSPEAWGTPSTGTIPKEIPAWGQLHTQPEVEPQVDSPAPPRPSLQPHPRLLDHRDSVEQVAVLASLGILSFLGLVAGALALGLW

SEQ ID NO: 6865 - protein, 422 aa, Homo Sapiens; identical to SEQ ID NO: 6861

SEQ ID NO: 6866 - protein, 68 aa, Homo Sapiens
MSSSCSGLSRVLVAVATALVSASSPCPQAWGPPGVQYGQPGRSVKLCCPGVTAGPSSPPCCLLPSSRL

SEQ ID NO: 6867 - protein, 77 aa, Homo Sapiens
  misc_feature (1)..(1): Xaa can be any naturally occurring amino acid
XTPSTGTIPKEIPAWGQLHTQPEVEPQVDSPAPPRPSLQPHPRLLDHRDSVEQVAVLASLGILSFLGLVAGALALGL

SEQ ID NO: 6868 - protein, 328 aa, Homo Sapiens
MCHQQLVISWFSLVFLASPLVAIWELKKDVYVVELDWYPDAPGEMVVLTCDTPEEDGITWTLDQSSEVLGSGKTLTIQVKEFGDAGQYTCHKGGEVLSHSLLLLHKKEDGIWSTDILKDQKEPKNKTFLRCEAKNYSGRFTCWWLTTISTDLTFSVKSSRGSSDPQGVTCGAATLSAERVRGDNKEYEYSVECQEDSACPAAEESLPIEVMVDAVHKLKYENYTSSFFIRDIIKPDPPKNLQLKPLKNSRQVEVSWEYPDTWSTPHSYFSLTFCVQVQGKSKREKKDRVFTDKTSATVICRKNASISVRAQDRYYSSSWSEWASVPCS

SEQ ID NO: 6869 - protein, 51 aa, Homo Sapiens
MEPLVTWVVPLLFLFLLSRQGAACRTSECCFQDPPYPDADSGSASGPRDLR

SEQ ID NO: 6870 - protein, 67 aa, Homo Sapiens
MEPLVTWVVPLLFLFLLSRQGAACRTSECCFQDPPYPDADSGSASGPRDLRCYRISSDRYECSWQYE

SEQ ID NO: 6871 - protein, 381 aa, Homo Sapiens
MEPLVTWVVPLLFLFLLSRQGAACRTSECCFQDPPYPDADSGSASGPRDLRCYRISSDRYECSWQYEGPTAGVSHFLRCCLSSGRCCYFAAGSATRLQFSDQAGVSVLYTVTLWVESWARNQTEKSPEVTLQLYNSVKYEPPLGDIKVSKLAGQLRMEWETPDNQVGAEVQFRHRTPSSPWKLGDCGPQDDDTESCLCPLEMNVAQEFQLRRRQLGSQGSSWSKWSSPVCVPPENPPQPQVRFSVEQLGQDGRRRLTLKEQPTQLELPEGCQGLAPGTEVTYRLQLHMLSCPCKAKATRTLHLGKMPYLSGAAYNVAVISSNQFGPGLNQTWHIPADTHTDGMISAHCNLRLPDSRDSPASASRVAGITGICHHTRLILYF

SEQ ID NO: 6872 - protein, 662 aa, Homo Sapiens
MEPLVTWVVPLLFLFLLSRQGAACRTSECCFQDPPYPDADSGSASGPRDLRCYRISSDRYECSWQYEGPTAGVSHFLRCCLSSGRCCYFAAGSATRLQFSDQAGVSVLYTVTLWVESWARNQTEKSPEVTLQLYNSVKYEPPLGDIKVSKLAGQLRMEWETPDNQVGAEVQFRHRTPSSPWKLGDCGPQDDDTESCLCPLEMNVAQEFQLRRRQLGSQGSSWSKWSSPVCVPPENPPQPQVRFSVEQLGQDGRRRLTLKEQPTQLELPEGCQGLAPGTEVTYRLQLHMLSCPCKAKATRTLHLGKMPYLSGAAYNVAVISSNQFGPGLNQTWHIPADTHTEPVALNISVGTNGTTMYWPARAQSMTYCIEWQPVGQDGGLATCSLTAPQDPDPAGMATYSWSRESGAMGQEKCYYITIFASAHPEKLTLWSTVLSTYHFGGNASAAGTPHHVSVKNHSLDSVSVDWAPSLLSTCPGVLKEYVVRCRDEDSKQVSEHPVQPTETQVTLSGLRAGVAYTVQVRADTAWLRGVWSQPQRFSIEVQVSDWLIFFASLGSFLSILLVGVLGYLGLNRAARHLCPPLPTPCASSAIEFPGGKETWQWINPVDFQEEASLQEALVVEMSWDKGERTEPLEKTELPEGAPELALDTELSLEDGDRCKAKM

SEQ ID NO: 6873 - protein, 662 aa, Homo Sapiens; identical to SEQ ID NO: 6872

SEQ ID NO: 6874 - protein, 118 aa, Homo Sapiens
MEPLVTWVVPLLFLFLLSRQGAACRTSECCFQDPPYPDADSGSLPGSASGPRDLRCYRISSDRYECSWQYEGPTAGVSHFLRCCLSSGRCCYFAAGSATRLQFSDQAGVSVLYTVTLW

SEQ ID NO: 6875 - protein, 862 aa, Homo Sapiens
MAHTFRGCSLAFMFIITWLLIKAKIDACKRGDVTVKPSHVILLGSTVNITCSLKPRQGCFHYSRRNKLILYKFDRRINFHHGHSLNSQVTGLPLGTTLFVCKLACINSDEIQICGAEIFVGVAPEQPQNLSCIQKGEQGTVACTWERGRDTHLYTEYTLQLSGPKNLTWQKQCKDIYCDYLDFGINLTPESPESNFTAKVTAVNSLGSSSSLPSTFTFLDIVRPLPPWDIRIKFQKASVSRCTLYWRDEGLVLLNRLRYRPSNSRLWNMVNVTKAKGRHDLLDLKPFTEYEFQISSKLHLYKGSWSDWSESLRAQTPEEEPTGMLDVWYMKRHIDYSRQQISLFWKNLSVSEARGKILHYQVTLQELTGGKAMTQNITGHTSWTTVIPRTGNWAVAVSAANSKGSSLPTRINIMNLCEAGLLAPRQVSANSEGMDNILVTWQPPRKDPSAVQEYVVEWRELHPGGDTQVPLNWLRSRPYNVSALISENIKSYICYEIRVYALSGDQGGCSSILGNSKHKAPLSGPHINAITEEKGSILISWNSIPVQEQMGCLLHYRIYWKERDSNSQPQLCEIPYRVSQNSHPINSLQPRVTYVLWMTALTAAGESSHGNEREFCLQGKANWMAFVAPSICIAIIMVGIFSTHYFQQKVFVLLAALRPQWCSREIPDPANSTCAKKYPIAEEKTQLPLDRLLIDWPTPEDPEPLVISEVLHQVTPVFRHPPCSNWPQREKGIQGHQASEKDMMHSASSPPPPRALQAESRQLVDLYKVLESRGSDPKPENPACPWTVLPAGDLPTHDGYLPSNIDDLPSHEAPLADSLEELEPQHISLSVFPSSSLHPLTFSCGDKLTLDQLKMRCDSLML

SEQ ID NO: 6876 - protein, 659 aa, Homo Sapiens
MAHTFRGCSLAFMFIITWLLIKAKIDACKRGDVTVKPSHVILLGSTVNITCSLKPRQGCFHYSRRNKLILYKFDRRINFHHGHSLNSQVTGLPLGTTLFVCKLACINSDEIQICGAEIFVGVAPEQPQNLSCIQKGEQGTVACTWERGRDTHLYTEYTLQLSGPKNLTWQKQCKDIYCDYLDFGINLTPESPESNFTAKVTAVNSLGSSSSLPSTFTFLDIVRPLPPWDIRIKFQKASVSRCTLYWRDEGLVLLNRLRYRPSNSRLWNMVNVTKAKGRHDLLDLKPFTEYEFQISSKLHLYKGSWSDWSESLRAQTPEEEPTGMLDVWYMKRHIDYSRQQISLFWKNLSVSEARGKILHYQVTLQELTGGKAMTQNITGHTSWTTVIPRTGNWAVAVSAANSKGSSLPTRINIMNLCEAGLLAPRQVSANSEGMDNILVTWQPPRKDPSAVQEYVVEWRELHPGGDTQVPLNWLRSRPYNVSALISENIKSYICYEIRVYALSGDQGGCSSILGNSKHKAPLSGPHINAITEEKGSILISWNSIPVQEQMGCLLHYRIYWKERDSNSQPQLCEIPYRVSQNSHPINSLQPRVTYVLWMTALTAAGESSHGNEREFCLQGKANWMAFVAPSICIAIIMVGIFSTHYFQQKRRHSCPWTGS

SEQ ID NO: 6877 - protein, 635 aa, Homo Sapiens
MAHTFRGCSLAFMFIITWLLIKAKIDACKRGDVTVKPSHVILLGSTVNITCSLKPRQGCFHYSRRNKLILYKFDRRINFHHGHSLNSQVTGLPLGTTLFVCKLACINSDEIQICGAEIFVGVAPEQPQNLSCIQKGEQGTVACTWERGRDTHLYTEYTLQLSGPKNLTWQKQCKDIYCDYLDFGINLTPESPESNFTAKVTAVNSLGSSSSLPSTFTFLDIVRPLPPWDIRIKFQKASVSRCTLYWRDEGLVLLNRLRYRPSNSRLWNMVNVTKAKGRHDLLDLKPFTEYEFQISSKLHLYKGSWSDWSESLRAQTPEEEPTGMLDVWYMKRHIDYSRQQISLFWKNLSVSEARGKILHYQVTLQELTGGKAMTQNITGHTSWTTVIPRTGNWAVAVSAANSKGSSLPTRINIMNLCEAGLLAPRQVSANSEGMDNILVTWQPPRKDPSAVQEYVVEWRELHPGGDTQVPLNWLRSRPYNVSALISENIKSYICYEIRVYALSGDQGGCSSILGNSKHKAPLSGPHINAITEEKGSILISWNSIPVQEQMGCLLHYRIYWKERDSNSQPQLCEIPYRVSQNSHPINSLQPRVTYVLWMTALTAAGESSHGNEREFCLQGEDTAALGQAPDRLAHA

SEQ ID NO: 6878 - protein, 776 aa, Homo Sapiens
MAHTFRGCSLAFMFIITWLLIKAKIDACKRGDVTVKPSHVILLGSTVNITCSLKPRQGCFHYSRRNKLILYKFDRRINFHHGHSLNSQVTGLPLGTTLFVCKLACINSDEIQICGAEIFVGVAPEQPQNLSCIQKGEQGTVACTWERGRDTHLYTEYTLQLSGPKNLTWQKQCKDIYCDYLDFGINLTPESPESNFTAKVTAVNSLGSSSSLPSTFTFLDIVRPLPPWDIRIKFQKASVSRCTLYWRDEGLVLLNRLRYRPSNSRLWNMVNVTKAKGRHDLLDLKPFTEYEFQISSKLHLYKGSWSDWSESLRAQTPEEEPTGMLDVWYMKRHIDYSRQQISLFWKNLSVSEARGKILHYQVTLQELTGGKAMTQNITGHTSWTTVIPRTGNWAVAVSAANSKGSSLPTRINIMNLCEAGLLAPRQVSANSEGMDNILVTWQPPRKDPSAVQEYVVEWRELHPGGDTQVPLNWLRSRPYNVSALISEIPYRVSQNSHPINSLQPRVTYVLWMTALTAAGESSHGNEREFCLQGKANWMAFVAPSICIAIIMVGIFSTHYFQQKVFVLLAALRPQWCSREIPDPANSTCAKKYPIAEEKTQLPLDRLLIDWPTPEDPEPLVISEVLHQVTPVFRHPPCSNWPQREKGIQGHQASEKDMMHSASSPPPPRALQAESRQLVDLYKVLESRGSDPKPENPACPWTVLPAGDLPTHDGYLPSNIDDLPSHEAPLADSLEELEPQHISLSVFPSSSLHPLTFSCGDKLTLDQLKMRCDSLML

SEQ ID NO: 6879 - protein, 230 aa, Homo Sapiens
  misc_feature (1)..(1): Xaa can be any naturally occurring amino acid
XQKGEQGTVACTWERGRDTHLYTEYTLQLSGPKNLTWQKQCKDIYCDYLDFGINLTPESPESNFTAKVTAVNSLGSSSSLPSTFTFLDIVRPLPPWDIRIKFQKASVSRCTLYWRDEGLVLLNRLRYRPSNSRLWNMVNVTKAKGRHDLLDLKPFTEYEFQISSKLHLYKGSWSDWSESLRAQTPEEEPTGMLDVWYMKRHIDYSRQQISLFWKVSFKRQLKTQGNKTEG

SEQ ID NO: 6880 - protein, 144 aa, Homo Sapiens
MALLLTTVIALTCLGGFASPGPVPPSTALRELIEELVNITQNQKAPLCNGSMVWSINLTAGMYCAALESLINVSGCSAIEKTQRMLSGFCPHKVSAGQFSSLHVRDTKIEVAQFVKDLLLHLKKLFREGQFNNFESIIICRDRT

SEQ ID NO: 6881 - protein, 146 aa, Homo Sapiens
MHPLLNPLLLALGLMALLLTTVIALTCLGGFASPGPVPPSTALRELIEELVNITQNQKAPLCNGSMVWSINLTAGMYCAALESLINVSGCSAIEKTQRMLSGFCPHKVSAGQFSSLHVRDTKIEVAQFVKDLLLHLKKLFREGQFN

SEQ ID NO: 6882 - protein, 279 aa, Homo Sapiens
MEWPARLCGLWALLLCAGGGGGGGGAAPTETQPPVTNLSVSVENLCTVIWTWNPPEGASSNCSLWYFSHFGDKQDKKIAPETRRSIEVPLNERICLQVGSQCSTNESEKPSILVEKCISPPEGDPESAVTELQCIWHNLSYMKCSWLPGRNTSPDTNYTLYYWHRSLEKIHQCENIFREGQYFGCSFDLTKVKDSSFEQHSVQIMVKDNAGKIKPSFNIVPLTSRVKPDPPHIKNLSFHNDDLYVQWENPQNFISRCLFYEVEVNNSQTETHNVFYVRF

SEQ ID NO: 6883 - protein, 427 aa, Homo Sapiens
MEWPARLCGLWALLLCAGGGGGGGGAAPTETQPPVTNLSVSVENLCTVIWTWNPPEGASSNCSLWYFSHFGDKQDKKIAPETRRSIEVPLNERICLQVGSQCSTNESEKPSILVEKCISPPEGDPESAVTELQCIWHNLSYMKCSWLPGRNTSPDTNYTLYYWHRSLEKIHQCENIFREGQYFGCSFDLTKVKDSSFEQHSVQIMVKDNAGKIKPSFNIVPLTSRVKPDPPHIKNLSFHNDDLYVQWENPQNFISRCLFYEVEVNNSQTETHNVFYVQEAKCENPEFERNVENTSCFMVPGVLPDTLNTVRIRVKTNKLCYEDDKLWSNWSQEMSIGKKRNSTLYITMLLIVPVIVAGAIIVLLLYLKRLKIIIFPPIPDPGKIFKEMFGDQNDDTLHWKKYDIYEKQTKEETDSVVLIENLKKASQ

SEQ ID NO: 6884 - protein, 308 aa, Homo Sapiens
MAPRRARGCRTLGLPALLLLLLLRPPATRDARDRLAVLAGRSRISESFNHEVQTHEACVRLRTMENCPQCHHHRTSRQQAGITCPPPMSVEHADIWVKSYSLYSRERYICNSGFKRKAGTSSLTECVLNKATNVAHWTTPSLKCIRDPALVHQRPAPPSTVTTAGVTPQPESLSPSGKEPAASSPSSNNTAATTAAIVPGSQLMPSKSPSTGTTEISSHESSHGTPSQTTAKNWELTASASHQPPGVYPQGHSDTTVAISTSTVLLCGLSAVSLLACYLKSSLDAFIKIRGGFSTWLLGLPHSTVGSG

SEQ ID NO: 6885 - protein, 346 aa, Homo Sapiens
MAPRRARGCRTLGLPALLLLLLLRPPATRDARDRLAVLAGRSRISESFNHEVQTHEACVRLRTMENCPQCHHHRTSRQQAGITCPPPMSVEHADIWVKSYSLYSRERYICNSGFKRKAGTSSLTECVLNKATNVAHWTTPSLKCIRDPALVHQRPAPPSTVTTAGVTPQPESLSPSGKEPAASSPSSNNTAATTAAIVPGSQLMPSKSPSTGTTEISSHESSHGTPSQTTAKNWELTASASHQPPGVYPQGHSDTTVAISTSTVLLCGLSAVSLLACYLKSSSHSRELTLLTLKWPKELLLLRRDISPALVEGAGQMPRASAPRQLQTGQPRMTSVLPRLCLSFGS

SEQ ID NO: 6886 - protein, 305 aa, Homo Sapiens
MAPRRARGCRTLGLPALLLLLLLRPPATRDARDRLAVLAGRSRISESFNHEVQTHEACVRLRTMENCPQCHHHRTSRQQAGITCPPPMSVEHADIWVKSYSLYSRERYICNSGFKRKAGTSSLTECVLNKATNVAHWTTPSLKCIRDPALVHQRPAPPSTVTTAGVTPQPESLSPSGKEPAASSPSSNNTAATTAAIVPGSQLMPSKSPSTGTTEISSHESSHGTPSQTTAKNWELTASASHQPPGVYPQGHSDTTGRKQHLLPDFQASFQRDCINKHIEDKECWTVASFLLFCTMFVSTCWYTL

SEQ ID NO: 6887 - protein, 331 aa, Homo Sapiens
MAPRRARGCRTLGLPALLLLLLLRPPATRDARDRLAVLAGRSRISESFNHEVQTHEACVRLRTMENCPQCHHHRTSRQQAGITCPPPMSVEHADIWVKSYSLYSRERYICNSGFKRKAGTSSLTECVLNKATNVAHWTTPSLKCIRDPALVHQRPAPPSTVTTAGVTPQPESLSPSGKEPAASSPSSNNTAATTAAIVPGSQLMPSKSPSTGTTEISSHESSHGTPSQTTAKNWELTASASHQPPGVYPQGHSDTTVAISTSTVLLCGLSAVSLLACYLKSRWLAKRSLPGDAEAPNMSRGGRNAWEQLSRAPATSLLRTPVESALSASRP

SEQ ID NO: 6888 - protein, 154 aa, Homo Sapiens
MAPRRARGCRTLGLPALLLLLLLRPPATREPAASSPSSNNTAATTAAIVPGSQLMPSKSPSTGTTEISSHESSHGTPSQTTAKNWELTASASHQPPGVYPQGHSDTTVAISTSTVLLCGLSAVSLLACYLKSRASVCSCHPRSAGHTCSVGSVC

SEQ ID NO: 6889 - protein, 169 aa, Homo Sapiens
MAPRRARGCRTLGLPALLLLLLLRPPATREPAASSPSSNNTAATTAAIVPGSQLMPSKSPSTGTTEISSHESSHGTPSQTTAKNWELTASASHQPPGVYPQGHSDTTVAISTSTVLLCGLSAVSLLACYLKSRQTPPLASVEMEAMEALPVTWGTSSRDEDLENCSHHL

SEQ ID NO: 6890 - protein, 172 aa, Homo Sapiens
MAPRRARGCRTLGLPALLLLLLLRPPATRGITCPPPMSVEHADIWVKSYSLYSRERYICNSGFKRKAGTSSLTECVLNKATNVAHWTTPSLKCIKPAASSPSSNNTAATTAAIVPGSQLMPSKSPSTGTTEISSHESSHGTPSQTTAKNWELTASASHQPPGVYPQGHSDTT

SEQ ID NO: 6891 - protein, 219 aa, Homo Sapiens
MAPRRARGCRTLGLPALLLLLLLRPPATRGITCPPPMSVEHADIWVKSYSLYSRERYICNSGFKRKAGTSSLTECVLNKATNVAHWTTPSLKCIKPAASSPSSNNTAATTAAIVPGSQLMPSKSPSTGTTEISSHESSHGTPSQTTAKNWELTASASHQPPGVYPQGHSDTTVAISTSTVLLCGLSAVSLLACYLKSRASVCSCHPRSAGHTCSVGSVC

SEQ ID NO: 6892 - protein, 234 aa, Homo Sapiens
MAPRRARGCRTLGLPALLLLLLLRPPATRGITCPPPMSVEHADIWVKSYSLYSRERYICNSGFKRKAGTSSLTECVLNKATNVAHWTTPSLKCIKPAASSPSSNNTAATTAAIVPGSQLMPSKSPSTGTTEISSHESSHGTPSQTTAKNWELTASASHQPPGVYPQGHSDTTVAISTSTVLLCGLSAVSLLACYLKSRQTPPLASVEMEAMEALPVTWGTSSRDEDLENCSHHL

SEQ ID NO: 6893 - protein, 252 aa, Homo Sapiens
MAPRRARGCRTLGLPALLLLLLLRPPATRGITCPPPMSVEHADIWVKSYSLYSRERYICNSGFKRKAGTSSLTECVLNKATNVAHWTTPSLKCIRDPALVHQRPAPPSTVTTAGVTPQPESLSPSGKEPAASSPSSNNTAATTAAIVPGSQLMPSKSPSTGTTEISSHESSHGTPSQTTAKNWELTASASHQPPGVYPQGHSDTTVAISTSTVLLCGLSAVSLLACYLKSRASVCSCHPRSAGHTCSVGSVC

SEQ ID NO: 6894 - protein, 267 aa, Homo Sapiens
MAPRRARGCRTLGLPALLLLLLLRPPATRGITCPPPMSVEHADIWVKSYSLYSRERYICNSGFKRKAGTSSLTECVLNKATNVAHWTTPSLKCIRDPALVHQRPAPPSTVTTAGVTPQPESLSPSGKEPAASSPSSNNTAATTAAIVPGSQLMPSKSPSTGTTEISSHESSHGTPSQTTAKNWELTASASHQPPGVYPQGHSDTTVAISTSTVLLCGLSAVSLLACYLKSRQTPPLASVEMEAMEALPVTWGTSSRDEDLENCSHHL

SEQ ID NO: 6895 - protein, 353 aa, Homo Sapiens
MRLAGRQVPEQRSPPPPGLGSARPGSPAVSCGAAAMAPRRARGCRTLGLPALLLLLLLRPPATRDARDRLAVLAGRSRISESFNHEVQTHEACVRLRTMENCPQCHHHRTSRQQAGITCPPPMSVEHADIWVKSYSLYSRERYICNSGFKRKAGTSSLTECVLNKATNVAHWTTPSLKCIRDPALVHQRPAPPSTVTTAGVTPQPESLSPSGKEPAASSPSSNNTAATTAAIVPGSQLMPSKSPSTGTTEISSHESSHGTPSQTTAKNWELTASASHQPPGVYPQGHSDTTVAISTSTVLLCGLSAVSLLACYLKSRQTPPLASVEMEAMEALPVTWGTSSRDEDLENCSHHL

SEQ ID NO: 6896 - protein, 172 aa, Homo Sapiens
MSVEHADIWVKSYSLYSRERYICNSGFKRKAGTSSLTECVLNKATNVAHWTTPSLKCIKPAASSPSSNNTAATTAAIVPGSQLMPSKSPSTGTTEISSHESSHGTPSQTTAKNWELTASASHQPPGVYPQGHSDTTVAISTSTVLLCGLSAVSLLACYLKSRQTPPLASVEM

SEQ ID NO: 6897 - protein, 148 aa, Homo Sapiens
MSVEHADIWVKSYSLYSRERYICNSGFKRKAGTSSLTECVLNKATNVAHWTTPSLKCINPALVHQRPAPPSTVTTAGVTPQPESLSPSGKEPAASSPSSNNTAATTAAIVPGSQLMPSKSPSTGTTEISSHESSHGTPSQTTAKNWEL

SEQ ID NO: 6898 - protein, 231 aa, Homo Sapiens
MSVEHADIWVKSYSLYSRERYICNSGFKRKAGTSSLTECVLNKATNVAHWTTPSLKCIRDPALVHQRPAPPSTVTTAGVTPQPESLSPSGKEPAASSPSSNNTAATTAAIVPGSQLMPSKSPSTGTTEISSHESSHGTPSQTTAKNWELTASASHQPPGVYPQGHSDTTVAISTSTVLLCGLSAVSLLACYLKSRQTPPLASVEMEAMEALPVTWGTSSRDEDLENCSHHL

SEQ ID NO: 6899 - protein, 209 aa, Homo Sapiens
  misc_feature (1)..(1): Xaa can be any naturally occurring amino acid
XITCPPPMSVEHADIWVKSYSLYSRERYICNSGFKRKAGTSSLTECVLNKATNVAHWTTPSLKCIRTTEISSHESSHGTPSQTTAKNWELTASASHQPPGVYPQGHSDTTGRKQHLLPDFQASFQRDCINKHIEDKECWTVASFLLFLAISTSTVLLCGLSAVSLLACYLKSRQTPPLASVEMEAMEALPVTWGTSSRDEDLENCSHHL

SEQ ID NO: 6900 - protein, 155 aa, Homo Sapiens
  misc_feature (1)..(1): Xaa can be any naturally occurring amino acid
XLVHQRPAPPSTVTTAGVTPQPESLSPSGKEPAASSPSSNNTAATTAAIVPGSQLMPSKSPSTGTTEISSHESSHGTPSQTTAKNWELTASASHQPPGVYPQGHSDTTVAISTSTVLLCGLSAVSLLACYLKSRASVCSCHPRSAGHTCSVGSVC

SEQ ID NO: 6901 - protein, 198 aa, Homo Sapiens
  misc_feature (1)..(1): Xaa can be any naturally occurring amino acid
XPAASSPSSNNTAATTAAIVPGSQLMPSKSPSTGTTEISSHESSHGTPSQTTAKNWELTASASHQPPGVYPQGHSDTTVAISTSTVLLCGLSAVSLLACYLKSSSQRKVTYLRLSVNYKAPPGVGDVYREDTSVWAPPNDPVSSCAARTDREPEKVEEMLSPVNPLHRRIQEEENSSQRHFTYICIYTSLSVISTHYI

SEQ ID NO: 6902 - protein, 155 aa, Homo Sapiens
MTPGKTSLVSLLLLLSLEAIVKAGITIPRNPGCPNSEDKNFPRTVMVNLNIHNRNTNTNPKRSSDYYNRSTSPWNLHRNEDPERYPSVIWEAKCRHLGCINADGNVDYHMNSVPIQQEILVLRREPPHCPNSFRLEKILVSVGCTCVTPIVHHVA

SEQ ID NO: 6903 - protein, 180 aa, Homo Sapiens
MDWPHNLLFLLTISIFLGLGQPRSPKSKRKGQGRPGPLAPGPHQVPLDLVSRMKPYARMEEYERNIEEMVAQLRNSSELAQRKCEVNLQLWMSNKRSLSPWGYSINHDPSRIPVDLPEARCLCLGCVNPFTMQEDRSMVSVPVFSQVPVRRRLCPPPPRTGPCRQRAVMETIAVGCTCIF

SEQ ID NO: 6904 - protein, 197 aa, Homo Sapiens
MTLLPGLLFLTWLHTCLAHHDPSLRGHPHSHGTPHCYSAEELPLGQAPPHLLARGAKWGQALPVALVSSLEAASHRGRHERPSATTQCPVLRPEEVLEADTHQRSISPWRYRVDTDEDRYPQKLAFAECLCRGCIDARTGRETAALNSVRLLQSLLVLRRRPCSRDGSGLPTPGAFAFHTEFIHVPVGCTCVLPRSV

SEQ ID NO: 6905 - protein, 35 aa, Homo Sapiens
MLGALVWMLVAGFLLALPPSWAAGAPRAGRRPARP

SEQ ID NO: 6906 - protein, 202 aa, Homo Sapiens
MLVAGFLLALPPSWAAGAPRAGRRPARPRGCADRPEELLEQLYGRLAAGVLSAFHHTLQLGPREQARNASCPAGGRPADRRFRPPTNLRSVSPWAYRISYDPARYPRYLPEAYCLCRGCLTGLFGEEDVRFRSAPVYMPTVVLRRTPACAGGRSVYTEAYVTIPVGCTCVPEPEKDADSINSSIDKQGAKLLLGPNDAPAGP

SEQ ID NO: 6907 - protein, 90 aa, Homo Sapiens
  misc_feature (1)..(1): Xaa can be any naturally occurring amino acid
XRPRGCADRPEELLEQLYGRLAAGVLSAFHHTLQLGPREQARNASCPAGGRPADRRFRPPTNLRSVSPWAYSSVSITSNHPWRTRPLFLD

SEQ ID NO: 6908 - protein, 163 aa, Homo Sapiens
MTVKTLHGPAMVKYLLLSILGLAFLSEAAARKIPKVGHTFFQKPESCPPVPGGSMKLDIGIINENQRVSMSRNIESRSTSPWNYTVTWDPNRYPSEVVQAQCRNLGCINAQGKEDISMNSVPIQQETLVVRRKHQGCSVSFQLEKVLVTVGCTCVTPVIHHVQ

SEQ ID NO: 6909 - protein, 866 aa, Homo Sapiens
MGAARSPPSAVPGPLLGLLLLLLGVLAPGGASLRLLDHRALVCSQPGLNCTVKNSTCLDDSWIHPRNLTPSSPKDLQIQLHFAHTQQGDLFPVAHIEWTLQTDASILYLEGAELSVLQLNTNERLCVRFEFLSKLRHHHRRWRFTFSHFVVDPDQEYEVTVHHLPKPIPDGDPNHQSKNFLVPDCEHARMKVTTPCMSSGSLWDPNITVETLEAHQLRVSFTLWNESTHYQILLTSFPHMENHSCFEHMHHIPAPRPEEFHQRSNVTLTLRNLKGCCRHQVQIQPFFSSCLNDCLRHSATVSCPEMPDTPEPIPDYMPLWVYWFITGISILLVGSVILLIVCMTWRLAGPGSEKYSDDTKYTDGLPAADLIPPPLKPRKVWIIYSADHPLYVDVVLKFAQFLLTACGTEVALDLLEEQAISEAGVMTWVGRQKQEMVESNSKIIVLCSRGTRAKWQALLGRGAPVRLRCDHGKPVGDLFTAAMNMILPDFKRPACFGTYVVCYFSEVSCDGDVPDLFGAAPRYPLMDRFEEVYFRIQDLEMFQPGRMHRVGELSGDNYLRSPGGRQLRAALDRFRDWQVRCPDWFECENLYSADDQDAPSLDEEVFEEPLLPPGTGIVKRAPLVREPGSQACLAIDPLVGEEGGAAVAKLEPHLQPRGQPAPQPLHTLVLAAEEGALVAAVEPGPLADGAAVRLALAGEGEACPLLGSPGAGRNSVLFLPVDPEDSPLGSSTPMASPDLLPEDVREHLEGLMLSLFEQSLSCQAQGGCSRPAMVLTDPHTPYEEEQRQSVQSDQGYISRSSPQPPEGLTEMEEEEEEEQDPGKPALPLSPEDLESLRSLQRQLLFRQLQKNSGWDTMGSESEGPSA

SEQ ID NO: 6910 - protein, 832 aa, Homo Sapiens
MGAARSPPSAVPGPLLGLLLLLLGVLAPGGASLRLLDHRALVCSQPGLNCTVKNSTCLDDSWIHPRNLTPSSPKDLQIQLHFAHTQQGDLFPVAHIEWTLQTDASILYLEGAELSVLQLNTNERLCVRFEFLSKLRHHHRRWRFTFSHFVVDPDQEYEVTVHHLPKPIPDGDPNHQSKNFLVPDCEHARMKVTTPCMSSGSLWDPNITVETLEAHQLRVSFTLWNESTHYQILLTSFPHMENHSCFEHMHHIPAPRPEEFHQRSNVTLTLRNLKGCCRHQVQIQPFFSSCLNDCLRHSATVSCPEMPDTPEPIPGPGSEKYSDDTKYTDGLPAADLIPPPLKPRKVWIIYSADHPLYVDVVLKFAQFLLTACGTEVALDLLEEQAISEAGVMTWVGRQKQEMVESNSKIIVLCSRGTRAKWQALLGRGAPVRLRCDHGKPVGDLFTAAMNMILPDFKRPACFGTYVVCYFSEVSCDGDVPDLFGAAPRYPLMDRFEEVYFRIQDLEMFQPGRMHRVGELSGDNYLRSPGGRQLRAALDRFRDWQVRCPDWFECENLYSADDQDAPSLDEEVFEEPLLPPGTGIVKRAPLVREPGSQACLAIDPLVGEEGGAAVAKLEPHLQPRGQPAPQPLHTLVLAAEEGALVAAVEPGPLADGAAVRLALAGEGEACPLLGSPGAGRNSVLFLPVDPEDSPLGSSTPMASPDLLPEDVREHLEGLMLSLFEQSLSCQAQGGCSRPAMVLTDPHTPYEEEQRQSVQSDQGYISRSSPQPPEGLTEMEEEEEEEQDPGKPALPLSPEDLESLRSLQRQLLFRQLQKNSGWDTMGSESEGPSA

SEQ ID NO: 6911 - protein, 330 aa, Homo Sapiens
MPVPWFLLSLALGRSPVVLSLERLVGPQDATHCSPGLSCRLWDSDILCLPGDIVPAPGPVLAPTHLQTELVLRCQKETDCDLCLRVAVHLAVHASLQAQVVLSFQAYPTARCVLLEVQVPAALVQFGQSVGSVVYDCFEAALGSEVRIWSYTQPRYEKELNHTQQLPALPWLNVSADGDNVHLVLNVSEEQHFGLSLYWNQVQGPPKPRWHKNLTGPQIITLNHTDLVPCLCIQVWPLEPDSVRTNICPFREDPRAHQNLWQAARLQLLTLQSWLLDAPCSLPAEAALCWRAPGGDPCQPLVPPLSWENVTVDKVLEFPLLKGHPNLCVQ

SEQ ID NO: 6912 - protein, 242 aa, Homo Sapiens
MPVPWFLLSLALGRSPVVLSLERLVGPQDATHCSPGLSCRLWDSDILCLPGDIVPAPGPVLAPTHLQTELVLRCQKETDCDLCLRVAVHLAVHASLQAQVVLSFQAYPTARCVLLEVQVPAALVQFGQSVGSVVYDCFEAALGSEVRIWSYTQPRYEKELNHTQQLPALPWLNVSADGDNVHLVLNVSEEQHFGLSLYWNQVQGPPKPRWHKNLVRPPPSQVHSHCRPMPVQRTQCHIREDP

SEQ ID NO: 6913 - protein, 416 aa, Homo Sapiens
MPVPWFLLSLALGRSPVVLSLERLVGPQDATHCSPGLSCRLWDSDILCLPGDIVPAPGPVLAPTHLQTELVLRCQKETDCDLCLRVAVHLAVHASLQAQVVLSFQAYPTARCVLLEVQVPAALVQFGQSVGSVVYDCFEAALGSEVRIWSYTQPRYEKELNHTQQLPDCRGLEVWNSIPSCWALPWLNVSADGDNVHLVLNVSEEQHFGLSLYWNQVQGPPKPRWHKNLTGPQIITLNHTDLVPCLCIQVWPLEPDSVRTNICPFREDPRAHQNLWQAARLQLLTLQSWLLDAPCSLPAEAALCWRAPGGDPCQPLVPPLSWENVTVDKVLEFPLLKGHPNLCVQVNSSEKLQLQECLWADSLGPLKDDVLLLETRGPQDNRSLCALEPSGCTSLPSKASTRAARLGEYLLQDLQS

SEQ ID NO: 6914 - protein, 99 aa, Homo Sapiens
MPVPWFLLSLALGRSPVVLSLERLVGPQDATHCSPGLSCRLWDSDILCLPGDIVPAPGPVLAPTHLQTELVLRCQKETDCDLCLRVAVHLAVHGEQVIL

SEQ ID NO: 6915 - protein, 156 aa, Homo Sapiens
MPVPWFLLSLALGRSPVVLSLERLVGPQDATHCSPGLSCRLWDSDILCLPGDIVPAPGPVLAPTHLQTELVLRCQKETDCDLCLRVAVHLAVHGHWEEPEDEEKFGGAADSGVEEPRNASLQAQVVLSFQAYPTARCVLLEVQVPAALVQFGLCGI

SEQ ID NO: 6916 - protein, 705 aa, Homo Sapiens
MPVPWFLLSLALGRSPVVLSLERLVGPQDATHCSPGLSCRLWDSDILCLPGDIVPAPGPVLAPTHLQTELVLRCQKETDCDLCLRVAVHLAVHGHWEEPEDEEKFGGAADSGVEEPRNASLQAQVVLSFQAYPTARCVLLEVQVPAALVQFGQSVGSVVYDCFEAALGSEVRIWSYTQPRYEKELNHTQQLPALPWLNVSADGDNVHLVLNVSEEQHFGLSLYWNQVQGPPKPRWHKNLTGPQIITLNHTDLVPCLCIQVWPLEPDSVRTNICPFREDPRAHQNLWQAARLQLLTLQSWLLDAPCSLPAEAALCWRAPGGDPCQPLVPPLSWENVTVDKVLEFPLLKGHPNLCVQVNSSEKLQLQECLWADSLGPLKDDVLLLETRGPQDNRSLCALEPSGCTSLPSKASTRAARLGEYLLQDLQSGQCLQLWDDDLGALWACPMDKYIHKRWALVWLACLLFAAALSLILLLKKDHAKGWLRLLKQDVRSGAAARGRAALLLYSADDSGFERLVGALASALCQLPLRVAVDLWSRRELSAQGPVAWFHAQRRQTLQEGGVVVLLFSPGAVALCSEWLQDGVSGPGAHGPHDAFRASLSCVLPDFLQGRAPGSYVGACFDRLLHPDAVPALFRTVPVFTLPSQLPDFLGALQQPRAPRSGRLQERAEQVSRALQPALDSYFHPPGTPAPGRGVGPGAGPGAGDGT

SEQ ID NO: 6917 - protein, 688 aa, Homo Sapiens
MPVPWFLLSLALGRSPVVLSLERLVGPQDATHCSPGLSCRLWDSDILCLPGDIVPAPGPVLAPTHLQTELVLRCQKETDCDLCLRVAVHLAVHGHWEEPEDEEKFGGAADSGVEEPRNASLQAQVVLSFQAYPTARCVLLEVQVPAALVQFGQSVGSVVYDCFEAALGSEVRIWSYTQPRYEKELNHTQQLPALPWLNVSADGDNVHLVLNVSEEQHFGLSLYWNQVQGPPKPRWHKNLTGPQIITLNHTDLVPCLCIQVWPLEPDSVRTNICPFREDPRAHQNLWQAARLQLLTLQSWLLDAPCSLPAEAALCWRAPGGDPCQPLVPPLSWENVTVDVNSSEKLQLQECLWADSLGPLKDDVLLLETRGPQDNRSLCALEPSGCTSLPSKASTRAARLGEYLLQDLQSGQCLQLWDDDLGALWACPMDKYIHKRWALVWLACLLFAAALSLILLLKKDHAKGWLRLLKQDVRSGAAARGRAALLLYSADDSGFERLVGALASALCQLPLRVAVDLWSRRELSAQGPVAWFHAQRRQTLQEGGVVVLLFSPGAVALCSEWLQDGVSGPGAHGPHDAFRASLSCVLPDFLQGRAPGSYVGACFDRLLHPDAVPALFRTVPVFTLPSQLPDFLGALQQPRAPRSGRLQERAEQVSRALQPALDSYFHPPGTPAPGRGVGPGAGPGAGDGT

SEQ ID NO: 6918 - protein, 690 aa, Homo Sapiens
MPVPWFLLSLALGRSPVVLSLERLVGPQDATHCSPGLSCRLWDSDILCLPGDIVPAPGPVLAPTHLQTELVLRCQKETDCDLCLRVAVHLAVHGHWEEPEDEEKFGGAADSGVEEPRNASLQAQVVLSFQAYPTARCVLLEVQVPAALVQFGQSVGSVVYDCFEAALGSEVRIWSYTQPRYEKELNHTQQLPDCRGLEVWNSIPSCWALPWLNVSADGDNVHLVLNVSEEQHFGLSLYWNQVQGPPKPRWHKNLTGPQIITLNHTDLVPCLCIQVWPLEPDSVRTNICPFREDPRAHQNLWQAARLQLLTLQSWLLDAPCSLPAEAALCWRAPGGDPCQPLVPPLSWENVTVDVNSSEKLQLQECLWADSLGPLKDDVLLLETRGPQDNRSLCALEPSGCTSLPSKASTRAARLGEYLLQDLQSGQCLQLWDDDLGALWACPMDKYIHKRWALVWLACLLFAAALSLILLLKKDHAKAAARGRAALLLYSADDSGFERLVGALASALCQLPLRVAVDLWSRRELSAQGPVAWFHAQRRQTLQEGGVVVLLFSPGAVALCSEWLQDGVSGPGAHGPHDAFRASLSCVLPDFLQGRAPGSYVGACFDRLLHPDAVPALFRTVPVFTLPSQLPDFLGALQQPRAPRSGRLQERAEQVSRALQPALDSYFHPPGTPAPGRGVGPGAGPGAGDGT

SEQ ID NO: 6919 - protein, 720 aa, Homo Sapiens
MPVPWFLLSLALGRSPVVLSLERLVGPQDATHCSPGLSCRLWDSDILCLPGDIVPAPGPVLAPTHLQTELVLRCQKETDCDLCLRVAVHLAVHGHWEEPEDEEKFGGAADSGVEEPRNASLQAQVVLSFQAYPTARCVLLEVQVPAALVQFGQSVGSVVYDCFEAALGSEVRIWSYTQPRYEKELNHTQQLPDCRGLEVWNSIPSCWALPWLNVSADGDNVHLVLNVSEEQHFGLSLYWNQVQGPPKPRWHKNLTGPQIITLNHTDLVPCLCIQVWPLEPDSVRTNICPFREDPRAHQNLWQAARLQLLTLQSWLLDAPCSLPAEAALCWRAPGGDPCQPLVPPLSWENVTVDKVLEFPLLKGHPNLCVQVNSSEKLQLQECLWADSLGPLKDDVLLLETRGPQDNRSLCALEPSGCTSLPSKASTRAARLGEYLLQDLQSGQCLQLWDDDLGALWACPMDKYIHKRWALVWLACLLFAAALSLILLLKKDHAKGWLRLLKQDVRSGAAARGRAALLLYSADDSGFERLVGALASALCQLPLRVAVDLWSRRELSAQGPVAWFHAQRRQTLQEGGVVVLLFSPGAVALCSEWLQDGVSGPGAHGPHDAFRASLSCVLPDFLQGRAPGSYVGACFDRLLHPDAVPALFRTVPVFTLPSQLPDFLGALQQPRAPRSGRLQERAEQVSRALQPALDSYFHPPGTPAPGRGVGPGAGPGAGDGT

SEQ ID NO: 6920 - protein, 707 aa, Homo Sapiens
MPVPWFLLSLALGRSPVVLSLERLVGPQDATHCSPGLSCRLWDSDILCLPGDIVPAPGPVLAPTHLQTELVLRCQKETDCDLCLRVAVHLAVHGHWEEPEDEEKFGGAADSGVEEPRNASLQAQVVLSFQAYPTARCVLLEVQVPAALVQFGQSVGSVVYDCFEAALGSEVRIWSYTQPRYEKELNHTQQLPDCRGLEVWNSIPSCWALPWLNVSADGDNVHLVLNVSEEQHFGLSLYWNQVQGPPKPRWHKNLTGPQIITLNHTDLVPCLCIQVWPLEPDSVRTNICPFREDPRAHQNLWQAARLQLLTLQSWLLDAPCSLPAEAALCWRAPGGDPCQPLVPPLSWENVTVDKVLEFPLLKGHPNLCVQVNSSEKLQLQECLWADSLGPLKDDVLLLETRGPQDNRSLCALEPSGCTSLPSKASTRAARLGEYLLQDLQSGQCLQLWDDDLGALWACPMDKYIHKRWALVWLACLLFAAALSLILLLKKDHAKAAARGRAALLLYSADDSGFERLVGALASALCQLPLRVAVDLWSRRELSAQGPVAWFHAQRRQTLQEGGVVVLLFSPGAVALCSEWLQDGVSGPGAHGPHDAFRASLSCVLPDFLQGRAPGSYVGACFDRLLHPDAVPALFRTVPVFTLPSQLPDFLGALQQPRAPRSGRLQERAEQVSRALQPALDSYFHPPGTPAPGRGVGPGAGPGAGDGT

SEQ ID NO: 6921 - protein, 98 aa, Homo Sapiens
MPVPWFLLSLALGRSPVVLSLERLVGPQDATHCSPGLSCRLWDSDILCLPGDIVPAPGPVLAPTHLQTELVLRCQKETDCDLCLRVAVHLAVHGLCGI

SEQ ID NO: 6922 - protein, 123 aa, Homo Sapiens
MPVPWFLLSLALGRSPVVLSLERLVGPQDATHCSPGLSCRLWDSDILCLPGDIVPAPGPVLAPTHLQTELVLRCQKETDCDLCLRVAVHLAVHGLPYCPLRPAGGASACCPCAVWSVCGLCGI

SEQ ID NO: 6923 - protein, 91 aa, Homo Sapiens
MPVPWFLLSLALGRSPVVLSLERLVGPQDATHCSPGLSCRLWGATKFWAWNSFSSHPLLHTQTVTYSACLGTSCLLRAPCWRLRTCRQSWC

SEQ ID NO: 6924 - protein, 70 aa, Homo Sapiens
MPVPWFLLSLALGRSPVVLSLERLVGPQDATHCSPGLSCRLWVTYSACLGTSCLLRAPCWRLRTCRQSWC

SEQ ID NO: 6925 - protein, 44 aa, Homo Sapiens
MPVPWFLLSLALGRSPVVLSLERLVGPQDATHCSPNCPVWSVWC

SEQ ID NO: 6926 - protein, 791 aa, Homo Sapiens
MPVPWFLLSLALGRSPVVLSLERLVGPQDATHCSPVSLEPWGDEERLRVQFLAQQSLSLAPVTAATARTALSGLSGADGRREERGRGKSWVCLSLGGSGNTEPQKKGLSCRLWDSDILCLPGDIVPAPGPVLAPTHLQTELVLRCQKETDCDLCLRVAVHLAVHGHWEEPEDEEKFGGAADSGVEEPRNASLQAQVVLSFQAYPTARCVLLEVQVPAALVQFGQSVGSVVYDCFEAALGSEVRIWSYTQPRYEKELNHTQQLPDCRGLEVWNSIPSCWALPWLNVSADGDNVHLVLNVSEEQHFGLSLYWNQVQGPPKPRWHKNLTGPQIITLNHTDLVPCLCIQVWPLEPDSVRTNICPFREDPRAHQNLWQAARLQLLTLQSWLLDAPCSLPAEAALCWRAPGGDPCQPLVPPLSWENVTVDKVLEFPLLKGHPNLCVQVNSSEKLQLQECLWADSLGPLKDDVLLLETRGPQDNRSLCALEPSGCTSLPSKASTRAARLGEYLLQDLQSGQCLQLWDDDLGALWACPMDKYIHKRWALVWLACLLFAAALSLILLLKKDHAKGWLRLLKQDVRSGAAARGRAALLLYSADDSGFERLVGALASALCQLPLRVAVDLWSRRELSAQGPVAWFHAQRRQTLQEGGVVVLLFSPGAVALCSEWLQDGVSGPGAHGPHDAFRASLSCVLPDFLQGRAPGSYVGACFDRLLHPDAVPALFRTVPVFTLPSQLPDFLGALQQPRAPRSGRLQERAEQVSRALQPALDSYFHPPGTPAPGRGVGPGAGPGAGDGT

SEQ ID NO: 6927 - protein, 173 aa, Homo Sapiens
MGSSRLAALLLPLLLIVIDLSDSAGIGFRHLPHWNTRCPLASHTDDSFTGLQRGLFHLLVQKSKKSSTFKFYRRHKMPAPAQRKLLPRRHLSEKSHHISIPSPDISHKGLRSKRTQPSDPETWESLPRLDSQRHGGPEFSFDLLPEARAIRVTISSGPEVSVRLCHQWALECE

SEQ ID NO: 6928 - protein, 667 aa, Homo Sapiens
MGSSRLAALLLPLLLIVIDLSDSAGIGFRHLPHWNTRCPLASHTDDSFTGSSAYIPCRTWWALFSTKPWCVRVWHCSRCLCQHLLSGGSGLQRGLFHLLVQKSKKSSTFKFYRRHKMPAPAQRKLLPRRHLSEKSHHISIPSPDISHKGLRSKRTQPSDPETWESLPRLDSQRHGGPEFSFDLLPEARAIRVTISSGPEVSVRLCHQWALECEELSSPYDVQKIVSGGHTVELPYEFLLPCLCIEASYLQEDTVRRKKCPFQSWPEAYGSDFWKSVHFTDYSQHTQMVMALTLRCPLKLEAALCQRHDWHTLCKDLPNATARESDGWYVLEKVDLHPQLCFKFSFGNSSHVECPHQTGSLTSWNVSMDTQAQQLILHFSSRMHATFSAAWSLPGLGQDTLVPPVYTVSQARGSSPVSLDLIIPFLRPGCCVLVWRSDVQFAWKHLLCPDVSYRHLGLLILALLALLTLLGVVLALTCRRPQSGPGPARPVLLLHAADSEAQRRLVGALAELLRAALGGGRDVIVDLWEGRHVARVGPLPWLWAARTRVAREQGTVLLLWSGADLRPVSGPDPRAAPLLALLHAAPRPLLLLAYFSRLCAKGDIPPPLRALPRYRLLRDLPRLLRALDARPFAEATSWGRLGARQRRQSRLELCSRLEREAARLADLG

SEQ ID NO: 6929 - protein, 533 aa, Homo Sapiens
MGSSRLAALLLPLLLIVIDLSDSAGIGFRHLPHWNTRCPLASHTDDSFTGSSAYIPCRTWWALFSTKPWCVRVWHCSRCLCQHLLSGGSGLQRGLFHLLVQKSKKSSTFKFYRRHKMPAPAQRKLLPRRHLSEKSHHISIPSPDISHKGLRSKRTQPSDPETWESLPRLDSQRHGGPEFSFDLLPEARAIRVTISSGPEVSVRLCHQWALECEELSSPYDVQKIVSGGHTVELPYEFLLPCLCIEASYLQEDTVRRKKCPFQSWPEAYGSDFWKSVHFTDYSQHTQMVMALTLRCPLKLEAALCQRHDWHTLCKDLPNATARESDGWYVLEKVDLHPQLCFKFSFGNSSHVECPHQTGSLTSWNVSMDTQAQQLILHFSSRMHATFSAAWSLPGLGQDTLVPPVYTVSQARGSSPVSLDLIIPFLRPGCCVLLHASLSSPGGEDAWLIGVGGSVPSGVAVRCPVCLEAPLVSGCLLQTPGALDPGTAGPPHPTGCCSGPHLPAPTVRPGPSAASAPPARGGLGGAAAPGGSAG

SEQ ID NO: 6930 - protein, 186 aa, Homo Sapiens
MGSSRLAALLLPLLLIVIDLSDSAGIGFRHLPHWNTRCPLASHTEVLPISLAAPGGPSSPQSLGVCESGTVPAVCASICCQVAQVFNGASSTSWCRNPKSLPHSSSIGDTRCQHLLRGSCCLVVTCLRRAITFPSPPQTSPTRDFALKGPNLRIQRHGKVFPDWTHKGMEDPSSPLICCLRPGLFG

SEQ ID NO: 6931 - protein, 190 aa, Homo Sapiens
MGSSRLAALLLPLLLIVIDLSDSAGIGFRHLPHWNTRCPLASHTRKLLPRRHLSEKSHHISIPSPDISHKGLRSKRTQPSDPETWESLPRLDSQRHGGPEFSFDLLPEARAIRVTISSGPEVSVRLCHQWALECEELSSPYDVQKIVSGGHTVELPYEFLLPCLCIEMARTSGSQCTSLTTASTLRWSWP

SEQ ID NO: 6932 - protein, 146 aa, Homo Sapiens
MGSSRLAALLLPLLLIVIDLSDSAGIGFRHLPHWNTRCPLASHTVFNGASSTSWCRNPKSLPHSSSIGDTRCQHLLRGSCCLVVTCLRRAITFPSPPQTSPTRDFALKGPNLRIQRHGKVFPDWTHKGMEDPSSPLICCLRPGLFG

SEQ ID NO: 6933 - protein, 700 aa, Homo Sapiens
MLAPFLLLLTHSRSPLSFRPCSHVPGALIAQKPMGSSRLAALLLPLLLIVIDLSDSAGIGFRHLPHWNTRCPLASHTDDSFTGSSAYIPCRTWWALFSTKPWCVRVWHCSRCLCQHLLSGGSGLQRGLFHLLVQKSKKSSTFKFYRRHKMPAPAQRKLLPRRHLSEKSHHISIPSPDISHKGLRSKRTQPSDPETWESLPRLDSQRHGGPEFSFDLLPEARAIRVTISSGPEVSVRLCHQWALECEELSSPYDVQKIVSGGHTVELPYEFLLPCLCIEASYLQEDTVRRKKCPFQSWPEAYGSDFWKSVHFTDYSQHTQMVMALTLRCPLKLEAALCQRHDWHTLCKDLPNATARESDGWYVLEKVDLHPQLCFKFSFGNSSHVECPHQTGSLTSWNVSMDTQAQQLILHFSSRMHATFSAAWSLPGLGQDTLVPPVYTVSQARGSSPVSLDLIIPFLRPGCCVLVWRSDVQFAWKHLLCPDVSYRHLGLLILALLALLTLLGVVLALTCRRPQSGPGPARPVLLLHAADSEAQRRLVGALAELLRAALGGGRDVIVDLWEGRHVARVGPLPWLWAARTRVAREQGTVLLLWSGADLRPVSGPDPRAAPLLALLHAAPRPLLLLAYFSRLCAKGDIPPPLRALPRYRLLRDLPRLLRALDARPFAEATSWGRLGARQRRQSRLELCSRLEREAARLADLG

SEQ ID NO: 6934 - protein, 194 aa, Homo Sapiens
MTMRHNWTPDLSPLWVLLLCAHVVTLLVRATPVSQTTTAATASVRSTKDPCPSQPPVFPAAKQCPALEVTWPEVEVPLNGTLSLSCVACSRFPNFSILYWLGNGSFIEHLPGRLWEGSTSRERGSTGTQLCKALVLEQLTPALHSTNFSCVLVDPEQVVQRHVVLAQLWAGLRATLPPTQEALPSSHSSPQQQG

SEQ ID NO: 6935 - protein, 194 aa, Homo Sapiens; identical to SEQ ID NO: 6934

SEQ ID NO: 6936 - protein, 194 aa, Homo Sapiens; identical to SEQ ID NO: 6934

SEQ ID NO: 6937 - protein, 194 aa, Homo Sapiens; identical to SEQ ID NO: 6934

SEQ ID NO: 6938 - protein, 194 aa, Homo Sapiens; identical to SEQ ID NO: 6934

SEQ ID NO: 6939 - protein, 194 aa, Homo Sapiens; identical to SEQ ID NO: 6934

SEQ ID NO: 6940 - protein, 199 aa, Homo Sapiens
MTMRHNWTPDLSPLWVLLLCAHVVTLLVRATPVSQTTTAATASVRSTKDPCPSQPPVFPAAKQCPALEVTWPEVEVPLNGTLSLSCVACSRFPNFSILYWLGNGSFIEHLPGRLWEGSTSRERGSTGTQLCKALVLEQLTPALHSTNFSCVLVDPEQVVQRHVVLAQLWVRSPRRGLQEQEELCFHMWGGKGGLCQSSL

SEQ ID NO: 6941 - protein, 199 aa, Homo Sapiens; identical to SEQ ID NO: 6940

SEQ ID NO: 6942 - protein, 163 aa, Homo Sapiens
MTMRHNWTPDLSPLWVLLLCAHVVTLLVRATPVSQTTTAATASVRSTKDPCPSQPPVFPAAKQCPALEVTWPEVEVPLNGTLSLSCVACSRFPNFSILYWLGNGSFIEHLPGRLWEGSTSRERGSTGWAEGNLAPHPRSPALQPQQSTAAGLRLSTGPAAAQP

SEQ ID NO: 6943 - protein, 163 aa, Homo Sapiens; identical to SEQ ID NO: 6942

SEQ ID NO: 6944 - protein, 115 aa, Homo Sapiens
MTMRHNWTPDLSPLWVLLLCAHVVTLLVRATPVSQTTTAATASVRSTKDPCPSQPPVFPAAKQCPALEVTWPEVEVPLSWAEGNLAPHPRSPALQPQQSTAAGLRLSTGPAAAQP

SEQ ID NO: 6945 - protein, 170 aa, Homo Sapiens
MNCRELPLTLWVLISVSTAESCTSRPHITVVEGEPFYLKHCSCSLAHEIETTTKSWYKSSGSQEHVELNPRSSSRIALHDCVLEFWPVELNDTGSYFFQMKNYTQKWKLNVIRRNKHSCFTERQVTSKIVEVKKFFQITCENSYYQTLVNSTSLYKIGPPICRKTSSGLH

SEQ ID NO: 6946 - protein, 541 aa, Homo Sapiens
MNCRELPLTLWVLISVSTAESCTSRPHITVVEGEPFYLKHCSCSLAHEIETTTKSWYKSSGSQEHVELNPRSSSRIALHDCVLEFWPVELNDTGSYFFQMKNYTQKWKLNVIRRNKHSCFTERQVTSKIVEVKKFFQITCENSYYQTLVNSTSLYKNCKKLLLENNKNPTIKKNAEFEDQGYYSCVHFLHHNGKLFNITKTFNITIVEDRSNIVPVLLGPKLNHVAVELGKNVRLNCSALLNEEDVIYWMFGEENGSDPNIHEEKEMRIMTPEGKWHASKVLRIENIGESNLNVLYNCTVASTGGTDTKSFILVRKADMADIPGHVFTRGMIIAVLILVAVVCLVTVCVIYRVDLVLFYRHLTRRDETLTDGKTYDAFVSYLKECRPENGEEHTFAVEILPRVLEKHFGYKLCIFERDVVPGGAVVDEIHSLIEKSRRLIIVLSKSYMSNEVRYELESGLHEALVERKIKIILIEFTPVTDFTFLPQSLKLLKSHRVLKWKADKSLSYNSRFWKNLLYLMPAKTVKPGRDEPEVLPVLSES

SEQ ID NO: 6947 - protein, 541 aa, Homo Sapiens; identical to SEQ ID NO: 6946

SEQ ID NO: 6948 - protein, 541 aa, Homo Sapiens; identical to SEQ ID NO: 6946

SEQ ID NO: 6949 - protein, 457 aa, Homo Sapiens
MILEVKPQTNASCEYSASHKQDLLLGSTGSISCPSLSCQSDAQSPAVTWYKNGKLLSVERSNRIVVDEVYDYHQGTYVCDYTQSDTVSSWTVRAVVQVRTIVGDTKLKPDILDPVEDTLEVELGKPLTISCKARFGFERVFNPVIKWYIKDSDLEWEVSVPEAKSIKSTLKDEIIERNIILEKVTQRDLRRKFVCFVQNSIGNTTQSVQLKEKRGVVLLYILLGTIGTLVAVLAASALLYRHWIEIVLLYRTYQSKDQTLGDKKDFDAFVSYAKWSSFPSEATSSLSEEHLALSLFPDVLENKYGYSLCLLERDVAPGGVYAEDIVSIIKRSRRGIFILSPNYVNGPSIFELQAAVNLALDDQTLKLILIKFCYFQEPESLPHLVKKALRVLPTVTWRGLKSVPPNSRFWAKMRYHMPVKNSQGFTWNQLRITSRIFQWKGLSRTETTGRSSQPKEW

SEQ ID NO: 6950 - protein, 44 aa, Homo Sapiens
MLCLGWIFLWLVAGERIKGFNISGCSTKKLLWTYSTRSEEEFVL

SEQ ID NO: 6951 - protein, 599 aa, Homo Sapiens
MLCLGWIFLWLVAGERIKGFNISGCSTKKLLWTYSTRSEEEFVLFCDLPEPQKSHFCHRNRLSPKQVPEHLPFMGSNDLSDVQWYQQPSNGDPLEDIRKSYPHIIQDKCTLHFLTPGVNNSGSYICRPKMIKSPYDVACCVKMILEVKPQTNASCEYSASHKQDLLLGSTGSISCPSLSCQSDAQSPAVTWYKNGKLLSVERSNRIVVDEVYDYHQGTYVCDYTQSDTVSSWTVRAVVQVRTIVGDTKLKPDILDPVEDTLEVELGKPLTISCKARFGFERVFNPVIKWYIKDSDLEWEVSVPEAKSIKSTLKDEIIERNIILEKVTQRDLRRKFVCFVQNSIGNTTQSVQLKEKRGVVLLYILLGTIGTLVAVLAASALLYRHWIEIVLLYRTYQSKDQTLGDKKDFDAFVSYAKWSSFPSEATSSLSEEHLALSLFPDVLENKYGYSLCLLERDVAPGGVYAEDIVSIIKRSRRGIFILSPNYVNGPSIFELQAAVNLALDDQTLKLILIKFCYFQEPESLPHLVKKALRVLPTVTWRGLKSVPPNSRFWAKMRYHMPVKNSQGFTWNQLRITSRIFQWKGLSRTETTGRSSQPKEW

SEQ ID NO: 6952 - protein, 215 aa, Homo Sapiens
MCTEGAFPHRSACSLPLTHVHTHIHVCVPVLWGSVPRGMKLQCVSLWLLGTILILCSVDNHGLRRCLISTDMHHIEESFQEIKRAIQAKDTFPNVTILSTLETLQIIKPLDVCCVTKNLLAFYVDRVFKDHQEPNPKILRKISSIANSFLYMQKTLRQCQEQRQCHCRQEATNATRVIHDNYDQLEVHAAAIKSLGELDVFLAWINKNHEVMFSA

SEQ ID NO: 6953 - protein, 177 aa, Homo Sapiens
MKLQCVSLWLLGTILILCSVDNHGLRRCLISTDMHHIEESFQEIKRAIQAKDTFPNVTILSTLETLQIIKPLDVCCVTKNLLAFYVDRVFKDHQEPNPKILRKISSIANSFLYMQKTLRQCQEQRQCHCRQEATNATRVIHDNYDQLEVHAAAIKSLGELDVFLAWINKNHEVMFSA

SEQ ID NO: 6954 - protein, 177 aa, Homo Sapiens; identical to SEQ ID NO: 6953

SEQ ID NO: 6955 - protein, 298 aa, Homo Sapiens
MEFFKNENNELPKLQWYKDCKPLLLDNIHFSGVKDRLIVMNVAEKHRGNYTCHASYTYLGKQYPITRVIEFITLEENKPTRPVIVSPANETMEVDLGSQIQLICNVTGQLSDIAYWKWNGSVIDEDDPVLGEDYYSVENPANKRRSTLITVLNISEIESRFYKHPFTCFAKNTHGIDAAYIQLIYPVTNFQKHMIGICVTLTVIIVCSVFIYKIFKIDIVLWYRDSCYDFLPIKASDGKTYDAYILYPKTVGEGSTSDCDIFVFKVLPEVLEKQCGYKLFIYGRDDYVGEDIVEVINE

SEQ ID NO: 6956 - protein, 80 aa, Homo Sapiens
MKVLLRLICFIALLISSLEADKCKEREEKIILVSSANEIDVRPCPLNPNEHKGTITWYKDDSKTPVSTEQASRIHQHKEK

SEQ ID NO: 6957 - protein, 119 aa, Homo Sapiens
MKVLLRLICFIALLISSLEADKCKEREEKIILVSSANEIDVRPCPLNPNEHKGTITWYKDDSKTPVSTEQASRIHQHKEKLWFVPAKVEDSGHYYCVVRIANLYFLTIYTLVESKIGSS

SEQ ID NO: 6958 - protein, 106 aa, Homo Sapiens
MKVLLRLICFIALLISSLEADKCKEREEKIILVSSANEIDVRPCPLNPNEHKGTITWYKDDSKTPVSTEQASRIHQHKEKLWFVPAKVEDSGHYYCVVRNSSYCLR

SEQ ID NO: 6959 - protein, 114 aa, Homo Sapiens
MKVLLRLICFIALLISSLEADKCKEREEKIILVSSANEIDVRPCPLNPNEHKGTITWYKDDSKTPVSTEQASRIHQHKEKLWFVPAKVEDSGHYYCVVRNSSYCLRIKISAKFV

SEQ ID NO: 6960 - protein, 182 aa, Homo Sapiens
MKVLLRLICFIALLISSLEADKCKEREEKIILVSSANEIDVRPCPLNPNEHKGTITWYKDDSKTPVSTEQASRIHQHKEKLWFVPAKVEDSGHYYCVVRNSSYCLRIKISAKFVENEPNLCYNAQAIFKQKLPVAGDGGLVCPYMEFFKNENNELPKLQWYKDCKPLLLDNIHFSGVKDRLI

SEQ ID NO: 6961 - protein, 447 aa, Homo Sapiens
MKVLLRLICFIALLISSLEADKCKEREEKIILVSSANEIDVRPCPLNPNEHKGTITWYKDDSKTPVSTEQASRIHQHKEKLWFVPAKVEDSGHYYCVVRNSSYCLRIKISAKFVENEPNLCYNAQAIFKQKLPVAGDGGLVCPYMEFFKNENNELPKLQWYKDCKPLLLDNIHFSGVKDRLIVMNVAEKHRGNYTCHASYTYLGKQYPITRVIEFITLEENKPTRPVIVSPANETMEVDLGSQIQLICNVTGQLSDIAYWKWNGSVIDEDDPVLGEDYYSVENPANKRRSTLITVLNISEIESRFYKHPFTCFAKNTHGIDAAYIQLIYPVTNFQKHMIGICVTLTVIIVCSVFIYKIFKIDIVLWYRDSCYDFLPIKASDGKTYDAYILYPKTVGEGSTSDCDIFVFKVLPEVLEKQCGYKLFIYGRDDYVGEGMCVMEQSKGLLL

SEQ ID NO: 6962 - protein, 447 aa, Homo Sapiens; identical to SEQ ID NO: 6961

SEQ ID NO: 6963 - protein, 538 aa, Homo Sapiens
MKVLLRLICFIALLISSLEADKCKEREEKIILVSSANEIDVRPCPLNPNEHKGTITWYKDDSKTPVSTEQASRIHQHKEKLWFVPAKVEDSGHYYCVVRNSSYCLRIKISAKFVENEPNLCYNAQAIFKQKLPVAGDGGLVCPYMEFFKNENNELPKLQWYKDCKPLLLDNIHFSGVKDRLIVMNVAEKHRGNYTCHASYTYLGKQYPITRVIEFITLEENKPTRPVIVSPANETMEVDLGSQIQLICNVTGQLSDIAYWKWNGSVIDEDDPVLGEDYYSVENPANKRRSTLITVLNISEIESRFYKHPFTCFAKNTHGIDAAYIQLIYPVTNFQKHMIGICVTLTVIIVCSVFIYKIFKIDIVLWYRDSCYDFLPIKVLPEVLEKQCGYKLFIYGRDDYVGEDIVEVINENVKKSRRLIIILVRETSGFSWLGGSSEEQIAMYNALVQDGIKVVLLELEKIQDYEKMPESIKFIKQKHGAIRWSGDFTQGPQSAKTRFWKNVRYHMPVQRRSPSSKHQLLSPATKEKLQREAHVPLG

SEQ ID NO: 6964 - protein, 447 aa, Homo Sapiens; identical to SEQ ID NO: 6961

SEQ ID NO: 6965 - protein, 569 aa, Homo Sapiens
MKVLLRLICFIALLISSLEADKCKEREEKIILVSSANEIDVRPCPLNPNEHKGTITWYKDDSKTPVSTEQASRIHQHKEKLWFVPAKVEDSGHYYCVVRNSSYCLRIKISAKFVENEPNLCYNAQAIFKQKLPVAGDGGLVCPYMEFFKNENNELPKLQWYKDCKPLLLDNIHFSGVKDRLIVMNVAEKHRGNYTCHASYTYLGKQYPITRVIEFITLEENKPTRPVIVSPANETMEVDLGSQIQLICNVTGQLSDIAYWKWNGSVIDEDDPVLGEDYYSVENPANKRRSTLITVLNISEIESRFYKHPFTCFAKNTHGIDAAYIQLIYPVTNFQKHMIGICVTLTVIIVCSVFIYKIFKIDIVLWYRDSCYDFLPIKASDGKTYDAYILYPKTVGEGSTSDCDIFVFKVLPEVLEKQCGYKLFIYGRDDYVGEDIVEVINENVKKSRRLIIILVRETSGFSWLGGSSEEQIAMYNALVQDGIKVVLLELEKIQDYEKMPESIKFIKQKHGAIRWSGDFTQGPQSAKTRFWKNVRYHMPVQRRSPSSKHQLLSPATKEKLQREAHVPLG

SEQ ID NO: 6966 - protein, 173 aa, Homo Sapiens
MKVLLRLICFIALLISSLEADKCKEREEKIILVSSANEIDVRPCPLNPNEHKGTITWYKDDSKTPVSTEQASRIHQHKEKLWFVPAKVEDSGHYYCVVRNSSYCLRIKISAKFVENEPNLCYNAQAIFKQKLPVAGDGGLVCPYMEFFKNENNELPKLQWYKVAVSRVWATAL

SEQ ID NO: 6967 - protein, 124 aa, Homo Sapiens
  misc_feature (1)..(1): Xaa can be any naturally occurring amino acid
XKCKEREEKIILVSSANEIDVRPCPLNPNEHKGTITWYKDDSKTPVSTEQASRIHQHKEKLWFVPAKVEDSGHYYCVETEDLCALIWSFLKMKIMSYLNYSGIRIANLYFLTIYTLVESKIGSS

SEQ ID NO: 6968 - protein, 229 aa, Homo Sapiens
MLRLYVLVMGVSAFTLQPAAHTGAARSCRFRGRHYKREFRLEGEPVALRCPQVPYWLWASVSPRINLTWHKNDSARTVPGEEETRMWAQDGALWLLPALQEDSGTYVCTTRNASYCDKMSIELRVFENTDAFLPFISYPQILTLSTSGVLVCPDLSEFTRDKTDVKIQWYKDSLLLDKDNEKFLSVRGTTHLLVHDVALEDAGYYRCVLTFAHEGQQYNITRSIELRIK

SEQ ID NO: 6969 - protein, 398 aa, Homo Sapiens
MLRLYVLVMGVSAFTLQPAAHTGAARSCRFRGRHYKREFRLEGEPVALRCPQVPYWLWASVSPRINLTWHKNDSARTVPGEEETRMWAQDGALWLLPALQEDSGTYVCTTRNASYCDKMSIELRVFENTDAFLPFISYPQILTLSTSGVLVCPDLSEFTRDKTDVKIQWYKDSLLLDKDNEKFLSVRGTTHLLVHDVALEDAGYYRCVLTFAHEGQQYNITRSIELRIKKKKEETIPVIISPLKTISASLGSRLTIPCKVFLGTGTPLTTMLWWTANDTHIESAYPGGRVTEGPRQEYSENNENYIEVPLIFDPVTREDLHMDFKCVVHNTLSFQTLRTTVKEASSTFSWGIVLAPLSLAFLVLGGIWMHRRCKHRTGKADGLTVLWPHHQDFQSYPK

SEQ ID NO: 6970 - protein, 398 aa, Homo Sapiens; identical to SEQ ID NO: 6969

SEQ ID NO: 6971 - protein, 296 aa, Homo Sapiens
MLRLYVLVMGVSAFTLQPAAHTGAARSCRFRGRHYKREFRLEGEPVALRCPQVPYWLWASVSPRINLTWHKNDSARTVPGEEETRMWAQDGALWLLPALQEDSGTYVCTTRNASYCDKMSIELRVFENTDAFLPFISYPQILTLSTSGVLVCPDLSEFTRDKTDVKIQWYKDSLLLDKDNEKFLSVRGTTHLLVHDVALEDAGYYRCVLTFAHEGQQYNITRSIELRIKKKKEETIPVIISPLKTISASLGSRLTIPCKVFLGTGTPLTTMLWWTANDTHIESAYPGGRVTEGPRQ

SEQ ID NO: 6972 - protein, 215 aa, Homo Sapiens
MKLPVHKLYIEYGIQRITCPNVDGYFPSSVKPTITWYMGCYKIQNFNNVIPEGMNLSFLIALISNNGNYTCVVTYPENGRTFHLTRTLTVKVVGSPKNAVPPVIHSPNDHVVYEKEPGEELLIPCTVYFSFLMDSRNEVWWTIDGKKPDDITIDVTINESISHSRTEDETRTQILSIKKVTSEDLKRSYVCHARSAKGEVAKAAKVKQKGNRCGQ

SEQ ID NO: 6973 - protein, 113 aa, Homo Sapiens
MTLLWCVVSLYFYGILQSDASERCDDWGLDTMRQIQVFEDEPARIKCPLFEHFLKFNYSTAHSAGLTLIWYWTRQDRDLEEPINFRLPENRISKEKDVLWFRPTLLNDTGNYT

SEQ ID NO: 6974 - protein, 145 aa, Homo Sapiens
MTLLWCVVSLYFYGILQSDASERCDDWGLDTMRQIQVFEDEPARIKCPLFEHFLKFNYSTAHSAGLTLIWYWTRQDRDLEEPINFRLPENRISKEKDVLWFRPTLLNDTGNYTCMLRNTTYCSKVAFPLEVVQKDSCFNSPMKLP

SEQ ID NO: 6975 - protein, 570 aa, Homo Sapiens
MTLLWCVVSLYFYGILQSDASERCDDWGLDTMRQIQVFEDEPARIKCPLFEHFLKFNYSTAHSAGLTLIWYWTRQDRDLEEPINFRLPENRISKEKDVLWFRPTLLNDTGNYTCMLRNTTYCSKVAFPLEVVQKDSCFNSPMKLPVHKLYIEYGIQRITCPNVDGYFPSSVKPTITWYMGCYKIQNFNNVIPEGMNLSFLIALISNNGNYTCVVTYPENGRTFHLTRTLTVKVVGSPKNAVPPVIHSPNDHVVYEKEPGEELLIPCTVYFSFLMDSRNEVWWTIDGKKPDDITIDVTINESISHSRTEDETRTQILSIKKVTSEDLKRSYVCHARSAKGEVAKAAKVKQKVPAPRYTVELACGFGATVLLVVILIVVYHVYWLEMVLFYRAHFGTDETILDGKEYDIYVSYARNAEEEEFVLLTLRGVLENEFGYKLCIFDRDSLPGGIVTDETLSFIQKSRRLLVVLSPNYVLQGTQALLELKAGLENMASRGNINVILVQYKAVKETKVKELKRAKTVLTVIKWKGEKSKYPQGRFWKQLQVAMPVKKSPRRSSSDEQGLSYSSLKNV

SEQ ID NO: 6976 - protein, 346 aa, Homo Sapiens
MTLLWCVVSLYFYGILQSDASERCDDWGLDTMRQIQVFEDEPARIKCPLFEHFLKFNYSTAHSAGLTLIWYWTRQDRDLEEPINFRLPENRISKEKDVLWFRPTLLNDTGNYTCMLRNTTYCSKVAFPLEVVQKDSCFNSPMKLPVHKLYIEYGIQRITCPNVDGYFPSSVKPTITWYMGCYKIQNFNNVIPEGMNLSFLIALISNNGNYTCVVTYPENGRTFHLTRTLTVKVVGSPKNAVPPVIHSPNDHVVYEKEPGEELLIPCTVYFSFLMDSRNEVWWTIDGKKPDDITIDVTINESASSKIHSGTGLWFWSHSPASGDSHCCLPCLLARDGPILPGSFWNR

SEQ ID NO: 6977 - protein, 687 aa, Homo Sapiens
MTLLWCVVSLYFYGILQSDASERCDDWGLDTMRQIQVFEDEPARIKCPLFEHFLKFNYSTAHSAGLTLIWYWTRQDRDLEEPINFRLPENRISKEKDVLWFRPTLLNDTGNYTCMLRNTTYCSKVAFPLEVVQKDSCFNSPMKLPVHKLYIEYGIQRITCPNVDGYFPSSVKPTITWYMGCYKIQNFNNVIPEGMNLSFLIALISNNGNYTCVVTYPENGRTFHLTRTLTVKVVGSPKNAVPPVIHSPNDHVVYEKEPGEELLIPCTVYFSFLMDSRNEVWWTIDGKKPDDITIDVTINESISHSRTEDETRTQILSIKKVTSEDLKRSYVCHARSAKGEVAKAAKVKQKVPAPRYTVELACGFGATVLLVVILIVVYHVYWLEMVLFYRAHFGTDETILDGKEYDIYVSYARNAEEEEFVLLTLRGVLENEFGYKLCIFDRDSLPGGNTVEAVFDFIQRSRRMIVVLSPDYVTEKSISMLEFKLGVMCQNSIATKLIVVEYRPLEHPHPGILQLKESVSFVSWKGEKSKHSGSKFWKALRLALPLRSLSASSGWNESCSSQSDISLDHVQRRRSRLKEPPELQSSERAAGSPPAPGTMSKHRGKSSATCRCCVTYCEGENHLRNKSRAEIHNQPQWETHLCKPVPQESETQWIQNGTRLEPPAPQISALALHHFTDLSNNNDFYIL

SEQ ID NO: 6978 - protein, 570 aa, Homo Sapiens; identical to SEQ ID NO: 6975

SEQ ID NO: 6979 - protein, 687 aa, Homo Sapiens; identical to SEQ ID NO: 6977

SEQ ID NO: 6980 - protein, 356 aa, Homo Sapiens
MTLLWCVVSLYFYGILQSDASERCDDWGLDTMRQIQVFEDEPARIKCPLFEHFLKFNYSTAHSAGLTLIWYWTRQDRDLEEPINFRLPENRISKEKDVLWFRPTLLNDTGNYTCMLRNTTYCSKVAFPLEVVQKDSCFNSPMKLPVHKLYIEYGIQRITCPNVDGYFPSSVKPTITWYMGCYKIQNFNNVIPEGMNLSFLIALISNNGNYTCVVTYPENGRTFHLTRTLTVKVVGSPKNAVPPVIHSPNDHVVYEKEPGEELLIPCTVYFSFLMDSRNEVWWTIDGKKPDDITIDVTINESISHSRTEDETRTQILSIKKVTSEDLKRSYVCHARSAKGEVAKAAKVKQKGNRCGQ

SEQ ID NO: 6981 - protein, 356 aa, Homo Sapiens; identical to SEQ ID NO: 6980

SEQ ID NO: 6982 - protein, 346 aa, Homo Sapiens; identical to SEQ ID NO: 6976

SEQ ID NO: 6983 - protein, 570 aa, Homo Sapiens; identical to SEQ ID NO: 6975

SEQ ID NO: 6984 - protein, 570 aa, Homo Sapiens; identical to SEQ ID NO: 6975

SEQ ID NO: 6985 - protein, 193 aa, Homo Sapiens
  misc_feature (1)..(1): Xaa can be any naturally occurring amino acid
XFIHIGTSKHIEVKTQGCYKIQNFNNVIPEGMNLSFLIALISNNGNYTCVVTYPENGRTFHLTRTLTVKVVGSPKNAVPPVIHSPNDHVVYEKEPGEELLIPCTVYFSFLMDSRNEVWWTIDGKKPDDITIDVTINESISHSRTEDETRTQILSIKKVTSEDLKRSYVCHARSAKGEVAKAAKVKQKGNRCGQ

SEQ ID NO: 6986 - protein, 38 aa, Homo Sapiens
MGFWILAILTILMYSTAAKFSKQSWGLENEALIVRCPR

SEQ ID NO: 6987 - protein, 556 aa, Homo Sapiens
MGFWILAILTILMYSTAAKFSKQSWGLENEALIVRCPRQGKPSYTVDWYYSQTNKSIPTQERNRVFASGQLLKFLPAAVADSGIYTCIVRSPTFNRTGYANVTIYKKQSDCNVPDYLMYSTVSGSEKNSKIYCPTIDLYNWTAPLEWFKNCQALQGSRYRAHKSFLVIDNVMTEDAGDYTCKFIHNENGANYSVTATRSFTVKDEQGFSLFPVIGAPAQNEIKEVEIGKNANLTCSACFGKGTQFLAAVLWQLNGTKITDFGEPRIQQEEGQNQSFSNGLACLDMVLRIADVKEEDLLLQYDCLALNLHGLRRHTVRLSRKNPIDHHSIYCIIAVCSVFLMLINVLVIILKMFWIEATLLWRDIAKPYKTRNDGKLYDAYVVYPRNYKSSTDGASRVEHFVHQILPDVLENKCGYTLCIYGRDMLPGEDVVTAVETNIRKSRRHIFILTPQITHNKEFAYEQEVALHCALIQNDAKVILIEMEALSELDMLQAEALQDSLQHLMKVQGTIKWREDHIANKRSLNSKFWKHVRYQMPVPSKIPRKASSLTPLAAQKQ

SEQ ID NO: 6988 - protein, 328 aa, Homo Sapiens
MGFWILAILTILMYSTAAKFSKQSWGLENEALIVRCPRQGKPSYTVDWYYSQTNKSIPTQERNRVFASGQLLKFLPAAVADSGIYTCIVRSPTFNRTGYANVTIYKKQSDCNVPDYLMYSTVSGSEKNSKIYCPTIDLYNWTAPLEWFKNCQALQGSRYRAHKSFLVIDNVMTEDAGDYTCKFIHNENGANYSVTATRSFTVKDEQGFSLFPVIGAPAQNEIKEVEIGKNANLTCSACFGKGTQFLAAVLWQLNGTKITDFGEPRIQQEEGQNQSFSNGLACLDMVLRIADVKEEDLLLQYDCLALNLHGLRRHTVRLSRKNPSKECF

SEQ ID NO: 6989 - protein, 314 aa, Homo Sapiens
MGFWILAILTILMYSTAAKFSKQSWGLENEALIVRCPRQGKPSYTVDWYYSQTNKSIPTQERNRVFASGQLLKFLPAAVADSGIYTCIVRSPTFNRTGYANVTIYKKQSDCNVPDYLMYSTVSGSEKNSKIYCPTIDLYNWTAPLEWFKNCQALQGSRYRAHKSFLVIDNVMTEDAGDYTCKFIHNENGANYSVTATRSFTVKDEQGFSLFPVIGAPAQNEIKEVEIGTQFLAAVLWQLNGTKITDFGEPRIQQEEGQNQSFSNGLACLDMVLRIADVKEEDLLLQYDCLALNLHGLRRHTVRLSRKNPSKECF

SEQ ID NO: 6990 - protein, 259 aa, Homo Sapiens
MGFWILAILTILMYSTAAKFSKQSWGLENEALIVRCPRQGKPSYTVDWYYSQTNKSIPTQERNRVFASGQLLKFLPAAVADSGIYTCIVRSPTFNRTGYANVTIYKKQSDCNVPDYLMYSTVSGSEKNSKIYCPTIDLYNWTAPLEWFKNCQALQGSRYRAHKSFLVIDNVMTEDAGDYTCKFIHNENGANYSVTATRSFTVKVWCQSFCKLKKSLIFSNTHWIQSLMRGFVMVYYGVHKCCRVVFNLCLQYFQHHQWP

SEQ ID NO: 6991 - protein, 211 aa, Homo Sapiens
MYSTVSGSEKNSKIYCPTIDLYNWTAPLEWFKNCQALQGSRYRAHKSFLVIDNVMTEDAGDYTCKFIHNENGANYSVTATRSFTVKDEQGFSLFPVIGAPAQNEIKEVEIGKNANLTCSACFGKGTQFLAAVLWQLNGTKITDFGEPRIQQEEGQNQSFSNGLACLDMVLRIADVKEEDLLLQYDCLALNLHGLRRHTVRLSRKNPSKECF

SEQ ID NO: 6992 - protein, 457 aa, Homo Sapiens
MTGLVSLSYFPLSTRSCALQSCSPVWGCGPCCSAGCPSPFHCLSQQDCNEIKGERFTVLETRLLVSNVSAEDRGNYACQAILTHSGKQYEVLNGITVSIKRAGYGGSVPKIIYPKNHSIEVQLGTTLIVDCNVTDTKDNTNLRCWRVNNTLVDDYYDESKRIREGVETHVSFREHNLYTVNITFLEVKMEDYGLPFMCHAGVSTAYIILQLPAPDFRAYLIGGLIALVAVAVSVVYIYNIFKIDIVLWYRSAFHSTETIVDGKLYDAYVLYPKPHKESQRHAVDALVLNILPEVLERQCGYKLFIFGRDEFPGQAVANVIDENVKLCRRLIVIVVPESLGFGLLKNLSEEQIAVYSALIQDGMKVILIELEKIEDYTVMPESIQYIKQKHGAIRWHGDFTEQSQCMKTKFWKTVRYHMPPRRCRPFPPVQLLQHTPCYRTAGPELGSRRKKCTLTTG

SEQ ID NO: 6993 - protein, 172 aa, Homo Sapiens
MWSLLLCGLSIALPLSVTADGCKDIFMKNEILSASQPFAFNCTFPPITSGEVSVTWYKNSSKIPVSKIIQSRIHQDETWILFLPMEWGDSGVYQCVIKGRDSCHRIHVNLTVFEKHWCDTSIGGLPNLSDEYKQILHLGKDDSLTCHLHFPKSCVLGPIKWYKDCNEIKGER

SEQ ID NO: 6994 - protein, 575 aa, Homo Sapiens
MWSLLLCGLSIALPLSVTADGCKDIFMKNEILSASQPFAFNCTFPPITSGEVSVTWYKNSSKIPVSKIIQSRIHQDETWILFLPMEWGDSGVYQCVIKGRDSCHRIHVNLTVFEKHWCDTSIGGLPNLSDEYKQILHLGKDDSLTCHLHFPKSCVLGPIKWYKDCNEIKGERFTVLETRLLVSNVSAEDRGNYACQAILTHSGKQYEVLNGITVSITERAGYGGSVPKIIYPKNHSIEVQLGTTLIVDCNVTDTKDNTNLRCWRVNNTLVDDYYDESKRIREGVETHVSFREHNLYTVNITFLEVKMEDYGLPFMCHAGVSTAYIILQLPAPDFRAYLIGGLIALVAVAVSVVYIYNIFKIDIVLWYRSAFHSTETIVDGKLYDAYVLYPKPHKESQRHAVDALVLNILPEVLERQCGYKLFIFGRDEFPGQAVANVIDENVKLCRRLIVIVVPESLGFGLLKNLSEEQIAVYSALIQDGMKVILIELEKIEDYTVMPESIQYIKQKHGAIRWHGDFTEQSQCMKTKFWKTVRYHMPPRRCRPFPPVQLLQHTPCYRTAGPELGSRRKKCTLTTG

SEQ ID NO: 6995 - protein, 180 aa, Homo Sapiens
MALADLYEEGGGGGGEGEDNADSKETICRPSGRKSSKMQAFRIWDVNQKTFYLRNNQLVAGYLQGPNVNLEEKIDVVPIEPHALFLGIHGGKMCLSCVKSGDETRLQLEAVNITDLSENRKQDKRFAFIRSDSGPTTSFESAACPGWFLCTAMEADQPVSLTNMPDEGVMVTKFYFQEDE

SEQ ID NO: 6996 - protein, 159 aa, Homo Sapiens
MALETICRPSGRKSSKMQAFRIWDVNQKTFYLRNNQLVAGYLQGPNVNLEEKIDVVPIEPHALFLGIHGGKMCLSCVKSGDETRLQLEAVNITDLSENRKQDKRFAFIRSDSGPTTSFESAACPGWFLCTAMEADQPVSLTNMPDEGVMVTKFYFQEDE

SEQ ID NO: 6997 - protein, 177 aa, Homo Sapiens
MEICRGLRSHLITLLLFLFHSETICRPSGRKSSKMQAFRIWDVNQKTFYLRNNQLVAGYLQGPNVNLEEKIDVVPIEPHALFLGIHGGKMCLSCVKSGDETRLQLEAVNITDLSENRKQDKRFAFIRSDSGPTTSFESAACPGWFLCTAMEADQPVSLTNMPDEGVMVTKFYFQEDE

SEQ ID NO: 6998 - protein, 143 aa, Homo Sapiens
MQAFRIWDVNQKTFYLRNNQLVAGYLQGPNVNLEEKIDVVPIEPHALFLGIHGGKMCLSCVKSGDETRLQLEAVNITDLSENRKQDKRFAFIRSDSGPTTSFESAACPGWFLCTAMEADQPVSLTNMPDEGVMVTKFYFQEDE

SEQ ID NO: 6999 - protein, 143 aa, Homo Sapiens; identical to SEQ ID NO: 6998

SEQ ID NO: 7000 - protein, 153 aa, Homo Sapiens
MYRMQLLSCIALSLALVTNSAPTSSSTKKTQLQLEHLLLDLQMILNGINNYKNPKLTRMLTFKFYMPKKATELKHLQCLEEELKPLEEVLNLAQSKNFHLRPRDLISNINVIVLELKGSETTFMCEYADETATIVEFLNRWITFCQSIISTLT

SEQ ID NO: 7001 - protein, 176 aa, Homo Sapiens
MKASSLAFSLLSAAFYLLWTPSTGLKTLNLGSCVIATNLQEIRNGFSEIRGSVQAKDGNIDIRILRRTESLQDTKPANRCCLLRHLLRLYLDRVFKNYQTPDHYTLRKISSLANSFLTIKKDLRLCHAHMTCHCGEEAMKKYSQILSHFEKLEPQAAVVKALGELDILLQWMEETE

SEQ ID NO: 7002 - protein, 176 aa, Homo Sapiens; identical to SEQ ID NO: 7001

SEQ ID NO: 7003 - protein, 151 aa, Homo Sapiens
MKASSLAFSLLSAAFYLLWTPSTGLKTLNLGSCVIATNLQEIRNGFSEIRGSVQAKDGNIDIRILRRTESLQDTKPANRCCLLRHLLRLYLDRVFKNYQTPDHYTLRKISSLANSFLTIKKDLRLCLEPQAAVVKALGELDILLQWMEETE

SEQ ID NO: 7004 - protein, 504 aa, Homo Sapiens
MKNVLQWTPPEGLQGVKVTYTVQYFIYGQKKWLNKSECRNINRTYCDLSAETSDYEHQYYAKVKAIWGTKCSKWAESGRFYPFLETQIGPPEVALTTDEKSISVVLTAPEKWKRNPEDLPVSMQQIYSNLKYNVSVLNTKSNRTWSQCVTNHTLVLTWLEPNTLYCVHVESFVPGPPRRAQPSEKQCARTLKDQSSEFKAKIIFWYVLPVSITVFLFSVMGYSIYRYIHVGKEKHPANLILIYGNEFDKRFFVPAEKIVINFITLNISDDSKISHQDMSLLGKSSDVSSLNDPQPSGNLRPPQEEEEVKHLGYASHLMEIFCDSEENTEGTSLTQQESLSRTIPPDKTVIEYEYDVRTTDICAGPEEQELSLQEEVSTQGTLLESQAALAVLGPQTLQYSYTPQLQDLDPLAQEHTDSEEGPEEEPSTTLVDWDPQTGRLCIPSLSSFDQDSEGCEPSEGDGLGEEGLLSRLYEEPAPDRPPGENETYLMQFMEEWGLYVQMEN

SEQ ID NO: 7005 - protein, 42 aa, Homo Sapiens
MRAPGRPALRPLPLPPLLLLLLAAPWGRAGYSRPLLGLWAKV

SEQ ID NO: 7006 - protein, 209 aa, Homo Sapiens
MRAPGRPALRPLPLPPLLLLLLAAPWGRAVPCVSGGLPKPANITFLSINMKNVLQWTPPEGLQGVKVTYTVQYFIYGQKKWLNKSECRNINRTYCDLSAETSDYEHQYYAKVKAIWGTKCSKWAESGRFYPFLETQIGPPEVALTTDEKSISVVLTAPEKWKRNPEDLPVSMQQIYSNLKYNVSVLNTKSNRTVSLKWNGAYIHVPLCS

SEQ ID NO: 7007 - protein, 553 aa, Homo Sapiens
MRAPGRPALRPLPLPPLLLLLLAAPWGRAVPCVSGGLPKPANITFLSINMKNVLQWTPPEGLQGVKVTYTVQYFIYGQKKWLNKSECRNINRTYCDLSAETSDYEHQYYAKVKAIWGTKCSKWAESGRFYPFLETQIGPPEVALTTDEKSISVVLTAPEKWKRNPEDLPVSMQQIYSNLKYNVSVLNTKSNRTWSQCVTNHTLVLTWLEPNTLYCVHVESFVPGPPRRAQPSEKQCARTLKDQSSEFKAKIIFWYVLPVSITVFLFSVMGYSIYRYIHVGKEKHPANLILIYGNEFDKRFFVPAEKIVINFITLNISDDSKISHQDMSLLGKSSDVSSLNDPQPSGNLRPPQEEEEVKHLGYASHLMEIFCDSEENTEGTSLTQQESLSRTIPPDKTVIEYEYDVRTTDICAGPEEQELSLQEEVSTQGTLLESQAALAVLGPQTLQYSYTPQLQDLDPLAQEHTDSEEGPEEEPSTTLVDWDPQTGRLCIPSLSSFDQDSEGCEPSEGDGLGEEGLLSRLYEEPAPDRPPGENETYLMQFMEEWGLYVQMEN

SEQ ID NO: 7008 - protein, 89 aa, Homo Sapiens
MSYNGLHQRVFKELKLLTLCSISSPEKWKRNPEDLPVSMQQIYSNLKYNVSVLNTKSNRTWSQCVTNHTLVLTWLEPNTLYCVHVESFV

SEQ ID NO: 7009 - protein, 177 aa, Homo Sapiens
MSYNGLHQRVFKELKLLTLCSISSQIGPPEVALTTDEKSISVVLTAPEKWKRNPEDLPVSMQQIYSNLKYNVSVLNTKSNRTWSQCVTNHTLVLTWLEPNTLYCVHVESFVPGPPRRAQPSEKQCARTLKDQSSEFKAKIIFWYVLPVSITVFLFSVMGYSIYRYIHVGKEKHPANL

SEQ ID NO: 7010 - protein, 442 aa, Homo Sapiens
MSYNGLHQRVFKELKLLTLCSISSQIGPPEVALTTDEKSISVVLTAPEKWKRNPEDLPVSMQQIYSNLKYNVSVLNTKSNRTWSQCVTNHTLVLTWLEPNTLYCVHVESFVPGPPRRAQPSEKQCARTLKDQSSEFKAKIIFWYVLPVSITVFLFSVMGYSIYRYIHVGKEKHPANLILIYGNEFDKRFFVPAEKIVINFITLNISDDSKISHQDMSLLGKSSDVSSLNDPQPSGNLRPPQEEEEVKHLGYASHLMEIFCDSEENTEGTSLTQQESLSRTIPPDKTVIEYEYDVRTTDICAGPEEQELSLQEEVSTQGTLLESQAALAVLGPQTLQYSYTPQLQDLDPLAQEHTDSEEGPEEEPSTTLVDWDPQTGRLCIPSLSSFDQDSEGCEPSEGDGLGEEGLLSRLYEEPAPDRPPGENETYLMQFMEEWGLYVQMEN

SEQ ID NO: 7011 - protein, 162 aa, Homo Sapiens
MRSSPGNMERIVICLMVIFLGTLVHKSSSQGQDRHMIRMRQLIDIVDQLKNYVNDLVPEFLPAPEDVETNCEWSAFSCFQKAQLKSANTGNNERIINVSIKKLKRKPPSTNAGRRQKHRLTCPSCDSYEKKPPKEFLERFKSLLQKMIHQHLSSRTHGSEDS

SEQ ID NO: 7012 - protein, 153 aa, Homo Sapiens
MRSSPGNMERIVICLMVIFLGTLVHKSSSQGQDRHMIRMRQLIDIVDQLKNYVNDLVPEFLPAPEDVETNCEWSAFSCFQKAQLKSANTGNNERIINVSIKKLKRKPPSTNAGRRQKHRLTCPSCDSYEKKPPKEFLERFKSLLQKVSTLSFI

SEQ ID NO: 7013 - protein, 179 aa, Homo Sapiens
MAALQKSVSSFLMGTLATSCLLLLALLVQGGAAAPISSHCRLDKSNFQQPYITNRTFMLAKEASLADNNTDVRLIGEKLFHGVSMSERCYLMKQVLNFTLEEVLFPQSDRFQPYMQEVVPFLARLSNRLSTCHIEGDDLHIQRNVQKLKDTVKKLGESGEIKAIGELDLLFMSLRNACI

SEQ ID NO: 7014 - protein, 179 aa, Homo Sapiens; identical to SEQ ID NO: 7013

SEQ ID NO: 7015 - protein, 263 aa, Homo Sapiens
MMPKHCFLGFLISFFLTGVAGTQSTHESLKPQRVQFQSRNFHNILQWQPGRALTGNSSVYFVQYKIMFSCSMKSSHQKPSGCWQHISCNFPGCRTLAKYGQRQWKNKEDCWGTQELSCDLTSETSDIQEPYYGRVRAASAGSYSEWSMTPRFTPWWETKIDPPVMNITQVNGSLLVILHAPNLPYRYQKEKNVSIEDYYELLYRVFIINNSLEKEQKVYEGAHRAVEIEALTPHSSYCVVAEIYQPMLDRRSQRSEERCVEIP

SEQ ID NO: 7016 - protein, 130 aa, Homo Sapiens
MMPKHCFLGFLISFFLTGVAGTQSTHESLKPQRVQFQSRNFHNILQWQPGRALTGNSSVYFVQYKIYGQRQWKNKEDCWGTQELSCDLTSETSDIQEPYYGRVRAASAGSYSEWSMTPRFTPWWERAKGL

SEQ ID NO: 7017 - protein, 231 aa, Homo Sapiens
MMPKHCFLGFLISFFLTGVAGTQSTHESLKPQRVQFQSRNFHNILQWQPGRALTGNSSVYFVQYKIYGQRQWKNKEDCWGTQELSCDLTSETSDIQEPYYGRVRAASAGSYSEWSMTPRFTPWWETKIDPPVMNITQVNGSLLVILHAPNLPYRYQKEKNVSIEDYYELLYRVFIINNSLEKEQKVYEGAHRAVEIEALTPHSSYCVVAEIYQPMLDRRSQRSEERCVEIP

SEQ ID NO: 7018 - protein, 189 aa, Homo Sapiens
MLGSRAVMLLLLLPWTAQGRAVPGGSSPAWTQCQQLSQKLCTLAWSAHPLVGHMDLREEGDEETTNDVPHIQCGDGCDPQGLRDNSQFCLQRIHQGLIFYEKLLGSDIFTGEPSLLPDSPVGQLHASLLGLSQLLQPEGHHWETQQIPSLSPSQPWQRLLLRFKILRSLQAFVAVAARVFAHGAATLSP

SEQ ID NO: 7019 - protein, 206 aa, Homo Sapiens
MNFQQRLQSLWTLARPFCPPLLATASQMQMVVLPCLGFTLLLWSQVSGAQGQEFHFGPCQVKGVVPQKLWEAFWAVKDTMQAQDNITSARLLQQEVLQNVSDAESCYLVHTLLEFYLKTVFKNYHNRTVEVRTLKSFSTLANNFVLIVSQLQPSQENEMFSIRDSAHRRFLLFRRAFKQLDVEAALTKALGEVDILLTWMQKFYKL

SEQ ID NO: 7020 - protein, 60 aa, Homo Sapiens
MNFQQRLQSLWTLASKLRITSRVPGCCSRRFCRTSRKKMRCFPSETVHTGGFCYSGEHSN

SEQ ID NO: 7021 - protein, 63 aa, Homo Sapiens
MNFQQRLQSLWTLASKLRITSRVPGCCSRRFCRTSRKKMRCFPSETVHTGGFCYSGEHSNSWT

SEQ ID NO: 7022 - protein, 51 aa, Homo Sapiens
MNFQQRLQSLWTLASKLRITSRVPGCCSRRFCRTSRMLRAVTLSTPCWSST

SEQ ID NO: 7023 - protein, 207 aa, Homo Sapiens
MNFQQRLQSLWTLASRPFCPPLLATASQMQMVVLPCLGFTLLLWSQVSGAQGQEFHFGPCQVKGVVPQKLWEAFWAVKDTMQAQDNITSARLLQQEVLQNVSDAESCYLVHTLLEFYLKTVFKNYHNRTVEVRTLKSFSTLANNFVLIVSQLQPSQENEMFSIRDSAHRRFLLFRRAFKQLDVEAALTKALGEVDILLTWMQKFYKL

SEQ ID NO: 7024 - protein, 154 aa, Homo Sapiens
MNFQQRLQSLWTLASRPFCPPLLATASQMQMVVLPCLGFTLLLWSQVSGAQGQEFHFGPCQVKGVVPQKLWEAFWAVKDTMQAQDNITSARLLQQEVLQNVSQENEMFSIRDSAHRRFLLFRRAFKQLDVEAALTKALGEVDILLTWMQKFYKL

SEQ ID NO: 7025 - protein, 177 aa, Homo Sapiens
MRERPRLGEDSSLISLFLQVVAFLAMVMGTHTYSHWPSCCPSKGQDTSEELLRWSTVPVPPLEPARPNRHPESCRASEDGPLNSRAISPWRYELDRDLNRLPQDLYHARCLCPHCVSLQTGSHMDPRGNSELLYHNQTVFYRRPCHGEKGTHKGYCLERRLYRVSLACVCVRPRVMG

SEQ ID NO: 7026 - protein, 161 aa, Homo Sapiens
MYQVVAFLAMVMGTHTYSHWPSCCPSKGQDTSEELLRWSTVPVPPLEPARPNRHPESCRASEDGPLNSRAISPWRYELDRDLNRLPQDLYHARCLCPHCVSLQTGSHMDPRGNSELLYHNQTVFYRRPCHGEKGTHKGYCLERRLYRVSLACVCVRPRVMG

SEQ ID NO: 7027 - protein, 171 aa, Homo Sapiens
MLVNFILRCGLLLVTLSLAIAKHKQSSFTKSCYPRGTLSQAVDALYIKAAWLKATIPEDRIKNIRLLKKKTKKQFMKNCQFQEQLLSFFMEDVFGQLQLQGCKKIRFVEDFHSLRQKLSHCISCASSAREMKSITRMKRIFYRIGNKGIYKAISELDILLSWIKKLLESSQ

SEQ ID NO: 7028 - protein, 24 aa, Homo Sapiens
MERMQLWAMRLDLRDLQRHLRFQV

SEQ ID NO: 7029 - protein, 243 aa, Homo Sapiens
MGQTAGDLGWRLSLLLLPLLLVQAGVWGFPRPPGRPQLSLQELRREFTVSLHLARKLLSEVRGQAHRFAESHLPGVNLYLLPLGEQLPDVSLTFQAWRRLSDPERLCFISTTLQPFHALLGGLGTQGRWTNMERMQLWAMRLDLRDLQRHLRFQVLAAGFNLPEEEEEEEEEEEEERKGLLPGALGSALQGPAQVSWPQLLSTYRLLHSLELVLSRAVRELLLLSKAGHSVWPLGFPTLSPQP

SEQ ID NO: 7030 - protein, 88 aa, Homo Sapiens
MAAPALSWRLPLLILLLPLATSWASAAVNGTSQFTCFYNSRANISCVWSQDGALQDTSCQVHAWPDRRRWNQTCELLPVSQASWACNL

SEQ ID NO: 7031 - protein, 146 aa, Homo Sapiens
MAAPALSWRLPLLILLLPLATSWASAAVNGTSQFTCFYNSRANISCVWSQDGALQDTSCQVHAWPDRRRWNQTCELLPVSQASWACNLILGAPDSQKLTTVDIVTLRVLCREGVRWRVMAIQDFKPFENLRLMAPISLQVVHVETH

SEQ ID NO: 7032 - protein, 188 aa, Homo Sapiens
MAAPALSWRLPLLILLLPLATSWASAAVNGTSQFTCFYNSRANISCVWSQDGALQDTSCQVHAWPDRRRWNQTCELLPVSQASWACNLILGAPDSQKLTTVDIVTLRVLCREGVRWRVMAIQDFKPFENLRLMAPISLQVVHVETHRCNISWEISQASHYFERHLEFEARTLSPGHTWEEAPLLTLKQ

SEQ ID NO: 7033 - protein, 551 aa, Homo Sapiens
MAAPALSWRLPLLILLLPLATSWASAAVNGTSQFTCFYNSRANISCVWSQDGALQDTSCQVHAWPDRRRWNQTCELLPVSQASWACNLILGAPDSQKLTTVDIVTLRVLCREGVRWRVMAIQDFKPFENLRLMAPISLQVVHVETHRCNISWEISQASHYFERHLEFEARTLSPGHTWEEAPLLTLKQKQEWICLETLTPDTQYEFQVRVKPLQGEFTTWSPWSQPLAFRTKPAALGKDTIPWLGHLLVGLSGAFGFIILVYLLINCRNTGPWLKKVLKCNTPDPSKFFSQLSSEHGGDVQKWLSSPFPSSSFSPGGLAPEISPLEVLERDKVTQLLLQQDKVPEPASLSSNHSLTSCFTNQGYFFFHLPDALEIEACQVYFTYDPYSEEDPDEGVAGAPTGSSPQPLQPLSGEDDAYCTFPSRDDLLLFSPSLLGGPSPPSTAPGGSGAGEERMPPSLQERVPRDWDPQPLGPPTPGVPDLVDFQPPPELVLREAGEEVPDAGPREGVSFPWSRPPGQGEFRALNARLPLNTDAYLSLQELQGQDPTHLV

SEQ ID NO: 7034 - protein, 105 aa, Homo Sapiens
TCFYNSRANISCVWSQDGALQDTSCQVHAWPDRRSLQLPWDQAGMREQDKVPMREECHGASGGGSAPHSGWHRGPSLALLPGAILAAERSEKSPLGQLCGSFLFF

SEQ ID NO: 7035 - protein, 152 aa, Homo Sapiens
MSRLPVLLLLQLLVRPGLQAPMTQTTPLKTSWVNCSNMIDEIITHLKQPPLPLLDFNNLNGEDQDILMENNLRRPNLEAFNRAVKSLQNASAIESILKNLLPCLPLATAAPTRHPIHIKDGDWNEFRRKLTFYLKTLENAQAQQTTLSLAIF

SEQ ID NO: 7036 - protein, 164 aa, Homo Sapiens
MASHSGPSTSVLFLFCCLGGWLASHTLPVRLLRPSDDVQKIVEELQSLSKMLLKDVEEEKGVLVSQNYTLPCLSPDAQPPNNIHSPAIRAYLKTIRQLDNKSVIDEIIEHLDKLIFQDAPETNISVPTDTHECKRFILTISQQFSECMDLALKSLTSGAQQATT

SEQ ID NO: 7037 - protein, 582 aa, Homo Sapiens
MCIRQLKFFTTACVCECPQNILSPQPSCVNLGMMWTWALWMLPSLCKFSLAALPAKPENISCVYYYRKNLTCTWSPGKETSYTQYTVKRTYAFGEKHDNCTTNSSTSENRASCSFFLPRITIPDNYTIEVEAENGDGVIKSHMTYWRLENIAKTEPPKIFRVKPVLGIKRMIQIEWIKPELAPVSSDLKYTLRFRTVNSTSWMEVNFAKNRKDKNQTYNLTGLQPFTEYVIALRCAVKESKFWSDWSQEKMGMTEEEAPCGLELWRVLKPAEADGRRPVRLLWKKARGAPVLEKTLGYNIWYYPESNTNLTETMNTTNQQLELHLGGESFWVSMISYNSLGKSPVATLRIPAIQEKSFQCIEVMQACVAEDQLVVKWQSSALDVNTWMIEWFPDVDSEPTTLSWESVSQATNWTIQQDKLKPFWCYNISVYPMLHDKVGEPYSIQAYAKEGVPSEGPETKVENIGVKTVTITWKEIPKSERKGIICNYTIFYQAEGGKGFCKHAHSEVEKNPKPQIDAMDRPVVGMAPPSHCDLQPGMNHLASLNLSENGAKSTHLLGFWGLNESEVTVPERRVLRKWKELL

SEQ ID NO: 7038 - protein, 681 aa, Homo Sapiens
MCIRQLKFFTTACVCECPQNILSPQPSCVNLGMMWTWALWMLPSLCKFSLAALPAKPENISCVYYYRKNLTCTWSPGKETSYTQYTVKRTYAFGEKHDNCTTNSSTSENRASCSFFLPRITIPDNYTIEVEAENGDGVIKSHMTYWRLENIAKTEPPKIFRVKPVLGIKRMIQIEWIKPELAPVSSDLKYTLRFRTVNSTSWMEVNFAKNRKDKNQTYNLTGLQPFTEYVIALRCAVKESKFWSDWSQEKMGMTEEEAPCGLELWRVLKPAEADGRRPVRLLWKKARGAPVLEKTLGYNIWYYPESNTNLTETMNTTNQQLELHLGGESFWVSMISYNSLGKSPVATLRIPAIQEKSFQCIEVMQACVAEDQLVVKWQSSALDVNTWMIEWFPDVDSEPTTLSWESVSQATNWTIQQDKLKPFWCYNISVYPMLHDKVGEPYSIQAYAKEGVPSEGPETKVENIGVKTVTITWKEIPKSERKGIICNYTIFYQAEGGKGFSKTVNSSILQYGLESLKRKTSYIVQVMASTSAGGTNGTSINFKTLSFSVFEIILITSLIGGGLLILIILTVAYGLKKPNKLTHLCWPTVPNPAESSIATWHGDDFKDKLNLKESDDSVNTEDRILKPCSTPSDKLVIDKLVVNFGNVLQEIFTDEARTGQENNLGGEKNGTRILSSCPTSI

SEQ ID NO: 7039 - protein, 764 aa, Homo Sapiens
MCIRQLKFFTTACVCECPQNILSPQPSCVNLGMMWTWALWMLPSLCKFSLAALPAKPENISCVYYYRKNLTCTWSPGKETSYTQYTVKRTYAFGEKHDNCTTNSSTSENRASCSFFLPRITIPDNYTIEVEAENGDGVIKSHMTYWRLENIAKTEPPKIFRVKPVLGIKRMIQIEWIKPELAPVSSDLKYTLRFRTVNSTSWMEVNFAKNRKDKNQTYNLTGLQPFTEYVIALRCAVKESKFWSDWSQEKMGMTEEEAPCGLELWRVLKPAEADGRRPVRLLWKKARGAPVLEKTLGYNIWYYPESNTNLTETMNTTNQQLELHLGGESFWVSMISYNSLGKSPVATLRIPAIQEKSFQCIEVMQACVAEDQLVVKWQSSALDVNTWMIEWFPDVDSEPTTLSWESVSQATNWTIQQDKLKPFWCYNISVYPMLHDKVGEPYSIQAYAKEGVPSEGPETKVENIGVKTVTITWKEIPKSERKGIICNYTIFYQAEGGKGFSKTVNSSILQYGLESLKRKTSYIVQVMASTSAGGTNGTSINFKTLSFSVFEIILITSLIGGGLLILIILTVAYGLKKPNKLTHLCWPTVPNPAESSIATWHGDDFKDKLNLKESDDSVNTEDRILKPCSTPSDKLVIDKLVVNFGNVLQEIFTDEARTGQENNLGGEKNGYVTCPFRPDCPLGKSFEELPVSPEIPPRKSQYLRSRMPEGTRPEAKEQLLFSGQSLVPDHLCEEGAPNPYLKNSVTAREFLVSEKLPEHTKGEV

SEQ ID NO: 7040 - protein, 745 aa, Homo Sapiens
MKLSPQPSCVNLGMMWTWALWMLPSLCKFSLAALPAKPENISCVYYYRKNLTCTWSPGKETSYTQYTVKRTYAFGEKHDNCTTNSSTSENRASCSFFLPRITIPDNYTIEVEAENGDGVIKSHMTYWRLENIAKTEPPKIFRVKPVLGIKRMIQIEWIKPELAPVSSDLKYTLRFRTVNSTSWMEVNFAKNRKDKNQTYNLTGLQPFTEYVIALRCAVKESKFWSDWSQEKMGMTEEEAPCGLELWRVLKPAEADGRRPVRLLWKKARGAPVLEKTLGYNIWYYPESNTNLTETMNTTNQQLELHLGGESFWVSMISYNSLGKSPVATLRIPAIQEKSFQCIEVMQACVAEDQLVVKWQSSALDVNTWMIEWFPDVDSEPTTLSWESVSQATNWTIQQDKLKPFWCYNISVYPMLHDKVGEPYSIQAYAKEGVPSEGPETKVENIGVKTVTITWKEIPKSERKGIICNYTIFYQAEGGKGFSKTVNSSILQYGLESLKRKTSYIVQVMASTSAGGTNGTSINFKTLSFSVFEIILITSLIGGGLLILIILTVAYGLKKPNKLTHLCWPTVPNPAESSIATWHGDDFKDKLNLKESDDSVNTEDRILKPCSTPSDKLVIDKLVVNFGNVLQEIFTDEARTGQENNLGGEKNGYVTCPFRPDCPLGKSFEELPVSPEIPPRKSQYLRSRMPEGTRPEAKEQLLFSGQSLVPDHLCEEGAPNPYLKNSVTAREFLVSEKLPEHTKGEV

SEQ ID NO: 7041 - protein, 662 aa, Homo Sapiens
MKLSPQPSCVNLGMMWTWALWMLPSLCKFSLAALPAKPENISCVYYYRKNLTCTWSPGKETSYTQYTVKRTYAFGEKHDNCTTNSSTSENRASCSFFLPRITIPDNYTIEVEAENGDGVIKSHMTYWRLENIAKTEPPKIFRVKPVLGIKRMIQIEWIKPELAPVSSDLKYTLRFRTVNSTSWMEVNFAKNRKDKNQTYNLTGLQPFTEYVIALRCAVKESKFWSDWSQEKMGMTEEEAPCGLELWRVLKPAEADGRRPVRLLWKKARGAPVLEKTLGYNIWYYPESNTNLTETMNTTNQQLELHLGGESFWVSMISYNSLGKSPVATLRIPAIQEKSFQCIEVMQACVAEDQLVVKWQSSALDVNTWMIEWFPDVDSEPTTLSWESVSQATNWTIQQDKLKPFWCYNISVYPMLHDKVGEPYSIQAYAKEGVPSEGPETKVENIGVKTVTITWKEIPKSERKGIICNYTIFYQAEGGKGFSKTVNSSILQYGLESLKRKTSYIVQVMASTSAGGTNGTSINFKTLSFSVFEIILITSLIGGGLLILIILTVAYGLKKPNKLTHLCWPTVPNPAESSIATWHGDDFKDKLNLKESDDSVNTEDRILKPCSTPSDKLVIDKLVVNFGNVLQEIFTDEARTGQENNLGGEKNGTRILSSCPTSI

SEQ ID NO: 7042 - protein, 662 aa, Homo Sapiens; identical to SEQ ID NO: 7041

SEQ ID NO: 7043 - protein, 324 aa, Homo Sapiens
MMWTWALWMLPSLCKFSLAALPAKPENISCVYYYRKNLTCTWSPGKETSYTQYTVKRTYAFGEKHDNCTTNSSTSENRASCSFFLPRITIPDNYTIEVEAENGDGVIKSHMTYWRLENIAKTEPPKIFRVKPVLGIKRMIQIEWIKPELAPVSSDLKYTLRFRTVNSTSWMEVNFAKNRKDKNQTYNLTGLQPFTEYVIALRCAVKESKFWSDWSQEKMGMTEEEAPCGLELWRVLKPAEADGRRPVRLLWKKARGAPVLEKTLGYNIWYYPESNTNLTETMNTTNQQLELHLGGESFWVSMISYNSLGKSPVATLRIPAIQEK

SEQ ID NO: 7044 - protein, 622 aa, Homo Sapiens
MTYWRLENIAKTEPPKIFRVKPVLGIKRMIQIEWIKPELAPVSSDLKYTLRFRTVNSTSWMEVNFAKNRKDKNQTYNLTGLQPFTEYVIALRCAVKESKFWSDWSQEKMGMTEEEAPCGLELWRVLKPAEADGRRPVRLLWKKARGAPVLEKTLGYNIWYYPESNTNLTETMNTTNQQLELHLGGESFWVSMISYNSLGKSPVATLRIPAIQEKSFQCIEVMQACVAEDQLVVKWQSSALDVNTWMIEWFPDVDSEPTTLSWESVSQATNWTIQQDKLKPFWCYNISVYPMLHDKVGEPYSIQAYAKEGVPSEGPETKVENIGVKTVTITWKEIPKSERKGIICNYTIFYQAEGGKGFSKTVNSSILQYGLESLKRKTSYIVQVMASTSAGGTNGTSINFKTLSFSVFEIILITSLIGGGLLILIILTVAYGLKKPNKLTHLCWPTVPNPAESSIATWHGDDFKDKLNLKESDDSVNTEDRILKPCSTPSDKLVIDKLVVNFGNVLQEIFTDEARTGQENNLGGEKNGYVTCPFRPDCPLGKSFEELPVSPEIPPRKSQYLRSRMPEGTRPEAKEQLLFSGQSLVPDHLCEEGAPNPYLKNSVTAREFLVSEKLPEHTKGEV

SEQ ID NO: 7045 - protein, 212 aa, Homo Sapiens
MCFPKGLGAWVSACDTEDTVGHLGPWRDKDPALWCQLCLSSQHQAIERFYDKMQNAESGRGQVMSSLAELEDDFKEGYLETVAAYYEEQHPELTPLLEKERDGLRCRGNRSPVPDVEDPATEEPGESFCDKVMRWFQAMLQRLQTWWHGVLAWVKEKVVALVHAVQALWKQFQSFCCSLSELFMSSFQSYGAPRGDKEELTPQKCSEPQSSK

SEQ ID NO: 7046 - protein, 131 aa, Homo Sapiens
MCFPKVLSDDMKKLKARMDDFKEGYLETVAAYYEEQHPELTPLLEKERDGLRCRGNRSPVPDVEDPATEEPGESFCDKVMRWFQAMLQRLQTWWHGVLAWVKEKVVALVHAVQALWKQFQSFCCSLSELFM

SEQ ID NO: 7047 - protein, 179 aa, Homo Sapiens
MCFPKVLSDDMKKLKARMHQAIERFYDKMQNAESGRGQDDFKEGYLETVAAYYEEQHPELTPLLEKERDGLRCRGNRSPVPDVEDPATEEPGESFCDKVMRWFQAMLQRLQTWWHGVLAWVKEKVVALVHAVQALWKQFQSFCCSLSELFMSSFQSYGAPRGDKEELTPQKCSEPQSSK

SEQ ID NO: 7048 - protein, 179 aa, Homo Sapiens; identical to SEQ ID NO: 7047

SEQ ID NO: 7049 - protein, 131 aa, Homo Sapiens
MCFPKVLSDDMKKLKARMHQAIERFYDKMQNAESGRGQVMSSLAELEDDFKEGYLETVAAYYEEQHPELTPLLEKERDGLRCRGNRSPVPDVEDPATEEPGESFCDKSYGAPRGDKEELTPQKCSEPQSSK

SEQ ID NO: 7050 - protein, 131 aa, Homo Sapiens; identical to SEQ ID NO: 7049

SEQ ID NO: 7051 - protein, 131 aa, Homo Sapiens; identical to SEQ ID NO: 7049

SEQ ID NO: 7052 - protein, 188 aa, Homo Sapiens
MCFPKVLSDDMKKLKARMHQAIERFYDKMQNAESGRGQVMSSLAELEDDFKEGYLETVAAYYEEQHPELTPLLEKERDGLRCRGNRSPVPDVEDPATEEPGESFCDKVMRWFQAMLQRLQTWWHGVLAWVKEKVVALVHAVQALWKQFQSFCCSLSELFMSSFQSYGAPRGDKEELTPQKCSEPQSSK

SEQ ID NO: 7053 - protein, 188 aa, Homo Sapiens; identical to SEQ ID NO: 7052

SEQ ID NO: 7054 - protein, 188 aa, Homo Sapiens; identical to SEQ ID NO: 7052

SEQ ID NO: 7055 - protein, 188 aa, Homo Sapiens; identical to SEQ ID NO: 7052

SEQ ID NO: 7056 - protein, 188 aa, Homo Sapiens; identical to SEQ ID NO: 7052

SEQ ID NO: 7057 - protein, 188 aa, Homo Sapiens; identical to SEQ ID NO: 7052

SEQ ID NO: 7058 - protein, 188 aa, Homo Sapiens; identical to SEQ ID NO: 7052

SEQ ID NO: 7059 - protein, 188 aa, Homo Sapiens; identical to SEQ ID NO: 7052

SEQ ID NO: 7060 - protein, 188 aa, Homo Sapiens; identical to SEQ ID NO: 7052

SEQ ID NO: 7061 - protein, 188 aa, Homo Sapiens; identical to SEQ ID NO: 7052

SEQ ID NO: 7062 - protein, 168 aa, Homo Sapiens
MCFPKVLSDDMKKLKARMHQAIERFYDKMQNAESGRGQVMSSLAELEELTPLLEKERDGLRCRGNRSPVPDVEDPATEEPGESFCDKVMRWFQAMLQRLQTWWHGVLAWVKEKVVALVHAVQALWKQFQSFCCSLSELFMSSFQSYGAPRGDKEELTPQKCSEPQSSK

SEQ ID NO: 7063 - protein, 168 aa, Homo Sapiens; identical to SEQ ID NO: 7062

SEQ ID NO: 7064 - protein, 225 aa, Homo Sapiens
MCFPKVLSDDMKKLKARMVMLLPTSAQGLGAWVSACDTEDTVGHLGPWRDKDPALWCQLCLSSQHQAIERFYDKMQNAESGRGQDDFKEGYLETVAAYYEEQHPELTPLLEKERDGLRCRGNRSPVPDVEDPATEEPGESFCDKVMRWFQAMLQRLQTWWHGVLAWVKEKVVALVHAVQALWKQFQSFCCSLSELFMSSFQSYGAPRGDKEELTPQKCSEPQSSK

SEQ ID NO: 7065 - protein, 225 aa, Homo Sapiens
MCFPKVLSDDMKKLKARMVMLLPTSAQGLGAWVSACDTEDTVGHLGPWRDKDPALWCQLCLSSQHQAIERFYDKMQNAESGRGQVMSSLAELEDDFKEGYLETVAAYYEEQHPELTPLLEKERDGLRCRGNRSPVPDVEDPATEEPGESFCDKVMRWFQAMLQRLQTWWHGVLAWVKEKVVALVHAVQALWKQFQSFCCSLSELFMSSFQSYGAPRGDKEELTPQ

SEQ ID NO: 7066 - protein, 234 aa, Homo Sapiens
MCFPKVLSDDMKKLKARMVMLLPTSAQGLGAWVSACDTEDTVGHLGPWRDKDPALWCQLCLSSQHQAIERFYDKMQNAESGRGQVMSSLAELEDDFKEGYLETVAAYYEEQHPELTPLLEKERDGLRCRGNRSPVPDVEDPATEEPGESFCDKVMRWFQAMLQRLQTWWHGVLAWVKEKVVALVHAVQALWKQFQSFCCSLSELFMSSFQSYGAPRGDKEELTPQKCSEPQSSK

SEQ ID NO: 7067 - protein, 234 aa, Homo Sapiens; identical to SEQ ID NO: 7066

SEQ ID NO: 7068 - protein, 234 aa, Homo Sapiens; identical to SEQ ID NO: 7066

SEQ ID NO: 7069 - protein, 221 aa, Homo Sapiens
MCFPKVLSDDMKKLKARMVMLLPTSAQGLGAWVSACDTEDTVGHLGPWRDKDPALWCQLCLSSQHQAIERFYDKMQNAESGRGQVMSSLAELEDDFKEGYLETVAAYYEEQHPELTPLLEKERDGLRCRGNRSPVPDVEDPATEEPGESFCDKVMRWFQAMLQRLQTWWHGVLAWVKEKVVALVHAVQALWKQFQSFCCSLSELFMSSFQSYGATRGARRS

SEQ ID NO: 7070 - protein, 168 aa, Homo Sapiens
MCFPKVLSDDMKKLKARMVMSSLAELEDDFKEGYLETVAAYYEEQHPELTPLLEKERDGLRCRGNRSPVPDVEDPATEEPGESFCDKVMRWFQAMLQRLQTWWHGVLAWVKEKVVALVHAVQALWKQFQSFCCSLSELFMSSFQSYGAPRGDKEELTPQKCSEPQSSK

SEQ ID NO: 7071 - protein, 168 aa, Homo Sapiens; identical to SEQ ID NO: 7070

SEQ ID NO: 7072 - protein, 168 aa, Homo Sapiens; identical to SEQ ID NO: 7070

SEQ ID NO: 7073 - protein, 148 aa, Homo Sapiens
MCFPKVLSDDMKKLKARMVMSSLAELEELTPLLEKERDGLRCRGNRSPVPDVEDPATEEPGESFCDKVMRWFQAMLQRLQTWWHGVLAWVKEKVVALVHAVQALWKQFQSFCCSLSELFMSSFQSYGAPRGDKEELTPQKCSEPQSSK

SEQ ID NO: 7074 - protein, 178 aa, Homo Sapiens
MKKLKARMHQAIERFYDKMQNAESGRGQVMSSLAELEDDFKEGYLETVAAYYEEQHPELTPLLEKERDGLRCRGNRSPVPDVEDPATEEPGESFCDKVMRWFQAMLQRLQTWWHGVLAWVKEKVVALVHAVQALWKQFQSFCCSLSELFMSSFQSYGAPRGDKEELTPQKCSEPQSSK

SEQ ID NO: 7075 - protein, 54 aa, Homo Sapiens
MPRGFTWLRYLGIFLGVALGNEPLEMWPLTQNEECTVTGFLRDKLQYRSRLQYM

SEQ ID NO: 7076 - protein, 242 aa, Homo Sapiens
MPRGFTWLRYLGIFLGVALGNEPLEMWPLTQNEECTVTGFLRDKLQYRSRLQYMKHYFPINYKISVPYEGVFRIANVTRLQRAQVSERELRYLWVLVSLSATESVQDVLLEGHPSWKYLQEVETLLLNVQQGLTDVEVSPKVESVLSLLNAPGPNLKLVRPKALLDNCFRVMELLYCSCCKQSSVLNWQDCEVPSPQSCSPEPSLQYAATQLYPPPPWSPSSPPHSTGSVRPVRAQGEGLLP

SEQ ID NO: 7077 - protein, 242 aa, Homo Sapiens; identical to SEQ ID NO: 7076

SEQ ID NO: 7078 - protein, 217 aa, Homo Sapiens
MWPLTQNEECTVTGFLRDKLQYRSRLQYMKHYFPINYKISVPYEGVFRIANVTRLQRAQVSERELRYLWVLVSLSATESVQDVLLEGHPSWKYLQEVETLLLNVQQGLTDVEVSPKVESVLSLLNAPGPNLKLVRPKALLDNCFRVMELLYCSCCKQSSVLNWQDCEVPSPQSCSPEPSLQYAATQLYPPPPWSPSSPPHSTGSVRPVRAQGEGLLP

SEQ ID NO: 7079 - protein, 378 aa, Homo Sapiens
MVLLWLTLLLIALPCLLQTKEDPNPPITNLRMKAKAQQLTWDLNRNVTDIECVKDADYSMPAVNNSYCQFGAISLCEVTNYTVRVANPPFSTWILFPENSGKPWAGAENLTCWIHDVDFLSCSWAVGPGAPADVQYDLYLNVANRRQQYECLHYKTDAQGTRIGCRFDDISRLSSGSQSSHILVRGRSAAFGIPCTDKFVVFSQIEILTPPNMTAKCNKTHSFMHWKMRSHFNRKFRYELQIQKRMQPVITEQVRDRTSFQLLNPGTYTVQIRARERVYEFLSAWSTPQRFECDQEEGANTRAWRTSLLIALGTLLALVCVFVICRRYLVMQRLFPRIPHMKDPIGDSFQNDKLVVWEAGKAGLEECLVTEVQVVQKT

SEQ ID NO: 7080 - protein, 164 aa, Homo Sapiens
MVLLWLTLLLIALPCLLQTKEGGKPWAGAENLTCWIHDVDFLSCSWAVGPGAPADVQYDLYLNVANRRQQYECLHYKTDAQGTRIGCRFDDISRLSSGSQSSHILVRGRSAAFGIPCTDKFVVFSQIEILTPPNMTAKCNKTHSFMHWKMRSHFNRKFRYELQI

SEQ ID NO: 7081 - protein, 300 aa, Homo Sapiens
MVLLWLTLLLIALPCLLQTKEGGKPWAGAENLTCWIHDVDFLSCSWAVGPGAPADVQYDLYLNVANRRQQYECLHYKTDAQGTRIGCRFDDISRLSSGSQSSHILVRGRSAAFGIPCTDKFVVFSQIEILTPPNMTAKCNKTHSFMHWKMRSHFNRKFRYELQIQKRMQPVITEQVRDRTSFQLLNPGTYTVQIRARERVYEFLSAWSTPQRFECDQEEGANTRAWRTSLLIALGTLLALVCVFVICRRYLVMQRLFPRIPHMKDPIGDSFQNDKLVVWEAGKAGLEECLVTEVQVVQKT

SEQ ID NO: 7082 - protein, 137 aa, Homo Sapiens
MGLTSQLLPPLFFLLACAGNFVHGHKCDITLQEIIKTLNSLTEQKNTTEKETFCRAATVLRQFYSHHEKDTRCLGATAQQFHRHKQLIRFLKRLDRNLWGLAGLNSCPVKEANQSTLENFLERLKTIMREKYSKCSS

SEQ ID NO: 7083 - protein, 153 aa, Homo Sapiens [sequence omitted]

SEQ ID NO: 7084 - protein, 136 aa, Homo Sapiens
MGLTSQLLPPLFFLLACAGNFVHGHKCDITLQEIIKTLNSLTEQKTLCTELTVTDIFAASKQHACLPTSRHTGTICRPPSARVPSTSTRLQSPERTQLRRKPSAGLRLCSGSSTATMRRTLAAWVRLHSSSTGTSS

SEQ ID NO: 7085 - protein, 32 aa, Homo Sapiens
MAPLALHLLVLVPILLSLVASQDWKAERSQDP

SEQ ID NO: 7086 - protein, 150 aa, Homo Sapiens
MAPLALHLLVLVPILLSLVASQDWKAERSQDPFEKCMQDPDYEQLLKVTILEADNRIGGRIFTYRDQNTGWIGELGAMRMPSSHRILHKLCQGLGLNLTKFTQYDKNTWTEVHEVKLRNYVVEKVPEKLGYALRPQEKGHSPEDIYQMAL

SEQ ID NO: 7087 - protein, 71 aa, Homo Sapiens
MAPLALHLLVLVPILLSLVASQDWKAERSQDPFEKCMQDPDYEQLLKVVTWGLNRTLKPQRVIVVGAGVAG

SEQ ID NO: 7088 - protein, 567 aa, Homo Sapiens
MAPLALHLLVLVPILLSLVASQDWKAERSQDPFEKCMQDPDYEQLLKVVTWGLNRTLKPQRVIVVGAGVAGLVAAKVLSDAGHKVTILEADNRIGGRIFTYRDQNTGWIGELGAMRMPSSHRILHKLCQGLGLNLTKFTQYDKNTWTEVHEVKLRNYVVEKVPEKLGYALRPQEKGHSPEDIYQMALNQALKDLKALGCRKAMKKFERHTLLEYLLGEGNLSRPAVQLLGDVMSEDGFFYLSFAEALRAHSCLSDRLQYSRIVGGWDLLPRALLSSLSGLVLLNAPVVAMTQGPHDVHVQIETSPPARNLKVLKADVVLLTASGPAVKRITFSPPLPRHMQEALRRLHYVPATKVFLSFRRPFWREEHIEGGHSNTDRPSRMIFYPPPREGALLLASYTWSDAAAAFAGLSREEALRLALDDVAALHGPVVRQLWDGTGVVKRWAEDQHSQGGFVVQPPALWQTEKDDWTVPYGRIYFAGEHTAYPHGWVETAVKSALRAAIKINSRKGPASDTASPEGHASDMEGQGHVHGVASSPSHDLAKEEGSHPPVQGQLSLQNTTHTRTSH

SEQ ID NO: 7089 - protein, 82 aa, Homo Sapiens
MPNDDFCPGLTIKAMGAERAPQRQPCNTISHRESWPHWPCTSSSSSPSSSAWWPPRTGRLNAAKTPSRNACRILTMSSCSRW

SEQ ID NO: 7090 - protein, 106 aa, Homo Sapiens
MPNDDFCPGLTIKAMGAERAPQRQPCTLHLLVLVPILLSLVASQDWKAERSQDPFEKCMQDPDYEQLLKVVTWGLNRTLKPQRVIVVGAGVAGLVAAKVLSDAGHK

SEQ ID NO: 7091 - protein, 589 aa, Homo Sapiens
MPNDDFCPGLTIKAMGAERAPQRQPCTLHLLVLVPILLSLVASQDWKAERSQDPFEKCMQDPDYEQLLKVVTWGLNRTLKPQRVIVVGAGVAGLVAAKVLSDAGHKVTILEADNRIGGRIFTYRDQNTGWIGELGAMRMPSSHRILHKLCQGLGLNLTKFTQYDKNTWTEVHEVKLRNYVVEKVPEKLGYALRPQEKGHSPEDIYQMALNQALKDLKALGCRKAMKKFERHTLLEYLLGEGNLSRPAVQLLGDVMSEDGFFYLSFAEALRAHSCLSDRLQYSRIVGGWDLLPRALLSSLSGLVLLNAPVVAMTQGPHDVHVQIETSPPARNLKVLKADVVLLTASGPAVKRITFSPPLPRHMQEALRRLHYVPATKVFLSFRRPFWREEHIEGGHSNTDRPSRMIFYPPPREGALLLASYTWSDAAAAFAGLSREEALRLALDDVAALHGPVVRQLWDGTGVVKRWAEDQHSQGGFVVQPPALWQTEKDDWTVPYGRIYFAGEHTAYPHGWVETAVKSALRAAIKINSRKGPASDTASPEGHASDMEGQGHVHGVASSPSHDLAKEEGSHPPVQGQLSLQNTTHTRTSH

SEQ ID NO: 7092 - protein, 589 aa, Homo Sapiens; identical to SEQ ID NO: 7091

SEQ ID NO: 7093 - protein, 10 aa, Homo Sapiens
MGWLCSGLLF

SEQ ID NO: 7094 - protein, 66 aa, Homo Sapiens
MGWLCSGLLFPVSCLVLLQVASSGLFRMPCGERKRVEARRSGGRSGVEEMRGSGSLWEVDLRTDWN

SEQ ID NO: 7095 - protein, 66 aa, Homo Sapiens; identical to SEQ ID NO: 7094

SEQ ID NO: 7096 - protein, 66 aa, Homo Sapiens; identical to SEQ ID NO: 7094

SEQ ID NO: 7097 - protein, 64 aa, Homo Sapiens
MGWLCSGLLFPVSCLVLLQVASSGNMKVLQEPTCVSDYMSISTCEWKMNGPTNCSTELRLLYQL

SEQ ID NO: 7098 - protein, 120 aa, Homo Sapiens
MGWLCSGLLFPVSCLVLLQVASSGNMKVLQEPTCVSDYMSISTCEWKMNGPTNCSTELRLLYQLVFLLSEAHTCIPENNGGAGCVCHLLMDDVVSADNYTLDLWAGQQLLWKGSFKPSEH

SEQ ID NO: 7099 - protein, 120 aa, Homo Sapiens; identical to SEQ ID NO: 7098

SEQ ID NO: 7100 - protein, 825 aa, Homo Sapiens
MGWLCSGLLFPVSCLVLLQVASSGNMKVLQEPTCVSDYMSISTCEWKMNGPTNCSTELRLLYQLVFLLSEAHTCIPENNGGAGCVCHLLMDDVVSADNYTLDLWAGQQLLWKGSFKPSEHVKPRAPGNLTVHTNVSDTLLLTWSNPYPPDNYLYNHLTYAVNIWSENDPADFRIYNVTYLEPSLRIAASTLKSGISYRARVRAWAQCYNTTWSEWSPSTKWHNSYREPFEQHLLLGVSVSCIVILAVCLLCYVSITKIKKEWWDQIPNPARSRLVAIIIQDAQGSQWEKRSRGQEPAKCPHWKNCLTKLLPCFLEHNMKRDEDPHKAAKEMPFQGSGKSAWCPVEISKTVLWPESISVVRCVELFEAPVECEEEEEVEEEKGSFCASPESSRDDFQEGREGIVARLTESLFLDLLGEENGGFCQQDMGESCLLPPSGSTSAHMPWDEFPSAGPKEAPPWGKEQPLHLEPSPPASPTQSPDNLTCTETPLVIAGNPAYRSFSNSLSQSPCPRELGPDPLLARHLEEVEPEMPCVPQLSEPTTVPQPEPETWEQILRRNVLQHGAAAAPVSAPTSGYQEFVHAVEQGGTQASAVVGLGPPGEAGYKAFSSLLASSAVSPEKCGFGASSGEEGYKPFQDLIPGCPGDPAPVPVPLFTFGLDREPPRSPQSSHLPSSSPEHLGLEPGEKVEDMPKPPLPQEQATDPLVDSLGSGIVYSALTCHLCGHLKQCHGQEDGGQTPVMASPCCGCCCGDRSSPPTTPLRAPDPSPGGVPLEASLCPASLAPSGISEKSKSSSSFHPAPGNAQSSSQTPKIVNFVSVGPTYMRVS

SEQ ID NO: 7101 - protein, 825 aa, Homo Sapiens; identical to SEQ ID NO: 7100

SEQ ID NO: 7102 - protein, 124 aa, Homo Sapiens
MGWLCSGLLFPVSCLVLLQVASSGNMKVLQEPTCVSDYMSISTCEWKMNGPTNCSTELRLLYQLVFLLSEAHTCIPENNGGAGCVCHLLMDDVVSADNYTLDLWAGQQLLWKGSFKPSEHVQNL

SEQ ID NO: 7103 - protein, 810 aa, Homo Sapiens
MQKDARREGNMKVLQEPTCVSDYMSISTCEWKMNGPTNCSTELRLLYQLVFLLSEAHTCIPENNGGAGCVCHLLMDDVVSADNYTLDLWAGQQLLWKGSFKPSEHVKPRAPGNLTVHTNVSDTLLLTWSNPYPPDNYLYNHLTYAVNIWSENDPADFRIYNVTYLEPSLRIAASTLKSGISYRARVRAWAQCYNTTWSEWSPSTKWHNSYREPFEQHLLLGVSVSCIVILAVCLLCYVSITKIKKEWWDQIPNPARSRLVAIIIQDAQGSQWEKRSRGQEPAKCPHWKNCLTKLLPCFLEHNMKRDEDPHKAAKEMPFQGSGKSAWCPVEISKTVLWPESISVVRCVELFEAPVECEEEEEVEEEKGSFCASPESSRDDFQEGREGIVARLTESLFLDLLGEENGGFCQQDMGESCLLPPSGSTSAHMPWDEFPSAGPKEAPPWGKEQPLHLEPSPPASPTQSPDNLTCTETPLVIAGNPAYRSFSNSLSQSPCPRELGPDPLLARHLEEVEPEMPCVPQLSEPTTVPQPEPETWEQILRRNVLQHGAAAAPVSAPTSGYQEFVHAVEQGGTQASAVVGLGPPGEAGYKAFSSLLASSAVSPEKCGFGASSGEEGYKPFQDLIPGCPGDPAPVPVPLFTFGLDREPPRSPQSSHLPSSSPEHLGLEPGEKVEDMPKPPLPQEQATDPLVDSLGSGIVYSALTCHLCGHLKQCHGQEDGGQTPVMASPCCGCCCGDRSSPPTTPLRAPDPSPGGVPLEASLCPASLAPSGISEKSKSSSSFHPAPGNAQSSSQTPKIVNFVSVGPTYMRVS

SEQ ID NO: 7104 - protein, 133 aa, Homo Sapiens
PSTKWHNSYREPFEQHLLLGVSVSCIVILAVCLLCYVSITKIKKEWWDQIPNPARSRLVAIIIQDAQGSQWEKRSRGPWAPRLVNELLAAPSTASAADCPCCNCPRHVLPTRSWPTWRPTCLCLTELEAEPRN

SEQ ID NO: 7105 - protein, 49 aa, Homo Sapiens
  misc_feature (1)..(1): Xaa can be any naturally occurring amino acid
XCVCHLLMDDVVSADNYTLDLWAGQQLLWKGSFKPSEHVLPPLKRSWSQ

SEQ ID NO: 7106 - protein, 193 aa, Homo Sapiens
  misc_feature (1)..(1): Xaa can be any naturally occurring amino acid
XNVTYLEPSLRIAASTLKSGISYRARVRAWAQCYNTTWSEWSPSTKWHNSYREPFEQHLLLGVSVSCIVILAVCLLCYVSITKIKKEWWDQIPNPARSRLVAIIIQDAQGSQWEKRSRGQEPAKCPLQGTAGGGVFWKRGLLAKPPEFHWCVRHWKNCLTKLLPCFLEHNMKRDEDPHKAAKEMPFQGSGKSA

SEQ ID NO: 7107 - protein, 51 aa, Homo Sapiens
MGVVVGWIGDPGSGTLRIPVPVHKNHQLCTEEIFQGIGTLESQTVQGGTVE

SEQ ID NO: 7108 - protein, 134 aa, Homo Sapiens
MRMLLHLSLLALGAAYVYAIPTEIPTSALVKETLALLSTHRTLLIANETLRIPVPVHKNHQLCTEEIFQGIGTLESQTVQGGTVERLFKNLSLIKKYIDGQKKKCGEERRRVNQFLDYLQEFLGVMNTEWIIES

SEQ ID NO: 7109 - protein, 109 aa, Homo Sapiens
MIIVAHVLLILLGATEILQADLLPDEKISLLPPVNFTIKVTGLAQVLLQWKPNPDQEQRNVNLEYQVKINAPKEDDYETRITESKCVTILHKGFSASVRTILQNDHSLL

SEQ ID NO: 7110 - protein, 196 aa, Homo Sapiens
MIIVAHVLLILLGATEILQADLLPDEKISLLPPVNFTIKVTGLAQVLLQWKPNPDQEQRNVNLEYQVKINAPKEDDYETRITESKCVTILHKGFSASVRTILQNDHSLLASSWASAELHAPPGSPGTSIVNLTCTTNTTEDNYSRLRSYQVSLHCTWLVGTDAPEDTQYFLYYRYGSWTEECQEYSKDTLGRNIAC

SEQ ID NO: 7111 - protein, 420 aa, Homo Sapiens
MIIVAHVLLILLGATEILQADLLPDEKISLLPPVNFTIKVTGLAQVLLQWKPNPDQEQRNVNLEYQVKINAPKEDDYETRITESKCVTILHKGFSASVRTILQNDHSLLASSWASAELHAPPGSPGTSIVNLTCTTNTTEDNYSRLRSYQVSLHCTWLVGTDAPEDTQYFLYYRYGSWTEECQEYSKDTLGRNIACWFPRTFILSKGRDWLAVLVNGSSKHSAIRPFDQLFALHAIDQINPPLNVTAEIEGTRLSIQWEKPVSAFPIHCFDYEVKIHNTRNGYLQIEKLMTNAFISIIDDLSKYDVQVRAAVSSMCREAGLWSEWSQPIYVGNDEHKPLREWFVIVIMATICFILLILSLICKICHLWIKLFPPIPAPKSNIKDLFVTTNYEKAGSSETEIEVICYIEKPGVETLEDSVF

SEQ ID NO: 7112 - protein, 335 aa, Homo Sapiens
MIIVAHVLLILLGATEILQADLLPDEKISLLPPVNFTIKVTGLAQVLLQWKPNPDQEQRNVNLEYQVKINAPKEDDYETRITESKCVTILHKGFSASVRTILQNDHSLLASSWASAELHAPPGSPGTSIVNLTCTTNTTEDNYSRLRSYQVSLHCTWLVGTDAPEDTQYFLYYRYGSWTEECQEYSKDTLGRNIACWFPRTFILSKGRDWLAVLVNGSSKHSAIRPFDQLFALHAIDQINPPLNVTAEIEGTRLSIQWEKPVSAFPIHCFDYEVKIHNTRNGYLQIEKLMTNAFISIIDDLSKYDVQVRAAVSSMCREAGLWSEWSQPIYVGFSR

SEQ ID NO: 7113 - protein, 335 aa, Homo Sapiens; identical to SEQ ID NO: 7112

SEQ ID NO: 7114 - protein, 333 aa, Homo Sapiens
MIIVAHVLLILLGATEILQADLLPDEKISLLPPVNFTIKVTGLAQVLLQWKPNPDQEQRNVNLEYQVKINAPKEDDYETRITESKCVTILHKGFSASVRTILQNDHSLLASSWASAELHAPPGSPGTSIVNLTCTTNTTEDNYSRLRSYQVSLHCTWLVGTDAPEDTQYFLYYRYGSWTEECQEYSKDTLGRNIACWFPRTFILSKGRDWLAVLVNGSSKHSAIRPFDQLFALHAIDQINPPLNVTAEIEGTRLSIQWEKPVSAFPIHCFDYEVKIHNTRNGYLQIEKLMTNAFISIIDDLSKYDVQVRAAVSSMCREAGLWSEWSQPIYVGK

SEQ ID NO: 7115 - protein, 420 aa, Homo Sapiens; identical to SEQ ID NO: 7111

SEQ ID NO: 7116 - protein, 378 aa, Homo Sapiens
MIIVAHVLLILLGATEILQADLLPDEKISLLPPVNFTIKVTGLAQVLLQWKPNPDQEQRNVNLEYQVKINAPKEDDYETRITESKCVTILHKGFSASVRTILQNDHSLLASSWASAELHAPPGSPGTSIVNLTCTTNTTEDNYSRLRSYQVSLHCTWLVGTDAPEDTQYFLYYRYGSWTEECQEYSKDTLGRNIACWFPRTFILSKGRDWLAVLVNGSSKHSAIRPFDQLFALHAIDQINPPLNVTAEIEGTRLSIQWEKPVSAFPIHCFDYEVKIHNTRNGYLQIEKLMTNAFISIIDDLSKYDVQVRAAVSSMCREAGLWSEWSQPIYVGNDEHKPLREWFVIVIMATICFILLILSLICKIKLGPVRRKLKSSVI

SEQ ID NO: 7117 - protein, 333 aa, Homo Sapiens; identical to SEQ ID NO: 7114

SEQ ID NO: 7118 - protein, 325 aa, Homo Sapiens
MIIVAHVLLILLGATEILQADLLPDEKISLLPPVNFTIKVTGLAQVLLQWKPNPDQEQRNVNLEYQVKINAPKEDDYETRITESKCVTILHKGFSASVRTILQNDHSLLASSWASAELHAPPGSPGTSIVNLTCTTNTTEDNYSRLRSYQVSLHCTWLVGTDAPEDTQYFLYYRYGSWTEECQEYSKDTLGRNIACWFPRTFILSKGRDWLAVLVNGSSKHSAIRPFDQLFALHAIGNDEHKPLREWFVIVIMATICFILLILSLICKICHLWIKLFPPIPAPKSNIKDLFVTTNYEKAGSSETEIEVICYIEKPGVETLEDSVF

SEQ ID NO: 7119 - protein, 136 aa, Homo Sapiens
MCESSKEALAENNLNLPKMAEKDGCFQSGFNEETCLVKIITGLLEFEVYLEYLQNRFESSEEQARAVQMSTKVLIQFLQKKAKNLDAITTPDPTTNASLLTKLQAQNQWLQDMTTHLILRSFKEFLQSSLRALRQM

SEQ ID NO: 7120 - protein, 122 aa, Homo Sapiens
MCESSKEALAENNLNLPKMAEKDGCFQSGFNEETCLVKIITGLLEFEVYLEYLQNRFESSEEQARAVQMSTKVLIQFLQKKVGVSSFPQLGVGEDRLKDSVLDNSGMQCHFQKRRLHVNKRV

SEQ ID NO: 7121 - protein, 189 aa, Homo Sapiens
MNSFSTIPPGEDSKDVAAPHRQPLTSSERIDKQIRYILDGISALRKETCNKSNMCESSKEALAENNLNLPKMAEKDGCFQSGFNEETCLVKIITGLLEFEVYLEYLQNRFESSEEQARAVQMSTKVLIQFLQKKAKNLDAITTPDPTTNASLLTKLQAQNQWLQDMTTHLILRSFKEFLQSSLRALRQM

SEQ ID NO: 7122 - protein, 152 aa, Homo Sapiens
MNSFSTSAFGPVAFSLGLLLVLPAAFPAPVPPGEDSKDVAAPHRQPLTSSERIDKQIRYILDGISALRKETCNKSNMCESSKEALAENNLNLPKMAEKDGCFQSGFNEETCLVKIITGLLEFEVYLEYLQNRFESSEEQARAVQMSTKVLIQ

SEQ ID NO: 7123 - protein, 212 aa, Homo Sapiens
MNSFSTSAFGPVAFSLGLLLVLPAAFPAPVPPGEDSKDVAAPHRQPLTSSERIDKQIRYILDGISALRKETCNKSNMCESSKEALAENNLNLPKMAEKDGCFQSGFNEETCLVKIITGLLEFEVYLEYLQNRFESSEEQARAVQMSTKVLIQFLQKKAKNLDAITTPDPTTNASLLTKLQAQNQWLQDMTTHLILRSFKEFLQSSLRALRQM

SEQ ID NO: 7124 - protein, 212 aa, Homo Sapiens; identical to SEQ ID NO: 7123

SEQ ID NO: 7125 - protein, 198 aa, Homo Sapiens
MNSFSTSAFGPVAFSLGLLLVLPAAFPAPVPPGEDSKDVAAPHRQPLTSSERIDKQIRYILDGISALRKETCNKSNMCESSKEALAENNLNLPKMAEKDGCFQSGFNEETCLVKIITGLLEFEVYLEYLQNRFESSEEQARAVQMSTKVLIQFLQKKVGVSSFPQLGVGEDRLKDSVLDNSGMQCHFQKRRLHVNKRV

SEQ ID NO: 7126 - protein, 171 aa, Homo Sapiens [sequence omitted]

SEQ ID NO: 7127 - protein, 365 aa, Homo Sapiens [sequence omitted]

SEQ ID NO: 7128 - protein, 468 aa, Homo Sapiens
MLAVGCALLAALLAAPGAALAPRRCPAQEVARGVLTSLPGDSVTLTCPGVEPEDNATVHWVLRKPAAGSHPSRWAGMGRRLLLRSVQLHDSGNYSCYRAGRPAGTVHLLVDVPPEEPQLSCFRKSPLSNVVCEWGPRSTPSLTTKAVLLVRKFQNSPAEDFQEPCQYSQESQKFSCQLAVPEGDSSFYIVSMCVASSVGSKFSKTQTFQGCGILQPDPPANITVTAVARNPRWLSVTWQDPHSWNSSFYRLRFELRYRAERSKTFTTWMVKDLQHHCVIHDAWSGLRHVVQLRAQEEFGQGEWSEWSPEAMGTPWTESRSPPAENEVSTPMQALTTNKDDDNILFRDSANATSLPVQDSSSVPLPTFLVAGGSLAFGTLLCIAIVLRFKKTWKLRALKEGKTSMHPPYSLGQLVPERPRPTPVLVPLISPPVSPSSLGSDNTSSHNRPDARDPRSPYDISNTDYFFPR

SEQ ID NO: 7129 - protein, 352 aa, Homo Sapiens
MLAVGCALLAALLAAPGAALAPRRCPAQEVARGVLTSLPGDSVTLTCPGVEPEDNATVHWVLRKPAAGSHPSRWAGMGRRLLLRSVQLHDSGNYSCYRAGRPAGTVHLLVDVPPEEPQLSCFRKSPLSNVVCEWGPRSTPSLTTKAVLLVRKFQNSPAEDFQEPCQYSQESQKFSCQLAVPEGDSSFYIVSMCVASSVGSKFSKTQTFQGCGILQPDPPANITVTAVARNPRWLSVTWQDPHSWNSSFYRLRFELRYRAERSKTFTTWMVKDLQHHCVIHDAWSGLRHVVQLRAQEEFGQGEWSEWSPEAMGTPWTDRLSPRCPGWSTAVQSQLTATSASWVQAILPPQPPK

SEQ ID NO: 7130 - protein, 190 aa, Homo Sapiens
  misc_feature (1)..(1): Xaa can be any naturally occurring amino acid
XGSKFSKTQTFQGCGILQPDPPANITVTAVARNPRWLSVTWQDPHSWNSSFYRLRFELRYRAERSKTFTTWMVKDLQHHCVIHDAWSGLRHVVQLRAQEEFGQGEWSEWSPEAMGTPWTESRSPPAENEVSTPMQALTTNKDDDNILFRDSANATSLPVQDSSSVPLPTFLVAGGSLAFGTLLCIAIVLR

SEQ ID NO: 7131 - protein, 294 aa, Homo Sapiens
  misc_feature (1)..(1): Xaa can be any naturally occurring amino acid
XRRLLLRSVQLHDSGNYSCYRAGRPAGTVHLLVDVPPEEPQLSCFRKSPLSNVVCEWGPRSTPSLTTKAVLLVRKFQNSPAEDFQEPCQYSQESQKFSCQLAVPEGDSSFYIVSMCVASSVGSKFSKTQTFQGCGILQPDPPANITVTAVARNPRWLSVTWQDPHSWNSSFYRLRFELRYRAERSKTFTTWMVKDLQHHCVIHDAWSGLRHVVQLRAQEEFGQGEWSEWSPEAMGTPWTGFSPQTIPGGIWDPAGESRSPPAENEVSTPMQALTTNKDDDNILFRDSANATSLP

SEQ ID NO: 7132 - protein, 66 aa, Homo Sapiens
MLTLQTWLVQALFIFLTTESTELKNTSGLMFQILQRVILPSGHLTLLQGTILIQKIKCIQMAISLM

SEQ ID NO: 7133 - protein, 918 aa, Homo Sapiens
MLTLQTWLVQALFIFLTTESTGELLDPCGYISPESPVVQLHSNFTAVCVLKEKCMDYFHVNANYIVWKTNHFTIPKEQYTIINRTASSVTFTDIASLNIQLTCNILTFGQLEQNVYGITIISGLPPEKPKNLSCIVNEGKKMRCEWDGGRETHLETNFTLKSEWATHKFADCKAKRDTPTSCTVDYSTVYFVNIEVWVEAENALGKVTSDHINFDPVYKVKPNPPHNLSVINSEELSSILKLTWTNPSIKSVIILKYNIQYRTKDASTWSQIPPEDTASTRSSFTVQDLKPFTEYVFRIRCMKEDGKGYWSDWSEEASGITYEDRPSKAPSFWYKIDPSHTQGYRTVQLVWKTLPPFEANGKILDYEVTLTRWKSHLQNYTVNATKLTVNLTNDRYLATLTVRNLVGKSDAAVLTIPACDFQATHPVMDLKAFPKDNMLWVEWTTPRESVKKYILEWCVLSDKAPCITDWQQEDGTVHRTYLRGNLAESKCYLITVTPVYADGPGSPESIKAYLKQAPPSKGPTVRTKKVGKNEAVLEWDQLPVDVQNGFIRNYTIFYRTIIGNETAVNVDSSHTEYTLSSLTSDTLYMVRMAAYTDEGGKDGPEFTFTTPKFAQGEIEAIVVPVCLAFLLTTLLGVLFCFNKRDLIKKHIWPNVPDPSKSHIAQWSPHTPPRHNFNSKDQMYSDGNFTDVSVVEIEANDKKPFPEDLKSLDLFKKEKINTEGHSSGIGGSSCMSSSRPSISSSDENESSQNTSSTVQYSTVVHSGYRHQVPSVQVFSRSESTQPLLDSEERPEDLQLVDHVDGGDGILPRQQYFKQNCSQHESSPDISHFERSKQVSSVNEEDFVRLKQQISDHISQSCGSGQMKMFQEVSAADAFGPGTEGQVERFETVGMEAATDEGMPKSYLPQTVRQGGYMPQ

SEQ ID NO: 7134 - protein, 918 aa, Homo Sapiens; identical to SEQ ID NO: 7133

SEQ ID NO: 7135 - protein, 857 aa, Homo Sapiens
MLTLQTWLVQALFIFLTTESTGELLDPCGYISPESPVVQLHSNFTAVCVLKEKCMDYFHVNANYIVWKTNHFTIPKEQYTIINRTASSVTFTDIASLNIQLTCNILTFGQLEQNVYGITIISGLPPEKPKNLSCIVNEGKKMRCEWDGGRETHLETNFTLKSEWATHKFADCKAKRDTPTSCTVDYSTVYFVNIEVWVEAENALGKVTSDHINFDPVYKVKPNPPHNLSVINSEELSSILKLTWTNPSIKSVIILKYNIQYRTKDASTWSQIPPEDTASTRSSFTVQDLKPFTEYVFRIRCMKEDGKGYWSDWSEEASGITYEDRPSKAPSFWYKIDPSHTQGYRTVQLVWKTLPPFEANGKILDYEVTLTRWKSHLQNYTVNATKLTVNLTNDRYLATLTVRNLVGKSDAAVLTIPACDFQGNLAESKCYLITVTPVYADGPGSPESIKAYLKQAPPSKGPTVRTKKVGKNEAVLEWDQLPVDVQNGFIRNYTIFYRTIIGNETAVNVDSSHTEYTLSSLTSDTLYMVRMAAYTDEGGKDGPEFTFTTPKFAQGEIEAIVVPVCLAFLLTTLLGVLFCFNKRDLIKKHIWPNVPDPSKSHIAQWSPHTPPRHNFNSKDQMYSDGNFTDVSVVEIEANDKKPFPEDLKSLDLFKKEKINTEGHSSGIGGSSCMSSSRPSISSSDENESSQNTSSTVQYSTVVHSGYRHQVPSVQVFSRSESTQPLLDSEERPEDLQLVDHVDGGDGILPRQQYFKQNCSQHESSPDISHFERSKQVSSVNEEDFVRLKQQISDHISQSCGSGQMKMFQEVSAADAFGPGTEGQVERFETVGMEAATDEGMPKSYLPQTVRQGGYMPQ

SEQ ID NO: 7136 - protein, 329 aa, Homo Sapiens
MLTLQTWLVQALFIFLTTESTGELLDPCGYISPESPVVQLHSNFTAVCVLKEKCMDYFHVNANYIVWKTNHFTIPKEQYTIINRTASSVTFTDIASLNIQLTCNILTFGQLEQNVYGITIISGLPPEKPKNLSCIVNEGKKMRCEWDGGRETHLETNFTLKSEWATHKFADCKAKRDTPTSCTVDYSTVYFVNIEVWVEAENALGKVTSDHINFDPVYKVKPNPPHNLSVINSEELSSILKLTWTNPSIKSVIILKYNIQYRTKDASTWSQIPPEDTASTRSSFTVQDLKPFTEYVFRIRCMKEDGKGYWSDWSEEASGITYEDNIASF

SEQ ID NO: 7137 - protein, 918 aa, Homo Sapiens; identical to SEQ ID NO: 7133

SEQ ID NO: 7138 - protein, 329 aa, Homo Sapiens; identical to SEQ ID NO: 7136

SEQ ID NO: 7139 - protein, 333 aa, Homo Sapiens
MLTLQTWLVQALFIFLTTESTGELLDPCGYISPESPVVQLHSNFTAVCVLKEKCMDYFHVNANYIVWKTNHFTIPKEQYTIINRTASSVTFTDIASLNIQLTCNILTFGQLEQNVYGITIISGLPPEKPKNLSCIVNEGKKMRCEWDGGRETHLETNFTLKSEWATHKFADCKAKRDTPTSCTVDYSTVYFVNIEVWVEAENALGKVTSDHINFDPVYKVKPNPPHNLSVINSEELSSILKLTWTNPSIKSVIILKYNIQYRTKDASTWSQIPPEDTASTRSSFTVQDLKPFTEYVFRIRCMKEDGKGYWSDWSEEASGITYEDTLDKPLGSG

SEQ ID NO: 7140 - protein, 203 aa, Homo Sapiens
MLTLQTWLVQALFIFLTTESTGELLDPCGYISPESPVVQLHSNFTAVCVLKEKLKPNPPHNLSVINSEELSSILKLTWTNPSIKSVIILKYNIQYRTKDASTWSQIPPEDTASTRSSFTVQDLKPFTEYVFRIRCMKEDGKGYWSDWSEEASGITYEDKLKNTSGLMFQILQRVILPSGHLTLLQGTILIQKIKCIQMAISLM

SEQ ID NO: 7141 - protein, 55 aa, Homo Sapiens
MLTLQTWLVQALFIFLTTESTGQHTSLLIAKQNVTPPPHALLIILLCILSTLKSG

SEQ ID NO: 7142 - protein, 115 aa, Homo Sapiens
MFHVSFRYIFGLPPLILVLLPVASSDCDIEGKDGKQYESVLMVSIDQLLDSMKEIGSNCLNNEFNFFKRHICDANKEENKSLKEQKKLNDLCFLKRLLQEIKTCWNKILMGTKEH

SEQ ID NO: 7143 - protein, 159 aa, Homo Sapiens
MFHVSFRYIFGLPPLILVLLPVASSDCDIEGKDGKQYESVLMVSIDQLLDSMKEIGSNCLNNEFNFFKRHICDANKEGMFLFRAARKLRQFLKMNSTGDFDLHLLKVSEGTTILLNCTGQEENKSLKEQKKLNDLCFLKRLLQEIKTCWNKILMGTKEH

SEQ ID NO: 7144 - protein, 177 aa, Homo Sapiens
MFHVSFRYIFGLPPLILVLLPVASSDCDIEGKDGKQYESVLMVSIDQLLDSMKEIGSNCLNNEFNFFKRHICDANKEGMFLFRAARKLRQFLKMNSTGDFDLHLLKVSEGTTILLNCTGQVKGRKPAALGEAQPTKSLEENKSLKEQKKLNDLCFLKRLLQEIKTCWNKILMGTKEH

SEQ ID NO: 7145 - protein, 133 aa, Homo Sapiens
MFHVSFRYIFGLPPLILVLLPVASSDCDIEGKDGKQYESVLMVSIDQLLDSMKEIGSNCLNNEFNFFKRHICDANKVKGRKPAALGEAQPTKSLEENKSLKEQKKLNDLCFLKRLLQEIKTCWNKILMGTKEH

SEQ ID NO: 7146 - protein, 71 aa, Homo Sapiens
MFHVSFRYIFGLPPLILVLLPVASSDCDIEGKDGKQYESVLMVSIDQLLNQPYKKKEKRTERKQQSAMSNN

SEQ ID NO: 7147 - protein, 71 aa, Homo Sapiens; identical to SEQ ID NO: 7146

SEQ ID NO: 7148 - protein, 37 aa, Homo Sapiens
MFHVSFRYIFGLPPLILVLLPVASSDCDIEGQHERNW

SEQ ID NO: 7149 - protein, 37 aa, Homo Sapiens; identical to SEQ ID NO: 7148

SEQ ID NO: 7150 - protein, 65 aa, Homo Sapiens
AAMYEIKVRSIPDHYFKGFWSEWSPSYYFRTPEINNSSGLSLSYGPVSPIIRRLWNIFVRNQEKI

SEQ ID NO: 7151 - protein, 52 aa, Homo Sapiens
MTILGTTFGMVFSLLQVVSGESGYAQNGDLEDAELDDYSFSCYSQLEVNGSQ

SEQ ID NO: 7152 - protein, 59 aa, Homo Sapiens
MTILGTTFGMVFSLLQVVSGESGYAQNGDLEDAELDDYSFSCYSQLEVNGSQHSLTCAF

SEQ ID NO: 7153 - protein, 150 aa, Homo Sapiens
MTILGTTFGMVFSLLQVVSGESGYAQNGDLEDAELDDYSFSCYSQLEVNGSQHSLTCAFEDPDVNITNLEFEICGALVEVKCLNFRKLQEIYFIETKKFLLIGKSNICVKVGEKSLTCKKIDLTTIGKKLYIKVWLSLLGYLKTLCLDIL

SEQ ID NO: 7154 - protein, 180 aa, Homo Sapiens
MTILGTTFGMVFSLLQVVSGESGYAQNGDLEDAELDDYSFSCYSQLEVNGSQHSLTCAFEDPDVNITNLEFEICGALVEVKCLNFRKLQEIYFIETKKFLLIGKSNICVKVGEKSLTCKKIDLTTIVKPEAPFDLSVVYREGANDFVVTFNTSHLQKKYVKVLMHDVAYRQEKDENKWTD

SEQ ID NO: 7155 - protein, 459 aa, Homo Sapiens
MTILGTTFGMVFSLLQVVSGESGYAQNGDLEDAELDDYSFSCYSQLEVNGSQHSLTCAFEDPDVNITNLEFEICGALVEVKCLNFRKLQEIYFIETKKFLLIGKSNICVKVGEKSLTCKKIDLTTIVKPEAPFDLSVVYREGANDFVVTFNTSHLQKKYVKVLMHDVAYRQEKDENKWTHVNLSSTKLTLLQRKLQPAAMYEIKVRSIPDHYFKGFWSEWSPSYYFRTPEINNSSGEMDPILLTISILSFFSVALLVILACVLWKKRIKPIVWPSLPDHKKTLEHLCKKPRKNLNVSFNPESFLDCQIHRVDDIQARDEVEGFLQDTFPQQLEESEKQRLGGDVQSPNCPSEDVVITPESFGRDSSLTCLAGNVSACDAPILSSSRSLDCRESGKNGPHVYQDLLLSLGTTNSTLPPPFSLQSGILTLNPVAQGQPILTSLGSNQEEAYVTMSSFYQNQ

SEQ ID NO: 7156 - protein, 261 aa, Homo Sapiens
MTILGTTFGMVFSLLQVVSGESGYAQNGDLEDAELDDYSFSCYSQLEVNGSQHSLTCAFEDPDVNITNLEFEICGALVEVKCLNFRKLQEIYFIETKKFLLIGKSNICVKVGEKSLTCKKIDLTTIVKPEAPFDLSVVYREGANDFVVTFNTSHLQKKYVKVLMHDVAYRQEKDENKWTHVNLSSTKLTLLQRKLQPAAMYEIKVRSIPDHYFKGFWSEWSPSYYFRTPEINNSSGLSLSYGPVSPIIRRLWNIFVRNQEK

SEQ ID NO: 7157 - protein, 144 aa, Homo Sapiens
MLLAMVLTSALLLCSVAGQGCPTLAGILDINFLINKMQEDPASKCHCSANVTSCLCLGIPSDNCTRPCFSERLSQMTNTTMQTRYPLIFSRVKKSVEVLKNNKCPYFSCEQPCNQTTAGNALTFLKSLLEIFQKEKMRGMRGKI

SEQ ID NO: 7158 - protein, 457 aa, Homo Sapiens
MAWPKLPAPWLLLCTWLPAGCLSLLVTVQHTERYVTLFASIILKCDYTTSAQLQDVVVTWRFKSFCKDPIFDYYSASYQAALSLGQDPSNDCNDNQREVRIVAQRRGQNEPVLGVDYRQRKITIQNPLARHRYMKQAQALGPQMMGKPLYWGADRSSQVSSYPMHPLLQRDLSLPSSLPQMPMTQTTNQPPIANGVLEYLEKELRNLNLAQPLPPDLKGRFGHPCSMLSSLGSEVVERRIIHLPPLIRDLSSSRRTSDSLHQQWLTPIPSRPWDLREGRSHHHYPDFHQELQDRGPKSWALERRELDPSWSGRHRSSRLNGSPIHWSDRDSLSDVPSSSEARWRPSHPPFRSRCQERPRRPSPRESTQRHGRRRRHRSYSPPLPSGLSSWSSEEDKERQPQSWRAHRRGSHSPHWPEEKPPSYRSLDITPGKNSRKKGSVERRSEKDSSHSGRSVVI

SEQ ID NO: 7159 - protein, 546 aa, Homo Sapiens
MAWPKLPAPWLLLCTWLPAGCLSLLVTVQHTERYVTLFASIILKCDYTTSAQLQDVVVTWRFKSFCKDPIFDYYSASYQAALSLGQDPSNDCNDNQREVRIVAQRRGQNEPVLGVDYRQRKITIQNRADLVINEVMWWDHGVYYCTIEAPGDTSGDPDKEVKLIVLHWLTVIFIILGALLLLLLIGVCWCQCCPQYCCCYIRCPCCPAHCCCPEEALARHRYMKQAQALGPQMMGKPLYWGADRSSQVSSYPMHPLLQRDLSLPSSLPQMPMTQTTNQPPIANGVLEYLEKELRNLNLAQPLPPDLKGRFGHPCSMLSSLGSEVVERRIIHLPPLIRDLSSSRRTSDSLHQQWLTPIPSRPWDLREGRSHHHYPDFHQELQDRGPKSWALERRELDPSWSGRHRSSRLNGSPIHWSDRDSLSDVPSSSEARWRPSHPPFRSRCQERPRRPSPRESTQRHGRRRRHRSYSPPLPSGLSSWSSEEDKERQPQSWRAHRRGSHSPHWPEEKPPSYRSLDITPGKNSRKKGSVERRSEKDSSHSGRSVVI

SEQ ID NO: 7160 - protein, 546 aa, Homo Sapiens; identical to SEQ ID NO: 7159

SEQ ID NO: 7161 - protein, 265 aa, Homo Sapiens
MAWPKLPAPWLLLCTWLPAGCLSLLVTVQHTERYVTLFASIILKCDYTTSAQLQDVVVTWRFKSFCKDPIFDYYSASYQAALSLGQDPSNDCNDNQREVRIVAQRRGQNEPVLGVDYRQRKITIQNRADLVINEVMWWDHGVYYCTIEAPGDTSGDPDKEVKLIVLHWLTVIFIILGALLLLLLIGVCWCQCCPQYCCCYIRCPCCPAHCCCPEEALARHRYMKQAQALGPQMMGKPLYWGADRSSQVSSYPMHPLLQRASRRCQ

SEQ ID NO: 7162 - protein, 502 aa, Homo Sapiens
MAWPKLPAPWLLLCTWLPAGCLSLLVTVQHTERYVTLFASIILKCDYTTSAQLQDVVVTWRFKSFCKDPIFDYYSASYQAALSLGQDPSNDCNDNQREVRIVAQRRGQNEPVLGVDYRQRKITIQNRADLVINEVMWWDHGVYYCTIEAPGDTSGDPDKEVKLIVLHWLTVIFIILGALLLLLLIGVCWCQCCPQYCCCYIRCPCCPAHCCCPEEDLSLPSSLPQMPMTQTTNQPPIANGVLEYLEKELRNLNLAQPLPPDLKGRFGHPCSMLSSLGSEVVERRIIHLPPLIRDLSSSRRTSDSLHQQWLTPIPSRPWDLREGRSHHHYPDFHQELQDRGPKSWALERRELDPSWSGRHRSSRLNGSPIHWSDRDSLSDVPSSSEARWRPSHPPFRSRCQERPRRPSPRESTQRHGRRRRHRSYSPPLPSGLSSWSSEEDKERQPQSWRAHRRGSHSPHWPEEKPPSYRSLDITPGKNSRKKGSVERRSEKDSSHSGRSVVI

SEQ ID NO: 7163 - protein, 167 aa, Homo Sapiens
MDRVLLRWISLFWLTAMVEGLQVTVPDKKKVAMLFQPTVLRCHFSTSSHQPAVVQWKFKSYCQDRMGESLGMSSTRAQSLSKRNLEWDPYLDCLDSRRTVRVVASKQGSTVTLGDFYRGREITIVHDADLQIGKLMWGDSGLYYCIITTPDDLEGKNEDSVELLVLE

SEQ ID NO: 7164 - protein, 620 aa, Homo Sapiens
MDRVLLRWISLFWLTAMVEGLQVTVPDKKKVAMLFQPTVLRCHFSTSSHQPAVVQWKFKSYCQDRMGESLGMSSTRAQSLSKRNLEWDPYLDCLDSRRTVRVVASKQGSTVTLGDFYRGREITIVHDADLQIGKLMWGDSGLYYCIITTPDDLEGKNEDSVELLVLEWVFVGLVLLGVFLFFVLVGICWCQCCPHSCCCYVRCPCCPDSCCCPQALYEAGKAAKAGYPPSVSGVPGPYSIPSVPLGGAPSSGMLMDKPHPPPLAPSDSTGGSHSVRKGYRIQADKERDSMKVLYYVEKELAQFDPARRMRGRYNNTISELSSLHEEDSNFRQSFHQMRSKQFPVSGDLESNPDYWSGVMGGSSGASRGPSAMEYNKEDRESFRHSQPRSKSEMLSRKNFATGVPAVSMDELAAFADSYGQRPRRADGNSHEARGGSRFERSESRAHSGFYQDDSLEEYYGQRSRSREPLTDADRGWAFSPARRRPAEDAHLPRLVSRTPGTAPKYDHSYLGSARERQARPEGASRGGSLETPSKRSAQLGPRSASYYAWSPPGTYKAGSSQDDQEDASDDALPPYSELELTRGPSYRGRDLPYHSNSEKKRKKEPAKKTNDFPTRMSLVV

SEQ ID NO: 7165 - protein, 580 aa, Homo Sapiens
MDRVLLRWISLFWLTAMVEGLQVTVPDKKKVAMLFQPTVLRCHFSTSSHQPAVVQWKFKSYCQDRMGESLGMSSTRAQSLSKRNLEWDPYLDCLDSRRTVRVVASKQGSTVTLGDFYRGREITIVHDADLQIGKLMWGDSGLYYCIITTPDDLEGKNEDSVELLVLGRTGLLADLLPSFAVEIMPEWVFVGLVLLGVFLFFVLVGICWCQCCPHSCCCYVRCPCCPDSCCCPQAFRKGYRIQADKERDSMKVLYYVEKELAQFDPARRMRGRYNNTISELSSLHEEDSNFRQSFHQMRSKQFPVSGDLESNPDYWSGVMGGSSGASRGPSAMEYNKEDRESFRHSQPRSKSEMLSRKNFATGVPAVSMDELAAFADSYGQRPRRADGNSHEARGGSRFERSESRAHSGFYQDDSLEEYYGQRSRSREPLTDADRGWAFSPARRRPAEDAHLPRLVSRTPGTAPKYDHSYLGSARERQARPEGASRGGSLETPSKRSAQLGPRSASYYAWSPPGTYKAGSSQDDQEDASDDALPPYSELELTRGPSYRGRDLPYHSNSEKKRKKEPAKKTNDFPTRMSLVV

SEQ ID NO: 7166 - protein, 639 aa, Homo Sapiens
MDRVLLRWISLFWLTAMVEGLQVTVPDKKKVAMLFQPTVLRCHFSTSSHQPAVVQWKFKSYCQDRMGESLGMSSTRAQSLSKRNLEWDPYLDCLDSRRTVRVVASKQGSTVTLGDFYRGREITIVHDADLQIGKLMWGDSGLYYCIITTPDDLEGKNEDSVELLVLGRTGLLADLLPSFAVEIMPEWVFVGLVLLGVFLFFVLVGICWCQCCPHSCCCYVRCPCCPDSCCCPQALYEAGKAAKAGYPPSVSGVPGPYSIPSVPLGGAPSSGMLMDKPHPPPLAPSDSTGGSHSVRKGYRIQADKERDSMKVLYYVEKELAQFDPARRMRGRYNNTISELSSLHEEDSNFRQSFHQMRSKQFPVSGDLESNPDYWSGVMGGSSGASRGPSAMEYNKEDRESFRHSQPRSKSEMLSRKNFATGVPAVSMDELAAFADSYGQRPRRADGNSHEARGGSRFERSESRAHSGFYQDDSLEEYYGQRSRSREPLTDADRGWAFSPARRRPAEDAHLPRLVSRTPGTAPKYDHSYLGSARERQARPEGASRGGSLETPSKRSAQLGPRSASYYAWSPPGTYKAGSSQDDQEDASDDALPPYSELELTRGPSYRGRDLPYHSNSEKKRKKEPAKKTNDFPTRMSLVV

SEQ ID NO: 7167 - protein, 437 aa, Homo Sapiens
MDRVLLRWISLFWLTAMVEGLQVTVPDKKKVAMLFQPTVLRCHFSTSSHQPAVVQWKFKSYCQDRMGESLGMSSTRAQSLSKRNLEWDPYLDCLDSRRTVRVVASKQGSTVTLGDFYRGREITIVHDADLQIGKLMWGDSGLYYCIITTPDDLEGKNEDSVELLVLGRTGLLADLLPSFAVEIMPEWVFVGLVLLGVFLFFVLVGICWCQCCPHSCCCYVRCPCCPDSCCCPQALYEAGKAAKAGYPPSVSGVPGPYSIPSVPLGGAPSSGMLMDKPHPPPLAPSDSTGGSHSVRKGYRIQADKERDSMKVLYYVEKELAQFDPARRMRGRYNNTISELSSLHEEDSNFRQSFHQMRSKQFPVSGDLESNPDYWSGVMGGSSGASRGPSAMEYNKEDRESFRHRMTFQPGCPLWSDVVNISLDNEKSDMDYGDKTQI

SEQ ID NO: 7168 - protein, 531 aa, Homo Sapiens
MDRVLLRWISLFWLTAMVEGLQVTVPDKKKVAMLFQPTVLRCHFSTSSHQPAVVQWKFKSYCQDRMGESLGMSSTRAQSLSKRNLEWDPYLDCLDSRRTVRVVASKQGSTVTLGDFYRGREITIVHDADLQIGKLMWGDSGLYYCIITTPDDLEGKNEDSVELLVLGRTGLLADLLPSFAVEIMPVRKGYRIQADKERDSMKVLYYVEKELAQFDPARRMRGRYNNTISELSSLHEEDSNFRQSFHQMRSKQFPVSGDLESNPDYWSGVMGGSSGASRGPSAMEYNKEDRESFRHSQPRSKSEMLSRKNFATGVPAVSMDELAAFADSYGQRPRRADGNSHEARGGSRFERSESRAHSGFYQDDSLEEYYGQRSRSREPLTDADRGWAFSPARRRPAEDAHLPRLVSRTPGTAPKYDHSYLGSARERQARPEGASRGGSLETPSKRSAQLGPRSASYYAWSPPGTYKAGSSQDDQEDASDDALPPYSELELTRGPSYRGRDLPYHSNSEKKRKKEPAKKTNDFPTRMSLVV

SEQ ID NO: 7169 - protein, 512 aa, Homo Sapiens
MDRVLLRWISLFWLTAMVEGLQVTVPDKKKVAMLFQPTVLRCHFSTSSHQPAVVQWKFKSYCQDRMGESLGMSSTRAQSLSKRNLEWDPYLDCLDSRRTVRVVASKQGSTVTLGDFYRGREITIVHDADLQIGKLMWGDSGLYYCIITTPDDLEGKNEDSVELLVLVRKGYRIQADKERDSMKVLYYVEKELAQFDPARRMRGRYNNTISELSSLHEEDSNFRQSFHQMRSKQFPVSGDLESNPDYWSGVMGGSSGASRGPSAMEYNKEDRESFRHSQPRSKSEMLSRKNFATGVPAVSMDELAAFADSYGQRPRRADGNSHEARGGSRFERSESRAHSGFYQDDSLEEYYGQRSRSREPLTDADRGWAFSPARRRPAEDAHLPRLVSRTPGTAPKYDHSYLGSARERQARPEGASRGGSLETPSKRSAQLGPRSASYYAWSPPGTYKAGSSQDDQEDASDDALPPYSELELTRGPSYRGRDLPYHSNSEKKRKKEPAKKTNDFPTRMSLVV

SEQ ID NO: 7170 - protein, 172 aa, Homo Sapiens
MITTSRDPSSRLKMFAKELKLVFPGAQRMNRGRHEVGALVRACKANGVTDLLVVHEHRGTPVGLIVSHLPFGPTAYFTLCNVVMRHDIPDLGTMSEAKPHLITHGFSSRLGKRVSDILRYLFPVPKDDSHRVITFANQDDYISFRHHVYKKTDHRNVELTEVGPRFELKLYM

SEQ ID NO: 7171 - protein, 76 aa, Homo Sapiens
MLRREARLRREYLYRKAREEAQRSAQERKERLRRALEENRLIPTELRREALALQGSLEFDDAGGEGNYTRCDQPRG

SEQ ID NO: 7172 - protein, 248 aa, Homo Sapiens
MLRREARLRREYLYRKAREEAQRSAQERKERLRRALEENRLIPTELRREALALQGSLEFDDAGGEGVTSHVDDEYRWAGVEDPKVMITTSRDPSSRLKMFAKELKLVFPGAQRMNRGRHEVGALVRACKANGVTDLLVVHEHRGTPVGLIVSHLPFGPTAYFTLCNVVMRHDIPDLGTMSEAKPHLITHGFSSRLGKRVSDILRYLFPVPKDDSHRVITFANQDDYISFRHHVYKKTDHRNVELTECT

SEQ ID NO: 7173 - protein, 291 aa, Homo Sapiens
MLRREARLRREYLYRKAREEAQRSAQERKERLRRALEENRLIPTELRREALALQGSLEFDDAGGEGVTSHVDDEYRWAGVEDPKVMITTSRDPSSRLKMFAKELKLVFPGAQRMNRGRHEVGALVRACKANGVTDLLVVHEHRGTPVGLIVSHLPFGPTAYFTLCNVVMRHDIPDLGTMSEAKPHLITHGFSSRLGKRVSDILRYLFPVPKDDSHRVITFANQDDYISFRHHVYKKTDHRNVELTEVGPRFELKLYMIRLGTLEQEATADVEWRWHPYTNTARKRVFLSTE

SEQ ID NO: 7174 - protein, 236 aa, Homo Sapiens
MMLEVKVTIQGVTSHVDDEYRWAGVEDPKVMITTSRDPSSRLKMFAKELKLVFPGAQRMNRGRHEVGALVRACKANGVTDLLVVHEHRGTPVGLIVSHLPFGPTAYFTLCNVVMRHDIPDLGTMSEAKPHLITHGFSSRLGKRVSDILRYLFPVPKDDSHRVITFANQDDYISFRHHVYKKTDHRNVELTEVGPRFELKLYMIRLGTLEQEATADVEWRWHPYTNTARKRVFLSTE

SEQ ID NO: 7175 - protein, 280 aa, Homo Sapiens
  misc_feature (1)..(1): Xaa can be any naturally occurring amino acid
XSKCLPAVFLAHWVLLLVLRVFLPCDENRLIPTELRREALALQGSLEFDDAGGEGVTSHVDDEYRWAGVEDPKVMITTSRDPSSRLKMFAKELKLVFPGAQRMNRGRHEVGALVRACKANGVTDLLVVHEHRGTPVGLIVSHLPFGPTAYFTLCNVVMRHDIPDLGTMSEAKPHLITHGFSSRLGKRVSDILRYLFPVPKDDSHRVITFANQDDYISFRHHVYKKTDHRNVELTEVGPRFELKLYMIRLGTLEQEATADVEWRWHPYTNTARKRVFLSTE

SEQ ID NO: 7176 - protein, 158 aa, Homo Sapiens
ERPNGTSAQPAQVKPEFYRQAELKPCPWTGSNQRRCITFCPTPDQADPCKFLACGEFAQCVKNERTEEAECRCKPGYDSQGSLDGLEPGLCGPGTKECEVLQGKGAPCRLPDHSENQAYKTSVKKFQNQQNNKVISKRNSELLTVEYEEFNHQDWEGN

SEQ ID NO: 7177 - protein, 140 aa, Homo Sapiens
MKQILDSLQAYYRLRVCQEAVWEAYRIFLDRIPDTGEYQDWVSICQQETFCLFDIGKNFSNSQEHLDLLQQRIKQRSFPDRKDEISAEKTLGEPGETIVISTEKNKGKTKPFNILQFGNNHHEHLLPIFCLLSSIIYTYY

SEQ ID NO: 7178 - protein, 797 aa, Homo Sapiens
MYLETRRAIFVFWIFLQVQGTKDISINIYHSETKDIDNPPRNETTESTEKMYKMSTMRRIFDLAKHRTKRSAFFPTGVKVCPQESMKQILDSLQAYYRLRVCQEAVWEAYRIFLDRIPDTGEYQDWVSICQQETFCLFDIGKNFSNSQEHLDLLQQRIKQRSFPDRKDEISAEKTLGEPGETIVISTDVANVSLGPFPLTPDDTLLNEILDNTLNDTKMPTTERETEFAVLEEQRVELSVSLVNQKFKAELADSQSPYYQELAGKSQLQMQKIFKKLPGFKKIHVLGFRPKKEKDGSSSTEMQLTAIFKRHSAEAKSPASDLLSFDSNKIESEEVYHGTMEEDKQPEIYLTATDLKRLISKALEEEQSLDVGTIQFTDEIAGSLPAFGPDTQSELPTSFAVITEDATLSPELPPVEPQLETVDGAEHGLPDTSWSPPAMASTSLSEAPPFFMASSIFSLTDQGTTDTMATDQTMLVPGLTIPTSDYSAISQLALGISHPPASSDDSRSSAGGEDMVRHLDEMDLSDTPAPSEVPELSEYVSVPDHFLEDTTPVSALQYITTSSMTIAPKGRELVVFFSLRVANMAFSNDLFNKSSLEYRALEQQFTQLLVPYLRSNLTGFKQLEILNFRNGSVIVNSKMKFAKSVPYNLTKAVHGVLEDFRSAAAQQLHLEIDSYSLNIEPADQADPCKFLACGEFAQCVKNERTEEAECRCKPGYDSQGSLDGLEPGLCGPGTKECEVLQGKGAPCRLPDHSENQAYKTSVKKFQNQQNNKVISKRNSELLTVEYEEFNHQDWEGN

SEQ ID NO: 7179 - protein, 719 aa, Homo Sapiens
MYLETRRAIFVFWIFLQVQGTKVCQEAVWEAYRIFLDRIPDTGEYQDWVSICQQETFCLFDIGKNFSNSQEHLDLLQQRIKQRSFPDRKDEISAEKTLGEPGETIVISTDVANVSLGPFPLTPDDTLLNEILDNTLNDTKMPTTERETEFAVLEEQRVELSVSLVNQKFKAELADSQSPYYQELAGKSQLQMQKIFKKLPGFKKIHVLGFRPKKEKDGSSSTEMQLTAIFKRHSAEAKSPASDLLSFDSNKIESEEVYHGTMEEDKQPEIYLTATDLKRLISKALEEEQSLDVGTIQFTDEIAGSLPAFGPDTQSELPTSFAVITEDATLSPELPPVEPQLETVDGAEHGLPDTSWSPPAMASTSLSEAPPFFMASSIFSLTDQGTTDTMATDQTMLVPGLTIPTSDYSAISQLALGISHPPASSDDSRSSAGGEDMVRHLDEMDLSDTPAPSEVPELSEYVSVPDHFLEDTTPVSALQYITTSSMTIAPKGRELVVFFSLRVANMAFSNDLFNKSSLEYRALEQQFTQLLVPYLRSNLTGFKQLEILNFRNGSVIVNSKMKFAKSVPYNLTKAVHGVLEDFRSAAAQQLHLEIDSYSLNIEPADQADPCKFLACGEFAQCVKNERTEEAECRCKPGYDSQGSLDGLEPGLCGPGTKECEVLQGKGAPCRLPDHSENQAYKTSVKKFQNQQNNKVISKRNSELLTVEYEEFNHQDWEGN

SEQ ID NO: 7180 - protein, 366 aa, Homo Sapiens
MVLHLLLFLLLTPQGGHSCQGLELARELVLAKVRALFLDALGPPAVTREGGDPGVRRLPRRHALGGFTHRGSEPEEEEDVSQAILFPATDASCEDKSAARGLAQEAEEGLFRYMFRPSQHTRSRQVTSAQLWFHTGLDRQGTAASNSSEPLLGLLALSPGGPVAVPMSLGHAPPHWAVLHLATSALSLLTHPVLVLLLRCPLCTCSARPEATPFLVAHTRTRPPSGGERARRSTPLMSWPWSPSALRLLQRPPEEPAAHANCHRVALNISFQELGWERWIVYPPSFIFHYCHGGCGLHIPPNLSLPVPGAPPTPAQPYSLLPGAQPCCAALPGTMRPLHVRTTSDGGYSFKYETVPNLLTQHCACI

SEQ ID NO: 7181 - protein, 426 aa, Homo Sapiens
MPLLWLRGFLLASCWIIVRSSPTPGSEGHSAAPDCPSCALAALPKDVPNSQPEMVEAVKKHILNMLHLKKRPDVTQPVPKAALLNAIRKLHVGKVGENGYVEIEDDIGRRAEMNELMEQTSEIITFAESGTARKTLHFEISKEGSDLSVVERAEVWLFLKVPKANRTRTKVTIRLFQQQKHPQGSLDTGEEAEEVGLKGERSELLLSEKVVDARKSTWHVFPVSSSIQRLLDQGKSSLDVRIACEQCQESGASLVLLGKKKKKEEEGEGKKKGGGEGGAGADEEKEQSHRPFLMLQARQSEDHPHRRRRRGLECDGKVNICCKKQFFVSFKDIGWNDWIIAPSGYHANYCEGECPSHIAGTSGSSLSFHSTVINHYRMRGHSPFANLKSCCVPTKLRPMSMLYYDDGQNIIKKDIQNMIVEECGCS

SEQ ID NO: 7182 - protein, 426 aa, Homo Sapiens; identical to SEQ ID NO: 7181

SEQ ID NO: 7183 - protein, 426 aa, Homo Sapiens; identical to SEQ ID NO: 7181

SEQ ID NO: 7184 - protein, 407 aa, Homo Sapiens
MDGLPGRALGAACLLLLAAGWLGPEAWGSPTPPPTPAAPPPPPPPGSPGGSQDTCTSCGGFRRPEELGRVDGDFLEAVKRHILSRLQMRGRPNITHAVPKAAMVTALRKLHAGKVREDGRVEIPHLDGHASPGADGQERVSEIISFAETDGLASSRVRLYFFISNEGNQNLFVVQASLWLYLKLLPYVLEKGSRRKVRVKVYFQEQGHGDRWNMVEKRVDLKRSGWHTFPLTEAIQALFERGERRLNLDVQCDSCQELAVVPVFVDPGEESHRPFVVVQARLGDSRHRIRKRGLECDGRTNLCCRQQFFIDFRLIGWNDWIIAPTGYYGNYCEGSCPAYLAGVPGSASSFHTAVVNQYRMRGLNPGTVNSCCIPTKLSTMSMLYFDDEYNIVKRDVPNMIVEECGCA

SEQ ID NO: 7185 - protein, 352 aa, Homo Sapiens
MTSSLLLAFLLLAPTTVATPRAGGQCPACGGPTLELESQRELLLDLAKRSILDKLHLTQRPTLNRPVSRAALRTALQHLHGVPQGALLEDNREQECEIISFAETGLSTINQTRLDFHFSSDRTAGDREVQQASLMFFVQLPSNTTWTLKVRVLVLGPHNTNLTLATQYLLEVDASGWHQLPLGPEAQAACSQGHLTLELVLEGQVAQSSVILGGAAHRPFVAARVRVGGKHQIHRRGIDCQGGSRMCCRQEFFVDFREIGWHDWIIQPEGYAMNFCIGQCPLHIAGMPGIAASFHTAVLNLLKANTAAGTTGGGSCCVPTARRPLSLLYYDRDSNIVKTDIPDMVVEACGCS

SEQ ID NO: 7186 - protein, 274 aa, Homo Sapiens
METAAAVVKLERLEAALTRALRRLQPGSVAPGNGEEVISFATVTDSTSAYSSLLTFHLSTPRSHHLYHARLWLHVLPTLPGTLCLRIFRWGPRRRRQGSRTLLAEHHITNLGWHTLTLPSSGLRGEKSGVLKLQLDCRPLEGNSTVTGQPRRLLDTAGHQQPFLELKIRANEPGAGRARRRTPTCEPATPLCCRRDHYVDFQELGWRDWILQPEGYQLNYCSGQCPPHLAGSPGIAASFHSAVFSLLKANNPWPASTSCCVPTARRPLSLLYLD

SEQ ID NO: 7187 - protein, 350 aa, Homo Sapiens
MRLPDVQLWLVLLWALVRAQGTGSVCPSCGGSKLAPQAERALVLELAKQQILDGLHLTSRPRITHPPPQAALTRALRRLQPGSVAPGNGEEVISFATVTDSTSAYSSLLTFHLSTPRSHHLYHARLWLHVLPTLPGTLCLRIFRWGPRRRRQGSRTLLAEHHITNLGWHTLTLPSSGLRGEKSGVLKLQLDCRPLEGNSTVTGQPRRLLDTAGHQQPFLELKIRANEPGAGRARRRTPTCEPATPLCCRRDHYVDFQELGWRDWILQPEGYQLNYCSGQCPPHLAGSPGIAASFHSAVFSLLKANNPWPASTSCCVPTARRPLSLLYLDHNGNVVKTDVPDMVVEACGCS

SEQ ID NO: 7188 - protein, 104 aa, Homo Sapiens
LDISFPPSYPYSEDARQGEQYMNTRCPAWCDRILMSPSAKELVLRSESEEKVVTYDHIGPNVCMGDHKPVFLAFRIMPGAGKRCQRHERTLREPPCSRGPNTHS

SEQ ID NO: 7189 - protein, 412 aa, Homo Sapiens
MAGKAAAPGTAVLLVTANVGSLFDDPENLQKNWLREFYQVVHTHKPHFMALHCQEFGGKNYEASMSHVDKFVKELLSSDAMKEYNRARVYLDENYKSQEHFTALGSFYFLHESLKNIYQFDFKAKKYRKVAGKEIYSDTLESTPMLEKEKFPQDYFPECKWSRKGFIRTRWCIADCAFDLVNIHLFHDASNLVAWETSPSVYSGIRHKALGYVLDRIIDQRFEKVSYFVFGDFNFRLDSKSVVETLCTKATMQTVRAADTNEVVKLIFRESDNDRKVMLQLEKKLFDYFNQEVFRDNNGTALLEFDKELSVFKDRLYELDISFPPSYPYSEDARQGEQYMNTRCPAWCDRILMSPSAKELVLRSESEEKVVTYDHIGPNVCMGDHKPVFLAFRIMPGAGKPHAHVHKCCVVQ

SEQ ID NO: 7190 - protein, 387 aa, Homo Sapiens
MAGKAAAPGTAVLLVTANVGSLFDDPENLQKNWLREFYQVVHTHKPHFMALHCQEFGGKNYEASMSHVDKFVKELLSSDAMKEYNRARVYLDENYKSQEHFTALGSFYFLHESLKNIYQFDFKAKKYRKVAGKEIYSDTLESTPMLEKEKFPQDYFPECKWSRKGFIRTRWCIADCAFDLVNIHLFHDASNLVAWETSPSVYSGIRHKALGYVLDRIIDQRFEKVSYFVFGDFNFRLDSKSVVETLCTKATMQTVRAADTNEVVKLIFRESDNDRKVMLQLEKKLFDYFNQEVFRDNNGTALLEFDKELSVFKDRLYELDISFPPSYPYSEDARQGEQYMNTRCPAWCDRILMSPSAKELVLRVSVCCPSPGHRGMWSAGSGLAQPW

SEQ ID NO: 7191 - protein, 138 aa, Homo Sapiens
VTANVGSLFDDPENLQKNWLREFYQALGSFYFLHESLKNIYQFDFKAKKYRKVAGKEIYSDTLESTPMLEKEKFPQDYFPECKWSRKGFIRTRWCIADCAFDLVNIHLFHDASNLVAWETSPSVYSGIRHKALGYVLD

SEQ ID NO: 7192 - protein, 278 aa, Homo Sapiens
  misc_feature (1)..(1): Xaa can be any naturally occurring amino acid
XQKNWLREFYQVVHTHKPHFMALHCQEFGGKNYEASMSHVDKFVKELLSSDAMKEYNRARVYLDENYKSQEHFTALGSFYFLHESLKNIYQFDFKAKKYRKVAGKEIYSDTLESTPMLEKEKFPQDYFPECKWSRKGFIRTRWCIADCAFDLVNIHLFHDASNLVAWETSPSVYSGIRHKALGYVLDRIIDQRFEKVSYFVFGDFNFRLDSKSVVELLEFDKELSVFKDRLYELDISFPPSYPYSEDARQGEQYMNTRCPAWCDRILMSPSAKELVLR

SEQ ID NO: 7193 - protein, 92 aa, Homo Sapiens
MALWMRLLPLLALLALWGPDPAAAFVNQHLCGSHLVEALYLVCGERGFFYTPKTRREAEDLQAGELLQLDAARRQPHTRRLLHRERWNKALE

SEQ ID NO: 7194 - protein, 98 aa, Homo Sapiens
MALWMRLLPLLALLALWGPDPAAAFVNQHLCGSHLVEALYLVCGERGFFYTPKTRREAEDLQGSLQPLALEGSLQKRGIVEQCCTSICSLYQLENYCN

SEQ ID NO: 7195 - protein, 110 aa, Homo Sapiens
MALWMRLLPLLALLALWGPDPAAAFVNQHLCGSHLVEALYLVCGERGFFYTPKTRREAEDLQVGQVELGGGPGAGSLQPLALEGSLQKRGIVEQCCTSICSLYQLENYCN

SEQ ID NO: 7196 - protein, 110 aa, Homo Sapiens; identical to SEQ ID NO: 7195

SEQ ID NO: 7197 - protein, 110 aa, Homo Sapiens; identical to SEQ ID NO: 7195

SEQ ID NO: 7198 - protein, 200 aa, Homo Sapiens
MALWMRLLPLLALLALWGPDPAAAFVNQHLCGSHLVEALYLVCGERGFFYTPKTRREAEDLQASALSLSSSTSTWPEGLDATARAPPALVVTANIGQAGGSSSRQFRQRALGTSDSPVLFIHCPGAAGTAQGLEYRGRRVTTELVWEEVDSSPQPQGSESLPAQPPAQPAPQPEPQQAREPSPEVSCCGLWPRRPQRSQN

SEQ ID NO: 7199 - protein, 200 aa, Homo Sapiens; identical to SEQ ID NO: 7198

SEQ ID NO: 7200 - protein, 157 aa, Homo Sapiens
MDPRLPAWALVLLGPALVFALGPAPTPEMREKLCGHHFVRALVRVCGGPRWSTEARRPATGGDQRESHSVSQAGLKLLSSSNPPTLTFQSVGISDVSCYSGWRDDICSMGWWPTVISRWDLACSPCPRPLTITATTVQLPPTLHATAASVAVPNKTC

SEQ ID NO: 7201 - protein, 131 aa, Homo Sapiens
MDPRLPAWALVLLGPALVFALGPAPTPEMREKLCGHHFVRALVRVCGGPRWSTEARRPATGGDRELLQWLERRHLLHGLVADSNLTLGPGLQPLPQTSHHHRHHRAAATNPARYCCLSGCTQQDLLTLCPY

SEQ ID NO: 7202 - protein, 71 aa, Homo Sapiens
  misc_feature (1)..(1): Xaa can be any naturally occurring amino acid
XDPRLPAWALVLLGPALVFALGPAPTPEMREKLCGHHFVRALVRVCGGPRWSTEARRPATGGDPEFHSVPR

SEQ ID NO: 7203 - protein, 139 aa, Homo Sapiens
MASLFRSYLPAIWLLLSQLLRESLAAELRGCGPRFGKHLLSYCPMPEKTFTTTPGGWLLESGRPKEMVSTSNNKDGQALGTTSEFIPNLSPELKKPLSEGQPSLKKIILSRKKRSGRHRFDPFCCEVICDDGTSVKLCT

SEQ ID NO: 7204 - protein, 135 aa, Homo Sapiens
MKGSIFTLFLFSVLFAISEVRSKESVRLCGLEYIRTVIYICASSRWRRHQEGIPQAQQAETGNSFQLPHKREFSEENPAQNLPKVDASGEDRLWGGQMPTEELWKSKKHSVMSRQDLQTLCCTDGCSMTDLSALC

SEQ ID NO: 7205 - protein, 213 aa, Homo Sapiens
MPRLLRLSLLWLGLLLVRFSRELSDISSARKLCGRYLVKEIEKLCGHANWSQFRFEEETPFSRLIAQASEKVEAYSPYQFESPQTASPARGRGTNPVSTSWEEAVNSWEMQSLPEYKDKKGYSPLGKTREFSSSHNINVYIHENAKFQKKRRNKIKTLSNLFWGHHPQRKRRGYSEKCCLTGCTKEELSIACLPYIDFKRLKEKRSSLVTKIY

SEQ ID NO: 7206 - protein, 902 aa, Homo Sapiens
MAVYTYLRLIVDHHGTAQLQALRQKEVDFCISLLRERFMECLMIGRDLVRLLQNVARIPEFELLWKDIIHNPQALSPQFTGILQLLQSRTSRKFLACRLTPDMETKLLFMTSRVRFGQQKRYQDWFQRQYLSTPDSQSLRCDLIRYICGVVHPSNEVLSSDILPRWAIIGWLLTTCTSNVAASNAKLALFYDWLFFSPDKDSIMNIEPAILVMHHSMKPHPAITATLLDFMCRIIPNFYPPLEGHVRQGVFSSLNHIVEKRVLAHLAPLFDNPKLDKELRAMLREKFPEFCSSPSPPVEVKIEEPVSMEMDNHMSDKDESCYDNAEAAFSDDEEDLNSKGKKREFRFHPIKETVVEEPVDITPYLDQLDESLRDKVLQLQKGSDTEAQCEVMQEIVDQVLEEDFDSEQLSVLASCLQELFKAHFRGEVLPEEITEESLEESVGKPLYLIFRNLCQMQEDNSSFSLLLDLLSELYQKQPKIGYHLLYYLRASKAAAGKMNLYESFAQATQLGDLHTCLMMDMKACQEDDVRLLCHLTPSIYTEFPDETLRSGELLNMIVAVIDSAQLQELVCHVMMGNLVMFRKDSVLNILIQSLDWETFEQYCAWQLFLAHNIPLETIIPILQHLKYKEHPEALSCLLLQLRREKPSEEMVKMVLSRPCHPDDQFTTSILRHWCMKHDELLAEHIKSLLIKNNSLPRKRQSLRSSSSKLAQLTLEQILEHLDNLRLNLTNTKQNCMPSTLGVQCRRCCPGPDYAWSQAGGRGRTPGATTHTRDKTTCACCLISSQTSDCFSFPALPFLPLVFSQTPILQALQHVQASCDEAHKMKFSDLFSLAEEYEDSSTKPPKSRRKAALSSPRSRKNATQPPNAEEESGSSSASEEEDTKPKPTKRKRKGSSAVGSDSD

SEQ ID NO: 7207 - protein, 1042 aa, Homo Sapiens
MELQKGKGAAAAAAASGAAGGGGGGAGAGAPGGGRLLLSTSLDAKDELEERLERCMSIVTSMTAGVSEREANDALNAYVCKGLPQHEEICLGLFTLILTEPAQAQKCYRDLALVSRDGMNIVLNKINQILMEKYLKLQDTCRTQLVWLVRELVKSGVLGADGVCMTFMKQIAGGDVTAKNIWLAESVLDILTEQREWVLKSSILIAMAVYTYLRLIVDHHGTAQLQALRQKEVDFCISLLRERFMECLMIGRDLVRLLQNVARIPEFELLWKDIIHNPQALSPQFTGILQLLQSRTSRKFLACRLTPDMETKLLFMTSRVRFGQQKRYQDWFQRQYLSTPDSQSLRCDLIRYICGVVHPSNEVLSSDILPRWAIIGWLLTTCTSNVAASNAKLALFYDWLFFSPDKDSIMNIEPAILVMHHSMKPHPAITATLLDFMCRIIPNFYPPLEGHVRQGVFSSLNHIVEKRVLAHLAPLFDNPKLDKELRAMLREKFPEFCSSPSPPVEVKIEEPVSMEMDNHMSDKDESCYDNAEAAFSDDEEDLNSKGKKREFRFHPIKETVVEEPVDITPYLDQLDESLRDKVLQLQKGSDTEAQCEVMQEIVDQVLEEDFDSEQLSVLASCLQELFKAHFRGEVLPEEITEESLEESVGKPLYLIFRNLCQMQEDNSSFSLLLDLLSELYQKQPKIGYHLLYYLRASKAAAGKMNLYESFAQATQLGDLHTCLMMDMKACQEDDVRLLCHLTPSIYTEFPDETLRSGELLNMIVAVIDSAQLQELVCHVMMGNLVMFRKDSVLNILIQSLDWETFEQYCAWQLFLAHNIPLETIIPILQHLKYKEHPEALSCLLLQLRREKPSEEMVKMVLSRPCHPDDQFTTSILRHWCMKHDELLAEHIKSLLIKNNSLPRKRQSLRSSSSKLAQLTLEQILEHLDNLRLNLTNTKQNFFSQTPILQALQHVQASCDEAHKMKFSDLFSLAEEYEDSSTKPPKSRRKAALSSPRSRKNATQPPNAEEESGSSSASEEEDTKPKPTKRKRKGSSAVGSDSD

SEQ ID NO: 7208 - protein, 1042 aa, Homo Sapiens; identical to SEQ ID NO: 7207

SEQ ID NO: 7209 - protein, 41 aa, Homo Sapiens
TQPPNAEEESGSSSASEEEDTKPKPTKRKRKGSSAVGSDSD

SEQ ID NO: 7210 - protein, 280 aa, Homo Sapiens
VYTYLRLIVDHHGTAQLQALRQKEVDFCISLLRERFMECLMIGRDLVRLLQNVARIPEFELLWKDIIHNPQALSPQFTGILQLLQSRTSRKFLACRLTPDMETKLLFMTSRVRFGQQKRYQDWFQRQYLSTPDSQSLRCDLIRYICGVVHPSNEVLSSDILPRWAIIGWLLTTCTSNVAASNAKLALFYDWLFFSPDKDSIMNIEPAILVMHHSMKPHPAITATLLDFMCRIIPNFYPPLEGHVRQGVFSSLNHIVEKRVLACKKYWLYLRLLGICLLGS

SEQ ID NO: 7211 - protein, 49 aa, Homo Sapiens
  misc_feature (1)..(1): Xaa can be any naturally occurring amino acid
XSQSLRCDLIRYICGVVHPSNEVLSSDILPRWAIIGWLLTTCTTPSSPV

SEQ ID NO: 7212 - protein, 64 aa, Homo Sapiens
MDLNSASTVVLQVLTQATSQDTAVLKPAEEQLKQWETQPGFYSVLLNIFTNHTLDINVRWLAVL

SEQ ID NO: 7213 - protein, 149 aa, Homo Sapiens
MDLNSASTVVLQVLTQATSQDTAVLKPAEEQLKQWETQPGFYSVLLNIFTNHTLDINVRWLAVLYFKHGIDRYWRRVAPHALSEEEKTTLRAGLITNFNEPINQIATQIAVLIAKVARLDCPRQWPELIPTLIESVKVQDDLRQHRALL

SEQ ID NO: 7214 - protein, 162 aa, Homo Sapiens
MDLNSASTVVLQVLTQATSQDTAVLKPAEEQLKQWETQPGFYSVLLNIFTNHTLDINVRWLAVLYFKHGIDRYWRRVAPHALSEEEKTTLRAGLITNFNEPINQIATQIAVLIAKVARLDCPRQWPELIPTLIESVKVQDDLRQHRALLTFYHVTKTLASKR

SEQ ID NO: 7215 - protein, 975 aa, Homo Sapiens
MDLNSASTVVLQVLTQATSQDTAVLKPAEEQLKQWETQPGFYSVLLNIFTNHTLDINVRWLAVLYFKHGIDRYWRRVAPHALSEEEKTTLRAGLITNFNEPINQIATQIAVLIAKVARLDCPRQWPELIPTLIESVKVQDDLRQHRALLTFYHVTKTLASKRLAADRKLFYDLASGIYNFACSLWNHHTDTFLQEVSSGNEAAILSSLERTLLSLKVLRKLTVNGFVEPHKNMEVMGFLHGIFERLKQFLECSRSIGTDNVCRDRLEKTIILFTKVLLDFLDQHPFSFTPLIQRSLEFSVSYVFTEVGEGVTFERFIVQCMNLIKMIVKNYAYKPSKNFEDSSPETLEAHKIKMAFFTYPTLTEICRRLVSHYFLLTEEELTMWEEDPEGFTVEETGGDSWKYSLRPCTEVLFIDIFHEYNQTLTPVLLEMMQTLQGPTNVEDMNALLIKDAVYNAVGLAAYELFDSVDFDQWFKNQLLPELQVIHNRYKPLRRRVIWLIGQWISVKFKSDLRPMLYEAICNLLQDQDLVVRIETATTLKLTVDDFEFRTDQFLPYLETMFTLLFQLLQQVTECDTKMHVLHVLSCVIERVNMQIRPYVGCLVQYLPLLWKQSEEHNMLRCAILTTLIHLVQGLGADSKNLYPFLLPVIQLSTDVSQPPHVYLLEDGLELWLVTLENSPCITPELLRIFQNMSPLLELSSENLRTCFKIINGYIFLSSTEFLQTYAVGLCQSFCELLKEITTEGQVQVLKVVENALKVNPILGPQMFQPILPYVFKGIIEGERYPVVMSTYLGVMGRVLLQNTSFFSSLLNEMAHKFNQEMDQLLGNMIEMWVDRMDNITQPERRKLSALALLSLLPSDNSVIQDKFCGIINISVEGLHDVMTEDPETGTYKDCMLMSHLEEPKVTEDEEPPTEQDKRKKMLALKDPVHTVSLQQFIYEKLKAQQEMLGEQGFQSLMETVDTEIVTQLQEFLQGF

SEQ ID NO: 7216 - protein, 863 aa, Homo Sapiens
MDLNSASTVVLQVLTQATSQDTAVLKPAEEQLKQWETQPGFYSVLLNIFTNHTLDINVRWLAVLYFKHGIDRYWRRVAPHALSEEEKTTLRAGLITNFNEPINQIATQIAVLIAKVARLDCPRQWPELIPTLIESVKVQDDLRQHRALLTFYHVTKTLASKRLAADRKLFYDLASGIYNFACSLWNHHTDTFLQEVSSGNEAAILSSLERTLLSLKVLRKLTVNGFVEPHKNMEVMGFLHGIFERLKQFLECSRSIGTDNVCRDRLEKTIILFTKVLLDFLDQHPFSFTPLIQRSLEFSVSYVFTEVGEGVTFERFIVQCMNLIKMIVKNYAYKPSKNFEDSSPETLEAHKIKMAFFTYPTLTEICRRLVSHYFLLTEEELTMWEEDPEGFTVEETGGDSWKYSLRPCTEVLFIDIFHEYNQTLTPVLLEMMQTLQGPTNVEDMNALLIKDAVYNAVGLAAYELFDSVDFDQWFKNQLLPELQVIHNRYKPLRRRVIWLIGQWISVKFKSDLRPMLYEAICNLLQDQDLVVRIETATTLKLTVDDFEFRTDQFLPYLETMFTLLFQLLQQVTECDTKMHVLHVLSCVIERVNMQIRPYVGCLVQYLPLLWKQSEEHNMLRCAILTTLIHLVQGLGADSKNLYPFLLPVIQLSTDVSQPPHVYLLEDGLELWLVTLENSPCITPELLRIFQNMSPLLELSSENLRTCFKIINGYIFLSSTEFLQTYAVGLCQSFCELLKEITTEGQVQVLKVVENALKVNPILGPQMFQPILPYVFKGIIEGERYPVVMSTYLGVMGRVLLQNTSFFSSLLNEMAHKFNQEMDQLLGNMIEMWVDRMDNITQPERRKLSALALLSLLPSDNSQF

SEQ ID NO: 7217 - protein, 59 aa, Homo Sapiens
MDQLLGNMIEMWVDRMDNITQPERRKLSALALLSLLPSDNSFLYPWQPLFYTLTVKEPM

SEQ ID NO: 7218 - protein, 94 aa, Homo Sapiens
MTEDPETGTYKDCMLMSHLEEPKVTEDEEPPTEQDKRKKMLALKDPVHTVSLQQFIYEKLKAQQEMLGEQGFQSLMETVDTEIVTQLQEFLQGF

SEQ ID NO: 7219 - protein, 1015 aa, Homo Sapiens
MVQPIIHLGYVVYSLLYLGYKPVQHVTALNTVSSCHKMVSMDLNSASTVVLQVLTQATSQDTAVLKPAEEQLKQWETQPGFYSVLLNIFTNHTLDINVRWLAVLYFKHGIDRYWRRVAPHALSEEEKTTLRAGLITNFNEPINQIATQIAVLIAKVARLDCPRQWPELIPTLIESVKVQDDLRQHRALLTFYHVTKTLASKRLAADRKLFYDLASGIYNFACSLWNHHTDTFLQEVSSGNEAAILSSLERTLLSLKVLRKLTVNGFVEPHKNMEVMGFLHGIFERLKQFLECSRSIGTDNVCRDRLEKTIILFTKVLLDFLDQHPFSFTPLIQRSLEFSVSYVFTEVGEGVTFERFIVQCMNLIKMIVKNYAYKPSKNFEDSSPETLEAHKIKMAFFTYPTLTEICRRLVSHYFLLTEEELTMWEEDPEGFTVEETGGDSWKYSLRPCTEVLFIDIFHEYNQTLTPVLLEMMQTLQGPTNVEDMNALLIKDAVYNAVGLAAYELFDSVDFDQWFKNQLLPELQVIHNRYKPLRRRVIWLIGQWISVKFKSDLRPMLYEAICNLLQDQDLVVRIETATTLKLTVDDFEFRTDQFLPYLETMFTLLFQLLQQVTECDTKMHVLHVLSCVIERVNMQIRPYVGCLVQYLPLLWKQSEEHNMLRCAILTTLIHLVQGLGADSKNLYPFLLPVIQLSTDVSQPPHVYLLEDGLELWLVTLENSPCITPELLRIFQNMSPLLELSSENLRTCFKIINGYIFLSSTEFLQTYAVGLCQSFCELLKEITTEGQVQVLKVVENALKVNPILGPQMFQPILPYVFKGIIEGERYPVVMSTYLGVMGRVLLQNTSFFSSLLNEMAHKFNQEMDQLLGNMIEMWVDRMDNITQPERRKLSALALLSLLPSDNSVIQDKFCGIINISVEGLHDVMTEDPETGTYKDCMLMSHLEEPKVTEDEEPPTEQDKRKKMLALKDPVHTVSLQQFIYEKLKAQQEMLGEQGFQSLMETVDTEIVTQLQEFLQGF

SEQ ID NO: 7220 - protein, 160 aa, Homo Sapiens
  misc_feature (1)..(1): Xaa can be any naturally occurring amino acid
XLRCAILTTLIHLVQVVENALKVNPILGPQMFQPILPYVFKGIIEGERYPVVMSTYLGVMGRVLLQNTSFFSSLLNEMAHKFNQEMDQLLGNMIEMWVDRMDNITQPERRKLSALALLSLLPSDNSVIQDKFCGIINISVEGLHDVMTEDPETGTYKDWP

SEQ ID NO: 7221 - protein, 1041 aa, Homo Sapiens
MAAAAAAGAASGLPGPVAQGLKEALVDTLTGILSPVQEVRAAAEEQIKVLEVTEEFGVHLAELTVDPQGALAIRQLASVILKQYVETHWCAQSEKFRPPETTERAKIVIRELLPNGLRESISKVRSSVAYAVSAIAHWDWPEAWPQLFNLLMEMLVSGDLNAVHGAMRVLTEFTREVTDTQMPLVAPVILPEMYKIFTMAEVYGIRTRSRAVEIFTTCAHMICNMEELEKGAAKVLIFPVVQQFTEAFVQALQIPDGPTSDSGFKMEVLKAVTALVKNFPKHMVSSMQQILPIVWNTLTESAAFYVRTEVNYTEEVEDPVDSDGEVLGFENLVFSIFEFVHALLENSKFKSTVKKALPELIYYIILYMQITEEQIKVWTANPQQFVEDEDDDTFSYTVRIAAQDLLLAVATDFQNESAAALAAAATRHLQEAEQTKNSGTEHWWKIHEACMLALGSVKAIITDSVKNGRIHFDMHGFLTNVILADLNLSVSPFLLGRALWAASRFTVAMSPELIQQFLQATVSGLHETQPPSVRISAVRAIWGYCDQLKVSESTHVLQPFLPSILDGLIHLAAQFSSEVLNLVMETLCIVCTVDPEFTASMESKICPFTIAIFLKYSNDPVVASLAQDIFKELSQIEACQGPMQMRLIPTLVSIMQAPADKIPAGLCATAIDILTTVVRNTKPPLSQLLICQAFPAVAQCTLHTDDNATMQNGGECLRAYVSVTLEQVAQWHDEQGHNGLWYVMQVVSQLLDPRTSEFTAAFVGRLVSTLISKAGRELGENLDQILRAILSKMQQAETLSVMQSLIMVFAHLVHTQLEPLLEFLCSLPGPTGKPALEFVMAEWTSRQHLFYGQYEGKVSSVALCKLLQHGINADDKRLQDIRVKGEEIYSMDEGIRTRSKSAKNPERWTNIPLLVKILKLIINELSNVMEANAARQATPAEWSQDDSNDMWEDQEEEEEEEEDGLAGQLLSDILATSKYEEDYYEDDEEDDPDALKDPLYQIDLQAYLTDFLCQFAQQPCYIMFSGHLNDNERRVLQTIGI

SEQ ID NO: 7222 - protein, 155 aa, Homo Sapiens
SNVMEANAARQATPAEWSQDDSNDMWEDQEEEEEEEEDGLAGQLLSDILATSKYEEDYYEDDEEDDPDALKDPLYQIDLQATLMTMRGEFYRPSASKKGSLSTFAPSGPAANHFAALTGLEMHFLLNLKWHLDPWPLASAVTLMTIQTRLTGAVT

SEQ ID NO: 7223 - protein, 127 aa, Homo Sapiens
MDTQNLEKTAIKIQSWWRGNMVRRTLLQAALRAWVIQCWWRSMQAKMLEQRRRLALRLYTCQEWAVVKVQAQVRMWQARRRFLQARQAACIIQSHWRWHASQTRGLIRGHYEVRASRLELDIEILMT

SEQ ID NO: 7224 - protein, 107 aa, Homo Sapiens
MVRRTLLQAALRAWVIQCWWRSMQAKMLEQRRRLALRLYTCQEWAVVKVQAQVRMWQARRRFLQARQAACIIQSHWRWHASQTRGLIRGHYEVRASRLELDIEILMT

SEQ ID NO: 7225 - protein, 596 aa, Homo Sapiens
MAGNCGARGALSAHTLLFDLPPALLGELCAVLDSCDGALGWRGLAERLSSSWLDVRHIEKYVDQGKSGTRELLWSWAQKNKTIGDLLQVLQEMGHRRAIHLITNYGAVLSPSEKSYQEGGFPNILFKETANVTVDNVLIPEHNEKGILLKSSISFQNIIEGTRNFHKDFLIGEGEIFEVYRVEIQNLTYAVKLFKQEKKMQCKKHWKRFLSELEVLLLFHHPNILELAAYFTETEKFCLIYPYMRNGTLFDRLQCVGDTAPLPWHIRIGILIGISKAIHYLHNVQPCSVICGSISSANILLDDQFQPKLTDFAMAHFRSHLEHQSCTINMTSSSSKHLWYMPEEYIRQGKLSIKTDVYSFGIVIMEVLTGCRVVLDDPKHIQLRDLLRELMEKRGLDSCLSFLDKKVPPCPRNFSAKLFCLAGRCAATRAKLRPSMDEVLNTLESTQASLYFAEDPPTSLKSFRCPSPLFLENVPSIPVEDDESQNNNLLPSDEGLRIDRMTQKTPFECSQSEVMFLSLDKKPESKRNEEACNMPSSSCEESWFPKYIVPSQDLRPYKVNIDPSSEAPGHSCRSRPVESSCSSKFSWDEYEQYKKE

SEQ ID NO: 7226 - protein, 535 aa, Homo Sapiens
MAGNCGARGALSAHTLLFDLPPALLGELCAVLDSCDGALGWRGLGAVLSPSEKSYQEGGFPNILFKETANVTVDNVLIPEHNEKGILLKSSISFQNIIEGTRNFHKDFLIGEGEIFEVYRVEIQNLTYAVKLFKQEKKMQCKKHWKRFLSELEVLLLFHHPNILELAAYFTETEKFCLIYPYMRNGTLFDRLQCVGDTAPLPWHIRIGILIGISKAIHYLHNVQPCSVICGSISSANILLDDQFQPKLTDFAMAHFRSHLEHQSCTINMTSSSSKHLWYMPEEYIRQGKLSIKTDVYSFGIVIMEVLTGCRVVLDDPKHIQLRDLLRELMEKRGLDSCLSFLDKKVPPCPRNFSAKLFCLAGRCAATRAKLRPSMDEVLNTLESTQASLYFAEDPPTSLKSFRCPSPLFLENVPSIPVEDDESQNNNLLPSDEGLRIDRMTQKTPFECSQSEVMFLSLDKKPESKRNEEACNMPSSSCEESWFPKYIVPSQDLRPYKVNIDPSSEAPGHSCRSRPVESSCSSKFSWDEYEQYKKE

SEQ ID NO: 7227 - protein, 93 aa, Homo Sapiens
MAGNCGARGALSAHTLLFDLPPALLGELCAVLDSCDGALGWRGLVSKNKLCENGVLILQGFWHVVVCKYKDSKYGCVALFEKTPSETYLHMET

SEQ ID NO: 7228 - protein, 1257 aa, Homo Sapiens
MASCSFTRDQATRRLRGAAAAAAAALAAVVTTPLLSSGTPTALIGTGSSCPGAMWLSTATGSRSDSESEEEDLPVGEEVCKRGYLRKQKHGHRRYFVLKLETADAPARLEYYENARKFRHSVRAAAAAAAAAASGAAIPPLIPPRRVITLYQCFSVSQRADARYRHLIALFTQDEYFAMVAENESEQESWYLLLSRLILESKRRRCGTLGAQPDGEPAALAAAAAAEPPFYKDVWQVIVKPRGLGHRKELSGVFRLCLTDEEVVFVRLNTEVASVVVQLLSIRRCGHSEQYFFLEVGRSTVIGPGELWMQVDDCVVAQNMHELFLEKMRALCADEYRARCRSYSISIGAHLLTLLSARRHLGLVPLEPGGWLRRSRFEQFCHLRAIGDGEDEMLFTRRFVTPSEPVAHSRRGRLHLPRGRRSRRAVSVPASFFRRLAPSPARPRHPAEAPNNGARLSSEVSGSGSGNFGEEGNPQGKEDQEGSGGDYMPMNNWGSGNGRGSGGGQGSNGQGSSSHSSGGNQCSGEGQGSRGGQGSNGQGSGGNQCSRDGQGTAGGHGSGGGQRPGGGHGSGGGQGPGDGHGSGGGKNSGGGKGSGSGKGSDGDGERGKSLKKRSYFGKLTQSKQQQMPPPPPPPPPPPPAGGTGGKGKSGGRFRLYFCVDRGATKECKEAKEVKDAEIPEGAARGPHRARAFDEDEDDPYVPMRPGVATPLVSSSDYMPMAPQNVSASKKRHSRSPFEDSRGYMMMFPRVSPPPAPSPPKAPDTNKEDDSKDNDSESDYMFMAPGAGAIPKNPRNPQGGSSSKSWSSYFSLPNPFRSSPLGQNDNSEYVPMLPGKFLGRGLDKEVSYNWDPKDAASKPSGEGSFSKPGDGGSPSKPSDHEPPKNKAKRPNRLSFITKGYKIKPKPQKPTHEQREADSSSDYVNMDFTKRESNTPAPSTQGLPDSWGIIAEPRQSAFSNYVNVEFGVPFPNPANDLSDLLRAIPRANPLSLDSARWPLPPLPLSATGSNAIEEEGDYIEVIFNSAMTPAMALADSAIRYDAETGRIYVVDPFSECCMDISLSPSRCSEPPPVARLLQEEEQERRRPQSRSQSFFAAARAAVSAFPTDSLERDLSPSSAPAVASAAEPTLALSQVVAAASALAAAPGIGAAAAAAGFDSASARWFQPVANAADAEAVRGAQDVAGGSNPGAHNPSANLARGDNQAGGAAAAAAAPEPPPRSRRVPRPPEREDSDNDDDTHVRMDFARRDNQFDSPKRGR

SEQ ID NO: 7229 - protein, 147 aa, Homo Sapiens
MQELHLLWWALLLGLAQACPEPCDCGEKYGFQIADCAYRDLESVPPGFPANVTTLSLSANRLPGLPEGAFREVPLLQSLWLAHNEIRTVAAGALASLSHLKSLDLSHNLISDFAWSDLHNLSALQLLKMDSNELTFIPRDAFRSLRA

SEQ ID NO: 7230 - protein, 183 aa, Homo Sapiens
MQELHLLWWALLLGLAQACPEPCDCGEKYGFQIADCAYRDLESVPPGFPANVTTLSLSANRLPGLPEGAFREVPLLQSLWLAHNEIRTVAAGALASLSHLKSLDLSHNLISDFAWSDLHNLSALQLLKMDSNELTFIPRDAFRSLRALRSLQLNHNRLHTLAEGTFTPLTALSHLQINENPFD

SEQ ID NO: 7231 - protein, 428 aa, Homo Sapiens
MQELHLLWWALLLGLAQACPEPCDCGEKYGFQIADCAYRDLESVPPGFPANVTTLSLSANRLPGLPEGAFREVPLLQSLWLAHNEIRTVAAGALASLSHLKSLDLSHNLISDFAWSDLHNLSALQLLKMDSNELTFIPRDAFRSLRALRSLQLNHNRLHTLAEGTFTPLTALSHLQINENPFDCTCGIVWLKTWALTTAVSIPEQDNIACTSPHVLKGTPLSRLPPLPCSAPSVQLSYQPSQDGAELRPGFVLALHCDVDGQPAPQLHWHIQIPSGIVEITSPNVGTDGRALPGTPVASSQPRFQAFANGSLLIPDFGKLEEGTYSCLATNELGSAESSVDVALATPGEGGEDTLGRRFHGKAVEGKGCYTVDNEVQPSGPEDNVVIIYLSRAGNPEAAVAEGVPGQLPPGLLLLGQSLLLFFFLTSF

SEQ ID NO: 7232 - protein, 428 aa, Homo Sapiens; identical to SEQ ID NO: 7231

SEQ ID NO: 7233 - protein, 5 aa, Homo Sapiens
MFPLR

SEQ ID NO: 7234 - protein, 89 aa, Homo Sapiens
MFPLRALWLVWALLGVAGSCPEPCACVDKYAHQFADCAYKELREVPEGLPANVTTLSLSANKITVLRRGAFADVTQVTSLWLAHNEVRT

SEQ ID NO: 7235 - protein, 114 aa, Homo Sapiens
MFPLRALWLVWALLGVAGSCPEPCACVDKYAHQFADCAYKELREVPEGLPANVTTLSLSANKITVLRRGAFADVTQVTSLWLAHNEVRTVEPGALAVLSQLKNLDLSHNFISSF

SEQ ID NO: 7236 - protein, 138 aa, Homo Sapiens
MFPLRALWLVWALLGVAGSCPEPCACVDKYAHQFADCAYKELREVPEGLPANVTTLSLSANKITVLRRGAFADVTQVTSLWLAHNEVRTVEPGALAVLSQLKNLDLSHNFISSFPWSDLRNLSALQLLKMNHNRLGSL

SEQ ID NO: 7237 - protein, 334 aa, Homo Sapiens
MFPLRALWLVWALLGVAGSCPEPCACVDKYAHQFADCAYKELREVPEGLPANVTTLSLSANKITVLRRGAFADVTQVTSLWLAHNEVRTVEPGALAVLSQLKNLDLSHNFISSFPWSDLRNLSALQLLKMNHNRLGSLPRDALGALPDLRSLRINNNRLAGEACHVQVVFSTKKELPSLLVIVAVSVFLLVLATVPLLGAACCHLLAKHPGKPYRLILRPQAPDPMEKRIAADFDPRASYLESEKSYPAGGEAGGEEPEDVQGEGLDEDAEQGDPSGDLQREESLAACSLVESQSKANQEEFEAGSEYSDRLPLGAEAVNIAQEINGNYRQTAG

SEQ ID NO: 7238 - protein, 745 aa, Homo Sapiens
MFPLRALWLVWALLGVAGSCPEPCACVDKYAHQFADCAYKELREVPEGLPANVTTLSLSANKITVLRRGAFADVTQVTSLWLAHNEVRTVEPGALAVLSQLKNLDLSHNFISSFPWSDLRNLSALQLLKMNHNRLGSLPRDALGALPDLRSLRINNNRLRTLAPGTFDALSALSHLQLYHNPFHCGCGLVWLQAWAASTRVSLPEPDSIACASPPALQGVPVYRLPALPCAPPSVHLSAEPPLEAPGTPLRAGLAFVLHCIADGHPTPRLQWQLQIPGGTVVLEPPVLSGEDDGVGAEEGEGEGDGDLLTQTQAQTPTPAPAWPAPPATPRFLALANGSLLVPLLSAKEAGVYTCRAHNELGANSTSIRVAVAATGPPKHAPGAGGEPDGQAPTSERKSTAKGRGNSVLPSKPEGKIKGQGLAKVSILGETETEPEEDTSEGEEAEDQILADPAEEQRCGNGDPSRYVSNHAFNQSAELKPHVFELGVIALDVAEREARVQLTPLAARWGPGPGGAGGAPRPGRRPLRLLYLCPAGGGAAVQWSRVEEGVNAYWFRGLRPGTNYSVCLALAGEACHVQVVFSTKKELPSLLVIVAVSVFLLVLATVPLLGAACCHLLAKHPGKPYRLILRPQAPDPMEKRIAADFDPRASYLESEKSYPAGGEAGGEEPEDVQGEGLDEDAEQGDPSGDLQREESLAACSLVESQSKANQEEFEAGSEYSDRLPLGAEAVNIAQEINGNYRQTAG

SEQ ID NO: 7239 - protein, 745 aa, Homo Sapiens; identical to SEQ ID NO: 7238

SEQ ID NO: 7240 - protein, 745 aa, Homo Sapiens; identical to SEQ ID NO: 7238

SEQ ID NO: 7241 - protein, 745 aa, Homo Sapiens; identical to SEQ ID NO: 7238

SEQ ID NO: 7242 - protein, 745 aa, Homo Sapiens; identical to SEQ ID NO: 7238

SEQ ID NO: 7243 - protein, 464 aa, Homo Sapiens
MVRLAAELLLLLGLLLLTLHITVLRGSGAADGPDAAAGNASQAQLQNNLNVGSDTTSETSFSLSKEAPREHLDHQAAHQPFPRPRFRQETGHPSLQRDFPRSFLLDLPNFPDLSKADINGQNPNIQVTIEVVDGPDSEADKDQHPENKPSWSVPSPDWRAWWQRSLSLARANSGDQDYKYDSTSDDSNFLNPPRGWDHTAPGHRTFETKDQPEYDSTDGEGDWSLWSVCSVTCGNGNQKRTRSCGYACTATESRTCDRPNCPGIEDTFRTAATEVSLLAGSEEFNATKLFEVDTDSCERWMSCKSEFLKKYMHKVMNDLPSCPCSYPTEVAYSTADIFDRIKRKDFRWKDASGPKEKLEIYKPTARYCIRSMLSLESTTLAAQHCCYGDNMQLITRGKGAGTPNLISTEFSAELHYKVDVLPWIICKGDWSRYNEARPPNNGQKCTESPSDEDYIKQFQEAREY

SEQ ID NO: 7244 - protein, 76 aa, Homo Sapiens
MRALRDRAGLLLCVLLLAALLEAALGLPVKKPRLRGPRPGSLTRLAEPPFQVRASSERSPAGARNLALCGVAGQGR

SEQ ID NO: 7245 - protein, 292 aa, Homo Sapiens
MRALRDRAGLLLCVLLLAALLEAALGLPVKKPRLRGPRPGSLTRLAEVSASPDPRPLKEEEEAPLLPRTHLQAEPHQHGCWTVTEPAAMTPGNATPPRTPEVTPLRLELQKLPGLANTTLSTPNPDTQASASPDPRPLREEEEARLLPRTHLQAELHQHGCWTVTEPAALTPGNATPPRTQEVTPLLLELQKLPELVHATLSTPNPDNQTMSLRRSGVPGLPAVGTAALASSRGLGPVAMAALPPRPVPVTCPPVLALRTRTPWASPVRSGSSWPAMLRTCMIKMWTAVRSG

SEQ ID NO: 7246 - protein, 571 aa, Homo Sapiens
MRALRDRAGLLLCVLLLAALLEAALGLPVKKPRLRGPRPGSLTRLAEVSASPDPRPLKEEEEAPLLPRTHLQAEPHQHGCWTVTEPAAMTPGNATPPRTPEVTPLRLELQKLPGLANTTLSTPNPDTQASASPDPRPLREEEEARLLPRTHLQAELHQHGCWTVTEPAALTPGNATPPRTQEVTPLLLELQKLPELVHATLSTPNPDNQVTIKVVEDPQAEVSIDLLAEPSNPPPQDTLSWLPALWSFLWGDYKGEEKDRAPGEKGEEKEEDEDYPSEDIEGEDQEDKEEDEEEQALWFNGTTDNWDQGWLAPGDWVFKDSVSYDYEPQKEWSPWSPCSGNCSTGKQQRTRPCGYGCTATETRTCDLPSCPGTEDKDTLGLPSEEWKLLARNATDMHDQDVDSCEKWLNCKSDFLIKYLSQMLRDLPSCPCAYPLEAMDSPVSLQDEHQGRSFRWRDASGPRERLDIYQPTARFCLRSMLSGESSTLAAQHCCYDEDSRLLTRGKGAGMPNLISTDFSPKLHFKFDTTPWILCKGDWSRLHAVLPPNNGRACTDNPLEEEYLAQLQEAKEY

SEQ ID NO: 7247 - protein, 185 aa, Homo Sapiens
MRALRDRAGLLLCVLLLAALLEAALGLPVKKPRLRGPRPGSLTRLAEVSASPDPRPLKEEEEAPLLPRTHLQAEPHQHGCWTVTEPAAMTPGNATPPRTPEVTPLRLELQKLPGLANTTLSTPNPDTQVTIKVVEDPQAEVSIDLLAEPSNPPPQDTLSWLPALWSFLWGDYKGEEKDRAPGEKG

SEQ ID NO: 7248 - protein, 104 aa, Homo Sapiens
  misc_feature (1)..(1): Xaa can be any naturally occurring amino acid
XCVLLLAALLEAALGLPVKKPRLRGPRPGSLTRLAEVSGGGTGLRSALSVPPPQPAGSSRAGSGTGTHTGSDPPMERGAGAGRKLPDTGRCPGAPDFGASTPRA

SEQ ID NO: 7249 - protein, 73 aa, Homo Sapiens
  misc_feature (1)..(1): Xaa can be any naturally occurring amino acid
XRLAEVSGGGTGLRSALSVPPPQPAGSSRAGSGTGTHTGSDPPMERGAGAGRKLPDTGRCPGAPDFGASTPRA

SEQ ID NO: 7250 - protein, 614 aa, Homo Sapiens
MAWEARREPGPRRAAVRETVMLLLCLGVPTGRPYNVDTESALLYQGPHNTLFGYSVVLHSHGANRWLLVGAPTANWLANASVINPGAIYRCRIGKNPGQTCEQLQLGSPNGEPCGKTCLEERDNQWLGVTLSRQPGENGSIVTCGHRWKNIFYIKNENKLPTGGCYGVPPDLRTELSKRIAPCYQDYVKKFGENFASCQAGISSFYTKDLIVMGAPGSSYWTGSLFVYNITTNKYKAFLDKQNQVKFGSYLGYSVGAGHFRSQHTTEVVGGAPQHEQIGKAYIFSIDEKELNILHEMKGKKLGSYFGASVCAVDLNADGFSDLLVGAPMQSTIREEGRVFVYINSGSGAVMNAMETNLVGSDKYAARFGESIVNLGDIDNDGFEDVAIGAPQEDDLQGAIYIYNGRADGISSTFSQRIEGLQISKSLSMFGQSISGQIDADNNGYVDVAVGAFRSDSAVLLRTRPVVIVDASLSHPESVNRTKFDCVENGWPSVCIDLTLCFSYKGKEVPGYIVLFYNMSLDVNRKAESPPRFYFSSNGTSDVITGSIQVSSREANCRTHQAFMRKDVRDILTPIQIEAAYHLGPHVISKRSTEEFPPLQPILQQKKEKDIMKK

SEQ ID NO: 7251 - protein, 1032 aa, Homo Sapiens [sequence omitted]

SEQ ID NO: 7252 - protein, 195 aa, Homo Sapiens
MAWEARREPGPRRAAVRETVMLLLCLGVPTGRPYNVDTESALLYQGPHNTLFGYSVVLHSHGANRWLLVGAPTANWLANASVINPGAIYRCRIGKNPGQTCEQLQLGSPNGEPCGKTCLEERDNQWLGVTLSRQPGENGSIVTCGHRWKNIFYIKNENKLPTGGCYGVPPDLRTELSKRIAPCYQGSISKYRART

SEQ ID NO: 7253 - protein, 1035 aa, Homo Sapiens
MGGPAAPRGAGRLRALLLALVVAGIPAGAYNLDPQRPVHFQGPADSFFGYAVLEHFHDNTRWVLVGAPKADSKYSPSVKSPGAVFKCRVHTNPDRRCTELDMARGKNRGTSCGKTCREDRDDEWMGVSLARQPKADGRVLACAHRWKNIYYEADHILPHGFCYIIPSNLQAKGRTLIPCYEEYKKKYGEEHGSCQAGIAGFFTEELVVMGAPGSFYWAGTIKVLNLTDNTYLKLNDEVIMNRRYTYLGYAVTAGHFSHPSTIDVVGGAPQDKGIGKVYIFRADRRSGTLIKIFQASGKKMGSYFGSSLCAVDLNGDGLSDLLVGAPMFSEIRDEGQVTVYINRGNGALEEQLALTGDGAYNAHFGESIASLDDLDNDGFPDVAIGAPKEDDFAGAVYIYHGDAGGIVPQYSMKLSGQKINPVLRMFGQSISGGIDMDGNGYPDVTVGAFMSDSVVLLRARPVITVDVSIFLPGSINITAPQCHDGQQPVNCLNVTTCFSFHGKHVPGEIGLNYVLMADVAKKEKGQMPRVYFVLLGETMGQVTEKLQLTYMEETCRHYVAHVKRRVQDVISPIVFEAAYSLSEHVTGEEERELPPLTPVLRWKKGQKIAQKNQTVFERNCRSEDCAADLQLQGKLLLSSMDEKTLYLALGAVKNISLNISISNLGDDAYDANVSFNVSRELFFINMWQKEEMGISCELLESDFLKCSVGFPFMRSKSKYEFSVIFDTSHLSGEEEVLSFIVTAQSGNTERSESLHDNTLVLMVPLMHEVDTSITGIMSPTSFVYGESVDAANFIQLDDLECHFQPINITLQVYNTGPSTLPGSSVSISFPNRLSSGGAEMFHVQEMVVGQEKGNCSFQKNPTPCIIPQEQENIFHTIFAFFTKSGRKVLDCEKPGISCLTAHCNFSALAKEESRTIDIYMLLNTEILKKDSSSVIQFMSRAKVKVDPALRVVEIAHGNPEEVTVVFEALHNLEPRGYVVGWIIAISLLVGILIFLLLAVLLWKMGFFRRRYKEIIEAEKNRKENEDSWDWVQKNQ

SEQ ID NO: 7254 - protein, 632 aa, Homo Sapiens
MGGPAAPRGAGRLRALLLALVVAGIPAGAYNLDPQRPVHFQGPADSFFGYAVLEHFHDNTRWVLVGAPKADSKYSPSVKSPGAVFKCRVHTNPDRRCTELDMARGKNRGTSCGKTCREDRDDEWMGVSLARQPKADGRVLACAHRWKNIYYEADHILPHGFCYIIPSNLQAKGRTLIPCYEEYKKKYGEEHGSCQAGIAGFFTEELVVMGAPGSFYWAGTIKVLNLTDNTYLKLNDEVIMNRRYTYLGYAVTAGHFSHPSTIDVVGGAPQDKGIGKVYIFRADRRSGTLIKIFQASGKKMGSYFGSSLCAVDLNGDGLSDLLVGAPMFSEIRDEGQVTVYINRGNGALEEQLALTGDGAYNAHFGESIASLDDLDNDGFPDVAIGAPKEDDFAGAVYIYHGDAGGIVPQYSMKLSGQKINPVLRMFGQSISGGIDMDGNGYPDVTVGAFMSDSVVLLRARPVITVDVSIFLPGSINITAPQCHDGQQPVNCLNVTTCFSFHGKHVPGEIGLNYVLMADVAKKEKGQMPRVYFVLLGETMGQVTEKLQLTYMEETCRHYVAHVKRRVQDVISPIVFEAAYSLSEHVTGEEERELPPLTPVLRWKKGQKIAQKNQVRTLKLILSTQGGSCTEQK

SEQ ID NO: 7255 - protein, 69 aa, Homo Sapiens
  misc_feature (1)..(1): Xaa can be any naturally occurring amino acid
XKKDSSSVIQFMSRAKVKVDPALRVVEIAHGNPEEVTMGFFRRRYKEIIEAEKNRKENEDSWDWVQKNQ

SEQ ID NO: 7256 - protein, 404 aa, Homo Sapiens
MKDSCITVMAMALLSGFFFFAPASSYNLDVRGARSFSPPRAGRHFGYRVLQIKSLIPQFQGRLVANLTYTLQLDGHRTRRRGLFPGGRHELRRNIAVTTSMSCTDFSFHFPMMFNTLVNSSWGDSVELHANVTCNNEDSDLLEDNSATTIIPILYPINILIQDQEDSTLYVSFTPKGPKIHQVKHMYQVRIQPSIHDHNIPTLEAVVGVPQPPSEGPITHQWSVQMEPPVPCHYEDLERLPDAAEPCLPGALFRCPVVFRQEILVQVIGTLELVGEIEASSMFSLCSSLSISFNSSKHFHLYGSNASLAQVVMKVDVVYEKQMLYLYVLSGIGGLLLLLLIFIVLYKVGFFKRNLKEKMEAGRGVPNGIPAEDSEQLASGQEAGDPGCLKPLHEKDSESGGGKD

SEQ ID NO: 7257 - protein, 109 aa, Homo Sapiens
MKDSCITVMAMALLSGFFFFAPASSYNLDVRGARSFSPPRAGRHFGYRVLQLDGHRTRRRGLFPGGRHELRRNIAVTTSMSCTDFSFHFPIQSPASNCFCQPLCGAEPE

SEQ ID NO: 7258 - protein, 55 aa, Homo Sapiens
MKDSCITVMAMALLSGFFFFAPASSYNLDVRGARSFSPPRAGRHFGYRVLQVGNG

SEQ ID NO: 7259 - protein, 1170 aa, Homo Sapiens
MKDSCITVMAMALLSGFFFFAPASSYNLDVRGARSFSPPRAGRHFGYRVLQVGNGVIVGAPGEGNSTGSLYQCQSGTGHCLPVTLRGSNYTSKYLGMTLATDPTDGSILACDPGLSRTCDQNTYLSGLCYLFRQNLQGPMLQGRPGFQECIKGNVDLVFLFDGSMSLQPDEFQKILDFMKDVMKKLSNTSYQFAAVQFSTSYKTEFDFSDYVKRKDPDALLKHVKHMLLLTNTFGAINYVATEVFREELGARPDATKVLIIITDGEATDSGNIDAAKDIIRYIIGIGKHFQTKESQETLHKFASKPASEFVKILDTFEKLKDLFTELQKKIYVIEGTSKQDLTSFNMELSSSGISADLSRGHAVVGAVGAKDWAGGFLDLKADLQDDTFIGNEPLTPEVRAGYLGYTVTWLPSRQKTSLLASGAPRYQHMGRVLLFQEPQGGGHWSQVQTIHGTQIGSYFGGELCGVDVDQDGETELLLIGAPLFYGEQRGGRVFIYQRRQLGFEEVSELQGDPGYPLGRFGEAITALTDINGDGLVDVAVGAPLEEQGAVYIFNGRHGGLSPQPSQRIEGTQVLSGIQWFGRSIHGVKDLEGDGLADVAVGAESQMIVLSSRPVVDMVTLMSFSPAEIPVHEVECSYSTSNKMKEGVNITICFQIKSLIPQFQGRLVANLTYTLQLDGHRTRRRGLFPGGRHELRRNIAVTTSMSCTDFSFHFPVCVQDLISPINVSLNFSLWEEEGTPRDQRAQGKDIPPILRPSLHSETWEIPFEKNCGEDKKCEANLRVSFSPARSRALRLTAFASLSVELSLSNLEEDAYWVQLDLHFPPGLSFRKVEMLKPHSQIPVSCEELPEESRLLSRALSCNVSSPIFKAGHSVALQMMFNTLVNSSWGDSVELHANVTCNNEDSDLLEDNSATTIIPILYPINILIQDQEDSTLYVSFTPKGPKIHQVKHMYQVRIQPSIHDHNIPTLEAVVGVPQPPSEGPITHQWSVQMEPPVPCHYEDLERLPDAAEPCLPGALFRCPVVFRQEILVQVIGTLELVGEIEASSMFSLCSSLSISFNSSKHFHLYGSNASLAQVVMKVDVVYEKQMLYLYVLSGIGGLLLLLLIFIVLYKVGFFKRNLKEKMEAGRGVPNGIPAEDSEQLASGQEAGDPGCLKPLHEKDSESGGGKD

SEQ ID NO: 7260 - protein, 162 aa, Homo Sapiens
MKDSCITVMAMALLSGFFFFAPASSYNLDVRGARSFSPPRAGRHFGYRVLQVGNGVIVGAPGEGNSTGSLYQCQSGTGHCLPVTLRGSNYTSKYLGMTLATDPTDGSILACDPGLSRTCDQNTYLSGLCYLFRQNLQGPMLQGRPGFQVCCCSVFHKLQNRI

SEQ ID NO: 7261 - protein, 1086 aa, Homo Sapiens
MKDSCITVMAMALLSGFFFFAPASSYNLDVRGARSFSPPRAGRHFGYRVLQVGNGVIVGAPGEGNSTGSLYQCQSGTGHCLPVTLRGSNYTSKYLGMTLATDPTDGSILFAAVQFSTSYKTEFDFSDYVKRKDPDALLKHVKHMLLLTNTFGAINYVATEVFREELGARPDATKVLIIITDGEATDSGNIDAAKDIIRYIIGIGKHFQTKESQETLHKFASKPASEFVKILDTFEKLKDLFTELQKKIYVIEGTSKQDLTSFNMELSSSGISADLSRGHAVVGAVGAKDWAGGFLDLKADLQDDTFIGNEPLTPEVRAGYLGYTVTWLPSRQKTSLLASGAPRYQHMGRVLLFQEPQGGGHWSQVQTIHGTQIGSYFGGELCGVDVDQDGETELLLIGAPLFYGEQRGGRVFIYQRRQLGFEEVSELQGDPGYPLGRFGEAITALTDINGDGLVDVAVGAPLEEQGAVYIFNGRHGGLSPQPSQRIEGTQVLSGIQWFGRSIHGVKDLEGDGLADVAVGAESQMIVLSSRPVVDMVTLMSFSPAEIPVHEVECSYSTSNKMKEGVNITICFQIKSLIPQFQGRLVANLTYTLQLDGHRTRRRGLFPGGRHELRRNIAVTTSMSCTDFSFHFPVCVQDLISPINVSLNFSLWEEEGTPRDQRAGKDIPPILRPSLHSETWEIPFEKNCGEDKKCEANLRVSFSPARSRALRLTAFASLSVELSLSNLEEDAYWVQLDLHFPPGLSFRKVEMLKPHSQIPVSCEELPEESRLLSRALSCNVSSPIFKAGHSVALQMMFNTLVNSSWGDSVELHANVTCNNEDSDLLEDNSATTIIPILYPINILIQDQEDSTLYVSFTPKGPKIHQVKHMYQVRIQPSIHDHNIPTLEAVVGVPQPPSEGPITHQWSVQMEPPVPCHYEDLERLPDAAEPCLPGALFRCPVVFRQEILVQVIGTLELVGEIEASSMFSLCSSLSISFNSSKHFHLYGSNASLAQVVMKVDVVYEKQMLYLYVLSGIGGLLLLLLIFIVLYKVGFFKRNLKEKMEAGRGVPNGIPAEDSEQLASGQEAGDPGCLKPLHEKDSESGGGKD

SEQ ID NO: 7262 - protein, 204 aa, Homo Sapiens
MKDSCITVMAMALLSGFFFFAPASSYNLDVRGARSFSPPRAGRHFGYRVLQVGNGVIVGAPGEGNSTGSLYQCQSGTGHCLPVTLRGSNYTSKYLGMTLATDPTDGSILFAAVQFSTSYKTEFDFSDYVKRKDPDALLKHVKHMLLLTNTFGAINYVATEVFREELGARPDATKVLIIITDGEATDSGNIDAAKDIIRYIIGVG

SEQ ID NO: 7263 - protein, 90 aa, Homo Sapiens
MKDSCITVMAMALLSGFFFFERPNGKLYPQALGRAFRALGGPGVAPSIFPEVNALEGKRRVRVAWGATSGWAWDRPPAGHVQGRGSLGRS

SEQ ID NO: 7264 - protein, 41 aa, Homo Sapiens
MTLATDPTDGSILACDPGLSRTCDQNTYLSGLCYLFRQNLQ

SEQ ID NO: 7265 - protein, 38 aa, Homo Sapiens
  misc_feature (1)..(1): Xaa can be any naturally occurring amino acid
XKEGVNITICFQIKSLIPQFQAGWPPDQKTGVVPRRET

SEQ ID NO: 7266 - protein, 1163 aa, Homo Sapiens
MTRTRAALLLFTALATSLGFNLDTEELTAFRVDSAGFGDSVVQYANSWVVVGAPQKITAANQTGGLYQCGYSTGACEPIGLQVPPEAVNMSLGLSLASTTSPSQLLACGPTVHHECGRNMYLTGLCFLLGPTQLTQRLPVSRQECPRQEQDIVFLIDGSGSISSRNFATMMNFVRAVISQFQRPSTQFSLMQFSNKFQTHFTFEEFRRSSNPLSLLASVHQLQGFTYTATAIQNVVHRLFHASYGARRDAAKILIVITDGKKEGDSLDYKDVIPMADAAGIIRYAIGVGLAFQNRNSWKELNDIASKPSQEHIFKVEDFDALKDIQNQLKEKIFAIEGTETTSSSSFELEMAQEGFSAVFTPDGPVLGAVGSFTWSGGAFLYPPNMSPTFINMSQENVDMRDSYLGYSTELALWKGVQSLVLGAPRYQHTGKAVIFTQVSRQWRMKAEVTGTQIGSYFGASLCSVDVDSDGSTDLVLIGAPHYYEQTRGGQVSVCPLPRGWRRWWCDAVLYGEQGHPWGRFGAALTVLGDVNGDKLTDVVIGAPGEEENRGAVYLFHGVLGPSISPSHSQRIAGSQLSSRLQYFGQALSGGQDLTQDGLVDLAVGARGQVLLLRTRPVLWVGVSMQFIPAEIPRSAFECREQVVSEQTLVQSNICLYIDKRSKNLLGSRDLQSSVTLDLALDPGRLSPRATFQETKNRSLSRVRVLGLKAHCENFNLLLPSCVEDSVTPITLRLNFTLVGKPLLAFRNLRPMLAADAQRYFTASLPFEKNCGADHICQDNLGISFSFPGLKSLLVGSNLELNAEVMVWNDGEDSYGTTITFSHPAGLSYRYVAEGQKQGQLRSLHLTCDSAPVGSQGTWSTSCRINHLIFRGGAQITFLATFDVSPKAVLGDRLLLTANVSSENNTPRTSKTTFQLELPVKYAVYTVVSSHEQFTKYLNFSESEEKESHVAMHRYQVNNLGQRDLPVSINFWVPVELNQEAVWMDVEVSHPQNPSLRCSSEKIAPPASDFLAHIQKNPVLDCSIAGCLRFRCDVPSFSVQEELDFTLKGNLSFGWVRQILQKKVSVVSVAEITFDTSVYSQLPGQEAFMRAQTTTVLEKYKVHNPTPLIVGSSIGGLLLLALITAVLYKVGFFKRQYKEMMEEANGQIAPENGTQTPSPPSEK

SEQ ID NO: 7267 - protein, 1169 aa, Homo Sapiens
MTRTRAALLLFTALATSLGFNLDTEELTAFRVDSAGFGDSVVQYANSWVVVGAPQKITAANQTGGLYQCGYSTGACEPIGLQVPPEAVNMSLGLSLASTTSPSQLLACGPTVHHECGRNMYLTGLCFLLGPTQLTQRLPVSRQECPRQEQDIVFLIDGSGSISSRNFATMMNFVRAVISQFQRPSTQFSLMQFSNKFQTHFTFEEFRRSSNPLSLLASVHQLQGFTYTATAIQNVVHRLFHASYGARRDAAKILIVITDGKKEGDSLDYKDVIPMADAAGIIRYAIGVGLAFQNRNSWKELNDIASKPSQEHIFKVEDFDALKDIQNQLKEKIFAIEGTETTSSSSFELEMAQEGFSAVFTPDGPVLGAVGSFTWSGGAFLYPPNMSPTFINMSQENVDMRDSYLGYSTELALWKGVQSLVLGAPRYQHTGKAVIFTQVSRQWRMKAEVTGTQIGSYFGASLCSVDVDSDGSTDLVLIGAPHYYEQTRGGQVSVCPLPRGWRRWWCDAVLYGEQGHPWGRFGAALTVLGDVNGDKLTDVVIGAPGEEENRGAVYLFHGVLGPSISPSHSQRIAGSQLSSRLQYFGQALSGGQDLTQDGLVDLAVGARGQVLLLRTRPVLWVGVSMQFIPAEIPRSAFECREQVVSEQTLVQSNICLYIDKRSKNLLGSRDLQSSVTLDLALDPGRLSPRATFQETKNRSLSRVRVLGLKAHCENFNLLLPSCVEDSVTPITLRLNFTLVGKPLLAFRNLRPMLAADAQRYFTASLPFEKNCGADHICQDNLGISFSFPGLKSLLVGSNLELNAEVMVWNDGEDSYGTTITFSHPAGLSYRYVAEGQKQGQLRSLHLTCDSAPVGSQGTWSTSCRINHLIFRGGAQITFLATFDVSPKAVLGDRLLLTANVSSENNTPRTSKTTFQLELPVKYAVYTVVSSHEQFTKYLNFSESEEKESHVAMHRYQVNNLGQRDLPVSINFWVPVELNQEAVWMDVEVSHPQNPSLRCSSEKIAPPASDFLAHIQKNPVLDCSIAGCLRFRCDVPSFSVQEELDFTLKGNLSFGWVRQILQKKVSVVSVAEITFDTSVYSQLPGQEAFMRAQTTTVLEKYKVHNPTPLIVGSSIGGLLLLALITAVLYKVGFFKRQYKEMMEEANGQIAPENGTQTPSPPTPHYPQDNV

SEQ ID NO: 7268 - protein, 181 aa, Homo Sapiens
MTRTRAALLLFTALATSLGFNLDTEELTAFRVDSAGFGDSVVQYANSWVVVGAPQKITAANQTGGLYQCGYSTGACEPIGLQVPPEAVNMSLGLSLASTTSPSQLLLTQRLPVSRQGECRDHQGFEELTHIQLGVRWARDSLARVDQKEGIWKKSYHVLQWFLTLLPAHPADRPHAAGPFL

SEQ ID NO: 7269 - protein, 49 aa, Homo Sapiens
MNLQPIFWIGLISSVCCVFAQTDENRCLKANAKSCGECIQAGPNCGWCT

SEQ ID NO: 7270 - protein, 89 aa, Homo Sapiens
MNLQPIFWIGLISSVCCVFAQTDENRCLKANAKSCGECIQAGPNCGWCTNSTFLQEGMPTSARCDDLEALKKKGCPPDDIENPRGSKDI

SEQ ID NO: 7271 - protein, 104 aa, Homo Sapiens
MNLQPIFWIGLISSVCCVFAQTDENRCLKANAKSCGECIQAGPNCGWCTNSTFLQEGMPTSARCDDLEALKKKGCPPDDIENPRGSKDIKKNKNVTNRSKGTAE

SEQ ID NO: 7272 - protein, 125 aa, Homo Sapiens
MNLQPIFWIGLISSVCCVFAQTDENRCLKANAKSCGECIQAGPNCGWCTNSTFLQEGMPTSARCDDLEALKKKGCPPDDIENPRGSKDIKKNKNVTNRSKGTAEKLKPEDITQIQPQQLVLRLRS

SEQ ID NO: 7273 - protein, 136 aa, Homo Sapiens
MNLQPIFWIGLISSVCCVFAQTDENRCLKANAKSCGECIQAGPNCGWCTNSTFLQEGMPTSARCDDLEALKKKGCPPDDIENPRGSKDIKKNKNVTNRSKGTAEKLKPEDITQIQPQQLVLRLRSGEPQTFTLKFK

SEQ ID NO: 7274 - protein, 143 aa, Homo Sapiens
MNLQPIFWIGLISSVCCVFAQTDENRCLKANAKSCGECIQAGPNCGWCTNSTFLQEGMPTSARCDDLEALKKKGCPPDDIENPRGSKDIKKNKNVTNRSKGTAEKLKPEDITQIQPQQLVLRLRSGEPQTFTLKFKRAEDYPI

SEQ ID NO: 7275 - protein, 163 aa, Homo Sapiens
MNLQPIFWIGLISSVCCVFAQTDENRCLKANAKSCGECIQAGPNCGWCTNSTFLQEGMPTSARCDDLEALKKKGCPPDDIENPRGSKDIKKNKNVTNRSKGTAEKLKPEDITQIQPQQLVLRLRSGEPQTFTLKFKRAEDYPIDLYYLMDLSYSMKDDLENVK

SEQ ID NO: 7276 - protein, 798 aa, Homo Sapiens
MNLQPIFWIGLISSVCCVFAQTDENRCLKANAKSCGECIQAGPNCGWCTNSTFLQEGMPTSARCDDLEALKKKGCPPDDIENPRGSKDIKKNKNVTNRSKGTAEKLKPEDITQIQPQQLVLRLRSGEPQTFTLKFKRAEDYPIDLYYLMDLSYSMKDDLENVKSLGTDLMNEMRRITSDFRIGFGSFVEKTVMPYISTTPAKLRNPCTSEQNCTSPFSYKNVLSLTNKGEVFNELVGKQRISGNLDSPEGGFDAIMQVAVCGSLIGWRNVTRLLVFSTDAGFHFAGDGKLGGIVLPNDGQCHLENNMYTMSHYYDYPSIAHLVQKLSENNIQTIFAVTEEFQPVYKELKNLIPKSAVGTLSANSSNVIQLIIDAYNSLSSEVILENGKLSEGVTISYKSYCKNGVNGTGENGRKCSNISIGDEVQFEISITSNKCPKKDSDSFKIRPLGFTEEVEVILQYICECECQSEGIPESPKCHEGNGTFECGACRCNEGRVGRHCECSTDEVNSEDMDAYCRKENSSEICSNNGECVCGQCVCRKRDNTNEIYSGKFCECDNFNCDRSNGLICGGNGVCKCRVCECNPNYTGSACDCSLDTSTCEASNGQICNGRGICECGVCKCTDPKFQGQTCEMCQTCLGVCAEHKECVQCRAFNKGEKKDTCTQECSYFNITKVESRDKLPQPVQPDPVSHCKEKDVDDCWFYFTYSVNGNNEVMVHVVENPECPTGPDIIPIVAGVVAGIVLIGLALLLIWKLLMIIHDRREFAKFEKEKMNAKWDTGENPIYKSAVTTVVNPKYEGK

SEQ ID NO: 7277 - protein, 798 aa, Homo Sapiens; identical to SEQ ID NO: 7276

SEQ ID NO: 7278 - protein, 801 aa, Homo Sapiens
MNLQPIFWIGLISSVCCVFAQTDENRCLKANAKSCGECIQAGPNCGWCTNSTFLQEGMPTSARCDDLEALKKKGCPPDDIENPRGSKDIKKNKNVTNRSKGTAEKLKPEDITQIQPQQLVLRLRSGEPQTFTLKFKRAEDYPIDLYYLMDLSYSMKDDLENVKSLGTDLMNEMRRITSDFRIGFGSFVEKTVMPYISTTPAKLRNPCTSEQNCTSPFSYKNVLSLTNKGEVFNELVGKQRISGNLDSPEGGFDAIMQVAVCGSLIGWRNVTRLLVFSTDAGFHFAGDGKLGGIVLPNDGQCHLENNMYTMSHYYDYPSIAHLVQKLSENNIQTIFAVTEEFQPVYKELKNLIPKSAVGTLSANSSNVIQLIIDAYNSLSSEVILENGKLSEGVTISYKSYCKNGVNGTGENGRKCSNISIGDEVQFEISITSNKCPKKDSDSFKIRPLGFTEEVEVILQYICECECQSEGIPESPKCHEGNGTFECGACRCNEGRVGRHCECSTDEVNSEDMDAYCRKENSSEICSNNGECVCGQCVCRKRDNTNEIYSGKFCECDNFNCDRSNGLICGGNGVCKCRVCECNPNYTGSACDCSLDTSTCEASNGQICNGRGICECGVCKCTDPKFQGQTCEMCQTCLGVCAEHKECVQCRAFNKGEKKDTCTQECSYFNITKVESRDKLPQPVQPDPVSHCKEKDVDDCWFYFTYSVNGNNEVMVHVVENPECPTGPDIIPIVAGVVAGIVLIGLALLLIWKLLMIIHDRREFAKFEKEKMNAKWDTQENPIYKSPINNFKNPNYGRKAGL

SEQ ID NO: 7279 - protein, 152 aa, Homo Sapiens
MNLQPIFWIGLISSVCCVFAQTDENRCLKANAKSCGECIQAGPNCGWCTNSVSKTFLQEGMPTSARCDDLEALKKKGCPPDDIENPRGSKDIKKNKNVTNRSKGTAEKLKPEDITQIQPQQLVLRLRSGEPQTFTLKFKRAEDYPIDLYYLM

SEQ ID NO: 7280 - protein, 14 aa, Homo Sapiens
MPTSARCDDLEALK

SEQ ID NO: 7281 - protein, 31 aa, Homo Sapiens
MPTSARCDDLEALKKKGCPPDDIENPRGSKD

SEQ ID NO: 7282 - protein, 98 aa, Homo Sapiens
MPTSARCDDLEALKKKGCPPDDIENPRGSKDIKKNKNVTNRSKGTAEKLKPEDITQIQPQQLVLRLRSGEPQTFTLKFKRAEDYPIDLYYLMDLSYSM

SEQ ID NO: 7283 - protein, 108 aa, Homo Sapiens
  misc_feature (1)..(1): Xaa can be any naturally occurring amino acid
XDMDAYCRKENSSEICSNNGECVCGQCVCRKRDNTNEIYSGKFCECDNFNCDRSNGLICGGNGVCKCRVCECNPNYTGSACDCSLDTSTCEASNGQICNGRGICECGV

SEQ ID NO: 7284 - protein, 70 aa, Homo Sapiens
  misc_feature (1)..(1): Xaa can be any naturally occurring amino acid
XVAGVVAGIVLIGLALLLIWKLLMIIHDRREFAKFEKEKMNAKWDTQENPIYKSPINNFKNPNYGRKAGL

SEQ ID NO: 7285 - protein, 322 aa, Homo Sapiens
GRLGKDLATGVLSQECTKFKVSSCRECIESGPGCTWCQKLNFTGPGDPDSIRCDTRPQLLMRGCAADDIMDPTSLAETQEDHNGGQKQLSPQKVTLYLRPGQAAAFNVTFRRAKGYPIDLYYLMDLSYSMLDDLRNVKKLGGDLLRALNEITESGRIGFGSFVDKTVLPFVNTHPDKLRNPCPNKEKECQPPFAFRHVLKLTNNSNQFQTEVGKQLISGNLDAPEGGLDAMMQVAACPEEIGWRNVTRLLVFATDDGFHFAGDGKLGAILTPNDGRCHLEDNLYKRSNEFDYPSVGQLAHKLAENNIQPIFAVTSRMVKTYE

SEQ ID NO: 7286 - protein, 71 aa, Homo Sapiens
MLGLRPPLLALVGLLSLGCGRPRAPTHQPASSLSPLSGVHEVQGQQLPGMHRVGARLHLVPEAELHRAGGS

SEQ ID NO: 7287 - protein, 49 aa, Homo Sapiens
MLGLRPPLLALVGLLSLGCVLSQECTKFKVSSCRECIESGPGCTWCQKL

SEQ ID NO: 7288 - protein, 93 aa, Homo Sapiens
MLGLRPPLLALVGLLSLGCVLSQECTKFKVSSCRECIESGPGCTWCQKLGAALGPPAHATAASSPRRRSRVAPVCPRTEQGGQAPELHRAGGS

SEQ ID NO: 7289 - protein, 108 aa, Homo Sapiens
MLGLRPPLLALVGLLSLGCVLSQECTKFKVSSCRECIESGPGCTWCQKLGAALGPPAHATAASSPRRRSRVAPVCPRTEQGGQAPGGNYLGQAGFFPSPFWRFSAPLK

SEQ ID NO: 7290 - protein, 70 aa, Homo Sapiens
MLGLRPPLLALVGLLSLGCVLSQECTKFKVSSCRECIESGPGCTWCQKLNFTGPGDPDSIRCDTRPQLLM

SEQ ID NO: 7291 - protein, 712 aa, Homo Sapiens
MLGLRPPLLALVGLLSLGCVLSQECTKFKVSSCRECIESGPGCTWCQKLNFTGPGDPDSIRCDTRPQLLMRGCAADDIMDPTSLAETQEDHNGGQKQLSPQKVTLYLRPGFGSFVDKTVLPFVNTHPDKLRNPCPNKEKECQPPFAFRHVLKLTNNSNQFQTEVGKQLISGNLDAPEGGLDAMMQVAACPEEIGWRNVTRLLVFATDDGFHFAGDGKLGAILTPNDGRCHLEDNLYKRSNEFDYPSVGQLAHKLAENNIQPIFAVTSRMVKTYEKLTEIIPKSAVGELSEDSSNVVHLIKNAYNKLSSRVFLDHNALPDTLKVTYDSFCSNGVTHRNQPRGDCDGVQINVPITFQVKVTATECIQEQSFVIRALGFTDIVTVQVLPQCECRCRDQSRDRSLCHGKGFLECGICRCDTGYIGKNCECQTQGRSSQELEGSCRKDNNSIICSGLGDCVCGQCLCHTSDVPGKLIYGQYCECDTINCERYNGQVCGGPGRGLCFCGKCRCHPGFEGSACQCERTTEGCLNPRRVECSGRGRCRCNVCECHSGYQLPLCQECPGCPSPCGKYISCAECLKFEKGPFGKNCSAACPGLQLSNNPVKGRTCKERDSEGCWVAYTLEQQDGMDRYLIYVDESRECVAGPNIAAIVGGTVAGIVLIGILLLVIWKALIHLSDLREYRRFEKEKLKSQWNNDNPLFKSATTTVMNPKFAES

SEQ ID NO: 7292 - protein, 120 aa, Homo Sapiens
MLGLRPPLLALVGLLSLGCVLSQECTKFKVSSCRECIESGPGCTWCQKLNFTGPGDPDSIRCDTRPQLLMRGCAADDIMDPTSLAETQEDHNGGQKQLSPQKVTLYLRPGQAAAFNVTFR

SEQ ID NO: 7293 - protein, 160 aa, Homo Sapiens
MLGLRPPLLALVGLLSLGCVLSQECTKFKVSSCRECIESGPGCTWCQKLNFTGPGDPDSIRCDTRPQLLMRGCAADDIMDPTSLAETQEDHNGGQKQLSPQKVTLYLRPGQAAAFNVTFRRAKGYPIDLYYLMDLSYSMLDDLRNVKKLGGDLLRALNEI

SEQ ID NO: 7294 - protein, 166 aa, Homo Sapiens
MLGLRPPLLALVGLLSLGCVLSQECTKFKVSSCRECIESGPGCTWCQKLNFTGPGDPDSIRCDTRPQLLMRGCAADDIMDPTSLAETQEDHNGGQKQLSPQKVTLYLRPGQAAAFNVTFRRAKGYPIDLYYLMDLSYSMLDDLRNVKKLGGDLLRALNEITESGRI

SEQ ID NO: 7295 - protein, 769 aa, Homo Sapiens
MLGLRPPLLALVGLLSLGCVLSQECTKFKVSSCRECIESGPGCTWCQKLNFTGPGDPDSIRCDTRPQLLMRGCAADDIMDPTSLAETQEDHNGGQKQLSPQKVTLYLRPGQAAAFNVTFRRAKGYPIDLYYLMDLSYSMLDDLRNVKKLGGDLLRALNEITESGRIGFGSFVDKTVLPFVNTHPDKLRNPCPNKEKECQPPFAFRHVLKLTNNSNQFQTEVGKQLISGNLDAPEGGLDAMMQVAACPEEIGWRNVTRLLVFATDDGFHFAGDGKLGAILTPNDGRCHLEDNLYKRSNEFDYPSVGQLAHKLAENNIQPIFAVTSRMVKTYEKLTEIIPKSAVGELSEDSSNVVHLIKNAYNKLSSRVFLDHNALPDTLKVTYDSFCSNGVTHRNQPRGDCDGVQINVPITFQVKVTATECIQEQSFVIRALGFTDIVTVQVLPQCECRCRDQSRDRSLCHGKGFLECGICRCDTGYIGKNCECQTQGRSSQELEGSCRKDNNSIICSGLGDCVCGQCLCHTSDVPGKLIYGQYCECDTINCERYNGQVCGGPGRGLCFCGKCRCHPGFEGSACQCERTTEGCLNPRRVECSGRGRCRCNVCECHSGYQLPLCQECPGCPSPCGKYISCAECLKFEKGPFGKNCSAACPGLQLSNNPVKGRTCKERDSEGCWVAYTLEQQDGMDRYLIYVDESRECVAGPNIAAIVGGTVAGIVLIGILLLVIWKALIHLSDLREYRRFEKEKLKSQWNNDNPLFKSATTTVMNPKFAES

SEQ ID NO: 7296 - protein, 769 aa, Homo Sapiens; identical to SEQ ID NO: 7295

SEQ ID NO: 7297 - protein, 769 aa, Homo Sapiens; identical to SEQ ID NO: 7295

SEQ ID NO: 7298 - protein, 769 aa, Homo Sapiens; identical to SEQ ID NO: 7295

SEQ ID NO: 7299 - protein, 769 aa, Homo Sapiens; identical to SEQ ID NO: 7295

SEQ ID NO: 7300 - protein, 37 aa, Homo Sapiens
MRGCAADDIMDPTSLAETQEDHNGGQKQLSPQKVTLY

SEQ ID NO: 7301 - protein, 49 aa, Homo Sapiens
MRGCAADDIMDPTSLAETQEDHNGGQKQLSPQKVTLYLRPGQAAAFNVT

SEQ ID NO: 7302 - protein, 35 aa, Homo Sapiens
LKSCMGLKIGDTVRWAGQGLCPGASVGTQPPFFLL

SEQ ID NO: 7303 - protein, 788 aa, Homo Sapiens
MRARPRPRPLWATVLALGALAGVGVGGPNICTTRGVSSCQQCLAVSPMCAWCSDEALPLGSPRCDLKENLLKDNCAPESIEFPVSEARVLEDRPLSDKGSGDSSQVTQVSPQRIALRLRPDDSKNFSIQVRQVEDYPVDIYYLMDLSYSMKDDLWSIQNLGTKLATQMRKLTSNLRIGFGAFVDKPVSPYMYISPPEALENPCYDMKTTCLPMFGYKHVLTLTDQVTRFNEEVKKQSVSRNRDAPEGGFDAIMQATVCDEKIGWRNDASHLLVFTTDAKTHIALDGRLAGIVQPNDGQCHVGSDNHYSASTTMDYPSLGLMTEKLSQKNINLIFAVTENVVNLYQNYSELIPGTTVGVLSMDSSNVLQLIVDAYGKIRSKVELEVRDLPEELSLSFNATCLNNEVIPGLKSCMGLKIGDTVSFSIEAKVRGCPQEKEKSFTIKPVGFKDSLIVQVTFDCDCACQAQAEPNSHRCNNGNGTFECGVCRCGPGWLGSQCECSEEDYRPSQQDECSPREGQPVCSQRGECLCGQCVCHSSDFGKITGKYCECDDFSCVRYKGEMCSGHGQCSCGDCLCDSDWTGYYCNCTTRTDTCMSSNGLLCSGRGKCECGSCVCIQPGSYGDTCEKCPTCPDACTFKKECVECKKFDRGALHDENTCNRYCRDEIESVKELKDTGKDAVNCTYKNEDDCVVRFQYYEDSSGKSILYVVEEPECPKGPDILVVLLSVMGAILLIGLAALLIWKLLITIHDRKEFAKFEEERARAKWDTANNPLYKEATSTFTNITYRGT

SEQ ID NO: 7304 - protein, 443 aa, Homo Sapiens
MRARPRPRPLWATVLALGALAGVGVGGPNICTTRGVSSCQQCLAVSPMCAWCSDEALPLGSPRCDLKENLLKDNCAPESIEFPVSEARVLEDRPLSDKGSGDSSQVTQVSPQRIALRLRPDDSKNFSIQVRQVEDYPVDIYYLMDLSYSMKDDLWSIQNLGTKLATQMRKLTSNLRIGFGAFVDKPVSPYMYISPPEALENPCYDMKTTCLPMFGYKHVLTLTDQVTRFNEEVKKQSVSRNRDAPEGGFDAIMQATVCDEKIGWRNDASHLLVFTTDAKTHIALDGRLAGIVQPNDGQCHVGSDNHYSASTTMDYPSLGLMTEKLSQKNINLIFAVTENVVNLYQNYSELIPGTTVGVLSMDSSNVLQLIVDAYGKIRSKVELEVRDLPEELSLSFNATCLNNEVIPGLKSCMGLKIGDTVRWAGQGLCPGASVGTQPPFFLL

SEQ ID NO: 7305 - protein, 89 aa, Homo Sapiens
MVALPMVLVLLLVLSRGESELDAKIPSTGDATEWRNPHLSMLGSCQPAPSCQKCILSHPSCAWCKQLNFTASGEAEARRCARREELLAR

SEQ ID NO: 7306 - protein, 93 aa, Homo Sapiens
MVALPMVLVLLLVLSRGESELDAKIPSTGDATEWRNPHLSMLGSCQPAPSCQKCILSHPSCAWCKQLNFTASGEAEARRCARREELLARGCPL

SEQ ID NO: 7307 - protein, 158 aa, Homo Sapiens
MVALPMVLVLLLVLSRGESELDAKIPSTGDATEWRNPHLSMLGSCQPAPSCQKCILSHPSCAWCKQLNFTASGEAEARRCARREELLARGCPLEELEEPRGQQEVLQDQPLSQGARGEGATQLAPQRVRVTLRPGEPQQLQVRFLRAEGYPVDLYYLM

SEQ ID NO: 7308 - protein, 798 aa, Homo Sapiens
MVALPMVLVLLLVLSRGESELDAKIPSTGDATEWRNPHLSMLGSCQPAPSCQKCILSHPSCAWCKQLNFTASGEAEARRCARREELLARGCPLEELEEPRGQQEVLQDQPLSQGARGEGATQLAPQRVRVTLRPGEPQQLQVRFLRAEGYPVDLYYLMDLSYSMKDDLERVRQLGHALLVRLQEVTHSVRIGFGSFVDKTVLPFVSTVPSKLRHPCPTRLERCQSPFSFHHVLSLTGDAQAFEREVGRQSVSGNLDSPEGGFDAILQAALCQEQIGWRNVSRLLVFTSDDTFHTAGDGKLGGIFMPSDGHCHLDSNGLYSRSTEFDYPSVGQVAQALSAANIQPIFAVTSAALPVYQELSKLIPKSAVGELSEDSSNVVQLIMDAYNSLSSTVTLEHSSLPPGVHISYESQCEGPEKREGKAEDRGQCNHVRINQTVTFWVSLQATHCLPEPHLLRLRALGFSEELIVELHTLCDCNCSDTQPQAPHCSDGQGHLQCGVCSCAPGRLGRLCECSVAELSSPDLESGCRAPNGTGPLCSGKGHCQCGRCSCSGQSSGHLCECDDASCERHEGILCGGFGRCQCGVCHCHANRTGRACECSGDMDSCISPEGGLCSGHGRCKCNRCQCLDGYYGALCDQCPGCKTPCERHRDCAECGAFRTGPLATNCSTACAHTNVTLALAPILDDGWCKERTLDNQLFFFLVEDDARGTVVLRVRPQEKGADHTQAIVLGCVGGIVAVGLGLVLAYRLSVEIYDRREYSRFEKEQQQLNWKQDSNPLYKSAITTTINPRFQEADSPTL

SEQ ID NO: 7309 - protein, 798 aa, Homo Sapiens; identical to SEQ ID NO: 7308

SEQ ID NO: 7310 - protein, 650 aa, Homo Sapiens
MVALPMVLVLLLVLSRGESELDAKIPSTGDATEWRNPHLSMLGSCQPAPSCQKCILSHPSCAWCKQLNFTASGEAEARRCARREELLARGCPLEELEEPRGQQEVLQDQPLSQGARGEGATQLAPQRVRVTLRPGEPQQLQVRFLRAEGYPVDLYYLMDLSYSMKDDLERVRQLGHALLVRLQEVTHSVRIGFGSFVDKTVLPFVSTVPSKLRHPCPTRLERCQSPFSFHHVLSLTGDAQAFEREVGRQSVSGNLDSPEGGFDAILQAALCQEQIGWRNVSRLLVFTSDDTFHTAGDGKLGGIFMPSDGHCHLDSNGLYSRSTEFDYPSVGQVAQALSAANIQPIFAVTSAALPVYQELSKLIPKSAVGELSEDSSNVVQLIMDAYNSLSSTVTLEHSSLPPGVHISYESQCEGPEKREGKAEDRGQCNHVRINQTVTFWVSLQATHCLPEPHLLRLRALGFSEELIVELHTLCDCNCSDTQPQAPHCSDGQGHLQCGVCRDCAECGAFRTGPLATNCSTACAHTNVTLALAPILDDGWCKERTLDNQLFFFLVEDDARGTVVLRVRPQEKGADHTQAIVLGCVGGIVAVGLGLVLAYRLSVEIYDRREYSRFEKEQQQLNWKQDSNPLYKSAITTTINPRFQEADSPTL

SEQ ID NO: 7311 - protein, 471 aa, Homo Sapiens
MVALPMVLVLLLVLSRGESELDAKIPSTGDATEWRNPHLSMLGSCQPAPSCQKCILSHPSCAWCKQLNFTASGEAEARRCARREELLARGCPLEELEEPRGQQEVLQDQPLSQGARGEGATQLAPQRVRVTLRPGEPQQLQVRFLRAEGYPVDLYYLMDLSYSMKDDLERVRQLGHALLVRLQEVTHSVRIGFGSFVDKTVLPFVSTVPSKLRHPCPTRLERCQSPFSFHHVLSLTGDAQAFEREVGRQSVSGNLDSPEGGFDAILQAALCQEQIGWRNVSRLLVFTSDDTFHTAGDGKLGGIFMPSDGHCHLDSNGLYSRSTEFDYPSVGQVAQALSAANIQPIFAVTSAALPVYQELSKLIPKSAVGELSEDSSNVVQLIMDAYNSLSSTVTLEHSSLPPGVHISYESQCEGPEKREGKAEDRGQCNHVRINQTGLCRVWGLQDWPTGHQLQYSLCPYQCDPGLGPYLG

SEQ ID NO: 7312 - protein, 117 aa, Homo Sapiens
  misc_feature (1)..(1): Xaa can be any naturally occurring amino acid
XSTACAHTNVTLALAPILDDGWCKERTLDNQLFFFLVEDDARGTVVLRVRPQEKGADHTQAIVLGCVGGIVAVGLGLVLAYRLSVEIYDRREYSRFEKEQQQLNWKQLLGFGSRLAS

SEQ ID NO: 7313 - protein, 353 aa, Homo Sapiens
MCKNSQDIICSNAGTCHCGRCKCDNSDGSGLVYGKFCECDDRECIDDETEEICGGHGKCYCGNCYCKAGWHGDKCEFQCDITPWESKRRCTSPDGKICSNRGTCVCGECTCHDVDPTGDWGDIHGDTCECDERDCRAVYDRYSDDFCSGHGQCNCGRCDCKAGWYGKKCEHPQSCTLSAEESIRKCQGSSDLPCSGRGKCECGKCTCYPPGDRRVYGKTCECDDRRCEDLDGVVCGGHGTCSCGRCVCERGWFGKLCQHPRKCNMTEEQSKNLCESADGILCSGKGSCHCGKCICSAEEWYISGEFCDCDDRDCDKHDGLICTGNGICSCGNCECWDGWNGNACEIWLGSEYP

SEQ ID NO: 7314 - protein, 401 aa, Homo Sapiens
MNLVAVMGAFNKGHGKCDCGKCKCDQGWYGDACQYPTNCDLTKKKSNQMCKNSQDIICSNAGTCHCGRCKCDNSDGSGLVYGKFCECDDRECIDDETEEICGGHGKCYCGNCYCKAGWHGDKCEFQCDITPWESKRRCTSPDGKICSNRGTCVCGECTCHDVDPTGDWGDIHGDTCECDERDCRAVYDRYSDDFCSGHGQCNCGRCDCKAGWYGKKCEHPQSCTLSAEESIRKCQGSSDLPCSGRGKCECGKCTCYPPGDRRVYGKTCECDDRRCEDLDGVVCGGHGTCSCGRCVCERGWFGKLCQHPRKCNMTEEQSKNLCESADGILCSGKGSCHCGKCICSAEEWYISGEFCDCDDRDCDKHDGLICTGNGICSCGNCECWDGWNGNACEIWLGSEYP

SEQ ID NO: 7315 - protein, 494 aa, Homo Sapiens
MRPPGFRNFLLLASSLLFAGLSAVPQSFSPSLRSWPGAACRLSRAESERRCRAPGQPPGAALCHGRGRCDCGVCICHVTEPGMFFGPLCECHEWVCETYDGSTCAGHGKCDCGKCKCDQGWYGDACQYPTNCDLTKKKSNQMCKNSQDIICSNAGTCHCGRCKCDNSDGSGLVYGKFCECDDRECIDDETEEICGGHGKCYCGNCYCKAGWHGDKCEFQCDITPWESKRRCTSPDGKICSNRGTCVCGECTCHDVDPTGDWGDIHGDTCECDERDCRAVYDRYSDDFCSGHGQCNCGRCDCKAGWYGKKCEHPQSCTLSAEESIRKCQGSSDLPCSGRGKCECGKCTCYPPGDRRVYGKTCECDDRRCEDLDGVVCGGHGTCSCGRCVCERGWFGKLCQHPRKCNMTEEQSKNLCESADGILCSGKGSCHCGKCICSAEEWYISGEFCDCDDRDCDKHDGLICTGNGICSCGNCECWDGWNGNACEIWLGSEYP

SEQ ID NO: 7316 - protein, 445 aa, Homo Sapiens
MRPPGFRNFLLLASSLLFAGLSAVPQSFSPSLRSWPGAACRLSRAESERRCRAPGQPPGAALCHGRGRCDCGVCICHVTEPGMFFGPLCECHEWVCETYDGSTCAGTCHCGRCKCDNSDGSGLVYGKFCECDDRECIDDETEEICGGHGKCYCGNCYCKAGWHGDKCEFQCDITPWESKRRCTSPDGKICSNRGTCVCGECTCHDVDPTGDWGDIHGDTCECDERDCRAVYDRYSDDFCSGHGQCNCGRCDCKAGWYGKKCEHPQSCTLSAEESIRKCQGSSDLPCSGRGKCECGKCTCYPPGDRRVYGKTCECDDRRCEDLDGVVCGGHGTCSCGRCVCERGWFGKLCQHPRKCNMTEEQSKNLCESADGILCSGKGSCHCGKCICSAEEWYISGEFCDCDDRDCDKHDGLICTGNGICSCGNCECWDGWNGNACEIWLGSEYP

SEQ ID NO: 7317 - protein, 401 aa, Homo Sapiens
MSGCARPTTGAPVQAMVSVGKCKCDQGWYGDACQYPTNCDLTKKKSNQMCKNSQDIICSNAGTCHCGRCKCDNSDGSGLVYGKFCECDDRECIDDETEEICGGHGKCYCGNCYCKAGWHGDKCEFQCDITPWESKRRCTSPDGKICSNRGTCVCGECTCHDVDPTGDWGDIHGDTCECDERDCRAVYDRYSDDFCSGHGQCNCGRCDCKAGWYGKKCEHPQSCTLSAEESIRKCQGSSDLPCSGRGKCECGKCTCYPPGDRRVYGKTCECDDRRCEDLDGVVCGGHGTCSCGRCVCERGWFGKLCQHPRKCNMTEEQSKNLCESADGILCSGKGSCHCGKCICSAEEWYISGEFCDCDDRDCDKHDGLICTGNGICSCGNCECWDGWNGNACEIWLGSEYP

SEQ ID NO: 7318 - protein, 208 aa, Homo Sapiens
  misc_feature (1)..(1): Xaa can be any naturally occurring amino acid
XCEGHGQCNCGRCDCKAGWYGKKCEHPQSCTLSAEESIRKCQGSSDLPCSGRGKCECGKCTCYPPGDRRVYGKTCECDDRRCEDLDGVVCGGHGTCSCGRCVCERGWFGKLCQHPRKCNMTEEQSKNLCESADGILCSGKGSCHCGKCICSAEEWYISGEFCDCDDRDCDKHDGLICTGNGICSCGNCECWDGWNGNACEIWLGSEYP

SEQ ID NO: 7319 - protein, 911 aa, Homo Sapiens
MDGAMGPRGLLLCMYLVSLLILQAMPALGSATGRSKSSEKRQAVDTAVDGVFIRSLKVNCKVTSRFAHYVVTSQVVNTANEAREVAFDLEIPKTAFISDFAVTADGNAFIGDIKDKVTAWKQYRKAAISGENAGLVRASGRTMEQFTIHLTVNPQSKVTFQLTYEEVLKRNHMQYEIVIKVKPKQLVHHFEIDVDIFEPQGISKLDAQASFLPKELAAQTIKKSFSGKKGHVLFRPTVSQQQSCPTCSTSLLNGHFKVTYDVSRDKICDLLVANNHFAHFFAPQNLTNMNKNVVFVIDISGSMRGQKVKQTKEALLKILGDMQPGDYFDLVLFGTRVQSWKGSLVQASEANLQAAQDFVRGFSLDEATNLNGGLLRGIEILNQVQESLPELSNHASILIMLTDGDPTEGVTDRSQILKNVRNAIRGRFPLYNLGFGHNVDFNFLEVMSMENNGRAQRIYEDHDATQQLQGFYSQVAKPLLVDVDLQYPQDAVLALTQNHHKQYYEGSEIVVAGRIADNKQSSFKADVQAHGEGQEFSITCLVDEEEMKKLLRERGHMLENHVERLWAYLTIQELLAKRMKVDREERANLSSQALQMSLDYGFVTPLTSMSIRGMADQDGLKPTIDKPSEDSPPLEMLGPRRTFVLSALQPSPTHSSSNTQRLPDRVTGVDTDPHFIIHVPQKEDTLCFNINEEPGVILSLVQDPNTGFSVNGQLIGNKARSPGQHDGTYFGRLGIANPATDFQLEVTPQNITLNPGFGGPVFSWRDQAVLRQDGVVVTINKKRNLVVSVDDGGTFEVVLHRVWKGSSVHQDFLGFYVLDSHRMSARTHGLLGQFFHPIGFEVSDIHPGSDPTKPDATMVVRNRRLTVTRGLQKDYSKDPWHGAEVSCWFIHNNGAGLIDGAYTDYIVPDIF

SEQ ID NO: 7320 - protein, 213 aa, Homo Sapiens
MDGAMGPRGLLLCMYLVSLLILQAMPALGSATGRSKSSEKRQAVDTAVDGVFIRSLKVNCKVTSRFAHYVVTSQVVNTANEAREVAFDLEIPKTAFISDFAVTADGNAFIGDIKDKVTAWKQYRKAAISGENAGLVRASGRTMEQFTIHLTVNPQSKVTFQLTYEEVLKRNHMQYEIVIKVKPKQLVHHFEVDHRSRGRGPAPLSVTMAPNTG

SEQ ID NO: 7321 - protein, 623 aa, Homo Sapiens
MNKNVVFVIDISGSMRGQKVKQTKEALLKILGDMQPGDYFDLVLFGTRVQSWKGSLVQASEANLQAAQDFVRGFSLDEATNLNGGLLRGIEILNQVQESLPELSNHASILIMLTDGDPTEGVTDRSQILKNVRNAIRGRFPLYNLGFGHNVDFNFLEVMSMENNGRAQRIYEDHDATQQLQGFYSQVAKPLLVDVDLQYPQDAVLALTQNHHKQYYEGSEIVVAGRIADNKQSSFKADVQAHGEGQEFSITCLVDEEEMKKLLRERGHMLENHVERLWAYLTIQELLAKRMKVDREERANLSSQALQMSLDYGFVTPLTSMSIRGMADQDGLKPTIDKPSEDSPPLEMLGPRRTFVLSALQPSPTHSSSNTQRLPDRVTGVDTDPHFIIHVPQKEDTLCFNINEEPGVILSLVQDPNTGFSVNGQLIGNKARSPGQHDGTYFGRLGIANPATDFQLEVTPQNITLNPGFGGPVFSWRDQAVLRQDGVVVTINKKRNLVVSVDDGGTFEVVLHRVWKGSSVHQDFLGFYVLDSHRMSARTHGLLGQFFHPIGFEVSDIHPGSDPTKPDATMVVRNRRLTVTRGLQKDYSKDPWHGAEVSCWFIHNNGAGLIDGAYTDYIVPDIF

SEQ ID NO: 7322 - protein, 277 aa, Homo Sapiens
MPLPLPSAFVLSALQPSPTHSSSNTQRLPDRVTGVDTDPHFIIHVPQKEDTLCFNINEEPGVILSLVQDPNTGFSVNGQLIGNKARSPGQHDGTYFGRLGIANPATDFQLEVTPQNITLNPGFGGPVFSWRDQAVLRQDGVVVTINKKRNLVVSVDDGGTFEVVLHRVWKGSSVHQDFLGFYVLDSHRMSARTHGLLGQFFHPIGFEVSDIHPGSDPTKPDATMVVRNRRLTVTRGLQKDYSKDPWHGAEVSCWFIHNNGAGLIDGAYTDYIVPDIF

SEQ ID NO: 7323 - protein, 464 aa, Homo Sapiens
SMENNGRAQRIYEDHDATQQLQGFYSQVAKPLLVDVDLQYPQDAVLALTQNHHKQYYEGSEIVVAGRIADNKQSSFKADVQAHGEGQEFSITCLVDEEEMKKLLRERGHMLENHVERLWAYLTIQELLAKRMKVDREERANLSSQALQMSLDYGFVTPLTSMSIRGMADQDGLKPTIDKPSEGIGCREMLGPRRTFVLSALQPSPTHSSSNTQRLPDRVTGVDTDPHFIIHVPQKEDTLCFNINEEPGVILSLVQDPNTGFSVNGQLIGNKARSPGQHDGTYFGRLGIANPATDFQLEVTPQNITLNPGFGGPVFSWRDQAVLRQDGVVVTINKKRNLVVSVDDGGTFEVVLHRVWKGSSVHQDFLGFYVLDSHRMSARTHGLLGQFFHPIGFEVSDIHPGSDPTKPDATMVVRNRRLTVTRGLQKDYSKDPWHGAEVSCWFIHNNGAGLIDGAYTDYIVPDIF

SEQ ID NO: 7324 - protein, 74 aa, Homo Sapiens
  misc_feature (1)..(1): Xaa can be any naturally occurring amino acid
XMKVDREERANLSSQALQMSLDYGFVTPLTSMSIRGMADQDGLKPTIDKPSEDSPPLEMLGPRRTPIPSGCQTE

SEQ ID NO: 7325 - protein, 935 aa, Homo Sapiens
MKRLTCFFICFFLSEVSGFEIPINGLSEFVDYEDLVELAPGKFQLVAENRRYQEEVDQVTLYSYKVQSTITSRMATTMIQSKVVNNSPQPQNVVFDVQIPKGAFISNFSMTVDGKTFRSSIKEKTVGRALYAQARAKGKTAGLVRSSALDMENFRTEVNVLPGAKVQFELHYQEVKWRKLGSYEHRIYLQPGRLAKHLEVDVWVIEPQGLRFLHVPDTFEGHFDGVPVISKGQQKAHVSFKPTVAQQRICPNCRETAVDGELVVLYDVKREEKAGELEVFNGYFVHFFAPDNLDPIPKNILFVIDVSGSMWGVKMKQTVEAMKTILDDLRAEDHFSVIDFNQNIRTWRNDLISATKTQVADAKRYIEKIQPSGGTNINEALLRAIFILNEANNLGLLDPNSVSLIILVSDGDPTVGELKLSKIQKNVKENIQDNISLFSLGMGFDVDYDFLKRLSNENHGIAQRIYGNQDTSSQLKKFYNQVSTPLLRNVQFNYPHTSVTDVTQNNFHNYFGGSEIVVAGKFDPAKLDQIESVITATSANTQLVLETLAQMDDLQDFLSKDKHADPDFTRKLWAYLTINQLLAERSLAPTAAAKRRITRSILQMSLDHHIVTPLTSLVIENEAGDERMLADAPPQDPSCCSGALYYGSKVVPDSTPSWANPSPTPVISMLAQGSQVLESTPPPHVMRVENDPHFIIYLPKSQKNICFNIDSEPGKILNLVSDPESGIVVNGQLVGAKKPNNGKLSTYFGKLGFYFQSEDIKIEISTETITLSHGSSTFSLSWSDTAQVTNQRVQISVKKEKVVTITLDKEMSFSVLLHRVWKKHPVNVDFLGIYIPPTNKFSPKAHGLIGQFMQEPKIHIFNERPGKDPEKPEASMEVKGQKLIITRGLQKDYRTDLVFGTDVTCWFVHNSGKGFIDGHYKDYFVPQLYSFLKRP

SEQ ID NO: 7326 - protein, 946 aa, Homo Sapiens
MKRLTCFFICFFLSEVSGFEIPINGLSEFVDYEDLVELAPGKFQLVAENRRYQRSLPGESEEMMEEVDQVTLYSYKVQSTITSRMATTMIQSKVVNNSPQPQNVVFDVQIPKGAFISNFSMTVDGKTFRSSIKEKTVGRALYAQARAKGKTAGLVRSSALDMENFRTEVNVLPGAKVQFELHYQEVKWRKLGSYEHRIYLQPGRLAKHLEVDVWVIEPQGLRFLHVPDTFEGHFDGVPVISKGQQKAHVSFKPTVAQQRICPNCRETAVDGELVVLYDVKREEKAGELEVFNGYFVHFFAPDNLDPIPKNILFVIDVSGSMWGVKMKQTVEAMKTILDDLRAEDHFSVIDFNQNIRTWRNDLISATKTQVADAKRYIEKIQPSGGTNINEALLRAIFILNEANNLGLLDPNSVSLIILVSDGDPTVGELKLSKIQKNVKENIQDNISLFSLGMGFDVDYDFLKRLSNENHGIAQRIYGNQDTSSQLKKFYNQVSTPLLRNVQFNYPHTSVTDVTQNNFHNYFGGSEIVVAGKFDPAKLDQIESVITATSANTQLVLETLAQMDDLQDFLSKDKHADPDFTRKLWAYLTINQLLAERSLAPTAAAKRRITRSILQMSLDHHIVTPLTSLVIENEAGDERMLADAPPQDPSCCSGALYYGSKVVPDSTPSWANPSPTPVISMLAQGSQVLESTPPPHVMRVENDPHFIIYLPKSQKNICFNIDSEPGKILNLVSDPESGIVVNGQLVGAKKPNNGKLSTYFGKLGFYFQSEDIKIEISTETITLSHGSSTFSLSWSDTAQVTNQRVQISVKKEKVVTITLDKEMSFSVLLHRVWKKHPVNVDFLGIYIPPTNKFSPKAHGLIGQFMQEPKIHIFNERPGKDPEKPEASMEVKGQKLIITRGLQKDYRTDLVFGTDVTCWFVHNSGKGFIDGHYKDYFVPQLYSFLKRP

SEQ ID NO: 7327 - protein, 237 aa, Homo Sapiens
MKRLTCFFICFFLSEVSGFEIPINGLSERSLPGESEEMMEEVDQVTLYSYKVQSTITSRMATTMIQSKVVNNSPQPQNVVFDVQIPKGAFISNFSMTVDGKTFRSSIKEKTVGRALYAQARAKGKTAGLVRSSALDMENFRTEVNVLPGAKVQFELHYQEVKWRKLGSYEHRIYLQPGRLAKHLEVDVWVIEPQGLRFLHVPDTFEGHFDGVPVISKGQQKAHVSFKPTVAQQRICP

SEQ ID NO: 7328 - protein, 698 aa, Homo Sapiens
MAFAWWPCLILALLSSLAASGFPRSPFRLLGKRSLPEGVANGIEVYSTKINSKVTSRFAHNVVTMRAVNRADTAKEVSFDVELPKTAFITNFTLTIDGVTYPGNVKEKEVAKKQYEKAVSQGKTAGLVKASGRKLEKFTVSVNVAAGSKVTFELTYEELLKRHKGKYEMYLKVQPKQLVKHFEIEVDIFEPQGISMLDAEASFITNDLLGSALTKSFSGKKGHVSFKPSLDQQRSCPTCTDSLLNGDFTITYDVNRESPGNVQIVNGYFVHFFAPQGLPVVPKNVAFVIDISGSMAGRKLEQTKEALLRILEDMQEEDYLNFILFSGDVSTWKEHLVQATPENLQEARTFVKSMEDKGMTNINDGLLRGISMLNKAREEHRIPERSTSIVIMLTDGDANVGESRPEKIQENVRNAIGGKFPLYNLGFGNNLNYNFLENMALENHGFARRIYEDSDADLQLQGFYEEVANPLLTGVEMEYPENAILDLTQNTYQHFYDGSEIVVAGRLVDEDMNSFKADVKGHGATNDLTFTEEVTTEKITLWNRAVPSTFSWLDTVTVTQDGLSMMINRKNMVVSFGDGVTFVVVLHQVWKKHPVHRDFLGFYVVDSHRMSAQTHGLLGQFFQPFDFKVSDIRPGSDPTKPDATLVVKNHQLIVTRGSQKDYRKDASIGTKVVCWFVHNNGEGLIDGVHTDYIVPNLF

SEQ ID NO: 7329 - protein, 890 aa, Homo Sapiens
MAFAWWPCLILALLSSLAASGFPRSPFRLLGKRSLPEGVANGIEVYSTKINSKVTSRFAHNVVTMRAVNRADTAKEVSFDVELPKTAFITNFTLTIDGVTYPGNVKEKEVAKKQYEKAVSQGKTAGLVKASGRKLEKFTVSVNVAAGSKVTFELTYEELLKRHKGKYEMYLKVQPKQLVKHFEIEVDIFEPQGISMLDAEASFITNDLLGSALTKSFSGKKGHVSFKPSLDQQRSCPTCTDSLLNGDFTITYDVNRESPGNVQIVNGYFVHFFAPQGLPVVPKNVAFVIDISGSMAGRKLEQTKEALLRILEDMQEEDYLNFILFSGDVSTWKEHLVQATPENLQEARTFVKSMEDKGMTNINDGLLRGISMLNKAREEHRIPERSTSIVIMLTDGDANVGESRPEKIQENVRNAIGGKFPLYNLGFGNNLNYNFLENMALENHGFARRIYEDSDADLQLQGFYEEVANPLLTGVEMEYPENAILDLTQNTYQHFYDGSEIVVAGRLVDEDMNSFKADVKGHGATNDLTFTEEVDMKEMEKALQERDYIFGNYIERLWAYLTIEQLLEKRKNAHGEEKENLTARALDLSLKYHFVTPLTSMVVTKPEDNEDERAIADKPGEDAEATPVSPAMSYLTSYQPPQNPYYYVDGDPHFIIQIPEKDDALCFNIDEAPGTVLRLIQDAVTGLTVNGQITGDKRGSPDSKTRKTYFGKLGIANAQMDFQVEVTTEKITLWNRAVPSTFSWLDTVTVTQDGLSMMINRKNMVVSFGDGVTFVVVLHQVWKKHPVHRDFLGFYVVDSHRMSAQTHGLLGQFFQPFDFKVSDIRPGSDPTKPDATLVVKNHQLIVTRGSQKDYRKDASIGTKVVCWFVHNNGEGLIDGVHTDYIVPNLF

SEQ ID NO: 7330 - protein, 670 aa, Homo Sapiens [sequence omitted]

SEQ ID NO: 7331 - protein, 930 aa, Homo Sapiens
MKPPRPVRTCSKVLVLLSLLAIHQTTTAEKNGIDIYSLTVDSRVSSRFAHTVVTSRVVNRANTVQEATFQMELPKKAFITNFSMIIDGMTYPGIIKEKAEAQAQYSAAVAKGKSAGLVKATGRNMEQFQVSVSVAPNAKITFELVYEELLKRRLGVYELLLKVRPQQLVKHLQMDIHIFEPQGISFLETESTFMTNQLVDALTTWQNKTKAHIRFKPTLSQQQKSPEQQETVLDGNLIIRYDVDRAISGGSIQIENGYFVHYFAPEGLTTMPKNVVFVIDKSGSMSGRKIQQTREALIKILDDLSPRDQFNLIVFSTEATQWRPSLVPASAENVNKARSFAAGIQALGGTNINDAMLMAVQLLDSSNQEERLPEGSVSLIILLTDGDPTVGETNPRSIQNNVREAVSGRYSLFCLGFGFDVSYAFLEKLALDNGGLARRIHEDSDSALQLQDFYQEVANPLLTAVTFEYPSNAVEEVTQNNFRLLFKGSEMVVAGKLQDRGPDVLTATVSGKLPTQNITFQTESSVAEQEAEFQSPKYIFHNFMERLWAYLTIQQLLEQTVSASDADQQALRNQALNLSLAYSFVTPLTSMVVTKPDDQEQSQVAEKPMEGESRNRNVHSGSTFFKYYLQGAKIPKPEASFSPRRGWNRQAGAAGSRMNFRPGVLSSRQLGLPGPPDVPDHAAYHPFRRLAILPASAPPATSNPDPAVSRVMNMKIEETTMTTQTPAPIQAPSAILPLPGQSVERLCVDPRHRQGPVNLLSDPEQGVEVTGQYEREKAGFSWIEVTFKNPLVWVHASPEHVVVTRNRRSSAYKWKETLFSVMPGLKMTMDKTGLLLLSDPDKVTIGLLFWDGRGEGLRLLLRDTDRFSSHVGGTLGQFYQEVLWGSPAASDDGRRTLRVQGNDHSATRERRLDYQEGPPGVEISCWSVEL

SEQ ID NO: 7332 - protein, 900 aa, Homo Sapiens
MKPPRPVRTCSKVLVLLSLLAIHQTTTAEKNGIDIYSLTVDSRVSSRFAHTVVTSRVVNRANTVQEATFQMELPKKAFITNFSMIIDGMTYPGIIKEKAEAQAQYSAAVAKGKSAGLVKATGRNMEQFQVSVSVAPNAKITFELVYEELLKRRLGVYELLLKVRPQQLVKHLQMDIHIFEPQGISFLETESTFMTNQLVDALTTWQNKTKAHIRFKPTLSQQQKSPEQQETVLDGNLIIRYDVDRAISGGSIQIENGYFVHYFAPEGLTTMPKNVVFVIDKSGSMSGRKIQQTREALIKILDDLSPRDQFNLIVFSTEATQWRPSLVPASAENVNKARSFAAGIQALGGTNINDAMLMAVQLLDSSNQEERLPEGSVSLIILLTDGDPTVGETNPRSIQNNVREAVSGRYSLFCLGFGFDVSYAFLEKLALDNGGLARRIHEDSDSALQLQDFYQEVANPLLTAVTFEYPSNAVEEVTQNNFRLLFKGSEMVVAGKLQDRGPDVLTATVSGKLPTQNITFQTESSVAEQEAEFQSPKYIFHNFMERLWAYLTIQQLLEQTVSASDADQQALRNQALNLSLAYSFVTPLTSMVVTKPDDQEQSQVAEKPMEGESRNRNVHSAGAAGSRMNFRPGVLSSRQLGLPGPPDVPDHAAYHPFRRLAILPASAPPATSNPDPAVSRVMNMKIEETTMTTQTPAPIQAPSAILPLPGQSVERLCVDPRHRQGPVNLLSDPEQGVEVTGQYEREKAGFSWIEVTFKNPLVWVHASPEHVVVTRNRRSSAYKWKETLFSVMPGLKMTMDKTGLLLLSDPDKVTIGLLFWDGRGEGLRLLLRDTDRFSSHVGGTLGQFYQEVLWGSPAASDDGRRTLRVQGNDHSATRERRLDYQEGPPGVEISCWSVEL

SEQ ID NO: 7333 - protein, 935 aa, Homo Sapiens
MKPPRPVRTCSKVLVLLSLLAIHQTTTAEKNGIDIYSLTVDSRVSSRFAHTVVTSRVVNRANTVQEATFQMELPKKAFITNFSMIIDGMTYPGIIKEKAEAQAQYSAAVAKGKSAGLVKATGRNMEQFQVSVSVAPNAKITFELVYEELLKRRLGVYELLLKVRPQQLVKHLQMDIHIFEPQGISFLETESTFMTNQLVDALTTWQNKTKAHIRFKPTLSQQQKSPEQQETVLDGNLIIRYDVDRAISGGSIQIENGYFVHYFAPEGLTTMPKNVVFVIDKSGSMSGRKIQQTREALIKILDDLSPRDQFNLIVFSTEATQWRPSLVPASAENVNKARSFAAGIQALGGTNINDAMLMAVQLLDSSNQEERLPEGSVSLIILLTDGDPTVGETNPRSIQNNVREAVSGRYSLFCLGFGFDVSYAFLEKLALDNGGLARRIHEDSDSALQLQDFYQEVANPLLTAVTFEYPSNAVEEVTQNNFRLLFKGSEMVVAGKLQDRGPDVLTATVSGKLPTQNITFQTESSVAEQEAEFQSPKYIFHNFMERLWAYLTIQQLLEQTVSASDADQQALRNQALNLSLAYSFVTPLTSMVVTKPDDQEQSQVAEKPMEGESRNRNVHSGSTFFKYYLQGAKIPKPGLDHTEASFSPRRGWNRQAGAAGSRMNFRPGVLSSRQLGLPGPPDVPDHAAYHPFRRLAILPASAPPATSNPDPAVSRVMNMKIEETTMTTQTPAPIQAPSAILPLPGQSVERLCVDPRHRQGPVNLLSDPEQGVEVTGQYEREKAGFSWIEVTFKNPLVWVHASPEHVVVTRNRRSSAYKWKETLFSVMPGLKMTMDKTGLLLLSDPDKVTIGLLFWDGRGEGLRLLLRDTDRFSSHVGGTLGQFYQEVLWGSPAASDDGRRTLRVQGNDHSATRERRLDYQEGPPGVEISCWSVEL

SEQ ID NO: 7334 - protein, 719 aa, Homo Sapiens
  misc_feature (1)..(1): Xaa can be any naturally occurring amino acid
XVSVAPNAKITFELVYEELLKRRLGVYELLLKVRPQQLVKHLQMDIHIFEPQGISFLETESTFMTNQLVDALTTWQNKTKQKSPEQQETVLDGNLIIRYDVDRAISGGSIQIENGYFVHYFAPEGLTTMPKNVVFVIDKSGSMSGRKIQQTREALIKILDDLSPRDQFNLIVFSTEATQWRPSLVPASAENVNKARSFAAGIQALGGTNINDAMLMAVQLLDSSNQEERLPEGSVSLIILLTDGDPTVGETNPRSIQNNVREAVSGRYSLFCLGFGFDVSYAFLEKLALDNGGLARRIHEDSDSALQLQDFYQEVANPLLTAVTFEYPSNAVEEVTQNNFRLLFKGSEMVVAGKLQDRGPDVLTATVSGKLPTQNITFQTESSVAEQEAEFQSPKYIFHNFMERLWAYLTIQQLLEQTVSASDADQQALRNQALNLSLAYSFVTPLTSMVVTKPDDQEQSQVAEKPMEGESRNRNVHSAGAAGSRMNFRPGVLSSRQLGLPGPPDVPDHAAYHPFRRLAILPASAPPATSNPDPAVSRVMNMKIEETTMTTQTPGVEVTGQYEREKAGFSWIEVTFKNPLVWVHASPEHVVVTRNRRSSAYKWKETLFSVMPGLKMTMDKTGLLLLSDPDKVTIGLLFWDGRGEGLRLLLRDTDRFSSHVGGTLGQFYQEVLWGSPAASDDGRRTLRVQGNDHSATRERRLDYQEGPPGVEISCWSVEL

SEQ ID NO: 7335 - protein, 942 aa, Homo Sapiens
MLLLLGLCLGLSLCVGSQEEAQSWGHSSEQDGLRVPRQVRLLQRLKTKPLMTEFSVKSTIISRYAFTTVSCRMLNRASEDQDIEFQMQIPAAAFITNFTMLIGDKVYQGEITEREKKSGDRVKEKRNKTTEENGEKGTEIFRASAVIPSKDKAAFFLSYEELLQRRLGKYEHSISVRPQQLSGRLSVDVNILESAGIASLEVLPLHNSRQRGSGRGEDDSGPPPSTVINQNETFANIIFKPTVVQQARIAQNGILGDFIIRYDVNREQSIGDIQVLNGYFVHYFAPKDLPPLPKNVVFVLDSSASMVGTKLRQTKDALFTILHDLRPQDRFSIIGFSNRIKVWKDHLISVTPDSIRDGKVYIHHMSPTGGTDINGALQRAIRLLNKYVAHSGIGDRSVSLIVFLTDGKPTVGETHTLKILNNTREAARGQVCIFTIGIGNDVDFRLLEKLSLENCGLTRRVHEEEDAGSQLIGFYDEIRTPLLSDIRIDYPPSSVVQATKTLFPNYFNGSEIIIAGKLVDRKLDHLHVEVTASNSKKFIILKTDVPVRPQKAGKDVTGSPRPGGDGEGDTNHIERLWSYLTTKELLSSWLQSDDEPEKERLRQRAQALAVSYRFLTPFTSMKLRGPVPRMDGLEEAHGMSAAMGPEPVVQSVRGAGTQPGPLLKKPYQPRIKISKTSVDGDPHFVVDFPLSRLTVCFNIDGQPGDILRLVSDHRDSGVTVNGELIGAPAPPNGHKKQRTYLRTITILINKPERSYLEITPSRVILDGGDRLVLPCNQSVVVGSWGLEVSVSANANVTVTIQGSIAFVILIHLYKKPAPFQRHHLGFYIANSEGLSSNCHGLLGQFLNQDARLTEDPAGPSQNLTHPLLLQVGEGPEAVLTVKGHQVPVVWKQRKIYNGEEQIDCWFARNNAAKLIDGEYKDYLASHPFDTGMTLGRGMSREL

SEQ ID NO: 7336 - protein, 702 aa, Homo Sapiens
MLLLLGLCLGLSLCVGSQEEAQSWGHSSEQDGLRVPRQVRLLQRLKTKPLMTEFSVKSTIISRYAFTTVSCRMLNRASEDQDIEFQMQIPAAAFITNFTMLIGDKVYQGEITEREKKSGDRVKEKRNKTTEENGEKGTEIFRASAVIPSKDKAAFFLSYEELLQRRLGKYEHSISVRPQQLSGRLSVDVNILESAGIASLEVLPLHNSRQRGSGRGEDDSGPPPSTVINQNETFANIIFKPTVVQQARIAQNGILGDFIIRYDVNREQSIGDIQVLNGYFVHYFAPKDLPPLPKNVVFVLDSSASMVGTKLRQTKDALFTILHDLRPQDRFSIIGFSNRIKVWKDHLISVTPDSIRDGKVYIHHMSPTGGTDINGALQRAIRLLNKYVAHSGIGDRSVSLIVFLTDGKPTVGETHTLKILNNTREAARGQVCIFTIGIGNDVDFRLLEKLSLENCGLTRRVHEEEDAGSQLIGFYDEIRTPLLSDIRIDYPPSSVVQATKTLFPNYFNGSEIIIAGKLVDRKLDHLHVEVTASNSKKFIILKTDVPVRPQKAGKDVTGSPRPGGDGEGDTNHIERLWSYLTTKELLSSWLQSDDEPEKERLRQRAQALAVSYRFLTPFTSMKLRGPVPRMDGLEEAHGMSAAMGPEPVVQSVRGAGTQPGPLLKKPYQPRIKISKTSVRGFRREEQIFSNVMKFPFASILEL

SEQ ID NO: 7337 - protein, 728 aa, Homo Sapiens
MRNYDSGPPPSTVINQNETFANIIFKPTVVQQARIAQNGILGDFIIRYDVNREQSIGDIQVLNGYFVHYFAPKDLPPLPKNVVFVLDSSASMVGTKLRQTKDALFTILHDLRPQDRFSIIGFSNRIKVWKDHLISVTPDSIRDGKVYIHHMSPTGGTDINGALQRAIRLLNKYVAHSGIGDRSVSLIVFLTDGKPTVGETHTLKILNNTREAARGQVCIFTIGIGNDVDFRLLEKLSLENCGLTRRVHEEEDAGSQLIGFYDEIRTPLLSDIRIDYPPSSVVQATKTLFPNYFNGSEIIIAGKLVDRKLDHLHVEVTASNSKKFIILKTDVPVRPQKAGKDVTGSPRPGGDGEGDTNHIERLWSYLTTKELLSSWLQSDDEPEKERLRQRAQALAVSYRFLTPFTSMKLRGPVPRMDGLEEAHGMSAAMGPEPVVQSVRGAGTQPGPLLKKPYQPRIKISKTSVDGDPHFVVDFPLSRLTVCFNIDGQPGDILRLVSDHRDSGVTVNGELIGAPAPPNGHKKQRTYLRTITILINKPERSYLEITPSRVILDGGDRLVLPCNQSVVVGSWGLEVSVSANANVTVTIQGSIAFVILIHLYKKPAPFQRHHLGFYIANSEGLSSNCHGLLGQFLNQDARLTEDPAGPSQNLTHPLLLQVGEGPEAVLTVKGHQVPVVWKQRKIYNGEEQIDCWFARNNAAKLIDGEYKDYLASHPFDTGMTLGRGMSREL

SEQ ID NO: 7338 - protein, 119 aa, Homo Sapiens
  misc_feature (1)..(1): Xaa can be any naturally occurring amino acid
XPSTVINQNETFANIIFKPTVVQQARIAQNGILGDFIIRYDVNREQSIGDIQVLNGYFVHYFAPKDLPPLPKNVVFVLDSSASMVGTKLRQDIGFSLAVQNWVPKGYLDISCVTLQVHV

SEQ ID NO: 7339 - protein, 1313 aa, Homo Sapiens
MSGWRYLICVSFLLTILLELTYQGPPVPASSSTKLLMTSYSMRSTVVSRYAHTLVTSVLFNPHAEAHEAIFDLDLPHLAFISNFTMTINNKVYIAEVKEKHQAKKIYEEAHQQGKTAAHVGIRDRESEKFRISTSLAAGTEVTFSLAYEELLQRHQGQYQLVVSLRPGQLVKRLSIEVTVSERTGISYVHIPPLRTGRLRTNAHASEVDSPPSTRIERGETCVRITYCPTLQDQSSISGSGIMADFLVQYDVVMEDIIGDVQIYDDYFIHYFAPRGLPPMEKNVVFVIDVSSSMFGTKMEQTKTAMNVILSDLQANDYFNIISFSDTVNVWKAGGSIQATIQNVHSAKDYLHCMEADGWTDVNSALLAAASVLNHSNQEPGRGPSVGRIPLIIFLTDGEPTAGVTTPSVILSNVRQALGHRVSLFSLAFGDDADFTLLRRLSLENRGIARRIYEDTDAALQLKGLYEEISMPLLADVRLNYLGGLVGASPWAVFPNYFGGSELVVAGQVQPGKQELGIHLAARGPKDQLLVAHHSEGATNNSQKAFGCPGEPAPNVAHFIRRLWAYVTIGELLDAHFQARDTTTRHLLAAKVLNLSLEYNFVTPLTSLVMVQPKQASEETRRQTSTSAGPDTIMPSSSSRHGLGVSTAQPALVPKVISPKSRPVKPKFYLSSTTTASTKKMLSSKELEPLGESPHTLSMPTYPKAKIPAQQDSGTLAQPTLRTKPTILVPSNSGTLLPLKPGSLSHQNPDILPTNSRTQVPPVKPGIPASPKADTVKCVTPLHSKPGAPSHPQLGALTSQAPKGLPQSRPGVSTLQVPKYPLHTRPRVPAPKTRNNMPHLGPGILLSKTPKILLSLKPSAPPHQISTSISLSKPETPNPHMPQTPLPPRPDRPRPPLPESLSTFPNTISSSTGPSSTTTTSVLGEPLPMPFTPTLPPGRFWHQYDLLPGPQRTRQVLGPSRPGVPTMSLLNSSRPTPEGSPPNLPILLPSSILPEAISLLLLPEELELLSESMVESKFVESLNPPAFYTFLTPDEDGSPNWDGNSEEILGGAGGSMESQGSSVGLAKGTLPSIFTFSSSVDGDPHFVIQIPHSEEKICFTLNGHPGDLLQLIEDPKAGLHVSGKLLGAPPRPGHKDQTRTYFQIITVTTDKPRAYTITISRSSISLRGEGTLRLSWDQPALLKRPQLELYVAAAARLTLRLGPYLEFLVLRHRYRHPSTLQLPHLGFYVANGSGLSPSARGLIGQFQHADIRLVTGPMGPCLRRHHGPDVPVILGKRLLKDSPRLLPRWASCWLVKRSHVELLLGHPYLSYVL

SEQ ID NO: 7340 - protein, 313 aa, Homo Sapiens
MNQLSFLLFLIATTRGWSTDEANTYFKEWTCSSSPSLPRSCKEIKDECPSAFDGLYFLRTENGVIYQTFCDMTSGGGGWTLVASVHENDMRGKCTVGDRWSSQQGSKAVYPEGDGNWANYNTFGSAEAATSDDYKNPGYYDIQAKDLGIWHVPNKSPMQHWRNSSLLRYRTDTGFLQTLGHNLFGIYQKYPVKYGEGKCWTDNGPVIPVVYDFGDAQKTASYYSPYGQREFTAGFVQFRVFNNERAANALCAGMRVTGCNTEHHCIGGGGYFPEASPQQCGDFSGFDWSGYGTHVGYSSSREITEAAVLLFYR

SEQ ID NO: 7341 - protein, 325 aa, Homo Sapiens
MLSMLRTMTRLCFLLFFSVATSGCSAAAASSLEMLSREFETCAFSFSSLPRSCKEIKERCHSAGDGLYFLRTKNGVVYQTFCDMTSGGGGWTLVASVHENDMRGKCTVGDRWSSQQGNKADYPEGDGNWANYNTFGSAEAATSDDYKNPGYYDIQAKDLGIWHVPNKSPMQHWRNSALLRYRTNTGFLQRLGHNLFGIYQKYPVKYRSGKCWNDNGPAIPVVYDFGDAKKTASYYSPYGQREFVAGFVQFRVFNNERAANALCAGIKVTGCNTEHHCIGGGGFFPQGKPRQCGDFSAFDWDGYGTHVKSSCSREITEAAVLLFYR

SEQ ID NO: 7342 - protein, 243 aa, Homo Sapiens
MACWWPLLLELWTVMPTWAGDELLNICMNAKHHKRVPSPEDKLYEECIPWKDNACCTLTTSWEAHLDVSPLYNFSLFHCGLLMPGCRKHFIQAICFYECSPNLGPWIQPVAPSGQGERVVNVPLCQEDCEEWWEDCRMSYTCKSNWRGGWDWSQGKNRCPKGAQCLPFSHYFPTPADLCEKTWSNSFKASPERRNSGRCLQKWFEPAQGNPNVAVARLFASSAPSWELSYTIMVCSLFLPFLS

SEQ ID NO: 7343 - protein, 250 aa, Homo Sapiens
MACWWPLLLELWTVMPTWAGDELLNICMNAKHHKRVPSPEDKLYEECIPWKDNACCTLTTSWEAHLDVSPLYNFSLFHCGLLMPGCRKHFIQAICFYECSPNLGPWIQPVGSLGWEVAPSGQGERVVNVPLCQEDCEEWWEDCRMSYTCKSNWRGGWDWSQGKNRCPKGAQCLPFSHYFPTPADLCEKTWSNSFKASPERRNSGRCLQKWFEPAQGNPNVAVARLFASSAPSWELSYTIMVCSLFLPFLS

SEQ ID NO: 7344 - protein, 184 aa, Homo Sapiens
MALLLCLVCLTAALAHGCLHCHSNFSKKFSFYRHHVNFKSWWVGDIPVSGALLTDWSDDTMKELHLAIPAKITREKLDQVATAVYQMMDQLYQGKMYFPGKGRETEAGPPHPGTPRPPPEPDLLLPRRLRVFPQRAAKHLPGAGAPHPERHHRKPHRLSAPLWSSAQWKSAVQGLLNYINNWHK

SEQ ID NO: 7345 - protein, 232 aa, Homo Sapiens
MALLLCLVCLTAALAHGCLHCHSNFSKKFSFYRHHVNFKSWWVGDIPVSGALLTDWSDDTMKELHLAIPAKITREKLDQVATAVYQMMDQLYQGKMYFPGYFPNELRNIFREQVHLIQNAIIESRIDCQHRCGIFQYETISCNNCTDSHVACFGYNCESSAQWKSAVQGLLNYINNWHKQDTSMRPRSSAFSWPGTHRATPAFLVSPALRCLEPPHLANLTLEDAAECLKQH

SEQ ID NO: 7346 - protein, 214 aa, Homo Sapiens
MALLLCLVCLTAALAHGCLHCHSNFSKKFSFYRHHVNFKSWWVGDIPVSGALLTDWSDDTMKELHLAIPAKITREKLDQVATAVYQMMDQLYQGKMYFPGYFPNELRNIFREQVHLIQNAIIESRIDCQHRCGIFQYETISCNNCTDSHVACFGYNCESSAQWKSAVQGLLNYINNWHKQDTSMSLVSPALRCLEPPHLANLTLEDAAECLKQH

SEQ ID NO: 7347 - protein, 208 aa, Homo Sapiens
MALLLCLVCLTAALAHGCLHCHSNFSKKFSFYRHHVNFKSWWVGDIPVSGALLTDWSDDTMKELHLAIPAKITREKLDQVATAVYQMMDQLYQGKMYFPGYFPNELRNIFREQVHLIQNAIIESRIDCQHRCGIFQYETISCNNCTDSHVACFGYNCESSAQWKSAVQGLLNYINNWHNLVSPALRCLEPPHLANLTLEDAAECLKQH

SEQ ID NO: 7348 - protein, 152 aa, Homo Sapiens
VSGALLTDWSDDTMKELHLAIPAKITREKLDQVATAVYQMMDQLYQGKMYFPGYFPNELRNIFREQVHLIQNAIIESIFQYETISCNNCTDSHVACFGYNCESSAQWKSAVQGLLNYINNWHNLVSPALRCLEPPHLANLTLEDAAECLKQH

SEQ ID NO: 7349 - protein, 152 aa, Homo Sapiens
  misc_feature (1)..(1): Xaa can be any naturally occurring amino acid
XPQQLLQEVLLLPPPCELQVLVGGRHPRVRGAAHRLERRHDEGAAPGHPRQDHPGEAGPSGDSSVPDDGSAVPGEDVLPRVFPQRAAKHLPGAGAPHPERHHRKPHRLSAPLWSSAQWKSAVQGLLNYINNWHKPRSSAFSWPGTHRATPAL

SEQ ID NO: 7350 - protein, 138 aa, Homo Sapiens
  misc_feature (1)..(1): Xaa can be any naturally occurring amino acid
XSALPQQLLQEVLLLPPPCELQVLVGGRHPRVRGAAHRLERRHDEGAAPGHPRQDHPGEAGPSGDSSVPDDGSAVPGEDVLPRVFPQRAAKHLPGAGAPHPERHHRKPHRLSAPLWHLPVRDHLLQQLHRLARRLLWL

SEQ ID NO: 7351 - protein, 155 aa, Homo Sapiens
MFCPLKLILLPVLLDYSLGLNDLNVSPPELTVHVGDSALMGCVFQSTEDKCIFKIDWTLSPGEHAKDEYVLYYYSNLSVPIGRFQNRVHLMGDILCNDGSLLLQDVQEADQGTYICEIRLKGESQVFKKAVVLHVLPEEPKELMVHVGGLIQMGC

SEQ ID NO: 7352 - protein, 383 aa, Homo Sapiens
MFCPLKLILLPVLLDYSLGLNDLNVSPPELTVHVGDSALMGCVFQSTEDKCIFKIDWTLSPGEHAKDEYVLYYYSNLSVPIGRFQNRVHLMGDILCNDGSLLLQDVQEADQGTYICEIRLKGESQVFKKAVVLHVLPEEPKELMVHVGGLIQMGCVFQSTEVKHVTKEEIVFRYYHKLRMSVEYSQSWGHFQNRVNLVGDIFRNDGSIMLQGVRESDGGNYTCSIHLGNLVFKKTIVLHVSPEEPRTLVTPAALRPLVLGGNQLVIIVGIVCATILLLPVLILIVKKTCGNKSSVNSTVLVKNTKKTNPEIKEKPCHFERCEGEKHIYSPIIVREVIEEEEPSEKSEATYMTMHPVWPSLRSDRNNSLEKKSGGGMPKTQQAF

SEQ ID NO: 7353 - protein, 394 aa, Homo Sapiens
MFCPLKLILLPVLLDYSLGLNDLNVSPPELTVHVGDSALMGCVFQSTEDKCIFKIDWTLSPGEHAKDEYVLYYYSNLSVPIGRFQNRVHLMGDILCNDGSLLLQDVQEADQGTYICEIRLKGESQVFKKAVVLHVLPEEPKELMVHVGGLIQMGCVFQSTEVKHVTKVEWIFSGRRAKEEIVFRYYHKLRMSVEYSQSWGHFQNRVNLVGDIFRNDGSIMLQGVRESDGGNYTCSIHLGNLVFKKTIVLHVSPEEPRTLVTPAALRPLVLGGNQLVIIVGIVCATILLLPVLILIVKKTCGNKSSVNSTVLVKNTKKTNPEIKEKPCHFERCEGEKHIYSPIIVREVIEEEEPSEKSEATYMTMHPVWPSLRSDRNNSLEKKSGGGMPKTQQAF

SEQ ID NO: 7354 - protein, 66 aa, Homo Sapiens
MFCPLKLILLPVLLEHRRQMYIQDRLDSVTRRARQGRICAILLLQSQCAYWALPEPRTLDGGHLMQ

SEQ ID NO: 7355 - protein, 121 aa, Homo Sapiens
MGCVFQSTEDKCIFKIDWTLSPGEHAKDEYVLYYYSNLSVPIGRFQNRVHLMGDILCNDGSLLLQDVQEADQGTYICEIRLKGESQVFKKAVVLHVLPEEPKELMVHVGGLIQMGCVFQST

SEQ ID NO: 7356 - protein, 220 aa, Homo Sapiens
MGCVFQSTEDKCIFKIDWTLSPGEHAKDEYVLYYYSNLSVPIGRFQNRVHLMGDILCNDGSLLLQDVQEADQGTYICEIRLKGESQVFKKAVVLHVLPEEPKELMVHVGGLIQMGCVFQSTEVKHVTKVEWIFSGRRAKEEIVFRYYHKLRMSVEYSQSWGHFQNRVNLVGDIFRNDGSIMLQGVRESDGGNYTCSIHLGNLVFKKTIVLHVSPEEPRKW

SEQ ID NO: 7357 - protein, 305 aa, Homo Sapiens
MGCVFQSTEDKCIFKIDWTLSPGEHAKDEYVLYYYSNLSVPIGRFQNRVHLMGDILCNDGSLLLQDVQEADQGTYICEIRLKGESQVFKKAVVLHVLPEEPKELMVHVGGLIQMGCVFQSTEVKHVTKVEWIFSGRRAKEEIVFRYYHKLRMSVEYSQSWGHFQNRVNLVGDIFRNDGSIMLQGVRESDGGNYTCSIHLGNLVFKKTIVLHVSPEEPRTLVTPAALRPLVLGGNQLVIIVGIVCATILLLPVLILIVKKTCGNKSSVNSTVLVKNTKKTNPEIKEKPCHFERCEGEVNTRFSLKH

SEQ ID NO: 7358 - protein, 355 aa, Homo Sapiens
MGCVFQSTEDKCIFKIDWTLSPGEHAKDEYVLYYYSNLSVPIGRFQNRVHLMGDILCNDGSLLLQDVQEADQGTYICEIRLKGESQVFKKAVVLHVLPEEPKELMVHVGGLIQMGCVFQSTEVKHVTKVEWIFSGRRAKEEIVFRYYHKLRMSVEYSQSWGHFQNRVNLVGDIFRNDGSIMLQGVRESDGGNYTCSIHLGNLVFKKTIVLHVSPEEPRTLVTPAALRPLVLGGNQLVIIVGIVCATILLLPVLILIVKKTCGNKSSVNSTVLVKNTKKTNPEIKEKPCHFERCEGEKHIYSPIIVREVIEEEEPSEKSEATYMTMHPVWPSLRSDRNNSLEKKSGGGMPKTQQAF

SEQ ID NO: 7359 - protein, 384 aa, Homo Sapiens
MVSGDYSLGLNDLNVSPPELTVHVGDSALMGCVFQSTEDKCIFKIDWTLSPGEHAKDEYVLYYYSNLSVPIGRFQNRVHLMGDILCNDGSLLLQDVQEADQGTYICEIRLKGESQVFKKAVVLHVLPEEPKELMVHVGGLIQMGCVFQSTEVKHVTKVEWIFSGRRAKEEIVFRYYHKLRMSVEYSQSWGHFQNRVNLVGDIFRNDGSIMLQGVRESDGGNYTCSIHLGNLVFKKTIVLHVSPEEPRTLVTPAALRPLVLGGNQLVIIVGIVCATILLLPVLILIVKKTCGNKSSVNSTVLVKNTKKTNPEIKEKPCHFERCEGEKHIYSPIIVREVIEEEEPSEKSEATYMTMHPVWPSLRSDRNNSLEKKSGGGMPKTQQAF

SEQ ID NO: 7360 - protein, 70 aa, Homo Sapiens
MKNHLLFWGVLAVFIKAVHVKAQEDERIVLVDNKCKCARITSRIIRSSEDPNEDIVERNIRIIVPLNNRE

SEQ ID NO: 7361 - protein, 159 aa, Homo Sapiens
MKNHLLFWGVLAVFIKAVHVKAQEDERIVLVDNKCKCARITSRIIRSSEDPNEDIVERNIRIIVPLNNRENISDPTSPLRTRFVYHLSDLCKKCDPTEVELDNQIVTATQSNICDEDSATETCYTYDRNKCYTAVVPLVYGGETKMVETALTPDACYPD

SEQ ID NO: 7362 - protein, 159 aa, Homo Sapiens; identical to SEQ ID NO: 7361

SEQ ID NO: 7363 - protein, 159 aa, Homo Sapiens; identical to SEQ ID NO: 7361

SEQ ID NO: 7364 - protein, 158 aa, Homo Sapiens
MKNHLLFWGVLAVFIKAVHVKENGIHSEFRAQEDERIVLVDNKCKCARITSRIIRSSEDPNEDIVERNIRIIVPLNNRENISDPTSPLRTRFVYHLSDLCKKCDPTEVELDNQIVTATQSNICDEDSATETCYTYDRNKCYTAVVPLVYGGETKMVET

SEQ ID NO: 7365 - protein, 157 aa, Homo Sapiens
MKNHLLFWGVLAVFIKAVHVKGSRDSSASASRVAGITAQEDERIVLVDNKCKCARITSRIIRSSEDPNEDIVERNIRIIVPLNNRENISDPTSPLRTRFVYHLSDLCKKCDPTEVELDNQIVTATQSNICDEDSATETCYTYDRNKCYTAVVPLVYG

SEQ ID NO: 7366 - protein, 285 aa, Homo Sapiens
MAGGWAQGSRRAARLPEGGRLMAPASRLLALWALAAVALPGSGAEGDGGWRPGGPGAVAEEERCTVERRADLTYAEFVQQYAFVRPVILQGLTDNSRFRALCSRDRLLASFGDRVVRLSTANTYSYHKVDLPFQEYVEQLLHPQDPTSLGNDTLYFFGDNNFTEWASLFRHYSPPPFGLLGTAPAYSFGIAGAGSGVPFHWHGPGYSEVIYGRKRWFLYPPEKTPEFHPNKTTLAWLRDTYPALPPSARPLECTIRAGEVLYFPDRWWHATLNLDTSVFISTFLG

SEQ ID NO: 7367 - protein, 264 aa, Homo Sapiens
MAPASRLLALWALAAVALPGSGAEGDGGWRPGGPGAVAEEERCTVERRADLTYAEFVQQYAFVRPVILQGLTDNSRFRALCSRDRLLASFGDRVVRLSTANTYSYHKVDLPFQEYVEQLLHPQDPTSLGNDTLYFFGDNNFTEWASLFRHYSPPPFGLLGTAPAYSFGIAGAGSGVPFHWHGPGYSEVIYGRKRWFLYPPEKTPEFHPNKTTLAWLRDTYPALPPSARPLECTIRAGEVLYFPDRWWHATLNLDTSVFISTFLG

SEQ ID NO: 7368 - protein, 219 aa, Homo Sapiens
MAPASRLLALWALAAVALPGSGAEGDGGWRPGGPGAVAEEERCTVERRADLTYAEFVQQYAFVRPVILQGLTDNSRFRALCSRDRLLASFGDRVVRLSTANTYSYHKVDLPFQEYVEQLLHPQDPTSLGNDTLYFFGDNNFTEWASLFRHYSPPPFGLLGTAPAYSFGIAGAGSGVPFHWHGPGYSEVIYGRKVLYFPDRWWHATLNLDTSVFISTFLG

SEQ ID NO: 7369 - protein, 234 aa, Homo Sapiens
MAPASRLLALWALAAVALPGSGAEGDGGWYAFVRPVILQGLTDNSRFRALCSRDRLLASFGDRVVRLSTANTYSYHKVDLPFQEYVEQLLHPQDPTSLGNDTLYFFGDNNFTEWASLFRHYSPPPFGLLGTAPAYSFGIAGAGSGVPFHWHGPGYSEVIYGRKRWFLYPPEKTPEFHPNKTTLAWLRDTYPALPPSARPLECTIRAGEVLYFPDRWWHATLNLDTSVFISTFLG

SEQ ID NO: 7370 - protein, 81 aa, Homo Sapiens
  misc_feature (1)..(1): Xaa can be any naturally occurring amino acid
XWTCPSRSMWSSCCTPRTPPPWAMTPCTSSGTTTSPSGPLSFGTTPHPHLACWEPLQLTALESQELARGCPSTGMDPGTQK

SEQ ID NO: 7371 - protein, 331 aa, Homo Sapiens
MSMTTRAWEELDGGLGSCQALEDHSALAETQEDRASATPRLADSGSVPHDSQVAEGPSVDTRPKKMEKEPAARGTPGTGKERLKAGASPRSVPARKKAQTAPPLQPPPPPPALSEELPWGDLSLNKCLVLASLVALLGSAFQLCRDAVPGEAALQARVPEPWVPPSSAPREPSSPLPKFEAQAPPSAPPAPRAEAEVRPKIPGSREAAENDEEEPGEATGEAVREDRVTLADRGPKERPRREGKPRKEKPRKEERPKKERPRKEERPRAAREPREALPQRWESREGGHRPWARDSRDAEPRKKQAWVSPRRPDEEQRPGSRQKLRAGKGRD

SEQ ID NO: 7372 - protein, 206 aa, Homo Sapiens
ENLKRLKCLRRYRQRYGVEALLHRQLKERRMLATDGAAQQAHTTRSSQRCLAFVDDVRCSNQSLPMTRHCLTHICQDTNQVLFKCCQGSEEVPCNKPVPVSLSEDPCCPLHFQLPPQMYKPEQDLDVVGDGMQCPPSPLLFDPSLTLEDHLVKEIAEDPVDILGQMQMAGDGCRSQGSRNSEKASAPLSQSGLATANGKPEPTSIS

SEQ ID NO: 7373 - protein, 675 aa, Homo Sapiens
MAVLFPLSSCGWAAISLFLSAQSCYSASKQCQSQSPSCRLPGARISGDWSRRTKWRSHRLPRPGPVVRSEAGRDKGGVRGGGVAAAWGWCCRFPSCCSCASPEDTFSVVWFGVGPGMEGHAKGRQSHRCLWRLGEGGGDLRSVPYGDDFCMSFGNCPRDLCGAGIFGKGKGFLVFRLTPQVLVMNRIRIHVLPTNRGRITPVPRSQEPLSCAFTHRPCSHPRLEGQEFCIKHILEDKNAPFKQCSYISTKNGKRCPNAAPKPEKKDGVSFCAEHVRRNALALHAQMKKTNPGPVGETLLCQLSSYAKTELGSQTPESSRSEASRILDEDSWSDGEQEPITVDQTWRGDPDSEADSIDSDQEDPLKHAGVYTAEEVALIMREKLIRLQSLYIDQFKRLQHLLKEKKRRYLHNRKVEHEALGSSLLTGPEGLLAKERENLKRLKCLRRYRQRYGVEALLHRQLKERRMLATDGAAQQAHTTRSSQRCLAFVDDVRCSNQSLPMTRHCLTHICQDTNQVLFKCCQGSEEVPCNKPVPVSLSEDPCCPLHFQLPPQMYKPEQVLSVPDDLEAGPMDLYLSAAELQPTESLPLEFSDDLDVVGDGMQCPPSPLLFDPSLTLEDHLVKEIAEDPVDILGQMQMAGDGCRSQGSRNSEKASAPLSQSGLATANGKPEPTSIS

SEQ ID NO: 7374 - protein, 69 aa, Homo Sapiens
MNRIRIHVLPTNRGRITPVPRSQEPLSCAFTHRPCSHPRLEGQEFCIKHILEDKNAPFKQCSYISTKNG

SEQ ID NO: 7375 - protein, 108 aa, Homo Sapiens
MNRIRIHVLPTNRGRITPVPRSQEPLSCAFTHRPCSHPRLEGQEFCIKHILEDKNAPFKQCSYISTKNGKRCPNAAPKPEKKDGVSFCAEHVRRNALALHAQMKKTNP

SEQ ID NO: 7376 - protein, 492 aa, Homo Sapiens
MNRIRIHVLPTNRGRITPVPRSQEPLSCAFTHRPCSHPRLEGQEFCIKHILEDKNAPFKQCSYISTKNGKRCPNAAPKPEKKDGVSFCAEHVRRNALALHAQMKKTNPGPVGETLLCQLSSYAKTELGSQTPESSRSEASRILDEDSWSDGEQEPITVDQTWRGDPDSEADSIDSDQEDPLKHAGVYTAEEVALIMREKLIRLQSLYIDQFKRLQHLLKEKKRRYLHNRKVEHEALGSSLLTGPEGLLAKERENLKRLKCLRRYRQRYGVEALLHRQLKERRMLATDGAAQQAHTTRSSQRCLAFVDDVRCSNQSLPMTRHCLTHICQDTNQVLFKCCQGSEEVPCNKPVPVSLSEDPCCPLHFQLPPQMYKPEQVLSVPDDLEAGPMDLYLSAAELQPTESLPLEFSDDLDVVGDGMQCPPSPLLFDPSLTLEDHLVKEIAEDPVDILGQMQMAGDGCRSQGSRNSEKASAPLSQSGLATANGKPEPTSIS

SEQ ID NO: 7377 - protein, 454 aa, Homo Sapiens
MNRIRIHVLPTNRGRITPVPRSQEPLSCAFTHRPCSHPRLEGQEFCIKHILEDKNAPFKQCSYISTKNGKRCPNAAPKPEKKDGVSFCAEHVRRNALALHAQMKKTNPGPVGETLLCQLSSYAKTELGSQTPESSRSEASRILDEDSWSDGEQEPITVDQTWRGDPDSEADSIDSDQEDPLKHAGVYTAEEVALIMREKLIRLQSLYIDQFKRLQHLLKEKKRRYLHNRKVEHEALGSSLLTGPEGLLAKERENLKRLKCLRRYRQRYGVEALLHRQLKERRMLATDGAAQQAHTTRSSQRCLAFVDDVRCSNQSLPMTRHCLTHICQDTNQVLFKCCQGSEEVPCNKPVPVSLSEDPCCPLHFQLPPQMYKPEQDLDVVGDGMQCPPSPLLFDPSLTLEDHLVKEIAEDPGQMQMAGDGCRSQGSRNSEKASAPLSQSGLATANGKPEPTSIS

SEQ ID NO: 7378 - protein, 155 aa, Homo Sapiens
MNRIRIHVLPTNRGRITPVPRSQEPLSCAFTHRPCSHPRLEGQEFCIKHILEDKNAPFKQCSYISTKNGKRCPNAAPKPEKKDGVSFCAEHVRRNALALHAQMKKTNPGPVGETLLCQLSSYAKTELGSQTPESSRSEASRILDMLVSTQQKKWP

SEQ ID NO: 7379 - protein, 133 aa, Homo Sapiens
MNRIRIHVLPTNRGRITPVPRVSFCAEHVRRNALALHAQMKKTNPGPVGETLLCQLSSYAKTELGSQTPESSRSEASRILDEDSWSDGEQEPITVDQTWRGDPDSEADSIDSDQEDPLKHAGVYTAEEVALIM

SEQ ID NO: 7380 - protein, 74 aa, Homo Sapiens
PNAAPKPEKKDGVSFCAEHVRRNALALHAQMKKTNPGPVGETLLCQLSSYAKTELGSQTPESSRSEASRILGLG

SEQ ID NO: 7381 - protein, 340 aa, Homo Sapiens
  misc_feature (1)..(1): Xaa can be any naturally occurring amino acid
XLPTNRGRITPVPRSQEPLSCAFTHRPCSHPRLEGQEFCIKHILEDKNAPFKQCSYISTKNGKRCPNAAPKPEKKDGVSFCAEHVRRNALALHAQMKKTNPGPVGETLLCQLSSYAKTELGSQTPESSRSEASRILDEDSWSDGEQEPITVDQTWRGDPDSEADSIDSDQEDPLKHAGVYTAEEVALIMREKLIRLQSLYIDQFKRLQHLLKEKKRRYLHNRKVEHEALGSSLLTGPEGLLAKERENLKRLKCLRRYRQRYGVEALLHRQLKERRMLATDGAAQQAHTTRSSQRCLAFVDDVRCSNQSLPMTRHCLTQKDATAIGDLLTLYCGLMETALD

SEQ ID NO: 7382 - protein, 25 aa, Homo Sapiens
  misc_feature (1)..(1): Xaa can be any naturally occurring amino acid
XPESSRSEASRILDMLVSTQQKKWP

SEQ ID NO: 7383 - protein, 304 aa, Homo Sapiens
MLPPPRPAAALALPVLLLLLVVLTPPPTGARPSPGPDYLRRGWMRLLAEGEGCAPCRPEECAAPRGCLAGRVRDACGCCWECANLEGQLCDLDPSAHFYGHCGEQLECRLDTGGDLSRGEVPEPLCACRSQSPLCGSDGHTYSQICRLQEAARARPDANLTVAHPGPCESGPQIVSHPYDTWNVTGQDVIFGCEVFAYPMASIEWRKDGLDIQLPGDDPHISVQFRGGPQRFEVTGWLQIQAVRPSDEGTYRCLGRNALGQVEAPASLTVLTPDQLNSTGIPQLRSLNLVPEEEAESEENDDYY

SEQ ID NO: 7384 - protein, 230 aa, Homo Sapiens
MGIQGMELCAMAVVVLLFIAVLKQFGILEPISMEDSSDSELELSTVRHQPEGLDQLQAQTKFTKKELQSLYRGFKNECPTGLVDEDTFKLIYAQFFPQGDATTYAHFLFNAFDADGNGAIHFEDFVVGLSILLRGTVHEKLKWAFNLYDINKDGYITKEEMLAIMKSIYDMMGRHTYPILREDAPAEHVERFFEKMDRNQDGVVTIEEFLEACQKDENIMSSMQLFENVI

SEQ ID NO: 7385 - protein, 256 aa, Homo Sapiens
MQPAKEVTKASDGSLLGDLGHTPLSKKEGIKWQRPRLSRQALMRCCLVKWILSSTAPQGSDSSDSELELSTVRHQPEGLDQLQAQTKFTKKELQSLYRGFKNECPTGLVDEDTFKLIYAQFFPQGDATTYAHFLFNAFDADGNGAIHFEDFVVGLSILLRGTVHEKLKWAFNLYDINKDGYITKEEMLAIMKSIYDMMGRHTYPILREDAPAEHVERFFEKMDRNQDGVVTIEEFLEACQKDENIMSSMQLFENVI

SEQ ID NO: 7386 - protein, 256 aa, Homo Sapiens
MQPRKEVTKASDGSLLGDLGHTPLSKKEGIKWQRPRLSRQALMRCCLVKWILSSTAPQGSDSSDSELELSTVRHQPEGLDQLQAQTKFTKKELQSLYRGFKNECPTGLVDEDTFKLIYAQFFPQGDATTYAHFLFNAFDADGNGAIHFEDFVVGLSILLRGTVHEKLKWAFNLYDINKDGYITKEEMLAIMKSIYDMMGRHTYPILREDAPAEHVERFFEKMDRNQDGVVTIEEFLEACQKDENIMSSMQLFENVI

SEQ ID NO: 7387 - protein, 252 aa, Homo Sapiens
MGGLRPWSRYGLLVVAHLLALGLGAVVFQALEGPPACRLQAELRAELAAFQAEHRACLPPGALEELLGTALATQAHGVSTLGNSSEGRTWDLPSALLFAASILTTTGYGHMAPLSPGGKAFCMVYAALGLPASLALVATLRHCLLPVLSRPRAWVAVHWQLSPARAALLQAVALGLLVASSFVLLPALVLWGLQGDCSLLGAVYFCFSSLSTIGLEDLLPGRGRSLHPVIYHLGQLALLGGGTSLQGTAWEG

SEQ ID NO: 7388 - protein, 252 aa, Homo Sapiens; identical to SEQ ID NO: 7387

SEQ ID NO: 7389 - protein, 257 aa, Homo Sapiens
MGGLRPWSRYGLLVVAHLLALGLGAVVFQALEGPPACRLQAELRAELAAFQAEHRACLPPGALEELLGTALATQAHGVSTLGNSSEGRTWDLPSALLFAASILTTTGYGHMAPLSPGGKAFCMVYAALGLPASLALVATLRHCLLPVLSRPRAWVAVHWQLSPARAALLQAVALGLLVASSFVLLPALVLWGLQGDCSLLGAVYFCFSSLSTIGLEDLLPGRGRSLHPVIYHLGQLALLGKSSHLTACGGRGKRSLD

SEQ ID NO: 7390 - protein, 307 aa, Homo Sapiens
MGGLRPWSRYGLLVVAHLLALGLGAVVFQALEGPPACRLQAELRAELAAFQAEHRACLPPGALEELLGTALATQAHGVSTLGNSSEGRTWDLPSALLFAASILTTTGYGHMAPLSPGGKAFCMVYAALGLPASLALVATLRHCLLPVLSRPRAWVAVHWQLSPARAALLQAVALGLLVASSFVLLPALVLWGLQGDCSLLGAVYFCFSSLSTIGLEDLLPGRGRSLHPVIYHLGQLALLGYLLLGLLAMLLAVETFSELPQVRAMGKFFRPSGPVTAEDQGGILGQDELALSTLPPAAPASGQAPAC

SEQ ID NO: 7391 - protein, 72 aa, Homo Sapiens
  misc_feature (1)..(1): Xaa can be any naturally occurring amino acid
XHLGQLALLGLLAMLLAVETFSELPQVRAMGKFFRPSGPVTAEDQGGILGQDELALSTLPPAAPASGQAPAC

SEQ ID NO: 7392 - protein, 28 aa, Homo Sapiens
  misc_feature (1)..(1): Xaa can be any naturally occurring amino acid
XLHPVIYHLGQLALLGGGTSLQGTAWEG

SEQ ID NO: 7393 - protein, 57 aa, Homo Sapiens
MGGDLVLGLGALRRRKRLLEQEKSLAGWALVLAGTGIGLMVLHAEMLWFGGCSTHFG

SEQ ID NO: 7394 - protein, 427 aa, Homo Sapiens
MGGDLVLGLGALRRRKRLLEQEKSLAGWALVLAGTGIGLMVLHAEMLWFGGCSWALYLFLVKCTISISTFLLLCLIVAFHAKEVQLFMTDNGLRDWRVALTGRQAAQIVLELVVCGLHPAPVRGPPCVQDLGAPLTSPQPWPGFLGQGEALLSLAMLLRLYLVPRAVLLRSGVLLNASYRSIGALNQVRFRHWFVAKLYMNTHPGRLLLGLTLGLWLTTAWVLSVAERQAVNATGHLSDTLWLIPITFLTIGYGDVVPGTMWGKIVCLCTGVMGVCCTALLVAVVARKLEFNKAEKHVHNFMMDIQYTKEMKESAARVLQEAWMFYKHTRRKESHAARRHQRKLLAAINAFRQVRLKHRKLREQVNSMVDISKMHMILYDLQQNLSSSHRALEKQIDTLAGKLDALTELLSTALGPRQLPEPSQQSK

SEQ ID NO: 7395 - protein, 295 aa, Homo Sapiens
MHDQHFHLLTPLPHRGLSCQRGPAVHDRQRAAGLARGADRAAGNASYRSIGALNQVRFRHWFVAKLYMNTHPGRLLLGLTLGLWLTTAWVLSVAERQAVNATGHLSDTLWLIPITFLTIGYGDVVPGTMWGKIVCLCTGVMGVCCTALLVAVVARKLEFNKAEKHVHNFMMDIQYTKEMKESAARVLQEAWMFYKHTRRKESHAARRHQRKLLAAINAFRQVRLKHRKLREQVNSMVDISKMHMILYDLQQNLSSSHRALEKQIDTLAGKLDALTELLSTALGPRQLPEPSQQSK

SEQ ID NO: 7396 - protein, 113 aa, Homo Sapiens
SDTLWLIPITFLTIGYGDVVPGTMWGKIVCLCTGVMGVCCTALLVAVVARKLEFNKAEKHVHNFMMDIQYTKEMKESAARVLQEAWMFYKHTRRKESHAARRHQRKLLAAINA

SEQ ID NO: 7397 - protein, 59 aa, Homo Sapiens
VDISKMHMILYDLQQNLSSSHRALEKQIDTLAGKLDALTELLSTALGPRQLPEPSQQSK

SEQ ID NO: 7398 - protein, 165 aa, Homo Sapiens
  misc_feature (1)..(1): Xaa can be any naturally occurring amino acid
XVCCTALLVAVVARKLEFNKAEKHVHNFMMDIQYTKEEGVSCCPQASAQAAGRHQRVRAALYAHVSMCTHVQVTSLHGCVCACPCLSRFRQVRLKHRKLREQVNSMVDISKMHMILYDLQQNLSSSHRALEKQIDTLAGKLDALTELLSTALGPRQLPEPSQQSK

SEQ ID NO: 7399 - protein, 113 aa, Homo Sapiens
MFQTKLRNETWEDLPKMSCTTEIQAAFILSSFVTFFSGLIILLIFRLIWRSVKKWQIIKGTGIILELFTSGTIARSHVRSLHFQGQFRDHIEMLLSAQTFVGQVLPCWKLFII

SEQ ID NO: 7400 - protein, 1149 aa, Homo Sapiens
MFQTKLRNETWEDLPKMSCTTEIQAAFILSSFVTFFSGLIILLIFRLIWRSVKKWQIIKGTGIILELFTSGTIARSHVRSLHFQGQFRDHIEMLLSAQTFVGQVLVILVFVLSIGSLIIYFINSADPVGSCSSYEDKTIPIDLVFNAFFSFYFGLRFMAADDKIKFWLEMNSIVDIFTIPPTFISYYLKSNWLGLRFLRALRLLELPQILQILRAIKTSNSVKFSKLLSIILSTWFTAAGFIHLVENSGDPWLKGRNSQNISYFESIYLVMATTSTVGFGDVVAKTSLGRTFIMFFTLGSLILFANYIPEMVELFANKRKYTSSYEALKGKKFIVVCGNITVDSVTAFLRNFLRDKSGEINTEIVFLGETPPSLELETIFKCYLAYTTFISGSAMKWEDLRRVAVESAEACLIIANPLCSDSHAEDISNIMRVLSIKNYDSTTRIIIQILQSHNKVYLPKIPSWNWDTGDNIICFAELKLGFIAQGCLVPGLCTFLTSLFVEQNKKVMPKQTWKKHFLNSMKNKILTQRLSDDFAGMSFPEVARLCFLKMHLLLIAIEYKSLFTDGFCGLILNPPPQVRIRKNTLGFFIAETPKDVRRALFYCSVCHDDVFIPELITNCGCKSRSRQHITVPSVKRMKKCLKGISSRISGQDSPPRVSASTSSISNFTTRTLQHDVEQDSDQLDSSGMFHWCKPTSLDKVTLKRTGKSKYKFRNHIVACVFGDAHSAPMGLRNFVMPLRASNYTRKELKDIVFIGSLDYLQREWRFLWNFPQIYILPGCALYSGDLHAANIEQCSMCAVLSPPPQPSSNQTLVDTEAIMATLTIGSLQIDSSSDPSPSVSEETPGYTNGHNEKSNCRKVPILTELKNPSNIHFIEQLGGLEGSLQETNLHLSTAFSTGTVFSGSFLDSLLATAFYNYHVLELLQMLVTGGVSSQLEQHLDKDKVYGVADSCTSLLSGRNRCKLGLLSLHETILSDVNPRNTFGQLFCGSLDLFGILCVGLYRIIDEEELNPENKRFVITRPANEFKLLPSDLVFCAIPFSTACYKRNEEFSLQKSYEIVNKASQTTETHSDTNCPPTIDSVTETLYSPVYSYQPRTNSLSFPKQIAWNQSRTNSIISSQIPLGDNAKENERKTSDEVYDEDPFAYSEPL

SEQ ID NO: 7401 - protein, 308 aa, Homo Sapiens
MFQTKLRNETWEDLPKMSCTTEIQAAFILSSFVTFFSGLIILLIFRLIWRSVKKWQIIKGTGIILELFTSGTIARSHVRSLHFQGQFRDHIEMLLSAQTFVGQVLVILVFVLSIGSLIIYFINSADPVGSCSSYEDKTIPIDLVFNAFFSFYFGLRFMAADDKIKFWLEMNSIVDIFTIPPTFISYYLKSNWLGLRFLRALRLLELPQILQILRAIKTSNSVKFSKLLSIILSTWFTAAGFIHLVENSGDPWLKGRNSQNISYFESIYLVMATTSTVGFGDVVAKTSLGRTFIMFFTLGSLVKNIFNI

SEQ ID NO: 7402 - protein, 947 aa, Homo Sapiens
MFQTKLRNETWEDLPKMSCTTEIQAAFILSSFVTFFSGLIILLIFRLIWRSVKKWQIIKGTGIILELFTSGTIARSHVRSLHFQGQFRDHIEMLLSAQTFVGQVLVILVFVLSIGSLIIYFINSADPVGSCSSYEDKTIPIDLVFNAFFSFYFGLRFMAADDKIKFWLEMNSIVDIFTIPPTFISYYLKSNWLGLRFLRALRLLELPQILQILRAIKTSNSVKFSKLLSIILSTWFTAAGFIHLVENSGDPWLKGRNSQNISYFESIYLVMATTSTVGFGDVVAKTSLGRTFIMFFTLGSLILFANYIPEMVELFANKRKYTSSYEALKGKKFIVVCGNITVDSVTAFLRNFLRDKSGEINTEIVFLGETPPSLELETIFKCYLAYTTFISGSAMKWEDLRRVAVESAEACLIIANPLCSDSHAEDISNIMRVLSIKNYDSTTRIIIQILQSHNKVYLPKIPSWNWDTGDNIICFAELKLGFIAQGCLVPGLCTFLTSLFVEQNKKVMPKQTWKKHFLNSMKNKILTQRLSDDFAGMSFPEVARLCFLKMHLLLIAIEYKSLFTDGFCGLILNPPPQVRIRKNTLGFFIAETPKDVRRALFYCSVCHDDVFIPELITNCGCKSRSRQHITVPSVKRMKKCLKGISSRISGQDSPPRVSASTSSISNFTTRTLQHDVEQDSDQLDSSGMFHWCKPTSLDKVTLKRTGKSKYKFRNHIVACVFGDAHSAPMGLRNFVMPLRASNYTRKELKDIVFIGSLDYLQREWRFLWNFPQIYILPGCALYSGDLHAANIEQCSMCAVLSPPPQPSSNQTLVDTEAIMATLTIGSLQIDSSSDPSPSVSEETPGYTNGHNEKSNCRKVPILTELKNPSNIHFIEQLGGLEGSLQETNLHLSTAFSTGTVFSGSFLDSLLATLMWKLAIKGSQFQGRSSGLCWPSTIIMSWNCFRCW

SEQ ID NO: 7403 - protein, 51 aa, Homo Sapiens
MIKKTEFSNVCSIFYLILQAMLKGLLQLSCPGIASDAGDRRSKFSAGTTFR

SEQ ID NO: 7404 - protein, 1628 aa, Homo Sapiens
MAGVGAAALSLLLHLGALALAAGAEGGAVPREPPGQQTTAHSSVLAGNSQEQWHPLREWLGRLEAAVMELREQNKDLQTRVRQLESCECHPASPQCWGLGRAWPEGARWEPDACTACVCQDGAAHCGPQAHLPHCRGCSQNGQTYGNGETFSPDACTTCRCLEGTITCNQKPCPRGPCPEPGACCPHCKPGCDYEGQLYEEGVTFLSSSNPCLQCTCLRSRVRCMALKCPPSPCPEPVLRPGHCCPTCQGCTEGGSHWEHGQEWTTPGDPCRICRCLEGHIQCRQRECASLCPYPARPLPGTCCPVCDGCFLNGREHRSGEPVGSGDPCSHCRCANGSVQCEPLPCPPVPCRHPGKIPGQCCPVCDGCEYQGHQYQSQETFRLQERGLCVRCSCQAGEVSCEEQECPVTPCALPASGRQLCPACELDGEEFAEGVQWEPDGRPCTACVCQDGVPKCGAVLCPPAPCQHPTQPPGACCPSCDSCTYHSQVYANGQNFTDADSPCHACHCQDGTVTCSLVDCPPTTCARPQSGPGQCCPRCPDCILEEEVFVDGESFSHPRDPCQECRCQEGHAHCQPRPCPRAPCAHPLPGTCCPNDCSGCAFGGKEYPSGADFPHPSDPCRLCRCLSGNVQCLARRCVPLPCPEPVLLPGECCPQCPAAPAPAGCPRPGAAHARHQEYFSPPGDPCRRCLCLDGSVSCQRLPCPPAPCAHPRQGPCCPSCDGCLYQGKEFASGERFPSPTAACHLCLCWEGSVSCEPKACAPALCPFPARGDCCPDCDGCEYLGESYLSNQEFPDPREPCNLCTCLGGFVTCGRRPCEPPGCSHPLIPSGHCCPTCQGCRYHGVTTASGETLPDPLDPTCSLCTCQEGSMRCQKKPCPPALCPHPSPGPCFCPVCHSCLSQGREHQDGEEFEGPAGSCEWCRCQAGQVSCVRLQCPPLPCKLQVTERGSCCPRCRGCLAHGEEHPEGSRWVPPDSACSSCVCHEGVVTCARIQCISSCAQPRQGPHDCCPQCSDCEHEGRKYEPGESFQPGADPCEVCICEPQPEGPPSLRCHRRQCPSLVGCPPSQLLPPGPQHCCPTCAEALSNCSEGLLGSELAPPDPCYTCQCQDLTWLCIHQACPELSCPLSERHTPPGSCCPVCRECVVEAEGRRVADGESWRDPSNACIACTCHRGHVECHLEECQALSCPHGWAKVPQADSCCERCQAPTQSCVHQGREVASGERWTVDTCTSCSCMAGTVRCQSQRCSPLSCGPDKAPALSPGSCCPRCLPRPASCMAFGDPHYRTFDGRLLHFQGSCSYVLAKDCHSGDFSVHVTNDDRGRSGVAWTQEVAVLLGDMAVRLLQDGAVTVDGHPVALPFLQEPLLYVELRGHTVILHAQPGLQVLWDGQSQVEVSVPGSYQGRTCGLCGNFNGFAQDDLQGPEGLLLPSEAAFGNSWQVSEGLWPGRPCSAGREVDPCRAAGYRARREANARCGVLKSSPFSRCHAVVPPEPFFAACVYDLCACGPGSSADACLCDALEAYASHCRQAGVTPTWRGPTLCVVGCPLERGFVFDECGPPCPRTCFNQHIPLGELAAHCVRPCVPGCQCPAGLVEHEAHCIPPEACPQVLLTGDQPLGARPSPSREPQETP

SEQ ID NO: 7405 - protein, 1504 aa, Homo Sapiens
MAGVGAAALSLLLHLGALALAAGAEGGAVPREPPGQQTTAHSSVLAGNSQEQWHPLREWLGRLEAAVMELREQNKDLQTRVRQLESCECHPASPQCWGLGRAWPEGARWEPDACTACVCQDGAAHCGPQAHLPHCRGCSQNGQTYGNGETFSPDACTTCRCLTGAVQCQGPSCSELNCLESCTPPGECCPICRCTEGGSHWEHGQEWTTPGDPCRICRCLEGHIQCRQRECASLCPYPARPLPGTCCPVCDGCFLNGREHRSGEPVGSGDPCSHCRCANGSVQCEPLPCPPVPCRHPGKIPGQCCPVCDGCEYQGHQYQSQETFRLQERGLCVRCSCQAGEVSCEEQECPVTPCALPASGRQLCPACELDGEEFAEGVQWEPDGRPCTACVCQDGVPKCGAVLCPPAPCQHPTQPPGACCPSCDSCTYHSQVYANGQNFTDADSPCHACHCQDGTVTCSLVDCPPTTCARPQSGPGQCCPRCPDCILEEEVFVDGESFSHPRDPCQECRCQEGHAHCQPRPCPRAPCAHPLPGTCCPNDCSGCAFGGKEYPSGADFPHPSDPCRLCRCLSGNVQCLARRCVPLPCPEPVLLPGECCPQCPAPAGCPRPGAAHARHQEYFSPPGDPCRRCLCLDGSVSCQRLPCPPAPCAHPRQGPCCPSCDGCLYQGKEFASGERFPSPTAACHLCLCWEGSVSCEPKACAPALCPFPARGDCCPDCDGCEYLGESYLSNQEFPDPREPCNLCTCLGGFVTCGRRPCEPPGCSHPLIPSGHCCPTCQGCRYHGVTTASGETLPDPLDPTCSLCTCQEGSMRCQKKPCPPALCPHPSPGPCFCPVCHSCLSQGREHQDGEEFEGPAGSCEWCRCQAGQVSCVRLQCPPLPCKLQVTERGSCCPRCRGCLAHGEEHPEGSRWVPPDSACSSCVCHEGVVTCARIQCISSCAQPRQGPHDCCPQCSDCEHEGRKYEPGESFQPGADPCEVCICEPQPEGPPSLRCHRRQCPSLVGCPPSQLLPPGPQHCCPTCAEALSNCSEGLLGSELAPPDPCYTCQCQDLTWLCIHQACPELSCPLSERHTPPGSCCPVCRAPTQSCVHQGREVASGERWTVDTCTSCSCMAGTVRCQSQRCSPLSCGPDKAPALSPGSCCPRCLPRPASCMAFGDPHYRTFDGRLLHFQGSCSYVLAKDCHSGDFSVHVTNDDRGRSGVAWTQEVAVLLGDMAVRLLQDGAVTVDGHPVALPFLQEPLLYVELRGHTVILHAQPGLQVLWDGQSQVEVSVPGSYQGRTCGLCGNFNGFAQDDLQGPEGLLLPSEAAFGNSWQVSEGLWPGRPCSAGREVDPCRAAGYRARREANARCGVLKSSPFSRCHAVVPPEPFFAACVYDLCACGPGSSADACLCDALEAYASHCRQAGVTPTWRGPTLCVVGCPLERGFVFDECGPPCPRTCFNQHIPLGELAAHCVRPCVPGCQCPAGLVEHEAHCIPPEACPQVLLTGDQPLGARPSPSREPQETP

SEQ ID NO: 7406 - protein, 1568 aa, Homo Sapiens
MAGVGAAALSLLLHLGALALAAGAEGGAVPREPPGQQTTAHSSVLAGNSQEQWHPLREWLGRLEAAVMELREQNKDLQTRVRQLESCECHPASPQCWGLGRAWPEGARWEPDACTACVCQDGAAHCGPQAHLPHCRGCSQNGQTYGNGETFSPDACTTCRCLTGAVQCQGPSCSELNCLESCTPPGECCPICRPGCDYEGQLYEEGVTFLSSSNPCLQCTCLRSRVRCMALKCPPSPCPEPVLRPGHCCPTCQGCTEGGSHWEHGQEWTTPGDPCRICRCLEGHIQCRQRECASLCPYPARPLPGTCCPVCDGCFLNGREHRSGEPVGSGDPCSHCRCANGSVQCEPLPCPPVPCRHPGKIPGQCCPVCDGCEYQGHQYQSQETFRLQERGLCVRCSCQAGEVSCEEQECPVTPCALPASGRQLCPACELDGEEFAEGVQWEPDGRPCTACVCQDGVPKCGAVLCPPAPCQHPTQPPGACCPSCDSCTYHSQVYANGQNFTDADSPCHACHCQDGTVTCSLVDCPPTTCARPQSGPGQCCPRCPDCILEEEVFVDGESFSHPRDPCQECRCQEGHAHCQPRPCPRAPCAHPLPGTCCPNDCSGCAFGGKEYPSGADFPHPSDPCRLCRCLSGNVQCLARRCVPLPCPEPVLLPGECCPQCPAAPAPAGCPRPGAAHARHQEYFSPPGDPCRRCLCLDGSVSCQRLPCPPAPCAHPRQGPCCPSCDGCLYQGKEFASGERFPSPTAACHLCLCWEGSVSCEPKACAPALCPFPARGDCCPDCDGCEYLGESYLSNQEFPDPREPCNLCTCLGGFVTCGRRPCEPPGCSHPLIPSGHCCPTCQGCRYHGVTTASGETLPDPLDPTCSLCTCQEGSMRCQKKPCPPALCPHPSPGPCFCPVCHSCLSQGREHQDGEEFEGPAGSCEWCRCQAGQVSCVRLQCPPLPCKLQVTERGSCCPRCRGCLAHGEEHPEGSRWVPPDSACSSCVCHEGVVTCARIQCISSCAQPRQGPHDCCPQCSDCEHEGRKYEPGESFQPGADPCEVCICEPQPEGPPSLRCHRRQCPSLVGCPPSQLLPPGPQHCCPTCAEALSNCSEGLLGSELAPPDPCYTCQCQDLTWLCIHQACPELSCPLSERHTPPGSCCPVCRAPTQSCVHQGREVASGERWTVDTCTSCSCMAGTVRCQSQRCSPLSCGPDKAPALSPGSCCPRCLPRPASCMAFGDPHYRTFDGRLLHFQGSCSYVLAKDCHSGDFSVHVTNDDRGRSGVAWTQEVAVLLGDMAVRLLQDGAVTVDGHPVALPFLQEPLLYVELRGHTVILHAQPGLQVLWDGQSQVEVSVPGSYQGRTCGLCGNFNGFAQDDLQGPEGLLLPSEAAFGNSWQVSEGLWPGRPCSAGREVDPCRAAGYRARREANARCGVLKSSPFSRCHAVVPPEPFFAACVYDLCACGPGSSADACLCDALEAYASHCRQAGVTPTWRGPTLCVVGCPLERGFVFDECGPPCPRTCFNQHIPLGELAAHCVRPCVPGCQCPAGLVEHEAHCIPPEACPQVLLTGDQPLGARPSPSREPQETP

SEQ ID NO: 7407 - protein, 1275 aa, Homo Sapiens
MAGVGAAALSLLLHLGALALAAGAEGGAVPREPPGQQTTAHSSVLAGNSQEQWHPLREWLGRLEAAVMELREQNKDLQTRVRQLESCECHPASPQCWGLGRAWPEGARWEPDACTACVCQDGAAHCGPQAHLPHCRGCSQNGQTYGNGETFSPDACTTCRCLTGAVQCQGPSCSELNCLESCTPPGECCPICRPGCDYEGQLYEEGVTFLSSSNPCLQCTCLRSRVRCMALKCPPSPCPEPVLRPGHCCPTCQGCTEGGSHWEHGQEWTTPGDPCRICRCLEGHIQCRQRECASLCPYPARPLPGTCCPVCDGCFLNGREHRSGEPVGSGDPCSHCRCANGSVQCEPLPCPPVPCRHPGKIPGQCCPVCDGCEYQGHQYQSQETFRLQERGLCVRCSCQAGEVSCEEQECPVTPCALPASGRQLCPACELDGEEFAEGVQWEPDGRPCTACVCQDGVPKCGAVLCPPAPCQHPTQPPGACCPSCDSCTYHSQVYANGQNFTDADSPCHACHCQDGTVTCSLVDCPPTTCARPQSGPGQCCPRCPDCILEEEVFVDGESFSHPRDPCQECRCQEGHAHCQPRPCPRAPCAHPLPGTCCPNDCSGCAFGGKEYPSGADFPHPSDPCRLCRCLSGNVQCLARRCVPLPCPEPVLLPGECCPQCPAAPAPAGCPRPGAAHARHQEYFSPPGDPCRRCLCLDGSVSCQRLPCPPAPCAHPRQGPCCPSCDGCLYQGKEFASGERFPSPTAACHLCLCWEGSVSCEPKACAPALCPFPARGDCCPDCDGCEYLGESYLSNQEFPDPREPCNLCTCLGGFVTCGRRPCEPPGCSHPLIPSGHCCPTCQGCRYHGVTTASGETLPDPLDPTCSLCTCQEGSMRCQKKPCPPALCPHPSPGPCFCPVCHSCLSQGREHQDGEEFEGPAGSCEWCRCQAGQVSCVRLQCPPLPCKLQVTERGSCCPRCRGCLAHGEEHPEGSRWVPPDSACSSCVCHEGVVTCARIQCISSCAQPRQGPHDCCPQCSDCEHEGRKYEPGESFQPGADPCEVCICEPQPEGPPSLRCHRRQCPSLVGCPPSQLLPPGPQHCCPTCAEALSNCSEGLLGSELAPPDPCYTCQCQDLTWLCIHQACPELSCPLSERHTPPGSCCPVCRAPTQSCVHQGREVASGERWTVDTCTSCSCMAGTVRCQSQRCSPLSCGPDKAPALSPGSCCPRCLPRPASCMAFGDPHYRTFDGRLLHFQGSCSYVLAKDCHSGDFRWMGTRWPCPSCRSRCCMWSCEDTL

SEQ ID NO: 7408 - protein, 502 aa, Homo Sapiens
MFGTLLLYCFFLATVPALAETGGERQLSPEKSEIWGPGLKADVVLPARYFYIQAVDTSGNKFTSSPGEKVFQVKVSAPEEQFTRVGVQVLDRKDGSFIVRYRMYASYKNLKVEIKFQGQHVAKSPYILKGPVYHENCDCPLQDSAAWLREMNCPETIAQIQRDLAHFPAVDPEKIAVEIPKRFGQRQSLCHYTLKDNKVYIKTHGEHVGFRIFMDAILLSLTRKVKMPDVELFVNLGDWPLEKKKSNSNIHPIFSWCGSTDSKDIVMPTYDLTDSVLETMGRVSLDMMSVQANTGPPWESKNSTAVWRGRDSRKERLELVKLSRKHPELIDAAFTNFFFFKHDENLYGPIVKHISFFDFFKHKYQINIDGTVAAYRLPYLLVGDSVVLKQDSIYYEHFYNELQPWKHYIPVKSNLSDLLEKLKWAKDHDEEAKKIAKAGQEFARNNLMGDDIFCYYFKLFQEYANLQVSEPQIREGMKRVEPQTEDDLFPCTCHRKKTKDEL

SEQ ID NO: 7409 - protein, 507 aa, Homo Sapiens
MRRLPRALLLQLRLALLVAAGAPEVLVSAPRSLVWGPGLQAAVVLPVRYFYLQAVNSEGQNLTRSPAGETPFKVVVKSLSPKELVRIHVPKPLDRNDGTFLMRYRMYETVDEGLKIEVLYGDEHVAQSPYILKGPVYHEYCECPEDPQAWQKTLSCPTKEPQIAKDFASFPSINLQQMLKEVPKRFGDERGAIVHYTILNNHVYRRSLGKYTDFKMFSDEILLSLTRKVLLPDLEFYVNLGDWPLEHRKVNGTPSPIPIISWCGSLDSRDVVLPTYDITHSMLEAMRGVTNDLLSIQGNTGPSWINKTERAFFRGRDSREERLQLVQLSKENPQLLDAGITGYFFFQEKEKELGKAKLMGFFDFFKYKYQVNVDGTVAAYRYPYLMLGDSLVLKQDSPYYEHFYMALEPWKHYVPIKRNLSDLLEKVKWAKENDEEAKKIAKEGQLMARDLLQPHRLYCYYYQVLQKYAERQSSKPEVRDGMELVPQPEDSTAICQCHRKKPSREEL

SEQ ID NO: 7410 - protein, 451 aa, Homo Sapiens
MVELFIFLFLLGETPFKVVVKSLSPKELVRIHVPKPLDRNDGTFLMRYRMYETVDEGLKIEVLYGDEHVAQSPYILKGPVYHEYCECPEDPQAWQKTLSCPTKEPQIAKDFASFPSINLQQMLKEVPKRFGDERGAIVHYTILNNHVYRRSLGKYTDFKMFSDEILLSLTRKVLLPDLEFYVNLGDWPLEHRKVNGTPSPIPIISWCGSLDSRDVVLPTYDITHSMLEAMRGVTNDLLSIQGNTGPSWINKTERAFFRGRDSREERLQLVQLSKENPQLLDAGITGYFFFQEKEKELGKAKLMGFFDFFKYKYQVNVDGTVAAYRYPYLMLGDSLVLKQDSPYYEHFYMALEPWKHYVPIKRNLSDLLEKVKWAKENDEEAKKIAKEGQLMARDLLQPHRLYCYYYQVLQKYAERQSSKPEVRDGMELVPQPEDSTAICQCHRKKPSREEL

SEQ ID NO: 7411 - protein, 409 aa, Homo Sapiens
MVELFIFLFLLGETPFKVVVKSLSPKELVRIHVPKPLDRNDGTFLMRYRMYETVDEGLKIEVLYGDEHVAQSPYILKGPVYHEYCECPEDPQAWQKTLSCPTKEPQIAKDFASFPSINLQQMLKEVPKRFGDERGAIVHYTILNNHVYRRSLGKYTDFKMFSDEILLSLTRKVLLPDLEFYVNLGDWPLEHRKVNGTPSPIPIISWCGSLDSRDVVLPTYDITHSMLEAMRGVTNDLLSIQGNTGPSWINKTERAFFRGRDSREERLQLVQLSKENPQLLDAGITGYFFFQEKEKELGKAKLMGFFDFFKYKYQVNVDGTVAAYRYPYLMLGDSLVLKQDSPYYEHFYMALEPWKHYVPIKRNLSDLLEKVKWAKSFTLSPRLECSGTISTHCNLCLPGSRNFVPQPPE

SEQ ID NO: 7412 - protein, 160 aa, Homo Sapiens
  misc_feature (1)..(1): Xaa can be any naturally occurring amino acid
XEAMRGVTNDLLSIQGNTGPSWINKTERAFFRGRDSREERLQLVQLSKENPQLLDAGITGYFFFQEKEKELGKAKLMGFFDFFKENDEEAKKIAKEGQLMARDLLQPHRLYCYYYQVLQKYAERQSSKPEVRDGMELVPQPEDSTAICQCHRKKPSREEL

SEQ ID NO: 7413 - protein, 302 aa, Homo Sapiens [sequence omitted]

SEQ ID NO: 7414 - protein, 876 aa, Homo Sapiens
MLSGKKAAAAAAAAAAAATGTEAGPGTAGGSENGSEVAAQPAGLSGPAEVGPGAVGERTPRKKEPPRASPPGGLAEPPGSAGPQAGPTVVPGSATPMETGIAETPEGRRTSRRKRAKVEYREMDESLANLSEDEYYSEEERNAKAEKEKKLPPPPPQAPPEEENESEPEEPSGQAGGLQDDSSGGYGDGQASGVEGAAFQSRLPHDRMTSQEAACFPDIISGPQQTQKVFLFIRNRTLQLWLDNPKIQLTFEATLQQLEAPYNSDTVLVHRVHSYLERHGLINFGIYKRIKPLPTKKTGKVIIIGSGVSGLAAARQLQSFGMDVTLLEARDRVGGRVATFRKGNYVADLGAMVVTGLGGNPMAVVSKQVNMELAKIKQKCPLYEANGQADTVKVPKEKDEMVEQEFNRLLEATSYLSHQLDFNVLNNKPVSLGQALEVVIQLQEKHVKDEQIEHWKKIVKTQEELKELLNKMVNLKEKIKELHQQYKEASEVKPPRDITAEFLVKSKHRDLTALCKEYDELAETQGKLEEKLQELEANPPSDVYLSSRDRQILDWHFANLEFANATPLSTLSLKHWDQDDDFEFTGSHLTVRNGYSCVPVALAEGLDIKLNTAVRQVRYTASGCEVIAVNTRSTSQTFIYKCDAVLCTLPLGVLKQQPPAVQFVPPLPEWKTSAVQRMGFGNLNKVVLCFDRVFWDPSVNLFGHVGSTTASRGELFLFWNLYKAPILLALVAGEAAGIMENISDDVIVGRCLAILKGIFGSSAVPQPKETVVSRWRADPWARGSYSYVAAGSSGNDYDLMAQPITPGPSIPGAPQPIPRLFFAGEHTIRNYPATVHGALLSGLREAGRIADQFLGAMYTLPRQATPGVPAQQSPSM

SEQ ID NO: 7415 - protein, 852 aa, Homo Sapiens
MLSGKKAAAAAAAAAAAATGTEAGPGTAGGSENGSEVAAQPAGLSGPAEVGPGAVGERTPRKKEPPRASPPGGLAEPPGSAGPQAGPTVVPGSATPMETGIAETPEGRRTSRRKRAKVEYREMDESLANLSEDEYYSEEERNAKAEKEKKLPPPPPQAPPEEENESEPEEPSGVEGAAFQSRLPHDRMTSQEAACFPDIISGPQQTQKVFLFIRNRTLQLWLDNPKIQLTFEATLQQLEAPYNSDTVLVHRVHSYLERHGLINFGIYKRIKPLPTKKTGKVIIIGSGVSGLAAARQLQSFGMDVTLLEARDRVGGRVATFRKGNYVADLGAMVVTGLGGNPMAVVSKQVNMELAKIKQKCPLYEANGQAVPKEKDEMVEQEFNRLLEATSYLSHQLDFNVLNNKPVSLGQALEVVIQLQEKHVKDEQIEHWKKIVKTQEELKELLNKMVNLKEKIKELHQQYKEASEVKPPRDITAEFLVKSKHRDLTALCKEYDELAETQGKLEEKLQELEANPPSDVYLSSRDRQILDWHFANLEFANATPLSTLSLKHWDQDDDFEFTGSHLTVRNGYSCVPVALAEGLDIKLNTAVRQVRYTASGCEVIAVNTRSTSQTFIYKCDAVLCTLPLGVLKQQPPAVQFVPPLPEWKTSAVQRMGFGNLNKVVLCFDRVFWDPSVNLFGHVGSTTASRGELFLFWNLYKAPILLALVAGEAAGIMENISDDVIVGRCLAILKGIFGSSAVPQPKETVVSRWRADPWARGSYSYVAAGSSGNDYDLMAQPITPGPSIPGAPQPIPRLFFAGEHTIRNYPATVHGALLSGLREAGRIADQFLGAMYTLPRQATPGVPAQQSPSM

SEQ ID NO: 7416 - protein, 858 aa, Homo Sapiens
MLSGKKAAAAAAAAAAAATGTEAGPGTAGGSENGSEVAAQPAGLSGPAEVGPGAVGERTPRKKEPPRASPPGGLAEPPGSAGPQAGPTVVPGSATPMETGIAETPEGRRTSRRKRAKVEYREMDESLANLSEDEYYSEEERNAKAEKEKKLPPPPPQAPPEEENESEPEEPSGVEGAAFQSRLPHDRMTSQEAACFPDIISGPQQTQKVFLFIRNRTLQLWLDNPKIQLTFEATLQQLEAPYNSDTVLVHRVHSYLERHGLINFGIYKRIKPLPTKKTGKVIIIGSGVSGLAAARQLQSFGMDVTLLEARDRVGGRVATFRKGNYVADLGAMVVTGLGGNPMAVVSKQVNMELAKIKQKCPLYEANGQAVPKEKDEMVEQEFNRLLEATSYLSHQLDFNVLNNKPVSLGQALEVVIQLQEKHVKDEQIEHWKKIVKTQEELKELLNKMVNLKEKIKELHQQYKEASEVKPPRDITAEFLVKSKHRDLTALCKEYDELAETQGKLEEKLQELEANPPSPLFFCSDVYLSSRDRQILDWHFANLEFANATPLSTLSLKHWDQDDDFEFTGSHLTVRNGYSCVPVALAEGLDIKLNTAVRQVRYTASGCEVIAVNTRSTSQTFIYKCDAVLCTLPLGVLKQQPPAVQFVPPLPEWKTSAVQRMGFGNLNKVVLCFDRVFWDPSVNLFGHVGSTTASRGELFLFWNLYKAPILLALVAGEAAGIMENISDDVIVGRCLAILKGIFGSSAVPQPKETVVSRWRADPWARGSYSYVAAGSSGNDYDLMAQPITPGPSIPGAPQPIPRLFFAGEHTIRNYPATVHGALLSGLREAGRIADQFLGAMYTLPRQATPGVPAQQSPSM

SEQ ID NO: 7417 - protein, 274 aa, Homo Sapiens
IFVEFDGCNWKQHSWVKVHAEEVIVLLLEGSLVWAPREDPVLLQGIRVSIAQWPALTFTPLVDKLGLGSVVPVEYLLDRELRFLSDANGLHLFQMGTDSQNQILLEHAALRETVNALISDQKLQEIFSRGPYSVQGHRVKIYQPEGEEGWLYGVVSHQDSITRLMEVSVTESGEIKSVDPRLIHVMLMDNSAPQSEGGTLKAVKSSKGKKKRESIEGKDGRRRKSASDSGCDPASKKLKGDRGEVDSNGSDGDKPQHSLCHLHQRKRQDSGGAG

SEQ ID NO: 7418 - protein, 1761 aa, Homo Sapiens
MADAAASPVGKRLLLLFADTAASASASAPAAAAASGDPGPALRTRAWRAGTVRAMSGAVPQDLAIFVEFDGCNWKQHSWVKVHAEEVIVLLLEGSLVWAPREDPVLLQGIRVSIAQWPALTFTPLVDKLGLGSVVPVEYLLDRELRFLSDANGLHLFQMGTDSQNQILLEHAALRETVNALISDQKLQEIFSRGPYSVQGHRVKIYQPEGEEGWLYGVVSHQDSITRLMEVSVTESGEIKSVDPRLIHVMLMDNSAPQSEGGTLKAVKSSKGKKKRESIEGKDGRRRKSASDSGCDPASKKLKGDRGEVDSNGSDGGEASRGPWKGGNASGEPGLDQRAKQPPSTFVPQINRNIRFATYTKENGRTLVVQDEPVGGDTPASFTPYSTATGQTPLAPEVGGAENKEAGKTLEQVGQGIVASAAVVTTASSTPNTVRISDTGLAAGTVPEKQKGSRSQASGENSRNSILASSGFGAPLPSSSQPLTFGSGRSQSNGVLATENKPLGFSFGCSSAQEAQKDTDLSKNLFFQCMSQTLPTSNYFTTVSESLADDSSSRDSFKQSLESLSSGLCKGRSVLGTDTKPGSKAGSSVDRKVPAESMPTLTPAFPRSLLNARTPENHENLFLQPPKLSREEPSNPFLAFVEKVEHSPFSSFASQASGSSSSATTVTSKVAPSWPESHSSADSASLAKKKPLFITTDSSKLVSGVLGSALTSGGPSLSAMGNGRSSSPTSSLTQPIEMPTLSSSPTEERPTVGPGQQDNPLLKTFSNVFGRHSGGFLSSPADFSQENKAPFEAVKRFSLDERSLACRQDSDSSTNSDLSDLSDSEEQLQAKTGLKGIPEHLMGKLGPNGERSAELLLGKSKGKQAPKGRPRTAPLKVGQSVLKDVSKVKKLKQSGEPFLQDGSCINVAPHLHKCRECRLERYRKFKEQEQDDSTVACRFFHFRRLIFTRKGVLRVEGFLSPQQSDPDAMNLWIPSSSLAEGIDLETSKYILANVGDQFCQLVMSEKEAMMMVEPHQKVAWKRAVRGVREMCDVCETTLFNIHWVCRKCGFGVCLDCYRLRKSRPRSETEEMGDEEVFSWLKCAKGQSHEPENLMPTQIIPGTALYNIGDMVHAARGKWGIKANCPCISRQNKSVLRPAVTNGMSQLPSINPSASSGNETTFSGGGGPAPVTTPEPDHVPKADSTDIRSEEPLKTDSSASNSNSELKAIRPPCPDTAPPSSALHWLADLATQKAKEETKEAGSLRSVLNKESHSPFGLDSFNSTAKVSPLTPKLFNSLLLGPTASNNKTEGSSLRDLLHSGPGKLPQTPLDTGIPFPPVFSTSSAGVKSKASLPNFLDHIIASVVENKKTSDASKRACNLTDTQKEVKEMVMGLNVLDPHTSHSWLCDGRLLCLHDPSNKNNWKIFRECWKQGQPVLVSGVHKKLKSELWKPEAFSQEFGDQDVDLVNCRNCAIISDVKVRDFWDGFEIICKRLRSEDGQPMVLKLKDWPPGEDFRDMMPTRFEDLMENLPLPEYTKRDGRLNLASRLPSYFVRPDLGPKMYNAYGLITAEDRRVGTTNLHLDVSDAVNVMVYVGIPIGEGAHDEEVLKTIDEGDADEVTKQRIHDGKEKPGALWHIYAAKDAEKIRELLRKVGEEQGQENPPDHDPIHDQSWYLDQTLRKRLYEEYGVQGWAIVQFLGDAVFIPAGAPHQVHNLYSCIKVAEDFVSPEHVKHCFRLTQEFRHLSNTHTNHEDKLQVKNIIYHAVKDAVGTLKAHESKLARS

SEQ ID NO: 7419 - protein, 759 aa, Homo Sapiens
MSEKEAMMMVEPHQKVAWKRAVRGVREMCDVCETTLFNIHWVCRKCGFGVCLDCYRLRKSRPRSETEEMGDEEVFSWLKCAKGQSHEPENLMPTQIIPGTALYNIGDMVHAARGKWGIKANCPCISRQNKSVLRPAVTNGMSQLPSINPSASSGNETTFSGGGGPAPVTTPEPDHVPKADSTDIRSEEPLKTDSSASNSNSELKAIRPPCPDTAPPSSALHWLADLATQKAKEETKEAGSLRSVLNKESHSPFGLDSFNSTAKVSPLTPKLFNSLLLGPTASNNKTEGSSLRDLLHSGPGKLPQTPLDTGIPFPPVFSTSSAGVKSKASLPNFLDHIIASVVENKKTSDASKRACNLTDTQKEVKEMVMGLNVLDPHTSHSWLCDGRLLCLHDPSNKNNWKIFRECWKQGQPVLVSGVHKKLKSELWKPEAFSQEFGDQDVDLVNCRNCAIISDVKVRDFWDGFEIICKRLRSEDGQPMVLKLKDWPPGEDFRDMMPTRFEDLMENLPLPEYTKRDGRLNLASRLPSYFVRPDLGPKMYNAYGLITAEDRRVGTTNLHLDVSDAVNVMVYVGIPIGEGAHDEEVLKTIDEGDADEVTKQRIHDGKEKPGALWHIYAAKDAEKIRELLRKVGEEQGQENPPDHDPIHDQSWYLDQTLRKRLYEEYGVQGWAIVQFLGDAVFIPAGAPHQVHNLYSCIKVAEDFVSPEHVKHCFRLTQEFRHLSNTHTNHEDKLQVKNIIYHAVKDAVGTLKAHESKLARS

SEQ ID NO: 7420 - protein, 20 aa, Homo Sapiens
VPEKQKGSRSQASGELASQC

SEQ ID NO: 7421 - protein, 1384 aa, Homo Sapiens
MAAGKASGESEEASPSLTAEEREALGGLDSRLFGFVRFHEDGARTKALLGKAVRCYESLILKAEGKVESDFFCQLGHFNLLLEDYPKALSAYQRYYSLQSDYWKNAAFLYGLGLVYFHYNAFQWAIKAFQEVLYVDPSFCRAKEIHLRLGLMFKVNTDYESSLKHFQLALVDCNPCTLSNAEIQFHIAHLYETQRKYHSAKEAYEQLLQTENLSAQVKATVLQQLGWMHHTVDLLGDKATKESYAIQYLQKSLEADPNSGQSWYFLGRCYSSIGKVQDAFISYRQSIDKSEASADTWCSIGVLYQQQNQPMDALQAYICAVQLDHGHAAAWMDLGTLYESCNQPQDAIKCYLNATRSKSCSNTSALAARIKYLQACKPHHPNTEPVLGLSQTPISQQSLPLHMIPSSQVDDLSSPAKRKRTSSPTKNTSDNWSGGHAVSHPPVQQQAHSWCLTPQKLQHLEQLRANRNNLNPAQKLMLEQLESQFVLMQQHQMRPTGVAQVRSTGIPNGPTADSSLPTNSVSGQQPQLALTRVPSVSQPGVRPACPGQPLANGPFSAGHVPCSTSRTLGSTDTILIGNNHITGSGSNGNVPYLQRNALTLPHNRTNLTSSAEEPWKNQLSNSTQGLHKGQSSHSAGPNGERPLSSTGPSQHLQAAGSGIQNQNGHPTLPSNSVTQGAALNHLSSHTATSGGQQGITLTKESKPSGNILTVPETSRHTGETPNSTASVEGLPNHVHQMTADAVCSPSHGDSKSPGLLSSDNPQLSALLMGKANNNVGTGTCDKVNNIHPAVHTKTDNSVASSPSSAISTATPSPKSTEQTTTNSVTSLNSPHSGLHTINGEGMEESQSPMKTDLLLVNHKPSPQIIPSMSVSIYPSSAEVLKACRNLGKNGLSNSSILLDKCPPPRPPSSPYPPLPKDKLNPPTPSIYLENKRDAFFPPLHQFCTNPNNPVTVIRGLAGALKLDLGLFSTKTLVEANNEHMVEVRTQLLQPADENWDPTGTKKIWHCESNRSHTTIAKYAQYQASSFQESLREENEKRSHHKDHSDSESTSSDNSGRRRKGPFKTIKFGTNIDLSDDKKWKLQLHELTKLPAFVRVVSAGNLLSHVGHTILGMNTVQLYMKVPGSRTPGHQENNNFCSVNINIGPGDCEWFVVPEGYWGVLNDFCEKNNLNFLMGSWWPNLEDLYEANVPVYRFIQRPGDLVWINAGTVHWVQAIGWCNNIAWNVGPLTACQYKLAVERYEWNKLQSVKSIVPMVHLSWNMARNIKVSDPKLFEMIKYCLLRTLKQCQTLREALIAAGKEIIWHGRTKEEPAHYCSICEVEVFDLLFVTNESNSRKTYIVHCQDCARKTSGNLENFVVLEQYKMEDLMQVYDQFTLAPPLPSASS

SEQ ID NO: 7422 - protein, 1269 aa, Homo Sapiens
MAAGKASGESEEASPSLTAEEREALGGLDSRLFGFVRFHEDGARTKALLGKAVRCYESLILKAEGKVESDFFCQLGHFNLLLEDYPKALSAYQRYYSLQSDYWKNAAFLYGLGLVYFHYNAFQWAIKAFQEVLYVDPSFCRAKEIHLRLGLMFKVNTDYESSLKHFQLALVDCNPCTLSNAEIQFHIAHLYETQRKYHSAKEAYEQLLQTENLSAQVKATVLQQLGWMHHTVDLLGDKATKESYAIQYLQKSLEADPNSGQSWYFLGRCYSSIGKVQDAFISYRQSIDKSEASADTWCSIGVLYQQQNQPMDALQAYICAVQLDHGHAAAWMDLGTLYESCNQPQDAIKCYLNATRSKSCSNTSALAARIKYLQACKPHHPNTEPVLGLSQTPISQQSLPLHMIPSSQVDDLSSPAKRKRTSSPTKNTSDNWSGGHAVSHPPVQQQAHSWCLTPQKLQMRPTGVAQVRSTGIPNGPTADSSLPTNSVSGQQPQLALTRVPSVSQPGVRPACPGQPLANGPFSAGHVPCSTSRTLGSTDTILIGNNHITGSGSNGNVPYLQRNALTLPHNRTNLTSSAEEPWKNQLSNSTQGLHKGQSSHSAGPNGERPLSSTGPSQHLQAAGSGIQNQNGHPTLPSNSVTQGAALNHLSSHTATSGGQQGITLTKESKPSGNILTVPETSRHTGETPNSTASVEGLPNHVHQMTADAVCSPSHGDSKSPGLLSSDNPQLSALLMGKANNNVGTGTCDKVNNIHPAVHTKTDNSVASSPSSAISTATPSPKSTEQTTTNSVTSLNSPHSGLHTINGEGMEESQSPMKTDLLLVNHKPSPQIIPSMSVSIYPSSAEVLKACRNLGKNGLSNSSILLDKCPPPRPPSSPYPPLPKDKLNPPTPSIYLENKRDAFFPPLHQFCTNPNNPVTVIRGLAGALKLDLGLFSTKTLVEANNEHMVEVRTQLLQPADENWDPTGTKKIWHCESNRSHTTIAKYAQYQASSFQESLREENEKRSHHKDHSDSESTSSDNSGRRRKGPFKTIKFGTNIDLSDDKKWKLQLHELTKLPAFVRVVSAGNLLSHVGHTILGMNTVQLYMKVPGSRTPGHQENNNFCSVNINIGPGDCEWFVVPEGYWGVLNDFCEKNNLNFLMGSWWPNLEDLYEANVPVYRFIQRPGDLVWINAGTVHWVQAIGWCNNIAWNVGPLTACQYKLAVERYEWNKLQSVKSIVPMVHLSWNMARNIKVLSSKNSEAMSDIEGSSHCCRKRDYMAWADKRRTSSLL

SEQ ID NO: 7423 - protein, 1332 aa, Homo Sapiens
MAAGKASGESEEASPSLTAEEREALGGLDSRLFGFVRFHEDGARTKALLGKAVRCYESLILKAEGKVESDFFCQLGHFNLLLEDYPKALSAYQRYYSLQSDYWKNAAFLYGLGLVYFHYNAFQWAIKAFQEVLYVDPSFCRAKEIHLRLGLMFKVNTDYESSLKHFQLALVDCNPCTLSNAEIQFHIAHLYETQRKYHSAKEAYEQLLQTENLSAQVKATVLQQLGWMHHTVDLLGDKATKESYAIQYLQKSLEADPNSGQSWYFLGRCYSSIGKVQDAFISYRQSIDKSEASADTWCSIGVLYQQQNQPMDALQAYICAVQLDHGHAAAWMDLGTLYESCNQPQDAIKCYLNATRSKSCSNTSALAARIKYLQNTSDNWSGGHAVSHPPVQQQAHSWCLTPQKLQHLEQLRANRNNLNPAQKLMLEQLESQFVLMQQHQMRPTGVAQVRSTGIPNGPTADSSLPTNSVSGQQPQLALTRVPSVSQPGVRPACPGQPLANGPFSAGHVPCSTSRTLGSTDTILIGNNHITGSGSNGNVPYLQRNALTLPHNRTNLTSSAEEPWKNQLSNSTQGLHKGQSSHSAGPNGERPLSSTGPSQHLQAAGSGIQNQNGHPTLPSNSVTQGAALNHLSSHTATSGGQQGITLTKESKPSGNILTVPETSRHTGETPNSTASVEGLPNHVHQMTADAVCSPSHGDSKSPGLLSSDNPQLSALLMGKANNNVGTGTCDKVNNIHPAVHTKTDNSVASSPSSAISTATPSPKSTEQTTTNSVTSLNSPHSGLHTINGEGMEESQSPMKTDLLLVNHKPSPQIIPSMSVSIYPSSAEVLKACRNLGKNGLSNSSILLDKCPPPRPPSSPYPPLPKDKLNPPTPSIYLENKRDAFFPPLHQFCTNPNNPVTVIRGLAGALKLDLGLFSTKTLVEANNEHMVEVRTQLLQPADENWDPTGTKKIWHCESNRSHTTIAKYAQYQASSFQESLREENEKRSHHKDHSDSESTSSDNSGRRRKGPFKTIKFGTNIDLSDDKKWKLQLHELTKLPAFVRVVSAGNLLSHVGHTILGMNTVQLYMKVPGSRTPGHQENNNFCSVNINIGPGDCEWFVVPEGYWGVLNDFCEKNNLNFLMGSWWPNLEDLYEANVPVYRFIQRPGDLVWINAGTVHWVQAIGWCNNIAWNVGPLTACQYKLAVERYEWNKLQSVKSIVPMVHLSWNMARNIKVSDPKLFEMIKYCLLRTLKQCQTLREALIAAGKEIIWHGRTKEEPAHYCSICEVEVFDLLFVTNESNSRKTYIVHCQDCARKTSGNLENFVVLEQYKMEDLMQVYDQFTLAPPLPSASS

SEQ ID NO: 7424 - protein, 1429 aa, Homo Sapiens
MAAGKASGESEEASPSLTAEEREALGGLDSRLFGFVRFHEDGARTKALLGKAVRCYESLILKAEGKVESDFFCQLGHFNLLLEDYPKALSAYQRYYSLQSDYWKNAAFLYGLGLVYFHYNAFQWAIKAFQEVLYVDPSFCRAKEIHLRLGLMFKVNTDYESSLKHFQLALVDCNPCTLSNAEIQFHIAHLYETQRKYHSAKEAYEQLLQTENLSAQVKATVLQQLGWMHHTVDLLGDKATKESYAIQYLQKSLEADPNSGQSWYFLGRCYSSIGKVQDAFISYRQSIDKSEASADTWCSIGVLYQQQNQPMDALQAYICAVQLDHGHAAAWMDLGTLYESCNQPQDAIKCYLNATRSKSCSNTSALAARIKYLQAQLCNLPQGSLQNKTKLLPSIEEAWSLPIPAELTSRQGAMNTAQQACKPHHPNTEPVLGLSQTPISQQSLPLHMIPSSQVDDLSSPAKRKRTSSPTKNTSDNWSGGHAVSHPPVQQQAHSWCLTPQKLQHLEQLRANRNNLNPAQKLMLEQLESQFVLMQQHQMRPTGVAQVRSTGIPNGPTADSSLPTNSVSGQQPQLALTRVPSVSQPGVRPACPGQPLANGPFSAGHVPCSTSRTLGSTDTILIGNNHITGSGSNGNVPYLQRNALTLPHNRTNLTSSAEEPWKNQLSNSTQGLHKGQSSHSAGPNGERPLSSTGPSQHLQAAGSGIQNQNGHPTLPSNSVTQGAALNHLSSHTATSGGQQGITLTKESKPSGNILTVPETSRHTGETPNSTASVEGLPNHVHQMTADAVCSPSHGDSKSPGLLSSDNPQLSALLMGKANNNVGTGTCDKVNNIHPAVHTKTDNSVASSPSSAISTATPSPKSTEQTTTNSVTSLNSPHSGLHTINGEGMEESQSPMKTDLLLVNHKPSPQIIPSMSVSIYPSSAEVLKACRNLGKNGLSNSSILLDKCPPPRPPSSPYPPLPKDKLNPPTPSIYLENKRDAFFPPLHQFCTNPNNPVTVIRGLAGALKLDLGLFSTKTLVEANNEHMVEVRTQLLQPADENWDPTGTKKIWHCESNRSHTTIAKYAQYQASSFQESLREENEKRSHHKDHSDSESTSSDNSGRRRKGPFKTIKFGTNIDLSDDKKWKLQLHELTKLPAFVRVVSAGNLLSHVGHTILGMNTVQLYMKVPGSRTPGHQENNNFCSVNINIGPGDCEWFVVPEGYWGVLNDFCEKNNLNFLMGSWWPNLEDLYEANVPVYRFIQRPGDLVWINAGTVHWVQAIGWCNNIAWNVGPLTACQYKLAVERYEWNKLQSVKSIVPMVHLSWNMARNIKVSDPKLFEMIKYCLLRTLKQCQTLREALIAAGKEIIWHGRTKEEPAHYCSICEVEVFDLLFVTNESNSRKTYIVHCQDCARKTSGNLENFVVLEQYKMEDLMQVYDQFTLAPPLPSASS

SEQ ID NO: 7425 - protein, 1401 aa, Homo Sapiens
MKSCGVSLATAAAAAAAFGDEEKKMAAGKASGESEEASPSLTAEEREALGGLDSRLFGFVRFHEDGARTKALLGKAVRCYESLILKAEGKVESDFFCQLGHFNLLLEDYPKALSAYQRYYSLQSDYWKNAAFLYGLGLVYFHYNAFQWAIKAFQEVLYVDPSFCRAKEIHLRLGLMFKVNTDYESSLKHFQLALVDCNPCTLSNAEIQFHIAHLYETQRKYHSAKEAYEQLLQTENLSAQVKATVLQQLGWMHHTVDLLGDKATKESYAIQYLQKSLEADPNSGQSWYFLGRCYSSIGKVQDAFISYRQSIDKSEASADTWCSIGVLYQQQNQPMDALQAYICAVQLDHGHAAAWMDLGTLYESCNQPQDAIKCYLNATRSKSCSNTSALAARIKYLQAQLCNLPQGSLQNKTKLLPSIEEAWSLPIPAELTSRQGAMNTAQQNTSDNWSGGHAVSHPPVQQQAHSWCLTPQKLQHLEQLRANRNNLNPAQKLMLEQLESQFVLMQQHQMRPTGVAQVRSTGIPNGPTADSSLPTNSVSGQQPQLALTRVPSVSQPGVRPACPGQPLANGPFSAGHVPCSTSRTLGSTDTILIGNNHITGSGSNGNVPYLQRNALTLPHNRTNLTSSAEEPWKNQLSNSTQGLHKGQSSHSAGPNGERPLSSTGPSQHLQAAGSGIQNQNGHPTLPSNSVTQGAALNHLSSHTATSGGQQGITLTKESKPSGNILTVPETSRHTGETPNSTASVEGLPNHVHQMTADAVCSPSHGDSKSPGLLSSDNPQLSALLMGKANNNVGTGTCDKVNNIHPAVHTKTDNSVASSPSSAISTATPSPKSTEQTTTNSVTSLNSPHSGLHTINGEGMEESQSPMKTDLLLVNHKPSPQIIPSMSVSIYPSSAEVLKACRNLGKNGLSNSSILLDKCPPPRPPSSPYPPLPKDKLNPPTPSIYLENKRDAFFPPLHQFCTNPNNPVTVIRGLAGALKLDLGLFSTKTLVEANNEHMVEVRTQLLQPADENWDPTGTKKIWHCESNRSHTTIAKYAQYQASSFQESLREENEKRSHHKDHSDSESTSSDNSGRRRKGPFKTIKFGTNIDLSDDKKWKLQLHELTKLPAFVRVVSAGNLLSHVGHTILGMNTVQLYMKVPGSRTPGHQENNNFCSVNINIGPGDCEWFVVPEGYWGVLNDFCEKNNLNFLMGSWWPNLEDLYEANVPVYRFIQRPGDLVWINAGTVHWVQAIGWCNNIAWNVGPLTACQYKLAVERYEWNKLQSVKSIVPMVHLSWNMARNIKVSDPKLFEMIKYCLLRTLKQCQTLREALIAAGKEIIWHGRTKEEPAHYCSICEVEVFDLLFVTNESNSRKTYIVHCQDCARKTSGNLENFVVLEQYKMEDLMQVYDQFTLAPPLPSASS

SEQ ID NO: 7426 - protein, 224 aa, Homo Sapiens
MKSCGVSLATAAAAAAAFGDEEKKMAAGKASGESEEASPSLTAEEREALGGLDSRLFGFVRFHEDGARTKALLGKAVRCYESLILKAEGKVESDFFCQLGHFNLLLEDYPKALSAYQRYYSLQSDYWKNAAFLYGLGLVYFHYNAFQWAIKAFQEVLYVDPSFCRAKEIHLRLGLMFKVNTDYESSLKHFQLALVDCNPCTLSNAEIQFHIAHLYETQVGCITL

SEQ ID NO: 7427 - protein, 161 aa, Homo Sapiens
  misc_feature (1)..(1): Xaa can be any naturally occurring amino acid
XARNIKVSDPKLFEMIKIFSLSPNFRAEKCLRDHLVQPLRSNGEPEPLRFTGEYCLLRTLKQCQTLREALIAAGKEIIWHGRTKEEPAHYCSICEVEVFDLLFVTNESNSRKTYIVHCQDCARKTSGNLENFVVLEQYKMEDLMQVYDQFTLAPPLPSASS

SEQ ID NO: 7428 - protein, 999 aa, Homo Sapiens
  misc_feature (1)..(1): Xaa can be any naturally occurring amino acid
XGTLYESCNQPQDAIKCYLNATRSKSCSNTSALAARIKYLQNTSDNWSGGHAVSHPPVQQQAHSWCLTPQKLQHLEQLRANRNNLNPAQKLMLEQLESQFVLMQQHQMRPTGVAQVRSTGIPNGPTADSSLPTNSVSGQQPQLALTRVPSVSQPGVRPACPGQPLANGPFSAGHVPCSTSRTLGSTDTILIGNNHITGSGSNGNVPYLQRNALTLPHNRTNLTSSAEEPWKNQLSNSTQGLHKGQSSHSAGPNGERPLSSTGPSQHLQAAGSGIQNQNGHPTLPSNSVTQGAALNHLSSHTATSGGQQGITLTKESKPSGNILTVPETSRHTGETPNSTASVEGLPNHVHQMTADAVCSPSHGDSKSPGLLSSDNPQLSALLMGKANNNVGTGTCDKVNNIHPAVHTKTDNSVASSPSSAISTATPSPKSTEQTTTNSVTSLNSPHSGLHTINGEGMEESQSPMKTDLLLVNHKPSPQIIPSMSVSIYPSSAEVLKACRNLGKNGLSNSSILLDKCPPPRPPSSPYPPLPKDKLNPPTPSIYLENKRDAFFPPLHQFCTNPNNPVTVIRGLAGALKLDLGLFSTKTLVEANNEHMVEVRTQLLQPADENWDPTGTKKIWHCESNRSHTTIAKYAQYQASSFQESLREENEKRSHHKDHSDSESTSSDNSGRRRKGPFKTIKFGTNIDLSDDKKWKLQLHELTKLPAFVRVVSAGNLLSHVGHTILGMNTVQLYMKVPGSRTPGHQENNNFCSVNINIGPGDCEWFVVPEGYWGVLNDFCEKNNLNFLMGSWWPNLEDLYEANVPVYRFIQRPGDLVWINAGTVHWVQAIGWCNNIAWNVGPLTACQYKLAVERYEWNKLQSVKSIVPMVHLSWNMARNIKVSDPKLFEMIKYCLLRTLKQCQTLREALIAAGKEIIWHGRTKEEPAHYCSICEVEVFDLLFVTNESNSRKTYIVHCQDCARKTSGNLENFVVLEQYKMEDLMQVYDQFTLAPPLPSASS

SEQ ID NO: 7429 - protein, 224 aa, Homo Sapiens
  misc_feature (1)..(1): Xaa can be any naturally occurring amino acid
XLQAYICAVQLDHGHAAAWMDLGTLYESCNQPQDAIKCYLNATRSKSCSNTSALAARIKYLQAQLCNLPQGSLQNKTKLLPSIEEAWSLPIPAELTSRQGAMNTAQQNTSDNWSGGHAVSHPPVQQQAHSWCLTPQKLQMRPTGVAQVRSTGIPNGPTADSSLPTNSVSGQQPQLALTRVPSVSQPGVRPACPGQPLANGPFSAGHVPCSTSRTLGSTDTILIG

SEQ ID NO: 7430 - protein, 1044 aa, Homo Sapiens
  misc_feature (1)..(1): Xaa can be any naturally occurring amino acid
XNKTKLLPSIEEAWSLPIPAELTSRQGAMNTAQQACKPHHPNTEPVLGLSQTPISQQSLPLHMIPSSQVDDLSSPAKRKRTSSPTKNTSDNWSGGHAVSHPPVQQQAHSWCLTPQKLQHLEQLRANRNNLNPAQKLMLEQLESQFVLMQQHQMRPTGVAQVRSTGIPNGPTADSSLPTNSVSGQQPQLALTRVPSVSQPGVRPACPGQPLANGPFSAGHVPCSTSRTLGSTDTILIGNNHITGSGSNGNVPYLQRNALTLPHNRTNLTSSAEEPWKNQLSNSTQGLHKGQSSHSAGPNGERPLSSTGPSQHLQAAGSGIQNQNGHPTLPSNSVTQGAALNHLSSHTATSGGQQGITLTKESKPSGNILTVPETSRHTGETPNSTASVEGLPNHVHQMTADAVCSPSHGDSKSPGLLSSDNPQLSALLMGKANNNVGTGTCDKVNNIHPAVHTKTDNSVASSPSSAISTATPSPKSTEQTTTNSVTSLNSPHSGLHTINGEGMEESQSPMKTDLLLVNHKPSPQIIPSMSVSIYPSSAEVLKACRNLGKNGLSNSSILLDKCPPPRPPSSPYPPLPKDKLNPPTPSIYLENKRDAFFPPLHQFCTNPNNPVTVIRGLAGALKLDLGLFSTKTLVEANNEHMVEVRTQLLQPADENWDPTGTKKIWHCESNRSHTTIAKYAQYQASSFQESLREENEKRSHHKDHSDSESTSSDNSGRRRKGPFKTIKFGTNIDLSDDKKWKLQLHELTKLPAFVRVVSAGNLLSHVGHTILGMNTVQLYMKVPGSRTPGHQENNNFCSVNINIGPGDCEWFVVPEGYWGVLNDFCEKNNLNFLMGSWWPNLEDLYEANVPVYRFIQRPGDLVWINAGTVHWVQAIGWCNNIAWNVGPLTACQYKLAVERYEWNKLQSVKSIVPMVHLSWNMARNIKVSDPKLFEMIKYCLLRTLKQCQTLREALIAAGKEIIWHGRTKEEPAHYCSICEVEVFDLLFVTNESNSRKTYIVHCQDCARKTSGNLENFVVLEQYKMEDLMQVYDQFTLAPPLPSASS

SEQ ID NO: 7431 - protein, 941 aa, Homo Sapiens
MAGAAAAVAAGAAAGAAAAAVSVAAPGRASAPPPPPPVYCVCRQPYDVNRFMIECDICKDWFHGSCVGVEEHHAVDIDLYHCPNCAVLHGSSLMKKRRNWHRHDYTEIDDGSKPVQAGTRTFIKELRSRVFPSADEIIIKMHGSQLTQRYLEKHGFDVPIMVPKLDDLGLRLPSPTFSVMDVERYVGGDKVIDVIDVARQADSKMTLHNYVKYFMNPNRPKVLNVISLEFSDTKMSELVEVPDIAKKLSWVENYWPDDSVFPKPFVQKYCLMGVQDSYTDFHIDFGGTSVWYHVLWGEKIFYLIKPTDENLARYESWSSSVTQSEVFFGDKVDKCYKCVVKQGHTLFVPTGWIHAVLTSQDCMAFGGNFLHNLNIGMQLRCYEMEKRLKTPDLFKFPFFEAICWFVAKNLLETLKELREDGFQPQTYLVQGVKALHTALKLWMKKELVSEHAFEIPDNVRPGHLIKELSKVIRAIEEENGKPVKSQGIPIVCPVSRSSNEATSPYHSRRKMRKLRDHNVRTPSNLDILELHTREVLKRLEMCPWEEDILSSKLNGKFNKHLQPSSTVPEWRAKDNDLRLLLTNGRIIKDERQPFADQSLYTADSENEEDKRRTKKAKMKIEESSGVEGVEHEESQKPLNGFFTRVKSELRSRSSGYSDISESEDSGPECTALKSIFTTEESESSGDEKKQEITSNFKEESNVMRNFLQKSQKPSRSEIPIKRECPTSTSTEEEAIQGMLSMAGLHYSTCLQRQIQSTDCSGERNSLQDPSSCHGSNHEVRQLYRYDKPVECGYHVKTEDPDLRTSSWIKQFDTSRFHPQDLSRSQKCIRKEGSSEISQRVQSRNYVDSSGSSLQNGKYMQNSNLTSGACQISNGSLSPERPVGETSFSVPLHPTKRPASNPPPISNQATKGKRPKKGMATAKQRLGKILKLNRNGHARFFV

SEQ ID NO: 7432 - protein, 404 aa, Homo Sapiens
  misc_feature (1)..(1): Xaa can be any naturally occurring amino acid
XAKNLLETLKELREDGFQPQTYLVQGVKALHTALKLWMKKELVSEHAFEIPDNVRPGHLIKELSKVIRAIEEENGKPVKSQGIPIVCPVSRSSNEATSPYHSRRKMRKLRDHNVRTPSNLDILELHTREVLKRLEMCPWEEDILSSKLNGKFNKHLQPSSTVPEWRAKDNDLRLLLTNGRIIKDERQPFADQSLYTADSENEEDKRRTKKAKMKIEESSGVEGVEHEESQKPLNGFFTRVKSELRSRSSGYSDISESEDSGPECTALKSIFTTEESESSGDEKKQEITSNFKEESNVMRNFLQKSQKPSRSEIPIKRECPTSTSTEEEAIQGMLSMAGLHYSTCLQRQIQSTDCSGERNSLQDPSSCHGSNHEVRQLYRYDKPVECETRSHLCCPDWSPTPELK

SEQ ID NO: 7433 - protein, 39 aa, Homo Sapiens
MLLLAAAFLVAFVLLLYMVSPLISPKPLALPGAHVVFFR

SEQ ID NO: 7434 - protein, 155 aa, Homo Sapiens
MLLLAAAFLVAFVLLLYMVSPLISPKPLALPGAHVVVTGGSSGIGKCIAIECYKQGAFITLVARNEDKLLQAKKEIEMHSINDKQVVLCISVDVSQDYNQVENVIKQAQEKLGPVDMLVNCAGMAVSGKFEDLERLMSINYLGSVYPSRAVITTM

SEQ ID NO: 7435 - protein, 332 aa, Homo Sapiens
MLLLAAAFLVAFVLLLYMVSPLISPKPLALPGAHVVVTGGSSGIGKCIAIECYKQGAFITLVARNEDKLLQAKKEIEMHSINDKQVVLCISVDVSQDYNQVENVIKQAQEKLGPVDMLVNCAGMAVSGKFEDLEVSTFERLMSINYLGSVYPSRAVITTMKERRVGRIVFVSSQAGQLGLFGFTAYSASKFAIRGLAEALQMEVKPYNVYITVAYPPDTDTPGFAEENRTKPLETRLISETTSVCKPEQVAKQIVKDAIQGNFNSSLGSDGYMLSALTCGMAPVTSITEGLQQVVTMGLFRTIALFYLGSFDSIVRRCMMQREKSENADKTA

SEQ ID NO: 7436 - protein, 332 aa, Homo Sapiens; identical to SEQ ID NO: 7435

SEQ ID NO: 7437 - protein, 298 aa, Homo Sapiens
MLLLAAAFLVAFVLLLYMVSPLISPKPLALPGAHVVVTGGSSGIGKCIAIECYKQGAFITLVARNEDKLLQAKKEIEMHSINDKQVVLCISVDVSQDYNQVENVIKQAQEKLGPVDMLVNCAGMAVSGKFEDLEVSTFERLMSINYLGSVYPSRAVITTMKERRVGRIVFVSSQAGQLGLFGFTAYSASKFAIRGLAEALQMEVKPYNVYITVAYPPDTDTPGFAEENRTKPLETRLISETTSVCKPEQVAKQIVKDAIVVTMGLFRTIALFYLGSFDSIVRRCMMQREKSENADKTA

SEQ ID NO: 7438 - protein, 268 aa, Homo Sapiens
MLLLAAAFLVAFVLLLYMVSPLISPKPLALPGAHVVVTGGSSGIGKCIAIECYKQGAFITLVARNEDKLLQAKKEIEMHSINDKQVVLCISVDVSQDYNQVENVIKQAQEKLGPVDMLVNCAGMAVSGKFEDLEVSTFEVKPYNVYITVAYPPDTDTPGFAEENRTKPLETRLISETTSVCKPEQVAKQIVKDAIQGNFNSSLGSDGYMLSALTCGMAPVTSITEGLQQVVTMGLFRTIALFYLGSFDSIVRRCMMQREKSENADKTA

SEQ ID NO: 7439 - protein, 39 aa, Homo Sapiens
MLLLAAAFLVAFVLLLYMVSPLISPKPLALPGAHVVWEG

SEQ ID NO: 7440 - protein, 352 aa, Homo Sapiens
MAGTICFIMWVLFITDTVWSRSVRQVYEVHDSDDWTIHDFECPMECFCPPSFPTALYCENRGLKEIPAIPSRIWYLYLQNNLIETIPEKPFENATQLRWINLNKNKITNYGIEKGALSQLKKLLFLFLEDNELEEVPSPLPRSLEQLQLARNKVSRIPQGTFSNLENLTLLDLQNNKLVDNAFQRDTFKGLKNLMQLNMAKNALRNMPPRLPANTMQLFLDNNSIEGIPENYFNVIPKVAFLRLNHNKLSDEGLPSRGFDVSSILDLQLSHNQLTKVPRISAHLQHLHLDHNKIKSVNVSVICPSPSMLPAERDSFSYGPHLRYLRLDGNEIKPPIPMALMTCFRLLQAVII

SEQ ID NO: 7441 - protein, 287 aa, Homo Sapiens
DPSPPLPWWDKSRLLFHGDWHMDIEQANLHQLATEFVFKGDLDINVRTASKYDDCCFLHLPDLCMTLDLQWLCHGNPHDHHSVTLRAPEFLPEVPLGQLHDSYRAFRSENLNLSIKMDLTRHSGTISQPRILLYSSTLRWMQNFWATWTSVTRPICRGKLFNNLKPSKKKLGQHYKQLSYTALFPQLQVHYWASFAQQRGIQIECSQGHVFTRGTQRLIPQAGTVMRRLISDWSVTQMVSDLSQVTVHLMASPTEENADHCLDPLVTKTHLLSLSSLTYQRHSNRTA

SEQ ID NO: 7442 - protein, 2235 aa, Homo Sapiens
MPLFFSALLVLLLVALSALFLGRWLVVRLATKWCQRKLQAELKIGSFRFFWIQNVSLKFQQHQQTVEIDNLWISSKLLSHDLPHYVALCFGEVRIRTDLQKVSDLSAPFSQSAGVDQKELSFSPSLLKIFCQLFSIHVDAINIMVLKVDTSESLWHIQISRSRFLLDSDGKRLICEVSLCKINSKVLKSGQLEDTCLVELSLALDLCLKVGISSRHLTAITVDVWTLHAELHEGLFQSQLLCQGPSLASKPVPCSEVTENLVEPTLPGLFLLQQLPDQVKVKMENTSVVLSMNSQKRHLTWTLKLLQFLYHRDEDQLPLRSFTANSDMAQMSTELLLEDGLLLSQSRQRIVCLNSLKASVQVTTIDLSASLVLNTCIIHYRHQEFSHWLHLLALETQGSSSPVLKQRKKRTFPQILAPIIFSTSISNVNISIQLGDTPPFALGFNSISLDYQHLRPQSIHQRGVLTVDHLCWRVGSDSHIQRAPHPPNMHVWGEALVLDSFTLQGSYNQPLGLSSTQSDTLFLDCTIRGLQVEASDTCAQCLSRILSLMGPQSGKSAVSRHSSFGESVSLLWKVDLKVEDMNLFTLSALVGASEVRLDTLTILGSAETSTVGIQGLVLALVKSVTEKMQPCCKAPDIPTPVLSLSMLSITYHSSIRSLEVQCGAGLTLLWSPPDHMYLYQHVLATLQCRDLLRATVFPETVPSLALETSGTTSELEGRAPEPLPPKRLLNLTLEVSTAKLTAFVAEDKFITLAAESVSLSRHGGSLQAYCPELAAGFDGNSIFNFKEVEVQLLPELEEMILHRNPFPALQTLRNRVWLLSFGSVSVEFPYQYDFSRTLDEAVGVQKWLKGLHQGTRAWASPSPVPLPPDLLLKVEHFSWVFLDDVFEVKLHDNYELMKDESKESAKRLQLLDAKVAALRKQHGELLPARKIEELYASLERKNIEIYIQRSRRLYGNTPMRRALLTWSLAGLELVALADASFHGPEHVVEQVQELDPGSPFPPEGLDLVIQWCRMLKCNVKSFLVRIRDYPRYLFEIRDWRLMGRLVGTEQSGQPCSRRRQILHLGLPWGNVAVERNMPPLKFYHDFHSEIFQYTVVWGPCWDPAWTLIGQCVDLLTKPSADPSPPLPWWDKSRLLFHGDWHMDIEQANLHQLATEDPYNTTENMHWEWSHLSFHWKPGQFVFKGDLDINVRTASKYDDCCFLHLPDLCMTLDLQWLCHGNPHDHHSVTLRAPEFLPEVPLGQLHDSYRAFRSENLNLSIKMDLTRHSGTISQPRILLYSSTLRWMQNFWATWTSVTRPICRGKLFNNLKPSKKKLGQHYKQLSYTALFPQLQVHYWASFAQQRGIQIECSQGHVFTRGTQRLIPQAGTVMRRLISDWSVTQMVSDLSQVTVHLMASPTEENADHCLDPLVTKTHLLSLSSLTYQRHSNRTAEEELSARDGDPTFHTHQLHLVDLRISWTTTNRDIAFGLYDGYKKAAVLKRNLSTEALKGLKIDPQMPAKKPKRGVPTSASAPPRVNTPSFSGQPDKGSSGGAYMLQKLIEETDRFVVFTEEESGMSDQLCGIAACQTDDIYNRNCLIELVNCQMVLRGAETEGCVIVSAAKAQLLQCQHHPAWYGDTLKQKTSWTCLLDGMQYFATTESSPTEQDGRQLWLEVKNIEEHRQRSLDSVQELMESGQAVGGMVTTTTDWNQPAEAQQAQQVQRIISRCNCRMYYISYSHDIDPELATQIKPPEVLENQEKEDLLKKQEGAVDTFTLIHHELEISTNPAQYAMILDIVNNLLLHVEPKRKEHSEKKQRVRFQLEISSNPEEQRSSILHLQEAVRQHVAQIRQLEKQMYSIMKSLQDDSKNENLLDLNQKLQLQLNQEKANLQLESEELNILIRCFKDFQLQRANKMELRKQQEDVSVVRRTEFYFAQARWRLTEEDGQLGIAELELQRFLYSKVNKSDDTAEHLLELGWFTMNNLLPNAVYKVVLRPQSSCQSGRQLALRLFSKVRPPVGGISVKEHFEVNVVPLTIQLTHQFFHRMMGFFFPGRSVEDDEVGDEEDKSKLVTTGIPVVKPRQLIATDDAVPLGPGKGVAQGLTRSSGVRRSFRKSPEHPVDDIDKMKERAAMNNSFIYIKIPQVPLCVSYKGEKNSVDWGDLNLVLPCLEYHNNTWTWLDFAMAVKRDSRKALVAQVIKEKLRLKSATGSEVRGKLETKSDLNMQQQEEEEKARLLIGLSVGDKNPGKKSIFGRRK

SEQ ID NO: 7443 - protein, 86 aa, Homo Sapiens
MPLFFSALLVLLLVALSALFLGRWLVVRLATKWCQRKLQAELKIGSFRFFWIQNVSLKFQQHQQTVTLCGIVLWRSAYQNGPTESF

SEQ ID NO: 7444 - protein, 2092 aa, Homo Sapiens
MVLKVDTSESLWHIQISRSRFLLDSDGKRLICEVSLCKINSKVLKSGQLEDTCLVELSLALDLCLKVGISSRHLTAITVDVWTLHAELHEGLFQSQLLCQGPSLASKPVPCSEVTENLVEPTLPGLFLLQQLPDQVKVKMENTSVVLSMNSQKRHLTWTLKLLQFLYHRDEDQLPLRSFTANSDMAQMSTELLLEDGLLLSQSRQRIVCLNSLKASVQVTTIDLSASLVLNTCIIHYRHQEFSHWLHLLALETQGSSSPVLKQRKKRTFPQILAPIIFSTSISNVNISIQLGDTPPFALGFNSISLDYQHLRPQSIHQRGVLTVDHLCWRVGSDSHIQRAPHPPNMHVWGEALVLDSFTLQGSYNQPLGLSSTQSDTLFLDCTIRGLQVEASDTCAQCLSRILSLMGPQSGKSAVSRHSSFGESVSLLWKVDLKVEDMNLFTLSALVGASEVRLDTLTILGSAETSTVGIQGLVLALVKSVTEKMQPCCKAPDIPTPVLSLSMLSITYHSSIRSLEVQCGAGLTLLWSPPDHMYLYQHVLATLQCRDLLRATVFPETVPSLALETSGTTSELEGRAPEPLPPKRLLNLTLEVSTAKLTAFVAEDKFITLAAESVSLSRHGGSLQAYCPELAAGFDGNSIFNFKEVEVQLLPELEEMILHRNPFPALQTLRNRVWLLSFGSVSVEFPYQYDFSRTLDEAVGVQKWLKGLHQGTRAWASPSPVPLPPDLLLKVEHFSWVFLDDVFEVKLHDNYELMKDESKESAKRLQLLDAKVAALRKQHGELLPARKIEELYASLERKNIEIYIQRSRRLYGNTPMRRALLTWSLAGLELVALADASFHGPEHVVEQVQELDPGSPFPPEGLDLVIQWCRMLKCNVKSFLVRIRDYPRYLFEIRDWRLMGRLVGTEQSGQPCSRRRQILHLGLPWGNVAVERNMPPLKFYHDFHSEIFQYTVVWGPCWDPAWTLIGQCVDLLTKPSADPSPPLPWWDKSRLLFHGDWHMDIEQANLHQLATEDPYNTTENMHWEWSHLSFHWKPGQFVFKGDLDINVRTASKYDDCCFLHLPDLCMTLDLQWLCHGNPHDHHSVTLRAPEFLPEVPLGQLHDSYRAFRSENLNLSIKMDLTRHSGTISQPRILLYSSTLRWMQNFWATWTSVTRPICRGKLFNNLKPSKKKLGQHYKQLSYTALFPQLQVHYWASFAQQRGIQIECSQGHVFTRGTQRLIPQAGTVMRRLISDWSVTQMVSDLSQVTVHLMASPTEENADHCLDPLVTKTHLLSLSSLTYQRHSNRTAEEELSARDGDPTFHTHQLHLVDLRISWTTTNRDIAFGLYDGYKKAAVLKRNLSTEALKGLKIDPQMPAKKPKRGVPTSASAPPRVNTPSFSGQPDKGSSGGAYMLQKLIEETDRFVVFTEEESGMSDQLCGIAACQTDDIYNRNCLIELVNCQMVLRGAETEGCVIVSAAKAQLLQCQHHPAWYGDTLKQKTSWTCLLDGMQYFATTESSPTEQDGRQLWLEVKNIEEHRQRSLDSVQELMESGQAVGGMVTTTTDWNQPAEAQQAQQVQRIISRCNCRMYYISYSHDIDPELATQIKPPEVLENQEKEDLLKKQEGAVDTFTLIHHELEISTNPAQYAMILDIVNNLLLHVEPKRKEHSEKKQRVRFQLEISSNPEEQRSSILHLQEAVRQHVAQIRQLEKQMYSIMKSLQDDSKNENLLDLNQKLQLQLNQEKANLQLESEELNILIRCFKDFQLQRANKMELRKQQEDVSVVRRTEFYFAQARWRLTEEDGQLGIAELELQRFLYSKVNKSDDTAEHLLELGWFTMNNLLPNAVYKAILRPQSSCQSGRQLALRLFSKVRPPVGGISVKEHFEVNVVPLTIQLTHQFFHRMMGFFFPGRSVEDDEVGDEEDKSKLVTTGIPVVKPRQLIATDDAVPLGPGKGVAQGLTRSSGVRRSFRKSPEHPVDDIDKMKERAAMNNSFIYIKIPQVPLCVSYKGEKNSVDWGDLNLVLPCLEYHNNTWTWLDFAMAVKRDSRKALVAQVIKEKLRLKSATGSEVRGKLETKSDLNMQQQEEEEKARLLIGLSVGDKNPGKKSIFGRRK

SEQ ID NO: 7445 - protein, 2092 aa, Homo Sapiens
MVLKVDTSESLWHIQISRSRFLLDSDGKRLICEVSLCKINSKVLKSGQLEDTCLVELSLALDLCLKVGISSRHLTAITVDVWTLHAELHEGLFQSQLLCQGPSLASKPVPCSEVTENLVEPTLPGLFLLQQLPDQVKVKMENTSVVLSMNSQKRHLTWTLKLLQFLYHRDEDQLPLRSFTANSDMAQMSTELLLEDGLLLSQSRQRIVCLNSLKASVQVTTIDLSASLVLNTCIIHYRHQEFSHWLHLLALETQGSSSPVLKQRKKRTFPQILAPIIFSTSISNVNISIQLGDTPPFALGFNSISLDYQHLRPQSIHQRGVLTVDHLCWRVGSDSHIQRAPHPPNMHVWGEALVLDSFTLQGSYNQPLGLSSTQSDTLFLDCTIRGLQVEASDTCAQCLSRILSLMGPQSGKSAVSRHSSFGESVSLLWKVDLKVEDMNLFTLSALVGASEVRLDTLTILGSAETSTVGIQGLVLALVKSVTEKMQPCCKAPDIPTPVLSLSMLSITYHSSIRSLEVQCGAGLTLLWSPPDHMYLYQHVLATLQCRDLLRATVFPETVPSLALETSGTTSELEGRAPEPLPPKRLLNLTLEVSTAKLTAFVAEDKFITLAAESVSLSRHGGSLQAYCPELAAGFDGNSIFNFKEVEVQLLPELEEMILHRNPFPALQTLRNRVWLLSFGSVSVEFPYQYDFSRTLDEAVGVQKWLKGLHQGTRAWASPSPVPLPPDLLLKVEHFSWVFLDDVFEVKLHDNYELMKDESKESAKRLQLLDAKVAALRKQHGELLPARKIEELYASLERKNIEIYIQRSRRLYGNTPMRRALLTWSLAGLELVALADASFHGPEHVVEQVQELDPGSPFPPEGLDLVIQWCRMLKCNVKSFLVRIRDYPRYLFEIRDWRLMGRLVGTEQSGQPCSRRRQILHLGLPWGNVAVERNMPPLKFYHDFHSEIFQYTVVWGPCWDPAWTLIGQCVDLLTKPSADPSPPLPWWDKSRLLFHGDWHMDIEQANLHQLATEDPYNTTENMHWEWSHLSFHWKPGQFVFKGDLDINVRTASKYDDCCFLHLPDLCMTLDLQWLCHGNPHDHHSVTLRAPEFLPEVPLGQLHDSYRAFRSENLNLSIKMDLTRHSGTISQPRILLYSSTLRWMQNFWATWTSVTRPICRGKLFNNLKPSKKKLGQHYKQLSYTALFPQLQVHYWASFAQQRGIQIECSQGHVFTRGTQRLIPQAGTVMRRLISDWSVTQMVSDLSQVTVHLMASPTEENADHCLDPLVTKTHLLSLSSLTYQRHSNRTAEEELSARDGDPTFHTHQLHLVDLRISWTTTNRDIAFGLYDGYKKAAVLKRNLSTEALKGLKIDPQMPAKKPKRGVPTSASAPPRVNTPSFSGQPDKGSSGGAYMLQKLIEETDRFVVFTEEESGMSDQLCGIAACQTDDIYNRNCLIELVNCQMVLRGAETEGCVIVSAAKAQLLQCQHHPAWYGDTLKQKTSWTCLLDGMQYFATTESSPTEQDGRQLWLEVKNIEEHRQRSLDSVQELMESGQAVGGMVTTTTDWNQPAEAQQAQQVQRIISRCNCRMYYISYSHDIDPELATQIKPPEVLENQEKEDLLKKQEGAVDTFTLIHHELEISTNPAQYAMILDIVNNLLLHVEPKRKEHSEKKQRVRFQLEISSNPEEQRSSILHLQEAVRQHVAQIRQLEKQMYSIMKSLQDDSKNENLLDLNQKLQLQLNQEKANLQLESEELNILIRCFKDFQLQRANKMELRKQQEDVSVVRRTEFYFAQARWRLTEEDGQLGIAELELQRFLYSKVNKSDDTAEHLLELGWFTMNNLLPNAVYKVVLRPQSSCQSGRQLALRLFSKVRPPVGGISVKEHFEVNVVPLTIQLTHQFFHRMMGFFFPGRSVEDDEVGDEEDKSKLVTTGIPVVKPRQLIATDDAVPLGPGKGVAQGLTRSSGVRRSFRKSPEHPVDDIDKMKERAAMNNSFIYIKIPQVPLCVSYKGEKNSVDWGDLNLVLPCLEYHNNTWTWLDFAMAVKRDSRKALVAQVIKEKLRLKSATGSEVRGKLETKSDLNMQQQEEEEKARLLIGLSVGDKNPGKKSIFGRRK

SEQ ID NO: 7446 - protein, 21 aa, Homo Sapiens
  misc_feature (1)..(1): Xaa can be any naturally occurring amino acid
XQGPSLASKPVPCSAARPGQG

SEQ ID NO: 7447 - protein, 1072 aa, Homo Sapiens
MAPPTGVLSSLLLLVTIAGCARKQCSEGRTYSNAVISPNLETTRIMRVSHTFPVVDCTAACCDLSSCDLAWWFEGRCYLVSCPHKENCEPKKMGPIRSYLTFVLRPVQRPAQLLDYGDMMLNRGSPSGIWGDSPEDIRKDLTFLGKDWGLEEMSEYSDDYRELEKDLLQPSGKQEPRGSAEYTDWGLLPGSEGAFNSSVGDSPAVPAETQQDPELHYLNESASTPAPKLPERSVLLPLPTTPSSGEVLEKEKASQLQEQSSNSSGKEVLMPSHSLPPASLELSSVTVEKSPVLTVTPGSTEHSIPTPPTSAAPSESTPSELPISPTTAPRTVKELTVSAGDNLIITLPDNEVELKAFVAPAPPVETTYNYEWNLISHPTDYQGEIKQGHKQTLNLSQLSVGLYVFKVTVSSENAFGEGFVNVTVKPARRVNLPPVAVVSPQLQELTLPLTSALIDGSQSTDDTEIVSYHWEEINGPFIEEKTSVDSPVLRLSNLDPGNYSFRLTVTDSDGATNSTTAALIVNNAVDYPPVANAGPNHTITLPQNSITLNGNQSSDDHQIVLYEWSLGPGSEGKHVVMQGVQTPYLHLSAMQEGDYTFQLKVTDSSRQQSTAVVTVIVQPENNRPPVAVAGPDKELIFPVESATLDGSSSSDDHGIVFYHWEHVRGPSAVEMENIDKAIATVTGLQVGTYHFRLTVKDQQGLSSTSTLTVAVKKENNSPPRARAGGRHVLVLPNNSITLDGSRSTDDQRIVSYLWIRDGQSPAAGDVIDGSDHSVALQLTNLVEGVYTFHLRVTDSQGASDTDTATVEVQPDPRKSGLVELTLQVGVGQLTEQRKDTLVRQLAVLLNVLDSDIKVQKIRAHSDLSTVIVFYVQSRPPFKVLKAAEVARNLHMRLSKEKADFLLFKVLRVDTAGCLLKCSGHGHCDPLTKRCICSHLWMENLIQRYIWDGESNCEWSIFYVTVLAFTLIVLTGGFTWLCICCCKRQKRTKIRKKTKYTILDNMDEQERMELRPKYGIKHRSTEHNSSLMVSESEFDSDQDTIFSREKMERGNPKVSMNGSIRNGASFSYCSKDR

SEQ ID NO: 7448 - protein, 1011 aa, Homo Sapiens
MAPPTGVLSSLLLLVTIAGCARKQCSEGRTYSNAVISPNLETTRIMRVSHTFPVVDCTAACCDLSSCDLAWWFEGRCYLVSCPHKENCEPKKMGPIRSYLTFVLRPVQRPAQLLDYGDMMLNRGSPSGIWGDSPEDIRKDLTFLGKDWGLEEMSEYSDDYRELEKDLLQPSGKQEPRGSAEYTDWGLLPGSEGAFNSSVGDSPAVPAETQQDPELHYLNESASTPAPKLPERSVLLPLPTTPSSGEVLEKEKASQLQEQSSNSSGKEVLMPSHSLPPASLELSSVTVEKSPVLTVTPGSTEHSIPTPPTSAAPSESTPSELPISPTTAPRTVKELTVSAGDNLIITLPDNEVELKAFVAPAPPVETTYNYEWNLISHPTDYQGEIKQGHKQTLNLSQLSVGLYVFKVTVSSENAFGEGFVNVTVKPARRVNLPPVAVVSPQLQELTLPLTSALIDGSQSTDDTEIVSYHWEEINGPFIEEKTSVDSPVLRLSNLDPGNYSFRLTVTDSDGATNSTTAALIVNNAVDYPPVANAGPNHTITLPQNSITLNGNQSSDDHQIVLYEWSLGPGSEGKHVVMQGVQTPYLHLSAMQEGDYTFQLKVTDSSRQQSTAVVTVIVQPENNRPPVAVAGPDKELIFPVESATLDGSSSSDDHGIVFYHWEHVRGPSAVEMENIDKAIATVTGLQVGTYHFRLTVKDQQGLSSTSTLTVAVKKENNSPPRARAGGRHVLVLPNNSITLDGSRSTDDQRIVSYLWIRDGQSPAAGDVIDGSDHSVALQLTNLVEGVYTFHLRVTDSQGASDTDTATVEVQPDPRKSGLVELTLQVGVGQLTEQRKDTLVRQLAVLLNVLDSDIKVQKIRAHSDLSTVIVFYVQSRPPFKVLKAAEVARNLHMRLSKEKADFLLFKVLRVDTAGCLLKCSGHGHCDPLTKRCICSHLWMENLIQRYIWDGESNCGIKHRSTEHNSSLMVSESEFDSDQDTIFSREKMERGNPKVSMNGSIRNGASFSYCSKDR

SEQ ID NO: 7449 - protein, 1072 aa, Homo Sapiens; identical to SEQ ID NO: 7447

SEQ ID NO: 7450 - protein, 483 aa, Homo Sapiens
MQEGDYTFQLKVTDSSRQQSTAVVTVIVQPENNRPPVAVAGPDKELIFPVESATLDGSSSSDDHGIVFYHWEHVRGPSAVEMENIDKAIATVTGLQVGTYHFRLTVKDQQGLSSTSTLTVAVKKENNSPPRARAGGRHVLVLPNNSITLDGSRSTDDQRIVSYLWIRDGQSPAAGDVIDGSDHSVALQLTNLVEGVYTFHLRVTDSQGASDTDTATVEVQPDPRKSGLVELTLQVGVGQLTEQRKDTLVRQLAVLLNVLDSDIKVQKIRAHSDLSTVIVFYVQSRPPFKVLKAAEVARNLHMRLSKEKADFLLFKVLRVDTAGCLLKCSGHGHCDPLTKRCICSHLWMENLIQRYIWDGESNCEWSIFYVTVLAFTLIVLTGGFTWLCICCCKRQKRTKIRKKTKYTILDNMDEQERMELRPKYGIKHRSTEHNSSLMVSESEFDSDQDTIFSREKMERGNPKVSMNGSIRNGASFSYCSKDR

SEQ ID NO: 7451 - protein, 1027 aa, Homo Sapiens
MRVSHTFPVVDCTAACCDLSSCDLAWWFEGRCYLVSCPHKENCEPKKMGPIRSYLTFVLRPVQRPAQLLDYGDMMLNRGSPSGIWGDSPEDIRKDLTFLGKDWGLEEMSEYSDDYRELEKDLLQPSGKQEPRGSAEYTDWGLLPGSEGAFNSSVGDSPAVPAETQQDPELHYLNESASTPAPKLPERSVLLPLPTTPSSGEVLEKEKASQLQEQSSNSSGKEVLMPSHSLPPASLELSSVTVEKSPVLTVTPGSTEHSIPTPPTSAAPSESTPSELPISPTTAPRTVKELTVSAGDNLIITLPDNEVELKAFVAPAPPVETTYNYEWNLISHPTDYQGEIKQGHKQTLNLSQLSVGLYVFKVTVSSENAFGEGFVNVTVKPARRVNLPPVAVVSPQLQELTLPLTSALIDGSQSTDDTEIVSYHWEEINGPFIEEKTSVDSPVLRLSNLDPGNYSFRLTVTDSDGATNSTTAALIVNNAVDYPPVANAGPNHTITLPQNSITLNGNQSSDDHQIVLYEWSLGPGSEGKHVVMQGVQTPYLHLSAMQEGDYTFQLKVTDSSRQQSTAVVTVIVQPENNRPPVAVAGPDKELIFPVESATLDGSSSSDDHGIVFYHWEHVRGPSAVEMENIDKAIATVTGLQVGTYHFRLTVKDQQGLSSTSTLTVAVKKENNSPPRARAGGRHVLVLPNNSITLDGSRSTDDQRIVSYLWIRDGQSPAAGDVIDGSDHSVALQLTNLVEGVYTFHLRVTDSQGASDTDTATVEVQPDPRKSGLVELTLQVGVGQLTEQRKDTLVRQLAVLLNVLDSDIKVQKIRAHSDLSTVIVFYVQSRPPFKVLKAAEVARNLHMRLSKEKADFLLFKVLRVDTAGCLLKCSGHGHCDPLTKRCICSHLWMENLIQRYIWDGESNCEWSIFYVTVLAFTLIVLTGGFTWLCICCCKRQKRTKIRKKTKYTILDNMDEQERMELRPKYGIKHRSTEHNSSLMVSESEFDSDQDTIFSREKMERGNPKVSMNGSIRNGASFSYCSKDR

SEQ ID NO: 7452 - protein, 1063 aa, Homo Sapiens
MTRLGWPSPCCARKQCSEGRTYSNAVISPNLETTRIMRVSHTFPVVDCTAACCDLSSCDLAWWFEGRCYLVSCPHKENCEPKKMGPIRSYLTFVLRPVQRPAQLLDYGDMMLNRGSPSGIWGDSPEDIRKDLTFLGKDWGLEEMSEYSDDYRELEKDLLQPSGKQEPRGSAEYTDWGLLPGSEGAFNSSVGDSPAVPAETQQDPELHYLNESASTPAPKLPERSVLLPLPTTPSSGEVLEKEKASQLQEQSSNSSGKEVLMPSHSLPPASLELSSVTVEKSPVLTVTPGSTEHSIPTPPTSAAPSESTPSELPISPTTAPRTVKELTVSAGDNLIITLPDNEVELKAFVAPAPPVETTYNYEWNLISHPTDYQGEIKQGHKQTLNLSQLSVGLYVFKVTVSSENAFGEGFVNVTVKPARRVNLPPVAVVSPQLQELTLPLTSALIDGSQSTDDTEIVSYHWEEINGPFIEEKTSVDSPVLRLSNLDPGNYSFRLTVTDSDGATNSTTAALIVNNAVDYPPVANAGPNHTITLPQNSITLNGNQSSDDHQIVLYEWSLGPGSEGKHVVMQGVQTPYLHLSAMQEGDYTFQLKVTDSSRQQSTAVVTVIVQPENNRPPVAVAGPDKELIFPVESATLDGSSSSDDHGIVFYHWEHVRGPSAVEMENIDKAIATVTGLQVGTYHFRLTVKDQQGLSSTSTLTVAVKKENNSPPRARAGGRHVLVLPNNSITLDGSRSTDDQRIVSYLWIRDGQSPAAGDVIDGSDHSVALQLTNLVEGVYTFHLRVTDSQGASDTDTATVEVQPDPRKSGLVELTLQVGVGQLTEQRKDTLVRQLAVLLNVLDSDIKVQKIRAHSDLSTVIVFYVQSRPPFKVLKAAEVARNLHMRLSKEKADFLLFKVLRVDTAGCLLKCSGHGHCDPLTKRCICSHLWMENLIQRYIWDGESNCEWSIFYVTVLAFTLIVLTGGFTWLCICCCKRQKRTKIRKKTKYTILDNMDEQERMELRPKYGIKHRSTEHNSSLMVSESEFDSDQDTIFSREKMERGNPKVSMNGSIRNGASFSYCSKDR

SEQ ID NO: 7453 - protein, 82 aa, Homo Sapiens
ILLTVLTCYFWKKNQKLEYKYSKLVMNATLKDCDLPAADSCAIMEGEDVEDDLIFTSKKSLFGKIKSFTSKVSGSSPLGAES

SEQ ID NO: 7454 - protein, 62 aa, Homo Sapiens
MAEPGHSHHLSARVRGRTERRIPRLWRLLLWAGTAFQVTQGTGPELHACKEPSPATPGSFWI

SEQ ID NO: 7455 - protein, 91 aa, Homo Sapiens
MAEPGHSHHLSARVRGRTERRIPRLWRLLLWAGTAFQVTQGTGPELHACKESEYHYEYTACDSTGSRWRVAVPHTPGLCTSLPDPIKGTEC

SEQ ID NO: 7456 - protein, 152 aa, Homo Sapiens
MAEPGHSHHLSARVRGRTERRIPRLWRLLLWAGTAFQVTQGTGPELHACKESEYHYEYTACDSTGSRWRVAVPHTPGLCTSLPDPIKGTECSFSCNAGEFLDMKDQSCKPCAEGRYSLGTGIRFDEWDELPHGFASLSANMELDDSAAESTG

SEQ ID NO: 7457 - protein, 156 aa, Homo Sapiens
MAEPGHSHHLSARVRGRTERRIPRLWRLLLWAGTAFQVTQGTGPELHACKESEYHYEYTACDSTGSRWRVAVPHTPGLCTSLPDPIKGTECSFSCNAGEFLDMKDQSCKPCAEGRYSLGTGIRFDEWDELPHGFASLSANMELDDSAAESTGNCTS

SEQ ID NO: 7458 - protein, 205 aa, Homo Sapiens
MAEPGHSHHLSARVRGRTERRIPRLWRLLLWAGTAFQVTQGTGPELHACKESEYHYEYTACDSTGSRWRVAVPHTPGLCTSLPDPIKGTECSFSCNAGEFLDMKDQSCKPCAEGRYSLGTGIRFDEWDELPHGFASLSANMELDDSAAESTGNCTSSKWVPRGDYIASNTDECTATLMYAVNLKQSGTVNFEYYYPDSSIIFEFF

SEQ ID NO: 7459 - protein, 1013 aa, Homo Sapiens
MAEPGHSHHLSARVRGRTERRIPRLWRLLLWAGTAFQVTQGTGPELHACKESEYHYEYTACDSTGSRWRVAVPHTPGLCTSLPDPIKGTECSFSCNAGEFLDMKDQSCKPCAEGRYSLGTGIRFDEWDELPHGFASLSANMELDDSAAESTGNCTSSKWVPRGDYIASNTDECTATLMYAVNLKQSGTVNFEYYYPDSSIIFEFFVQNDQCQPNADDSRWMKTTEKGWEFHSVELNRGNNVLYWRTTAFSVWTKVPKPVLVRNIAITGVAYTSECFPCKPGTYADKQGSSFCKLCPANSYSNKGETSCHQCDPDKYSEKGSSSCNVRPACTDKDYFYTHTACDANGETQLMYKWAKPKICSEDLEGAVKLPASGVKTHCPPCNPGFFKTNNSTCQPCPYGSYSNGSDCTRCPAGTEPAVGFEYKWWNTLPTNMETTVLSGINFEYKGMTGWEVAGDHIYTAAGASDNDFMILTLVVPGFRPPQSVMADTENKEVARITFVFETLCSVNCELYFMVGVNSRTNTPVETWKGSKGKQSYTYIIEENTTTSFTWAFQRTTFHEASRKYTNDVAKIYSINVTNVMNGVASYCRPCALEASDVGSSCTSCPAGYYIDRDSGTCHSCPTNTILKAHQPYGVQACVPCGPGTKNNKIHSLCYNDCTFSRNTPTRTFNYNFSALANTVTLAGGPSFTSKGLKYFHHFTLSLCGNQGRKMSVCTDNVTDLRIPEGESGFSKSITAYVCQAVIIPPEVTGYKAGVSSQPVSLADRLIGVTTDMTLDGITSPAELFHLESLGIPDVIFFYRSNDVTQSCSSGRSTTIRVRCSPQKTVPGSLLLPGTCSDGTCDGCNFHFLWESAAACPLCSVADYHAIVSSCVAGIQKTTYVWREPKLCSGGISLPEQRVTICKTIDFWLKVGISAGTCTAILLTVLTCYFWKKNQKLEYKYSKLVMNATLKDCDLPAADSCAIMEGEDVEDDLIFTSKKSLFGKIKSFTSKRTPDGFDSVPLKTSSGGLDMDL

SEQ ID NO: 7460 - protein, 901 aa, Homo Sapiens
MAEPGHSHHLSARVRGRTERRIPRLWRLLLWAGTAFQVTQGTGPELHACKESEYHYEYTACDSTGSRWRVAVPHTPGLCTSLPDPIKGTECSFSCNAGEFLDMKDQSCKPCAEGRYSLGTGIRFDEWDELPHGFASLSANMELDDSAAESTGNCTSSKWVPRGDYIASNTDECTATLMYAVNLKQSGTVNFEYYYPDSSIIFEFFVQNDQCQPNADDSRWMKTTEKGWEFHSVELNRGNNVLYWRTTAFSVWTKVPKPVLVRNIAITEKGSSSCNVRPACTDKDYFYTHTACDANGETQLMYKWAKPKICSEDLEGAVKLPASGVKTHCPPCNPGFFKTNNSTCQPCPYGSYSNGSDCTRCPAGTEPAVGFEYKWWNTLPTNMETTVLSGINFEYKGMTGWEVAGDHIYTAAGASDNDFMILTLVVPGFRPPQSVMADTENKEVARITFVFETLCSVNCELYFMVGVNSRTNTPVETWKGSKGKQSYTYIIEENTTTSFTWAFQRTTFHEASRKYTNDVAKIYSINVTNVMNGVASYCRPCALEASDVGSSCTSCPAGYYIDRDSGTCHSCPTNTILKAHQPYGVQACVPCGPGTKNNKIHSLCYNDCTFSRNTPTRTFNYNFSALANTVTLAGGPSFTSKGLKYFHHFTLSLCGNQGRKMSVCTDNVTDLRIPEGESGFSKSITAYVCQAVIIPPEVTGYKAGVSSQPVSLADRLIGVTTDMTLDGITSPAELFHLESLGIPDVIFFYRSNDVTQSCSSGRSTTIRVRCSPQKTVPGSLLLPGTCSDGTCDGCNFHFLWESAAACPLCSVADYHAIVSSCVAGIQKTTYVWREPKLCSGGISLPEQRVTICKTIDFWLKVGISAGTCTAILLTVLTCYFWKKNQKLEYKYSKLVMNATLK

SEQ ID NO: 7461 - protein, 926 aa, Homo Sapiens
MAEPGHSHHLSARVRGRTERRIPRLWRLLLWAGTAFQVTQGTGPELHACKESEYHYEYTACDSTGSRWRVAVPHTPGLCTSLPDPIKGTECSFSCNAGEFLDMKDQSCKPCAEGRYSLGTGIRFDEWDELPHGFASLSANMELDDSAAESTGNCTSSKWVPRGDYIASNTDECTATLMYAVNLKQSGTVNFEYYYPDSSIIFEFFVQNDQCQPNADDSRWMKTTEKGWEFHSVELNRGNNVLYWRTTAFSVWTKVPKPVLTQLMYKWAKPKICSEDLEGAVKLPASGVKTHCPPCNPGFFKTNNSTCQPCPYGSYSNGSDCTRCPAGTEPAVGFEYKWWNTLPTNMETTVLSGINFEYKGMTGWEVAGDHIYTAAGASDNDFMILTLVVPGFRPPQSVMADTENKEVARITFVFETLCSVNCELYFMVGVNSRTNTPVETWKGSKGKQSYTYIIEENTTTSFTWAFQRTTFHEASRKYTNDVAKIYSINVTNVMNGVASYCRPCALEASDVGSSCTSCPAGYYIDRDSGTCHSCPTNTILKAHQPYGVQACVPCGPGTKNNKIHSLCYNDCTFSRNTPTRTFNYNFSALANTVTLAGGPSFTSKGLKYFHHFTLSLCGNQGRKMSVCTDNVTDLRIPEGESGFSKSITAYVCQAVIIPPEVTGYKAGVSSQPVSLADRLIGVTTDMTLDGITSPAELFHLESLGIPDVIFFYRSNDVTQSCSSGRSTTIRVRCSPQKTVPGSLLLPGTCSDGTCDGCNFHFLWESAAACPLCSVADYHAIVSSCVAGIQKTTYVWREPKLCSGGISLPEQRVTICKTIDFWLKVGISAGTCTAILLTVLTCYFWKKNQKLEYKYSKLVMNATLKDCDLPAADSCAIMEGEDVEDDLIFTSKKSLFGKIKSFTSKRTPDGFDSVPLKTSSGGLDMDL

SEQ ID NO: 7462 - protein, 838 aa, Homo Sapiens
MYAFYSLLIYIFYSLFRRDGGAAAAAEPGDPAQRARKPRGRRRPDLPAPELWTELTGLAASSEPEDGSEGAAEGRAAAVSLEEALLRLAEFLSVQLGAEESCGGPADLGQSGEVPSLLTVTSQLLALLAWLRSPRGRQALLQGTQPAPRVRPPSPDGSTSQEESPSHFTAVPGEPLGDETQGQQPLQLEEDQRAWQRLEQLILGQLEELKQQLEQQEEELGRLRLGVGATDSEKRVQHLTLENEALKQSLSLMRDLLLHWGPGPPIRAPQEEAEALLELQGRLQEAQDTTEALRAQLGVQEVQLQGLQGALQQLQQETEQNCRRELQQMHGQLAGLRARMASLRQGCGDLRGLVSTFTQSCQGSLSEARGQVSWALGALSSGGPGTQLPEGQQGPPAGCPGRLPELKGNIRVLCRLRPGTSSSLVSVEPGPGGTVTTCYRGRHRRFRLDWVFPPDASQEEVFRELEPAVLSCLRGYSVCIFTYGQTGTGKTYSMEGPPEDPGIVPRALQSLFREMGAGRQHRVTLSMVEIYNEAVRDLLAPGPPERLAVRQGPEGQGGIQVAGLTHWDVPNLETLHQMLKLGRSNRATAATAMNQRSSRSHALVTLTLRAASPPRAPGTAGTLHLVDLAGSERARKAGAAGPPRGDPDGARRLREAQTINRSLLALGGVMAALRAHRPHVPFRDSQLTRLLQPALGPGTTAVLLLQVGAGAGQVCACRSPPTRARPPAPLARRSPRGRRISGRQSAPSSSPTEWVKWSWGQPGAAGSRAPPGRLLPSAPTLRSPGPPAPLRRPLAVLHAPVPTTARARLSRPQRACPSSPGSRPCPWGLRPGLCWQRR

SEQ ID NO: 7463 - protein, 744 aa, Homo Sapiens
MYAFYSLLIYIFYSLFRRDGGAAAAAEPGDPAQRARKPRGRRRPDLPAPELWTELTGLAASSEPEDGSEGAAEGRAAAVSLEEALLRLAEFLSVQLGAEESCGGPADLGQSGEVPSLLTVTSQLLALLAWLRSPRGRQALLQGTQPAPRVRPPSPDGSTSQEESPSHFTAVPGEPLGDETQGQQPLQLEEDQRAWQRLEQLILGQLEELKQQLEQQEEELGRLRLGVGATDSEKRVQHLTLENEALKQSLSLMRDLLLHWGPGPPIRAPQEEAEALLELQGRLQEAQDTTEALRAQLQQETEQNCRRELQQMHGQLAGLRARMASLRQGCGDLRGLVSTFTQSCQGSLSEARGQVSWALGALSSGGPGTQLPEGQQGPPAGCPGRLPELKGNIRVLCRLRPGTSSSLVSVEPGPGGTVTTCYRGRHRRFRLDWVFPPDASQEEVFRELEPAVLSCLRGYSVCIFTYGQTGTGKTYSMEGPPEDPGIVPRALQSLFREMGAGRQHRVTLSMVEIYNEAVRDLLAPGPPERLAVRQGPEGQGGIQVAGLTHWDVPNLETLHQMLKLGRSNRATAATAMNQRSSRSHALVTLTLRAASPPRAPGTAGTLHLVDLAGSERARKAGAAGPPRGDPDGARRLREAQTINRSLLALGGVMAALRAHRPHVPFRDSQLTRLLQPALGPGTTAVLLLQISTRPEDLGETVCSLKFADRVGQVELGPARRRRVPRSSGTPSSLSTDTPLTGTPC

SEQ ID NO: 7464 - protein, 791 aa, Homo Sapiens
MYAFYSLLIYIFYSLFRRDGGAAAAAEPGDPAQRARKPRGRRRPDLPAPELWTELTGLAASSEPEDGSEGAAEGRAAAVSLEEALLRLAEFLSVQLGAEESCGGPADLGQSGEVPSLLTVTSQLLALLAWLRSPRGRQALLQGTQPAPRVRPPSPDGSTSQEESPSHFTAVPGEPLGDETQGQQPLQLEEDQRAWQRLEQLILGQLEELKQQLEQQEEELGRLRLGVGATDSEKRVQHLTLENEALKQSLSLMRDLLLHWGPGPPIRAPQEEAEALLELQGRLQEAQDTTEALRAQLGVQEVQLQGLQGALQQLQQETEQNCRRELQQMHGQLAGLRARMASLRQGCGDLRGLVSTFTQSCQGSLSEARGQVSWALGALSSGGPGTQLPEGQQGPPAGCPGRLPELKGNIRVLCRLRPGTSSSLVSVEPGPGGTVTTCYRGRHRRFRLDWVFPPDASQEEVFRELEPAVLSCLRGYSVCIFTYGQTGTGKTYSMEGPPEDPGIVPRALQSLFREMGAGRQHRVTLSMVEIYNEAVRDLLAPGPPERLAVRQGPEGQGGIQVAGLTHWDVPNLETLHQMLKLGRSNRATAATAMNQRSSRSHALVTLTLRAASPPRAPGTAGTLHLVDLAGSERARKAGAAGPPRGDPDGARRLREAQTINRSLLALGGVMAALRAHRPHVPFRDSQLTRLLQPALGPGTTAVLLLQISTRPEDLGETVCSLKFADRVGQVELGPARRRRVPRSSGTPSSLSTDTPLTGTPCTPTPSPGSPPCPSPDNGSGSALAPAEGLPL

SEQ ID NO: 7465 - protein, 325 aa, Homo Sapiens
MSMSPTVIILACLGFFLDQSVWAHVGGQDKPFCSAWPSAVVPQGGHVTLRCHYRRGFNIFTLYKKDGVPVPELYNRIFWNSFLISPVTPAHAGTYRCRGFHPHSPTEWSAPSNPLVIMVTGLYEKPSLTARPGPTVRAGENVTLSCSSQSSFDIYHLSREGEAHELRLPAVPSINGTFQADFPLGPATHGETYRCFGSFHGSPYEWSDPSDPLPVSVTDAAVMNQEPAGHRTVNREDSDEQDPQEVTYAQLDHCIFTQRKITGPSQRSKRPSTDTSVCIELPNAEPRALSPAHEHHSQALMGSSRETTALSQTQLASSNVPAAGI

SEQ ID NO: 7466 - protein, 342 aa, Homo Sapiens
MSMSPTVIILACLGFFLDQSVWAHVGGQDKPFCSAWPSAVVPQGGHVTLRCHYRRGFNIFTLYKKDGVPVPELYNRIFWNSFLISPVTPAHAGTYRCRGFHPHSPTEWSAPSNPLVIMVTGLYEKPSLTARPGPTVRAGENVTLSCSSQSSFDIYHLSREGEAHELRLPAVPSINGTFQADFPLGPATHGETYRCFGSFHGSPYEWSDPSDPLPVSVTGNPSSSWPSPTEPSFKTDAAVMNQEPAGHRTVNREDSDEQDPQEVTYAQLDHCIFTQRKITGPSQRSKRPSTDTSVCIELPNAEPRALSPAHEHHSQALMGSSRETTALSQTQLASSNVPAAGI

SEQ ID NO: 7467 - protein, 273 aa, Homo Sapiens
MSMSPTVIILACLGFFLDQSVWAHVGGQDKPFCSAWPSAVVPQGGHVTLRCHYRRGFNIFTLYKKDGVPVPELYNRIFWNSFLISPVTPAHAGTYRCRGFHPHSPTEWSAPSNPLVIMVTGLYEKPSLTARPGPTVRAGENVTLSCSSQSSFDIYHLSREGEAHELRLPAVPSINGTFQADFPLGPATHGETYRCFGSFHGSPYEWSDPSDPLPVSVTGNPSSSWPSPTEPSFKTGIARHLHAVIRYSVAIILFTILPFFLLHRWCSKKKMLL

SEQ ID NO: 7468 - protein, 230 aa, Homo Sapiens
MSMSPTVIILACLGFFLDQSVWAHVGLYEKPSLTARPGPTVRAGENVTLSCSSQSSFDIYHLSREGEAHELRLPAVPSINGTFQADFPLGPATHGETYRCFGSFHGSPYEWSDPSDPLPVSVTDAAVMNQEPAGHRTVNREDSDEQDPQEVTYAQLDHCIFTQRKITGPSQRSKRPSTDTSVCIELPNAEPRALSPAHEHHSQALMGSSRETTALSQTQLASSNVPAAGI

SEQ ID NO: 7469 - protein, 247 aa, Homo Sapiens
MSMSPTVIILACLGFFLDQSVWAHVGLYEKPSLTARPGPTVRAGENVTLSCSSQSSFDIYHLSREGEAHELRLPAVPSINGTFQADFPLGPATHGETYRCFGSFHGSPYEWSDPSDPLPVSVTGNPSSSWPSPTEPSFKTDAAVMNQEPAGHRTVNREDSDEQDPQEVTYAQLDHCIFTQRKITGPSQRSKRPSTDTSVCIELPNAEPRALSPAHEHHSQALMGSSRETTALSQTQLASSNVPAAGI

SEQ ID NO: 7470 - protein, 416 aa, Homo Sapiens
MSPSHVVVNVSTARSGPLTTSSAPVSRAESLRPGSRSCTMSMSPTVIILACLGFFLDQSVWAHVGGQDKPFCSAWPSAVVPQGGHVTLRCHYRRGFNIFTLYKKDGVPVPELYNRIFWNSFLISPVTPAHAGTYRCRGFHPHSPTEWSAPSNPLVIMVTGLYEKPSLTARPGPTVRAGENVTLSCSSQSSFDIYHLSREGEAHELRLPAVPSINGTFQADFPLGPATHGETYRCFGSFHGSPYEWSDPSDPLPVSVTGNPSSSWPSPTEPSFKTGIARHLHAVIRYSVAIILFTILPFFLLHRWCSKKKDAAVMNQEPAGHRTVNREDSDEQDPQEVTYAQLDHCIFTQRKITGPSQRSKRPSTDTSVCIELPNAEPRALSPAHEHHSQALMGSSRETTALSQTQLASSNVPAAGI

SEQ ID NO: 7471 - protein, 398 aa, Homo Sapiens
  misc_feature (1)..(1): Xaa can be any naturally occurring amino acid
XMSPTVIILACLGFFLDQSVWAHVGGQDKPFCSAWPSAVVPQGGHVTLRCHYRRGFNIFTLYKKDGVPVPELYNRIFWNSFLISPVTPAHAGTYRCRGFHPHSPTEWSAPSNPLVIMVTGLYEKPSLTARPGPTVRAGENVTLSCSSQSSFDIYHLSREGEAHELRLPAVPSINGTFQADFPLGPATHGETYRCFGSFHGSPYEWSDPSDPLPVSVTGNPSSSWPSPTEPSFKTGIARHLHAVIRYSVAIILFTILPFFLLHRWCSKKKVSLTKQRPENSGPCAEAGWEHADAAVMNQEPAGHRTVNREDSDEQDPQEVTYAQLDHCIFTQRKITGPSQRSKRPSTDTSVCIELPNAEPRALSPAHEHHSQALMGSSRETTALSQTQLASSNVPAAGI

SEQ ID NO: 7472 - protein, 139 aa, Homo Sapiens
MAPKLITVLCLGFCLNQKICPHAGAQDKFSLSAWPSPVVPLGGRVTLSCHSHLRFVIWTIFQTTGTRSHELHTGLSNNITISPVTPEHAGTYRCVGIYKHASKWSAESNSLKIIVTAFSLHPGGPHDEAGREVDPLLQL

SEQ ID NO: 7473 - protein, 133 aa, Homo Sapiens
MAPKLITVLCLGFCLNQKICPHAGAQDKFSLSAWPSPVVPLGGRVTLSCHSHLRFVIWTIFQTTGTRSHELHTGLSNNITISPVTPEHAGTYRCVGIYKHASKWSAESNSLKIIVTGGPHDEAGREVDPLLQL

SEQ ID NO: 7474 - protein, 133 aa, Homo Sapiens; identical to SEQ ID NO: 7473

SEQ ID NO: 7475 - protein, 352 aa, Homo Sapiens
MAPKLITVLCLGFCLNQKICPHAGAQDKFSLSAWPSPVVPLGGRVTLSCHSHLRFVIWTIFQTTGTRSHELHTGLSNNITISPVTPEHAGTYRCVGIYKHASKWSAESNSLKIIVTGLFTKPSISAHPSSLVHAGARVSLRCHSELAFDEFILYKEGHIQHSQQLDQGMEAGIHYVEAVFSMGPVTPAHAGAYRCCGCFSHSRYEWSAPSDPLDIVITGKYKKPSLSTQVDPMMRLGEKLTLFCSSEISFDQYHLFRHGVAHGQWLSGGQRHREAFQANFSVGRATPVPGGTYRCYGSFNDSPYKPPVTRCNFTPQETLRVLLCHSQNPPLNLTHLALKDSPATCICSLDSQ

SEQ ID NO: 7476 - protein, 365 aa, Homo Sapiens
MAPKLITVLCLGFCLNQKICPHAGAQDKFSLSAWPSPVVPLGGRVTLSCHSHLRFVIWTIFQTTGTRSHELHTGLSNNITISPVTPEHAGTYRCVGIYKHASKWSAESNSLKIIVTGLFTKPSISAHPSSLVHAGARVSLRCHSELAFDEFILYKEGHIQHSQQLDQGMEAGIHYVEAVFSMGPVTPAHAGAYRCCGCFSHSRYEWSAPSDPLDIVITGKYKKPSLSTQVDPMMRLGEKLTLFCSSEISFDQYHLFRHGVAHGQWLSGGQRHREAFQANFSVGRATPVPGGTYRCYGSFNDSPYKPPVTRCNFTPQETLRVLLCHSQNPPLNLTPPWQTQSPRKANGRMKRSLQQKRHRRSYMPS

SEQ ID NO: 7477 - protein, 191 aa, Homo Sapiens
MLRMRVPALLVLLFCFRGRAGPSPHFLQQPEDLVVLLGEEARLPCALGAYWGLVQWTKSGLALGGQRDLPGWSRYWISGNAANGQHDLHIRPVELEDEASYECQATQAGLRSRPAQLHVLVPPEAPQVLGGPSVSLVAGVPANLTCRSRGDARPTPELLWFRDGVLLDGATFHQTLLKEGTPGSVESTLTL

SEQ ID NO: 7478 - protein, 633 aa, Homo Sapiens
MLRMRVPALLVLLFCFRGRAGPSPHFLQQPEDLVVLLGEEARLPCALGAYWGLVQWTKSGLALGGQRDLPGWSRYWISGNAANGQHDLHIRPVELEDEASYECQATQAGLRSRPAQLHVLVPPEAPQVLGGPSVSLVAGVPANLTCRSRGDARPTPELLWFRDGVLLDGATFHQTLLKEGTPGSVESTLTLTPFSHDDGATFVCRARSQALPTGRDTAITLSLQYPPEVTLSASPHTVQEGEKVIFLCQATAQPPVTGYRWAKGGSPVLGARGPRLEVVADASFLTEPVSCEVSNAVGSANRSTALDVLFGPILQAKPEPVSVDVGEDASFSCAWRGNPLPRVTWTRRGGAQVLGSGATLRLPSVGPEDAGDYVCRAEAGLSGLRGGAAEARLTVNAPPVVTALHSAPAFLRGPARLQCLVFASPAPDAVVWSWDEGFLEAGSQGRFLVETFPAPESRGGLGPGLISVLHISGTQESDFSRSFNCSARNRLGEGGAQASLGRRDLLPTVRIVAGVAAATTTLLMVITGVALCCWRHSKASASFSEQKNLMRIPGSSDGSSSRGPEEEETGSREDRGPIVHTDHSDLVLEEEGTLETKDPTNGYYKVRGVSPPASPDSRVTSFQWKSPGISNLP

SEQ ID NO: 7479 - protein, 708 aa, Homo Sapiens
MLRMRVPALLVLLFCFRGRAGPSPHFLQQPEDLVVLLGEEARLPCALGAYWGLVQWTKSGLALGGQRDLPGWSRYWISGNAANGQHDLHIRPVELEDEASYECQATQAGLRSRPAQLHVLVPPEAPQVLGGPSVSLVAGVPANLTCRSRGDARPTPELLWFRDGVLLDGATFHQTLLKEGTPGSVESTLTLTPFSHDDGATFVCRARSQALPTGRDTAITLSLQYPPEVTLSASPHTVQEGEKVIFLCQATAQPPVTGYRWAKGGSPVLGARGPRLEVVADASFLTEPVSCEVSNAVGSANRSTALDVLFGPILQAKPEPVSVDVGEDASFSCAWRGNPLPRVTWTRRGGAQVLGSGATLRLPSVGPEDAGDYVCRAEAGLSGLRGGAAEARLTVNAPPVVTALHSAPAFLRGPARLQCLVFASPAPDAVVWSWDEGFLEAGSQGRFLVETFPAPESRGGLGPGLISVLHISGTQESDFSRSFNCSARNRLGEGGAQASLGRRDLLPTVRIVAGVAAATTTLLMVITGVALCCWRHSKASASFSEQKNLMRIPGSSDGSSSRGPEEEETGSREDRGPIVHTDHSDLVLEEEGTLETKDPTNGYYKVRGVSVSLSLGEAPGGGLFLPPPSPLGPPGTPTFYDFNPHLGMVPPCRLYRARAGYLTTPHPRAFTSYIKPTSFGPPDLAPGTPPFPYAAFPTPSHPRLQTHV

SEQ ID NO: 7480 - protein, 673 aa, Homo Sapiens
MLRMRVPALLVLLFCFRGRAGPSPHFLQQPEDLVVLLGEEARLPCALGAYWGLVQWTKSGLALGGQRDLPGWSRYWISGNAANGQHDLHIRPVELEDEASYECQATQAGLRSRPAQLHVLVPPEAPQVLGGPSVSLVAGVPANLTCRSRGDARPTPELLWFRDGVLLDGATFHQTLLKEGTPGSVESTLTLTPFSHDDGATFVCRARSQALPTGRDTAITLSLQYPPEVTLSASPHTVQEGEKVIFLCQATAQPPVTGYRWAKGGSPVLGARGPRLEVVADASFLTEPVSCEVSNAVGSANRSTALDVLFGPILQAKPEPVSVDVGEDASFSCAWRGNPLPRVTWTRRGGAQVLGSGATLRLPSVGPEDAGDYVCRAEAGLSGLRGGAAEARLTVNAPPVVTALHSAPAFLRGPARLQCLVFASPAPDAVVWSWDEGFLEAGSQGRFLVETFPAPESRGGLGPGLISVLHISGTQESDFSRSFNCSARNRLGEGGAQASLGRRASASFSEQKNLMRIPGSSDGSSSRGPEEEETGSREDRGPIVHTDHSDLVLEEEGTLETKDPTNGYYKVRGVSVSLSLGEAPGGGLFLPPPSPLGPPGTPTFYDFNPHLGMVPPCRLYRARAGYLTTPHPRAFTSYIKPTSFGPPDLAPGTPPFPYAAFPTPSHPRLQTHV

SEQ ID NO: 7481 - protein, 583 aa, Homo Sapiens
MLRMRVPALLVLLFCFRGRAGWSRYWISGNAANGQHDLHIRPVELEDEASYECQATQAGLRSRPAQLHVLVPPEAPQVLGGPSVSLVAGVPANLTCRSRGDARPTPELLWFRDGVLLDGATFHQTLLKEGTPGSVESTLTLTPFSHDDGATFVCRARSQALPTGRDTAITLSLQYPPEVTLSASPHTVQEGEKVIFLCQATAQPPVTGYRWAKGGSPVLGARGPRLEVVADASFLTEPVSCEVSNAVGSANRSTALDVLFGPILQAKPEPVSVDVGEDASFSCAWRGNPLPRVTWTRRGGAQVLGSGATLRLPSVGPEDAGDYVCRAEAGLSGLRGGAAEARLTVNAPPVVTALHSAPAFLRGPARLQCLVFASPAPDAVVWSWDEGFLEAGSQGRFLVETFPAPESRGGLGPGLISVLHISGTQESDFSRSFNCSARNRLGEGGAQASLGRRDLLPTVRIVAGVAAATTTLLMVITGVALCCWRHSKASASFSEQKNLMRIPGSSDGSSSRGPEEEETGSREDRGPIVHTDHSDLVLEEEGTLETKDPTNGYYKVRGVSPPASPDSRVTSFQWKSPGISNLP

SEQ ID NO: 7482 - protein, 138 aa, Homo Sapiens
MNSLVSWQLLLFLCATHFGEPLEKVASVGNSRPTGQQLESLGLLAPGEQSLPCTERKPAATARLSRRGTSLSPPPESSGSPQQPGLSAPHSRQIPAPQGAVLVQREKDLPNYNWNSFGLRFGKREAAPGNHGRSAGRG

SEQ ID NO: 7483 - protein, 144 aa, Homo Sapiens [sequence omitted]

SEQ ID NO: 7484 - protein, 708 aa, Homo Sapiens
MAAAAVAAAAAAAAAASLQVLEMESMETAAAGSAGLAAEVRGSGTVDFGPGPGISAMEASGGDPGPEAEDFECSSHCSELSWRQNEQRRQGLFCDITLCFGGAGGREFRAHRSVLAAATEYFTPLLSGQFSESRSGRVEMRKWSSEPGPEPDTVEAVIEYMYTGRIRVSTGSVHEVLELADRFLLIRLKEFCGEFLKKKLHLSNCVAIHSLAHMYTLSQLALKAADMIRRNFHKVIQDEEFYTLPFHLIRDWLSDLEITVDSEEVLFETVLKWVQRNAEERERYFEELFKLLRLSQMKPTYLTRHVKPERLVANNEVCVKLVADAVERHALRAENIQSGTCQHPTSHVSLLPRYGQNMDVIMVIGGVSEGGDYLSECVGYFVDEDRWVNLPHIHNHLDGHAVAVTESYVYVAGSMEPGFAKTVERYNPNLNTWEHVCSLMTRKHSFGLTEVKGKLYSIGGHGNFSPGFKDVTVYNPELDKWHNLESAPKILRDVKALAIEDRFVYIAARTPVDRDTEDGLKAVITCYDTETRQWQDVESLPLIDNYCFFQMSVVNSNFYQTASCCPKSYCLENEEAVRKIASQVSDEILESLPPEVLSIEGAAICYYKDDVFIIGGWKNSDDIDKQYRKEAYRYCAERKRWMLLPPMPQPRCRATACHVRIPYRYLHGTQRYPMPQNLMWQKDRIRQMQEIHRHALNMRRVPSSQIEC

SEQ ID NO: 7485 - protein, 235 aa, Homo Sapiens
MAEEQEFTQLCKLPAQPSHPHCVNNTYRSAQHSQALLRGLLALRDSGILFDVVLVVEGRHIEAHRILLAASCDYFRGMFAGGLKEMEQEEVLIHGVSYNAMCQILHFIYTSELELSLSNVQETLVAACQLQIPEIIHFCCDFLMSWVDEENILDVYRLAELFDLSRLTEQLDTYILKNFVAFSRTDKYRQLPLEKVYSLLSSNRLEVSCETEVYEGALLYHYSLEQVQADQISLH

SEQ ID NO: 7486 - protein, 634 aa, Homo Sapiens
MAEEQEFTQLCKLPAQPSHPHCVNNTYRSAQHSQALLRGLLALRDSGILFDVVLVVEGRHIEAHRILLAASCDYFRGMFAGGLKEMEQEEVLIHGVSYNAMCQILHFIYTSELELSLSNVQETLVAACQLQIPEIIHFCCDFLMSWVDEENILDVYRLAELFDLSRLTEQLDTYILKNFVAFSRTDKYRQLPLEKVYSLLSSNRLEVSCETEVYEGALLYHYSLEQVQADQISLHEPPKLLETVRFPLMEAEVLQRLHDKLDPSPLRDTVASALMYHRNESLQPSLQSPQTELRSDFQCVVGFGGIHSTPSTVLSDQAKYLNPLLGEWKHFTASLAPRMSNQGIAVLNNFVYLIGGDNNVQGFRAESRCWRYDPRHNRWFQIQSLQQEHADLSVCVVGRYIYAVAGRDYHNDLNAVERYDPATNSWAYVAPLKREVYAHAGATLEGKMYITCGRRGEDYLKETHCYDPGSNTWHTLADGPVRRAWHGMATLLNKLYVIGGSNNDAGYRRDVHQVACYSCTSGQWSSVCPLPAGHGEPGIAVLDNRIYVLGGRSHNRGSRTGYVHIYDVEKDCWEEGPQLDNSISGLAACVLTLPRSLLLEPPRGTPDRSQADPDFASEVMSVSDWEEFDNSSED

SEQ ID NO: 7487 - protein, 158 aa, Homo Sapiens
MAEEQEFTQLCKLPAQPSHPHCVNNTYRSAQHSQALLRGLLALRDSGILFDVVLVVEGRHIEAHRILLAASCDYFRGMFAGGLKEMEQEEVLIHGVSYNAMCQILHFIYTSELELSLSNVQETLVAACQLQMLFTSPGLNGCHSLCRSQKLSISAVIS

SEQ ID NO: 7488 - protein, 225 aa, Homo Sapiens
MFAGGLKEMEQEEVLIHGVSYNAMCQILHFIYTSELELSLSNVQETLVAACQLQIPEIIHFCCDFLMSWVDEENILDVYRLAELFDLSRLTEQLDTYILKNFVAFSRTDKYRQLPLEKVYSLLSSNRLEVSCETEVYEGALLYHYSLEQVQADQISLHEPPKLLETVRFPLMEAEVLQRLHDKLDPSPLRDTVASALMYHRNESLQPSLQSPQTELRSDFQCVVG

SEQ ID NO: 7489 - protein, 252 aa, Homo Sapiens
MGLGSSCHLSLPKRAEALLCSRKATVVRDLVAVRMAEEQEFTQLCKLPAQPSHPHCVNNTYRSAQHSQALLRGLLALRDSGILFDVVLVVEGRHIEAHRILLAASCDYFRGMFAGGLKEMEQEEVLIHGVSYNAMCQILHFIYTSELELSLSNVQETLVAACQLQIPEIIHFCCDFLMSWVDEENILDVYRLAELFDLSRLTEQLDTYILKNFVAFSRTDKYRQLPLEKVYSLLSSNRLEVSCETEVYEGAL

SEQ ID NO: 7490 - protein, 107 aa, Homo Sapiens
MPPPWHPPPRLLAVCLLTTTQATVVRDLVAVRMAEEQEFTQLCKLPAQPSHPHCVNNTYRSAQHSQALLRGLLALRDSGILFDVVLVVEGRHIEAHRILLAASCDYF

SEQ ID NO: 7491 - protein, 295 aa, Homo Sapiens
MPPPWHPPPRLLAVCLLTTTQATVVRDLVAVRMAEEQEFTQLCKLPAQPSHPHCVNNTYRSAQHSQALLRGLLALRDSGILFDVVLVVEGRHIEAHRILLAASCDYFRGMFAGGLKEMEQEEVLIHGVSYNAMCQILHFIYTSELELSLSNVQETLVAACQLQIPEIIHFCCDFLMSWVDEENILDVYRLAELFDLSRLTEQLDTYILKNFVAFSRTDKYRQLPLEKVYSLLSSNRLEVSCETEVYEGALLYHYSLEQVQADQISLHEPPKLLETVRFPLMEAEVLQRLHDKLDP

SEQ ID NO: 7492 - protein, 56 aa, Homo Sapiens
MWFLVLCLALSLGGTALVFWNPTPRILNAFSASASALASPKIASKRTPYPSSTLRP

SEQ ID NO: 7493 - protein, 262 aa, Homo Sapiens
MWFLVLCLALSLGGTGAAPPIQSRIVGGWECEQHSQPWQAALYHFSTFQCGGILVHRQWVLTAAHCISDNYQLWLGRHNLFDDENTAQFVHVSESFPHPGFNMSLLENHTRQADEDYSHDLMLLRLTEPADTITDAVKVVELPTEEPEVGSTCLASGWGSIEPENFSFPDDLQCVDLKILPNDECKKAHVQKVTDFMLCVGHLEGGKDTCVGDSGGPLMCDGVLQGVTSWGYVPCGTPNKPSVAVRVLSYVKWIEDTIAENS

SEQ ID NO: 7494 - protein, 143 aa, Homo Sapiens
MRAPHLHLSAASGARALAKLLPLLMAQLWAAEAALLPQNDTRLDPEAYGSPCARGSQPWQVSLFNGLSFHCAGVLVDQSWVLTAAHCGNKPLWARVGDDHLLLLQGEQLRRTTRSVVHPKYHQGSGPILPRRTDEHDLMLLKL

SEQ ID NO: 7495 - protein, 276 aa, Homo Sapiens
MRAPHLHLSAASGARALAKLLPLLMAQLWAAEAALLPQNDTRLDPEAYGSPCARGSQPWQVSLFNGLSFHCAGVLVDQSWVLTAAHCGNKPLWARVGDDHLLLLQGEQLRRTTRSVVHPKYHQGSGPILPRRTDEHDLMLLKLARPVVLGPRVRALQLPYRCAQPGDQCQVAGWGTTAARRVKYNKGLTCSSITILSPKECEVFYPGVVTNNMICAGLDRGQDPCQSDSGGPLVCDETLQGILSWGVYPCGSAQHPAVYTQICKYMSWINKVIRSN

SEQ ID NO: 7496 - protein, 276 aa, Homo Sapiens; identical to SEQ ID NO: 7495

SEQ ID NO: 7497 - protein, 276 aa, Homo Sapiens; identical to SEQ ID NO: 7495

SEQ ID NO: 7498 - protein, 43 aa, Homo Sapiens
MTTCCFFRESSSAGPLALLSIPSTTRAQAPSCQGERMSTISCC

SEQ ID NO: 7499 - protein, 282 aa, Homo Sapiens
MQRLRWLRDWKSSGRGLTAAKEPGARSSPLQAMRILQLILLALATGLVGGETRIIKGFECKPHSQPWQAALFEKTRLLCGATLIAPRWLLTAAHCLKPRYIVHLGQHNLQKEEGCEQTRTATESFPHPGFNNSLPNKDHRNDIMLVKMASPVSITWAVRPLTLSSRCVTAGTSCLISGWGSTSSPQLRLPHTLRCANITIIEHQKCENAYPGNITDTMVCASVQEGGKDSCQGDSGGPLVCNQSLQGIISWGQDPCAITRKPGVYTKVCKYVDWIQETMKNN

SEQ ID NO: 7500 - protein, 116 aa, Homo Sapiens
MQRLRWLRDWKSSGRGLTAAKEPGARSSPLQAMRILQLILLALATGLVGGETRIIKGFECKPHSQPWQAALFEKTRLLCGATLIAPRWLLTAAHCLKPWPLHSSPGAAQPPEGGGL

SEQ ID NO: 7501 - protein, 68 aa, Homo Sapiens
MRILQLILLALATGLVGGETRIIKGFECKPHSQPWQAALFEKTRLLCGATLIAPRWLLTAAHCLKPRY

SEQ ID NO: 7502 - protein, 170 aa, Homo Sapiens
MRILQLILLALATGLVGGETRIIKGFECKPHSQPWQAALFEKTRLLCGATLIAPRWLLTAAHCLKPRYIVHLGQHNLQKEEGCEQTRTATESFPHPGFNNSLPNKDHRNDIMLVKMASPVSITWAVRPLTLSSRCVTAGTSCLISGWGSTSSPQLRLPHTLRCANITIIE

SEQ ID NO: 7503 - protein, 250 aa, Homo Sapiens
MRILQLILLALATGLVGGETRIIKGFECKPHSQPWQAALFEKTRLLCGATLIAPRWLLTAAHCLKPRYIVHLGQHNLQKEEGCEQTRTATESFPHPGFNNSLPNKDHRNDIMLVKMASPVSITWAVRPLTLSSRCVTAGTSCLISGWGSTSSPQLRLPHTLRCANITIIEHQKCENAYPGNITDTMVCASVQEGGKDSCQGDSGGPLVCNQSLQGIISWGQDPCAITRKPGVYTKVCKYVDWIQETMKNN

SEQ ID NO: 7504 - protein, 250 aa, Homo Sapiens; identical to SEQ ID NO: 7503

SEQ ID NO: 7505 - protein, 275 aa, Homo Sapiens
MRILQLILLALATGLVGGETRIIKGFECKPHSQPWQAALFEKTRLLCGATLIAPRWLLTAAHCLKPWVSLTSPTHVSPDLSSSNYCLSHLSRYIVHLGQHNLQKEEGCEQTRTATESFPHPGFNNSLPNKDHRNDIMLVKMASPVSITWAVRPLTLSSRCVTAGTSCLISGWGSTSSPQLRLPHTLRCANITIIEHQKCENAYPGNITDTMVCASVQEGGKDSCQGDSGGPLVCNQSLQGIISWGQDPCAITRKPGVYTKVCKYVDWIQETMKNN

SEQ ID NO: 7506 - protein, 109 aa, Homo Sapiens
MRILQLILLALATVRLPHTLRCANITIIEHQKCENAYPGNITDTMVCASVQEGGKDSCQGDSGGPLVCNQSLQGIISWGQDPCAITRKPGVYTKVCKYVDWIQETMKNN

SEQ ID NO: 7507 - protein, 141 aa, Homo Sapiens
  misc_feature (1)..(1): Xaa can be any naturally occurring amino acid
XNSLPNKDHRNDIMLVKMASPVSITWAVRPLTLSSRCVTAGTSCLISGWGSTSSPQLRLPHTLRCANITIIEHQKCENAYPGNITDTMVCASVQEGGKDSCQSLQGIISWGQDPCAITRKPGVYTKVCKYVDWIQETMKNN

SEQ ID NO: 7508 - protein, 79 aa, Homo Sapiens
MGLSIFLLLCVLGEFSRSRERAGLRLDPFTPMRRPHHPPHLSSGPQPGGEEERGFLCASIYLQLSGAQPGSHTEDFQWH

SEQ ID NO: 7509 - protein, 79 aa, Homo Sapiens; identical to SEQ ID NO: 7508

SEQ ID NO: 7510 - protein, 111 aa, Homo Sapiens
MGLSIFLLLCVLGLSQAATPKIFNGTECGRNSQPWQVGLFEGTSLRCGGVLIDHRWVLTAAHCSGRPIPGSAPVPQPLHRLPCHLPWCVSRENHEQHGVCRRRPGAGCLPG

SEQ ID NO: 7511 - protein, 248 aa, Homo Sapiens
MGLSIFLLLCVLGLSQAATPKIFNGTECGRNSQPWQVGLFEGTSLRCGGVLIDHRWVLTAAHCSGSRYWVRLGEHSLSQLDWTEQIRHSGFSVTHPGYLGASTSHEHDLRLLRLRLPVRVTSSVQPLPLPNDCATAGTECHVSGWGITNHPRNPFPDLLQCLNLSIVSHATCHGVYPGRITSNMVCAGGVPGQDACQGDSGGPLVCGGVLQGLVSWGSVGPCGQDGIPGVYTYICKYVDWIRMIMRNN

SEQ ID NO: 7512 - protein, 248 aa, Homo Sapiens; identical to SEQ ID NO: 7511

SEQ ID NO: 7513 - protein, 254 aa, Homo Sapiens
MGLSIFLLLCVLGLSQAATPKIFNGTECGRNSQPWQVGLFEGTSLRCGGVLIDHRWVLTAAHCSGSRYWVRLGEHSLSQLDWTEQIRHSGFSVTHPGYLGASTSHEHDLRLLRLRLPVRVTSSVQPLPLPNDCATAGTECHVSGWGITNHPRNPFPDLLQCLNLSIVSHATCHGVYPGRITSNMVCAGGVPGQDACQGDSGGPLVCGGVLQGLVSWGSVGPCGQDGIPGVYTYICNSTLVGLGTSWNFNSCQPF

SEQ ID NO: 7514 - protein, 177 aa, Homo Sapiens
MGLSIFLLLCVLGLSQAATPKIFNGTECGRNSQPWQVGLFEGTSLRCGGVLIDHRWVLTAAHCSGSRYWVRLGEHSLSQLDWTEQIRHSGFSVTHPGYLGASTSHEHDLRLLRLRLPVRVTSSVQPLPLPNDCATAGTECHVSGWGITNHPRSKGPRARGQGSGWVQVWDAGREVES

SEQ ID NO: 7515 - protein, 98 aa, Homo Sapiens
MGLIYKCLPEKVTVNIETRCLPGVFQGSQHQWDQWVSPRWLHLLPPLSALAGCPTSARAATLWGSPGPPQMGPHCRTLSKGGAQSLPRQARPRACGSW

SEQ ID NO: 7516 - protein, 98 aa, Homo Sapiens; identical to SEQ ID NO: 7515

SEQ ID NO: 7517 - protein, 93 aa, Homo Sapiens
MWPLALVIASLTLALSGGEDFKEPSQGPRDVMAASRPEAFPKGLTLEPRPEKGGICGCLAPGTILGLKVGWLFSSGDTPWIHARATPECHTLG

SEQ ID NO: 7518 - protein, 93 aa, Homo Sapiens; identical to SEQ ID NO: 7517

SEQ ID NO: 7519 - protein, 99 aa, Homo Sapiens
MWPLALVIASLTLALSGGVSQESSKVLNTNGTSGFLPGGYTCFPHSQPWQAALLVQGRLLCGGVLVHPKWVLTAAHCLKEGLKVYLGKHALGRVEAGEQ

SEQ ID NO: 7520 - protein, 180 aa, Homo Sapiens
MWPLALVIASLTLALSGGVSQESSKVLNTNGTSGFLPGGYTCFPHSQPWQAALLVQGRLLCGGVLVHPKWVLTAAHCLKEGLKVYLGKHALGRVEAGEQVREVVHSIPHPEYRRSPTHLNHDHDIMLLELQSPVQLTGYIQTLPLSHNNRLTPGTTCRVSGWGTTTSPQGMHPHRWPEAP

SEQ ID NO: 7521 - protein, 277 aa, Homo Sapiens
MWPLALVIASLTLALSGGVSQESSKVLNTNGTSGFLPGGYTCFPHSQPWQAALLVQGRLLCGGVLVHPKWVLTAAHCLKEGLKVYLGKHALGRVEAGEQVREVVHSIPHPEYRRSPTHLNHDHDIMLLELQSPVQLTGYIQTLPLSHNNRLTPGTTCRVSGWGTTTSPQVNYPKTLQCANIQLRSDEECRQVYPGKITDNMLCAGTKEGGKDSCEGDSGGPLVCNRTLYGIVSWGDFPCGQPDRPGVYTRVSRYVLWIRETIRKYETQQQKWLKGPQ

SEQ ID NO: 7522 - protein, 204 aa, Homo Sapiens
MWPLALVIASLTLALSGGVSQESSKVLNTNGTSGFLPGGYTCFPHSQPWQAALLVQGRLLCGGVLVHPKWVLTAAHCLKEGLKVYLGKHALGRVEAVNYPKTLQCANIQLRSDEECRQVYPGKITDNMLCAGTKEGGKDSCEGDSGGPLVCNRTLYGIVSWGDFPCGQPDRPGVYTRVSRYVLWIRETIRKYETQQQKWLKGPQ

SEQ ID NO: 7523 - protein, 125 aa, Homo Sapiens
MWPLALVIASLTLALSGVNYPKTLQCANIQLRSDEECRQVYPGKITDNMLCAGTKEGGKDSCEGDSGGPLVCNRTLYGIVSWGDFPCGQPDRPGVYTRVSRYVLWIRETIRKYETQQQKWLKGPQ

SEQ ID NO: 7524 - protein, 267 aa, Homo Sapiens
MSLRVLGSGTWPSAPKMFLLLTALQVLAIAMTQSQEDENKIIGGHTCTRSSQPWQAALLAGPRRRFLCGGALLSGQWVITAAHCGRPILQVALGKHNLRRWEATQQVLRVVRQVTHPNYNSRTHDNDLMLLQLQQPARIGRAVRPIEVTQACASPGTSCRVSGWGTISSPIARYPASLQCVNINISPDEVCQKAYPRTITPGMVCAGVPQGGKDSCQGDSGGPLVCRGQLQGLVSWGMERCALPGYPGVYTNLCKYRSWIEETMRDK

SEQ ID NO: 7525 - protein, 267 aa, Homo Sapiens; identical to SEQ ID NO: 7524

SEQ ID NO: 7526 - protein, 43 aa, Homo Sapiens
MRVRLGEHNLRKRDGPEQLRTTSRVIPHPRYEARSHRNDIMLL

SEQ ID NO: 7527 - protein, 256 aa, Homo Sapiens
MWLLLTLSFLLASTAAQDGDKLLEGDECAPHSQPWQVALYERGRFNCGASLISPHWVLSAAHCQSRFMRVRLGEHNLRKRDGPEQLRTTSRVIPHPRYEARSHRNDIMLLRLVQPARLNPQVRPAVLPTRCPHPGEACVVSGWGLVSHNEPGTAGSPRSQVSLPDTLHCANISIISDTSCDKSYPGRLTNTMVCAGAEGRGAESCEGDSGGPLVCGGILQGIVSWGDVPCDNTTKPGVYTKVCHYLEWIRETMKRN

SEQ ID NO: 7528 - protein, 120 aa, Homo Sapiens
MWLLLTLSFLLASTAQDGDKLLEGDECAPHSQPWQVALYERGRFNCGASLISPHWVLSAAHCQSRFMRVRLGEHNLRKRDGPEQLRTTSRVIPHPRYEARSHRNDIMLLRLVQPARLNPQ

SEQ ID NO: 7529 - protein, 160 aa, Homo Sapiens
MWLLLTLSFLLASTAQDGDKLLEGDECAPHSQPWQVALYERGRFNCGASLISPHWVLSAAHCQSRFMRVRLGEHNLRKRDGPEQLRTTSRVIPHPRYEARSHRNDIMLLRLVQPARLNPQVRPAVLPTRCPHPGEACVVSGWGLVSHNEPGTAGSPRSQG

SEQ ID NO: 7530 - protein, 255 aa, Homo Sapiens
MWLLLTLSFLLASTAQDGDKLLEGDECAPHSQPWQVALYERGRFNCGASLISPHWVLSAAHCQSRFMRVRLGEHNLRKRDGPEQLRTTSRVIPHPRYEARSHRNDIMLLRLVQPARLNPQVRPAVLPTRCPHPGEACVVSGWGLVSHNEPGTAGSPRSQVSLPDTLHCANISIISDTSCDKSYPGRLTNTMVCAGAEGRGAESCEGDSGGPLVCGGILQGIVSWGDVPCDNTTKPGVYTKVCHYLEWIRETMKRN

SEQ ID NO: 7531 - protein, 23 aa, Homo Sapiens
MSLLKHQSLRPDEDSSHDLMLLR

SEQ ID NO: 7532 - protein, 44 aa, Homo Sapiens
MSLLKHQSLRPDEDSSHDLMLLRLSEPAKITDVVKVLGLPTQEP

SEQ ID NO: 7533 - protein, 159 aa, Homo Sapiens
MSLLKHQSLRPDEDSSHDLMLLRLSEPAKITDVVKVLGLPTQEPALGTTCYASGWGSIEPEEFLRPRSLQCVSLHLLSNDMCARAYSEKVTEFMLCAGLWTGGKDTCGGDSGGPLVCNGVLQGITSWGPEPCALPEKPAVYTKVVHYRKWIKDTIAANP

SEQ ID NO: 7534 - protein, 69 aa, Homo Sapiens
MWDLVLSIALSVGCTGAVPLIQSRIVGGWECEKHSQPWQVAVYSHGWAHCGGVLVHPQWVLTAAHCLKK

SEQ ID NO: 7535 - protein, 122 aa, Homo Sapiens
MWDLVLSIALSVGCTGAVPLIQSRIVGGWECEKHSQPWQVAVYSHGWAHCGGVLVHPQWVLTAAHCLKKACQDHRCCEGPGPAHPGASTGDHLLRLRLGQHRTRGVLAPQESSVCEPPSPVQ

SEQ ID NO: 7536 - protein, 164 aa, Homo Sapiens
MWDLVLSIALSVGCTGAVPLIQSRIVGGWECEKHSQPWQVAVYSHGWAHCGGVLVHPQWVLTAAHCLKKNSQVWLGRHNLFEPEDTGQRVPVSHSFPHPLYNMSLLKHQSLRPDEDSSHDLMLLRLSEPAKITDVVKVLGLPTQEPALGTTCYASGWGSIEPEE

SEQ ID NO: 7537 - protein, 261 aa, Homo Sapiens
MWDLVLSIALSVGCTGAVPLIQSRIVGGWECEKHSQPWQVAVYSHGWAHCGGVLVHPQWVLTAAHCLKKNSQVWLGRHNLFEPEDTGQRVPVSHSFPHPLYNMSLLKHQSLRPDEDSSHDLMLLRLSEPAKITDVVKVLGLPTQEPALGTTCYASGWGSIEPEEFLRPRSLQCVSLHLLSNDMCARAYSEKVTEFMLCAGLWTGGKDTCGGDSGGPLVCNGVLQGITSWGPEPCALPEKPAVYTKVVHYRKWIKDTIAANP

SEQ ID NO: 7538 - protein, 223 aa, Homo Sapiens
MWDLVLSIALSVGCTGAVPLIQSRIVGGWECEKHSQPWQVAVYSHGWAHCGGVLVHPQWVLTAAHCLKKNSQVWLGRHNLFEPEDTGQRVPVSHSFPHPLYNMSLLKHQSLRPDEDSSHDLMLLRLSEPAKITDVVKVLGLPTQEPALGTTCYASGWGSIEPEEFLRPRSLQCVSLHLLSNDMCARAYSEKVTEFMLCAGLWTGGKDTCGVSHPYSQHLEGKG

SEQ ID NO: 7539 - protein, 49 aa, Homo Sapiens
MWDLVLSIALSVGCTGIARSGWVGTTCLSLKTQARGSLSATASHTRSTI

SEQ ID NO: 7540 - protein, 49 aa, Homo Sapiens; identical to SEQ ID NO: 7539

SEQ ID NO: 7541 - protein, 49 aa, Homo Sapiens; identical to SEQ ID NO: 7539

SEQ ID NO: 7542 - protein, 51 aa, Homo Sapiens
  misc_feature (1)..(1): Xaa can be any naturally occurring amino acid
XEKVTEFMLCAGLWTGGKDTCGHNSPIPVLSTCLLGTCYVTSIAVDPGKQQ

SEQ ID NO: 7543 - protein, 184 aa, Homo Sapiens
  misc_feature (1)..(1): Xaa can be any naturally occurring amino acid
XPDEDSSHDLMLLRLSEPAKITDVVKVLGLPTQEPALGTTCYASGWGSIEPEEFLRPRSLQCVSLHLLSNDMCARAYSEKVTEFMLCAGLWTGGKDTCGESGAVDGAGQKKDRAWLRVILGVHLSVMVCFKVSHHGALSHVPCLKSLLCTPRWCITGSGSRTPSQPTPECPCPTPTSSKFKSTS

SEQ ID NO: 7544 - protein, 172 aa, Homo Sapiens
MWVPVVFLTLAVCGGVLVHPQWVLTAAHCIRNKSVILLGRHSLFHPEDTGQVFQVSHSFPHPLYDMSLLKNRFLRPGDDSSHDLMLLRLSEPAELTDAVKVMDLPTQEPALGTTCYASGWGSIEPEEFLTPKKLQCVDLHVISNDVCAQVHPQKVTKFMLCAGRWTGGKSTC

SEQ ID NO: 7545 - protein, 173 aa, Homo Sapiens [sequence omitted]

SEQ ID NO: 7546 - protein, 218 aa, Homo Sapiens
MWVPVVFLTLSVTWIGAAPLILSRIVGGWECEKHSQPWQVLVASRGRAVCGGVLVHPQWVLTAAHCIRKPGDDSSHDLMLLRLSEPAELTDAVKVMDLPTQEPALGTTCYASGWGSIEPEEFLTPKKLQCVDLHVISNDVCAQVHPQKVTKFMLCAGRWTGGKSTCSGDSGGPLVCNGVLQGITSWGSEPCALPERPSLYTKVVHYRKWIKDTIVANP

SEQ ID NO: 7547 - protein, 195 aa, Homo Sapiens
MWVPVVFLTLSVTWIGAAPLILSRIVGGWECEKHSQPWQVLVASRGRAVCGGVLVHPQWVLTAAHCIRKPGDDSSHDLMLLRLSEPAELTDAVKVMDLPTQEPALGTTCYASGWGSIEPEEFLTPKKLQCVDLHVISNDVCAQVHPQKVTKFMLCAGRWTGGKSTCSWVILITELTMPALPMVLHGSLVPWRGGV

SEQ ID NO: 7548 - protein, 90 aa, Homo Sapiens
MWVPVVFLTLSVTWIGAAPLILSRIVGGWECEKHSQPWQVLVASRGRAVCGGVLVHPQWVLTAAHCIRNKSVILLGRHSLFHPEDTGQAR

SEQ ID NO: 7549 - protein, 261 aa, Homo Sapiens
MWVPVVFLTLSVTWIGAAPLILSRIVGGWECEKHSQPWQVLVASRGRAVCGGVLVHPQWVLTAAHCIRNKSVILLGRHSLFHPEDTGQVFQVSHSFPHPLYDMSLLKNRFLRPGDDSSHDLMLLRLSEPAELTDAVKVMDLPTQEPALGTTCYASGWGSIEPEEFLTPKKLQCVDLHVISNDVCAQVHPQKVTKFMLCAGRWTGGKSTCSGDSGGPLVCNGVLQGITSWGSEPCALPERPSLYTKVVHYRKWIKDTIVANP

SEQ ID NO: 7550 - protein, 227 aa, Homo Sapiens
MWVPVVFLTLSVTWIGAAPLILSRIVGGWECEKHSQPWQVLVASRGRAVCGGVLVHPQWVLTAAHCIRNKSVILLGRHSLFHPEDTGQVFQVSHSFPHPLYDMSLLKNRFLRPGDDSSHDLMLLRLSEPAELTDAVKVMDLPTQEPALGTTCYASGWGSIEPEEFLTPKKLQCVDLHVISNDVCAQVHPQKVTKFMLCAGRWTGGKSTCSVSHPYSQDLEGKGEWGP

SEQ ID NO: 7551 - protein, 238 aa, Homo Sapiens
MWVPVVFLTLSVTWIGAAPLILSRIVGGWECEKHSQPWQVLVASRGRAVCGGVLVHPQWVLTAAHCIRNKSVILLGRHSLFHPEDTGQVFQVSHSFPHPLYDMSLLKNRFLRPGDDSSHDLMLLRLSEPAELTDAVKVMDLPTQEPALGTTCYASGWGSIEPEEFLTPKKLQCVDLHVISNDVCAQVHPQKVTKFMLCAGRWTGGKSTCSWVILITELTMPALPMVLHGSLVPWRGGV

SEQ ID NO: 7552 - protein, 220 aa, Homo Sapiens
MWVPVVFLTLSVTWIGAAPLILSRIVGGWECEKHSQPWQVLVASRGRAVCGGVLVHPQWVLTAAHCIRNKSVILLGRHSLFHPEDTGQVFQVSHSFPHPLYDMSLLKNRFLRPGDDSSIEPEEFLTPKKLQCVDLHVISNDVCAQVHPQKVTKFMLCAGRWTGGKSTCSGDSGGPLVCNGVLQGITSWGSEPCALPERPSLYTKVVHYRKWIKDTIVANP

SEQ ID NO: 7553 - protein, 124 aa, Homo Sapiens
MWVPVVFLTLSVTWIGAAPLILSRIVGGWECEKHSQPWQVLVASRGRAVCGGVLVHPQWVLTAAHCIRNKSVILLGRHSLFHPEDTGQVFQVSHSFPHPLYDMSLLKNRFLRPGDDSTLNQRSS

SEQ ID NO: 7554 - protein, 104 aa, Homo Sapiens
MWVPVVFLTLSVTWIGERGHGWGDAGEGASPDCQAEALSPPTQHPSPDRELGSFLSLPAPLQAHTPSPSILQQSSLPHQVPAPSHLPQNFLPIAQPAPCSQLLY

SEQ ID NO: 7555 - protein, 262 aa, Homo Sapiens
  misc_feature (1)..(1): Xaa can be any naturally occurring amino acid
XFLTLSVTWIGAAPLILSRIVGGWECEKHSQPWQVLVASRGRAVCGGVLVHPQWVLTAAHCIRNKSVILLGRHSLFHPEDTGQVFQVSHSFPHPLYDMSLLKNRFLRPGDDSSHDLMLLRLSEPAELTDAVKVMDLPTQEPALGTTCYASGWGSIEPEECTPGPDVLTPKKLQCVDLHVISNDVCAQVHPQKVTKFMLCAGRWTGGKSTCSGDSGGPLVCNGVLQGITSWGSEPCALPERPSLYTKVVHYRKWIKDTIVANP

SEQ ID NO: 7556 - protein, 75 aa, Homo Sapiens
MATAGNPWGWFLGYLILGVAGSLVSGSCSQIINGEDCSPHSQPWQAALVMENELFCSGVLVHPQWVLSAAHCFQK

SEQ ID NO: 7557 - protein, 254 aa, Homo Sapiens
MATAGNPWGWFLGYLILGVAGSLVSGSCSQIINGEDCSPHSQPWQAALVMENELFCSGVLVHPQWVLSAAHCFQNSYTIGLGLHSLEADQEPGSQMVEASLSVRHPEYNRPLLANDLMLIKLDESVSESDTIRSISIASQCPTAGNSCLVSGWGLLANGRMPTVLQCVNVSVVSEEVCSKLYDPLYHPSMFCAGGGQDQKDSCNGDSGGPLICNGYLQGLVSFGKAPCGQVGVPGVYTNLCKFTEWIEKTVQAS

SEQ ID NO: 7558 - protein, 110 aa, Homo Sapiens
MENELFCSGVLVHPQWVLSAAHCFQNSYTIGLGLHSLEADQEPGSQMVEASLSVRHPEYNRPLLANDLMLIKLDESVSESDTIRSISIASQCPTAGNSCLVSGWGLLANG

SEQ ID NO: 7559 - protein, 71 aa, Homo Sapiens
MVEASLSVRHPEYNRPLLANDLMLIKLDESVSESDTIRSISIASQCPTAGNSCLVSGWGLLANECLPCCSA

SEQ ID NO: 7560 - protein, 71 aa, Homo Sapiens; identical to SEQ ID NO: 7559

SEQ ID NO: 7561 - protein, 205 aa, Homo Sapiens
MATARPPWMWVLCALITALLLGVTEHVLANNDVSCDHPSNTVPSGSNQDLGAGAGEDARSDDSSSRIINGSDCDMHTQPWQAALLLRPNQLYCGAVLVHPQWLLTAAHCRKKVFRVRLGHYSLSPVYESGQQMFQGVKSIPHPGYSHPGHSNDLMLIKLNRRIRPTKDVRPINVSSHCPSAGTKCLVSGWGTTKSPQVHFPKVLQ

SEQ ID NO: 7562 - protein, 293 aa, Homo Sapiens
MATARPPWMWVLCALITALLLGVTEHVLANNDVSCDHPSNTVPSGSNQDLGAGAGEDARSDDSSSRIINGSDCDMHTQPWQAALLLRPNQLYCGAVLVHPQWLLTAAHCRKKVFRVRLGHYSLSPVYESGQQMFQGVKSIPHPGYSHPGHSNDLMLIKLNRRIRPTKDVRPINVSSHCPSAGTKCLVSGWGTTKSPQVHFPKVLQCLNISVLSQKRCEDAYPRQIDDTMFCAGDKAGRDSCQGDSGGPVVCNGSLQGLVSWGDYPCARPNRPGVYTNLCKFTKWIQETIQANS

SEQ ID NO: 7563 - protein, 293 aa, Homo Sapiens; identical to SEQ ID NO: 7562

SEQ ID NO: 7564 - protein, 293 aa, Homo Sapiens; identical to SEQ ID NO: 7562

SEQ ID NO: 7565 - protein, 69 aa, Homo Sapiens
MADPATRHLTPTKLPSTPRATCSVVGSLSIHCGSSQLPTAKNRIFRSSWGSITFGKGRVPRSRVLLSGL

SEQ ID NO: 7566 - protein, 244 aa, Homo Sapiens
MKKLMVVLSLIAAAWAEEQNKLVHGGPCDKTSHPYQAALYTSGHLLCGGVLIHPLWVLTAAHCKKPNLQVFLGKHNLRQRESSQEQSSVVRAVIHPDYDAASHDQDIMLLRLARPAKLSELIQPLPLERDCSANTTSCHILGWGKTADGDFPDTIQCAYIHLVSREECEHAYPGQITQNMLCAGDEKYGKDSCQGDSGGPLVCGDHLRGLVSWGNIPCGSKEKPGVYTNVCRYTNWIQKTIQAK

SEQ ID NO: 7567 - protein, 244 aa, Homo Sapiens; identical to SEQ ID NO: 7566

SEQ ID NO: 7568 - protein, 244 aa, Homo Sapiens; identical to SEQ ID NO: 7566

SEQ ID NO: 7569 - protein, 40 aa, Homo Sapiens
MKKLMVVLSLIAAGIFRSSWGSITFGKGRVPRSRVLLSGL

SEQ ID NO: 7570 - protein, 40 aa, Homo Sapiens; identical to SEQ ID NO: 7569

SEQ ID NO: 7571 - protein, 137 aa, Homo Sapiens
MLLRLARPAKLSELIQPLPLERDCSANTTSCHILGWGKTADGDFPDTIQCAYIHLVSREECEHAYPGQITQNMLCAGDEKYGKDSCQGDSGGPLVCGDHLRGLVSWGNIPCGSKEKPGVYTNVCRYTNWIQKTIQAK

SEQ ID NO: 7572 - protein, 253 aa, Homo Sapiens
MARSLLLPLQILLLSLALETAGEEAQGDKIIDGAPCARGSHPWQVALLSGNQLHCGGVLVNERWVLTAAHCKMNEYTVHLGSDTLGDRRAQRIKASKSFRHPGYSTQTHVNDLMLVKLNSQARLSSMVKKVRLPSRCEPPGTTCTVSGWGTTTSPDVTFPSDLMCVDVKLISPQDCTKVYKDLLENSMLCAGIPDSKKNACNGDSGGPLVCRGTLQGLVSWGTFPCGQPNDPGVYTQVCKFTKWINDTMKKHR

SEQ ID NO: 7573 - protein, 253 aa, Homo Sapiens; identical to SEQ ID NO: 7572

SEQ ID NO: 7574 - protein, 66 aa, Homo Sapiens
MARSLLLPLQILLLSLALETAGEEVSTPCTWAVIRWATGELRGSRPRSHSATPATPHRPMLMTSCS

SEQ ID NO: 7575 - protein, 69 aa, Homo Sapiens
MNEYTVHLGSDTLGDRRAQRIKASKSFRHPGYSTQTHVNDLMLVKLNSQARLSSMVKKVRLPSRCEPPG

SEQ ID NO: 7576 - protein, 181 aa, Homo Sapiens
MNEYTVHLGSDTLGDRRAQRIKASKSFRHPGYSTQTHVNDLMLVKLNSQARLSSMVKKVRLPSRCEPPGTTCTVSGWGTTTSPDVTFPSDLMCVDVKLISPQDCTKVYKDLLENSMLCAGIPDSKKNACNGDSGGPLVCRGTLQGLVSWGTFPCGQPNDPGVYTQVCKFTKWINDTMKKHR

SEQ ID NO: 7577 - protein, 305 aa, Homo Sapiens
MGRPRPRAAKTWMFLLLLGGAWAACGSLDLLTKLYAENLPCVHLNPQWPSQPSHCPRGWRSNPLPPAAGHSRAQEDKVLGGHECQPHSQPWQAALFQGQQLLCGGVLVGGNWVLTAAHCKKPKYTVRLGDHSLQNKDGPEQEIPVVQSIPHPCYNSSDVEDHNHDLMLLQLRDQASLGSKVKPISLADHCTQPGQKCTVSGWGTVTSPRENFPDTLNCAEVKIFPQKKCEDAYPGQITDGMVCAGSSKGADTCQGDSGGPLVCDGALQGITSWGSDPCGRSDKPGVYTNICRYLDWIKKIIGSKG

SEQ ID NO: 7578 - protein, 119 aa, Homo Sapiens
MGRPRPRAAKTWMFLLLLGGAWAENFPDTLNCAEVKIFPQKKCEDAYPGQITDGMVCAGSSKGADTCQGDSGGPLVCDGALQGITSWGSDPCGRSDKPGVYTNICRYLDWIKKIIGSKG

SEQ ID NO: 7579 - protein, 97 aa, Homo Sapiens
MGRPRPRAAKTWMFLLLLGGAWAGHSRAQEDKVLGGHECQPHSQPWQAALFQGQQLLCGGVLVGGNWVLTAAHCKKPKYTVRLGDHSLQNKDGPEQE

SEQ ID NO: 7580 - protein, 260 aa, Homo Sapiens
MGRPRPRAAKTWMFLLLLGGAWAGHSRAQEDKVLGGHECQPHSQPWQAALFQGQQLLCGGVLVGGNWVLTAAHCKKPKYTVRLGDHSLQNKDGPEQEIPVVQSIPHPCYNSSDVEDHNHDLMLLQLRDQASLGSKVKPISLADHCTQPGQKCTVSGWGTVTSPRENFPDTLNCAEVKIFPQKKCEDAYPGQITDGMVCAGSSKGADTCQGDSGGPLVCDGALQGITSWGSDPCGRSDKPGVYTNICRYLDWIKKIIGSKG

SEQ ID NO: 7581 - protein, 32 aa, Homo Sapiens
MGRPRPRAAKTWMFLLLLGGAWAGRFWRPPGV

SEQ ID NO: 7582 - protein, 32 aa, Homo Sapiens; identical to SEQ ID NO: 7581

SEQ ID NO: 7583 - protein, 139 aa, Homo Sapiens
MLLQLRDQASLGSKVKPISLADHCTQPGQKCTVSGWGTVTSPRENFPDTLNCAEVKIFPQKKCEDAYPGQITDGMVCAGSSKGADTCQGDSGGPLVCDGALQGITSWGSDPCGRSDKPGVYTNICRYLDWIKKIIGSKG

SEQ ID NO: 7584 - protein, 54 aa, Homo Sapiens
  misc_feature (1)..(1): Xaa can be any naturally occurring amino acid
XLLLLGGAWAGNTQYAWETTAYRIKMAQSKKYLWFSPSHTPATTAAMWRTTTMI

SEQ ID NO: 7585 - protein, 250 aa, Homo Sapiens
MKLGLLCALLSLLAGHGWADTRAIGAEECRPNSQPWQAGLFHLTRLFCGATLISDRWLLTAAHCRKPYLWVRLGEHHLWKWEGPEQLFRVTDFFPHPGFNKDLSANDHNDDIMLIRLPRQARLSPAVQPLNLSQTCVSPGMQCLISGWGAVSSPKALFPVTLQCANISILENKLCHWAYPGHISDSMLCAGLWEGGRGSCQGDSGGPLVCNGTLAGVVSGGAEPCSRPRRPAVYTSVCHYLDWIQEIMEN

SEQ ID NO: 7586 - protein, 61 aa, Homo Sapiens
MKLGLLCALLSLLAGICGSALESTTSGNGRVRSSCSGLRTSSPTLASTRTSAPMTTMMTSC

SEQ ID NO: 7587 - protein, 148 aa, Homo Sapiens
MILFKQATYFISLFATVSCGCLTQLYENAFFRGGDVASMYTPNAQYCQMRCTFHPRCLLFSFLPASSINDMEKRFGCFLKDSVTGTLPKVHRTGAVSGHSLKQCGHQISACHRDIYKGVDMRGVNFNVSKVSSVEECQKRCTSNIRCQ

SEQ ID NO: 7588 - protein, 638 aa, Homo Sapiens
MILFKQATYFISLFATVSCGCLTQLYENAFFRGGDVASMYTPNAQYCQMRCTFHPRCLLFSFLPASSINDMEKRFGCFLKDSVTGTLPKVHRTGAVSGHSLKQCGHQISACHRDIYKGVDMRGVNFNVSKVSSVEECQKRCTSNIRCQFFSYATQTFHKAEYRNNCLLKYSPGGTPTAIKVLSNVESGFSLKPCALSEIGCHMNIFQHLAFSDVDVARVLTPDAFVCRTICTYHPNCLFFTFYTNVWKIESQRNVCLLKTSESGTPSSSTPQENTISGYSLLTCKRTLPEPCHSKIYPGVDFGGEELNVTFVKGVNVCQETCTKMIRCQFFTYSLLPEDCKEEKCKCFLRLSMDGSPTRIAYGTQGSSGYSLRLCNTGDNSVCTTKTSTRIVGGTNSSWGEWPWQVSLQVKLTAQRHLCGGSLIGHQWVLTAAHCFDGLPLQDVWRIYSGILNLSDITKDTPFSQIKEIIIHQNYKVSEGNHDIALIKLQAPLNYTEFQKPICLPSKGDTSTIYTNCWVTGWGFSKEKGEIQNILQKVNIPLVTNEECQKRYQDYKITQRMVCAGYKEGGKDACKGDSGGPLVCKHNGMWRLVGITSWGEGCARREQPGVYTKVAEYMDWILEKTQSSDGKAQMQSPA

SEQ ID NO: 7589 - protein, 141 aa, Homo Sapiens
MYTPNAQYCQMRCTFHPRCLLFSFLPASSINDMEKRFGCFLKDSVTGTLPKVHRTGAVSGHSLKQCGHQISACHRDIYKGVDMRGVNFNVSKVSSVEECQKRCTSNIRCQFFSYATQTFHKAEYRNNCLLKYSPGGTPTAI

SEQ ID NO: 7590 - protein, 514 aa, Homo Sapiens
MYTPNAQYCQMRCTFHPRCLLFSFLPASSINDMEKRFGCFLKDSVTGTLPKVHRTGAVSGHSLKQCGHQISACHRDIYKGVDMRGVNFNVSKVSSVEECQKRCTSNIRCQFFSYATQTFHKAEYRNNCLLKYSPGGTPTAIKVLSNVESGFSLKPCALSEIGCHMNIFQHLAFSDVDVARVLTPDAFVCRTICTYHPNCLFFTFYTNVWKIESQRNVCLLKTSESGTPSSSTPQENTISGYSLLTCKRTLPEPCHSKIYPGVDFGGEELNVTFVKGVNVCQETCTKMIRCQFFTYSLLPEDCKEEKCKCFLRLSMDGSPTRIAYGTQGSSGYSLRLCNTGDNSVCTTKTSTRIVGGTNSSWGEWPWQVSLQVKLTAQRHLCGGSLIGHQWVLTAAHCFDGLPLQDVWRIYSGILNLSDITKDTPFSQIKEIIIHQNYKVSEGNHDIALIKLQAPLNYTEFQKPICLPSKGDTSTIYTNCWVTGWGFSKEKGRFRWSLSLQTQWNVAFGGHHQLG

SEQ ID NO: 7591 - protein, 686 aa, Homo Sapiens
  misc_feature (1)..(1): Xaa can be any naturally occurring amino acid
XSEDCEVAGYRVLKGTEAVIIPYALHRDPRYFPNPEEFQPERFFPENAQGRHPYAYVPFSAGPRNCIGCLTQLYENAFFRGGDVASMYTPNAQYCQMRCTFHPRCLLFSFLPASSINDMEKRFGCFLKDSVTGTLPKVHRTGAVSGHSLKQCGHQISACHRDIYKGVDMRGVNFNVSKVSSVEECQKRCTSNIRCQFFSYATQTFHKAEYRNNCLLKYSPGGTPTAIKVLSNVESGFSLKPCALSEIGCHMNIFQHLAFSDVDVARVLTPDAFVCRTICTYHPNCLFFTFYTNVWKIESQRNVCLLKTSESGTPSSSTPQENTISGYSLLTCKRTLPEPCHSKIYPGVDFGGEELNVTFVKGVNVCQETCTKMIRCQFFTYSLLPEDCKEEKCKCFLRLSMDGSPTRIAYGTQGSSGYSLRLCNTGDNSVCTTKTSTRIVGGTNSSWGEWPWQVSLQVKLTAQRHLCGGSLIGHQWVLTAAHCFDGLPLQDVWRIYSGILNLSDITKDTPFSQIKEIIIHQNYKVSEGNHDIALIKLQAPLNYTEFQKPICLPSKGDTSTIYTNCWVTGWGFSKEKGEIQNILQKVNIPLVTNEECQKRYQDYKITQRMVCAGYKEGGKDACKGDSGGPLVCKHNGMWRLVGITSWGEGCARREQPGVYTKVAEYMDWILEKTQSSDGKAQMQSPA

SEQ ID NO: 7592 - protein, 91 aa, Homo Sapiens
MARGERIYRAVKDLFLHEPEQMLWNAFPPSGRELSYTSRSQMPGETISRNLQETRREKKCWERSTERHEVRGTEDQRRQERSPGTFSKPKI

SEQ ID NO: 7593 - protein, 352 aa, Homo Sapiens
MARGRKMSKPRAVEAAAAAAAVAATAPGPEMVERRGPGRPRTDGENVFTGQSKIYSYMSPNKCSGMRFPLQEENSVTHHEVKCQGKPLAGIYRKREEKRNAGNAVRSAMKSEEQKIKDARKGPLVPFPNQKSEAAEPPKTPPSSCDSTNAAIAKQALKKPIKGKQAPRKKAQGKTQQNRKLTDFYPVRRSSRKSKAELQSEERKRIDELIESGKEEGMKIDLIDGKGRGVIATKQFSRGDFVVEYHGDLIEITDAKKREALYAQDPSTGCYMYYFQYLSKTYCVDATRETNRLGRLINHSKCGNCQTKLHDIDGVPHLILIASRDIAAGEELLYDYGDRSKASIEAHPWLKH

SEQ ID NO: 7594 - protein, 299 aa, Homo Sapiens
MRWLWLLLFPDSPVTLREVLPSQPWRLRGCSDLRGENVFTGQSKIYSYMSPNKCSGMRFPLQEENSVTHHEVKCQGKPLAGIYRKREEKRNAGNAVRSAMKSEEQKIKDARKGPLVPFPNQKSEAAEPPKTPPSSCDSTNAAIAKQALKKPIKGKQAPRKKAQGKTQQNRKLTDFYPVRRSSRKSKAELQSEERKRIDELIESGKEEGMKIDLIDGKGRGVIATKQFSRGDFVVEYHGDLIEITDAKKREALYAQDPSTGCYMYYFQYLSKTYCVDATRETNRLGRLINHSKCGNCQTK

SEQ ID NO: 7595 - protein, 322 aa, Homo Sapiens
MVERRGPGRPRTDGENVFTGQSKIYSYMSPNKCSGMRFPLQEENSVTHHEVKCQGKPLAGIYRKREEKRNAGNAVRSAMKSEEQKIKDARKGPLVPFPNQKSEAAEPPKTPPSSCDSTNAAIAKQALKKPIKGKQAPRKKAQGKTQQNRKLTDFYPVRRSSRKSKAELQSEERKRIDELIESGKEEGMKIDLIDGKGRGVIATKQFSRGDFVVEYHGDLIEITDAKKREALYAQDPSTGCYMYYFQYLSKTYCVDATRETNRLGRLINHSKCGNCQTKLHDIDGVPHLILIASRDIAAGEELLYDYGDRSKASIEAHPWLKH

SEQ ID NO: 7596 - protein, 1749 aa, Homo Sapiens
MQAMDPAAADLYEEDGKDLDFYDFEPLPTLPEDEENVSLADILSLRDRGLSEQEAWAVCLECSLSMRSVAHAAIFQSLCITPDTLAFNTSGNVCFMEQLSDDPEGAFVPPEFDVTGNTFEAHIYSLGATLKAALEYVAEPTLEPRLSQDLEALLSRMQAEDPGDRPDLESIIALCEEKLQLTSSCRVCRSLSAVGRRVLSIESFGALQDVSESSWRERPAPGNAGPRRPPGDPSTDPEVLPTPEGPESETSRGPRASPTKALLSTPVRNGESHSREGLAGLVLDAERTLGELDRDALRRSRLRKVQTFPRLLSDSPEATLCLPLTRGKSQLPISELFSPDPRKAFLDRKNGLSSFQAQPKCRLWPEQEPEHQLGRVPCAGRSTDRGPGVPGSPGQPETSHPSQGPAEAPADPRDASGEAQTPRDDERIPEGARQLESAAAEQWVSLQDLLSQLGRPFREYELWALCLACLRALQTRPEHPAYLCLDSVLVAEDGAVLFQPPPANGSYDSFFLAPELAEERLVTEKASVYCVAAVLWTAAKFSVPRNHKLALPRRLKTLLLDMARRSAPERPSAAEAIKVCGSYLLQRGMDSRKILAHLRASICQVYQEEETISLQNAFSVVELKPSVAPAPEPSPGFLPVNSDTGLVAVPGPVPGQHPCGEEATQLPAAFTSEATHFKPIVLAQNASVARDQPALAQEESEERGGQREGEGEEKLSLEAHAGSPSLKTPDGPVPGPGPQGAAPEPLGASVQRDSAQGRPCPPPQAPANQPEGASSAAPGSPVPAPPTKASALPVEQGPAEPIPPGVASGGLRPDALGPTTAHHGPRHPPKPPRSKATERPGQEPEGPGATPAGERDDQSPDSVPERPRPADRRLCLPCVDASPLPGRTACPSLQEATRLIQEEFAFDGYLDNGLEALIMGEYIFALKDLTFATFCGAISEKFCDLYWDEKLLQNLFKVVNGQASPSPSTAEEAGSQLEGSQSPRSPSSKRPSLHRLGKEKPAMARTSSRAPCSPTSVSDVDSDALSRGNFEVGFRPQRSVKAERAQQPEAGEDRRPAGGASDVEAVTRLARSKGVGPALSPGPAGFQSCSPGWCSAFYEADCFGADVHNYVKDLGRQQADGALPDAQSPELEQQLMMEKRNYRKTLKFYQKLLQKEKRNKGSDVKTMLSKLKGQLEEMKSRVQFLSLVKKYLQVMYAERWGLEPCTLPVIVNIAAAPCDTLDFSPLDESSSLIFYNVNKHPGGRQKARILQAGTPLGLMAYLYSSDAFLEGYVQQFLYTFRYFCTPHDFLHFLLDRINSTLTRAHQDPTSTFTKIYRRSLCVLQAWVEDCYAVDFPRNSGLLGKLEDFISSKILPLDGSAKHLLGLLEVGMDRRAEGNPRGTDLENPREAEEDARPFNALCKRLSEDGISRKSFPWRLPRGNGLVLPPHKERPYTIAAALPKPCFLEDFYGPCAKTSEKGPYFLTEYSTHQLFSQLTLLQQELFQKCHPVHFLNSRALGVMDKSTAIPKASSSESLSAKTCSLFLPNYVQDKYLLQLLRNADDVSTWVAAEIVTSHTSKLQVNLLSKFLLIAKSCYEQRNFATAMQILSGLEHLAVRQSPAWRILPAKIAEVMEELKAVEVFLKSDSLCLMEGRRFRAQPTLPSAHLLAMHIQQLETGGFTMTNGAHRWSKLRNIAKVVSQVHAFQENPYTFSPDPKLQSYLKQRIARFSGADISTLAADSRANFHQVSSEKHSRKIQDKLRRMKATFQ

SEQ ID NO: 7597 - protein, 1141 aa, Homo Sapiens
MRSVAHAAIFQSLCITPDTLAFNTSGNVCFMEQLSDDPEGAFVPPEFDVTGNTFEAHIYSLGATLKAALEYVAEPTLEPRLSQDLEALLSRMQAEDPGDRPDLESIIALCEEKLQLTSSCRVCRSLSAVGRRVLSIESFGALQDVSESSWRERPAPGNAGPRRPPGDPSTDPEVLPTPEGPESETSRGPRASPTKALLSTPVRNGESHSREGLAGLVLDAERTLGELDRDALRRSRLRKVQTFPRLLSDSPEATLCLPLTRGKSQLPISELFSPDPRKAFLDRKNGLSSFQAQPKCRLWPEQEPEHQLGRVPCAGRSTDRGPGVPGSPGQPETSHPSQGPAEAPADPRDASGEAQTPRDDERIPEGARQLESAAAEQWVSLQDLLSQLGRPFREYELWALCLACLRALQTRPEHPAYLCLDSVLVAEDGAVLFQPPPANGSYDSFFLAPELAEERLVTEKASVYCVAAVLWTAAKFSVPRNHKLALPRRLKTLLLDMARRSAPERPSAAEAIKVCGSYLLQRGMDSRKILAHLRASICQVYQEEETISLQNAFSVVELKPSVAPAPEPSPGFLPVNSDTGLVAVPGPVPGQHPCGEEATQLPAAFTSEATHFKPIVLAQNASVARDQPALAQEESEERGGQREGEGEEKLSLEAHAGSPSLKTPDGPVPGPGPQGAAPEPLGASVQRDSAQGRPCPPPQAPANQPEGASSAAPGSPVPAPPTKASALPVEQGPAEPIPPGVASGGLRPDALGPTTAHHGPRHPPKPPRSKATERPGQEPEGPGATPAGERDDQSPDSVPERPRPADRRLCLPCVDASPLPGRTACPSLQEATRLIQEEFAFDGYLDNGLEALIMGEYIFALKDLTFATFCGAISEKFCDLYWDEKLLQNLFKVVNGQASPSPSTAEEAGSQLEGSQSPRSPSSKRPSLHRLGKEKPAMARTSSRAPCSPTSVSDVDSDALSRGNFEVGFRPQRSVKAERAQQPEAGEDRRPAGGASDVEAVTRLARSKGVGPALSPGPAGFQSCSPGWCSAFYEADCFGADVHNYVKDLGRQQADGALPDAQSPELEQQLMMEKRNYRKTLKFYQKLLQKEKRNKGSDVKTMLSKLKGQLEEMKSRVQFLSLVKKYLQASGLRAPLCPVRQ

SEQ ID NO: 7598 - protein, 391 aa, Homo Sapiens
MKLITILFLCSRLLLSLTQESQSEEIDCNDKDLFKAVDAALKKYNSQNQSNNQFVLYRITEATKTVGSDTFYSFKYEIKEGDCPVQSGKTWQDCEYKDAAKAATGECTATVGKRSSTKFSVATQTCQITPAEGPVVTAQYDCLGCVHPISTQSPDLEPILRHGIQYFNNNTQHSSLFMLNEVKRAQRQDTGECTDNAYIDIQLRIASFSQNCDIYPGKDFVQPPTKICVGCPRDIPTNSPELEETLTHTITKLNAENNATFYFKIDNVKKARVQVVAGKKYFIDFVARETTCSKESNEELTESCETKKLGQSLDCNAEVYVVPWEKKIYPTVNCQPLGMISLMKRPPGFSPFRSSRIGEIKEETTSHLRSCEYKGRPPKAGAEPASEREVS

SEQ ID NO: 7599 - protein, 427 aa, Homo Sapiens
MKLITILFLCSRLLLSLTQESQSEEIDCNDKDLFKAVDAALKKYNSQNQSNNQFVLYRITEATKTVGSDTFYSFKYEIKEGDCPVQSGKTWQDCEYKDAAKAATGECTATVGKRSSTKFSVATQTCQITPAEGPVVTAQYDCLGCVHPISTQSPDLEPILRHGIQYFNNNTQHSSLFMLNEVKRAQRQVVAGLNFRITYSIVQTNCSKENFLFLTPDCKSLWNGDTGECTDNAYIDIQLRIASFSQNCDIYPGKDFVQPPTKICVGCPRDIPTNSPELEETLTHTITKLNAENNATFYFKIDNVKKARVQVVAGKKYFIDFVARETTCSKESNEELTESCETKKLGQSLDCNAEVYVVPWEKKIYPTVNCQPLGMISLMKRPPGFSPFRSSRIGEIKEETTSHLRSCEYKGRPPKAGAEPASEREVS

SEQ ID NO: 7600 - protein, 644 aa, Homo Sapiens
MKLITILFLCSRLLLSLTQESQSEEIDCNDKDLFKAVDAALKKYNSQNQSNNQFVLYRITEATKTVGSDTFYSFKYEIKEGDCPVQSGKTWQDCEYKDAAKAATGECTATVGKRSSTKFSVATQTCQITPAEGPVVTAQYDCLGCVHPISTQSPDLEPILRHGIQYFNNNTQHSSLFMLNEVKRAQRQVVAGLNFRITYSIVQTNCSKENFLFLTPDCKSLWNGDTGECTDNAYIDIQLRIASFSQNCDIYPGKDFVQPPTKICVGCPRDIPTNSPELEETLTHTITKLNAENNATFYFKIDNVKKARVQVVAGKKYFIDFVARETTCSKESNEELTESCETKKLGQSLDCNAEVYVVPWEKKIYPTVNCQPLGMISLMKRPPGFSPFRSSRIGEIKEETTVSPPHTSMAPAQDEERDSGKEQGHTRRHDWGHEKQRKHNLGHGHKHERDQGHGHQRGHGLGHGHEQQHGLGHGHKFKLDDDLEHQGGHVLDHGHKHKHGHGHGKHKNKGKKNGKHNGWKTEHLASSSEDSTTPSAQTQEKTEGPTPIPSLAKPGVTVTFSDFQDSDLIATMMPPISPAPIQSDDDWIPDIQIDPNGLSFNPISDFPDTTSPKCPGRPWKSVSEINPTTQMKESYYFDLTDGLS

SEQ ID NO: 7601 - protein, 427 aa, Homo Sapiens; identical to SEQ ID NO: 7599

SEQ ID NO: 7602 - protein, 644 aa, Homo Sapiens; identical to SEQ ID NO: 7600

SEQ ID NO: 7603 - protein, 458 aa, Homo Sapiens
MLFQEATAFENMTKDWNYLEGSQKDCYRDTMLDSYENTVPQGSFLQLSMMPQRAGNDPPGVSNASEMEMEISNMREKFLMSVTKLVESKSYNSKVFSKEKYFQTIKEVKEAKEKGKKSSRDYRRAAKYDVISVQGTEKLIEATHGERDRIRYYVHKEELFDILHDTHLSIGHGGRTRMLKELQGKYGNVTKEVIVLYLTLCKQCHQKNPVPKRGLAPKPMTFKDIDSTCQVEILDMQSSADGEFKFILYYQDHSTKFIILRPLRTKQAHEVVSVLLDIFTILGTPSVLDSDSGVEFTNQVVHELNELWPDLKIVSGKYHPGQSQGSLEGASRDVKNMISTWMQSNHSCHWAKGLRFMQMVRNQAFDVSLQQSPFEAMFGYKAKFGLYSSNLPRETVATLQTEEELEIAEEQLENSLWIRQEERAEIGADRSDMDDDMDPTPEASEPSTSQGTSGLLCW

SEQ ID NO: 7604 - protein, 410 aa, Homo Sapiens
MMPQRAGNDPPGVSNASEMEMEISNMREKFLMSVTKLVESKSYNSKVFSKEKYFQTIKEVKEAKEKGKKSSRDYRRAAKYDVISVQGTEKLIEATHGERDRIRYYVHKEELFDILHDTHLSIGHGGRTRMLKELQGKYGNVTKEVIVLYLTLCKQCHQKNPVPKRGLAPKPMTFKDIDSTCQVEILDMQSSADGEFKFILYYQDHSTKFIILRPLRTKQAHEVVSVLLDIFTILGTPSVLDSDSGVEFTNQVVHELNELWPDLKIVSGKYHPGQSQGSLEGASRDVKNMISTWMQSNHSCHWAKGLRFMQMVRNQAFDVSLQQSPFEAMFGYKAKFGLYSSNLPRETVATLQTEEELEIAEEQLENSLWIRQEERAEIGADRSDMDDDMDPTPEASEPSTSQGTSGLLCW

SEQ ID NO: 7605 - protein, 492 aa, Homo Sapiens
MPSFLVPSLVSSPVLLKLLFSPGPKTIWSLWQQPMLFQEATAFENMTKDWNYLEGSQKDCYRDTMLDSYENTVPQGSFLQLSMMPQRAGNDPPGVSNASEMEMEISNMREKFLMSVTKLVESKSYNSKVFSKEKYFQTIKEVKEAKEKGKKSSRDYRRAAKYDVISVQGTEKLIEATHGERDRIRYYVHKEELFDILHDTHLSIGHGGRTRMLKELQGKYGNVTKEVIVLYLTLCKQCHQKNPVPKRGLAPKPMTFKDIDSTCQVEILDMQSSADGEFKFILYYQDHSTKFIILRPLRTKQAHEVVSVLLDIFTILGTPSVLDSDSGVEFTNQVVHELNELWPDLKIVSGKYHPGQSQGSLEGASRDVKNMISTWMQSNHSCHWAKGLRFMQMVRNQAFDVSLQQSPFEAMFGYKAKFGLYSSNLPRETVATLQTEEELEIAEEQLENSLWIRQEERAEIGADRSDMDDDMDPTPEASEPSTSQGTSGLLCW

SEQ ID NO: 7606 - protein, 492 aa, Homo Sapiens; identical to SEQ ID NO: 7605

SEQ ID NO: 7607 - protein, 462 aa, Homo Sapiens
MGTQALQGFLFLLFLPLLQPRGASAGSLHSPGLSECFQVNGADYRGHQNRTGPRGAGRPCLFWDQTQQHSYSSASDPHGRWGLGAHNFCRNPDGDVQPWCYVAETEEGIYWRYCDIPSCHMPGYLGCFVDSGAPPALSGPSGTSTKLTVQVCLRFCRMKGYQLAGVEAGYACFCGSESDLARGRLAPATDCDQICFGHPGQLCGGDGRLGVYEVSVGSCQGNWTAPQGVIYSPDFPDEYGPDRNCSWALGPPGAALELTFRLFELADPRDRLELRDAASGSLLRAFDGARPPPSGPLRLGTAALLLTFRSDARGHAQGFALTYRGLQDAAEDPEAPEGSAQTPAAPLDGANVSCSPRPGAPPAAIGARVFSTVTAVSVLLLLLLGLLRPLRRRSCLLAPGKGPPALGASRGPRRSWAVWYQQPRGVALPCSPGDPQAEGSAAGYRPLSASSQSSLRSLISAL

SEQ ID NO: 7608 - protein, 420 aa, Homo Sapiens
MGTQALQGFLFLLFLPLLQPRGASAGSLHSPGLSECFQVNGADYRGHQNRTGPRGAGRPCLFWDQTQQHSYSSASDPHGRWGLGAHNFCRNPDGDVQPWCYVAETEEGIYWRYCDIPSCHMPGYLGCFVDSGAPPALSGPSGTSTKLTVQVCLRFCRMKGYQLAGVEAGYACFCGSESDLARGRLAPATDCDQICFGHPGQLCGGDGRLGVYEVSVGSCQGNWTAPQGVIYSPDFPDEYGPDRNCSWALGPPGAALELTFRLFELADPRDRLELRDAASGSLLRAFDGARPPPSGPLRLGTAALLLTFRSDARGHAQGFALTYRGLQDAAEDPEAPEGSAQTPAAPLDGANVSCSPRPGAPPAAIGGAVCWLREKGPRRWGLPGAPGEAGLCGTNSPEGWPCPAPPGTPRLRVLPRATGL

SEQ ID NO: 7609 - protein, 399 aa, Homo Sapiens
MGTQALQGFLFLLFLPLLQPRGASAGSLHSPGLSECFQVNGADYRGHQNRTGPRGAGRPCLFWDQTQQHSYSSASDPHGRWGLGAHNFCRNPDGDVQPWCYVAETEEGIYWRYCDIPSCHMPGYLGCFVDSGAPPALSGPSGTSTKLTVQVCLRFCRMKGYQLAGVEAGYACFCGSESDLARGRLAPATDCDQICFGHPGQLCGGDGRLGVYEVSVGSCQGNWTAPQGVIYSPDFPDEYGPDRNCSWALGPPGAALELTFRLFELADPRDRLELRDAASGSLLRAFDGARPPPSGPLRLGTAALLLTFRSDARGHAQGFALTYRGLQDAAEDPEAPEGSAQTPAAPLDGANVSCSPRPGAPPAAIGGEAGARDGSESGSRPLAPILTAAVCPQPGSSRR

SEQ ID NO: 7610 - protein, 424 aa, Homo Sapiens
MGTQALQGFLFLLFLPLLQPRGASAGSLHSPGLSECFQVNGADYRGHQNRTGPRGAGRPCLFWDQTQQHSYSSASDPHGRWGLGAHNFCRNPDGDVQPWCYVAETEEGIYWRYCDIPSCHMPGYLGCFVDSGAPPALSGPSGTSTKLTVQVCLRFCRMKGYQLAGVEAGYACFCGSESDLARGRLAPATDCDQICFGHPGQLCGGDGRLGVYEVSVGSCQGNWTAPQGVIYSPDFPDEYGPDRNCSWALGPPGAALELTFRLFELADPRDRLELRDAASGSLLRAFDGARPPPSGPLRLGTAALLLTFRSDARGHAQGFALTYRGLQDAAEDPEAPEGSAQTPAAPLDGANVSCSPRPGAPPAAIGARVFSTVTAVSVLLLLLLGLLRPLRRRCGALGQGLRADRWWGAGAPEGNRARKELLGS

SEQ ID NO: 7611 - protein, 381 aa, Homo Sapiens
MGTQALQGFLFLLFLPLLQPRGASAGSLHSPGLSECFQVNGADYRGHQNRTGPRGAGRPCLFWDQTQQHSYSSASDPHGRWGLGAHNFCRNPDGDVQPWCYVAETEEGIYWRYCDIPSCHMPGYLGCFVDSGAPPALSGPSGTSTKLTVQVCLRFCRMKGYQLCGGDGRLGVYEVSVGSCQGNWTAPQGVIYSPDFPDEYGPDRNCSWALGPPGAALELTFRLFELADPRDRLELRDAASGSLLRAFDGARPPPSGPLRLGTAALLLTFRSDARGHAQGFALTYRGLQDAAEDPEAPEGSAQTPAAPLDGANVSCSPRPGAPPAAIGGAVCWLREKGPRRWGLPGAPGEAGLCGTNSPEGWPCPAPPGTPRLRVLPRATGL

SEQ ID NO: 7612 - protein, 423 aa, Homo Sapiens
MGTQALQGFLFLLFLPLLQPRGASAGSLHSPGLSECFQVNGADYRGHQNRTGPRGAGRPCLFWDQTQQHSYSSASDPHGRWGLGAHNFCRNPDGDVQPWCYVAETEEGIYWRYCDIPSCHMPGYLGCFVDSGAPPALSGPSGTSTKLTVQVCLRFCRMKGYQLCGGDGRLGVYEVSVGSCQGNWTAPQGVIYSPDFPDEYGPDRNCSWALGPPGAALELTFRLFELADPRDRLELRDAASGSLLRAFDGARPPPSGPLRLGTAALLLTFRSDARGHAQGFALTYRGLQDAAEDPEAPEGSAQTPAAPLDGANVSCSPRPGAPPAAIGARVFSTVTAVSVLLLLLLGLLRPLRRRSCLLAPGKGPPALGASRGPRRSWAVWYQQPRGVALPCSPGDPQAEGSAAGYRPLSASSQSSLRSLISAL

SEQ ID NO: 7613 - protein, 85 aa, Homo Sapiens
MKIPVLPAVVLLSLLVLHSAQGATLGGPEEESTIENYASRPEAFKADEFLNWHALFESIKRKLPFLNWDAFPKLKGLRSATPDAQ

SEQ ID NO: 7614 - protein, 99 aa, Homo Sapiens
MKIPVLPAVVLLSLLVLHSAQGATLGGPEEESTIENYASRPEAFNTPFLNIDKLRSAFKADEFLNWHALFESIKRKLPFLNWDAFPKLKGLRSATPDAQ

SEQ ID NO: 7615 - protein, 153 aa, Homo Sapiens
EEKGGASLSPQYVSYNQSSYTQWDLQPDTDYEIHLFKERMFRHQMAVKTNGTVKDKEDTQVDSEARPMKDETFGEYSDNEEKAFGSSQPSLNGDIKPLGSDDSLADYGGSVDVQFNEDGSFIGQYSGKKEKEAAGGNDSSGATSPINPAVALE

SEQ ID NO: 7616 - protein, 90 aa, Homo Sapiens
MVVALRYVWPLLLCSPCLLIQIPEELMEPPVITEQSPRRLVVFPTDDISLKCEASGKPEVQFRWTRDGVHFKPKEELGVTVYQSPHSGSF

SEQ ID NO: 7617 - protein, 128 aa, Homo Sapiens
MVVALRYVWPLLLCSPCLLIQIPEELMEPPVITEQSPRRLVVFPTDDISLKCEASGKPEVQFRWTRDGVHFKPKEELGVTVYQSPHSGSFTITGNNSNFAQRFQGIYRCFASNKLGTAMSHEIRLMAE

SEQ ID NO: 7618 - protein, 1248 aa, Homo Sapiens
MVVALRYVWPLLLCSPCLLIQIPEELMEPPVITEQSPRRLVVFPTDDISLKCEASGKPEVQFRWTRDGVHFKPKEELGVTVYQSPHSGSFTITGNNSNFAQRFQGIYRCFASNKLGTAMSHEIRLMAEGAPKWPKETVKPVEVEEGESVVLPCNPPPSAEPLRIYWMNSKILHIKQDERVTMGQNGNLYFANVLTSDNHSDYICHAHFPGTRTIIQKEPIDLRVKATNSMIDRKPRLLFPTNSSSHLVALQGQPLVLECIAEGFPTPTIKWLRPSGPMPADRVTYQNHNKTLQLLKVGEEDDGEYRCLAENSLGSARHAYYVTVEAAPYWLHKPQSHLYGPGETARLDCQVQGRPQPEVTWRINGIPVEELAKDQKYRIQRGALILSNVQPSDTMVTQCEARNRHGLLLANAYIYVVQLPAKILTADNQTYMAVQGSTAYLLCKAFGAPVPSVQWLDEDGTTVLQDERFFPYANGTLGIRDLQANDTGRYFCLAANDQNNVTIMANLKVKDATQITQGPRSTIEKKGSRVTFTCQASFDPSLQPSITWRGDGRDLQELGDSDKYFIEDGRLVIHSLDYSDQGNYSCVASTELDVVESRAQLLVVGSPGPVPRLVLSDLHLLTQSQVRVSWSPAEDHNAPIEKYDIEFEDKEMAPEKWYSLGKVPGNQTSTTLKLSPYVHYTFRVTAINKYGPGEPSPVSETVVTPEAAPEKNPVDVKGEGNETTNMVITWKPLRWMDWNAPQVQYRVQWRPQGTRGPWQEQIVSDPFLVVSNTSTFVPYEIKVQAVNSQGKGPEPQVTIGYSGEDYPQAIPELEGIEILNSSAVLVKWRPVDLAQVKGHLRGYNVTYWREGSQRKHSKRHIHKDHVVVPANTTSVILSGLRPYSSYHLEVQAFNGRGSGPASEFTFSTPEGVPGHPEALHLECQSNTSLLLRWQPPLSHNGVLTGYVLSYHPLDEGGKGQLSFNLRDPELRTHNLTDLSPHLRYRFQLQATTKEGPGEAIVREGGTMALSGISDFGNISATAGENYSVVSWVPKEGQCNFRFHILFKALGEEKGGASLSPQYVSYNQSSYTQWDLQPDTDYEIHLFKERMFRHQMAVKTNGTGRVRLPPAGFATEGWFIGFVSAIILLLLVLLILCFIKRSKGGKYSVKDKEDTQVDSEARPMKDETFGEYSDNEEKAFGSSQPSLNGDIKPLGSDDSLADYGGSVDVQFNEDGSFIGQYSGKKEKEAAGGNDSSGATSPINPAVALE

SEQ ID NO: 7619 - protein, 1248 aa, Homo Sapiens; identical to SEQ ID NO: 7618

SEQ ID NO: 7620 - protein, 84 aa, Homo Sapiens
MVVALRYVWPLLLCSPCLLIQIPEEYEGHHVMEPPVITEQSPRRLVVFPTDDISLKCEASGKPEVQFRWTRDGVHFKPKEELGV

SEQ ID NO: 7621 - protein, 151 aa, Homo Sapiens
MVVALRYVWPLLLCSPCLLIQIPEEYEGHHVMEPPVITEQSPRRLVVFPTDDISLKCEASGKPEVQFRWTRDGVHFKPKEELGVTVYQSPHSGSFTITGNNSNFAQRFQGIYRCFASNKLGTAMSHEIRLMAEGAPKWPKETVKPVEVEEG

SEQ ID NO: 7622 - protein, 1253 aa, Homo Sapiens
MVVALRYVWPLLLCSPCLLIQIPEEYEGHHVMEPPVITEQSPRRLVVFPTDDISLKCEASGKPEVQFRWTRDGVHFKPKEELGVTVYQSPHSGSFTITGNNSNFAQRFQGIYRCFASNKLGTAMSHEIRLMAEGAPKWPKETVKPVEVEEGESVVLPCNPPPSAEPLRIYWMNSKILHIKQDERVTMGQNGNLYFANVLTSDNHSDYICHAHFPGTRTIIQKEPIDLRVKATNSMIDRKPRLLFPTNSSSHLVALQGQPLVLECIAEGFPTPTIKWLRPSGPMPADRVTYQNHNKTLQLLKVGEEDDGEYRCLAENSLGSARHAYYVTVEAAPYWLHKPQSHLYGPGETARLDCQVQGRPQPEVTWRINGIPVEELAKDQKYRIQRGALILSNVQPSDTMVTQCEARNRHGLLLANAYIYVVQLPAKILTADNQTYMAVQGSTAYLLCKAFGAPVPSVQWLDEDGTTVLQDERFFPYANGTLGIRDLQANDTGRYFCLAANDQNNVTIMANLKVKDATQITQGPRSTIEKKGSRVTFTCQASFDPSLQPSITWRGDGRDLQELGDSDKYFIEDGRLVIHSLDYSDQGNYSCVASTELDVVESRAQLLVVGSPGPVPRLVLSDLHLLTQSQVRVSWSPAEDHNAPIEKYDIEFEDKEMAPEKWYSLGKVPGNQTSTTLKLSPYVHYTFRVTAINKYGPGEPSPVSETVVTPEAAPEKNPVDVKGEGNETTNMVITWKPLRWMDWNAPQVQYRVQWRPQGTRGPWQEQIVSDPFLVVSNTSTFVPYEIKVQAVNSQGKGPEPQVTIGYSGEDYPQAIPELEGIEILNSSAVLVKWRPVDLAQVKGHLRGYNVTYWREGSQRKHSKRHIHKDHVVVPANTTSVILSGLRPYSSYHLEVQAFNGRGSGPASEFTFSTPEGVPGHPEALHLECQSNTSLLLRWQPPLSHNGVLTGYVLSYHPLDEGGKGQLSFNLRDPELRTHNLTDLSPHLRYRFQLQATTKEGPGEAIVREGGTMALSGISDFGNISATAGENYSVVSWVPKEGQCNFRFHILFKALGEEKGGASLSPQYVSYNQSSYTQWDLQPDTDYEIHLFKERMFRHQMAVKTNGTGRVRLPPAGFATEGWFIGFVSAIILLLLVLLILCFIKRSKGGKYSVKDKEDTQVDSEARPMKDETFGEYSDNEEKAFGSSQPSLNGDIKPLGSDDSLADYGGSVDVQFNEDGSFIGQYSGKKEKEAAGGNDSSGATSPINPAVALE

SEQ ID NO: 7623 - protein, 1257 aa, Homo Sapiens
MVVALRYVWPLLLCSPCLLIQIPEEYEGHHVMEPPVITEQSPRRLVVFPTDDISLKCEASGKPEVQFRWTRDGVHFKPKEELGVTVYQSPHSGSFTITGNNSNFAQRFQGIYRCFASNKLGTAMSHEIRLMAEGAPKWPKETVKPVEVEEGESVVLPCNPPPSAEPLRIYWMNSKILHIKQDERVTMGQNGNLYFANVLTSDNHSDYICHAHFPGTRTIIQKEPIDLRVKATNSMIDRKPRLLFPTNSSSHLVALQGQPLVLECIAEGFPTPTIKWLRPSGPMPADRVTYQNHNKTLQLLKVGEEDDGEYRCLAENSLGSARHAYYVTVEAAPYWLHKPQSHLYGPGETARLDCQVQGRPQPEVTWRINGIPVEELAKDQKYRIQRGALILSNVQPSDTMVTQCEARNRHGLLLANAYIYVVQLPAKILTADNQTYMAVQGSTAYLLCKAFGAPVPSVQWLDEDGTTVLQDERFFPYANGTLGIRDLQANDTGRYFCLAANDQNNVTIMANLKVKDATQITQGPRSTIEKKGSRVTFTCQASFDPSLQPSITWRGDGRDLQELGDSDKYFIEDGRLVIHSLDYSDQGNYSCVASTELDVVESRAQLLVVGSPGPVPRLVLSDLHLLTQSQVRVSWSPAEDHNAPIEKYDIEFEDKEMAPEKWYSLGKVPGNQTSTTLKLSPYVHYTFRVTAINKYGPGEPSPVSETVVTPEAAPEKNPVDVKGEGNETTNMVITWKPLRWMDWNAPQVQYRVQWRPQGTRGPWQEQIVSDPFLVVSNTSTFVPYEIKVQAVNSQGKGPEPQVTIGYSGEDYPQAIPELEGIEILNSSAVLVKWRPVDLAQVKGHLRGYNVTYWREGSQRKHSKRHIHKDHVVVPANTTSVILSGLRPYSSYHLEVQAFNGRGSGPASEFTFSTPEGVPGHPEALHLECQSNTSLLLRWQPPLSHNGVLTGYVLSYHPLDEGGKGQLSFNLRDPELRTHNLTDLSPHLRYRFQLQATTKEGPGEAIVREGGTMALSGISDFGNISATAGENYSVVSWVPKEGQCNFRFHILFKALGEEKGGASLSPQYVSYNQSSYTQWDLQPDTDYEIHLFKERMFRHQMAVKTNGTGRVRLPPAGFATEGWFIGFVSAIILLLLVLLILCFIKRSKGGKYSVKDKEDTQVDSEARPMKDETFGEYRSLESDNEEKAFGSSQPSLNGDIKPLGSDDSLADYGGSVDVQFNEDGSFIGQYSGKKEKEAAGGNDSSGATSPINPAVALE

SEQ ID NO: 7624 - protein, 190 aa, Homo Sapiens
  misc_feature (1)..(1): Xaa can be any naturally occurring amino acid
XDPSLQPSITWRGDGRDLQELGDSDKYFIEDGRLVIHSLDYSDQGNYSCVASTELDVVESRAQLLVVEYDIEFEDKEMAPEKWYSLGKVPGNQTSTTLKLSPYVHYTFRVTAINKYGPGEPSPVSETVVTPEAAPEKNPVDVKGEGNETTNMVITWKPLRWMDWNAPQVQYRVQWRPQGTRGPWQEQIVS

SEQ ID NO: 7625 - protein, 232 aa, Homo Sapiens
ETPSSEPMEEEEDDDLELFGGYDSFRSYNSSVGSESSSYLEESSEAENEDREAGELPTSPLHLLSPGTPRSLDGSGSEPAVCEMCGIVGTREAFFSKTKRFCSVSCSRSYSSNSKKASILARLQGKPPTKKAKVLHKAAWSAKIGAFLHSQGTGQLADGTPTGQDALVLGFDWGKFLKDHSYKAAPVSCFKHGIGCCFGMKALKMTPAMTSGATWEQWMSTPLAGVPSTARS

SEQ ID NO: 7626 - protein, 705 aa, Homo Sapiens
MEKPRSIEETPSSEPMEEEEDDDLELFGGYDSFRSYNSSVGSESSSYLEESSEAENEDREAGELPTSPLHLLSPGTPRSLDGSGSEPAVCEMCGIVGTREAFFSKTKRFCSVSCSRSYSSNSKKASILARLQGKPPTKKAKVLHKAAWSAKIGAFLHSQGTGQLADGTPTGQDALVLGFDWGKFLKDHSYKAAPVSCFKHVPLYDQWEDVMKGMKVEVLNSDAVLPSRVYWIASVIQTAGYRVLLRYEGFENDASHDFWCNLGTVDVHPIGWCAINSKILVPPRTIHAKFTDWKGYLMKRLVGSRTLPVDFHIKMVESMKYPFRQGMRLEVVDKSQVSRTRMAVVDTVIGGRLRLLYEDGDSDDDFWCHMWSPLIHPVGWSRRVGHGIKMSERRSDMAHHPTFRKIYCDAVPYLFKKVRAVYTEGGWFEEGMKLEAIDPLNLGNICVATVCKVLLDGYLMICVDGGPSTDGLDWFCYHASSHAIFPATFCQKNDIELTPPKGYEAQTFNWENYLEKTKSKAAPSRLFNMDCPNHGFKVGMKLEAVDLMEPRLICVATVKRVVHRLLSIHFDGWDSEYDQWVDCESPDIYPVGWCELTGYQLQPPVAAEPATPLKAKEATKKKKKQFGKKRKRIPPTKTRPLRQGSKKPLLEDDPQGARKISSEPVPGEIIAVRVKEEHLDVASPDKASSPELPVSVENIKQETDD

SEQ ID NO: 7627 - protein, 614 aa, Homo Sapiens
MEKPRSIEETPSSEPMEEEEDDDLELFGGYDSFRSYNSSVGSESSSYLEESSEAENEDREAGELPTSPLHLLSPGTPRSLDGSGSEPAVCEMCGIVGTREAFFSKTKRFCSVSCSRSYSSNSKKASILARLQGKPPTKKAKVLHKAAWSAKIGAFLHSQGTGQLADGTPTGQDALVLGFDWGKFLKDHSYKAAPVSCFKHVPLYDQWEDVMKGMKVEVLNSDAVLPSRVYWIASVIQTAGYRVLLRYEGFENDASHDFWCNLGTVDVHPIGWCAINSKILVPPRTIHAKFTDWKGYLMKRLVGSRTLPVDFHIKMVESMKYPFRQGMRLEVVDKSQVSRTRMAVVDTVIGGRLRLLYEDGDSDDDFWCHMWSPLIHPVGWSRRVGHGIKMSERRSDMAHHPTFRKIYCDAVPYLFKKVRAVYTEGGWFEEGMKLEAIDPLNLGNICVATVCKVLLDGYLMICVDGGPSTDGLDWFCYHASSHAIFPATFCQKNDIELTPPKGYEAQTFNWENYLEKTKSKAAPSRLFNMDCPNHGFKVGMKLEAVDLMEPRLICVATVKRVVHRLLSIHFDGWDSEYDQWVDCESPDIYPVGWCELTGYQLQPPVAAGKLPRSL

SEQ ID NO: 7628 - protein, 40 aa, Homo Sapiens
MEKPRSIERWGVAVLPRLVSNSWVQAIHLPQPPKVLGLQM

SEQ ID NO: 7629 - protein, 288 aa, Homo Sapiens
  misc_feature (1)..(1): Xaa can be any naturally occurring amino acid
XRPHLQNQWRKRKMTTWSCLVAMIVSGVITAVWAVRAAPIWRSQVKQKMRIGKQGNCRPPRCICSALGLLAPWMAVVLSQGKPPTKKAKVLHKAAWSAKIGAFLHSQGTGQLADGTPTGQDALVLGFDWGKFLKDHSYKAAPVSCFKHVPLYDQWEDVMKGMKVEVLNSDAVLPSRVYWIASVIQTAGYRVLLRYEGFENDASHDFWCNLGTVDVHPIGWCAINSKILVPPRTIHAKFTDWKGYLMKRLVGSRTLPVDFHIKVGSEPLTDVPPSALPFFCILHATHWS

SEQ ID NO: 7630 - protein, 127 aa, Homo Sapiens
MKFTTLLFLAAVAGALVYAEDASSDSTGADPAQEAGTSKPNEEISGPAEPASPPETTTTAQETSAAAVQGTAKVTSSRQELNPLKQALAKAGKGMHGGVPGGKQFIENGSEFAQKLLKKFSLLKPWA

SEQ ID NO: 7631 - protein, 138 aa, Homo Sapiens
MKFTTLLFLAAVAGALVYAEDASSDSTGADPAQEAGTSKPNEEISGPAEPASPPETTTTAQETSAAAVQGTAKVTSSRQELNPLKSIVEKSILLTEQALAKAGKGMHGGVPGGKQFIENGSEFAQKLLKKFSLLKPWA

SEQ ID NO: 7632 - protein, 85 aa, Homo Sapiens
PAQEAGTSKPNEEISGPAEPASPPETTTTAQETSAAAVQGTAKVTSSRQELNPLKQALAKAGKGMHGGVPGGKQFIESECIPRWK

SEQ ID NO: 7633 - protein, 126 aa, Homo Sapiens
MRIASISKSLTMVALAKLWEAGKLDLDIPVQHYVPEFPEKEYEGEKVSVTTRLLISHLSGIRHYEKDIKKVKEEKAYKALKMMKENVAFEQEKEGKSNEKNDFTKFKTEQENEAKCRNSKPGKKKN

SEQ ID NO: 7634 - protein, 547 aa, Homo Sapiens
MYRLMSAVTARAAAPGGLASSCGRRGVHQRAGLPPLGHGWVGGLGLGLGLALGVKLAGGLRGAAPAQSPAAPDPEASPLAEPPQEQSLAPWSPQTPAPPCSRCFARAIESSRDLLHRIKDEVGAPGIVVGVSVDGKEVWSEGLGYADVENRVPCKPETVMRIASISKSLTMVALAKLWEAGKLDLDIPVQHYVPEFPEKEYEGEKVSVTTRLLISHLSGIRHYEKDIKKVKEEKAYKALKMMKENVAFEQEKEGKSNEKNDFTKFKTEQENEAKCRNSKPGKKKNDFEQGELYLREKFENSIESLRLFKNDPLFFKPGSQFLYSTFGYTLLAAIVERASGCKYLDYMQKIFHDLDMLTTVQEENEPVIYNRARFYVYNKKKRLVNTPYVDNSYKWAGGGFLSTVGDLLKFGNAMLYGYQVGLFKNSNENLLPGYLKPETMVMMWTPVPNTEMSWDKEGKYAMAWGVVERKQTYGSCRKQRHYASHTGGAVGASSVLLVLPEELDTETINNKVPPRGIIVSIICNMQSVGLNSTALKIALEFDKDRSD

SEQ ID NO: 7635 - protein, 373 aa, Homo Sapiens
MYRLMSAVTARAAAPGGLASSCGRRGVHQRAGLPPLGHGWVGGLGLGLGLALGVKLAGGLRGAAPAQSPAAPDPEASPLAEPPQEQSLAPWSPQTPAPPCSRCFARAIESSRDLLHRIKDEVGAPGIVVGVSVDGKEVWSEGLGYADVENRVPCKPETVMRIASISKSLTMVALAKLWEAGKLDLDIPVQHYVPEFPEKEYEGEKVSVTTRLLISHLSGIRHYEKDIKKVKEEKAYKALKMMKENVAFEQEKEGKSNEKNDFTKFKTEQENEAKCRNSKPGKKKNDFEQGELYLREKFENSIESLRLFKNDPLFFKPGSQFLYSTFGYTLLAAIVERASGCKYLDYMQKIFHDLDMLTTVQEENEPVIYNRAR

SEQ ID NO: 7636 - protein, 525 aa, Homo Sapiens
MWEAQFLGLLFLQPLWVAPVKPLQPGAEVPVVWAQEGAPAQLPCSPTIPLQDLSLLRRAGVTWQHQPDSGPPAAAPGHPLAPGPHPAAPSSWGPRPRRYTVLSVGPGGLRSGRLPLQPRVQLDERGRQRGDFSLWLRPARRADAGEYRAAVHLRDRALSCRLRLRLGQASMTASPPGSLRASDWVILNCSFSRPDRPASVHWFRNRGQGRVPVRESPHHHLAESFLFLPQVSPMDSGPWGCILTYRDGFNVSIMYNLTVLGLEPPTPLTVYAGAGSRVGLPCRLPAGVGTRSFLTAKWTPPGGGPDLLVTGDNGDFTLRLEDVSQAQAGTYTCHIHLQEQQLNATVTLAIITVTPKSFGSPGSLGKLLCEVTPVSGQERFVWSSLDTPSQRSFSGPWLEAQEAQLLSQPWQCQLYQGERLLGAAVYFTELSSPGAQRSGRAPGALPAGHLLLFLILGVLSLLLLVTGAFGFHLWRRQWRPRRFSALEQGIHPPQAQSKIEELEQEPEPEPEPEPEPEPEPEPEQL

SEQ ID NO: 7637 - protein, 360 aa, Homo Sapiens
MWEAQFLGLLFLQPLWVAPVKPLQPGAEVPVVWAQEGAPAQLPCSPTIPLQDLSLLRRAGVTWQHQPDSGPPAAAPGHPLAPGPHPAAPSSWGPRPRRYTVLSVGPGGLRSGRLPLQPRVQLDERGRQRGDFSLWLRPARRADAGEYRAAVHLRDRALSCRLRLRLGQASMTASPPGSLRASDWVILNCSFSRPDRPASVHWFRNRGQGRVPVRESPHHHLAESFLFLPQVSPMDSGPWGCILTYRDGFNVSIMYNLTVLGLEPPTPLTVYAGAGSRVGLPCRLPAGVGTRSFLTAKWTPPGGGPDLLVTGDNGDFTLRLEDVSQAQAGTYTCHIHLQEQQLNATVTLAIITGQPQVGKE

SEQ ID NO: 7638 - protein, 77 aa, Homo Sapiens
MEREMGALPRPSISAEPGTVISPGSHVTFMCRGPVGVQTFRLEREDRAKYKDSYNVFRLGPSESEARFHIDSVSEGN

SEQ ID NO: 7639 - protein, 89 aa, Homo Sapiens
MEREMVLCLAQTIHTQEGALPRPSISAEPGTVISPGSHVTFMCRGPVGVQTFRLEREDRAKYKDSYNVFRLGPSESEARFHIDSVSEGN

SEQ ID NO: 7640 - protein, 152 aa, Homo Sapiens
MSPHLTALLGLVLCLAQTIHTQEGALPRPSISAEPGTVISPGSHVTFMCRGPVGVQTFRLEREDRAKYKDSYNVFRLGPSESEARFHIDSVSEGNAGLYRCLYYKPPGWSEHSDFLELLVKESSGGPDSPDTEPGSSAGTVPGTEASGFDAP

SEQ ID NO: 7641 - protein, 135 aa, Homo Sapiens
MSPHLTALLGLVLCLAQTIHTQEGALPRPSISAEPGTVISPGSHVTFMCRGPVGVQTFRLEREDRAKYKDSYNVFRLGPSESEARFHIDSVSEGNAGLYRCLYYKPPGWSEHSDFLELLVKGTVPGTEASGFDAP

SEQ ID NO: 7642 - protein, 123 aa, Homo Sapiens
MRFFVPLFLVGILFPAILAKQFTKCELSQLLKDIDGYGGIALPELICTMFHTSGYDTQAIVENNESTEYGLFQISNKLWCKSSQVPQSRNICDISCDKFLDDDITDDIMCAKKILDIKGIDYW

SEQ ID NO: 7643 - protein, 142 aa, Homo Sapiens
MRFFVPLFLVGILFPAILAKQFTKCELSQLLKDIDGYGGIALPELICTMFHTSGYDTQAIVENNESTEYGLFQISNKLWCKSSQVPQSRNICDISCDKFLDDDITDDIMCAKKILDIKGIDYWLAHKALCTEKLEQWLCEKL

SEQ ID NO: 7644 - protein, 217 aa, Homo Sapiens
MLIGGNIEVHVNPGDGTGLRKALLHAPTGTCSDGQAHSISLVRNRRIITVQLDENNPVEMKLGTLVESRTINVSNLYVGGIPEGEGTSLLTMRRSFHGCIKNLIFNLELLDFNSAVGMSKSTWTPAGCQKGLSWLPMQRTKLLPEPRAFPVGAASFTISQVQSAKEGLGQRELKWGLAVKVPAKAGAGAGAGAVLKIRAGTGRERVPQATQMTRPNP

SEQ ID NO: 7645 - protein, 3075 aa, Homo Sapiens
MRGGVLLVLLLCVAAQCRQRGLFPAILNLASNAHISTNATCGEKGPEMFCKLVEHVPGRPVRNPQCRICDGNSANPRERHPISHAIDGTNNWWQSPSIQNGREYHWVTITLDLRQVFQVAYVIIKAANAPRPGNWILERSLDGTTFSPWQYYAVSDSECLSRYNITPRRGPPTYRADDEVICTSYYSRLVPLEHGEIHTSLINGRPSADDLSPKLLEFTSARYIRLRLQRIRTLNADLMTLSHREPKELDPIVTRRYYYSIKDISVGGMCICYGHASSCPWDETTKKLQCQCEHNTCGESCNRCCPGYHQQPWRPGTVSSGNTCEACNCHNKAKDCYYDESVAKQKKSLNTAGQFRGGGVCINCLQNTMGINCETCIDGYYRPHKVSPYEDEPCRPCNCDPVGSLSSVCIKDDLHSDLHNGKQPGQCPCKEGYTGEKCDRCQLGYKDYPTCVSCGCNPVGSASDEPCTGPCVCKENVEGKACDRCKPGFYNLKEKNPRGCSECFCFGVSDVCSSLSWPVGQVNSMSGWLVTDLISPRKIPSQQDALGGRHQVSINNTAVMQRLAPKYYWAAPEAYLGNKLTAFGGFLKYTVSYDIPVETVDSNLMSHADVIIKGNGLTLSTQAEGLSLQPYEEYLNVVRLVPENFQDFHSKRQIDRDQLMTVLANVTHLLIRANYNSAKMALYRLESVSLDIASSNAIDLVVAADVEHCECPQGYTGTSCESCLSGYYRVDGILFGGICQPCECHGHAAECNVHGVCIACAHNTTGVHCEQCLPGFYGEPSRGTPGDCQPCACPLTIASNNFSPTCHLNDGDEVVCDWCAPGYSGAWCERCADGYYGNPTVPGESCVPCDCSGNVDPSEAGHCDSVTGECLKCLGNTDGAHCERCADGFYGDAVTAKNCRACECHVKGSHSAVCHLETGLCDCKPNVTGQQCDQCLHGYYGLDSGHGCRPCNCSVAGSVSDGCTDEGQCHCVPGVAGKRCDRCAHGFYAYQDGSCTPCDCPHTQNTCDPETGECVCPPHTQGVKCEECEDGHWGYDAEVGCQACNCSLVGSTHHRCDVVTGHCQCKSKFGGRACDQCSLGYRDFPDCVPCDCDLRGTSGDACNLEQGLCGCVEETGACPCKENVFGPQCNECREGTFALRADNPLGCSPCFCSGLSHLCSELEDYVRTPVTLGSDQPLLRVVSQSNLRGTTEGVYYQAPDFLLDAATVRQHIRAEPFYWRLPQQFQGDQLMAYGGKLKYSVAFYSLDGVGTSNFEPQVLIKGGRIRKQVIYMDAPAPENGVRQEQEVAMRENFWKYFNSVSEKPVTREDFMSVLSDIEYILIKASYGQGLQQSRISDISMEVGRKAEKLHPEEEVASLLENCVCPPGTVGFSCQDCAPGYHRGKLPAGSDRGPRPLVAPCVPCSCNNHSDTCDPNTGKCLNCGDNTAGDHCDVCTSGYYGKVTGSASDCALCACPHSPPASFSPTCVLEGDHDFRCDACLLGYEGKHCERCSSSYYGNPQTPGGSCQKCDCNPHGSVHGDCDRTSGQCVCRLGASGLRCDECEPRHILMETDCVSCDDECVGVLLNDLDEIGDAVLSLNLTGIIPVPYGILSNLENTTKYLQESLLKENMQKDLGKIKLEGVAEETDNLQKKLTRMLASTQKVNRATERIFKESQDLAIAIERLQMSITEIMEKTTLNQTLDEDFLLPNSTLQNMQQNGTSLLEIMQIRDFTQLHQNATLELKAAEDLLSQIQENYQKPLEELEVLKEAASHVLSKHNNELKAAEALVREAEAKMQESNHLLLMVNANLREFSDKKLHVQEEQNLTSELIVQGRGLIDAAAAQTDAVQDALEHLEDHQDKLLLWSAKIRHHIDDLVMHMSQRNAVDLVYRAEDHAAEFQRLADVLYSGLENIRNVSLNATSAAYVHYNIQSLIEESEELARDAHRTVTETSLLSESLVSNGKAAVQRSSRFLKEGNNLSRKLPGIALELSELRNKTNRFQENAVEITRQTNESLLILRAIPKGIRDKGAKTKELATSASQSAVSTLRDVAGLSQELLNTSASLSRVNTTLRETHQLLQDSTMATLLAGRKVKDVEIQANLLFDRLKPLKMLEENLSRNLSEIKLLISQARKQAASIKVAVSADRDCIRAYQPQISSTNYNTLTLNVKTQEPDNLLFYLGSSTASDFLAVEMRRGRVAFLWDLGSGSTRLEFPDFPIDDNRWHSIHVARFGNIGSLSVKEMSSNQKSPTKTSKSPGTANVLDVNNSTLMFVGGLGGQIKKSPAVKVTHFKGCLGEAFLNGKSIGLWNYIEREGKCRGCFGSSQNEDPSFHFDGSGYSVVEKSLPATVTQIIMLFNTFSPNGLLLYLGSYGTKDFLSIELFRGRVKVMTDLGSGPITLLTDRRYNNGTWYKIAFQRNRKQGVLAVIDAYNTSNKETKQGETPGASSDLNRLDKDPIYVGGLPRSRVVRRGVTTKSFVGCIKNLEISRSTFDLLRNSYGVRKGCLLEPIRSVSFLKGGYIELPPKSLSPESEWLVTFATTNSSGIILAALGGDVEKRGDREEAHVPFFSVMLIGGNIEVHVNPGDGTGLRKALLHAPTGTCSDGQAHSISLVRNRRIITVQLDENNPVEMKLGTLVESRTINVSNLYVGGIPEGEGTSLLTMRRSFHGCIKNLIFNLELLDFNSAVGHEQVDLDTCWLSERPKLAPDAEDSKLLPEPRAFPEQCVVDAALEYVPGAHQFGLTQNSHFILPFNQSAVRKKLSVELSIRTFASSGLIYYMAHQNQADYAVLQLHGGRLHFMFDLGKGRTKVSHPALLSDGKWHTVKTDYVKRKGFITVDGRESPMVTVVGDGTMLDVEGLFYLGGLPSQYQARKIGNITHSIPACIGDVTVNSKQLDKDSPVSAFTVNRCYAVAQEGTYFDGSGYAALVKEGYKVQSDVNITLEFRTSSQNGVLLGISTAKVDAIGLELVDGKVLFHVNNGAGRITAAYEPKTATVLCDGKWHTLQANKSKHRITLIVDGNAVGAESPHTQSTSVDTNNPIYVGGYPAGVKQKCLRSQTSFRGCLRKLALIKSPQVQSFDFSRAFELHGVFLHSCPGTES

SEQ ID NO: 7646 - protein, 3122 aa, Homo Sapiens
MPGAAGVLLLLLLSGGLGGVQAQRPQQQRQSQAHQQRGLFPAVLNLASNALITTNATCGEKGPEMYCKLVEHVPGQPVRNPQCRICNQNSSNPNQRHPITNAIDGKNTWWQSPSIKNGIEYHYVTITLDLQQVFQIAYVIVKAANSPRPGNWILERSLDDVEYKPWQYHAVTDTECLTLYNIYPRTGPPSYAKDDEVICTSFYSKIHPLENGEIHISLINGRPSADDPSPELLEFTSARYIRLRFQRIRTLNADLMMFAHKDPREIDPIVTRRYYYSVKDISVGGMCICYGHARACPLDPATNKSRCECEHNTCGDSCDQCCPGFHQKPWRAGTFLTKTECEACNCHGKAEECYYDENVARRNLSLNIRGKYIGGGVCINCTQNTAGINCETCTDGFFRPKGVSPNYPRPCQPCHCDPIGSLNEVCVKDEKHARRGLAPGSCHCKTGFGGVSCDRCARGYTGYPDCKACNCSGLGSKNEDPCFGPCICKENVEGGDCSRCKSGFFNLQEDNWKGCDECFCSGVSNRCQSSYWTYGKIQDMSGWYLTDLPGRIRVAPQQDDLDSPQQISISNAEARQALPHSYYWSAPAPYLGNKLPAVGGQLTFTISYDLEEEEEDTERVLQLMIILEGNDLSISTAQDEVYLHPSEEHTNVLLLKEESFTIHGTHFPVRRKEFMTVLANLKRVLLQITYSFGMDAIFRLSSVNLESAVSYPTDGSIAAAVEVCQCPPGYTGSSCESCWPRHRRVNGTIFGGICEPCQCFGHAESCDDVTGECLNCKDHTGGPYCDKCLPGFYGEPTKGTSEDCQPCACPLNIPSNNFSPTCHLDRSLGLICDGCPVGYTGPRCERCAEGYFGQPSVPGGSCQPCQCNDNLDFSIPGSCDSLSGSCLICKPGTTGRYCELCADGYFGDAVDAKNCQPCRCNAGGSFSEVCHSQTGQCECRANVQGQRCDKCKAGTFGLQSARGCVPCNCNSFGSKSFDCEESGQCWCQPGVTGKKCDRCAHGYFNFQEGGCTACECSHLGNNCDPKTGRCICPPNTIGEKCSKCAPNTWGHSITTGCKACNCSTVGSLDFQCNVNTGQCNCHPKFSGAKCTECSRGHWNYPRCNLCDCFLPGTDATTCDSETKKCSCSDQTGQCTCKVNVEGIHCDRCRPGKFGLDAKNPLGCSSCYCFGTTTQCSEAKGLIRTWVTLKAEQTILPLVDEALQHTTTKGIVFQHPEIVAHMDLMREDLHLEPFYWKLPEQFEGKKLMAYGGKLKYAIYFEAREETGFSTYNPQVIIRGGTPTHARIIVRHMAAPLIGQLTRHEIEMTEKEWKYYGDDPRVHRTVTREDFLDILYDIHYILIKATYGNFMRQSRISEISMEVAEQGRGTTMTPPADLIEKCDCPLGYSGLSCEACLPGFYRLRSQPGGRTPGPTLGTCVPCQCNGHSSLCDPETSICQNCQHHTAGDFCERCALGYYGIVKGLPNDCQQCACPLISSSNNFSPSCVAEGLDDYRCTACPRGYEGQYCERCAPGYTGSPGNPGGSCQECECDPYGSLPVPCDPVTGFCTCRPGATGRKCDGCKHWHAREGWECVFCGDECTGLLLGDLARLEQMVMSINLTGPLPAPYKMLYGLENMTQELKHLLSPQRAPERLIQLAEGNLNTLVTEMNELLTRATKVTADGEQTGQDAERTNTRAKSLGEFIKELARDAEAVNEKAIKLNETLGTRDEAFERNLEGLQKEIDQMIKELRRKNLETQKEIAEDELVAAEALLKKVKKLFGESRGENEEMEKDLREKLADYKNKVDDAWDLLREATDKIREANRLFAVNQKNMTALEKKKEAVESGKRQIENTLKEGNDILDEANRLADEINSIIDYVEDIQTKLPPMSEELNDKIDDLSQEIKDRKLAEKVSQAESHAAQLNDSSAVLDGILDEAKNISFNATAAFKAYSNIKDYIDEAEKVAKEAKDLAHEATKLATGPRGLLKEDAKGCLQKSFRILNEAKKLANDVKENEDHLNGLKTRIENADARNGDLLRTLNDTLGKLSAIPNDTAAKLQAVKDKARQANDTAKDVLAQITELHQNLDGLKKNYNKLADSVAKTNAVVKDPSKNKIIADADATVKNLEQEADRLIDKLKPIKELEDNLKKNISEIKELINQARKQANSIKVSVSSGGDCIRTYKPEIKKGSYNNIVVNVKTAVADNLLFYLGSAKFIDFLAIEMRKGKVSFLWDVGSGVGRVEYPDLTIDDSYWYRIVASRTGRNGTISVRALDGPKASIVPSTHHSTSPPGYTILDVDANAMLFVGGLTGKLKKADAVRVITFTGCMGETYFDNKPIGLWNFREKEGDCKGCTVSPQVEDSEGTIQFDGEGYALVSRPIRWYPNISTVMFKFRTFSSSALLMYLATRDLRDFMSVELTDGHIKVSYDLGSGMASVVSNQNHNDGKWKSFTLSRIQKQANISIVDIDTNQEENIATSSSGNNFGLDLKADDKIYFGGLPTLRNLSMKARPEVNLKKYSGCLKDIEISRTPYNILSSPDYVGVTKGCSLENVYTVSFPKPGFVELSPVPIDVGTEINLSFSTKNESGIILLGSGGTPAPPRRKRRQTGQAYYAILLNRGRLEVHLSTGARTMRKIVIRPEPNLFHDGREHSVHVERTRGIFTVQVDENRRYMQNLTVEQPIEVKKLFVGGAPPEFQPSPLRNIPPFEGCIWNLVINSVPMDFARPVSFKNADIGRCAHQKLREDEDGAAPAEIVIQPEPVPTPAFPTPTPVLTHGPCAAESEPALLIGSKQFGLSRNSHIAIAFDDTKVKNRLTIELEVRTEAESGLLFYMARINHADFATVQLRNGLPYFSYDLGSGDTHTMIPTKINDGQWHKIKIMRSKQEGILYVDGASNRTISPKKADILDVVGMLYVGGLPINYTTRRIGPVTYSIDGCVRNLHMAEAPADLEQPTSSFHVGTCFANAQRGTYFDGTGFAKAVGGFKVGLDLLVEFEFRTTTTTGVLLGISSQKMDGMGIEMIDEKLMFHVDNGAGRFTAVYDAGVPGHLCDGQWHKVTANKIKHRIELTVDGNQVEAQSPNPASTSADTNDPVFVGGFPDDLKQFGLTTSIPFRGCIRSLKLTKGTGKPLEVNFAKALELRGVQPVSCPAN

SEQ ID NO: 7647 - protein, 3121 aa, Homo Sapiens
MPGAAGVLLLLLLSGGLGGVQAQRPQQQRQSQAHQQRGLFPAVLNLASNALITTNATCGEKGPEMYCKLVEHVPGQPVRNPQCRICNQNSSNPNQRHPITNAIDGKNTWWQSPSIKNGIEYHYVTITLDLQQVFQIAYVIVKAANSPRPGNWILERSLDDVEYKPWQYHAVTDTECLTLYNIYPRTGPPSYAKDDEVICTSFYSKIHPLENGEIHISLINGRPSADDPSPELLEFTSARYIRLRFQRIRTLNADLMMFAHKDPREIDPIVTRRYYYSVKDISVGGMCICYGHARACPLDPATNKSRCECEHNTCGDSCDQCCPGFHQKPWRAGTFLTKTECEACNCHGKAEECYYDENVARRNLSLNIRGKYIGGGVCINCTQNTAGINCETCTDGFFRPKGVSPNYPRPCQPCHCDPIGSLNEVCVKDEKHARRGLAPGSCHCKTGFGGVSCDRCARGYTGYPDCKACNCSGLGSKNEDPCFGPCICKENVEGGDCSRCKSGFFNLQEDNWKGCDECFCSGVSNRCQSSYWTYGKIQDMSGWYLTDLPGRIRVAPQQDDLDSPQQISISNAEARQALPHSYYWSAPAPYLGNKLPAVGGQLTFTISYDLEEEEEDTERVLQLMIILEGNDLSISTAQDEVYLHPSEEHTNVLLLKEESFTIHGTHFPVRRKEFMTVLANLKRVLLQITYSFGMDAIFRLSSVNLESAVSYPTDGSIAAAVEVCQCPPGYTGSSCESCWPRHRRVNGTIFGGICEPCQCFGHAESCDDVTGECLNCKDHTGGPYCDKCLPGFYGEPTKGTSEDCQPCACPLNIPSNNFSPTCHLDRSLGLICDGCPVGYTGPRCERCAEGYFGQPSVPGGSCQPCQCNDNLDFSIPGSCDSLSGSCLICKPGTTGRYCELCADGYFGDAVDAKNCQPCRCNAGGSFSEVCHSQTGQCECRANVQGQRCDKCKAGTFGLQSARGCVPCNCNSFGSKSFDCEESGQCWCQPGVTGKKCDRCAHGYFNFQEGGCTACECSHLGNNCDPKTGRCICPPNTIGEKCSKCAPNTWGHSITTGCKACNCSTVGSLDFQCNVNTGQCNCHPKFSGAKCTECSRGHWNYPRCNLCDCFLPGTDATTCDSETKKCSCSDQTGQCTCKVNVEGIHCDRCRPGKFGLDAKNPLGCSSCYCFGTTTQCSEAKGLIRTWVTLKAEQTILPLVDEALQHTTTKGIVFQHPEIVAHMDLMREDLHLEPFYWKLPEQFEGKKLMAYGGKLKYAIYFEAREETGFSTYNPQVIIRGGTPTHARIIVRHMAAPLIGQLTRHEIEMTEKEWKYYGDDPRVHRTVTREDFLDILYDIHYILIKATYGNFMRQSRISEISMEVAEQGRGTTMTPPADLIEKCDCPLGYSGLSCEACLPGFYRLRSQPGGRTPGPTLGTCVPCQCNGHSSLCDPETSICQNCQHHTAGDFCERCALGYYGIVKGLPNDCQQCACPLISSSNNFSPSCVAEGLDDYRCTACPRGYEGQYCERCAPGYTGSPGNPGGSCQECECDPYGSLPVPCDPVTGFCTCRPGATGRKCDGCKHWHAREGWECVFCGDECTGLLLGDLARLEQMVMSINLTGPLPAPYKMLYGLENMTQELKHLLSPQRAPERLIQLAEGNLNTLVTEMNELLTRATKVTADGEQTGQDAERTNTRAKSLGEFIKELARDAEAVNEKAIKLNETLGTRDEAFERNLEGLQKEIDQMIKELRRKNLETQKEIAEDELVAAEALLKKVKKLFGESRGENEEMEKDLREKLADYKNKVDDAWDLLREATDKIREANRLFAVNQKNMTALEKKKEAVESGKRQIENTLKEGNDILDEANRLADEINSIIDYVEDIQTKLPPMSEELNDKIDDLSQEIKDRKLAEKVSQAESHAAQLNDSSAVLDGILDEAKNISFNATAAFKAYSNIKDYIDEAEKVAKEAKDLAHEATKLATGPRGLLKEDAKGCLQKSFRILNEAKKLANDVKENEDHLNGLKTRIENADARNGDLLRTLNDTLGKLSAIPNDTAAKLQAVKDKARQANDTAKDVLAQITELHQNLDGLKKNYNKLADSVAKTNAVVKDPSKNTVADADATVKNLEQEADRLIDKLKPIKELEDNLKKNISEIKELINQARKQANSIKVSVSSGGDCIRTYKPEIKKGSYNNIVVNVKTAVADNLLFYLGSAKFIDFLAIEMRKGKVSFLWDVGSGVGRVEYPDLTIDDSYWYRIVASRTGRNGTISVRALDGPKASIVPSTHHSTSPPGYTILDVDANAMLFVGGLTGKLKKADAVRVITFTGCMGETYFDNKPIGLWNFREKEGDCKGCTVSPQVEDSEGTIQFDGEGYALVSRPIRWYPNISTVMFKFRTFSSSALLMYLATRDLRDFMSVELTDGHIKVSYDLGSGMASVVSNQNHNDGKWKSFTLSRIQKQANISIVDIDTNQEENIATSSSGNNFGLDLKADDKIYFGGLPTLRNLSMKARPEVNLKKYSGCLKDIEISRTPYNILSSPDYVGVTKGCSLENVYTVSFPKPGFVELSPVPIDVGTEINLSFSTKNESGIILLGSGGTPAPPRRKRRQTGQAYYAILLNRGRLEVHLSTGARTMRKIVIRPEPNLFHDGREHSVHVERTRGIFTVQVDENRRYMQNLTVEQPIEVKKLFVGGAPPEFQPSPLRNIPPFEGCIWNLVINSVPMDFARPVSFKNADIGRCAHQKLREDEDGAAPAEIVIQPEPVPTPAFPTPTPVLTHGPCAAESEPALLIGSKQFGLSRNSHIAIAFDDTKVKNRLTIELEVRTEAESGLLFYMARINHADFATVQLRNGLPYFSYDLGSGDTHTMIPTKINDGQWHKIKIMRSKQEGILYVDGASNRTISPKKADILDVVGMLYVGGLPINYTTRRIGPVTYSIDGCVRNLHMAEAPADLEQPTSSFHVGTCFANAQRGTYFDGTGFAKAVGGFKVGLDLLVEFEFRTTTTTGVLLGISSQKMDGMGIEMIDEKLMFHVDNGAGRFTAVYDAGVPGHLCDGQWHKVTANKIKHRIELTVDGNQVEAQSPNPASTSADTNDPVFVGGFPDDLKQFGLTTSIPFRGCIRSLKLTKGTGKPLEVNFAKALELRGVQPVSCPAN

SEQ ID NO: 7648 - protein, 3118 aa, Homo Sapiens
MPGAAGVLLLLLLSGGLGGVQAQRPQQQRQSQAHQQRGLFPAVLNLASNALITTNATCGEKGPEMYCKLVEHVPGQPVRNPQCRICNQNSSNPNQRHPITNAIDGKNTWWQSPSIKNGIEYHYVTITLDLQQVFQIAYVIVKAANSPRPGNWILERSLDDVEYKPWQYHAVTDTECLTLYNIYPRTGPPSYAKDDEVICTSFYSKIHPLENGEIHISLINGRPSADDPSPELLEFTSARYIRLRFQRIRTLNADLMMFAHKDPREIDPIVTRRYYYSVKDISVGGMCICYGHARACPLDPATNKSRCECEHNTCGDSCDQCCPGFHQKPWRAGTFLTKTECEACNCHGKAEECYYDENVARRNLSLNIRGKYIGGGVCINCTQNTAGINCETCTDGFFRPKGVSPNYPRPCQPCHCDPIGSLNEVCVKDEKHARRGLAPGSCHCKTGFGGVSCDRCARGYTGYPDCKACNCSGLGSKNEDPCFGPCICKENVEGGDCSRCKSGFFNLQEDNWKGCDECFCSGVSNRCQSSYWTYGKIQDMSGWYLTDLPGRIRVAPQQDDLDSPQQISISNAEARQALPHSYYWSAPAPYLGNKLPAVGGQLTFTISYDLEEEEEDTERVLQLMIILEGNDLSISTAQDEVYLHPSEEHTNVLLLKEESFTIHGTHFPVRRKEFMTVLANLKRVLLQITYSFGMDAIFRLSSVNLESAVSYPTDGSIAAAVEVCQCPPGYTGSSCESCWPRHRRVNGTIFGGICEPCQCFGHAESCDDVTGECLNCKDHTGGPYCDKCLPGFYGEPTKGTSEDCQPCACPLNIPSNNFSPTCHLDRSLGLICDGCPVGYTGPRCERCAEGYFGQPSVPGGSCQPCQCNDNLDFSIPGSCDSLSGSCLICKPGTTGRYCELCADGYFGDAVDAKNCQPCRCNAGGSFSEVCHSQTGQCECRANVQGQRCDKCKAGTFGLQSARGCVPCNCNSFGSKSFDCEESGQCWCQPGVTGKKCDRCAHGYFNFQEGGCTACECSHLGNNCDPKTGRCICPPNTIGEKCSKCAPNTWGHSITTGCKACNCSTVGSLDFQCNVNTGQCNCHPKFSGAKCTECSRGHWNYPRCNLCDCFLPGTDATTCDSETKKCSCSDQTGQCTCKVNVEGIHCDRCRPGKFGLDAKNPLGCSSCYCFGTTTQCSEAKGLIRTWVTLKAEQTILPLVDEALQHTTTKGIVFQHPEIVAHMDLMREDLHLEPFYWKLPEQFEGKKLMAYGGKLKYAIYFEAREETGFSTYNPQVIIRGGTPTHARIIVRHMAAPLIGQLTRHEIEMTEKEWKYYGDDPRVHRTVTREDFLDILYDIHYILIKATYGNFMRQSRISEISMEVAEQGRGTTMTPPADLIEKCDCPLGYSGLSCEACLPGFYRLRSQPGGRTPGPTLGTCVPCQCNGHSSLCDPETSICQNCQHHTAGDFCERCALGYYGIVKGLPNDCQQCACPLISSSNNFSPSCVAEGLDDYRCTACPRGYEGQYCERCAPGYTGSPGNPGGSCQECECDPYGSLPVPCDPVTGFCTCRPGATGRKCDGCKHWHAREGWECVFCGDECTGLLLGDLARLEQMVMSINLTGPLPAPYKMLYGLENMTQELKHLLSPQRAPERLIQLAEGNLNTLVTEMNELLTRATKVTADGEQTGQDAERTNTRAKSLGEFIKELARDAEAVNEKAIKLNETLGTRDEAFERNLEGLQKEIDQMIKELRRKNLETQKEIAEDELVAAEALLKKVKKLFGESRGENEEMEKDLREKLADYKNKVDDAWDLLREATDKIREANRLFAVNQKNMTALEKKKEAVESGKRQIENTLKEGNDILDEANRLADEINSIIDYVEDIQTKLPPMSEELNDKIDDLSQEIKDRKLAEKVSQAESHAAQLNDSSAVLDGILDEAKNISFNATAAFKAYSNIKDYIDEAEKVAKEAKDLAHEATKLATGPRGLLKEDAKGCLQKSFRILNEAKKLANDVKENEDHLNGLKTRIENADARNGDLLRTLNDTLGKLSAIPNDTAAKLQAVKDKARQANDTAKDVLAQITELHQNLDGLKKNYNKLADSVAKTNAVVKDPSKNNAVADADATVKNLEQEADRLIDKLKPIKELEDNLKKNISEIKELINQARKQANSIKVSVSSGGDCIRTYKPEIKKGSYNNIVVNVKTAVADNLLFYLGSAKFIDFLAIEMRKGKVSFLWDVGSGVGRVEYPDLTIDDSYWYRIVASRTGRNGTISVRALDGPKASIVPSTHHSTSPPGYTILDVDANAMLFVGGLTGKLKKADAVRVITFTGCMGETYFDNKPIGLWNFREKEGDCKGCTVSPQVEDSEGTIQFDGEGYALVSRPIRWYPNISTVMFKFRTFSSSALLMYLATRDLRDFMSVELTDGHIKVSYDLGSGMASVVSNQNHNDGKWKSFTLSRIQKQANISIVDIDTNQEENIATSSSGNNFGLDLKADDKIYFGGLPTLRNLRPEVNLKKYSGCLKDIEISRTPYNILSSPDYVGVTKGCSLENVYTVSFPKPGFVELSPVPIDVGTEINLSFSTKNESGIILLGSGGTPAPPRRKRRQTGQAYYAILLNRGRLEVHLSTGARTMRKIVIRPEPNLFHDGREHSVHVERTRGIFTVQVDENRRYMQNLTVEQPIEVKKLFVGGAPPEFQPSPLRNIPPFEGCIWNLVINSVPMDFARPVSFKNADIGRCAHQKLREDEDGAAPAEIVIQPEPVPTPAFPTPTPVLTHGPCAAESEPALLIGSKQFGLSRNSHIAIAFDDTKVKNRLTIELEVRTEAESGLLFYMARINHADFATVQLRNGLPYFSYDLGSGDTHTMIPTKINDGQWHKIKIMRSKQEGILYVDGASNRTISPKKADILDVVGMLYVGGLPINYTTRRIGPVTYSIDGCVRNLHMAEAPADLEQPTSSFHVGTCFANAQRGTYFDGTGFAKAVGGFKVGLDLLVEFEFRTTTTTGVLLGISSQKMDGMGIEMIDEKLMFHVDNGAGRFTAVYDAGVPGHLCDGQWHKVTANKIKHRIELTVDGNQVEAQSPNPASTSADTNDPVFVGGFPDDLKQFGLTTSIPFRGCIRSLKLTKGTGKPLEVNFAKALELRGVQPVSCPAN

SEQ ID NO: 7649 - protein, 184 aa, Homo Sapiens
  misc_feature (1)..(1): Xaa can be any naturally occurring amino acid
XCRCNAGGSFSEVCHSQTGQCECRANVQGQRCDKCKPNMWRDPEKRFCVLCDCDPVGSVSPQCDITGRCVCKSGFVGKQCNLGRQVHQQEEQPRRAQRVLGSPQRWAIGSSSGCPRGAYRAPAPAGTFGLQSARGCVPCNCNSFGSKSFDCEESGQCWCQPGVTGKKCDRCAHGYFNFQEGGCT

SEQ ID NO: 7650 - protein, 94 aa, Homo Sapiens
LVRSASFSRGGQLSFTDLGLPPTDHLQASFGFQTFQPSGILLDHQTWTRNLQVTLEDGYIELSTSDSGGPIFKSPQTYMDGLLHYVSVISDNSG

SEQ ID NO: 7651 - protein, 3333 aa, Homo Sapiens
MAAAARPRGRALGPVLPPTPLLLLVLRVLPACGATARDPGAAAGLSLHPTYFNLAEAARIWATATCGERGPGEGRPQPELYCKLVGGPTAPGSGHTIQGQFCDYCNSEDPRKAHPVTNAIDGSERWWQSPPLSSGTQYNRVNLTLDLGQLFHVAYILIKFANSPRPDLWVLERSVDFGSTYSPWQYFAHSKVDCLKEFGREANMAVTRDDDVLCVTEYSRIVPLENGEVVVSLINGRPGAKNFTFSHTLREFTKATNIRLRFLRTNTLLGHLISKAQRDPTVTRRYYYSIKDISIGGQCVCNGHAEVCNINNPEKLFRCECQHHTCGETCDRCCTGYNQRRWRPAAWEQSHECEACNCHGHASNCYYDPDVERQQASLNTQGIYAGGGVCINCQHNTAGVNCEQCAKGYYRPYGVPVDAPDGCIPCSCDPEHADGCEQGSGRCHCKPNFHGDNCEKCAIGYYNFPFCLRIPIFPVSTPSSEDPVAGDIKGCDCNLEGVLPEICDAHGRCLCRPGVEGPRCDTCRSGFYSFPICQACWCSALGSYQMPCSSVTGQCECRPGVTGQRCDRCLSGAYDFPHCQGSSSACDPAGTINSNLGYCQCKLHVEGPTCSRCKLLYWNLDKENPSGCSECKCHKAGTVSGTGECRQGDGDCHCKSHVGGDSCDTCEDGYFALEKSNYFGCQGCQCDIGGALSSMCSGPSGVCQCREHVVGKVCQRPENNYYFPDLHHMKYEIEDGSTPNGRDLRFGFDPLAFPEFSWRGYAQMTSVQNDVRITLNVGKSSGSLFRVILRYVNPGTEAVSGHITIYPSWGAAQSKEIIFLPSKEPAFVTVPGNGFADPFSITPGIWVACIKAEGVLLDYLVLLPRDYYEASVLQLPVTEPCAYAGPPQENCLLYQHLPVTRFPCTLACEARHFLLDGEPRPVAVRQPTPAHPVMVDLSGREVELHLRLRIPQVGHYVVVVEYSTEAAQLFVVDVNVKSSGSVLAGQVNIYSCNYSVLCRSAVIDHMSRIAMYELLADADIQLKGHMARFLLHQVCIIPIEEFSAEYVRPQVHCIASYGRFVNQSATCVSLAHETPPTALILDVLSGRPFPHLPQQSSPSVDVLPGVTLKAPQNQVTLRGRVPHLGRYVFVIHFYQAAHPTFPAQVSVDGGWPRAGSFHASFCPHVLGCRDQVIAEGQIEFDISEPEVAATVKVPEGKSLVLVRVLVVPAENYDYQILHKKSMDKSLEFITNCGKNSFYLDPQTASRFCKNSARSLVAFYHKGALPCECHPTGATGPHCSPEGGQCPCQPNVIGRQCTRCATGHYGFPRCKPCSCGRRLCEEMTGQCRCPPRTVRPQCEVCETHSFSFHPMAGCEGCNCSRRGTIEAAMPECDRDSGQCRCKPRITGRQCDRCASGFYRFPECVPCNCNRDGTEPGVCDPGTGACLCKENVEGTECNVCREGSFHLDPANLKGCTSCFCFGVNNQCHSSHKRRTKFVDMLGWHLETADRVDIPVSFNPGSNSMVADLQELPATIHSASWVAPTSYLGDKVSSYGGYLTYQAKSFGLPGDMVLLEKKPDVQLTGQHMSIIYEETNTPRPDRLHHGRVHVVEGNFRHASSRAPVSREELMTVLSRLADVRIQGLYFTETQRLTLSEVGLEEASDTGSGRIALAVEICACPPAYAGDSCQGCSPGYYRDHKGLYTGRCVPCNCNGHSNQCQDGSGICVNCQHNTAGEHCERCQEGYYGNAVHGSCRACPCPHTNSFATGCVVNGGDVRCSCKAGYTGTQCERCAPGYFGNPQKFGGSCQPCSCNSNGQLGSCHPLTGDCINQEPKDSSPAEECDDCDSCVMTLLNDLATMGEQLRLVKSQLQGLSASAGLLEQMRHMETQAKDLRNQLLNYRSAISNHGSKIEGLERELTDLNQEFETLQEKAQVNSRKAQTLNNNVNRATQSAKELDVKIKNVIRNVHILLKQISGTDGEGNNVPSGDFSREWAEAQRMMRELRNRNFGKHLREAEADKRESQLLLNRIRTWQKTHQGENNGLANSIRDSLNEYEAKLSDLRARLQEAAAQAKQANGLNQENERALGAIQRQVKEINSLQSDFTKYLTTADSSLLQTNIALQLMEKSQKEYEKLAASLNEARQELSDKVRELSRSAGKTSLVEEAEKHARSLQELAKQLEEIKRNASGDELVRCAVDAATAYENILNAIKAAEDAANRAASASESALQTVIKEDLPRKAKTLSSNSDKLLNEAKMTQKKLKQEVSPALNNLQQTLNIVTVQKEVIDTNLTTLRDGLHGIQRGDIDAMISSAKSMVRKANDITDEVLDGLNPIQTDVERIKDTYGRTQNEDFKKALTDADNSVNKLTNKLPDLWRKIESINQQLLPLGNISDNMDRIRELIQQARDAASKVAVPMRFNGKSGVEVRLPNDLEDLKGYTSLSLFLQRPNSRENGGTENMFVMYLGNKDASRDYIGMAVVDGQLTCVYNLGDREAELQVDQILTKSETKEAVMDRVKFQRIYQFARLNYTKGATSSKPETPGVYDMDGRNSNTLLNLDPENVVFYVGGYPPDFKLPSRLSFPPYKGCIELDDLNENVLSLYNFKKTFNLNTTEVEPCRRRKEESDKNYFEGTGYARVPTQPHAPIPTFGQTIQTTVDRGLLFFAENGDRFISLNIEDGKLMVRYKLNSELPKERGVGDAINNGRDHSIQIKIGKLQKRMWINVDVQNTIIDGEVFDFSTYYLGGIPIAIRERFNISTPAFRGCMKNLKKTSGVVRLNDTVGVTKKCSEDWKLVRSASFSRGGQLSFTDLGLPPTDHLQASFGFQTFQPSGILLDHQTWTRNLQVTLEDGYIELSTSDSGGPIFKSPQTYMDGLLHYVSVISDNSGLRLLIDDQLLRNSKRLKHISSSRQSLRLGGSNFEGCISNVFVQRLSLSPEVLDLTSNSLKRDVSLGGCSLNKPPFLMLLKGSTRFNKTKTFRINQLLQDTPVASPRSVKVWQDACSPLPKTQANHGALQFGDIPTSHLLFKLPQELLKPRSQFAVDMQTTSSRGLVFHTGTKNSFMALYLSKGRLVFALGTDGKKLRIKSKEKCNDGKWHTVVFGHDGEKGRLVVDGLRAREGSLPGNSTISIRAPVYLGSPPSGKPKSLPTNSFVGCLKNFQLDSKPLYTPSSSFGVSSCLGGPLEKGIYFSEEGGHVVLAHSVLLGPEFKLVFSIRPRSLTGILIHIGSQPGKHLCVYLEAGKVTASMDSGAGGTSTSVTPKQSLCDGQWHSVAVTIKQHILHLELDTDSSYTAGQIPFPPASTQEPLHLGGAPANLTTLRIPVWKSFFGCLRNIHVNHIPVPVTEALEVQGPVSLNGCPDQ

SEQ ID NO: 7652 - protein, 3277 aa, Homo Sapiens
MAAAARPRGRALGPVLPPTPLLLLVLRVLPACGATARDPGAAAGLSLHPTYFNLAEAARIWATATCGERGPGEGRPQPELYCKLVGGPTAPGSGHTIQGQFCDYCNSEDPRKAHPVTNAIDGSERWWQSPPLSSGTQYNRVNLTLDLGQLFHVAYILIKFANSPRPDLWVLERSVDFGSTYSPWQYFAHSKVDCLKEFGREANMAVTRDDDVLCVTEYSRIVPLENGEVVVSLINGRPGAKNFTFSHTLREFTKATNIRLRFLRTNTLLGHLISKAQRDPTVTRRYYYSIKDISIGGQCVCNGHAEVCNINNPEKLFRCECQHHTCGETCDRCCTGYNQRRWRPAAWEQSHECEACNCHGHASNCYYDPDVERQQASLNTQGIYAGGGVCINCQHNTAGVNCEQCAKGYYRPYGVPVDAPDGCIPCSCDPEHADGCEQGSGRCHCKPNFHGDNCEKCAIGYYNFPFCLRIPIFPVSTPSSEDPVAGDIKGCDCNLEGVLPEICDAHGRCLCRPGVEGPRCDTCRSGFYSFPICQACWCSALGSYQMPCSSVTGQCECRPGVTGQRCDRCLSGAYDFPHCQGSSSACDPAGTINSNLGYCQCKLHVEGPTCSRCKLLYWNLDKENPSGCSECKCHKAGTVSGTGECRQGDGDCHCKSHVGGDSCDTCEDGYFALEKSNYFGCQGCQCDIGGALSSMCSGPSGVCQCREHVVGKVCQRPENNYYFPDLHHMKYEIEDGSTPNGRDLRFGFDPLAFPEFSWRGYAQMTSVQNDVRITLNVGKSSGSLFRVILRYVNPGTEAVSGHITIYPSWGAAQSKEIIFLPSKEPAFVTVPGNGFADPFSITPGIWVACIKAEGVLLDYLVLLPRDYYEASVLQLPVTEPCAYAGPPQENCLLYQHLPVTRFPCTLACEARHFLLDGEPRPVAVRQPTPAHPVMVDLSGREVELHLRLRIPQVGHYVVVVEYSTEAAQLFVVDVNVKSSGSVLAGQVNIYSCNYSVLCRSAVIDHMSRIAMYELLADADIQLKGHMARFLLHQVCIIPIEEFSAEYVRPQVHCIASYGRFVNQSATCVSLAHETPPTALILDVLSGRPFPHLPQQSSPSVDVLPGVTLKAPQNQVTLRGRVPHLGRYVFVIHFYQAAHPTFPAQVSVDGGWPRAGSFHASFCPHVLGCRDQVIAEGQIEFDISEPEVAATVKVPEGKSLVLVRVLVVPAENYDYQILHKKSMDKSLEFITNCGKNSFYLDPQTASRFCKNSARSLVAFYHKGALPCECHPTGATGPHCSPEGGQCPCQPNVIGRQCTRCATGHYGFPRCKPCSCGRRLCEEMTGQCRCPPRTVRPQCEVCETHSFSFHPMAGCEGCNCSRRGTIEAAMPECDRDSGQCRCKPRITGRQCDRCASGFYRFPECVPCNCNRDGTEPGVCDPGTGACLCKENVEGTECNVCREGSFHLDPANLKGCTSCFCFGVNNQCHSSHKRRTKFVDMLGWHLETADRVDIPVSFNPGSNSMVADLQELPATIHSASWVAPTSYLGDKVSSYGGYLTYQAKSFGLPGDMVLLEKKPDVQLTGQHMSIIYEETNTPRPDRLHHGRVHVVEGNFRHASSRAPVSREELMTVLSRLADVRIQGLYFTETQRLTLSEVGLEEASDTGSGRIALAVEICACPPAYAGDSCQGCSPGYYRDHKGLYTGRCVPCNCNGHSNQCQDGSGICVNCQHNTAGEHCERCQEGYYGNAVHGSCRACPCPHTNSFATGCVVNGGDVRCSCKAGYTGTQCERCAPGYFGNPQKFGGSCQPCSCNSNGQLGSCHPLTGDCINQEPKDSSPAEECDDCDSCVMTLLNDLATMGEQLRLVKSQLQGLSASAGLLEQMRHMETQAKDLRNQLLNYRSAISNHGSKIEGLERELTDLNQEFETLQEKAQVNSRKAQTLNNNVNRATQSAKELDVKIKNVIRNVHMLNRIRTWQKTHQGENNGLANSIRDSLNEYEAKLSDLRARLQEAAAQAKQANGLNQENERALGAIQRQVKEINSLQSDFTKYLTTADSSLLQTNIALQLMEKSQKEYEKLAASLNEARQELSDKVRELSRSAGKTSLVEEAEKHARSLQELAKQLEEIKRNASGDELVRCAVDAATAYENILNAIKAAEDAANRAASASESALQTVIKEDLPRKAKTLSSNSDKLLNEAKMTQKKLKQEVSPALNNLQQTLNIVTVQKEVIDTNLTTLRDGLHGIQRGDIDAMISSAKSMVRKANDITDEVLDGLNPIQTDVERIKDTYGRTQNEDFKKALTDADNSVNKLTNKLPDLWRKIESINQQLLPLGNISDNMDRIRELIQQARDAASKVAVPMRFNGKSGVEVRLPNDLEDLKGYTSLSLFLQRPNSRENGGTENMFVMYLGNKDASRDYIGMAVVDGQLTCVYNLGDREAELQVDQILTKSETKEAVMDRVKFQRIYQFARLNYTKGATSSKPETPGVYDMDGRNSNTLLNLDPENVVFYVGGYPPDFKLPSRLSFPPYKGCIELDDLNENVLSLYNFKKTFNLNTTEVEPCRRRKEESDKNYFEGTGYARVPTQPHAPIPTFGQTIQTTVDRGLLFFAENGDRFISLNIEDGKLMVRYKLNSELPKERGVGDAINNGRDHSIQIKIGKLQKRMWINVDVQNTIIDGEVFDFSTYYLGGIPIAIRERFNISTPAFRGCMKNLKKTSGVVRLNDTVGVTKKCSEDWKLVRSASFSRGGQLSFTDLGLPPTDHLQASFGFQTFQPSGILLDHQTWTRNLQVTLEDGYIELSTSDSGGPIFKSPQTYMDGLLHYVSVISDNSGLRLLIDDQLLRNSKRLKHISSSRQSLRLGGSNFEGCISNVFVQRLSLSPEVLDLTSNSLKRDVSLGGCSLNKPPFLMLLKGSTRFNKTKTFRINQLLQDTPVASPRSVKVWQDACSPLPKTQANHGALQFGDIPTSHLLFKLPQELLKPRSQFAVDMQTTSSRGLVFHTGTKNSFMALYLSKGRLVFALGTDGKKLRIKSKEKCNDGKWHTVVFGHDGEKGRLVVDGLRAREGSLPGNSTISIRAPVYLGSPPSGKPKSLPTNSFVGCLKNFQLDSKPLYTPSSSFGVSSCLGGPLEKGIYFSEEGGHVVLAHSVLLGPEFKLVFSIRPRSLTGILIHIGSQPGKHLCVYLEAGKVTASMDSGAGGTSTSVTPKQSLCDGQWHSVAVTIKQHILHLELDTDSSYTAGQIPFPPASTQEPLHLGGAPANLTTLRIPVWKSFFGCLRNIHVNHIPVPVTEALEVQGPVSLNGCPDQ

SEQ ID NO: 7653 - protein, 576 aa, Homo Sapiens
MAAAARPRGRALGPVLPPTPLLLLVLRVLPACGATARDPGAAAGLSLHPTYFNLAEAARIWATATCGERGPGEGRPQPELYCKLVGGPTAPGSGHTIQGQFCDYCNSEDPRKAHPVTNAIDGSERWWQSPPLSSGTQYNRVNLTLDLGQLFHVAYILIKFANSPRPDLWVLERSVDFGSTYSPWQYFAHSKVDCLKEFGREANMAVTRDDDVLCVTEYSRIVPLENGEVVVSLINGRPGAKNFTFSHTLREFTKATNIRLRFLRTNTLLGHLISKAQRDPTVTRRYYYSIKDISIGGQCVCNGHAEVCNINNPEKLFRCECQHHTCGETCDRCCTGYNQRRWRPAAWEQSHECEACNCHGHASNCYYDPDVERQQASLNTQGIYAGGGVCINCQHNTAGVNCEQCAKGYYRPYGVPVDAPDGCIPCSCDPEHADGCEQGSGRCHCKPNFHGDNCEKCAIGYYNFPFCLRIPIFPVSTPSSEDPVAGDIKGCDCNLEGVLPEICDAHGRCLCRPGVEGPRCDTCRSGFYSFPICQGPSEKVAIYKPESRPSAETEPASTWILDFPASRTGEINFYCL

SEQ ID NO: 7654 - protein, 1724 aa, Homo Sapiens
MPPAVRRSACSMGWLWIFGAALGQCLGYSSQQQRVPFLQPPGQSQLQASYVEFRPSQGCSPGYYRDHKGLYTGRCVPCNCNGHSNQCQDGSGICVNCQHNTAGEHCERCQEGYYGNAVHGSCRACPCPHTNSFATGCVVNGGDVRCSCKAGYTGTQCERCAPGYFGNPQKFGGSCQPCSCNSNGQLGSCHPLTGDCINQEPKDSSPAEECDDCDSCVMTLLNDLATMGEQLRLVKSQLQGLSASAGLLEQMRHMETQAKDLRNQLLNYRSAISNHGSKIEGLERELTDLNQEFETLQEKAQVNSRKAQTLNNNVNRATQSAKELDVKIKNVIRNVHILLKQISGTDGEGNNVPSGDFSREWAEAQRMMRELRNRNFGKHLREAEADKRESQLLLNRIRTWQKTHQGENNGLANSIRDSLNEYEAKLSDLRARLQEAAAQAKQANGLNQENERALGAIQRQVKEINSLQSDFTKYLTTADSSLLQTNIALQLMEKSQKEYEKLAASLNEARQELSDKVRELSRSAGKTSLVEEAEKHARSLQELAKQLEEIKRNASGDELVRCAVDAATAYENILNAIKAAEDAANRAASASESALQTVIKEDLPRKAKTLSSNSDKLLNEAKMTQKKLKQEVSPALNNLQQTLNIVTVQKEVIDTNLTTLRDGLHGIQRGDIDAMISSAKSMVRKANDITDEVLDGLNPIQTDVERIKDTYGRTQNEDFKKALTDADNSVNKLTNKLPDLWRKIESINQQLLPLGNISDNMDRIRELIQQARDAASKVAVPMRFNGKSGVEVRLPNDLEDLKGYTSLSLFLQRPNSRENGGTENMFVMYLGNKDASRDYIGMAVVDGQLTCVYNLGDREAELQVDQILTKSETKEAVMDRVKFQRIYQFARLNYTKGATSSKPETPGVYDMDGRNSNTLLNLDPENVVFYVGGYPPDFKLPSRLSFPPYKGCIELDDLNENVLSLYNFKKTFNLNTTEVEPCRRRKEESDKNYFEGTGYARVPTQPHAPIPTFGQTIQTTVDRGLLFFAENGDRFISLNIEDGKLMVRYKLNSELPKERGVGDAINNGRDHSIQIKIGKLQKRMWINVDVQNTIIDGEVFDFSTYYLGGIPIAIRERFNISTPAFRGCMKNLKKTSGVVRLNDTVGVTKKCSEDWKLVRSASFSRGGQLSFTDLGLPPTDHLQASFGFQTFQPSGILLDHQTWTRNLQVTLEDGYIELSTSDSGGPIFKSPQTYMDGLLHYVSVISDNSGLRLLIDDQLLRNSKRLKHISSSRQSLRLGGSNFEGCISNVFVQRLSLSPEVLDLTSNSLKRDVSLGGCSLNKPPFLMLLKGSTRFNKTKTFRINQLLQDTPVASPRSVKVWQDACSPLPKTQANHGALQFGDIPTSHLLFKLPQELLKPRSQFAVDMQTTSSRGLVFHTGTKNSFMALYLSKGRLVFALGTDGKKLRIKSKEKCNDGKWHTVVFGHDGEKGRLVVDGLRAREGSLPGNSTISIRAPVYLGSPPSGKPKSLPTNSFVGCLKNFQLDSKPLYTPSSSFGVSSCLGGPLEKGIYFSEEGGHVVLAHSVLLGPEFKLVFSIRPRSLTGILIHIGSQPGKHLCVYLEAGKVTASMDSGAGGTSTSVTPKQSLCDGQWHSVAVTIKQHILHLELDTDSSYTAGQIPFPPASTQEPLHLGGAPANLTTLRIPVWKSFFGCLRNIHVNHIPVPVTEALEVQGPVSLNGCPDQ

SEQ ID NO: 7655 - protein, 1668 aa, Homo Sapiens
MPPAVRRSACSMGWLWIFGAALGQCLGYSSQQQRVPFLQPPGQSQLQASYVEFRPSQGCSPGYYRDHKGLYTGRCVPCNCNGHSNQCQDGSGICVNCQHNTAGEHCERCQEGYYGNAVHGSCRACPCPHTNSFATGCVVNGGDVRCSCKAGYTGTQCERCAPGYFGNPQKFGGSCQPCSCNSNGQLGSCHPLTGDCINQEPKDSSPAEECDDCDSCVMTLLNDLATMGEQLRLVKSQLQGLSASAGLLEQMRHMETQAKDLRNQLLNYRSAISNHGSKIEGLERELTDLNQEFETLQEKAQVNSRKAQTLNNNVNRATQSAKELDVKIKNVIRNVHMLNRIRTWQKTHQGENNGLANSIRDSLNEYEAKLSDLRARLQEAAAQAKQANGLNQENERALGAIQRQVKEINSLQSDFTKYLTTADSSLLQTNIALQLMEKSQKEYEKLAASLNEARQELSDKVRELSRSAGKTSLVEEAEKHARSLQELAKQLEEIKRNASGDELVRCAVDAATAYENILNAIKAAEDAANRAASASESALQTVIKEDLPRKAKTLSSNSDKLLNEAKMTQKKLKQEVSPALNNLQQTLNIVTVQKEVIDTNLTTLRDGLHGIQRGDIDAMISSAKSMVRKANDITDEVLDGLNPIQTDVERIKDTYGRTQNEDFKKALTDADNSVNKLTNKLPDLWRKIESINQQLLPLGNISDNMDRIRELIQQARDAASKVAVPMRFNGKSGVEVRLPNDLEDLKGYTSLSLFLQRPNSRENGGTENMFVMYLGNKDASRDYIGMAVVDGQLTCVYNLGDREAELQVDQILTKSETKEAVMDRVKFQRIYQFARLNYTKGATSSKPETPGVYDMDGRNSNTLLNLDPENVVFYVGGYPPDFKLPSRLSFPPYKGCIELDDLNENVLSLYNFKKTFNLNTTEVEPCRRRKEESDKNYFEGTGYARVPTQPHAPIPTFGQTIQTTVDRGLLFFAENGDRFISLNIEDGKLMVRYKLNSELPKERGVGDAINNGRDHSIQIKIGKLQKRMWINVDVQNTIIDGEVFDFSTYYLGGIPIAIRERFNISTPAFRGCMKNLKKTSGVVRLNDTVGVTKKCSEDWKLVRSASFSRGGQLSFTDLGLPPTDHLQASFGFQTFQPSGILLDHQTWTRNLQVTLEDGYIELSTSDSGGPIFKSPQTYMDGLLHYVSVISDNSGLRLLIDDQLLRNSKRLKHISSSRQSLRLGGSNFEGCISNVFVQRLSLSPEVLDLTSNSLKRDVSLGGCSLNKPPFLMLLKGSTRFNKTKTFRINQLLQDTPVASPRSVKVWQDACSPLPKTQANHGALQFGDIPTSHLLFKLPQELLKPRSQFAVDMQTTSSRGLVFHTGTKNSFMALYLSKGRLVFALGTDGKKLRIKSKEKCNDGKWHTVVFGHDGEKGRLVVDGLRAREGSLPGNSTISIRAPVYLGSPPSGKPKSLPTNSFVGCLKNFQLDSKPLYTPSSSFGVSSCLGGPLEKGIYFSEEGGHVVLAHSVLLGPEFKLVFSIRPRSLTGILIHIGSQPGKHLCVYLEAGKVTASMDSGAGGTSTSVTPKQSLCDGQWHSVAVTIKQHILHLELDTDSSYTAGQIPFPPASTQEPLHLGGAPANLTTLRIPVWKSFFGCLRNIHVNHIPVPVTEALEVQGPVSLNGCPDQ

SEQ ID NO: 7656 - protein, 59 aa, Homo Sapiens
  misc_feature (1)..(1): Xaa can be any naturally occurring amino acid
XAGQVNIYSCNYRCDAMNSLLSPQRLCQVPGCIAQGKRLILSNVRGCTPTFATHLQNWG

SEQ ID NO: 7657 - protein, 1147 aa, Homo Sapiens
  misc_feature (1)..(1): Xaa can be any naturally occurring amino acid
XFATGCVVNGGDVRCSCKAGYTGTQCERCAPGYFGNPQKFGGSCQPCSCNSNGQLGSCHPLTGDCINQEPKDSSPAEECDDCDSCVMTLLNDLATMGEQLRLVKSQLQGLSASAGLLEQMRHMETQAKDLRNQLLNYRSAISNHGSKIEGLERELTDLNQEFETLQEKAQVNSRKAQTLNNNVNRATQSAKELDVKIKNVIRNVHILLKQISGTDGEGNNVPSGDFSREWAEAQRMMRELRNRNFGKHLREAEADKRESQLLLNRIRTWQKTHQGENNGLANSIRDSLNEYEAKLSDLRARLQEAAAQAKQANGLNQENERALGAIQRQVKEINSLQSDFTKYLTTADSSLLQTNIALQLMEKSQKEYEKLAASLNEARQELSDKVRELSRSAGKTSLVEEAEKHARSLQELAKQLEEIKRNASGDELVRCAVDAATAYENILNAIKAAEDAANRAASASESALQTVIKEDLPRKAKTLSSNSDKLLNEAKMTQKKLKQEVSPALNNLQQTLNIVTVQKEVIDTNLTTLRDGLHGIQRGDIDAMISSAKSMVRKANDITDEVLDGLNPIQTDVERIKDTYGRTQNEDFKKALTDADNSVNKLTNKLPDLWRKIESINQQLLPLGNISDNMDRIRELIQQARDAASKVAVPMRFNGKSGVEVRLPNDLEDLKGYTSLSLFLQRPNSRENGGTENMFVMYLGNKDASRDYIGMAVVDGQLTCVYNLGDREAELQVDQILTKSETKEAVMDRVKFQRIYQFARLNYTKGATSSKPETPGVYDMDGRNSNTLLNLDPENVVFYVGGYPPDFKLPSRLSFPPYKGCIELDDLNENVLSLYNFKKTFNLNTTEVEPCRRRKEESDKNYFEGTGYARVPTQPHAPIPTFGQTIQTTVDRGLLFFAENGDRFISLNIEDGKLMVRYKLNSELPKERGVGDAINNGRDHSIQIKIGKLQKRMWINVDVQNTIIDGEVFDFSTYYLGGIPIAIRERFNISTPAFRGCMKNLKKTSGVVRLNDTVGVTKKCSEDWKLVRSASFSRGGQLSFTDLGLPPTDHLQASFGFQTFQPSGILLDHQTWTRNLQVTLEDGYIELSTSDSGGPIFKSPQTYMDGLLHYVSVISDNSGLRQEGCLRPRVRDQSWKHSETMSLRKLK

SEQ ID NO: 7658 - protein, 134 aa, Homo Sapiens
  misc_feature (1)..(1): Xaa can be any naturally occurring amino acid
XFSEEGGHVVLAHSVLLGPEFKLVFSIRPRSLTGILIHIGSQPGKHLCVYLEAGKVTASMDSGAGGTSTSVTPKQSLCDGQWHSVAANLTTLRIPVWKSFFGCLRNIHVNHIPVPVTEALEVQGPVSLNGCPDQ

SEQ ID NO: 7659 - protein, 37 aa, Homo Sapiens
  misc_feature (1)..(1): Xaa can be any naturally occurring amino acid
XGWTEGPGGKFAWKLHHQHQSASLPGITSIRETKGAG

SEQ ID NO: 7660 - protein, 81 aa, Homo Sapiens
MALSSAWRSVLPLWLLWSAACSRAASGDDNAFPFDIEGSSAVGRQDPPETSEPRVALGRLPPAAEKCNAGFFHTLSGECVP

SEQ ID NO: 7661 - protein, 88 aa, Homo Sapiens
MALSSAWRSVLPLWLLWSAACSRAASGDDNAFPFDIEGSSAVGRQDPPETSEPRVALGRLPPAAEKCNAGFFHTLSGECVPCDCNGNS

SEQ ID NO: 7662 - protein, 107 aa, Homo Sapiens
MALSSAWRSVLPLWLLWSAACSRAASGDDNAFPFDIEGSSAVGRQDPPETSEPRVALGRLPPAAEKCNAGFFHTLSGECVPCDCNGNSNECLDGSGYCVHCQRNTTG

SEQ ID NO: 7663 - protein, 1823 aa, Homo Sapiens
MALSSAWRSVLPLWLLWSAACSRAASGDDNAFPFDIEGSSAVGRQDPPETSEPRVALGRLPPAAEKCNAGFFHTLSGECVPCDCNGNSNECLDGSGYCVHCQRNTTGEHCEKCLDGYIGDSIRGAPQFCQPCPCPLPHLANFAESCYRKNGAVRCICNENYAGPNCERCAPGYYGNPLLIGSTCKKCDCSGNSDPNLIFEDCDEVTGQCRNCLRNTTGFKCERCAPGYYGDARIAKNCAVCNCGGGPCDSVTGECLEEGFEPPTGMDCPTISCDKCVWDLTDDLRLAALSIEEGKSGVLSVSSGAAAHRHVNEINATIYLLKTKLSERENQYALRKIQINNAENTMKSLLSDVEELVEKENQASRKGQLVQKESMDTINHASQLVEQAHDMRDKIQEINNKMLYYGEEHELSPKEISEKLVLAQKMLEEIRSRQPFFTQRELVDEEADEAYELLSQAESWQRLHNETRTLFPVVLEQLDDYNAKLSDLQEALDQALNYVRDAEDMNRATAARQRDHEKQQERVREQMEVVNMSLSTSADSLTTPRLTLSELDDIIKNASGIYAEIDGAKSELQVKLSNLSNLSHDLVQEAIDHAQDLQQEANELSRKLHSSDMNGLVQKALDASNVYENIVNYVSEANETAEFALNTTDRIYDAVSGIDTQIIYHKDESENLLNQARELQAKAESSSDEAVADTSRRVGGALARKSALKTRLSDAVKQLQAAERGDAQQRLGQSRLITEEANRTTMEVQQATAPMANNLTNWSQNLQHFDSSAYNTAVNSARDAVRNLTEVVPQLLDQLRTVEQKRPASNVSASIQRIRELIAQTRSVASKIQVSMMFDGQSAVEVHSRTSMDDLKAFTSLSLYMKPPVKRPELTETADQFILYLGSKNAKKEYMGLAIKNDNLVYVYNLGTKDVEIPLDSKPVSSWPAYFSIVKIERVGKHGKVFLTVPSLSSTAEEKFIKKGEFSGDDSLLDLDPEDTVFYVGGVPSNFKLPTSLNLPGFVGCLELATLNNDVISLYNFKHIYNMDPSTSVPCARDKLAFTQSRAASYFFDGSGYAVVRDITRRGKFGQVTRFDIEVRTPADNGLILLMVNGSMFFRLEMRNGYLHVFYDFGFSGGPVHLEDTLKKAQINDAKYHEISIIYHNDKKMILVVDRRHVKSMDNEKMKIPFTDIYIGGAPPEILQSRALRAHLPLDINFRGCMKGFQFQKKDFNLLEQTETLGVGYGCPEDSLISRRAYFNGQSFIASIQKISFFDGFEGGFNFRTLQPNGLLFYYASGSDVFSISLDNGTVIMDVKGIKVQSVDKQYNDGLSHFVISSVSPTRYELIVDKSRVGSKNPTKGKIEQTQASEKKFYFGGSPISAQYANFTGCISNAYFTRVDRDVEVEDFQRYTEKVHTSLYECPIESSPLFLLHKKGKNLSKPKASQNKKGGKSKDAPSWDPVALKLPERNTPRNSHCHLSNSPRAIEHAYQYGGTANSRQEFEHLKGDFGAKSQFSIRLRTRSSHGMIFYVSDQEENDFMTLFLAHGRLVYMFNVGHKKLKIRSQEKYNDGLWHDVIFIRERSSGRLVIDGLRVLEESLPPTEATWKIKGPIYLGGVAPGKAVKNVQINSIYSFSGCLSNLQLNGASITSASQTFSVTPCFEGPMETGTYFSTEGGYVVLDESFNIGLKFEIAFEVRPRSSSGTLVHGHSVNGEYLNVHMKNGQVIVKVNNGIRDFSTSVTPKQSLCDGRWHRITVIRDSNVVQLDVDSEVNHVVGPLNPKPIDHREPVFVGGVPESLLTPRLAPSKPFTGCIRHFVIDGHPVSFSKAALVSGAVSINSCPAA

SEQ ID NO: 7664 - protein, 1816 aa, Homo Sapiens
MALSSAWRSVLPLWLLWSAACSRAASGDDNAFPFDIEGSSAVGRQDPPETSEPRVALGRLPPAAEKCNAGFFHTLSGECVPCDCNGNSNECLDGSGYCVHCQRNTTGEHCEKCLDGYIGDSIRGAPQFCQPCPCPLPHLANFAESCYRKNGAVRCICNENYAGPNCERCAPGYYGNPLLIGSTCKKCDCSGNSDPNLIFEDCDEVTGQCRNCLRNTTGFKCERCAPGYYGDARIAKNCAVCNCGGGPCDSVTGECLEEGFEPPTGCDKCVWDLTDDLRLAALSIEEGKSGVLSVSSGAAAHRHVNEINATIYLLKTKLSERENQYALRKIQINNAENTMKSLLSDVEELVEKENQASRKGQLVQKESMDTINHASQLVEQAHDMRDKIQEINNKMLYYGEEHELSPKEISEKLVLAQKMLEEIRSRQPFFTQRELVDEEADEAYELLSQAESWQRLHNETRTLFPVVLEQLDDYNAKLSDLQEALDQALNYVRDAEDMNRATAARQRDHEKQQERVREQMEVVNMSLSTSADSLTTPRLTLSELDDIIKNASGIYAEIDGAKSELQVKLSNLSNLSHDLVQEAIDHAQDLQQEANELSRKLHSSDMNGLVQKALDASNVYENIVNYVSEANETAEFALNTTDRIYDAVSGIDTQIIYHKDESENLLNQARELQAKAESSSDEAVADTSRRVGGALARKSALKTRLSDAVKQLQAAERGDAQQRLGQSRLITEEANRTTMEVQQATAPMANNLTNWSQNLQHFDSSAYNTAVNSARDAVRNLTEVVPQLLDQLRTVEQKRPASNVSASIQRIRELIAQTRSVASKIQVSMMFDGQSAVEVHSRTSMDDLKAFTSLSLYMKPPVKRPELTETADQFILYLGSKNAKKEYMGLAIKNDNLVYVYNLGTKDVEIPLDSKPVSSWPAYFSIVKIERVGKHGKVFLTVPSLSSTAEEKFIKKGEFSGDDSLLDLDPEDTVFYVGGVPSNFKLPTSLNLPGFVGCLELATLNNDVISLYNFKHIYNMDPSTSVPCARDKLAFTQSRAASYFFDGSGYAVVRDITRRGKFGQVTRFDIEVRTPADNGLILLMVNGSMFFRLEMRNGYLHVFYDFGFSGGPVHLEDTLKKAQINDAKYHEISIIYHNDKKMILVVDRRHVKSMDNEKMKIPFTDIYIGGAPPEILQSRALRAHLPLDINFRGCMKGFQFQKKDFNLLEQTETLGVGYGCPEDSLISRRAYFNGQSFIASIQKISFFDGFEGGFNFRTLQPNGLLFYYASGSDVFSISLDNGTVIMDVKGIKVQSVDKQYNDGLSHFVISSVSPTRYELIVDKSRVGSKNPTKGKIEQTQASEKKFYFGGSPISAQYANFTGCISNAYFTRVDRDVEVEDFQRYTEKVHTSLYECPIESSPLFLLHKKGKNLSKPKASQNKKGGKSKDAPSWDPVALKLPERNTPRNSHCHLSNSPRAIEHAYQYGGTANSRQEFEHLKGDFGAKSQFSIRLRTRSSHGMIFYVSDQEENDFMTLFLAHGRLVYMFNVGHKKLKIRSQEKYNDGLWHDVIFIRERSSGRLVIDGLRVLEESLPPTEATWKIKGPIYLGGVAPGKAVKNVQINSIYSFSGCLSNLQLNGASITSASQTFSVTPCFEGPMETGTYFSTEGGYVVLDESFNIGLKFEIAFEVRPRSSSGTLVHGHSVNGEYLNVHMKNGQVIVKVNNGIRDFSTSVTPKQSLCDGRWHRITVIRDSNVVQLDVDSEVNHVVGPLNPKPIDHREPVFVGGVPESLLTPRLAPSKPFTGCIRHFVIDGHPVSFSKAALVSGAVSINSCPAA

SEQ ID NO: 7665 - protein, 1816 aa, Homo Sapiens; identical to SEQ ID NO: 7664

SEQ ID NO: 7666 - protein, 1816 aa, Homo Sapiens; identical to SEQ ID NO: 7664

SEQ ID NO: 7667 - protein, 331 aa, Homo Sapiens
MALSSAWRSVLPLWLLWSAACSRAASGDDNAFPFDIEGSSAVGRQDPPETSEPRVALGRLPPAAEKCNAGFFHTLSGECVPCDCNGNSNECLDGSGYCVHCQRNTTGEHCEKCLDGYIGDSIRGAPQFCQPCPCPLPHLANFAESCYRKNGAVRCICNENYAGPNCERCAPGYYGNPLLIGSTCKKCDCSGNSDPNLIFEDCDEVTGQCRNCLRNTTGFKCERCAPGYYGDARIAKNCAVCNCGGGPCDSVTGECLEEGFEPPTGMDCPTISCDKCVWDLTDDLRLAALSIEEGKSGVLSVSSGAAAHRHVNEINATIYLLKTKLSERENQ

SEQ ID NO: 7668 - protein, 129 aa, Homo Sapiens
MALSSAWRSVLPLWLLWSAACSRAASGDDNAFPFDIEGSSAVGRQDPPETSEPRVALGRLPPAAEKCNAGFFHTLSGECVPCDCNGNSNECLDGSGYCVTTDGEDPGFSASALSFILSSQGAREARAPT

SEQ ID NO: 7669 - protein, 120 aa, Homo Sapiens
MALSSAWRSVLPLWLLWSAACSRAASGDDNAFPFDIEGSSAVGRQDPPETSEPRVALGRLPPAAEVQCPCHCHPAGAPAPPRAVPHSSFSLSPPLSSPQCLESFTWARSVRKLEIKSFPL

SEQ ID NO: 7670 - protein, 120 aa, Homo Sapiens; identical to SEQ ID NO: 7669

SEQ ID NO: 7671 - protein, 120 aa, Homo Sapiens; identical to SEQ ID NO: 7669

SEQ ID NO: 7672 - protein, 178 aa, Homo Sapiens
  misc_feature (1)..(1): Xaa can be any naturally occurring amino acid
XIFEDCDEVTGQCRNCLRNTTGFKCERCAPGYYGDARIAKNCAVCNCGGGPCDSVTGECLEEGFEPPTGMDCPTISCDKCVWDLTDDLRLAALSIEEGKSGVLSVSSGAAAHRHVNEINATIYLLKTKLSERENQYALRKIQINNAENTMKSLLSDVEELVEKHWNKPRRRLELQEGV

SEQ ID NO: 7673 - protein, 188 aa, Homo Sapiens
  misc_feature (1)..(1): Xaa can be any naturally occurring amino acid
XKNASGIYAEIDGAKSELQVKLSNLSNLSHDLVQEAIDHAQDLQQEANELSRKLHSSDMNGLVQKALDASNVYENIVNYVSEANETAEFALNTTDRIYDAVSGIDTQIIYHKDESENLLNQARELQAKAESSSDEAVADTSRRVGGALARKSALKTRLSDAVKQLQAAERGKHQRELKSHLLIHWSVR

SEQ ID NO: 7674 - protein, 187 aa, Homo Sapiens
  misc_feature (1)..(1): Xaa can be any naturally occurring amino acid
XSTCKKCDCSGNSDPNLIFEDCDEVTGQCRNCLRNTTGFKCERCAPGYYGDARIAKNCAVCNCGGGPCDSVTGECLEEGFEPPTGCDKCVWDLTDDLRLAALSIEEGKSGVLSVSSGAAAHRHVNEINATIYLLKTKLSERENQYALRKIQINNAENTMKSLLSDVEELVEKHWNKPRRRLELQEGV

SEQ ID NO: 7675 - protein, 38 aa, Homo Sapiens
CVPGAYNFPYCEGAVWWDGTSVAAEGAGRCVFSGRPCG

SEQ ID NO: 7676 - protein, 3695 aa, Homo Sapiens
MAKRLCAGSALCVRGPRGPAPLLLVGLALLGAARAREEAGGGFSLHPPYFNLAEGARIAASATCGEEAPARGSPRPTEDLYCKLVGGPVAGGDPNQTIRGQYCDICTAANSNKAHPASNAIDGTERWWQSPPLSRGLEYNEVNVTLDLGQVFHVAYVLIKFANSPRPDLWVLERSMDFGRTYQPWQFFASSKRDCLERFGPQTLERITRDDAAICTTEYSRIVPLENGEIVVSLVNGRPGAMNFSYSPLLREFTKATNVRLRFLRTNTLLGHLMGKALRDPTVTRRYYYSIKDISIGGRCVCHGHADACDAKDPTDPFRLQCTCQHNTCGGTCDRCCPGFNQQPWKPATANSANECQSCNCYGHATDCYYDPEVDRRRASQSLDGTYQGGGVCIDCQHHTTGVNCERCLPGFYRSPNHPLDSPHVCRRCNCESDFTDGTCEDLTGRCYCRPNFSGERCDVCAEGFTGFPSCYPTPSSSNDTREQVLPAGQIVNCDCSAAGTQGNACRKDPRVGRCLCKPNFQGTHCELCAPGFYGPGCQPCQCSSPGVADDRCDPDTGQCRCRVGFEGATCDRCAPGYFHFPLCQLCGCSPAGTLPEGCDEAGRCLCQPEFAGPHCDRCRPGYHGFPNCQACTCDPRGALDQLCGAGGLCRCRPGYTGTACQECSPGFHGFPSCVPCHCSAEGSLHAACDPRSGQCSCRPRVTGLRCDTCVPGAYNFPYCEAGSCHPAGLAPVDPALPEAQVPCMCRAHVEGPSCDRCKPGFWGLSPSNPEGCTRCSCDLRGTLGGVAECQPGTGQCFCKPHVCGQACASCKDGFFGLDQADYFGCRSCRCDIGGALGQSCEPRTGVCRCRPNTQGPTCSEPARDHYLPDLHHLRLELEEAATPEGHAVRFGFNPLEFENFSWRGYAQMAPVQPRIVARLNLTSPDLFWLVFRYVNRGAMSVSGRVSVREEGRSATCANCTAQSQPVAFPPSTEPAFITVPQRGFGEPFVLNPGTWALRVEAEGVLLDYVVLLPSAYYEAALLQLRVTEACTYRPSAQQSGDNCLLYTHLPLDGFPSAAGLEALCRQDNSLPRPCPTEQLSPSHPPLITCTGSDVDVQLQVAVPQPGRYALVVEYANEDARQEVGVAVHTPQRAPQQGLLSLHPCLYSTLCRGTARDTQDHLAVFHLDSEASVRLTAEQARFFLHGVTLVPIEEFSPEFVEPRVSCISSHGAFGPNSAACLPSRFPKPPQPIILRDCQVIPLPPGLPLTHAQDLTPAMSPAGPRPRPPTAVDPDAEPTLLREPQATVVFTTHVPTLGRYAFLLHGYQPAHPTFPVEVLINAGRVWQGHANASFCPHGYGCRTLVVCEGQALLDVTHSELTVTVRVPKGRWLWLDYVLVVPENVYSFGYLREEPLDKSYDFISHCAAQGYHISPSSSSLFCRNAAASLSLFYNNGARPCGCHEVGATGPTCEPFGGQCPCHAHVIGRDCSRCATGYWGFPNCRPCDCGARLCDELTGQCICPPRTIPPDCLLCQPQTFGCHPLVGCEECNCSGPGIQELTDPTCDTDSGQCKCRPNVTGRRCDTCSPGFHGYPRCRPCDCHEAGTAPGVCDPLTGQCYCKENVQGPKCDQCSLGTFSLDAANPKGCTRCFCFGATERCRSSSYTRQEFVDMEGWVLLSTDRQVVPHERQPGTEMLRADLRHVPEAVPEAFPELYWQAPPSYLGDRVSSYGGTLRYELHSETQRGDVFVPMESRPDVVLQGNQMSITFLEPAYPTPGHVHRGQLQLVEGNFRHTETRNTVSREELMMVLASLEQLQIRALFSQISSAVFLRRVALEVASPAGQGALASNVELCLCPASYRGDSCQECAPGFYRDVKGLFLGRCVPCQCHGHSDRCLPGSGVCVDCQHNTEGAHCERCQAGFVSSRDDPSAPCVSCPCPLSVPSNNFAEGCVLRGGRTQCLCKPGYAGASCERCAPGFFGNPLVLGSSCQPCDCSGNGDPNLLFSDCDPLTGACRGCLRHTTGPRCEICAPGFYGNALLPGNCTRCDCTPCGTEACDPHSGHCLCKAGVTGRRCDRCQEGHFGFDGCGGCRPCACGPAAEGSECHPQSGQCHCRPGTMGPQCRECAPGYWGLPEQGCRRCQCPGGRCDPHTGRCNCPPGLSGERCDTCSQQHQVPVPGGPVGHSIHCEVCDHCVVLLLDDLERAGALLPAIHEQLRGINASSMAWARLHRLNASIADLQSQLRSPLGPRHETAQQLEVLEQQSTSLGQDARRLGGQAVGTRDQASQLLAGTEATLGHAKTLLAAIRAVDRTLSELMSQTGHLGLANASAPSGEQLLRTLAEVERLLWEMRARDLGAPQAAAEAELAAAQRLLARVQEQLSSLWEENQALATQTRDRLAQHEAGLMDLREALNRAVDATREAQELNSRNQERLEEALQRKQELSRDNATLQATLHAARDTLASVFRLLHSLDQAKEELERLAASLDGARTPLLQRMQTFSPAGSKLRLVEAAEAHAQQLGQLALNLSSIILDVNQDRLTQRAIEASNAYSRILQAVQAAEDAAGQALQQADHTWATVVRQGLVDRAQQLLANSTALEEAMLQEQQRLGLVWAALQGARTQLRDVRAKKDQLEAHIQAAQAMLAMDTDETSKKIAHAKAVAAEAQDTATRVQSQLQAMQENVERWQGQYEGLRGQDLGQAVLDAGHSVSTLEKTLPQLLAKLSILENRGVHNASLALSASIGRVRELIAQARGAASKVKVPMKFNGRSGVQLRTPRDLADLAAYTALKFYLQGPEPEPGQGTEDRFVMYMGSRQATGDYMGVSLRDKKVHWVYQLGEAGPAVLSIDEDIGEQFAAVSLDRTLQFGHMSVTVERQMIQETKGDTVAPGAEGLLNLRPDDFVFYVGGYPSTFTPPPLLRFPGYRGCIEMDTLNEEVVSLYNFERTFQLDTAVDRPCARSKSTGDPWLTDGSYLDGTGFARISFDSQISTTKRFEQELRLVSYSGVLFFLKQQSQFLCLAVQEGSLVLLYDFGAGLKKAVPLQPPPPLTSASKAIQVFLLGGSRKRVLVRVERATVYSVEQDNDLELADAYYLGGVPPDQLPPSLRRLFPTGGSVRGCVKGIKALGKYVDLKRLNTTGVSAGCTADLLVGRAMTFHGHGFLRLALSNVAPLTGNVYSGFGFHSAQDSALLYYRASPDGLCQVSLQQGRVSLQLLRTEVKTQAGFADGAPHYVAFYSNATGVWLYVDDQLQQMKPHRGPPPELQPQPEGPPRLLLGGLPESGTIYNFSGCISNVFVQRLLGPQRVFDLQQNLGSVNVSTGCAPALQAQTPGLGPRGLQATARKASRRSRQPARHPACMLPPHLRTTRDSYQFGGSLSSHLEFVGILARHRNWPSLSMHVLPRSSRGLLLFTARLRPGSPSLALFLSNGHFVAQMEGLGTRLRAQSRQRSRPGRWHKVSVRWEKNRILLVTDGARAWSQEGPHRQHQGAEHPQPHTLFVGGLPASSHSSKLPVTVGFSGCVKRLRLHGRPLGAPTRMAGVTPCILGPLEAGLFFPGSGGVITLDLPGATLPDVGLELEVRPLAVTGLIFHLGQARTPPYLQLQVTEKQVLLRADDGAGEFSTSVTRPSVLCDGQWHRLAVMKSGNVLRLEVDAQSNHTVGPLLAAAAGAPAPLYLGGLPEPMAVQPWPPAYCGCMRRLAVNRSPVAMTRSVEVHGAVGASGCPAA

SEQ ID NO: 7677 - protein, 241 aa, Homo Sapiens
RLRFLRTNTLLGHLMGKALRDPTVTRRYYYSIKDISIGGRCVCHGHADACDAKDPTDPFSSPNLSGHNRQLPCCPSPDLHSSQAGTKAQDGDGRVGAANTPHLLCPVCLLSGAAEGTAEHPPPGSPSQDGQQPWCWHRHIPGPHPESSVRLQCTCQHNTCGGTCDRCCPGFNQQPWKPATANSANECQSCNCYGHATDCYYDPEVDRRRASQSLDGTYQGGGVCIDCQHHTTGVNCERCLP

SEQ ID NO: 7678 - protein, 1810 aa, Homo Sapiens
MDCPLSAPTPPPPLVRFFRAPLPACVPPTLLPVLPAALCRARVRAQEPEFSYGCAEGSCYPATGDLLIGRAQKLSVTSTCGLHKPEPYCIVSHLQEDKKCFICNSQDPYHETLNPDSHLIENVVTTFAPNRLKIWWQSENGVENVTIQLDLEAEFHFTHLIMTFKTFRPAAMLIERSSDFGKTWGVYRYFAYDCEASFPGISTGPMKKVDDIICDSRYSDIEPSTEGEVIFRALDPAFKIEDPYSPRIQNLLKITNLRIKFVKLHTLGDNLLDSRMEIREKYYYAVYDMVVRGNCFCYGHASECAPVDGFNEEVEGMVHGHCMCRHNTKGLNCELCMDFYHDLPWRPAEGRNSNACKKCNCNEHSISCHFDMAVYLATGNVSGGVCDDCQHNTMGRNCEQCKPFYYQHPERDIRDPNFCERCTCDPAGSQNEGICDSYTDFSTGLIAGQCRCKLNVEGEHCDVCKEGFYDLSSEDPFGCKSCACNPLGTIPGGNPCDSETGHCYCKRLVTGQHCDQCLPEHWGLSNDLDGCRPCDCDLGGALNNSCFAESGQCSCRPHMIGRQCNEVEPGYYFATLDHYLYEAEEANLGPGVSIVERQYIQDRIPSWTGAGFVRVPEGAYLEFFIDNIPYSMEYDILIRYEPQLPDHWEKAVITVQRPGRIPTSSRCGNTIPDDDNQVVSLSPGSRYVVLPRPVCFEKGTNYTVRLELPQYTSSDSDVESPYTLIDSLVLMPYCKSLDIFTVGGSGDGVVTNSAWETFQRYRCLENSRSVVKTPMTDVCRNIIFSISALLHQTGLACECDPQGSLSSVCDPNGGQCQCRPNVVGRTCNRCAPGTFGFGPSGCKPCECHLQGSVNAFCNPVTGQCHCFQGVYARQCDRCLPGHWGFPSCQPCQCNGHADDCDPVTGECLNCQDYTMGHNCERCLAGYYGDPIIGSGDHCRPCPCPDGPDSGRQFARSCYQDPVTLQLACVCDPGYIGSRCDDCASGYFGNPSEVGGSCQPCQCHNNIDTTDPEACDKETGRCLKCLYHTEGEHCQFCRFGYYGDALQQDCRKCVCNYLGTVQEHCNGSDCQCDKATGQCLCLPNVIGQNCDRCAPNTWQLASGTGCDPCNCNAAHSFGPSCNEFTGQCQCMPGFGGRTCSECQELFWGDPDVECRACDCDPRGIETPQCDQSTGQCVCVEGVEGPRCDKCTRGYSGVFPDCTPCHQCFALWDVIIAELTNRTHRFLEKAKALKISGVIGPYRETVDSVERKVSEIKDILAQSPAAEPLKNIGNLFEEAEKLIKDVTEMMAQVEVKLSDTTSQSNSTAKELDSLQTEAESLDNTVKELAEQLEFIKNSDIRGALDSITKYFQMSLEAEERVNASTTEPNSTVEQSALMRDRVEDVMMERESQFKEKQEEQARLLDELAGKLQSLDLSAAAEMTCGTPPGASCSETECGGPNCRTDEGERKCGGPGCGGLVTVAHNAWQKAMDLDQDVLSALAEVEQLSKMVSEAKLRADEAKQSAEDILLKTNATKEKMDKSNEELRNLIKQIRNFLTQDSADLDSIEAVANEVLKMEMPSTPQQLQNLTEDIRERVESLSQVEVILQHSAADIARAEMLLEEAKRASKSATDVKVTADMVKEALEEAEKAQVAAEKAIKQADEDIQGTQNLLTSIESETAASEETLFNASQRISELERNVEELKRKAAQNSGEAEYIEKVVYTVKQSAEDVKKTLDGELDEKYKKVENLIAKKTEESADARRKAEMLQNEAKTLLAQANSKLQLLKDLERKYEDNQRYLEDKAQELARLEGEVRSLLKDISQKVAVYSTCL

SEQ ID NO: 7679 - protein, 91 aa, Homo Sapiens
MGLLQLLAFSFLALCRARVRAQEPEFSYGCAEGSCYPATGDLLIGRAQKLSVTSTCGLHKPEPYCIVSHLQEDKKCFICNSQDPYHETLNP

SEQ ID NO: 7680 - protein, 1786 aa, Homo Sapiens
MGLLQLLAFSFLALCRARVRAQEPEFSYGCAEGSCYPATGDLLIGRAQKLSVTSTCGLHKPEPYCIVSHLQEDKKCFICNSQDPYHETLNPDSHLIENVVTTFAPNRLKIWWQSENGVENVTIQLDLEAEFHFTHLIMTFKTFRPAAMLIERSSDFGKTWGVYRYFAYDCEASFPGISTGPMKKVDDIICDSRYSDIEPSTEGEVIFRALDPAFKIEDPYSPRIQNLLKITNLRIKFVKLHTLGDNLLDSRMEIREKYYYAVYDMVVRGNCFCYGHASECAPVDGFNEEVEGMVHGHCMCRHNTKGLNCELCMDFYHDLPWRPAEGRNSNACKKCNCNEHSISCHFDMAVYLATGNVSGGVCDDCQHNTMGRNCEQCKPFYYQHPERDIRDPNFCERCTCDPAGSQNEGICDSYTDFSTGLIAGQCRCKLNVEGEHCDVCKEGFYDLSSEDPFGCKSCACNPLGTIPGGNPCDSETGHCYCKRLVTGQHCDQCLPEHWGLSNDLDGCRPCDCDLGGALNNSCFAESGQCSCRPHMIGRQCNEVEPGYYFATLDHYLYEAEEANLGPGVSIVERQYIQDRIPSWTGAGFVRVPEGAYLEFFIDNIPYSMEYDILIRYEPQLPDHWEKAVITVQRPGRIPTSSRCGNTIPDDDNQVVSLSPGSRYVVLPRPVCFEKGTNYTVRLELPQYTSSDSDVESPYTLIDSLVLMPYCKSLDIFTVGGSGDGVVTNSAWETFQRYRCLENSRSVVKTPMTDVCRNIIFSISALLHQTGLACECDPQGSLSSVCDPNGGQCQCRPNVVGRTCNRCAPGTFGFGPSGCKPCECHLQGSVNAFCNPVTGQCHCFQGVYARQCDRCLPGHWGFPSCQPCQCNGHADDCDPVTGECLNCQDYTMGHNCERCLAGYYGDPIIGSGDHCRPCPCPDGPDSGRQFARSCYQDPVTLQLACVCDPGYIGSRCDDCASGYFGNPSEVGGSCQPCQCHNNIDTTDPEACDKETGRCLKCLYHTEGEHCQFCRFGYYGDALQQDCRKCVCNYLGTVQEHCNGSDCQCDKATGQCLCLPNVIGQNCDRCAPNTWQLASGTGCDPCNCNAAHSFGPSCNEFTGQCQCMPGFGGRTCSECQELFWGDPDVECRACDCDPRGIETPQCDQSTGQCVCVEGVEGPRCDKCTRGYSGVFPDCTPCHQCFALWDVIIAELTNRTHRFLEKAKALKISGVIGPYRETVDSVERKVSEIKDILAQSPAAEPLKNIGNLFEEAEKLIKDVTEMMAQVEVKLSDTTSQSNSTAKELDSLQTEAESLDNTVKELAEQLEFIKNSDIRGALDSITKYFQMSLEAEERVNASTTEPNSTVEQSALMRDRVEDVMMERESQFKEKQEEQARLLDELAGKLQSLDLSAAAEMTCGTPPGASCSETECGGPNCRTDEGERKCGGPGCGGLVTVAHNAWQKAMDLDQDVLSALAEVEQLSKMVSEAKLRADEAKQSAEDILLKTNATKEKMDKSNEELRNLIKQIRNFLTQDSADLDSIEAVANEVLKMEMPSTPQQLQNLTEDIRERVESLSQVEVILQHSAADIARAEMLLEEAKRASKSATDVKVTADMVKEALEEAEKAQVAAEKAIKQADEDIQGTQNLLTSIESETAASEETLFNASQRISELERNVEELKRKAAQNSGEAEYIEKVVYTVKQSAEDVKKTLDGELDEKYKKVENLIAKKTEESADARRKAEMLQNEAKTLLAQANSKLQLLKDLERKYEDNQRYLEDKAQELARLEGEVRSLLKDISQKVAVYSTCL

SEQ ID NO: 7681 - protein, 850 aa, Homo Sapiens
MGLLQLLAFSFLALCRARVRAQEPEFSYGCAEGSCYPATGDLLIGRAQKLSVTSTCGLHKPEPYCIVSHLQEDKKCFICNSQDPYHETLNPDSHLIENVVTTFAPNRLKIWWQSENGVENVTIQLDLEAEFHFTHLIMTFKTFRPAAMLIERSSDFGKTWGVYRYFAYDCEASFPGISTGPMKKVDDIICDSRYSDIEPSTEGEVIFRALDPAFKIEDPYSPRIQNLLKITNLRIKFVKLHTLGDNLLDSRMEIREKYYYAVYDMVVRGNCFCYGHASECAPVDGFNEEVEGMVHGHCMCRHNTKGLNCELCMDFYHDLPWRPAEGRNSNACKKCNCNEHSISCHFDMAVYLATGNVSGGVCDDCQHNTMGRNCEQCKPFYYQHPERDIRDPNFCERCTCDPAGSQNEGICDSYTDFSTGLIAGQCRCKLNVEGEHCDVCKEGFYDLSSEDPFGCKSCACNPLGTIPGGNPCDSETGHCYCKRLVTGQHCDQCLPEHWGLSNDLDGCRPCDCDLGGALNNSCFAESGQCSCRPHMIGRQCNEVEPGYYFATLDHYLYEAEEANLGPGVSIVERQYIQDRIPSWTGAGFVRVPEGAYLEFFIDNIPYSMEYDILIRYEPQLPDHWEKAVITVQRPGRIPTSSRCGNTIPDDDNQVVSLSPGSRYVVLPRPVCFEKGTNYTVRLELPQYTSSDSDVESPYTLIDSLVLMPYCKSLDIFTVGGSGDGVVTNSAWETFQRYRCLENSRSVVKTPMTDVCRNIIFSISALLHQTGLACECDPQGSLSSVCDPNGGQCQCRPNVVGRTCNRCAPGTFGFGPSGCKRRFLKSIVMHSFRLTQPLWQGSIAAEPMLPS

SEQ ID NO: 7682 - protein, 183 aa, Homo Sapiens
MGLLQLLAFSFLETAGPGASLEWRSLETTPEPQGLSMGSPSSGKRRPPRAPAPRPQRSAGDPRACTHTHSRFPSSQISTRTLTPRMRGLPRARGFTCVALCRARVRAQEPEFSYGCAEGSCYPATGDLLIGRAQKLSVTSTCGLHKPEPYCIVSHLQEDKKCFICNSQDPYHETLNPDSHLIE

SEQ ID NO: 7683 - protein, 1798 aa, Homo Sapiens
MELTSRERGRGQPLPWELRLGLLLSVLAATLAQAPAPDVPGCSRGSCYPATGDLLVGRADRLTASSTCGLNGPQPYCIVSHLQDEKKCFLCDSRRPFSARDNPHSHRIQNVVTSFAPQRRAAWWQSENGIPAVTIQLDLEAEFHFTHLIMTFKTFRPAAMLVERSADFGRTWHVYRYFSYDCGADFPGVPLAPPRHWDDVVCESRYSEIEPSTEGEVIYRVLDPAIPIPDPYSSRIQNLLKITNLRVNLTRLHTLGDNLLDPRREIREKYYYALYELVVRGNCFCYGHASECAPAPGAPAHAEGMVHGACICKHNTRGLNCEQCQDFYRDLPWRPAEDGHSHACRKCECHGHTHSCHFDMAVYLASGNVSGGVCDGCQHNTAGRHCELCRPFFYRDPTKDLRDPAVCRSCDCDPMGSQDGGRCDSHDDPALGLVSGQCRCKEHVVGTRCQQCRDGFFGLSISDRLGCRRCQCNARGTVPGSTPCDPNSGSCYCKRLVTGRGCDRCLPGHWGLSHDLLGCRPCDCDVGGALDPQCDEGTGQCHCRQHMVGRRCEQVQPGYFRPFLDHLIWEAEDTRGQVLDVVERLVTPGETPSWTGSGFVRLQEGQTLEFLVASVPKAMDYDLLLRLEPQVPEQWAELELIVQRPGPVPAHSLCGHLVPKDDRIQGTLQPHARYLIFPNPVCLEPGISYKLHLKLVRTGGSAQPETPYSGPGLLIDSLVLLPRVLVLEMFSGGDAAALERQATFERYQCHEEGLVPSKTSPSEACAPLLISLSTLIYNGALPCQCNPQGSLSSECNPHGGQCLCKPGVVGRRCDLCAPGYYGFGPTGCQACQCSHEGALSSLCEKTSGQCLCRTGAFGLRCDRCQRGQWGFPSCRPCVCNGHADECNTHTGACLGCRDHTGGEHCERCIAGFHGDPRLPYGGQCRPCPCPEGPGSQRHFATSCHQDEYSQQIVCHCRAGYTGLRCEACAPGHFGDPSRPGGRCQLCECSGNIDPMDPDACDPHTGQCLRCLHHTEGPHCAHCKPGFHGQAARQSCHRCTCNLLGTNPQQCPSPDQCHCDPSSGQCPCLPNVQGPSCDRCAPNFWNLTSGHGCQPCACHPSRARGPTCNEFTGQCHCRAGFGGRTCSECQELHWGDPGLQCHACDCDSRGIDTPQCHRFTGHCSCRPGVSGVRCDQCARGFSGIFPACHPCHACFGDWDRVVQDLAARTQRLEQRAQELQQTGVLGAFESSFWHMQEKLGIVQGIVGARNTSAASTAQLVEATEELRREIGEATEHLTQLEADLTDVQDENFNANHALSGLERDRLALNLTLRQLDQHLDLLKHSNFLGAYDSIRHAHSQSAEAERRANTSALAVPSPVSNSASARHRTEALMDAQKEDFNSKHMANQRALGKLSAHTHTLSLTDINELVCGAPGDAPCATSPCGGAGCRDEDGQPRCGGLSCNGAAATADLALGRARHTQAELQRALAEGGSILSRVAETRRQASEAQQRAQAALDKANASRGQVEQANQELQELIQSVKDFLNQEGADPDSIEMVATRVLELSIPASAEQIQHLAGAIAERVRSLADVDAILARTVGDVRRAEQLLQDARRARSWAEDEKQKAETVQAALEEAQRAQGIAQGAIRGAVADTRDTEQTLYQVQERMAGAERALSSAGERARQLDALLEALKLKRAGNSLAASTAEETAGSAQGRAQEAEQLLRGPLGDQYQTVKALAERKAQGVLAAQARAEQLRDEARDLLQAAQDKLQRLQELEGTYEENERALESKAAQLDGLEARMRSVLQAINLQVQIYNTCQ

SEQ ID NO: 7684 - protein, 1798 aa, Homo Sapiens; identical to SEQ ID NO: 7683

SEQ ID NO: 7685 - protein, 151 aa, Homo Sapiens
MTFKTFRPAAMLVERSADFGRTWHVYRYFSYDCGADFPGVPLAPPRHWDDVVCESRYSEIEPSTEGEVIYRVLDPAIPIPDPYSSRIQNLLKITNLRVNLTRLHTLGDNLLDPRREIREKYYYALYELVVRGNCFCYGHASECAPAPGAPA

SEQ ID NO: 7686 - protein, 160 aa, Homo Sapiens
MNEIQAIAARLPNVDLVLSQTKQDIARARRLQAEAEEARSRAHAVEGQVEDVVGNLRQGTVALQEAQDTMQGTSRSLRLIQDRVAEVQQVLRPAEKLVTSMTKQLGDFWTRMEELRHQARQQGAEAVQAQQLAEGASEQALSAQEGFERIKQKYAELKDR

SEQ ID NO: 7687 - protein, 188 aa, Homo Sapiens
MRPFFLLCFALPGLLHAQQACSRGACYPPVGDLLVGRTRFLRASSTCGLTKPETYCTQYGEWQMKCCKCDSRQPHNYYSHRVENVASSSGPMRWWQSQNDVNPVSLQLDLDRRFQLQEVMMEFQGPMPAGMLIERSSDFGKTWRVYQYLAADCTSTFPRVRQGRPQSWQDVRCQSLPQRPNARLNGGK

SEQ ID NO: 7688 - protein, 1172 aa, Homo Sapiens [sequence omitted]

SEQ ID NO: 7689 - protein, 1172 aa, Homo Sapiens [sequence omitted]

SEQ ID NO: 7690 - protein, 1172 aa, Homo Sapiens [sequence omitted]

SEQ ID NO: 7691 - protein, 1761 aa, Homo Sapiens
MQFQLTLFLHLGWLSYSKAQDDCNRGACHPTTGDLLVGRNTQLMASSTCGLSRAQKYCILSYLEGEQKCFICDSRFPYDPYDQPNSHTIENVIVSFEPDREKKWWQSENGLDHVSIRLDLEALFRFSHLILTFKTFRPAAMLVERSTDYGHNWKVFKYFAKDCATSFPNITSGQAQGVGDIVCDSKYSDIEPSTGGEVVLKVLDPSFEIENPYSPYIQDLVTLTNLRINFTKLHTLGDALLGRRQNDSLDKYYYALYEMIVRGSCFCNGHASECRPMQKMRGDVFSPPGMVHGQCVCQHNTDGPNCERCKDFFQDAPWRPAADLQDNACRSCSCNSHSSRCHFDMTTYLASGGLSGGVCEDCQHNTEGQHCDRCRPLFYRDPLKTISDPYACIPCECDPDGTISGGICVSHSDPALGSVAGQCLCKENVEGAKCDQCKPNHYGLSATDPLGCQPCDCNPLGSLPFLTCDVDTGQCLCLSYVTGAHCEECTVGYWGLGNHLHGCSPCDCDIGGAYSNVCSPKNGQCECRPHVTGRSCSEPAPGYFFAPLNFYLYEAEEATTLQGLAPLGSETFGQSPAVHVVLGEPVPGNPVTWTGPGFARVLPGAGLRFAVNNIPFPVDFTIAIHYETQSAADWTVQIVVNPPGGSEHCIPKTLQSKPQSFALPAATRIMLLPTPICLEPDVQYSIDVYFSQPLQGESHAHSHVLVDSLGLIPQINSLENFCSKQDLDEYQLHNCVEIASAMGPQVLPGACERLIISMSAKLHDGAVACKCHPQGSVGSSCSRLGGQCQCKPLVVGRCCDRCSTGSYDLGHHGCHPCHCHPQGSKDTVCDQVTGQCPCHGEVSGRRCDRCLAGYFGFPSCHPCPCNRFAELCDPETGSCFNCGGFTTGRNCERCIDGYYGNPSSGQPCRPCLCPDDPSSNQYFAHSCYQNLWSSDVICNCLQGYTGTQCGECSTGFYGNPRISGAPCQPCACNNNIDVTDPESCSRVTGECLRCLHNTQGANCQLCKPGHYGSALNQTCRRCSCHASGVSPMECPPGGGACLCDPVTGACPCLPNVTGLACDRCADGYWNLVPGRGCQSCDCDPRTSQSSHCDQLTGQCPCKLGYGGKRCSECQENYYGDPPGRCIPCDCNRAGTQKPICDPDTGMCRCREGVSGQRCDRCARGHSQEFPTCLQCHLCFDQWDHTISSLSKAVQGLMRLAANMEDKRETLPVCEADFKDLRGNVSEIERILKHPVFPSGKFLKVKDYHDSVRRQIMQLNEQLKAVYEFQDLKDTIERAKNEADLLLEDLQEEIDLQSSVLNASIADSSENIKKYYHISSSAEKKINETSSTINTSANTRNDLLTILDTLTSKGNLSLERLKQIKIPDIQILNEKVCGDPGNVPCVPLPCGGALCTGRKGHRKCRGPGCHGSLTLSTNALQKAQEAKSIIRNLDKQVRGLKNQIESISEQAEVSKNNALQLREKLGNIRNQSDSEEENINLFIKKVKNFLLEENVPPEDIEKVANGVLDIHLPIPSQNLTDELVKIQKHMQLCEDYRTDENRLNEEADGAQKLLVKAKAAEKAANILLNLDKTLNQLQQAQITQGRANSTITQLTANITKIKKNVLQAENQTREMKSELELAKQRSGLEDGLSLLQTKLQRHQDHAVNAKVQAESAQHQAGSLEKEFVELKKQYAILQRKTSTTGLTKETLGKVKQLKDAAEKLAGDTEAKIRRITDLERKIQDLNLSRQAKADQLRILEDQVVAIKNEIVEQEKKYARCYS

SEQ ID NO: 7692 - protein, 1761 aa, Homo Sapiens; identical to SEQ ID NO: 7691

SEQ ID NO: 7693 - protein, 772 aa, Homo Sapiens
MQFQLTLFLHLGWLSYSKAQDDCNRGACHPTTGDLLVGRNTQLMASSTCGLSRAQKYCILSYLEGEQKCFICDSRFPYDPYDQPNSHTIENVIVSFEPDREKKWWQSENGLDHVSIRLDLEALFRFSHLILTFKTFRPAAMLVERSTDYGHNWKVFKYFAKDCATSFPNITSGQAQGVGDIVCDSKYSDIEPSTGGEVVLKVLDPSFEIENPYSPYIQDLVTLTNLRINFTKLHTLGDALLGRRQNDSLDKYYYALYEMIVRGSCFCNGHASECRPMQKMRGDVFSPPGMVHGQCVCQHNTDGPNCERCKDFFQDAPWRPAADLQDNACRSCSCNSHSSRCHFDMTTYLASGGLSGGVCEDCQHNTEGQHCDRCRPLFYRDPLKTISDPYACIPCECDPDGTISGGICVSHSDPALGSVAGQCLCKENVEGAKCDQCKPNHYGLSATDPLGCQPCDCNPLGSLPFLTCDVDTGQCLCLSYVTGAHCEECTVGYWGLGNHLHGCSPCDCDIGGAYSNVCSPKNGQCECRPHVTGRSCSEPAPGYFFAPLNFYLYEAEEATTLQGLAPLGSETFGQSPAVHVVLGEPVPGNPVTWTGPGFARVLPGAGLRFAVNNIPFPVDFTIAIHYETQSAADWTVQIVVNPPGGSEHCIPKTLQSKPQSFALPAATRIMLLPTPICLEPDVQYSIDVYFSQPLQGESHAHSHVLVDSAAVQWHNLGSLQPPPPECKQFSCFSFPSSWDYRHPPPHLANFCIFSRDGVSPHWPGWSQTPDLR

SEQ ID NO: 7694 - protein, 749 aa, Homo Sapiens
NIDVTDPESCSRVTGECLRCLHNTQGANCQLCKPGHYGSALNQTCRRCSCHASGVSPMECPPGGGACLCDPVTGACPCLPNVTGLACDRCADGYWNLVPGRGCQSCDCDPRTSQSSHCDQLTGQCPCKLGYGGKRCSECQENYYGDPPGRCIPCDCNRAGTQKPICDPDTGMCRCREGVSGQRCDRCARGHSQEFPTCLQCHLCFDQWDHTISSLSKAVQGLMRLAANMEDKRETLPVCEADFKDLRGNVSEIERILKHPVFPSGKFLKVKDYHDSVRRQIMQLNEQLKAVYEFQDLKDTIERAKNEADLLLEDLQEEIDLQSSVLNASIADSSENIKKYYHISSSAEKKINETSSTINTSANTRNDLLTILDTLTSKGNLSLERLKQIKIPDIQILNEKVCGDPGNVPCVPLPCGGALCTGRKGHRKCRGPGCHGSLTLSTNALQKAQEAKSIIRNLDKQVRGLKNQIESISEQAEVSKNNALQLREKLGNIRNQSDSEEENINLFIKKVKNFLLEENVPPEDIEKVANGVLDIHLPIPSQNLTDELVKIQKHMQLCEDYRTDENRLNEEADGAQKLLVKAKAAEKAANILLNLDKTLNQLQQAQITQGRANSTITQLTANITKIKKNVLQAENQTREMKSELELAKQRSGLEDGLSLLQTKLQRHQDHAVNAKVQAESAQHQAGSLEKEFVELKKQYAILQRKTSTTGLTKETLGKVKQLKDAAEKLAGDTEAKIRRITGCFQNSAR

SEQ ID NO: 7695 - protein, 38 aa, Homo Sapiens
MKNEFDKLVCNCKHNTYGVDCEKCLPFFNDRPWRRATA

SEQ ID NO: 7696 - protein, 1609 aa, Homo Sapiens
MRGSHRAAPALRPRGRLWPVLAVLAAAAAAGCAQAAMDECTDEGGRPQRCMPEFVNAAFNVTVVATNTCGTPPEEYCVQTGVTGVTKSCHLCDAGQPHLQHGAAFLTDYNNQADTTWWQSQTMLAGVQYPSSINLTLHLGKAFDITYVRLKFHTSRPESFAIYKRTREDGPWIPYQYYSGSCENTYSKANRGFIRTGGDEQQALCTDEFSDISPLTGGNVAFSTLEGRPSAYNFDNSPVLQEWVTATDIRVTLNRLNTFGDEVFNDPKVLKSYYYAISDFAVGGRCKCNGHASECMKNEFDKLVCNCKHNTYGVDCEKCLPFFNDRPWRRATAESASECLPCDCNGRSQECYFDPELYRSTGHGGHCTNCQDNTDGAHCERCRENFFRLGNNEACSSCHCSPVGSLSTQCDSYGRCSCKPGVMGDKCDRCQPGFHSLTEAGCRPCSCDPSGSIDECNIETGRCVCKDNVEGFNCERCKPGFFNLESSNPRGCTPCFCFGHSSVCTNAVGYSVYSISSTFQIDEDGWRAEQRDGSEASLEWSSERQDIAVISDSYFPRYFIAPAKFLGKQVLSYGQNLSFSFRVDRRDTRLSAEDLVLEGAGLRVSVPLIAQGNSYPSETTVKYVFRLHEATDYPWRPALTPFEFQKLLNNLTSIKIRGTYSERSAGYLDDVTLASARPGPGVPATWVESCTCPVGYGGQFCEMCLSGYRRETPNLGPYSPCVLCACNGHSETCDPETGVCNCRDNTAGPHCEKCSDGYYGDSTAGTSSDCQPCPCPGGSSCAVVPKTKEVVCTNCPTGTTGKRCELCDDGYFGDPLGRNGPVRLCRLCQCSDNIDPNAVGNCNRLTGECLKCIYNTAGFYCDRCKDGFFGNPLAPNPADKCKACNCNLYGTMKQQSSCNPVTGQCECLPHVTGQDCGACDPGFYNLQSGQGCERCDCHALGSTNGQCDIRTGQCECQPGITGQHCERCEVNHFGFGPEGCKPCDCHPEGSLSLQCKDDGRCECREGFVGNRCDQCEENYFYNRSWPGCQECPACYRLVKDKVADHRVKLQELESLIANLGTGDEMVTDQAFEDRLKEAEREVMDLLREAQDVKDVDQNLMDRLQRVNNTLSSQISRLQNIRNTIEETGNLAEQARAHVENTERLIEIASRELEKAKVAAANVSVTQPESTGDPNNMTLLAEEARKLAERHKQEADDIVRVAKTANDTSTEAYNLLLRTLAGENQTAFEIEELNRKYEQAKNISQDLEKQAARVHEEAKRAGDKAVEIYASVAQLSPLDSETLENEANNIKMEAENLEQLIDQKLKDYEDLREDMRGKELEVKNLLEKGKTEQQTADQLLARADAAKALAEEAAKKGRDTLQEANDILNNLKDFDRRVNDNKTAAEEALRKIPAINQTITEANEKTREAQQALGSAAADATEAKNKAHEAERIASAVQKNATSTKAEAERTFAEVTDLDNEVNNMLKQLQEAEKELKRKQDDADQDMMMAGMASQAAQEAEINARKAKNSVTSLLSIINDLLEQLGQLDTVDLNKLNEIEGTLNKAKDEMKVSDLDRKVSDLENEAKKQEAAIMDYNRDIEEIMKDIRNLEDIRKTLPSGCFNTPSIEKP

SEQ ID NO: 7697 - protein, 1193 aa, Homo Sapiens
MPALWLGCCLCFSLLLPAARATSRREVCDCNGKSRQCIFDRELHRQTGNGFRCLNCNDNTDGIHCEKCKNGFYRHRERDRCLPCNCNSKGSLSARCDNSGRCSCKPGVTGARCDRCLPGFHMLTDAGCTQDQRLLDSKCDCDPAGIAGPCDAGRCVCKPAVTGERCDRCRSGYYNLDGGNPEGCTQCFCYGHSASCRSSAEYSVHKITSTFHQDVDGWKAVQRNGSPAKLQWSQRHQDVFSSAQRLDPVYFVAPAKFLGNQQVSYGQSLSFDYRVDRGGRHPSAHDVILEGAGLRITAPLMPLGKTLPCGLTKTYTFRLNEHPSNNWSPQLSYFEYRRLLRNLTALRIRATYGEYSTGYIDNVTLISARPVSGAPAPWVEQCICPVGYKGQFCQDCASGYKRDSARLGPFGTCIPCNCQGGGACDPDTGDCYSGDENPDIECADCPIGFYNDPHDPRSCKPCPCHNGFSCSVMPETEEVVCNNCPPGVTGARCELCADGYFGDPFGEHGPVRPCQPCQCNNNVDPSASGNCDRLTGRCLKCIHNTAGIYCDQCKAGYFGDPLAPNPADKCRACNCNPMGSEPVGCRSDGTCVCKPGFGGPNCEHGAFSCPACYNQVKIQMDQFMQQLQRMEALISKAQGGDGVVPDTELEGRMQQAEQALQDILRDAQISEGASRSLGLQLAKVRSQENSYQSRLDDLKMTVERVRALGSQYQNRVRDTHRLITQMQLSLAESEASLGNTNIPASDHYVGPNGFKSLAQEATRLAESHVESASNMEQLTRETEDYSKQALSLVRKALHEGVGSGSGSPDGAVVQGLVEKLEKTKSLAQQLTREATQAEIEADRSYQHSLRLLDSVSRLQGVSDQSFQVEEAKRIKQKADSLSSLVTRHMDEFKRTQKNLGNWKEEAQQLLQNGKSGREKSDQLLSRANLAKSRAQEALSMGNATFYEVESILKNLREFDLQVDNRKAEAEEAMKRLSYISQKVSDASDKTQQAERALGSAAADAQRAKNGAGEALEISSEIEQEIGSLNLEANVTADGALAMEKGLASLKSEMREVEGELERKELEFDTNMDAVQMVITEAQKVDTRAKNAGVTIQDTLNTLDGLLHLMDQPLSVDEEGLVLLEQKLSRAKTQINSQLRPMMSELEERARQQRGHLHLLETSIDGILADVKNLENIRDNLPPGCYNTQALEQQ

SEQ ID NO: 7698 - protein, 1111 aa, Homo Sapiens
MPALWLGCCLCFSLLLPAARATSRREVCDCNGKSRQCIFDRELHRQTGNGFRCLNCNDNTDGIHCEKCKNGFYRHRERDRCLPCNCNSKGSLSARCDNSGRCSCKPGVTGARCDRCLPGFHMLTDAGCTQDQRLLDSKCDCDPAGIAGPCDAGRCVCKPAVTGERCDRCRSGYYNLDGGNPEGCTQCFCYGHSASCRSSAEYSVHKITSTFHQDVDGWKAVQRNGSPAKLQWSQRHQDVFSSAQRLDPVYFVAPAKFLGNQQVSYGQSLSFDYRVDRGGRHPSAHDVILEGAGLRITAPLMPLGKTLPCGLTKTYTFRLNEHPSNNWSPQLSYFEYRRLLRNLTALRIRATYGEYSTGYIDNVTLISARPVSGAPAPWVEQCICPVGYKGQFCQDCASGYKRDSARLGPFGTCIPCNCQGGGACDPDTGDCYSGDENPDIECADCPIGFYNDPHDPRSCKPCPCHNGFSCSVMPETEEVVCNNCPPGVTGARCELCADGYFGDPFGEHGPVRPCQPCQCNNNVDPSASGNCDRLTGRCLKCIHNTAGIYCDQCKAGYFGDPLAPNPADKCRACNCNPMGSEPVGCRSDGTCVCKPGFGGPNCEHGAFSCPACYNQVKIQMDQFMQQLQRMEALISKAQGGDGVVPDTELEGRMQQAEQALQDILRDAQISEGASRSLGLQLAKVRSQENSYQSRLDDLKMTVERVRALGSQYQNRVRDTHRLITQMQLSLAESEASLGNTNIPASDHYVGPNGFKSLAQEATRLAESHVESASNMEQLTRETEDYSKQALSLVRKALHEGVGSGSGSPDGAVVQGLVEKLEKTKSLAQQLTREATQAEIEADRSYQHSLRLLDSVSRLQGVSDQSFQVEEAKRIKQKADSLSSLVTRHMDEFKRTQKNLGNWKEEAQQLLQNGKSGREKSDQLLSRANLAKSRAQEALSMGNATFYEVESILKNLREFDLQVDNRKAEAEEAMKRLSYISQKVSDASDKTQQAERALGSAAADAQRAKNGAGEALEISSEIEQEIGSLNLEANVTADGALAMEKGLASLKSEMREVEGELERKELEFDTNMDAVQMVITEAQKVDTRAKNAGVTIQDTLNTLDGLLHLMGM

SEQ ID NO: 7699 - protein, 1575 aa, Homo Sapiens
MAAAALLLGLALLAPRAAGAGMGACYDGAGRPQRCLPVFENAAFGRLAQASHTCGSPPEDFCPHVGAAGAGAHCQRCDAADPQRHHNASYLTDFHSQDESTWWQSPSMAFGVQYPTSVNITLRLGKAYEITYVRLKFHTSRPESFAIYKRSRADGPWEPYQFYSASCQKTYGRPEGQYLRPGEDERVAFCTSEFSDISPLSGGNVAFSTLEGRPSAYNFEESPGLQEWVTSTELLISLDRLNTFGDDIFKDPKVLQSYYYAVSDFSVGGRCKCNGHASECGPDVAGQLACRCQHNTTGTDCERCLPFFQDRPWARGTAEAAHECLPCNCSGRSEECTFDRELFRSTGHGGRCHHCRDHTAGPHCERCQENFYHWDPRMPCQPCDCQSAGSLHLQCDDTGTCACKPTVTGWKCDRCLPGFHSLSEGGCRPCTCNPAGSLDTCDPRSGRCPCKENVEGNLCDRCRPGTFNLQPHNPAGCSSCFCYGHSKVCASTAQFQVHHILSDFHQGAEGWWARSVGGSEHPPQWSPNGVLLSPEDEEELTAPEKFLGDQRFSYGQPLILTFRVPPGDSPLPVQLRLEGTGLALSLRHSSLSGPQDAGHPREVELRFHLQETSEDVAPPLPPFHFQRLLANLTSLRLRVSPGPSPAGPVFLTEVRLTSARPGLSPPASWVEICSCPTGYTGQFCESCAPGYKREMPQGGPYASCVPCTCNQHGTCDPNTGICVCSHHTEGPSCERCLPGFYGNPFAGQADDCQPCPCPGQSACTTIPESREVVCTHCPPGQRGRRCEVCDDGFFGDPLGLFGHPQPCHQCQCSGNVDPNAVGNCDPLSGHCLRCLHNTTGDHCEHCQEGFYGSALAPRPADKCMPCSCHPQGSVSEQMPCDPVTGQCSCLPHVTARDCSRCYPGFFDLQPGRGCRSCKCHPLGSQEDQCHPKTGQCTCRPGVTGQACDRCQLGFFGFSIKGCRACRCSPLGAASAQCHENGTCVCRPGFEGYKCDRCHDNFFLTADGTHCQQCPSCYALVKEEAAKLKARLTLTEGWLQGSDCGSPWGPLDILLGEAPRGDVYQGHHLLPGAREAFLEQMMSLEGAVKAAREQLQRLNKGARCAQAGSQKTCTQLADLEAVLESSEEEILHAAAILASLEIPQEGPSQPTKWSHLATEARALARSHRDTATKIAATAWRALLASNTSYALLWNLLEGRVALETQRDLEDRYQEVQAAQKALRTAVAEVLPEAESVLATVQQVGADTAPYLALLASPGALPQKSRAEDLGLKAKALEKTVASWQHMATEAARTLQTAAQATLRQTEPLTKLHQEARAALTQASSSVQAATVTVMGARTLLADLEGMKLQFPRPKDQAALQRKADSVSDRLLADTRKKTKQAERMLGNAAPLSSSAKKKGREAEVLAKDSAKLAKALLRERKQAHRRASRLTSQTQATLQQASQQVLASEARRQELEEAERVGAGLSEMEQQIRESRISLEKDIETLSELLARLGSLDTHQAPAQALNETQWALERLRLQLGSPGSLQRKLSLLEQESQQQELQIQGFESDLAEIRADKQNLEAILHSLPENCASWQ

SEQ ID NO: 7700 - protein, 257 aa, Homo Sapiens
  misc_feature (1)..(1): Xaa can be any naturally occurring amino acid
XTLQTAAQATLRQTEPLTKLHQEARAALTQASSSVQAATVTVMGARTLLADLEDTRKKTKQAERMLGNAAPLSSSAKKKGREAEVLAKDSAKLAKALLRERKQAHRRASRLTSQTQATLQQASQQVLASEARRQELEEAERVGAGLSEMEQQIRESRISLEKDIETLSELLARLGSLDTHQAPAQALNETQWALERLRLQLGSPGSLQRKLSLLEQESQQQELQIQGFESDLAEIRADKQNLEAILHSLPENCASWQ

SEQ ID NO: 7701 - protein, 180 aa, Homo Sapiens
MPRQLSAAAALFASLAVILHDGSQMRAKAFPETRDYSQPTAAATVQDIKKPVQQPAKQAPHQTLAARFMDGHITFQTAATVKIPTTTPATTKNTATTSPITYTLVTTQATPNNSHTAPPVTEVTVGPSLAPYSLPPTITPPAHTTGTSSSTVSHTTGNTTQPSNQTTLPATLSIALHKST

SEQ ID NO: 7702 - protein, 416 aa, Homo Sapiens
MPRQLSAAAALFASLAVILHDGSQMRAKAFPETRDYSQPTAAATVQDIKKPVQQPAKQAPHQTLAARFMDGHITFQTAATVKIPTTTPATTKNTATTSPITYTLVTTQATPNNSHTAPPVTEVTVGPSLAPYSLPPTITPPAHTTGTSSSTVSHTTGNTTQPSNQTTLPATLSIALHKSTTGQKPVQPTHAPGTTAAAHNTTRTAAPASTVPGPTLAPQPSSVKTGIYQVLNGSRLCIKAEMGIQLIVQDKESVFSPRRYFNIDPNATQASGNCGTRKSNLLLNFQGGFVNLTFTKDEESYYISEVGAYLTVSDPETIYQGIKHAVVMFQTAVGHSFKCVSEQSLQLSAHLQVKTTDVQLQAFDFEDDHFGNVDECSSDYTIVLPVIGAIVVGLCLMGMGVYKIRLRCQSSGYQRI

SEQ ID NO: 7703 - protein, 143 aa, Homo Sapiens
MRAKAFPETRDYSQPTAAATVQDIKKPVQQPAKQAPHQTLAARFMDGHITFQTAATVKIPTTTPATTKNTATTSPITYTLVTTQATPNNSHTAPPVTEVTVGPSLAPYSLPPTITPPAHTTGTSSSTVSHTTGNTTQPSNQTT

SEQ ID NO: 7704 - protein, 392 aa, Homo Sapiens
MRAKAFPETRDYSQPTAAATVQDIKKPVQQPAKQAPHQTLAARFMDGHITFQTAATVKIPTTTPATTKNTATTSPITYTLVTTQATPNNSHTAPPVTEVTVGPSLAPYSLPPTITPPAHTTGTSSSTVSHTTGNTTQPSNQTTLPATLSIALHKSTTGQKPVQPTHAPGTTAAAHNTTRTAAPASTVPGPTLAPQPSSVKTGIYQVLNGSRLCIKAEMGIQLIVQDKESVFSPRRYFNIDPNATQASGNCGTRKSNLLLNFQGGFVNLTFTKDEESYYISEVGAYLTVSDPETIYQGIKHAVVMFQTAVGHSFKCVSEQSLQLSAHLQVKTTDVQLQAFDFEDDHFGNVDECSSDYTIVLPVIGAIVVGLCLMGMGVYKIRLRCQSSGYQRI

SEQ ID NO: 7705 - protein, 690 aa, Homo Sapiens
MLPRGRPRALGAAALLLLLLLLGFLLFDGRLRRAAALDGDPGAGPGDHNRSDCGPQPPPPPKCELLHVAIVCAGHNSSRDVITLVKSMLFYRKNPLHLHLVTDAVARNILETLFHTWMVPAVRVSFYHADQLKPQVSWIPNKHYSGLYGLMKLVLPSALPAELARVIVLDTDVTFASDISELWALFAHFSDTQAIGLVENQSDWYLGNLWKNHRPWPALGRGFNTGVILLRLDRLRQAGWEQMWRLTARRELLSLPATSLADQDIFNAVIKEHPGLVQRLPCVWNVQLSDHTLAERCYSEASDLKVIHWNSPKKLRVKNKHVEFFRNFYLTFLEYDGNLLRRELFVCPSQPPPGAEQLQQALAQLDEEDPCFEFRQQQLTVHRVHVTFLPHEPPPPRPHDVTLVAQLSMDRLQMLEALCRHWPGPMSLALYLTDAEAQQFLHFVEASPVLAARQDVAYHVVYREGPLYPVNQLRNVALAQALTPYVFLSDIDFLPAYSLYDYLRASIEQLGLGSRRKAALVVPAFETLRYRFSFPHSKVELLALLDAGTLYTFRYHEWPRGHAPTDYARWREAQAPYRVQWAANYEPYVVVPRDCPRYDPRFVGFGWNKVAHIVELDAQEYELLVLPEAFTIHLPHAPSLDISRFRSSPTYRDCLQALKDEFHQDLSRHHGAAALKYLPALQQPQSPARG

SEQ ID NO: 7706 - protein, 721 aa, Homo Sapiens
MLPRGRPRALGAAALLLLLLLLGFLLFGGDLGCERREPGGRAGAPGCFPGPLMPRVPPDGRLRRAAALDGDPGAGPGDHNRSDCGPQPPPPPKCELLHVAIVCAGHNSSRDVITLVKSMLFYRKNPLHLHLVTDAVARNILETLFHTWMVPAVRVSFYHADQLKPQVSWIPNKHYSGLYGLMKLVLPSALPAELARVIVLDTDVTFASDISELWALFAHFSDTQAIGLVENQSDWYLGNLWKNHRPWPALGRGFNTGVILLRLDRLRQAGWEQMWRLTARRELLSLPATSLADQDIFNAVIKEHPGLVQRLPCVWNVQLSDHTLAERCYSEASDLKVIHWNSPKKLRVKNKHVEFFRNFYLTFLEYDGNLLRRELFVCPSQPPPGAEQLQQALAQLDEEDPCFEFRQQQLTVHRVHVTFLPHEPPPPRPHDVTLVAQLSMDRLQMLEALCRHWPGPMSLALYLTDAEAQQFLHFVEASPVLAARQDVAYHVVYREGPLYPVNQLRNVALAQALTPYVFLSDIDFLPAYSLYDYLRASIEQLGLGSRRKAALVVPAFETLRYRFSFPHSKVELLALLDAGTLYTFRYHEWPRGHAPTDYARWREAQAPYRVQWAANYEPYVVVPRDCPRYDPRFVGFGWNKVAHIVELDAQEYELLVLPEAFTIHLPHAPSLDISRFRSSPTYRDCLQALKDEFHQDLSRHHGAAALKYLPALQQPQSPARG

SEQ ID NO: 7707 - protein, 721 aa, Homo Sapiens; identical to SEQ ID NO: 7706

SEQ ID NO: 7708 - protein, 721 aa, Homo Sapiens; identical to SEQ ID NO: 7706

SEQ ID NO: 7709 - protein, 158 aa, Homo Sapiens
WNSPKKLRVKNKHVEFFRNFYLTFLEYDGNLLRRELFVCPSQPPPGAEQLQQALAQLDEEDPCFEFRQQQLTVHRVHVTFLPHEPPPPRPHDVTLVAQLSMDRTWPTMWCTVRGPYTPSTSFATWPWPRPSRLTSSSVTLTSCLPILSTTTSGPPLSS

SEQ ID NO: 7710 - protein, 109 aa, Homo Sapiens
  misc_feature (1)..(1): Xaa can be any naturally occurring amino acid
XLLDAGTLYTFRNMSSWCCPRPSPSICPTLQAWTSPASAPAPPIVTASRPSRTNSTRTCPATMGLLPSNTSQPCSSPRALPEAEAGPALPLILALGRHQGNLPSAIPAI

SEQ ID NO: 7711 - protein, 166 aa, Homo Sapiens
IPRSPQPLGGSHRTPSSRRDSDGANSVASYENEEPACEDADEDEDDYHNPGYLVVLPDSTPATSTAAPSAPALSTPGIRDSAFSMESIDDYVNVPESGESAEASLDGSREYVNVSQELHPGAAKTEPVEAESVLEPGLPGTAELGSWKWLWGPHMASCPCSSLTTA

SEQ ID NO: 7712 - protein, 269 aa, Homo Sapiens
MEATAASWQVAVPVLGGASRPLGPRGAASLLRAPLQMEEAILVPCVLGLLLLPILAMLMALCVHCHRLPGSYDSTSSDSLYPRGIQFKRPHTVAPWPPAYPPVTSYPPLSQPDLLPIPRSPQPLGGSHRTPSSRRDSDGANSVASYENEEPACEDADEDEDDYHNPGYLVVLPDSTPATSTAAPSAPALSTPGIRDSAFSMESIDDYVNVPESGESAEASLDGSREYVNVSQELHPGAAKTEPAALSSQEAEEVEEEGAPDYENLQELN

SEQ ID NO: 7713 - protein, 85 aa, Homo Sapiens
MEEAILVPCVLGLLLLPILAMLMALCVHCHRLPGSYDSTSSDSLYPRGIQFKRPHTVAPWPPAYPPVTSYPPLSQPDLLPIPHDP

SEQ ID NO: 7714 - protein, 85 aa, Homo Sapiens; identical to SEQ ID NO: 7713

SEQ ID NO: 7715 - protein, 233 aa, Homo Sapiens
MEEAILVPCVLGLLLLPILAMLMALCVHCHRLPGSYDSTSSDSLYPRGIQFKRPHTVAPWPPAYPPVTSYPPLSQPDLLPIPRSPQPLGGSHRTPSSRRDSDGANSVASYENEEPACEDADEDEDDYHNPGYLVVLPDSTPATSTAAPSAPALSTPGIRDSAFSMESIDDYVNVPESGESAEASLDGSREYVNVSQELHPGAAKTEPAALSSQEAEEVEEEGAPDYENLQELN

SEQ ID NO: 7716 - protein, 262 aa, Homo Sapiens
MEEAILVPCVLGLLLLPILAMLMALCVHCHRLPGSYDSTSSDSLYPRGIQFKRPHTVAPWPPAYPPVTSYPPLSQPDLLPIPRSPQPLGGSHRTPSSRRDSDGANSVASYENEGASGIRGAQAGWGVWGPSWTRLTPVSLPPEPACEDADEDEDDYHNPGYLVVLPDSTPATSTAAPSAPALSTPGIRDSAFSMESIDDYVNVPESGESAEASLDGSREYVNVSQELHPGAAKTEPAALSSQEAEEVEEEGAPDYENLQELN

SEQ ID NO: 7717 - protein, 252 aa, Homo Sapiens
MEEAILVPCVLGLLLLPILAMLMALCVHCHRLPGSYDSTSSDSLYPRGIQFKRPHTVAPWPPAYPPVTSYPPLSQPDLLPIPRSPQPLRDSDGANSVASYENEGASGIRGAQAGWGVWGPSWTRLTPVSLPPEPACEDADEDEDDYHNPGYLVVLPDSTPATSTAAPSAPALSTPGIRDSAFSMESIDDYVNVPESGESAEASLDGSREYVNVSQELHPGAAKTEPAALSSQEAEEVEEEGAPDYENLQELN

SEQ ID NO: 7718 - protein, 232 aa, Homo Sapiens
MEEAILVPCVLGLLLLPILAMLMALCVHCHRLPGSYDSTSSDSLYPRGIQFKRPHTVAPWPPAYPPVTSYPPLSQPDLLPIPSPQPLGGSHRTPSSRRDSDGANSVASYENEEPACEDADEDEDDYHNPGYLVVLPDSTPATSTAAPSAPALSTPGIRDSAFSMESIDDYVNVPESGESAEASLDGSREYVNVSQELHPGAAKTEPAALSSQEAEEVEEEGAPDYENLQELN

SEQ ID NO: 7719 - protein, 232 aa, Homo Sapiens; identical to SEQ ID NO: 7718

SEQ ID NO: 7720 - protein, 261 aa, Homo Sapiens
MEEAILVPCVLGLLLLPILAMLMALCVHCHRLPGSYDSTSSDSLYPRGIQFKRPHTVAPWPPAYPPVTSYPPLSQPDLLPIPSPQPLGGSHRTPSSRRDSDGANSVASYENEGASGIRGAQAGWGVWGPSWTRLTPVSLPPEPACEDADEDEDDYHNPGYLVVLPDSTPATSTAAPSAPALSTPGIRDSAFSMESIDDYVNVPESGESAEASLDGSREYVNVSQELHPGAAKTEPAALSSQEAEEVEEEGAPDYENLQELN

SEQ ID NO: 7721 - protein, 100 aa, Homo Sapiens
MSSGTELLWPGAALLVLLGVAASLCVRCSRPGAKRREDQQSFTGSRTYSLVGQAWPGPLADMAPTRKDKLLQFYPSLEDPASSRYQNFSKGSRHGSEEAY

SEQ ID NO: 7722 - protein, 58 aa, Homo Sapiens
MSSGTELLWPGAALLVLLGVAASLCVRCSRPGAKRSEKIYQQRSLREDQQSFTGSRTY

SEQ ID NO: 7723 - protein, 64 aa, Homo Sapiens
MSSGTELLWPGAALLVLLGVAASLCVRCSRPGAKRSEKIYQQRSLREDQQSFTGSRTYSLVGQA

SEQ ID NO: 7724 - protein, 100 aa, Homo Sapiens
MSSGTELLWPGAALLVLLGVAASLCVRCSRPGAKRSEKIYQQRSLREDQQSFTGSRTYSLVGQAWPGPLADMAPTRKDKLLQFYPSLEDPASSRYQNFSK

SEQ ID NO: 7725 - protein, 111 aa, Homo Sapiens
MSSGTELLWPGAALLVLLGVAASLCVRCSRPGAKRSEKIYQQRSLREDQQSFTGSRTYSLVGQAWPGPLADMAPTRKDKLLQFYPSLEDPASSRYQNFSKGSRHGSEEAYI

SEQ ID NO: 7726 - protein, 243 aa, Homo Sapiens
MSSGTELLWPGAALLVLLGVAASLCVRCSRPGAKRSEKIYQQRSLREDQQSFTGSRTYSLVGQAWPGPLADMAPTRKDKLLQFYPSLEDPASSRYQNFSKGSRHGSEEAYIDPIAMEYYNWGRFSKPPEDDDANSYENVLICKQKTTETGAQQEGIGGLCRGDLSLSLALKTGPTSGLCPSASPEEDEESEDYQNSASIHQWRESRKVMGQLQREASPGPVGSPDEEDGEPDYVNGEVAATEA

SEQ ID NO: 7727 - protein, 243 aa, Homo Sapiens; identical to SEQ ID NO: 7726

SEQ ID NO: 7728 - protein, 243 aa, Homo Sapiens; identical to SEQ ID NO: 7726

SEQ ID NO: 7729 - protein, 243 aa, Homo Sapiens; identical to SEQ ID NO: 7726

SEQ ID NO: 7730 - protein, 481 aa, Homo Sapiens
MGALARALPSILLALLLTSTPEALGANPGLVARITDKGLQYAAQEGLLALQSELLRITLPDFTGDLRIPHVGRGRYEFHSLNIHSCELLHSALRPVPGQGLSLSISDSSIRVQGRWKVRKSFFKLQGSFDVSVKGISISVNLLLGSESSGRPTVTASSCSSDIADVEVDMSGDLGWLLNLFHNQIESKFQKVLESRICEMIQKSVSSDLQPYLQTLPVTTEIDSFADIDYSLVEAPRATAQMLEVMFKGEIFHRNHRSPVTLLAAVMSLPEEHNKMVYFAISDYVFNTASLVYHEEGYLNFSITDDMIPPDSNIRLTTKSFRPFVPRLARLYPNMNLELQGSVPSAPLLNFSPGNLSVDPYMEIDAFVLLPSSSKEPVFRLSVATNVSATLTFNTSKITGFLKPGKVKVELKESKVGLFNAELLEALLNYYILNTFYPKFNDKLAEGFPLPLLKRVQLYDLGLQIHKDFLFLGANVQYMRV

SEQ ID NO: 7731 - protein, 255 aa, Homo Sapiens
MCYRKTEDFFTIWLDLNMFLPLGVDCWIDNTRVVYNRSSGLVSNAPGVQIRVPGFGKTYSVEYLDSSKLAGYLHTLVQNLVNNGYVRDETVRAAPYDWRLEPGQQEEYYRKLAGLVEEMHAAYGKPVFLIGHSLGCLHLLYFLLRQPQAWKDRFIDGFISLGAPWGGSIKPMLVLASGDNQGIPIMSSIKLKEEQRITTTSPWMFPSRMAWPEDHVFISTPSFNYTGRDFQRFFADLHFEEGWYMWLQSRDLLAG

SEQ ID NO: 7732 - protein, 93 aa, Homo Sapiens
MGPPGSPWQWVTLLLGLLLPPAAPFWLLNVLFPPHTTPKAELSNHTRPVILARSQAGQTRCGELDVLPQDRGLLHHLAGSQHVPTPWGRLLDR

SEQ ID NO: 7733 - protein, 440 aa, Homo Sapiens
MGPPGSPWQWVTLLLGLLLPPAAPFWLLNVLFPPHTTPKAELSNHTRPVILVPGCLGNQLEAKLDKPDVVNWMCYRKTEDFFTIWLDLNMFLPLGVDCWIDNTRVVYNRSSGLVSNAPGVQIRVPGFGKTYSVEYLDSSKLAGYLHTLVQNLVNNGYVRDETVRAAPYDWRLEPGQQEEYYRKLAGLVEEMHAAYGKPVFLIGHSLGCLHLLYFLLRQPQAWKDRFIDGFISLGAPWGGSIKPMLVLASGDNQGIPIMSSIKLKEEQRITTTSPWMFPSRMAWPEDHVFISTPSFNYTGRDFQRFFADLHFEEGWYMWLQSRDLLAGLPAPGVEVYCLYGVGLPTPRTYIYDHGFPYTDPVGVLYEDGDDTVATRSTELCGLWQGRQPQPVHLLPLHGIQHLNMVFSNLTLEHINAILLGAYRQGPPASPTASPEPPPPE

SEQ ID NO: 7734 - protein, 61 aa, Homo Sapiens
SPRPGRTALLMASSLLGLPGVAPSSPCWSWPQECLCPGMCFTEDGSARARARPPEAPPALP

SEQ ID NO: 7735 - protein, 138 aa, Homo Sapiens
VQIRVPGFGKTYSVEYLDSSKLAGYLHTLVQNLVNNGYVRDETVRAAPYDWRLEPGQQEEYYRKLAGLVEEMHAAYGKPVFLIGHSLGCLHLLYFLLRQPQAWKDRFIDGFISLGAPWGGSIKPMLVLASETGSHCIA

SEQ ID NO: 7736 - protein, 80 aa, Homo Sapiens
  misc_feature (1)..(1): Xaa can be any naturally occurring amino acid
XEYYRKLAGLVEEMHAAYGKPVFLIGHSLGCLHLLYFLLRQPQAWKDRFIDGFISLGAPWGGSIKPMLVLASGSGTRAQH

SEQ ID NO: 7737 - protein, 107 aa, Homo Sapiens
  misc_feature (1)..(1): Xaa can be any naturally occurring amino acid
XLPLGVDCWIDNTRVVYNRSSGLVSNAPGVQIRVPGFGKTYSVEYLDSSKLAGPPATACAPAAPARDTASQHGLQQPDPGAHQCHPAGCLPPGSPCIPDCQPRAPAS

SEQ ID NO: 7738 - protein, 176 aa, Homo Sapiens
MKPLLLAVSLGLIAALQAHHLLASDEEIQDVSGTWYLKAMTVDREFPEMNLESVTPMTLTTLEGGNLEAKVTMLISGRCQEVKAVLEKTDEPGKYTADGGKHVAYIIRSHVKDHYIFYCEGELHGKPVRGVKLVGRDPKNNLEALEDFEKAAGARGLSTESILIPRQSETCSPGSD

SEQ ID NO: 7739 - protein, 176 aa, Homo Sapiens; identical to SEQ ID NO: 7738

SEQ ID NO: 7740 - protein, 86 aa, Homo Sapiens
MRQGLLVLALVLVLVLVLAAGSQVQEWYPRESHALNWNKFSGFWYILATATDAQGFLPARDKRKLGASVVKVNKVGQLRVLLAFRR

SEQ ID NO: 7741 - protein, 187 aa, Homo Sapiens
MRQGLLVLALVLVLVLVLAAGSQVQEWYPRESHALNWNKFSGFWYILATATDAQGFLPARDKRKLGASVVKVNKVGQLRVLLAFRRGQGCGRAQPRHPGTSGHLWASLSVKGVKAFHVLSTDYSYGLVYLRLGRATQNYKNLLLFHRQNVSSFQSLKEFMDACDILGLSKAAVILPKDASRTHTILP

SEQ ID NO: 7742 - protein, 164 aa, Homo Sapiens
MRQGLLVLALVLVLVLVLAAGSQVQEWYPRESHALNWNKFSGFWYILATATDAQGFLPARDKRKLGASVVKVNKVGQLRVLLAFRRLKGCQSQEVILRKDGKKPVFGNACAYAAGPREGQEGDRQNVSSFQSLKEFMDACDILGLSKAAVILPKDASRTHTILP

SEQ ID NO: 7743 - protein, 200 aa, Homo Sapiens
MRQGLLVLALVLVLVLVLAAGSQVQEWYPRESHALNWNKFSGFWYILATATDAQGFLPARDKRKLGASVVKVNKVGQLRVLLAFRRLKGCQSQEVILRKDGKKPVFGNACAYAAGPREGQEGVKGVKAFHVLSTDYSYGLVYLRLGRATQNYKNLLLFHRQNVSSFQSLKEFMDACDILGLSKAAVILPKDASRTHTILP

SEQ ID NO: 7744 - protein, 75 aa, Homo Sapiens
MRQGLLVLALVLVLVLVLAAGSQVQEWYPRESHALNWNKGQEEAGGVRGKGEQSGPAPRAPRLQTIGRMFRASRV

SEQ ID NO: 7745 - protein, 37 aa, Homo Sapiens
  misc_feature (1)..(1): Xaa can be any naturally occurring amino acid
XTDAQGFLPARDKRKLGASVVKVNKVGQLRVLLAFRR

SEQ ID NO: 7746 - protein, 102 aa, Homo Sapiens
ALLNAFTATFELSDDGRFEVWNAMTRGQHCDTWSYVLIPAAQPGQFTVDHGVGRSWLLPPGTLDQFICLGRAQGLSDDNIVFPDVTGGALDLSSLPWVAAPA

SEQ ID NO: 7747 - protein, 192 aa, Homo Sapiens
MRLLCGLWLWLSLLKVLQAQTPTPLPLPPPMQSFQGNQFQGEWFVLGLAGNSFRPEHRALLNAFTATFELSDDGRFEVWNAMTRGQHCDTWSYVLIPAAQPGQFTVDHGVEPGADREETRVVDSDYTQFALMLSRRHTSRLAVLRISLLGRSWLLPPGTLDQFICLGRAQGLSDDNIVFPDVTGWSPQASVC

SEQ ID NO: 7748 - protein, 90 aa, Homo Sapiens
TFELSDDGRFEVWNAMTRGQHCDTWSYVLIPAAQPGQFTVDHGVDTRAGWPSSGSACWAGAGCCLPGRWTSSSAWAELRASRMTTSSSQM

SEQ ID NO: 7749 - protein, 184 aa, Homo Sapiens
MMSFLLGAILTLLWAPTAQAEVLLQPDFNAEKFSGLWYVVSMASDCRVFLGKKDHLSMSTRAIRPTEEGGLHVHMEFPGADGCNQVDAEYLKVGSEGHFRVPALGYLDVRIVDTDYSSFAVLYIYKELEGALSTMVQLYSRTQDVSPQALKSFQDFYPTLGLPKDMMVMLPQSDACNPESKEAP

SEQ ID NO: 7750 - protein, 200 aa, Homo Sapiens
MPLGLLWLGLALLGALHAQAQDSTSDLIPAPPLSKVPLQQNFQDNQFQGKWYVVGLAGNAILREDKDPQKMYATIYELKEDKSYNVTSVLFREKAQKCDYWIRTFVPGCQPGEFTLGNIKSYPGLTSYLVRVVSTNYNQHAMVFFKKVSQNREYFKITLYGRTKELTSELKENFIRFSKSLGLPENHIVFPVPIDQCIDG

SEQ ID NO: 7751 - protein, 198 aa, Homo Sapiens
MPLGLLWLGLALLGALHAQAQDSTSDLIPAPPLSKVPLQQNFQDNQFQGKWYVVGLAGNAILREDKDPQKMYATIYELKEDKSYNVTSVLFRKKKCDYWIRTFVPGCQPGEFTLGNIKSYPGLTSYLVRVVSTNYNQHAMVFFKKVSQNREYFKITLYGRTKELTSELKENFIRFSKSLGLPENHIVFPVPIDQCIDG

SEQ ID NO: 7752 - protein, 198 aa, Homo Sapiens; identical to SEQ ID NO: 7751

SEQ ID NO: 7753 - protein, 78 aa, Homo Sapiens
MDLIKRNSGWVFENPSIGVLELWVLATNFRDYAIIFTQLEFGDEPFNTVELYSLTETASQEAMGLFTKWSRSLGFLSQ

SEQ ID NO: 7754 - protein, 163 aa, Homo Sapiens
MGGLLLAAFLALVSVPRAQAVWLGRLDPEQLLGPWYVLAVASREKGFAMEKDMKNVVGVVVTLTPENNLRTLSSQHGLGGCDQSVMDLIKRNSGWVFENPSIGVLELWVLATNFRDYAIIFTQLEFGDEPFNTVELYSLTETASQEAMGLFTKWSRSLGFLSQ

SEQ ID NO: 7755 - protein, 152 aa, Homo Sapiens
MEELDRQKIGGFWREVGVASDQSLVLTAPKRVEGLFLTLSGSNLTVKVAYNSSGSCEIEKIVGSEIDSTGKFAFPGHREIHVLDTDYEGYAILRVSLMWRGRNFRVLKYFTRSLEDKDRLGFWKFRELTADTGLYLAARPGRCAELLKEELI

SEQ ID NO: 7756 - protein, 175 aa, Homo Sapiens
MPGAAEALPTVTVTLVAGAVPPASGALTAHCIGGFWREVGVASDQSLVLTAPKRVEGLFLTLSGSNLTVKVAYNSSGSCEIEKIVGSEIDSTGKFAFPGHREIHVLDTDYEGYAILRVSLMWRGRNFRVLKYFTRSLEDKDRLGFWKFRELTADTGLYLAARPGRCAELLKEELI

SEQ ID NO: 7757 - protein, 176 aa, Homo Sapiens [sequence omitted]

SEQ ID NO: 7758 - protein, 176 aa, Homo Sapiens
MALLLLSLGLSLIAAQEFDPHTVMQRNYNVARVSGVWYSIFMASDDLNRIKENGDLRVFVRNIEHLKNGSLIFDFEYMVQGECVAVVVVCEKTEKNGEYSINYEGQNTVAVSETDYRLFITFHLQNFRNGTETHTLALYETCEKYGLGSQNIIDLTNKDPCYSKHYRSPPRPPMRW

SEQ ID NO: 7759 - protein, 518 aa, Homo Sapiens
MDEKCSFCNLQREAVSDCIPSLDSSQSTPTEELSSQGQSNTDKIECQAENYLNALFRKKDLPQNCDPNIPLVAQELMKKMIRQFAIEYISKSGKTQENRNGSIGPSIVCKSIQMNQAENSLQEEQEGPLDLTVNRMQEQNTQQGDGVLDLSTKKTSIKSEESSICDPSSENSVAGRLHRNREDYVERSAEFADGLLSKALKDIQSGALDINKAGILYGIPQKTLLLHLEALPAGKPASFKNKTRDFHDSYSYKDSKETCAVLQKVALWARAQAERTEKSKLNLLETSEIKFPTASTYLHQLTLQKMVTQFKEKNESLQYETSNPTVQLKIPQLRVSSVSKSQPDGSGLLDVMYQVSKTSSVLEGSALQKLKNILPKQNKIECSGPVTHSSVDSYFLHGDLSPLCLNSKNGTVDGTSENTEDGLDRKDSKQPRKKRGRYRQYDHEIMEEAIAMVMSGKMSVSKAQGIYGVPHSTLEYKVKERSGTLKTPPKKKLRLPDTGLYNMTDSGTGSCKNSSKPV

SEQ ID NO: 7760 - protein, 318 aa, Homo Sapiens
MDKGRERMAAAAAAAAAAAAAAQCRSPRCAAERRGFRRELDSWRHRLMHCVGFESILEGLYGPRLRRDLSLFEDCEPEELTDWSMDEKCSFCNLQREAVSDCIPSLDSSQSTPTEELSSQGQSNTDKIECQAENYLNALFRKKDLPQNCDPNIPLVAQELMKKMIRQFAIEYISKSGKTQENRNGSIGPSIVCKSIQMNQAENSLQEEQEGPLDLTVNRMQEQNTQQGDGVLDLSTKKTSIKSEESSICDPSSENSVAGMLQVKTDEKLNVSDENTASCPLSPIKMCLNRPIEWNLNLTTASLTSCTVHNQNLKSEEK

SEQ ID NO: 7761 - protein, 602 aa, Homo Sapiens
MDKGRERMAAAAAAAAAAAAAAQCRSPRCAAERRGFRRELDSWRHRLMHCVGFESILEGLYGPRLRRDLSLFEDCEPEELTDWSMDEKCSFCNLQREAVSDCIPSLDSSQSTPTEELSSQGQSNTDKIECQAENYLNALFRKKDLPQNCDPNIPLVAQELMKKMIRQFAIEYISKSGKTQENRNGSIGPSIVCKSIQMNQAENSLQEEQEGPLDLTVNRMQEQNTQQGDGVLDLSTKKTSIKSEESSICDPSSENSVAGRLHRNREDYVERSAEFADGLLSKALKDIQSGALDINKAGILYGIPQKTLLLHLEALPAGKPASFKNKTRDFHDSYSYKDSKETCAVLQKVALWARAQAERTEKSKLNLLETSEIKFPTASTYLHQLTLQKMVTQFKEKNESLQYETSNPTVQLKIPQLRVSSVSKSQPDGSGLLDVMYQVSKTSSVLEGSALQKLKNILPKQNKIECSGPVTHSSVDSYFLHGDLSPLCLNSKNGTVDGTSENTEDGLDRKDSKQPRKKRGRYRQYDHEIMEEAIAMVMSGKMSVSKAQGIYGVPHSTLEYKVKERSGTLKTPPKKKLRLPDTGLYNMTDSGTGSCKNSSKPV

SEQ ID NO: 7762 - protein, 1871 aa, Homo Sapiens
MDKGRERMAAAAAAAAAAAAAAQCRSPRCAAERRGFRRELDSWRHRLMHCVGFESILEGLYGPRLRRDLSLFEDCEPEELTDWSMDEKCSFCNLQREAVSDCIPSLDSSQSTPTEELSSQGQSNTDKIECQAENYLNALFRKKDLPQNCDPNIPLVAQELMKKMIRQFAIEYISKSGKTQENRNGSIGPSIVCKSIQMNQAENSLQEEQEGPLDLTVNRMQEQNTQQGDGVLDLSTKKTSIKSEESSICDPSSENSVAGSTVDAKSEEATKMEKRKSALNKVLESLCIHHQQQVLAMLKFLVQEQNAASLCCCNTSCVVSSESQKPLIEDDLCGLFCSCEYRLAERGCLQNEKQSPGLEPLPVCIKDLHCLSCQTVTVEHVKPVVNRGIADSYNSHRCCSGLLPNIHSTKSAFRSPLLSKEVCDLSVTLKDACRSRSPSPPPLSPIETEGFEKLKDVISEISALENNKLEANINQPPSLTPAEISSNKSDHQDKILKTKKSSNSYSLLSNDSNNSTTNHEKGETAVIFQDLMDRINEKLKSIETTDMTSLVKLSSSDYNTYNDLKLGDFITSLLHNAKASDYSFMELLSQHDKKVENKIIQTRFRKRQETLFAMRNSSDSPMFRRQSLQIKRELASLDENFTRKKYTEKSSRKLTQNNEISSSDKGEFYHDQGPSLQNSKRLQGKNHAETSFSPNYALQSLQLPLHSSETNLSFNEFSESFKTTSPEKMSIRKPQEKSADGKQFLQNDRKNPKLGNTQTLLRNDVSGLLSRTKRNIVPPGWYSVYVTNNYVFKKSPKAKKVSESTTKNDPVKNIHIESSHNIDLNKIAMNSNLQVVVKRLEDTISIAKKSWNNQPLSEGYKASKKLIEIDGKDQHADRNMTLTLNRMTCKEQSLSKSVVASGNIINSHCMPTVDLNNKRLENLKKSSILDMGRLISSVENVPAKYEGTESSSVSNYSSPIKLMFLSEVKSSEGVKYTLTSVGTSHSNVVLPSEKPTTHHVTEEKTETNEDISNANSENYHSSHYDTDTFQRELNKFSHAKETAGSSTMFIGDINSDKPQEEPKDNSSSATDPSFKRKPGRPKKIGPQVVKQIKRPIGRPPKPKIDQTNITVCQNEPFSAGRKSPECLISEVKEGIYKKSITVTVIYGRSRRTKRHVSEGRVNISNLMSLNNNAGDFPTEYNSPRNISEDKIDLGERISAVASLTTESEILGSGFEYVRPIKNKSVIPQPSKNIIRPNQKPLAISRKPGRPAKVKISGISVTINRTSPQEREVSISSCLPPLEQDNTSGKNLPEEKYDQQCTQMDKIRHTEADIFKNGSKRMIATVPLRHSIRDRKPSLHFLHSLASSSSLIYRNALLHKSYKLHLQKNKSQKEKHRHSKMKIAYKDTPRNRLSRNAKKCLEDNKLVPISEVSLDPIISSNPLLRWWATSASNDSLLEELNNRFEQITNAWVQVSGDEAENCIHKKREHIENDHFKVASPLETCLLELEVSPVKMLFQKKYDLNELCTWFMQTTETQSLSLVRKANARNPLEVINTRGIKLGTKYSDFNASPFRKHFKKFALSSPSKSAEKLHILHKVANSPLLNVKSNLAIARLKRTEFKRLHHERWKREGKLHNHGTVDWNSKRRNLRFFCQNQFLNKTEGETNADIPLQGKSIVDNQCVLPPEIRGDLQQRVVMPDFKIHASFENKFKSEAKENGTNCSQKDFQKGPRLENVCPNSWRSKTLKDCRIFLRKLNCLEHRNTFKLNTIIYSPESTDSGNTHQTHMEESKRFTLRSHSARQNSFKKQSKEIENANTNNPSADEFADHLGNSKLSKCVNFDKNPDSFEVLSNLNKRKRPPWKITEMSTKRHKRQSCNSGQMANYFSKSLACYK

SEQ ID NO: 7763 - protein, 79 aa, Homo Sapiens
MDKGRERMAAAAAAAAAAAAAAQCRSPRCAAERRGFRRELDSWRHRLMHCVGFESILEGLYGPRLRRDLSLFEGLYTIS

SEQ ID NO: 7764 - protein, 77 aa, Homo Sapiens
  misc_feature (1)..(1): Xaa can be any naturally occurring amino acid
XGRERMAAAAAAAAAAAAAAQCRSPRCAAERRGFRRELDSWRHRLMHCVGFESILEGLYGPRLRRDLSLFEGLYTIS

SEQ ID NO: 7765 - protein, 692 aa, Homo Sapiens
MGPWGWKLRWTVALLLAAAGTAVGDRCERNEFQCQDGKCISYKWVCDGSAECQDGSDESQETCLSVTCKSGDFSCGGRVNRCIPQFWRCDGQVDCDNGSDEQGCLTLCEGPNKFKCHSGECITLDKVCNMARDCRDWSDEPIKECGTNECLDNNGGCSHVCNDLKIGYECLCPDGFQLVAQRRCEDIDECQDPDTCSQLCVNLEGGYKCQCEEGFQLDPHTKACKAVGSIAYLFFTNRHEVRKMTLDRSEYTSLIPNLRNVVALDTEVASNRIYWSDLSQRMICSTQLDRAHGVSSYDTVISRDIQAPDGLAVDWIHSNIYWTDSVLGTVSVADTKGVKRKTLFRENGSKPRAIVVDPVHGFMYWTDWGTPAKIKKGGLNGVDIYSLVTENIQWPNGITLDLLSGRLYWVDSKLHSISSIDVNGGNRKTILEDEKRLAHPFSLAVFEDKVFWTDIINEAIFSANRLTGSDVNLLAENLLSPEDMVLFHNLTQPRGVNWCERTTLSNGGCQYLCLPAPQINPHSPKFTCACPDGMLLARDMRSCLTEAEAAVATQETSTVRLKVSSTAVRTQHTTTRPVPDTSRLPGATPGLTTVEIVTMSHQALGDVAGRGNEKKPSSVRALSIVLPIVLLVFLCLGVFLLWKNWRLKNINSINFDNPVYQKTTEDEVHICHNQDGYSYPSRQMVSLEDDVA

SEQ ID NO: 7766 - protein, 860 aa, Homo Sapiens [sequence omitted]

SEQ ID NO: 7767 - protein, 858 aa, Homo Sapiens
MGPWGWKLRWTVALLLAAAGTAVGDRCERNEFQCQDGKCISYKWVCDGSAECQDGSDESQETCLSVTCKSGDFSCGGRVNRCIPQFWRCDGQVDCDNGSDEQGCPPKTCSQDEFRCHDGKCISRQFVCDSDRDCLDGSDEASCPVLTCGPASFQCNSSTCIPQLWACDNDPDCEDGSDEWPQRCRGLYVFQGDSSPCSAFEFHCLSGECIHSSWRCDGGPDCKDKSDEENCAVATCRPDEFQCSDGNCIHGSRQCDREYDCKDMSDEVGCVNVTLCEGPNKFKCHSGECITLDKVCNMARDCRDWSDEPIKECGTNECLDNNGGCSHVCNDLKIGYECLCPDGFQLVAQRRCEDIDECQDPDTCSQLCVNLEGGYKCQCEEGFQLDPHTKACKAVGSIAYLFFTNRHEVRKMTLDRSEYTSLIPNLRNVVALDTEVASNRIYWSDLSQRMICSTQLDRAHGVSSYDTVISRDIQAPDGLAVDWIHSNIYWTDSVLGTVSVADTKGVKRKTLFRENGSKPRAIVVDPVHGFMYWTDWGTPAKIKKGGLNGVDIYSLVTENIQWPNGITLDLLSGRLYWVDSKLHSISSIDVNGGNRKTILEDEKRLAHPFSLAVFEDKVFWTDIINEAIFSANRLTGSDVNLLAENLLSPEDMVLFHNLTQPRGVNWCERTTLSNGGCQYLCLPAPQINPHSPKFTCACPDGMLLARDMRSCLTEAEAAVATQETSTVRLKVSSTAVRTQHTTTRPVPDTSRLPGATPGLTTVEIVTMSHQALGDVAGRGNEKKPSSVRALSIVLPIVLLVFLCLGVFLLWKNWRLKNINSINFDNPVYQKTTEDEVHICHNQDGYSYPSMVSLEDDVA

SEQ ID NO: 7768 - protein, 948 aa, Homo Sapiens
MGPWGWKLRWTVALLLAAAGTAVGDRCERNEFQCQDGKCISYKWVCDGSAECQDGSDESQETCLSVTCKSGDFSCGGRVNRCIPQFWRCDGQVDCDNGSDEQGCPPKTCSQDEFRCHDGKCISRQFVCDSDRDCLDGSDEASCPVLTCGPASFQCNSSTCIPQLWACDNDPDCEDGSDEWPQRCRGLYVFQGDSSPCSAFEFHCLSGECIHSSWRCDGGPDCKDKSDEENCAVATCRPDEFQCSDGNCIHGSRQCDREYDCKDMSDEVGCVNVTLCEGPNKFKCHSGECITLDKVCNMARDCRDWSDEPIKECGTNECLDNNGGCSHVCNDLKIGYECLCPDGFQLVAQRRCEDIDECQDPDTCSQLCVNLEGGYKCQCEEGFQLDPHTKACKAVGSIAYLFFTNRHEVRKMTLDRSEYTSLIPNLRNVVALDTEVASNRIYWSDLSQRMICSTQLDRAHGVSSYDTVISRDIQAPDGLAVDWIHSNIYWTDSVLGTVSVADTKGVKRKTLFRENGSKPRAIVVDPVHGFMYWTDWGTPAKIKKGGLNGVDIYSLVTENIQWPNGITLDLLSGRLYWVDSKLHSISSIDVNGGNRKTILEDEKRLAHPFSLAVFEDKVFWTDIINEAIFSANRLTGSDVNLLAENLLSPEDMVLFHNLTQPRGVNWCERTTLSNGGCQYLCLPAPQINPHSPKFTCACPDGMLLARDMRSCLTEAEAAVATQETSTVRLKVSSTAVRTQHTTTRPVPDTSRLPGATPGLTTVEIVTMSHQALGDVAGRGNEKKPSSVRALSIVLPIATELGLWSRGQLCDRACLSLQCSSSSFAWGSSFYGRTGGLRTSTASTLTTPSIRRPQRMRSTFATTRTATATPRDRWSVWRMTWREHLPGVPSLPRTLPETSPALFYSKTEKTKALPARALFYIFIHLGGRTGFGQCPCNGLGWDFGFFLSS

SEQ ID NO: 7769 - protein, 682 aa, Homo Sapiens
MGPWGWKLRWTVALLLAAAGTAVGDRCERNEFQCQDGKCISYKWVCDGSAECQDGSDESQETCLSVTCKSGDFSCGGRVNRCIPQFWRCDGQVDCDNGSDEQGCPVATCRPDEFQCSDGNCIHGSRQCDREYDCKDMSDEVGCVNVTLCEGPNKFKCHSGECITLDKVCNMARDCRDWSDEPIKECGTNECLDNNGGCSHVCNDLKIGYECLCPDGFQLVAQRRCEDIDECQDPDTCSQLCVNLEGGYKCQCEEGFQLDPHTKACKAVGSIAYLFFTNRHEVRKMTLDRSEYTSLIPNLRNVVALDTEVASNRIYWSDLSQRMICSTQLDRAHGVSSYDTVISRDIQAPDGLAVDWIHSNIYWTDSVLGTVSVADTKGVKRKTLFRENGSKPRAIVVDPVHGFMYWTDWGTPAKIKKGGLNGVDIYSLVTENIQWPNGITLDLLSGRLYWVDSKLHSISSIDVNGGNRKTILEDEKRLAHPFSLAVFEDKVFWTDIINEAIFSANRLTGSDVNLLAENLLSPEDMVLFHNLTQPREAEAAVATQETSTVRLKVSSTAVRTQHTTTRPVPDTSRLPGATPGLTTVEIVTMSHQALGDVAGRGNEKKPSSVRALSIVLPIVLLVFLCLGVFLLWKNWRLKNINSINFDNPVYQKTTEDEVHICHNQDGYSYPSRQMVSLEDDVA

SEQ ID NO: 7770 - protein, 819 aa, Homo Sapiens
MGPWGWKLRWTVALLLAAAGTAVGDRCERNEFQCQDGKCISYKWVCDGSAECQDGSDESQETCSPKTCSQDEFRCHDGKCISRQFVCDSDRDCLDGSDEASCPVLTCGPASFQCNSSTCIPQLWACDNDPDCEDGSDEWPQRCRGLYVFQGDSSPCSAFEFHCLSGECIHSSWRCDGGPDCKDKSDEENCAVATCRPDEFQCSDGNCIHGSRQCDREYDCKDMSDEVGCVNVTLCEGPNKFKCHSGECITLDKVCNMARDCRDWSDEPIKECGTNECLDNNGGCSHVCNDLKIGYECLCPDGFQLVAQRRCEDIDECQDPDTCSQLCVNLEGGYKCQCEEGFQLDPHTKACKAVGSIAYLFFTNRHEVRKMTLDRSEYTSLIPNLRNVVALDTEVASNRIYWSDLSQRMICSTQLDRAHGVSSYDTVISRDIQAPDGLAVDWIHSNIYWTDSVLGTVSVADTKGVKRKTLFRENGSKPRAIVVDPVHGFMYWTDWGTPAKIKKGGLNGVDIYSLVTENIQWPNGITLDLLSGRLYWVDSKLHSISSIDVNGGNRKTILEDEKRLAHPFSLAVFEDKVFWTDIINEAIFSANRLTGSDVNLLAENLLSPEDMVLFHNLTQPRGVNWCERTTLSNGGCQYLCLPAPQINPHSPKFTCACPDGMLLARDMRSCLTEAEAAVATQETSTVRLKVSSTAVRTQHTTTRPVPDTSRLPGATPGLTTVEIVTMSHQALGDVAGRGNEKKPSSVRALSIVLPIVLLVFLCLGVFLLWKNWRLKNINSINFDNPVYQKTTEDEVHICHNQDGYSYPSRQMVSLEDDVA

SEQ ID NO: 7771 - protein, 945 aa, Homo Sapiens
  misc_feature (1)..(1): Xaa can be any naturally occurring amino acid
XGRPGVPPRFLSQRRRQVPGPRSRLRDIHESPSVILGPPGEVPGFRCALWRHLRPHLVLGGALAPPAPIKFTEGPPATLKASVPYEVETLPQNLPAPPWSAAEIFSHVGDRCERNEFQCQDGKCISYKWVCDGSAECQDGSDESQETCLSVTCKSGDFSCGGRVNRCIPQFWRCDGQVDCDNGSDEQGCPPKTCSQDEFRCHDGKCISRQFVCDSDRDCLDGSDEASCPVLTCGPASFQCNSSTCIPQLWACDNDPDCEDGSDEWPQRCRGLYVFQGDSSPCSAFEFHCLSGECIHSSWRCDGGPDCKDKSDEENCAVATCRPDEFQCSDGNCIHGSRQCDREYDCKDMSDEVGCVNVTLCEGPNKFKCHSGECITLDKVCNMARDCRDWSDEPIKECGTNECLDNNGGCSHVCNDLKIGYECLCPDGFQLVAQRRCEDIDECQDPDTCSQLCVNLEGGYKCQCEEGFQLDPHTKACKAVGSIAYLFFTNRHEVRKMTLDRSEYTSLIPNLRNVVALDTEVASNRIYWSDLSQRMICSTQLDRAHGVSSYDTVISRDIQAPDGLAVDWIHSNIYWTDSVLGTVSVADTKGVKRKTLFRENGSKPRAIVVDPVHGFMYWTDWGTPAKIKKGGLNGVDIYSLVTENIQWPNGITLDLLSGRLYWVDSKLHSISSIDVNGGNRKTILEDEKRLAHPFSLAVFEDKVFWTDIINEAIFSANRLTGSDVNLLAENLLSPEDMVLFHNLTQPRGVNWCERTTLSNGGCQYLCLPAPQINPHSPKFTCACPDGMLLARDMRSCLTEAEAAVATQETSTVRLKVSSTAVRTQHTTTRPVPDTSRLPGATPGLTTVEIVTMSHQALGDVAGRGNEKKPSSVRALSIVLPIVLLVFLCLGVFLLWKNWRLKNINSINFDNPVYQKTTEDEVHICHNQDGYSYPSRQMVSLEDDVA

SEQ ID NO: 7772 - protein, 309 aa, Homo Sapiens
  misc_feature (1)..(1): Xaa can be any naturally occurring amino acid
XLDGSDEASCPVLTCGPASFQCNSSTCIPQLWACDNDPDCEDGSDEWPQRCRGLYVFQGDSSPCSAFEFHCLSGECIHSSWRCDGGPDCKDKSDEENCAVATCRPDEFQCSDGNCIHGSRQCDREYDCKDMSDEVGCVNVTLCEGPNKFKCHSGECITLDKVCNMARDCRDWSDEPIKECDIDECQDPDTCSQLCVNLEGGYKCQCEEGFQLDPHTKACKAVGSIAYLFFTNRHEVRKMTLDRSEYTSLIPNLRNVVALDTEVASNRIYWSDLSQRMICSTQLDRAHGVSSYDTVISRDIQAPDGLAVD

SEQ ID NO: 7773 - protein, 170 aa, Homo Sapiens
  misc_feature (1)..(1): Xaa can be any naturally occurring amino acid
XNVVALDTEVASNRIYWSDLSQRMICSTQLDRAHGVSSYDTVISRDIQAPDGLAVDWIHSNIYWTDSVLGTVSVADTKGVKRKTLFRENGSKPRAIVVDPVHGFMYWTDWGTPAKIKKGGLNGVDIYSLVTENIQWPNGITLGQSILDRYHQRSHFQCQPPHRFRCQLVG

SEQ ID NO: 7774 - protein, 272 aa, Homo Sapiens
MEACCLLQLPQRLLLLGAAALTATALETADLAELCGQTWQGDGLLLRSHAASRRFYFVAPDTDCGLWVQAAAPGDRIRFQFRFFLVYSLTPAPPALNTSSPAPADPCAPGSYLQFYEGPPGAPRPLGSPLCGLNIPVPVASSGPFLGLRLVTRGRQPRVDFVGEVTSFRLGPCGAYFRCQNGRCIPSSLVCDPWGMDNCGDGSDQGSWSPADCRGPSPVPSQTGSTDAHTSRSLTPSPALGSAGSLWIAAERSSPAGRDPTRQDAALEGSTE

SEQ ID NO: 7775 - protein, 272 aa, Homo Sapiens; identical to SEQ ID NO: 7774

SEQ ID NO: 7776 - protein, 77 aa, Homo Sapiens
MWHLKLCAVLMIFLLLLGQIDGSPIPEVSSAKRRPRRMTPFWRGVSLRPIGASCRDDSECITRLCRKRRCSLSVAQE

SEQ ID NO: 7777 - protein, 131 aa, Homo Sapiens
MFSTKALLLAGLISTALAGPWANICAGKSSNEIRTCDRHGCGQYSAQRSQRPHQGVDILCSAGSTVYAPFTGMIVGQEKPYQNKNAINNGVRISGREITTDTPIFNNYYPDQSAAVNIKTRSSTSKKMMTH

SEQ ID NO: 7778 - protein, 151 aa, Homo Sapiens
MFSTKALLLAGLISTALAGPWANICAGKSSNEIRTCDRHGCGQYSAQRSQRPHQGVDILCSAGSTVYAPFTGMIVGQEKPYQNKNAINNGVRISGRGFCVKMFYIKPIKYKGPIKKGEKLGTLLPLQKVYPGIQSHVHIENCDSSDPTAYL

SEQ ID NO: 7779 - protein, 111 aa, Homo Sapiens
MFSTKALLLAGLISTALAGPWANICAGKSSNEIRTCDRHGCGQYSAQRSQRPHQGVDILCSAGSTVYAPFTGMIVGQEKPYQNKNAINNGVRISGRGKRGGVYTWGASWRC

SEQ ID NO: 7780 - protein, 79 aa, Homo Sapiens
MIVGQEKPYQNKNAINNGVRISGRGFCVKMFYIKPIKYKGPIKKGEKLGTLLPLQKVYPGIQSHVHIENCDSSDPTAYL

SEQ ID NO: 7781 - protein, 64 aa, Homo Sapiens
MEQRLPPNSELVQAVLRLFQEPVPKAALHRHGRLSPRSARARVTVEWLRVRDDGSNRTSLIDSR

SEQ ID NO: 7782 - protein, 366 aa, Homo Sapiens
MQPLWLCWALWVLPLASPGAALTGEQLLGSLLRQLQLKEVPTLDRADMEELVIPTHVRAQYVALLQRSHGDRSRGKRFSQSFREVAGRFLALEASTHLLVFGMEQRLPPNSELVQAVLRLFQEPVPKAALHRHGRLSPRSARARVTVEWLRVRDDGSNRTSLIDSRLVSVHESGWKAFDVTEAVNFWQQLSRPRQPLLLQVSVQREHLGPLASGAHKLVRFASQGAPAGLGEPQLELHTLDLGDYGAQGDCDPEAPMTEGTRCCRQEMYIDLQGMKWAENWVLEPPGFLAYECVGTCRQPPEALAFKWPFLGPRQCIASETDSLPMIVSIKEGGRTRPQVVSLPNMRVQKCSCASDGALVPRRLQP

SEQ ID NO: 7783 - protein, 332 aa, Homo Sapiens
MWPLWLCWALWVLPLAGPGAALTEEQLLGSLLRQLQLSEVPVLDRADMEKLVIPAHVRAQYVVLLRRSHGDRSRGKRFSQSFREVAGRFLASEAALHRHGRLSPRSAQARVTVEWLRVRDDGSNRTSLIDSRLVSVHESGWKAFDVTEAVNFWQQLSRPRQPLLLQVSVQREHLGPLASGAHKLVRFASQGAPAGLGEPQLELHTLDLRDYGAQGDCDPEAPMTEGTRCCRQEMYIDLQGMKWAKNWVLEPPGFLAYECVGTCQQPPEALAFNWPFLGPRQCIASETASLPMIVSIKEGGRTRPQVVSLPNMRVQKCSCASDGALVPRRLQP

SEQ ID NO: 7784 - protein, 366 aa, Homo Sapiens
MWPLWLCWALWVLPLAGPGAALTEEQLLGSLLRQLQLSEVPVLDRADMEKLVIPAHVRAQYVVLLRRSHGDRSRGKRFSQSFREVAGRFLASEASTHLLVFGMEQRLPPNSELVQAVLRLFQEPVPKAALHRHGRLSPRSAQARVTVEWLRVRDDGSNRTSLIDSRLVSVHESGWKAFDVTEAVNFWQQLSRPRQPLLLQVSVQREHLGPLASGAHKLVRFASQGAPAGLGEPQLELHTLDLRDYGAQGDCDPEAPMTEGTRCCRQEMYIDLQGMKWAKNWVLEPPGFLAYECVGTCQQPPEALAFNWPFLGPRQCIASETASLPMIVSIKEGGRTRPQVVSLPNMRVQKCSCASDGALVPRRLQP

SEQ ID NO: 7785 - protein, 167 aa, Homo Sapiens
MHWGTLCGFLWLWPYLFYVQAVPIQKVQDDTKTLIKTIVTRINDISHTQSVSSKQKVTGLDFIPGLHPILTLSKMDQTLAVYQQILTSMPSRNVIQISNDLENLRDLLHVLAFSKSCHLPWASGLETLDSLGGVLEASGYSTEVVALSRLQGSLQDMLWQLDLSPGC

SEQ ID NO: 7786 - protein, 308 aa, Homo Sapiens
MDEQTGRLRLDTYCMSAKQIWAWSKCSGRLWDEHMKWMEGWTDRWTDGWMDGWMDEWSPTPALRSYGGGLSQQTFIFTDGEDEALARHTGNVVITNCSAAHSRQALSCKMAVEYDRFIESGRKWFCHVDDDNYVNLRALLRLLASYPHTRDVYVGKPSLDRPIQAMERVSENKVRPVHFWFATGGAGFCISRGLALKMSPWASGGHFMNTAERIRLPDDCTIGYIVEALLGVPLIRSGLFHSHLENLQQVPTSELHEQVTLSYGMFENKRNAVHVKGPFSVEADPSRFRSIHCHLYPDTPWCPRTAIF

SEQ ID NO: 7787 - protein, 248 aa, Homo Sapiens
MKGCLLKADFLLQTFIFTDGEDEALARHTGNVVITNCSAAHSRQALSCKMAVEYDRFIESGRKWFCHVDDDNYVNLRALLRLLASYPHTRDVYVGKPSLDRPIQAMERVSENKVRPVHFWFATGGAGFCISRGLALKMSPWASGGHFMNTAERIRLPDDCTIGYIVEALLGVPLIRSGLFHSHLENLQQVPTSELHEQVTLSYGMFENKRNAVHVKGPFSVEADPSRFRSIHCHLYPDTPWCPRTAIF

SEQ ID NO: 7788 - protein, 379 aa, Homo Sapiens
MLKRCGRRLLLALAGALLACLLVLTADPPPPPLPAERGRRALRSLAGPAGAAPAPGLGAAAAAPGALVRDVHSLSEYFSLLTRARRDAGPPPGAAPRPADGHPRPLAEPLAPRDVFIAVKTTKKFHRARLDLLLETWISRHKEMTFIFTDGEDEALARHTGNVVITNCSAAHSRQALSCKMAVEYDRFIESGRKWFCHVDDDNYVNLRALLRLLASYPHTRDVYVGKPSLDRPIQAMERVSENKVRPVHFWFATGGAGFCISRGLALKMSPWASGGHFMNTAERIRLPDDCTIGYIVEALLGVPLIRSGLFHSHLENLQQVPTSELHEQVTLSYGMFENKRNAVHVKGPFSVEADPSRFRSIHCHLYPDTPWCPRTAIF

SEQ ID NO: 7789 - protein, 361 aa, Homo Sapiens
MLKRCGRRLLLALAGALLACLLVLTADPPPPPLPAERGRRALRSLAGPAGAAPAPGLGAAAAAPGALVRDVHSLSEYFSLLTRARRDAGPPPGAAPRPADGHPRPLAEPLAPRDVFIAVKTTKKFHRARLDLLLETWISRHKEMTFIFTDGEDEALARHTGNVVITNCSAAHSRQALSCKMAVEYDRFIESGRKWFCHVDDDNYVNLRALLRLLASYPHTRDVYVGKPSLDRPIQAMERVSENKVRPVHFWFATGGAGFCISRGLALKMSPWASGGHFMNTAERIRLPDDCTIGYIVEALLGVPLIRSGLFHSHLENLQQVPTSELHEQVTLSYGMFENKRNAVHVKGPFSVEADPSRWGN

SEQ ID NO: 7790 - protein, 250 aa, Homo Sapiens
MTPGRCCLAADIQVETFIFTDGEDEALARHTGNVVITNCSAAHSRQALSCKMAVEYDRFIESGRKWFCHVDDDNYVNLRALLRLLASYPHTRDVYVGKPSLDRPIQAMERVSENKVRPVHFWFATGGAGFCISRGLALKMSPWASGGHFMNTAERIRLPDDCTIGYIVEALLGVPLIRSGLFHSHLENLQQVPTSELHEQVTLSYGMFENKRNAVHVKGPFSVEADPSRFRSIHCHLYPDTPWCPRTAIF

SEQ ID NO: 7791 - protein, 250 aa, Homo Sapiens; identical to SEQ ID NO: 7790

SEQ ID NO: 7792 - protein, 18 aa, Homo Sapiens
MTPPRLFWVWLLVAGTQA

SEQ ID NO: 7793 - protein, 41 aa, Homo Sapiens
MTPPRLFWVWLLVAGTQAPGIPSDDDLEVPGGSPGFRRERW

SEQ ID NO: 7794 - protein, 41 aa, Homo Sapiens; identical to SEQ ID NO: 7793

SEQ ID NO: 7795 - protein, 62 aa, Homo Sapiens
MTPPRLFWVWLLVAGTQGELSPWEIPKAEVWKAGAPWGCSELQGDILPGARGPAVSQIFSPA

SEQ ID NO: 7796 - protein, 62 aa, Homo Sapiens; identical to SEQ ID NO: 7795

SEQ ID NO: 7797 - protein, 144 aa, Homo Sapiens
MTPPRLFWVWLLVAGTQGSGPIMLDEVQCTGTEASLADCKSLGWLKSNCRHERDAGVVCTNETRSTHTLDLSRELSEALGQIFDSQRGCDLSISVNVQGEDALGFCGHTVILTANLEAQALWKEPGSNVTMSVDAECVPMVRDL

SEQ ID NO: 7798 - protein, 48 aa, Homo Sapiens
MTPPRLFWVWLLVAGTQGVNDGDMRLADGGATNQGRVEIFYRGPWPDL

SEQ ID NO: 7799 - protein, 113 aa, Homo Sapiens
MTPPRLFWVWLLVAGTQGVNDGDMRLADGGATNQGRVEIFYRGQWGTVCDNLWDLTDASVVCRALGFENATQALGRAAFGQGRACCLTGRLQVPGLAEEQLQARERRWCGLHQ

SEQ ID NO: 7800 - protein, 88 aa, Homo Sapiens
MTPPRLFWVWLLVAGTQGVNDGDMRLADGGATNQGRVEIFYRGQWGTVCDNLWDLTDASVVCRALGFENATQALGRAAFGQGSGPIML

SEQ ID NO: 7801 - protein, 209 aa, Homo Sapiens
MTPPRLFWVWLLVAGTQGVNDGDMRLADGGATNQGRVEIFYRGQWGTVCDNLWDLTDASVVCRALGFENATQALGRAAFGQGSGPIMLDEVQCTGTEASLADCKSLGWLKSNCRHERDAGVVCTNETRSTHTLDLSRELSEALGQIFDSQRGCDLSISVNVQGEDALGFCGHTVILTANLEAQALWKEPGSNVTMSVDAECVPMVRDLL

SEQ ID NO: 7802 - protein, 210 aa, Homo Sapiens
MTPPRLFWVWLLVAGTQGVNDGDMRLADGGATNQGRVEIFYRGQWGTVCDNLWDLTDASVVCRALGFENATQALGRAAFGQGSGPIMLDEVQCTGTEASLADCKSLGWLKSNCRHERDAGVVCTNETRSTHTLDLSRELSEALGQIFDSQRGCDLSISVNVQGEDALGFCGHTVILTANLEAQALWKEPGSNVTMSVDAECVPMVRDLLR

SEQ ID NO: 7803 - protein, 585 aa, Homo Sapiens
MTPPRLFWVWLLVAGTQGVNDGDMRLADGGATNQGRVEIFYRGQWGTVCDNLWDLTDASVVCRALGFENATQALGRAAFGQGSGPIMLDEVQCTGTEASLADCKSLGWLKSNCRHERDAGVVCTNETRSTHTLDLSRELSEALGQIFDSQRGCDLSISVNVQGEDALGFCGHTVILTANLEAQALWKEPGSNVTMSVDAECVPMVRDLLRYFYSRRIDITLSSVKCFHKLASAYGARQLQGYCASLFAILLPQDPSFQMPLDLYAYAVATGDALLEKLCLQFLAWNFEALTQAEAWPSVPTDLLQLLLPRSDLAVPSELALLKAVDTWSWGERASHEEVEGLVEKIRFPMMLPEELFELQFNLSLYWSHEALFQKKTLQALEFHTVPFQLLARYKGLNLTEDTYKPRIYTSPTWSAFVTDSSWSARKSQLVYQSRRGPLVKYSSDYFQAPSDYRYYPYQSFQTPQHPSFLFQDKRVSWSLVYLPTIQSCWNYGFSCSSDELPVLGLTKSGGSDRTIAYENKALMLCEGLFVADVTDFEGWKAAIPSALDTNSSKSTSSFPCPAGHFNGFRTVIRPFYLTNSSGVD

SEQ ID NO: 7804 - protein, 259 aa, Homo Sapiens
MTPPRLFWVWLLVAGTQGVNDGDMRLADGGATNQGRVEIFYRGQWGTVCDNLWDLTDASVVCRALGFENATQALGRAAFGQGSGPIMLDEVQCTGTEASLADCKSLGWLKSNCRHERDAGVVCTNETRSTHTLDLSRELSEALGQIFDSQRGCDLSISVNVQGEDALGFCGHTVILTANLEAQALWKEPGSNVTMSVDAECVPMVRDLLRYFYSRRIDITLSSVKCFHKLASAYGARQLQGYCASLFAILLPQDPSFQM

SEQ ID NO: 7805 - protein, 131 aa, Homo Sapiens
MTPPRLFWVWLLVAGTQGVNDGDMRLADGGATNQGRVEIFYRGQWGTVCDNLWDLTDASVVCRALGFENATQALGRAAFGQGSGPIMLDEVQCTGTEASLADCKSLGWLKSNCRHERDAGVVCTNGAFQSE

SEQ ID NO: 7806 - protein, 205 aa, Homo Sapiens
MTPPRLFWVWLLVAGTQGVNDGDMRLADGGATNQGRVEIFYRGQWGTVCDNLWDLTDASVVCRALGFENATQALGRAAFGQGSGPIMLDEVQCTGTEASLADCKSLGWLKSNCRHERDAGVVCTNGTSTPEGLTSPCRQSSASTSWPLPMGPGSCRATAQASLPSSSPRTPRSRCPWTCMPMQWPQGTPCWRSSAYSSWPGTSRP

SEQ ID NO: 7807 - protein, 52 aa, Homo Sapiens
MESERSKRMGNACIPLKRIAYFLCLLSALLLTEGKKPAKPKCPAILCEIWFY

SEQ ID NO: 7808 - protein, 72 aa, Homo Sapiens
MESERSKRMGNACIPLKRIAYFLCLLSALLLTEGKKPAKPKCPAVCTCTKDNALCENARSIPRTVPPDVISL

SEQ ID NO: 7809 - protein, 72 aa, Homo Sapiens; identical to SEQ ID NO: 7808

SEQ ID NO: 7810 - protein, 72 aa, Homo Sapiens; identical to SEQ ID NO: 7808

SEQ ID NO: 7811 - protein, 72 aa, Homo Sapiens; identical to SEQ ID NO: 7808

SEQ ID NO: 7812 - protein, 72 aa, Homo Sapiens; identical to SEQ ID NO: 7808

SEQ ID NO: 7813 - protein, 533 aa, Homo Sapiens
MESERSKRMGNACIPLKRIAYFLCLLSALLLTEGKKPAKPKCPAVCTCTKDNALCENARSIPRTVPPDVISLLFTSNSFDVISDDAFIGLPHLEYLFIENNNIKSISRHTFRGLKSLIHLSLANNNLQTLPKDIFKGLDSLTNVDLRGNSFNCDCKLKWLVEWLGHTNATVEDIYCEGPPEYKKRKINSLSSKDFDCIITEFAKSQDLPYQSLSIDTFSYLNDEYVVIAQPFTGKCIFLEWDHVEKTFRNYDNITGTSTVVCKPIVIETQLYVIVAQLFGGSHIYKRDSFANKFIKIQDIEILKIRKPNDIETFKIENNWYFVVADSSKAGFTTIYKWNGNGFYSHQSLHAWYRDTDVEYLEIVRTPQTLRTPHLILSSSSQRPVIYQWNKATQLFTNQTDIPNMEDVYAVKHFSVKGDVYICLTRFIGDSKVMKWGGSSFQDIQRMPSRGSMVFQPLQINNYQYAILGSDYSFTQVYNWDAEKAKFVKFQELNVQAPRSFTHVSINKRNFLFASSFKGNTQIYKHVIVDLSA

SEQ ID NO: 7814 - protein, 96 aa, Homo Sapiens
MESERSKRMGNACIPLKRIAYFLCLLSALLLTEGKKPAKPKCPAVCTCTKDNALCENARSIPRTVPPDVISLSFVRSGFTEISEGSFLFTPSLQLL

SEQ ID NO: 7815 - protein, 96 aa, Homo Sapiens; identical to SEQ ID NO: 7814

SEQ ID NO: 7816 - protein, 236 aa, Homo Sapiens
MESERSKRMGNACIPLKRIAYFLCLLSALLLTEGKKPAKPKCPAVCTCTKDNALCENARSIPRTVPPDVISLSFVRSGFTEISEGSFLFTPSLQLLLFTSNSFDVISDDAFIGLPHLEYLFIENNNIKSISRHTFRGLKSLIHLFRETQTQAENLHCRGAGAPQMAVGDAFLAAEPGGTETNAVFEPVWSALERRLSSGFHSHNRRFSWVNDENTKGQEMVIISVKKEWPSAFENT

SEQ ID NO: 7817 - protein, 151 aa, Homo Sapiens
MESERSKRMGNACIPLKRIAYFLCLLSALLLTEGKKPAKPKCPAVCTCTKDNALCENARSIPRTVPPDVISLSFVRSGFTEISEGSFLFTPSLQLLLFTSNSFDVISDDAFIGLPHLEYLFIENNNIKSISRHTFRGLKSLIHLRDGVGRI

SEQ ID NO: 7818 - protein, 168 aa, Homo Sapiens
MESERSKRMGNACIPLKRIAYFLCLLSALLLTEGKKPAKPKCPAVCTCTKDNALCENARSIPRTVPPDVISLSFVRSGFTEISEGSFLFTPSLQLLLFTSNSFDVISDDAFIGLPHLEYLFIENNNIKSISRHTFRGLKSLIHLSLANNNLQTLPKDIFKGLDSLTNV

SEQ ID NO: 7819 - protein, 168 aa, Homo Sapiens; identical to SEQ ID NO: 7818

SEQ ID NO: 7820 - protein, 557 aa, Homo Sapiens
MESERSKRMGNACIPLKRIAYFLCLLSALLLTEGKKPAKPKCPAVCTCTKDNALCENARSIPRTVPPDVISLSFVRSGFTEISEGSFLFTPSLQLLLFTSNSFDVISDDAFIGLPHLEYLFIENNNIKSISRHTFRGLKSLIHLSLANNNLQTLPKDIFKGLDSLTNVDLRGNSFNCDCKLKWLVEWLGHTNATVEDIYCEGPPEYKKRKINSLSSKDFDCIITEFAKSQDLPYQSLSIDTFSYLNDEYVVIAQPFTGKCIFLEWDHVEKTFRNYDNITGTSTVVCKPIVIETQLYVIVAQLFGGSHIYKRDSFANKFIKIQDIEILKIRKPNDIETFKIENNWYFVVADSSKAGFTTIYKWNGNGFYSHQSLHAWYRDTDVEYLEIVRTPQTLRTPHLILSSSSQRPVIYQWNKATQLFTNQTDIPNMEDVYAVKHFSVKGDVYICLTRFIGDSKVMKWGGSSFQDIQRMPSRGSMVFQPLQINNYQYAILGSDYSFTQVYNWDAEKAKFVKFQELNVQAPRSFTHVSINKRNFLFASSFKGNTQIYKHVIVDLSA

SEQ ID NO: 7821 - protein, 291 aa, Homo Sapiens
MESERSKRMGNACIPLKRIAYFLCLLSALLLTEGKKPAKPKCPAVCTCTKDNALCENARSIPRTVPPDVISLSFVRSGFTEISEGSFLFTPSLQLLLFTSNSFDVISDDAFIGLPHLEYLFIENNNIKSISRHTFRGLKSLIHLSLANNNLQTLPKDIFKGLDSLTNVDLRGNSFNCDCKLKWLVEWLGHTNATVEDIYCEGPPEYKKRKINSLSSKDFDCIITEFAKSQDLPYQSLSIDTFSYLNDEYVVIAQPFTGKCIFLEWDHVEKTFRNYDNITVLREIHRFTNMS

SEQ ID NO: 7822 - protein, 287 aa, Homo Sapiens
MESERSKRMGNACIPLKRIAYFLCLLSALLLTEGKKPAKPKCPAVCTCTKDNALCENARSIPRTVPPDVISLSFVRSGFTEISEGSFLFTPSLQLLLFTSNSFDVISDDAFIGLPHLEYLFIENNNIKSISRHTFRGLKSLIHLSLANNNLQTLPKDIFKGLDSLTNVDLRGNSFNCDCKLKWLVEWLGHTNATVEDIYCEGPPEYKKRKINSLSSKDFDCIITEFAKSQDLPYQSLSIDTFSYLNDEYVVIAQPFTGKCIFLEWDHVEKTFRNYDNITGQSCWCPQ

SEQ ID NO: 7823 - protein, 281 aa, Homo Sapiens
MESERSKRMGNACIPLKRIAYFLCLLSALLLTEGKKPAKPKCPAVCTCTKDNALCENARSIPRTVPPDVISLSFVRSGFTEISEGSFLFTPSLQLLLFTSNSFDVISDDAFIGLPHLEYLFIENNNIKSISRHTFRGLKSLIHLSLANNNLQTLPKDIFKGLDSLTNVDLRGNSFNCDCKLKWLVEWLGHTNATVEDIYCEGPPEYKKRKINSLSSKDFDCIITEFAKSQDLPYQSLSIDTFSYLNDEYVVIAQPFTGKCIFLEWDHVEKTFRNYDNITGS

SEQ ID NO: 7824 - protein, 509 aa, Homo Sapiens
MESERSKRMGNACIPLKRIAYFLCLLSALLLTEGKKPAKPKCPAVCTCTKDNALCENARSIPRTVPPDVISLSFVRSGFTEISEGSFLFTPSLQLLSLANNNLQTLPKDIFKGLDSLTNVDLRGNSFNCDCKLKWLVEWLGHTNATVEDIYCEGPPEYKKRKINSLSSKDFDCIITEFAKSQDLPYQSLSIDTFSYLNDEYVVIAQPFTGKCIFLEWDHVEKTFRNYDNITGTSTVVCKPIVIETQLYVIVAQLFGGSHIYKRDSFANKFIKIQDIEILKIRKPNDIETFKIENNWYFVVADSSKAGFTTIYKWNGNGFYSHQSLHAWYRDTDVEYLEIVRTPQTLRTPHLILSSSSQRPVIYQWNKATQLFTNQTDIPNMEDVYAVKHFSVKGDVYICLTRFIGDSKVMKWGGSSFQDIQRMPSRGSMVFQPLQINNYQYAILGSDYSFTQVYNWDAEKAKFVKFQELNVQAPRSFTHVSINKRNFLFASSFKGNTQIYKHVIVDLSA

SEQ ID NO: 7825 - protein, 100 aa, Homo Sapiens
MKWGGSSFQDIQRMPSRGSMVFQPLQINNYQYAILGSDYSFTQVYNWDAEKAKFVKFQELNVQAPRSFTHVSINKRNFLFASSFKGNTQIYKHVIVDLSA

SEQ ID NO: 7826 - protein, 545 aa, Homo Sapiens
MALRRGGCGALGLLLLLLGAACLIPRSAQVRRLARCPATCSCTKESIICVGSSWVPRIVPGDISSLSLVNGTFSEIKDRMFSHLPSLQLLLLNSNSFTIIRDDAFAGLFHLEYLFIEGNKIETISRNAFRGLRDLTHLSLANNHIKALPRDVFSDLDSLIELDLRGNKFECDCKAKWLYLWLKMTNSTVSDVLCIGPPEYQEKKLNDVTSFDYECTTTDFVVHQTLPYQSVSVDTFNSKNDVYVAIAQPSMENCMVLEWDHIEMNFRSYDNITGQSIVGCKAILIDDQVFVVVAQLFGGSHIYKYDESWTKFVKFQDIEVSRISKPNDIELFQIDDETFFVIADSSKAGLSTVYKWNSKGFYSYQSLHEWFRDTDAEFVDIDGKSHLILSSRSQVPIILQWNKSSKKFVPHGDIPNMEDVLAVKSFRMQNTLYLSLTRFIGDSRVMRWNSKQFVEIQALPSRGAMTLQPFSFKDNHYLALGSDYTFSQIYQWDKEKQLFKKFKEIYVQAPRSFTAVSTDRRDFFFASSFKGKTKIFEHIIVDLSL

SEQ ID NO: 7827 - protein, 256 aa, Homo Sapiens
  misc_feature (1)..(1): Xaa can be any naturally occurring amino acid
XLGLLLLLLGAACLIPRSAQVRRLARCPATCSCTKESIICVGSSWVPRIVPGDISSLSLVNGTFSEIKDRMFSHLPSLQLLLLNSNSFTIIRDDAFAGLFHLEYLFIEGNKIETISRNAFRGLRDLTHLSLANNHIKALPRDVFSDLDSLIELDLRGNKFECDCKAKWLYLWLKMTNSTVSDVLCIGPPEYQEKKLNDVTSFDYECTTTDKQEEICEGKIQNLNARVVMNCSRPSSAFRKHTGNGRVAFFLPHGVR

SEQ ID NO: 7828 - protein, 134 aa, Homo Sapiens
MAGLRARGGPGPGLLALSALGFCLMLQVSAKRPPKTPPCPPSCSCTRDTAFCVDSKAVPRNLPSEVISLTALADPTVLTRVSPQDPGECRLLRDPGWSVLPPPAAAVLVTQLQQVYTDWRQRLHRTVAPAVSLH

SEQ ID NO: 7829 - protein, 548 aa, Homo Sapiens
MAGLRARGGPGPGLLALSALGFCLMLQVSAKRPPKTPPCPPSCSCTRDTAFCVDSKAVPRNLPSEVISLTLVNAAFSEIQDGAFSHLPLLQFLLLNSNKFTLIGDNAFTGLSHLQYLFIENNDIWALSKFTFRGLKSLTHLSLANNNLQTLPRDIFRPLDILNDLDLRGNSLNCDCKVKWLVEWLAHTNTTVAPIYCASPPRFQEHKVQDLPLREFDCITTDFVLYQTLAFPAVSAEPFLYSSDLYLALAQPGVSACTILKWDYVERQLRDYDRIPAPSAVHCKPMVVDSQLYVVVAQLFGGSYIYHWDPNTTRFTRLQDIDPQRVRKPNDLEAFRIDGDWYFAVADSSKAGATSLYRWHQNGFYSHQALHPWHRDTDLEFVDGEGKPRLIVSSSSQAPVIYQWSRTQKQFVAQGEVTQVPDAQAVKHFRAGRDSYLCLSRYIGDSKILRWEGTRFSEVQALPSRGSLALQPFLVGGRRYLALGSDFSFTQIYQWDEGRQKFVRFQELAVQAPRAFCYMPAGDAQLLLAPSFKGQTLVYRHIVVDLSA

SEQ ID NO: 7830 - protein, 524 aa, Homo Sapiens
MAGLRARGGPGPGLLALSALGFCLMLQVSAKRPPKTPPCPPSCSCTRDTAFCVDSKAVPRNLPSEVISLTLVNAAFSEIQDGAFSHLPLLQFLLLNSNKFTLIGDNAFTGLSHLQYLSLANNNLQTLPRDIFRPLDILNDLDLRGNSLNCDCKVKWLVEWLAHTNTTVAPIYCASPPRFQEHKVQDLPLREFDCITTDFVLYQTLAFPAVSAEPFLYSSDLYLALAQPGVSACTILKWDYVERQLRDYDRIPAPSAVHCKPMVVDSQLYVVVAQLFGGSYIYHWDPNTTRFTRLQDIDPQRVRKPNDLEAFRIDGDWYFAVADSSKAGATSLYRWHQNGFYSHQALHPWHRDTDLEFVDGEGKPRLIVSSSSQAPVIYQWSRTQKQFVAQGEVTQVPDAQAVKHFRAGRDSYLCLSRYIGDSKILRWEGTRFSEVQALPSRGSLALQPFLVGGRRYLALGSDFSFTQIYQWDEGRQKFVRFQELAVQAPRAFCYMPAGDAQLLLAPSFKGQTLVYRHIVVDLSA

SEQ ID NO: 7831 - protein, 198 aa, Homo Sapiens
MCPCRDRTLVNAAFSEIQDGAFSHLPLLQFLLLNSNKFTLIGDNAFTGLSHLQYLFIENNDIWALSKFTFRGLKSLTHLSLANNNLQTLPRDIFRPLDILNDLDLRGNSLNCDCKVKWLVEWLAHTNTTVAPIYCASPPRFQEHKVQDLPLREFDCITTDFVLYQTLAFPAVSAEPFLYSSDLYLALAQPGVSACTIL

SEQ ID NO: 7832 - protein, 537 aa, Homo Sapiens
MGGAGILLLLLAGAGVVVAWRPPKGKCPLRCSCSKDSALCEGSPDLPVSFSPTLLSLSLVRTGVTQLKAGSFLRIPSLHLLLFTSNSFSVIEDDAFAGLSHLQYLFIEDNEIGSISKNALRGLRSLTHLSLANNHLETLPRFLFRGLDTLTHVDLRGNPFQCDCRVLWLLQWMPTVNASVGTGACAGPASLSHMQLHHLDPKTFKCRAIELSWFQTVGESALSVEPFSYQGEPHIVLAQPFAGRCLILSWDYSLQRFRPEEELPAASVVSCKPLVLGPSLFVLAARLWGGSQLWARPSPGLRLAPTQTLAPRRLLRPNDAELLWLEGQPCFVVADASKAGSTTLLCRDGPGFYPHQSLHAWHRDTDAEALELDGRPHLLLASASQRPVLFHWTGGRFERRTDIPEAEDVYATRHFQAGGDVFLCLTRYIGDSMVMRWDGSMFRLLQQLPSRGAHVFQPLLIARDQLAILGSDFAFSQVLRLEPDKGLLEPLQELGPPALVAPRAFAHITMAGRRFLFAACFKGPTQIYQHHEIDLSA

SEQ ID NO: 7833 - protein, 494 aa, Homo Sapiens
MGGAGILLLLLAGAGVVVAWRPPKGKCPLRCSCSKDSALCEGSPDLPVSFSPTLLSLSLVRTGVTQLKAGSFLRIPSLHLLLFTSNSFSVIEDDAFAGLSHLQYLFIEDNEIGSISKNALRGLRSLTHLSLANNHLETLPRFLFRGLDTLTHVDLRGNPFQCDCRVLWLLQWMPTVNASVGTGACAGPASLSHMQLHHLDPKTFKCRAIELSWFQTVGESALSVEPFSYQGEPHIVLAQPFAGRCLILSWDYSLQRFRPEEELPGEPPPRPSACPAACLAGLTCLPTSPQRPPWCPASHWCWARASSCWLPACGGAHSCGPGPVPACAWPQRRPWPRGGCCGPMTPSSCGWKGNPASWWPMPPRRAAPRCCAATGPAFTRTRACTPGTGTRTLRPWSWTAGPTCCWPRLPSGPCSSTGPVAASRDAQTSPRPRMSMPHATSRLVGTCSCASHATLGTPWSCAGTAPCFVCCSNFPRAVPTSSSHCSSPGTSWPS

SEQ ID NO: 7834 - protein, 261 aa, Homo Sapiens
MGGAGILLLLLAGAGVVVAWRPPKGKCPLRCSCSKDSALCEGSPDLPVSFSPTLLSLSLVRTGVTQLKAGSFLRIPSLHLLLFTSNSFSVIEDDAFAGLSHLQYLFIEDNEIGSISKNALRGLRSLTHLSLANNHLETLPRFLFRGLDTLTHVDLRGNPFQCDCRVLWLLQWMPTVNASVGTGACAGPASLSHMQLHHLDPKTFKCRAIGGGLSRWGGRREIWGKGCQGQEARLTPCPAISRSGKTLSKQHCLPEPQFSHL

SEQ ID NO: 7835 - protein, 378 aa, Homo Sapiens
  misc_feature (1)..(1): Xaa can be any naturally occurring amino acid
XVIEDDAFAGLSHLQYLFIEDNEIGSISKNALRGLRSLTHLSLANNHLETLPRFLFRGLDTLTHVDLRGNPFQCDCRVLWLLQWMPTVNASVGTGACAGPASLSHMQLHHLDPKTFKCRAIELSWFQTVGESALSVEPFSYQGEPHIVLAQPFAGRCLILSWDYSLQRFRPEEELPAASVVSCKPLVLGPSLFVLAARLWGGSQLWARPSPGLRLAPTQTLAPRRLLRPNDAELLWLEGQPCFVVADASKAGSTTLLCRDGPGFYPHQSLHAWHRDTDAEALELDGRPHLLLASASQRPVLFHWTGGRFERRTDIPEAEDVYATRHFQAGGDVFLCLTRYIGDSMVRLGLGAGGWLFSTDPILHTKPLNSDLPSHADL

SEQ ID NO: 7836 - protein, 19 aa, Homo Sapiens
MVWKVAVFLSVALGIGAVP

SEQ ID NO: 7837 - protein, 57 aa, Homo Sapiens
MVWKVAVFLSVALGIGAVPIDDPEDGGKHWVVIVAGSNGWYNYRHQADACHAYQIIH

SEQ ID NO: 7838 - protein, 58 aa, Homo Sapiens
MVWKVAVFLSVALGIGAVPIDDPEDGGKHWVVIVAGSNGWYNYRHQADACHAYQIIHR

SEQ ID NO: 7839 - protein, 135 aa, Homo Sapiens
MVWKVAVFLSVALGIGAVPIDDPEDGGKHWVVIVAGSNGWYNYRHQADACHAYQIIHRNGIPDEQIVVMINPTPGIVINRPNGTDVYQGVPKDYTGEDVTPQNFLAVLRGDAEAVKGIGSGKVLKSGPQDHVFIY

SEQ ID NO: 7840 - protein, 78 aa, Homo Sapiens
MVWKVAVFLSVALGIGAVPIDDPEDGGKHWVVIVAGSNGWYNYRHQADACHAYQIIHRNGIPDEQIVVMMYDDIAYSE

SEQ ID NO: 7841 - protein, 78 aa, Homo Sapiens; identical to SEQ ID NO: 7840

SEQ ID NO: 7842 - protein, 223 aa, Homo Sapiens
MVWKVAVFLSVALGIGAVPIDDPEDGGKHWVVIVAGSNGWYNYRHQADACHAYQIIHRNGIPDEQIVVMMYDDIAYSEDNPTPGIVINRPNGTDVYQGVPKDYTGEDVTPQNFLAVLRGDAEAVKGIGSGKVLKSGPQDHVFIYFTDHGSTGILVFPNEDLHVKDLNETIHYMYKHKMYRKMVFYIEACESGSMMNHLPDNINGRWLGRRPRPGLASRLLRHR

SEQ ID NO: 7843 - protein, 433 aa, Homo Sapiens
MVWKVAVFLSVALGIGAVPIDDPEDGGKHWVVIVAGSNGWYNYRHQADACHAYQIIHRNGIPDEQIVVMMYDDIAYSEDNPTPGIVINRPNGTDVYQGVPKDYTGEDVTPQNFLAVLRGDAEAVKGIGSGKVLKSGPQDHVFIYFTDHGSTGILVFPNEDLHVKDLNETIHYMYKHKMYRKMVFYIEACESGSMMNHLPDNINVYATTAANPRESSYACYYDEKRSTYLGDWYSVNWMEDSDVEDLTKETLHKQYHLVKSHTNTSHVMQYGNKTISTMKVMQFQGMKRKASSPVPLPPVTHLDLTPSPDVPLTIMKRKLMNTNDLEESRQLTEEIQRHLDARHLIEKSVRKIVSLLAASEAEVEQLLSERAPLTGHSCYPEALLHFRTHCFNWHSPTYEYALRHLYVLVNLCEKPYPLHRIKLSMDHVCLGHY

SEQ ID NO: 7844 - protein, 433 aa, Homo Sapiens; identical to SEQ ID NO: 7843

SEQ ID NO: 7845 - protein, 376 aa, Homo Sapiens
MVWKVAVFLSVALGIGAVPIDDPEDGGKHWVVIVAGSNGWYNYRHQADACHAYQIIHRNGIPDEQIVVMMYDDIAYSEDNPTPGIVINRPNGTDVYQGVPKDYTGEDVTPQNFLAVLRGDAEAVKGIGSGKVLKSGPQDHVFIYFTDHGSTGILVFPNEDLHVKDLNETIHYMYKHKMYRKMVFYIEACESGSMMNHLPDNINVYATTAANPRESSYACYYDEKRSTYLGDWYSVNWMEDSDVEDLTKETLHKQYHLVKSHTNTSHVMQYGNKTISTMKVMQFQGMKRKASSPVPLPPVTHLDLTPSPDVPLTIMKRKLMNTNDLEESRQLTEEIQRHLDYEYALRHLYVLVNLCEKPYPLHRIKLSMDHVCLGHY

SEQ ID NO: 7846 - protein, 372 aa, Homo Sapiens
MVWKVAVFLSVALGIGAVPIDDPEDGGKHWVVIVAGSNGWYNYRHQADACHAYQIIHRNGIPDEQIVVMMYDDIAYSEDNPTPGIVINRPNGTDVYQGVPKDYTGEDVTPQNFLAVLRGDAEAVKGIGSGKVLKSGPQDHVFIYFTDHGSTGILVFPNEDLHVKDLNETIHYMYKHKMYRKMVFYIEACESGSMMNHLPDNINVYATTAANPRESSYACYYDEKRSTYLGDWYSVNWMEDSDVEDLTKETLHKQYHLVKSHTNTSHVMQYGNKTISTMKVMQFQGMKRKASSPVPLPPVTHLDLTPSPDVPLTIMKRKLMNTNDLEESRQLTEEIQRHLDDKIVHGPRVPWSLLKSCLLEAFPSVSAPPTVC

SEQ ID NO: 7847 - protein, 117 aa, Homo Sapiens
MVWKVAVFLSVALGIGAVPIDDPEDGGKHWVVIVAGSNGWYNYRHQADACHAYQIIHRNGIPDEQIVVMMYDDIAYSEDNPTPGIVINRPNGTDVYQGVPKDYTGEWPPGSRVHLLH

SEQ ID NO: 7848 - protein, 48 aa, Homo Sapiens
MVWKVAVFLSVALGIGAVPIDDPEDGGKHWVVIVAGSNGWYNYRHQEL

SEQ ID NO: 7849 - protein, 91 aa, Homo Sapiens
  misc_feature (1)..(1): Xaa can be any naturally occurring amino acid
XPTPGIVINRPNGTDVYQGVPKDYTGEDVTPQNFLAVLRGGVRSLRCSGPPGEPPLQGSLQDLLHKMTCSLLPASPVFSEKLQIRVGKALY

SEQ ID NO: 7850 - protein, 951 aa, Homo Sapiens
MPGPLGLLCFLALGLLGSAGPSGAAPPLCAAPCSCDGDRRVDCSGKGLTAVPEGLSAFTQALDISMNNITQLPEDAFKNFPFLEELQLAGNDLSFIHPKALSGLKELKVLTLQNNQLKTVPSEAIRGLSALQSLRLDANHITSVPEDSFEGLVQLRHLWLDDNSLTEVPVHPLSNLPTLQALTLALNKISSIPDFAFTNLSSLVVLHLHNNKIRSLSQHCFDGLDNLETLDLNYNNLGEFPQAIKALPSLKELGFHSNSISVIPDGAFDGNPLLRTIHLYDNPLSFVGNSAFHNLSDLHSLVIRGASMVQQFPNLTGTVHLESLTLTGTKISSIPNNLCQEQKMLRTLDLSYNNIRDLPSFNGCHALEEISLQRNQIYQIKEGTFQGLISLRILDLSRNLIHEIHSRAFATLGPITNLDVSFNELTSFPTEGLNGLNQLKLVGNFKLKEALAAKDFVNLRSLSVPYAYQCCAFWGCDSYANLNTEDNSLQDHSVAQEKGTADAANVTSTLENEEHSQIIIHCTPSTGAFKPCEYLLGSWMIRLTVWFIFLVALFFNLLVILTTFASCTSLPSSKLFIGLISVSNLFMGIYTGILTFLDAVSWGRFAEFGIWWETGSGCKVAGFLAVFSSESAIFLLMLATVERSLSAKDIMKNGKSNHLKQFRVAALLAFLGATVAGCFPLFHRGEYSASPLCLPFPTGETPSLGFTVTLVLLNSLAFLLMAVIYTKLYCNLEKEDLSENSQSSMIKHVAWLIFTNCIFFCPVAFFSFAPLITAISISPEIMKSVTLIFFPLPACLNPVLYVFFNPKFKEDWKLLKRRVTKKSGSVSVSISSQGGCLEQDFYYDCGMYSHLQGNLTVCDCCESFLLTKPVSCKHLIKSHSCPALAVASCQRPEGYWSDCGTQSAHSDYADEEDSFVSDSSDQVQACGRACFYQSRGFPLVRYAYNLPRVKD

SEQ ID NO: 7851 - protein, 158 aa, Homo Sapiens
MPGPLGLLCFLALGLLGSAGPSGAAPPLCAAPCSCDGDRRVDCSGKGLTAVPEGLSAFTQALDISMNNITQLPEDAFKNFPFLEELRLDANHITSVPEDSFEGLVQLRHLWLDDNSLTEVPVHPLSNLPTLQALTLALNKISSIPDFAFTNLSSLVVL

SEQ ID NO: 7852 - protein, 927 aa, Homo Sapiens
MPGPLGLLCFLALGLLGSAGPSGAAPPLCAAPCSCDGDRRVDCSGKGLTAVPEGLSAFTQALQLAGNDLSFIHPKALSGLKELKVLTLQNNQLKTVPSEAIRGLSALQSLRLDANHITSVPEDSFEGLVQLRHLWLDDNSLTEVPVHPLSNLPTLQALTLALNKISSIPDFAFTNLSSLVVLHLHNNKIRSLSQHCFDGLDNLETLDLNYNNLGEFPQAIKALPSLKELGFHSNSISVIPDGAFDGNPLLRTIHLYDNPLSFVGNSAFHNLSDLHSLVIRGASMVQQFPNLTGTVHLESLTLTGTKISSIPNNLCQEQKMLRTLDLSYNNIRDLPSFNGCHALEEISLQRNQIYQIKEGTFQGLISLRILDLSRNLIHEIHSRAFATLGPITNLDVSFNELTSFPTEGLNGLNQLKLVGNFKLKEALAAKDFVNLRSLSVPYAYQCCAFWGCDSYANLNTEDNSLQDHSVAQEKGTADAANVTSTLENEEHSQIIIHCTPSTGAFKPCEYLLGSWMIRLTVWFIFLVALFFNLLVILTTFASCTSLPSSKLFIGLISVSNLFMGIYTGILTFLDAVSWGRFAEFGIWWETGSGCKVAGFLAVFSSESAIFLLMLATVERSLSAKDIMKNGKSNHLKQFRVAALLAFLGATVAGCFPLFHRGEYSASPLCLPFPTGETPSLGFTVTLVLLNSLAFLLMAVIYTKLYCNLEKEDLSENSQSSMIKHVAWLIFTNCIFFCPVAFFSFAPLITAISISPEIMKSVTLIFFPLPACLNPVLYVFFNPKFKEDWKLLKRRVTKKSGSVSVSISSQGGCLEQDFYYDCGMYSHLQGNLTVCDCCESFLLTKPVSCKHLIKSHSCPALAVASCQRPEGYWSDCGTQSAHSDYADEEDSFVSDSSDQVQACGRACFYQSRGFPLVRYAYNLPRVKD

SEQ ID NO: 7853 - protein, 141 aa, Homo Sapiens
MEMLQGLLLLLLLSMGGAWASREPLRPWCHPINAILAVEKEGCPVCITVNTTICAGYCPTMMRVLQAVLPPLPQVVCTYRDVRFESIRLPGCPRGVDPVVSFPVALSCRCGPCRRSTSDCGGPKDHPLTCDHPQLSGLLFL

SEQ ID NO: 7854 - protein, 699 aa, Homo Sapiens
MKQRFSALQLLKLLLLLQPPLPRALREALCPEPCNCVPDGALRCPGPTAGLTRLSLAYLPVKVIPSQAFRGLNEVIKIEISQIDSLERIEANAFDNLLNLSEILIQNTKNLRYIEPGAFINLPRLKYLSICNTGIRKFPDVTKVFSSESNFILEICDNLHITTIPGNAFQGMNNESVTLKLYGNGFEEVQSHAFNGTTLTSLELKENVHLEKMHNGAFRGATGPKTLDISSTKLQALPSYGLESIQRLIATSSYSLKKLPSRETFVNLLEATLTYPSHCCAFRNLPTKEQNFSHSISENFSKQCESTVRKVNNKTLYSSMLAESELSGWDYEYGFCLPKTPRCAPEPDAFNPCEDIMGYDFLRVLIWLINILAIMGNMTVLFVLLTSRYKLTVPRFLMCNLSFADFCMGLYLLLIASVDSQTKGQYYNHAIDWQTGSGCSTAGFFTVFASELSVYTLTVITLERWHTITYAIHLDQKLRLRHAILIMLGGWLFSSLIAMLPLVGVSNYMKVSICFPMDVETTLSQVYILTILILNVVAFFIICACYIKIYFAVRNPELMATNKDTKIAKKMAILIFTDFTCMAPISFFAISAAFKVPLITVTNSKVLLVLFYPINSCANPFLYAIFTKTFQRDFFLLLSKFGCCKRRAELYRRKDFSAYTSNCKNGFTGSNKPSQSTLKLSTLHCQGTALLDKTRYTEC

SEQ ID NO: 7855 - protein, 672 aa, Homo Sapiens
MKQRFSALQLLKLLLLLQPPLPRALREALCPEPCNCVPDGALRCPGPTAGLTRLSLAYLPVKVIPSQAFRGLNEVIKIEISQIDSLERIEANAFDNLLNLSEILIQNTKNLRYIEPGAFINLPRLKYLSICNTGIRKFPDVTKVFSSESNFILEICDNLHITTIPGNAFQGMNNESVTLKLYGNGFEEVQSHAFNGTTLTSLELKENVHLEKMHNGAFRGATGPKTLDISSTKLQALPSYGLESIQRLIATSSYSLKKLPSRETFVNLLEATLTYPSHCCAFRNLPTKDYSSMLAESELSGWDYEYGFCLPKTPRCAPEPDAFNPCEDIMGYDFLRVLIWLINILAIMGNMTVLFVLLTSRYKLTVPRFLMCNLSFADFCMGLYLLLIASVDSQTKGQYYNHAIDWQTGSGCSTAGFFTVFASELSVYTLTVITLERWHTITYAIHLDQKLRLRHAILIMLGGWLFSSLIAMLPLVGVSNYMKVSICFPMDVETTLSQVYILTILILNVVAFFIICACYIKIYFAVRNPELMATNKDTKIAKKMAILIFTDFTCMAPISFFAISAAFKVPLITVTNSKVLLVLFYPINSCANPFLYAIFTKTFQRDFFLLLSKFGCCKRRAELYRRKDFSAYTSNCKNGFTGSNKPSQSTLKLSTLHCQGTALLDKTRYTEC

SEQ ID NO: 7856 - protein, 325 aa, Homo Sapiens
MKQRFSALQLLKLLLLLQPPLPRALREALCPEPCNCVPDGALRCPGPTAGLTRLSLAYLPVKVIPSQAFRGLNEVIKIEISQIDSLERIEANAFDNLLNLSEILIQNTKNLRYIEPGAFINLPRLKYLSICNTGIRKFPDVTKVFSSESNFILEICDNLHITTIPGNAFQGMNNESVTLKLYGNGFEEVQSHAFNGTTLTSLELKENVHLEKMHNGAFRGATGPKTLDISSTKLQALPSYGLESIQRLIATSSYSLKKLPSRETFVNLLEATLTYPSHCCAFRNLPTKEQNFSHSISENFSKQCESTVRKVNNKTLSKPRINGYQ

SEQ ID NO: 7857 - protein, 329 aa, Homo Sapiens
MKQRFSALQLLKLLLLLQPPLPRALREALCPEPCNCVPDGALRCPGPTAGLTRLSLAYLPVKVIPSQAFRGLNEVIKIEISQIDSLERIEANAFDNLLNLSEILIQNTKNLRYIEPGAFINLPRLKYLSICNTGIRKFPDVTKVFSSESNFILEICDNLHITTIPGNAFQGMNNESVTLKLYGNGFEEVQSHAFNGTTLTSLELKENVHLEKMHNGAFRGATGPKTLDISSTKLQALPSYGLESIQRLIATSSYSLKKLPSRETFVNLLEATLTYPSHCCAFRNLPTKEQNFSHSISENFSKQCESTVRKVNNKTLLLHGALSAAHSLS

SEQ ID NO: 7858 - protein, 175 aa, Homo Sapiens
NCVPDGALRCPGPTAGLTRLSLAYLPVKVIPSQAFRGLNEVIKIEISQIDSLERIEANAFDNLLNLSEILIQNTKNLRYIEPGAFINLPRLKYLSICNTGIRKFPDVTKVFSSESNFILEICDNLHITTIPGNAFQGMNNESVTLPWQNCDEAIKELTLKEKRENMDWNDSEMKR

SEQ ID NO: 7859 - protein, 202 aa, Homo Sapiens
MKVLAAGVVPLLLVLHWKHGAGSPLPITPVNATCAIRHPCHNNLMNQIRSQLAQLNGSANALFILYYTAQGEPFPNNLDKLCGPNVTDFPPFHANGTEKAKLVELYRIVVYLGTSLGNITRDQKILNPSALSLHSKLNATADILRGLLSNVLCRLCSKYHVGHVDVTYGPDTSGKDVFQKKKLGCQLLGKYKQIIAVLAQAF

SEQ ID NO: 7860 - protein, 88 aa, Homo Sapiens
MKVLAAVHSPGGAVPQQPGQAMWPQRDGLPALPRQRHGEGQAGGAVPHSRVPWHLPGQHHPGPEDPQPQCPQPPQQAQRHRRHPARPP

SEQ ID NO: 7861 - protein, 75 aa, Homo Sapiens
MMDIYVCLKRPSWMVDNKRMRTASNFQWLLSTFILLYLMNQVNSQKKGAPHDLKCVTNNLQVWNCSWKAPSGTGR

SEQ ID NO: 7862 - protein, 126 aa, Homo Sapiens
MMDIYVCLKRPSWMVDNKRMRTASNFQWLLSTFILLYLMNQVNSQKKGAPHDLKCVTNNLQVWNCSWKAPSGTGRGTDYEVCIENRSRSCYQLEKTSIKIPALSHGDYEITINSLHDFGSSTSKFT

SEQ ID NO: 7863 - protein, 1097 aa, Homo Sapiens
MMDIYVCLKRPSWMVDNKRMRTASNFQWLLSTFILLYLMNQVNSQKKGAPHDLKCVTNNLQVWNCSWKAPSGTGRGTDYEVCIENRSRSCYQLEKTSIKIPALSHGDYEITINSLHDFGSSTSKFTLNEQNVSLIPDTPEILNLSADFSTSTLYLKWNDRGSVFPHRSNVIWEIKVLRKESMELVKLVTHNTTLNGKDTLHHWSWASDMPLECAIHFVEIRCYIDNLHFSGLEEWSDWSPVKNISWIPDSQTKVFPQDKVILVGSDITFCCVSQEKVLSALIGHTNCPLIHLDGENVAIKIRNISVSASSGTNVVFTTEDNIFGTVIFAGYPPDTPQQLNCETHDLKEIICSWNPGRVTALVGPRATSYTLVESFSGKYVRLKRAEAPTNESYQLLFQMLPNQEIYNFTLNAHNPLGRSQSTILVNITEKVYPHTPTSFKVKDINSTAVKLSWHLPGNFAKINFLCEIEIKKSNSVQEQRNVTIKGVENSSYLVALDKLNPYTLYTFRIRCSTETFWKWSKWSNKKQHLTTEASPSKGPDTWREWSSDGKNLIIYWKPLPINEANGKILSYNVSCSSDEETQSLSEIPDPQHKAEIRLDKNDYIISVVAKNSVGSSPPSKIASMEIPNDDLKIEQVVGMGKGILLTWHYDPNMTCDYVIKWCNSSRSEPCLMDWRKVPSNSTETVIESDEFRPGIRYNFFLYGCRNQGYQLLRSMIGYIEELAPIVAPNFTVEDTSADSILVKWEDIPVEELRGFLRGYLFYFGKGERDTSKMRVLESGRSDIKVKNITDISQKTLRIADLQGKTSYHLVLRAYTDGGVGPEKSMYVVTKENSVGLIIAILIPVAVAVIVGVVTSILCYRKREWIKETFYPDIPNPENCKALQFQKSVCEGSSALKTLEMNPCTPNNVEVLETRSAFPKIEDTEIISPVAERPEDRSDAEPENHVVVSYCPPIIEEEIPNPAADEAGGTAQVIYIDVQSMYQPQAKPEEEQENDPVGGAGYKPQMHLPINSTVEDIAAEEDLDKTAGYRPQANVNTWNLVSPDSPRSIDSNSEIVSFGSPCSINSRQFLIPPKDEDSPKSNGGGWSFTNFFQNKPND

SEQ ID NO: 7864 - protein, 1097 aa, Homo Sapiens; identical to SEQ ID NO: 7863

SEQ ID NO: 7865 - protein, 66 aa, Homo Sapiens
  misc_feature (1)..(1): Xaa can be any naturally occurring amino acid
XWSNKKQHLTTEASPSKGPDTWREWSSDGKNLIIYWKMRKHSPFLKSLILSTKQRYDLIRMTTSSA

SEQ ID NO: 7866 - protein, 289 aa, Homo Sapiens
MTPIVTVLICLRLSLGPRTHVQAGTLPKPTLWAEPGSVITQGSPVTLWCQGILETQEYRLYREKKTAPWITRIPQEIVKKGQFPIPSITWEHTGRYRCFYGSHTAGWSEPSDPLELVVTGAYIKPTLSALPSPVVTSGGNVTLHCVSQVAFGSFILCKEGEDEHPQCLNSQPRTHGWSRAIFSVGPVSPSRRWSYRCYAYDSNSPHVWSLPSDLLELLVLGAAETLSPPQNKSDSKAGAANTLSPSQNKTASHPQDYTVENLIRMGIAGLVLVVLGILLFEAQHSQRSL

SEQ ID NO: 7867 - protein, 489 aa, Homo Sapiens
MTPIVTVLICLRLSLGPRTHVQAGTLPKPTLWAEPGSVITQGSPVTLWCQGILETQEYRLYREKKTAPWITRIPQEIVKKGQFPIPSITWEHTGRYRCFYGSHTAGWSEPSDPLELVVTGAYIKPTLSALPSPVVTSGGNVTLHCVSQVAFGSFILCKEGEDEHPQCLNSQPRTHGWSRAIFSVGPVSPSRRWSYRCYAYDSNSPHVWSLPSDLLELLVLGVSKKPSLSVQPGPIVAPGESLTLQCVSDVSYDRFVLYKEGERDFLQLPGPQPQAGLSQANFTLGPVSRSYGGQYRCSGAYNLSSEWSAPSDPLDILIAGQFRGRPFISVHPGPTVASGENVTLLCQSWGPFHTFLLTKAGAADAPLRLRSIHEYPKYQAEFPMSPVTSAHSGTYRCYGSLSSNPYLLSHPSDSLELMVSGAAETLSPPQNKSDSKAGAANTLSPSQNKTASHPQDYTVENLIRMGIAGLVLVVLGILLFEAQHSQRSL

SEQ ID NO: 7868 - protein, 454 aa, Homo Sapiens
MTPILTVLICLGHLPKPTLWAEPGSVIIQGSPVTLRCQGSLQAEEYHLYRENKSASWVRRIQEPGKNGQFPIPSITWEHAGRYHCQYYSHNHSSEYSDPLELVVTGAYSKPTLSALPSPVVTSGGNVTLQCVSQVAFDGFILCKEGEDEHPQRLNSHSHARGWSWAIFSVGPVSPSRRWSYRCYAYDSNSPYVWSLPSDLLELLVPGVSKKPSLSVQPGPMVAPGESLTLQCVSDVGYDRFVLYKEGERDFLQRPGWQPQAGLSQANFTLGPVSPSHGGQYRCYSAHNLSSEWSAPSDPLDILITGQFYDRPSLSVQPVPTVAPGKNVTLLCQSRGQFHTFLLTKEGAGHPPLHLRSEHQAQQNQAEFRMGPVTSAHVGTYRCYSSLSSNPYLLSLPSDPLELVVSASLGQHPQDYTVENLIRMGVAGLVLVVLGILLFEAQHSQRSLQDAAGR

SEQ ID NO: 7869 - protein, 203 aa, Homo Sapiens
MTPILTVLICLGLSLGPRTHVQAGHLPKPTLWAEPGSVIIQGSPVTLRCQGSLQAEEYHLYRENKSASWVRRIQEPGKNGQFPIPSITWEHAGRYHCQYYSHNHSSEHQAQQNQAEFRMGPVTSAHVGTYRCYSSLSSNPYLLSLPSDPLELVVSASLGQHPQDYTVENLIRMGVAGLVLVVLGILLFEAQHSQRSLQDAAGR

SEQ ID NO: 7870 - protein, 466 aa, Homo Sapiens
MTPILTVLICLGLSLGPRTHVQAGHLPKPTLWAEPGSVIIQGSPVTLRCQGSLQAEEYHLYRENKSASWVRRIQEPGKNGQFPIPSITWEHAGRYHCQYYSHNHSSEYSDPLELVVTGAYSKPTLSALPSPVVTSGGNVTLQCVSQVAFDGFILCKEGEDEHPQRLNSHSHARGWSWAIFSVGPVSPSRRWSYRCYAYDSNSPYVWSLPSDLLELLVPGVSKKPSLSVQPGPMVAPGESLTLQCVSDVGYDRFVLYKEGERDFLQRPGWQPQAGLSQANFTLGPVSPSHGGQYRCYSAHNLSSEWSAPSDPLDILITGQFYDRPSLSVQPVPTVAPGKNVTLLCQSRGQFHTFLLTKEGAGHPPLHLRSEHQAQQNQAEFRMGPVTSAHVGTYRCYSSLSSNPYLLSLPSDPLELVVSASLGQHPQDYTVENLIRMGVAGLVLVVLGILLFEAQHSQRSLQDAAGR

SEQ ID NO: 7871 - protein, 483 aa, Homo Sapiens
MTPILTVLICLGLSLGPRTHVQAGHLPKPTLWAEPGSVIIQGSPVTLRCQGSLQAEEYHLYRENKSASWVRRIQEPGKNGQFPIPSITWEHAGRYHCQYYSHNHSSEYSDPLELVVTGAYSKPTLSALPSPVVTSGGNVTLQCVSQVAFDGFILCKEGEDEHPQRLNSHSHARGWSWAIFSVGPVSPSRRWSYRCYAYDSNSPYVWSLPSDLLELLVPGVSKKPSLSVQPGPMVAPGESLTLQCVSDVGYDRFVLYKEGERDFLQRPGWQPQAGLSQANFTLGPVSPSHGGQYRCYSAHNLSSEWSAPSDPLDILITGQFYDRPSLSVQPVPTVAPGKNVTLLCQSRGQFHTFLLTKEGAGHPPLHLRSEHQAQQNQAEFRMGPVTSAHVGTYRCYSSLSSNPYLLSLPSDPLELVVSEAAETLSPSQNKTDSTTTSLGQHPQDYTVENLIRMGVAGLVLVVLGILLFEAQHSQRSLQDAAGR

SEQ ID NO: 7872 - protein, 483 aa, Homo Sapiens; identical to SEQ ID NO: 7871

SEQ ID NO: 7873 - protein, 327 aa, Homo Sapiens
MTPILTVLICLGLSLGPRTHVQAGHLPKPTLWAEPGSVIIQGSPVTLRCQGSLQAEEYHLYRENKSASWVRRIQEPGKNGQFPIPSITWEHAGRYHCQYYSHNHSSEYSDPLELVVTGAYSKPTLSALPSPVVTSGGNVTLQCVSQVAFDGFILCKEGEDEHPQRLNSHSHARGWSWAIFSVGPVSPSRRWSYRCYAYDSNSPYVWSLPSDLLELLVPGVSKKPSLSVQPGPMVAPGESLTLQCVSDVGYDRFVLYKEGERDFLQRPGWQPQAGLSQANFTLGPVSPSHGGQYRCYSAHNLSSEWSAPSDPLDILITGQFYDRPSLS

SEQ ID NO: 7874 - protein, 85 aa, Homo Sapiens
  misc_feature (1)..(1): Xaa can be any naturally occurring amino acid
XSLPSDPLELVVSEPLSISPSPTPAGSLGHLKTREEAAWASVGSDCDEAGVHPRCAPLERSTPAVGAAHTAPPVLTWRPLCSGHP

SEQ ID NO: 7875 - protein, 158 aa, Homo Sapiens
MTPALTALLCLGLSLGPRTRMQAGPFPKPTLWAEPGSVISWGSPVTIWCQGSLEAQEYQLDKEGSPEPWDRNNPLEPKNKARFSIPSMTQHHAGRYRCHYYSSAGWSEPSDPLELVMTGFYNKPTLSALPSPVVASGGNMTLRCGSQKGYHHFVLMKE

SEQ ID NO: 7876 - protein, 632 aa, Homo Sapiens
MTPALTALLCLGLSLGPRTRMQAGPFPKPTLWAEPGSVISWGSPVTIWCQGSLEAQEYQLDKEGSPEPWDRNNPLEPKNKARFSIPSMTQHHAGRYRCHYYSSAGWSEPSDPLELVMTGFYNKPTLSALPSPVVASGGNMTLRCGSQKGYHHFVLMKEGEHQLPRTLDSQQLHSGGFQALFPVGPVTPSHRWRFTCYYYYTNTPWVWSHPSDPLEILPSGVSRKPSLLTLQGPVLAPGQSLTLQCGSDVGYDRFVLYKEGERDFLQRPGQQPQAGLSQANFTLGPVSRSYGGQYRCYGAHNLSSEWSAPSDPLDILITGQIYDTVSLSAQPGPTVASGENMTLLCQSRGYFDTFLLTKEGAAHPPLRLRSMYGAHKYQAEFPMSPVTSAHAGTYRCYGSRSSNPHLLSFPSEPLELMVSGHSGGSSLPPTGPPSTPGLGRYLEVLIGVSVAFVLLLFLLLFLLLLRQRHSKHRTSDQRKTDFQRPAGAAETEPKDRGLLRRSSPAADVQEENLYAAVKDTQSEDRVELDSQQSPHDEDPQAVTYAPVKHSSPRREMASPPSSLSGEFLDTKDRQVEEDRQMDTEAAASEASQDVTYAQLHSLTLRRKATEPPPSQEGEPPAEPSIYATLAIH

SEQ ID NO: 7877 - protein, 643 aa, Homo Sapiens
MTPALTALLCLGLSLGPRTRMQAGPFPKPTLWAEPGSVISWGSPVTIWCQGSLEAQEYQLDKEGSPEPWDRNNPLEPKNKARFSIPSMTQHHAGRYRCHYYSSAGWSEPSDPLELVMTGFYNKPTLSALPSPVVASGGNMTLRCGSQKGYHHFVLMKEGEHQLPRTLDSQQLHSGGFQALFPVGPVTPSHRWRFTCYYYYTNTPWVWSHPSDPLEILPSGVSRKPSLLTLQGPVLAPGQSLTLQCGSDVGYDRFVLYKEGERDFLQRPGQQPQAGLSQANFTLGPVSRSYGGQYRCYGAHNLSSEWSAPSDPLDILITGQIYDTVSLSAQPGPTVASGENMTLLCQSRGYFDTFLLTKEGAAHPPLRLRSMYGAHKYQAEFPMSPVTSAHAGTYRCYGSRSSNPHLLSFPSEPLELMVSGPEDQPLNPPGSGPQNAPGLGSGAGTRAAGLGRYLEVLIGVSVAFVLLLFLLLFLLLLRQRHSKHRTSDQRKTDFQRPAGAAETEPKDRGLLRRSSPAADVQEENLYAAVKDTQSEDRVELDSQSPHDEDPQAVTYAPVKHSSPRREMASPPSSLSGEFLDTKDRQVEEDRQMDTEAAASEASQDVTYAQLHSLTLRRKATEPPPSQEGEPPAEPSIYATLAIH

SEQ ID NO: 7878 - protein, 631 aa, Homo Sapiens
MTPALTALLCLGLSLGPRTRMQAGPFPKPTLWAEPGSVISWGSPVTIWCQGSLEAQEYQLDKEGSPEPWDRNNPLEPKNKARFSIPSMTQHHAGRYRCHYYSSAGWSEPSDPLELVMTGFYNKPTLSALPSPVVASGGNMTLRCGSQKGYHHFVLMKEGEHQLPRTLDSQQLHSGGFQALFPVGPVTPSHRWRFTCYYYYTNTPWVWSHPSDPLEILPSGVSRKPSLLTLQGPVLAPGQSLTLQCGSDVGYDRFVLYKEGERDFLQRPGQQPQAGLSQANFTLGPVSRSYGGQYRCYGAHNLSSEWSAPSDPLDILITGQIYDTVSLSAQPGPTVASGENMTLLCQSRGYFDTFLLTKEGAAHPPLRLRSMYGAHKYQAEFPMSPVTSAHAGTYRCYGSRSSNPHLLSFPSEPLELMVSGHSGGSSLPPTGPPSTPGLGRYLEVLIGVSVAFVLLLFLLLFLLLLRQRHSKHRTSDQRKTDFQRPAGAAETEPKDRGLLRRSSPAADVQEENLYAAVKDTQSEDRVELDSQSPHDEDPQAVTYAPVKHSSPRREMASPPSSLSGEFLDTKDRQVEEDRQMDTEAAASEASQDVTYAQLHSLTLRRKATEPPPSQEGEPPAEPSIYATLAIH

SEQ ID NO: 7879 - protein, 191 aa, Homo Sapiens
MTPALTALLCLGLSLGPRTRMQAGPFPKPTLWAEPGSVISWGSPVTIWCQGSLEAQEYQLDKEGSPEPWDRNNPLEPKNKARFSIPSMTQHHAGRYRCHYYSSAGWSEPSDPLELVMTGFYNKPTLSALPSPVVASGGNMTLRCGSQKGYHHFVLMKEGEHQLPRTLDSQQLHSGGFQALFPVGPVTPSHS

SEQ ID NO: 7880 - protein, 253 aa, Homo Sapiens [sequence omitted]

SEQ ID NO: 7881 - protein, 131 aa, Homo Sapiens
MGLPVSWAPPALWVLGCCALLLSLWALCTACRRPEDAVAPRKRARRQRARLQGSATAAEAQVGHQTARAAPGPAQQQGPAACQHGSPAPTLAGGVQGHHRTAGSPLCLPTPGAAPGSAGSCSHRRVRWPRG

SEQ ID NO: 7882 - protein, 176 aa, Homo Sapiens
MGLPVSWAPPALWVLGCCALLLSLWALCTACRRPEDAVAPRKRARRQRARLQGSATAAEAQVGHQTARAAPGPAQQQGPAACQHGSPAPTLAGGVQGHHRTAGSPLCLPTPGAAPGSAGSCSHRRVRWPRGHLFQRGAGGPSRGQPGGQPCGGRVCPRPEAQRDPSQSPRATAGED

SEQ ID NO: 7883 - protein, 107 aa, Homo Sapiens
MGLPVSWAPPALWVLGCCALLLSLWALCTACRRPEDAVAPRKRARRQRARLQGSATAAEASLLRRTHLCSLSKSDTRLHELHRGPRSSRALRPASMDLLRPHWLEVS

SEQ ID NO: 7884 - protein, 295 aa, Homo Sapiens
MGLPVSWAPPALWVLGCCALLLSLWALCTACRRPEDAVAPRKRARRQRARLQGSATAAEASLLRRTHLCSLSKSDTRLHELHRGPRSSRALRPASMDLLRPHWLEVSRDITGPQAAPSAFPHQELPRALPAAAATAGCAGLEATYSNVGLAALPGVSLAASPVVAEYARVQKRKGTHRSPQEPQQGKTEVTPAAQVDVLYSRVCKPKRRDPGPTTDPLDPKGQGAILALAGDLAYQTLPLRALDVDSGPLENVYESIRELGDPAGRSSTCGAGTPPASSCPSLGRGWRPLPASLP

SEQ ID NO: 7885 - protein, 211 aa, Homo Sapiens
MGLPVSWAPPALWVLGCCALLLSLWALCTACRRPEDAVAPRKRARRQRARLQGSATAAEAVSARLSRGPGWGPQGTDQPSSPPVPTEADPPLLPQQVGHQTARAAPGPAQQQGPAACQHGSPAPTLAGGVQGHHRTAGSPLCLPTPGAAPGSAGSCSHRRVRWPRGHLFQRGAGGPSRGQPGGQPCGGRVCPRPEAQRDPSQSPRATAGED

SEQ ID NO: 7886 - protein, 4 aa, Homo Sapiens
MLAG

SEQ ID NO: 7887 - protein, 12 aa, Homo Sapiens
MLAGGVRSMPSP

SEQ ID NO: 7888 - protein, 19 aa, Homo Sapiens
MLAGGVRSMPSPLLACWQP

SEQ ID NO: 7889 - protein, 35 aa, Homo Sapiens
MLAGGVRSMPSPLLACWQPILLLVLGSVLSGSATG

SEQ ID NO: 7890 - protein, 55 aa, Homo Sapiens
MLAGGVRSMPSPLLACWQPILLLVLGSVLSGSATGCPPRCECSAQDRAVLCHRKR

SEQ ID NO: 7891 - protein, 72 aa, Homo Sapiens
MLAGGVRSMPSPLLACWQPILLLVLGSVLSGSATGCPPRCECSAQDRAVLCHRKRFVAVPEGIPTETRLLDL

SEQ ID NO: 7892 - protein, 125 aa, Homo Sapiens
MLAGGVRSMPSPLLACWQPILLLVLGSVLSGSATGCPPRCECSAQDRAVLCHRKRFVAVPEGIPTETRLLDLGKNRIKTLNQDEFASFPHLEELELNENIVSAVEPGAFNNLFNLRTLGLRSNRL

SEQ ID NO: 7893 - protein, 179 aa, Homo Sapiens
MLAGGVRSMPSPLLACWQPILLLVLGSVLSGSATGCPPRCECSAQDRAVLCHRKRFVAVPEGIPTETRLLDLGKNRIKTLNQDEFASFPHLEELELNENIVSAVEPGAFNNLFNLRTLGLRSNRLKLIPLGVFTGLSNLTKLDISENKIVILLDYMFQDLYNLKSLEVGDNDLVYISHR

SEQ ID NO: 7894 - protein, 614 aa, Homo Sapiens
MLAGGVRSMPSPLLACWQPILLLVLGSVLSGSATGCPPRCECSAQDRAVLCHRKRFVAVPEGIPTETRLLDLGKNRIKTLNQDEFASFPHLEELELNENIVSAVEPGAFNNLFNLRTLGLRSNRLKLIPLGVFTGLSNLTKLDISENKIVILLDYMFQDLYNLKSLEVGDNDLVYISHRAFSGLNSLEQLTLEKCNLTSIPTEALSHLHGLIVLRLRHLNINAIRDYSFKRLYRLKVLEISHWPYLDTMTPNCLYGLNLTSLSITHCNLTAVPYLAVRHLVYLRFLNLSYNPISTIEGSMLHELLRLQEIQLVGGQLAVVEPYAFRGLNYLRVLNVSGNQLTTLEESVFHSVGNLETLILDSNPLACDCRLLWVFRRRWRLNFNRQQPTCATPEFVQGKEFKDFPDVLLPNYFTCRRARIRDRKAQQVFVDEGHTVQFVCRADGDPPPAILWLSPRKHLVSAKSNGRLTVFPDGTLEVRYAQVQDNGTYLCIAANAGGNDSMPAHLHVRSYSPDWPHQPNKTFAFISNQPGEGEANSTRATVPFPFDIKTLIIATTMGFISFLGVVLFCLVLLFLWSRGKGNTKHNIEIEYVPRKSDAGISSADAPRKFNMKMI

SEQ ID NO: 7895 - protein, 620 aa, Homo Sapiens
MQVSKRMLAGGVRSMPSPLLACWQPILLLVLGSVLSGSATGCPPRCECSAQDRAVLCHRKRFVAVPEGIPTETRLLDLGKNRIKTLNQDEFASFPHLEELELNENIVSAVEPGAFNNLFNLRTLGLRSNRLKLIPLGVFTGLSNLTKLDISENKIVILLDYMFQDLYNLKSLEVGDNDLVYISHRAFSGLNSLEQLTLEKCNLTSIPTEALSHLHGLIVLRLRHLNINAIRDYSFKRLYRLKVLEISHWPYLDTMTPNCLYGLNLTSLSITHCNLTAVPYLAVRHLVYLRFLNLSYNPISTIEGSMLHELLRLQEIQLVGGQLAVVEPYAFRGLNYLRVLNVSGNQLTTLEESVFHSVGNLETLILDSNPLACDCRLLWVFRRRWRLNFNRQQPTCATPEFVQGKEFKDFPDVLLPNYFTCRRARIRDRKAQQVFVDEGHTVQFVCRADGDPPPAILWLSPRKHLVSAKSNGRLTVFPDGTLEVRYAQVQDNGTYLCIAANAGGNDSMPAHLHVRSYSPDWPHQPNKTFAFISNQPGEGEANSTRATVPFPFDIKTLIIATTMGFISFLGVVLFCLVLLFLWSRGKGNTKHNIEIEYVPRKSDAGISSADAPRKFNMKMI

SEQ ID NO: 7896 - protein, 326 aa, Homo Sapiens
MVQLEQKVSKRMLAGGVRSMPSPLLACWQPILLLVLGSVLSGSATGCPPRCECSAQDRAVLCHRKRFVAVPEGIPTETRLLDLGKNRIKTLNQDEFASFPHLEELELNENIVSAVEPGAFNNLFNLRTLGLRSNRLKLIPLGVFTGLSNLTKLDISENKIVILLDYMFQDLYNLKSLEVGDNDLVYISHRAFSGLNSLEQLTLEKCNLTSIPTEALSHLHGLIVLRLRHLNINAIRDYSFKRLYRLKVLEISHWPYLDTMTPNCLYGLNLTSLSITHCNLTAVPYLAVRHLVYLRFLNLSYNPISTIEGSMLHELLRLQEIQLVGG

SEQ ID NO: 7897 - protein, 343 aa, Homo Sapiens
MACLEFVPFDVQMCLEFLPSGPKPVVFLQHGLLADSSNWVTNLANSSLGFILADAGFDVWMGNSRGNTWSRKHKTLSVSQDEFWAFSYDEMAKYDLPASINFILNKTGQEQVYYVGHSQGTTIGFIAFSQIPELAKRIKMFFALGPVASVAFCTSPMAKLGRLPDHLIKDLFGDKEFLPQSAFLKWLGTHVCTHVILKELCGNLCFLLCGFNERNLNMSRVDVYTTHSPAGTSVQNMLHWSQAVKFQKFQAFDWGSSAKNYFHYNQSYPPTYNVKDMLVPTAVWSGGHDWLADVYDVNILLTQITNLVFHESIPEWEHLDFIWGLDAPWRLYNKIINLMRKYQ

SEQ ID NO: 7898 - protein, 283 aa, Homo Sapiens
MGNSRGNTWSRKHKTLSVSQDEFWAFSYDEMAKYDLPASINFILNKTGQEQVYYVGHSQGTTIGFIAFSQIPELAKRIKMFFALGPVASVAFCTSPMAKLGRLPDHLIKDLFGDKEFLPQSAFLKWLGTHVCTHVILKELCGNLCFLLCGFNERNLNMSRVDVYTTHSPAGTSVQNMLHWSQAVKFQKFQAFDWGSSAKNYFHYNQSYPPTYNVKDMLVPTAVWSGGHDWLADVYDVNILLTQITNLVFHESIPEWEHLDFIWGLDAPWRLYNKIINLMRKYQ

SEQ ID NO: 7899 - protein, 219 aa, Homo Sapiens
MKMRFLGLVVCLVLWTLHSEGSGGKLTAVDPETNMNVSEIISYWGFPSEEYLVETEDGYILCLNRIPHGRKNHSDKGPKPVVFLQHGLLADSSNWVTNLANSSLGFILADAGFDVWMGNSRGNTWSRKHKTLSVSQDEFWAFSYDEMAKYDLPASINFILNKTGQEQVYYVGHSQGTTIGFIAFSQIPELAKRIKMFFALGPVASVAFCTSPMAKLGRL

SEQ ID NO: 7900 - protein, 399 aa, Homo Sapiens
MKMRFLGLVVCLVLWTLHSEGSGGKLTAVDPETNMNVSEIISYWGFPSEEYLVETEDGYILCLNRIPHGRKNHSDKGPKPVVFLQHGLLADSSNWVTNLANSSLGFILADAGFDVWMGNSRGNTWSRKHKTLSVSQDEFWAFSYDEMAKYDLPASINFILNKTGQEQVYYVGHSQGTTIGFIAFSQIPELAKRIKMFFALGPVASVAFCTSPMAKLGRLPDHLIKDLFGDKEFLPQSAFLKWLGTHVCTHVILKELCGNLCFLLCGFNERNLNMSRVDVYTTHSPAGTSVQNMLHWSQAVKFQKFQAFDWGSSAKNYFHYNQSYPPTYNVKDMLVPTAVWSGGHDWLADVYDVNILLTQITNLVFHESIPEWEHLDFIWGLDAPWRLYNKIINLMRKYQ

SEQ ID NO: 7901 - protein, 290 aa, Homo Sapiens
MKMRFLGLVVCLVLWTLHSEGSGGKLTAVDPETNMNVSEIISYWGFPSEEYLVETEDGYILCLNRIPHGRKNHSDKGPKPVVFLQHGLLADSSNWVTNLANSSLGFILADAGFDVWMGNSRGNTWSRKHKTLSVSQDEFWAFSYDEMAKYDLPASINFILNKTGQEQVYYVGHSQGTTIGFIAFSQIPELAKRIKMFFALGPVASVAFCTSPMAKLGRLPDHLIKDLFGDKEFLPQSAFLKWLGTHVCTHVILKELCGNLCFLLCGFNERNLNMSRVDVYTTHSPAGTSV

SEQ ID NO: 7902 - protein, 438 aa, Homo Sapiens
MDTSPLCFSILLVLCIFIQSSALGQSLKPEPFGRRAQAVETNKTLHEMKTRFLLFGETNQGCQIRINHPDTLQECGFNSSLPLVMIIHGWSESVQLSRSHVHLIGYSLGAHVSGFAGSSIGGTHKIGRITGLDAAGPLFEGSAPSNRLSPDDANFVDAIHTFTREHMGLSVGIKQPIGHYDFYPNGGSFQPGCHFLELYRHIAQHGFNAITQTIKCSHERSVHLFIDSLLHAGTQSMAYPCGDMNSFSQGLCLSCKKGRCNTLGYHVRQEPRSKSKRLFLVTRAQSPFKVYHYQFKIQFINQTETPIQTTFTMSLLGTKEKMQKIPITLGKGIASNKTYSFLITLDVDIGELIMIKFKWENSAVWANVWDTVQTIIPWSTGPRHSGLVLKTIRVKAGETQQRMTFCSENTDDLLLRPTQEKIFVKCEIKSKTSKRKIR

SEQ ID NO: 7903 - protein, 499 aa, Homo Sapiens
MDTSPLCFSILLVLCIFIQSSALGQSLKPEPFGRRAQAVETNKTLHEMKTRFLLFGETNQGCQIRINHPDTLQECGFNSSLPLVMIIHGWSVDGVLENWIWQMVAALKSQPAQPVNVGLVDWITLAHDHYTIAVRNTRLVGKEVAALLRWLEESVQLSRSHVHLIGYSLGAHVSGFAGSSIGGTHKIGRITGLDAAGPLFEGSAPSNRLSPDDANFVDAIHTFTREHMGLSVGIKQPIGHYDFYPNGGSFQPGCHFLELYRHIAQHGFNAITQTIKCSHERSVHLFIDSLLHAGTQSMAYPCGDMNSFSQGLCLSCKKGRCNTLGYHVRQEPRSKSKRLFLVTRAQSPFKVYHYQFKIQFINQTETPIQTTFTMSLLGTKEKMQKIPITLGKGIASNKTYSFLITLDVDIGELIMIKFKWENSAVWANVWDTVQTIIPWSTGPRHSGLVLKTIRVKAGETQQRMTFCSENTDDLLLRPTQEKIFVKCEIKSKTSKRKIR

SEQ ID NO: 7904 - protein, 499 aa, Homo Sapiens; identical to SEQ ID NO: 7903

SEQ ID NO: 7905 - protein, 499 aa, Homo Sapiens
MDTSPLCFSILLVLCIFIQSSALGQSLKPEPFGRRAQAVETNKTLHEMKTRFLLFGETNQGCQIRINHPDTLQECGFNSSLPLVMIIHGWSVDGVLENWIWQMVAALKSQPAQPVNVGLVDWITLAHDHYTIAVRNTRLVGKEVAALLRWLEESVQLSRSHVHLIGYSLGAHVSGFAGSSIGGTHKIGRITGLDAAGPLFEGSAPSNRLSPDDANFVDAIHTFTREHMGLSVGIKQPIGHYDFYPNGGSFQPGCHFLELYRHIAQHGFNAITQTIKCSHERSVHLFIDSLLHAGTQSMAYPCGDMNSFSQGLCLSCKKGRCNTLGYHVRQEPRSKSKRLFLVTRAQSPFKVYHYQFKIQFINQTETPIQTTFTMSLLGTKEKMQKIPITLGKGIASNKTYSFLITLDVDIGELIMIKFKWENSAVWANVWDTVQTIIPWSTGPRHSGLVLKTIRVKAGETQQRSPNRINLGRLNCSLLFCTELFSHDSLAHWSSAASEL

SEQ ID NO: 7906 - protein, 375 aa, Homo Sapiens
MFSNANSRSKMWLLLTMASLISVLGTTHGLFGKLHPGSPEVTMNISQMITYWGYPNEEYEVVTEDGYILEVNRIPYGKKNSGNTDAGYDVWLGNSRGNTWARRNLYYSPDSVEFWAFSFDEMAKYDLPATIDFIVKKTGQKQLHYVGHSQGTTIGFIAFSTNPSLAKRIKTFYALAPVATVKYTKSLINKLRFVPQSLFKFIFGDKIFYPHNFFDQFLATEVCSREMLNLLCSNALFIICGFDSKNFNTSRLDVYLSHNPAGTSVQNMFHWTQAVKSGKFQAYDWGSPVQNRMHYDQSQPPYYNVTAMNVPIAVWNGGKDLLADPQDVGLLLPKLPNLIYHKEIPFYNHLDFIWAMDAPQEVYNDIVSMISEDKK

SEQ ID NO: 7907 - protein, 408 aa, Homo Sapiens
MFSNANSRSKMWLLLTMASLISVLGTTHGLFGKLHPGSPEVTMNISQMITYWGYPNEEYEVVTEDGYILEVNRIPYGKKNSGNTGQRPVVFLQHGLLASATNWISNLPNNSLAFILADAGYDVWLGNSRGNTWARRNLYYSPDSVEFWAFSFDEMAKYDLPATIDFIVKKTGQKQLHYVGHSQGTTIGFIAFSTNPSLAKRIKTFYALAPVATVKYTKSLINKLRFVPQSLFKFIFGDKIFYPHNFFDQFLATEVCSREMLNLLCSNALFIICGFDSKNFNTSRLDVYLSHNPAGTSVQNMFHWTQAVKSGKFQAYDWGSPVQNRMHYDQSQPPYYNVTAMNVPIAVWNGGKDLLADPQDVGLLLPKLPNLIYHKEIPFYNHLDFIWAMDAPQEVYNDIVSMISEDKK

SEQ ID NO: 7908 - protein, 365 aa, Homo Sapiens
MWLLLTMASLISVLGTTHGLFGKLHPGSPEVTMNISQMITYWGYPNEEYEVVTEDGYILEVNRIPYGKKNSGNTDAGYDVWLGNSRGNTWARRNLYYSPDSVEFWAFSFDEMAKYDLPATIDFIVKKTGQKQLHYVGHSQGTTIGFIAFSTNPSLAKRIKTFYALAPVATVKYTKSLINKLRFVPQSLFKFIFGDKIFYPHNFFDQFLATEVCSREMLNLLCSNALFIICGFDSKNFNTSRLDVYLSHNPAGTSVQNMFHWTQAVKSGKFQAYDWGSPVQNRMHYDQSQPPYYNVTAMNVPIAVWNGGKDLLADPQDVGLLLPKLPNLIYHKEIPFYNHLDFIWAMDAPQEVYNDIVSMISEDKK

SEQ ID NO: 7909 - protein, 398 aa, Homo Sapiens
MWLLLTMASLISVLGTTHGLFGKLHPGSPEVTMNISQMITYWGYPNEEYEVVTEDGYILEVNRIPYGKKNSGNTGQRPVVFLQHGLLASATNWISNLPNNSLAFILADAGYDVWLGNSRGNTWARRNLYYSPDSVEFWAFSFDEMAKYDLPATIDFIVKKTGQKQLHYVGHSQGTTIGFIAFSTNPSLAKRIKTFYALAPVATVKYTKSLINKLRFVPQSLFKFIFGDKIFYPHNFFDQFLATEVCSREMLNLLCSNALFIICGFDSKNFNTSRLDVYLSHNPAGTSVQNMFHWTQAVKSGKFQAYDWGSPVQNRMHYDQSQPPYYNVTAMNVPIAVWNGGKDLLADPQDVGLLLPKLPNLIYHKEIPFYNHLDFIWAMDAPQEVYNDIVSMISEDKK

SEQ ID NO: 7910 - protein, 188 aa, Homo Sapiens
LCYCFAAGSPVPFGPEGRLEDKLHKPKATQTEVKPSVRFNLRTSKDPEHEGCYLSVGHSQPLEDCSFNMTAKTFFIIHGWTMSGIFENWLHKLVSALHTREKDANVVVVDWLPLAHQLYTDAVNNTRVVGHSIARMLDWLQVLGDERESPVTSRISNPIFLRNAGHASVAMNFWSLIKIFEIKSFIEL

SEQ ID NO: 7911 - protein, 390 aa, Homo Sapiens
MLSFSRDRLPSGRRVSGKCPPPPLGMAVGRGGSGCPEEGSGRKLELLESQLPAERAREEAGPSVRRPRDKLHKPKATQTEVKPSVRFNLRTSKDPEHEGCYLSVGHSQPLEDCSFNMTAKTFFIIHGWTMSGIFENWLHKLVSALHTREKDANVVVVDWLPLAHQLYTDAVNNTRVVGHSIARMLDWLQEKDDFSLGNVHLIGYSLGAHVAGYAGNFVKGTVGRITGLDPAGPMFEGADIHKRLSPDDADFVDVLHTYTRSFGLSIGIQMPVGHIDIYPNGGDFQPGCGLNDVLGSIAYGTITEVVKCEHERAVHLFVDSLVNQDKPSFAFQCTDSNRFKKGICLSCRKNRCNSIGYNAKKMRNKRNSKMYLKTRAGMPFRGNLQSLECP

SEQ ID NO: 7912 - protein, 426 aa, Homo Sapiens
MSNSVPLLCFWSLCYCFAAGSPVPFGPEGRLEDKLHKPKATQTEVKPSVRFNLRTSKDPEHEGCYLSVGHSQPLEDCSFNMTAKTFFIIHGWTMSGIFENWLHKLVSALHTREKDANVVVVDWLPLAHQLYTDAVNNTRVVGHSIARMLDWLQEKDDFSLGNVHLIGYSLGAHVAGYAGNFVKGTVGRITAITEVVKCEHERAVHLFVDSLVNQDKPSFAFQCTDSNRFKKGICLSCRKNRCNSIGYNAKKMRNKRNSKMYLKTRAGMPFRVYHYQMKIHVFSYKNMGEIEPTFYVTLYGTNADSQTLPLEIVERIEQNATNTFLVYTEEDLGDLLKIQLTWEGASQSWYNLWKEFRSYLSQPRNPGRELNIRRIRVKSGETQRKLTFCTEDPENTSISPGRELWFRKCRDGWRMKNETSPTVELP

SEQ ID NO: 7913 - protein, 500 aa, Homo Sapiens
MSNSVPLLCFWSLCYCFAAGSPVPFGPEGRLEDKLHKPKATQTEVKPSVRFNLRTSKDPEHEGCYLSVGHSQPLEDCSFNMTAKTFFIIHGWTMSGIFENWLHKLVSALHTREKDANVVVVDWLPLAHQLYTDAVNNTRVVGHSIARMLDWLQEKDDFSLGNVHLIGYSLGAHVAGYAGNFVKGTVGRITGLDPAGPMFEGADIHKRLSPDDADFVDVLHTYTRSFGLSIGIQMPVGHIDIYPNGGDFQPGCGLNDVLGSIAYGTITEVVKCEHERAVHLFVDSLVNQDKPSFAFQCTDSNRFKKGICLSCRKNRCNSIGYNAKKMRNKRNSKMYLKTRAGMPFRVYHYQMKIHVFSYKNMGEIEPTFYVTLYGTNADSQTLPLEIVERIEQNATNTFLVYTEEDLGDLLKIQLTWEGASQSWYNLWKEFRSYLSQPRNPGRELNIRRIRVKSGETQRKLTFCTEDPENTSISPGRELWFRKCRDGWRMKNETSPTVELP

SEQ ID NO: 7914 - protein, 354 aa, Homo Sapiens
MSNSVPLLCFWSLCYCFAAGSPVPFGPEGRLEDKLHKPKATQTEVKPSVRFNLRTSKDPEHEGCYLSVGHSQPLEDCSFNMTAKTFFIIHGWTMSGIFENWLHKLVSALHTREKDANVVVVDWLPLAHQLYTDAVNNTRVVGHSIARMLDWLQEKDDFSLGNVHLIGYSLGAHVAGYAGNFVKGTVGRITGLDPAGPMFEGADIHKRLSPDDADFVDVLHTYTRSFGLSIGIQMPVGHIDIYPNGGDFQPGCGLNDVLGSIAYGTITEVVKCEHERAVHLFVDSLVNQDKPSFAFQCTDSNRFKKGICLSCRKNRCNSIGYNAKKMRNKRNSKMYLKTRAGMPFRGNLQSLECP

SEQ ID NO: 7915 - protein, 24 aa, Homo Sapiens
MTAKTFFIIHGWTMSGIFENWLHK

SEQ ID NO: 7916 - protein, 417 aa, Homo Sapiens
MLRFYLFISLLCLSRSDAEETCPSFTRLSFHSAVVGTGLNVRLMLYTRKNLTCAQTINSSAFGNLNVTKKTTFIVHGFRPTGSPPVWMDDLVKGLLSVEDMNVVVVDWNRGATTLIYTHASSKTRKVAMVLKEFIDQMLAEGASLDDIYMIGVSLGAHISGFVGEMYDGWLGRITALGYKEPLGNIDFYPNGGLDQPGCPKTILGGFQYFKCDHQRSVYLYLSSLRESCTITAYPCDSYQDYRNGKCVSCGTSQKESCPLLGYYADNWKDHLRGKDPPMTKAFFDTAEESPFCMYHYFVDIITWNKNVRRGDITIKLRDKAGNTTESKINHEPTTFQKYHQVSLLARFNQDLDKVAAISLMFSTGSLIGPRYKLRILRMKLRSLAHPERPQLCRYDLVLMENVETVFQPILCPELQL

SEQ ID NO: 7917 - protein, 451 aa, Homo Sapiens
MLRFYLFISLLCLSRSDAEETCPSFTRLSFHSAVVGTGLNVRLMLYTRKNLTCAQTINSSAFGNLNVTKKTTFIVHGFRPTGSPPVWMDDLVKGLLSVEDMNVVVVDWNRGATTLIYTHASSKTRKVAMVLKEFIDQMLAEGASLDDIYMIGVSLGAHISGFVGEMYDGWLGRITGLDPAGPLFNGKPHQDRLDPSDAQFVDVIHSDTDALGYKEPLGNIDFYPNGGLDQPGCPKTILGGFQYFKCDHQRSVYLYLSSLRESCTITAYPCDSYQDYRNGKCVSCGTSQKESCPLLGYYADNWKDHLRGKDPPMTKAFFDTAEESPFCMYHYFVDIITWNKNVRRGDITIKLRDKAGNTTESKINHEPTTFQKYHQVSLLARFNQDLDKVAAISLMFSTGSLIGPRYKLRILRMKLRSLAHPERPQLCRYDLVLMENVETVFQPILCPELQL

SEQ ID NO: 7918 - protein, 47 aa, Homo Sapiens
MLRFYLFISLLCLSRSDASLDMNEESPLFEEGFLQSEIWEIKLIPPK

SEQ ID NO: 7919 - protein, 86 aa, Homo Sapiens
  misc_feature (1)..(1): Xaa can be any naturally occurring amino acid
XDIYMIGVSLGAHISGFVGEMYDGWLGRITGFQYFKCDHQRSVYLYLSSLRESCTITAYPCDSYQDYRNGKCVSCGTSQKESCPLL

SEQ ID NO: 7920 - protein, 73 aa, Homo Sapiens
  misc_feature (1)..(1): Xaa can be any naturally occurring amino acid
XSPFCMYHYFVDIITWNKNVRRGDITIKLRDKAGNTTESKINQISNRPKVQAQDSPNEVKVPCPSGEASAVSV

SEQ ID NO: 7921 - protein, 399 aa, Homo Sapiens
MWQLLAAACWMLLLGSMYGYDKKGNNANPEANMNISQIISYWGYPYEEYDVTTKDGYILGIYRIPHGRGCPGRTAPKPAVYLQHGLIASASNWICNLPNNSLAFLLADSGYDVWLGNSRGNTWSRKHLKLSPKSPEYWAFSLDEMAKYDLPATINFIIEKTGQKRLYYVGHSQGTTIAFIAFSTNPELAKKIKIFFALAPVVTVKYTQSPMKKLTTLSRRVVKVLFGDKMFHPHTLFDQFIATKVCNRKLFRRICSNFLFTLSGFDPQNLNMSRLDVYLSHNPAGTSVQNMLHWAQAVNSGQLQAFDWGNSDQNMMHFHQLTPPLYNITKMEVPTAIWNGGQDIVADPKDVENLLPQIANLIYYKLIPHYNHVDFYLGEDAPQEIYQDLIILMEEYLQN

SEQ ID NO: 7922 - protein, 423 aa, Homo Sapiens
MLETLSRQWIVSHRMEMWLLILVAYMFQRNVNSVHMPTKAVDPEAFMNISEIIQHQGYPCEEYEVATEDGYILSVNRIPRGLVQPKKTGSRPVVLLQHGLVGGASNWISNLPNNSLGFILADAGFDVWMGNSRGNAWSRKHKTLSIDQDEFWAFSYDEMARFDLPAVINFILQKTGQEKIYYVGYSQGTTMGFIAFSTMPELAQKIKMYFALAPIATVKHAKSPGTKFLLLPDMMIKGLFGKKEFLYQTRFLRQLVIYLCGQVILDQICSNIMLLLGGFNTNNMNMSRASVYAAHTLAGTSVQNILHWSQAVNSGELRAFDWGSETKNLEKCNQPTPVRYRVRDMTVPTAMWTGGQDWLSNPEDVKMLLSEVTNLIYHKNIPEWAHVDFIWGLDAPHRMYNEIIHLMQQEETNLSQGRCEAVL

SEQ ID NO: 7923 - protein, 383 aa, Homo Sapiens
MTRPLDRKQSEIIQHQGYPCEEYEVATEDGYILSVNRIPRGLVQPKKTGSRPVVLLQHGLVGGASNWISNLPNNSLGFILADAGFDVWMGNSRGNAWSRKHKTLSIDQDEFWAFSYDEMARFDLPAVINFILQKTGQEKIYYVGYSQGTTMGFIAFSTMPELAQKIKMYFALAPIATVKHAKSPGTKFLLLPDMMIKGLFGKKEFLYQTRFLRQLVIYLCGQVILDQICSNIMLLLGGFNTNNMNMSRASVYAAHTLAGTSVQNILHWSQAVNSGELRAFDWGSETKNLEKCNQPTPVRYRVRDMTVPTAMWTGGQDWLSNPEDVKMLLSEVTNLIYHKNIPEWAHVDFIWGLDAPHRMYNEIIHLMQQEETNLSQGRCEAVL

SEQ ID NO: 7924 - protein, 398 aa, Homo Sapiens
MMWLLLTTTCLICGTLNAGGFLDLENEVNPEVWMNTSEIIIYNGYPSEEYEVTTEDGYILLVNRIPYGRTHARSTGPRPVVYMQHALFADNAYWLENYANGSLGFLLADAGYDVWMGNSRGNTWSRRHKTLSETDEKFWAFSFDEMAKYDLPGVIDFIVNKTGQEKLYFIGHSLGTTIGFVAFSTMPELAQRIKMNFALGPTISFKYPTGIFTRFFLLPNSIIKAVFGTKGFFLEDKKTKIASTKICNNKILWLICSEFMSLWAGSNKKNMNQSRMDVYMSHAPTGSSVHNILHIKQLYHSDEFRAYDWGNDADNMKHYNQSHPPIYDLTAMKVPTAIWAGGHDVLVTPQDVARILPQIKSLHYFKLLPDWNHFDFVWGLDAPQRMYSEIIALMKAYS

SEQ ID NO: 7925 - protein, 288 aa, Homo Sapiens
MAAEGWIWRWGWGRRCLGRPGLLGPGPGPTTPLFLLLLLGSVTADITDGNSEHLKREHSLIKPYQGVGSSSMPLWDFQGSTMLTSQYVRLTPDERSKEGSIWNHQPCFLKDWEMHVHFKVHGTGKKNLHGDGIALWYTRDRLVPDNFHGLAIFLDTYPNDETTERVFPYISVMVNNGSLSYDHSKDGRWTELAGCTADFRNRDHDTFLAVRYSRGRLTVMTDLEDKNEWKNCIDITGVRLPTGYYFGASAGTGDLSDNHDIISMKLFQLMVEHTPDEESIDWTKIEPS

SEQ ID NO: 7926 - protein, 203 aa, Homo Sapiens
MAAEGWIWRWGWGRRCLGRPGLLGPGPGPTTPLFLLLLLGSVTADITDGNSEHLKREHSLIKPYQGVGSSSMPLWDFQGSTMLTSQYVRLTPDERSKEGSIWNHQPCFLKDWEMHVHFKVHGTGKKNLHGDGIALWYTRDRLVPGPVFGSKDNFHGLAIFLDTYPNDETTEHRLDQDRAQRQLPQVAQRQRGRPHGELPQRAP

SEQ ID NO: 7927 - protein, 356 aa, Homo Sapiens
MAAEGWIWRWGWGRRCLGRPGLLGPGPGPTTPLFLLLLLGSVTADITDGNSEHLKREHSLIKPYQGVGSSSMPLWDFQGSTMLTSQYVRLTPDERSKEGSIWNHQPCFLKDWEMHVHFKVHGTGKKNLHGDGIALWYTRDRLVPGPVFGSKDNFHGLAIFLDTYPNDETTERVFPYISVMVNNGSLSYDHSKDGRWTELAGCTADFRNRDHDTFLAVRYSRGRLTVMTDLEDKNEWKNCIDITGVRLPTGYYFGASAGTGDLSDNHDIISMKLFQLMVEHTPDEESIDWTKIEPSVNFLKSPKDNVDDPTGNFRSGPLTGWRVFLLLLCALLGIVVCAVVGAVVFQKRQERNKRFY

SEQ ID NO: 7928 - protein, 325 aa, Homo Sapiens
MAAEGWIWRWGWGRRCLGRPGLLGPGPGPTTPLFLLLLLGSVTADITDGNSEHLKREHSLIKPYQGVGSSSMPLWDFQGSTMLTSQYVRLTPDERSKEGSIWNHQPCFLKDWEMHVHFKVHGTGKKNLHGDGIALWYTRDRLVPGPVFGSKDNFHGLAIFLDTYPNDETTERVFPYISVMVNNGSLSYDHSKDGRWTELAGCTADFRNRDHDTFLAVRYSRGRLTVMTDLEDKNEWKNCIDITGVRLPTGYYFGASAGTGDLSDNHDIISMKLFQLMVEHTPDEESIDWTKIEPSVNFLKSPKAPPFLLPQTTWTTPRGTSAAGP

SEQ ID NO: 7929 - protein, 192 aa, Homo Sapiens
MPLWDFQGSTMLTSQYVRLTPDERSKEGSIWNHQPCFLKDWEMHVHFKVHGTGKKNLHGDGIALWYTRDRLVPGPVFGSKDNFHGLAIFLDTYPNDETTERVFPYISVMVNNGSLSYDHSKDGRWTELAGCTADFRNRDHDTFLAVRYSRGRLTVMTDLEDKNEWKNCIDITGVRLPTGYYFGASAGTGDLS

SEQ ID NO: 7930 - protein, 144 aa, Homo Sapiens
MAIGDHILQQNVNGQTISLYRFLPNIVMQANSTVTVWAAASEAKHQPPSDFLWKEQDKFRASPDCITILCKPNGQAIAWYTPIHWKQAWEKLDADVEFNRCSVVSPTFRKRVFQWTASTATITKEKQDQPKKDISNYQVEQAQV

SEQ ID NO: 7931 - protein, 291 aa, Homo Sapiens
MIGDGEDYFLSLFGDSKKLTAHSNYTQKTLKYFSMILEEVGQFTSSSLGDVEIAEVNVKGLFVKLINSSLDKEMAIGDHILQQNVNGQTISLYRFLPNIVMQANSTVTVWAAASEAKHQPPSDFLWKEQDKFRASPDCITILCKPNGQAIAWYTPIHWKQAWEKLDADVEFNRCSVVSPTFRKRVFQWTASTATITKEKQDQPKKDISNYQVEQAQVLLKREKEIPPTVFPNRSPWCQNPYVSAHPYCPLIEPHNTSTAGGRLDRQPRTRSTRPNRASGSKKKKTSESQKQ

SEQ ID NO: 7932 - protein, 369 aa, Homo Sapiens
MKDTQDIQEASKAMQNKVHEQEDKNEKQKQREDKLGVYSLVHFSPKMLGSVATTLPLSSSNSSGMPLGYYLSSPQISRVTISTTGQLTSKATVGSCSRVENSLDASPFSVPKKQDESPMIGDGEDYFLSLFGDSKKLTAHSNYTQKTLKYFSMILEEVGQFTSSSLGDVEIAEVNVKGLFVKLINSSLDKEMAIGDHILQQNVNGQTISLYRFLPNIVMQANSTVTAIAWYTPIHWKQAWEKLDADVEFNRCSVVSPTFRKRVFQWTASTATITKEKQDQPKKDISNYQVEQAQVLLKREKEIPPTVFPNRSPWCQNPYVSAHPYCPLIEPHNTSTAGGRLDRQPRTRSTRPNRASGSKKKKTSESQKQ

SEQ ID NO: 7933 - protein, 409 aa, Homo Sapiens
MKDTQDIQEASKAMQNKVHEQEDKNEKQKQREDKLGVYSLVHFSPKMLGSVATTLPLSSSNSSGMPLGYYLSSPQISRVTISTTGQLTSKATVGSCSRVENSLDASPFSVPKKQDESPMIGDGEDYFLSLFGDSKKLTAHSNYTQKTLKYFSMILEEVGQFTSSSLGDVEIAEVNVKGLFVKLINSSLDKEMAIGDHILQQNVNGQTISLYRFLPNIVMQANSTVTVWAAASEAKHQPPSDFLWKEQDKFRASPDCITILCKPNGQAIAWYTPIHWKQAWEKLDADVEFNRCSVVSPTFRKRVFQWTASTATITKEKQDQPKKDISNYQVEQAQVLLKREKEIPPTVFPNRSPWCQNPYVSAHPYCPLIEPHNTSTAGGRLDRQPRTRSTRPNRASGSKKKKTSESQKQ

SEQ ID NO: 7934 - protein, 388 aa, Homo Sapiens
MLEGSWINRREDKLGVYSLVHFSPKMLGSVATTLPLSSSNSSGMPLGYYLSSPQISRVTISTTGQLTSKATVGSCSRVENSLDASPFSVPKKQDESPMIGDGEDYFLSLFGDSKKLTAHSNYTQKTLKYFSMILEEVGQFTSSSLGDVEIAEVNVKGLFVKLINSSLDKEMAIGDHILQQNVNGQTISLYRFLPNIVMQANSTVTVWAAASEAKHQPPSDFLWKEQDKFRASPDCITILCKPNGQAIAWYTPIHWKQAWEKLDADVEFNRCSVVSPTFRKRVFQWTASTATITKEKQDQPKKDISNYQVEQAQVLLKREKEIPPTVFPNRSPWCQNPYVSAHPYCPLIEPHNTSTAGGRLDRQPRTRSTRPNRASGSKKKKTSESQKQ

SEQ ID NO: 7935 - protein, 72 aa, Homo Sapiens
MLGSVATTLPLSSSNSSGMPLGYYLSSPQISRVTISTTGQLTSKATVGSCSRVENSLDASPFSVPKKQDESP

SEQ ID NO: 7936 - protein, 166 aa, Homo Sapiens
MLGSVATTLPLSSSNSSGMPLGYYLSSPQISRVTISTTGQLTSKATVGSCSRVENSLDASPFSVPKKQDESPMIGDGEDYFLSLFGDSKKLTAHSNYTQKTLKYFSMILEEVGQFTSSSLGDVEIAEVNVKGLFVKLINSSLDKEMAIGDHILQQNVNGQTISLYR

SEQ ID NO: 7937 - protein, 170 aa, Homo Sapiens
MLGSVATTLPLSSSNSSGMPLGYYLSSPQISRVTISTTGQLTSKATVGSCSRVENSLDASPFSVPKKQDESPMIGDGEDYFLSLFGDSKKLTAHSNYTQKTLKYFSMILEEVGQFTSSSLGDVEIAEVNVKGLFVKLINSSLDKEMAIGDHILQQNVNGQTISLYRFLPN

SEQ ID NO: 7938 - protein, 325 aa, Homo Sapiens
MQQPVRAGDIGVSRVQTHHNASPFSVPKKQDESPMIGDGEDYFLSLFGDSKKLTAHSNYTQKTLKYFSMILEEVGQFTSSSLGDVEIAEVNVKGLFVKLINSSLDKEMAIGDHILQQNVNGQTISLYRFLPNIVMQANSTVTVWAAASEAKHQPPSDFLWKEQDKFRASPDCITILCKPNGQAIAWYTPIHWKQAWEKLDADVEFNRCSVVSPTFRKRVFQWTASTATITKEKQDQPKKDISNYQVEQAQVLLKREKEIPPTVFPNRSPWCQNPYVSAHPYCPLIEPHNTSTAGGRLDRQPRTRSTRPNRASGSKKKKTSESQKQ

SEQ ID NO: 7939 - protein, 105 aa, Homo Sapiens
QWTASTATITKEKQDQPKKDISNYQVEQAQVLLKREKEIPPTVFPNRSPWCQNPYVSAHPYCPLIEPHNTSTAGGRLDRQPRTRSTRPNRASGSKKKKTSESQKQ

SEQ ID NO: 7940 - protein, 163 aa, Homo Sapiens
  misc_feature (1)..(1): Xaa can be any naturally occurring amino acid
XDKFRASPDCITILCKPNGQAIAWYTPIHWKQAWEKLDADVEFNRCSVVSPTFRKRVFQWTASTATITKEKQDQPKKDISNYQVEQAQVLLKREKEIPPTVFPNRSPWCQNPYVSAHPYCPLIEPHNTSTAGGRLDRQPRTRSTRPNRASGSKKKKTSESQKQ

SEQ ID NO: 7941 - protein, 632 aa, Homo Sapiens
MKALLLLVLPWLSPANYIDNVGNLHFLYSELCKGASHYGLTKDRKRRSQDGCPDGCASLTATAPSPEVSAAATISLMTDEPGLDNPAYVSSAEDGQPAISPVDSGRSNRTRARPFERSTIRSRSFKKINRALSVLRRTKSGSAVANHADQGRENSENTTAPEVFPRLYHLIPDGEITSIKINRVDPSESLSIRLVGGSETPLVHIIIQHIYRDGVIARDGRLLPGDIILKVNGMDISNVPHNYAVRLLRQPCQVLWLTVMREQKFRSRNNGQAPDAYRPRDDSFHVILNKSSPEEQLGIKLVRKVDEPGVFIFNVLDGGVAYRHGQLEENDRVLAINGHDLRYGSPESAAHLIQASERRVHLVVSRQVRQRSPDIFQEAGWNSNGSWSPGPGERSNTPKPLHPTITCHEKVVNIQKDPGESLGMTVAGGASHREWDLPIYVISVEPGGVISRDGRIKTGDILLNVDGVELTEVSRSEAVALLKRTSSSIVLKALEVKEYEPQEDCSSPAALDSNHNMAPPSDWSPSWVMWLELPRCLYNCKDIVLRRNTAGSLGFCIVGGYEEYNGNKPFFIKSIVEGTPAYNDGRIRCGDILLAVNGRSTSGMIHACLARLLKELKGRITLTIVSWPGTFL

SEQ ID NO: 7942 - protein, 6 aa, Homo Sapiens
MNQPES

SEQ ID NO: 7943 - protein, 16 aa, Homo Sapiens
MNQPESANDPEPLCAV

SEQ ID NO: 7944 - protein, 90 aa, Homo Sapiens
MNQPESANDPEPLCAVCGQAHSLEENHFYSYPEEVDDDLICHICLQALLDPLDTPCGHTYCTLCLTNFLVEKDFCPMDRKPLVLQHCKKS

SEQ ID NO: 7945 - protein, 99 aa, Homo Sapiens
MNQPESANDPEPLCAVCGQAHSLEENHFYSYPEEVDDDLICHICLQALLDPLDTPCGHTYCTLCLTNFLVEKDFCPMDRKPLVLQHCKKSSILVNKLLN

SEQ ID NO: 7946 - protein, 126 aa, Homo Sapiens
MNQPESANDPEPLCAVCGQAHSLEENHFYSYPEEVDDDLICHICLQALLDPLDTPCGHTYCTLCLTNFLVEKDFCPMDRKPLVLQHCKKSSILVNKLLNKLLVTCPFREHCTQVLQRCDLEHHFQT

SEQ ID NO: 7947 - protein, 728 aa, Homo Sapiens
MNQPESANDPEPLCAVCGQAHSLEENHFYSYPEEVDDDLICHICLQALLDPLDTPCGHTYCTLCLTNFLVEKDFCPMDRKPLVLQHCKKSSILVNKLLNKLLVTCPFREHCTQVLQRCDLEHHFQTSCKGASHYGLTKDRKRRSQDGCPDGCASLTATAPSPEVSAAATISLMTDEPGLDNPAYVSSAEDGQPAISPVDSGRSNRTRARPFERSTIRSRSFKKINRALSVLRRTKSGSAVANHADQGRENSENTTAPEVFPRLYHLIPDGEITSIKINRVDPSESLSIRLVGGSETPLVHIIIQHIYRDGVIARDGRLLPGDIILKVNGMDISNVPHNYAVRLLRQPCQVLWLTVMREQKFRSRNNGQAPDAYRPRDDSFHVILNKSSPEEQLGIKLVRKVDEPGVFIFNVLDGGVAYRHGQLEENDRVLAINGHDLRYGSPESAAHLIQASERRVHLVVSRQVRQRSPDIFQEAGWNSNGSWSPGPGERSNTPKPLHPTITCHEKVVNIQKDPGESLGMTVAGGASHREWDLPIYVISVEPGGVISRDGRIKTGDILLNVDGVELTEVSRSEAVALLKRTSSSIVLKALEVKEYEPQEDCSSPAALDSNHNMAPPSDWSPSWVMWLELPRCLYNCKDIVLRRNTAGSLGFCIVGGYEEYNGNKPFFIKSIVEGTPAYNDGRIRCGDILLAVNGRSTSGMIHACLARLLKELKGRITLTIVSWPGTFL

SEQ ID NO: 7948 - protein, 417 aa, Homo Sapiens
MRFAWTVLLLGPLQLCALVHCAPPAAGQQQPPREPPAAPGAWRQQIQWENNGQVFSLLSLGSQYQPQRRRDPGAAVPGAANASAQQPRTPILLIRDNRTAAARTRTAGSSGVTAGRPRPTARHWFQAGYSTSRAREAGASRAENQTAPGEVPALSNLRPPSRVDGMVGDDPYNPYKYSDDNPYYNYYDTYERPRPGGRYRPGYGTGYFQYGLPDLVADPYYIQASTYVQKMSMYNLRCAAEENCLASTAYRADVRDYDHRVLLRFPQRVKNQGTSDFLPSRPRYSWEWHSCHQHYHSMDEFSHYDLLDANTQRRVAEGHKASFCLEDTSCDYGYHRRFACTAHTQGLSPGCYDTYGADIDCQWIDITDVKPGNYILKVSVNPSYLVPESDYTNNVVRCDIRYTGHHAYASGCTISPY

SEQ ID NO: 7949 - protein, 417 aa, Homo Sapiens; identical to SEQ ID NO: 7948

SEQ ID NO: 7950 - protein, 61 aa, Homo Sapiens
YNPYKYSDDNPYYNYYDTYERPRPGGRYRPGYGTGYFQYVQHTGQMSEIMITGCCSDFPKE

SEQ ID NO: 7951 - protein, 574 aa, Homo Sapiens
MALARGSRQLGALVWGACLCVLVHGQQAQPGQGSDPARWRQLIQWENNGQVYSLLNSGSEYVPAGPQRSESSSRVLLAGAPQAQQRRSHGSPRRRQAPSLPLPGRVGSDTVRGQARHPFGFGQVPDNWREVAVGDSTGMARARTSVSQQRHGGSASSVSASAFASTYRQQPSYPQQFPYPQAPFVSQYENYDPASRTYDQGFVYYRPAGGGVGAGAAAVASAGVIYPYQPRARYEEYGGGEELPEYPPQGFYPAPERPYVPPPPPPPDGLDRRYSHSLYSEGTPGFEQAYPDPGPEAAQAHGGDPRLGWYPPYANPPPEAYGPPRALEPPYLPVRSSDTPPPGGERNGAQQGRLSVGSVYRPNQNGRGLPDLVPDPNYVQASTYVQRAHLYSLRCAAEEKCLASTAYAPEATDYDVRVLLRFPQRVKNQGTADFLPNRPRHTWEWHSCHQHYHSMDEFSHYDLLDAATGKKVAEGHKASFCLEDSTCDFGNLKRYACTSHTQGLSPGCYDTYNADIDCQWIDITDVQPGNYILKVHVNPKYIVLESDFTNNVVRCNIHYTGRYVSATNCKIVQS

SEQ ID NO: 7952 - protein, 431 aa, Homo Sapiens
MALARGSRQLGALVWGACLCVLVHGQQAQPGQGSDPARWRQLIQWENNGQVYSLLNSGSEYVPAGPQRSESSSRVLLAGAPQAQQRRSHGSPRRRQAPSLPLPGRVGSDTVRGQARHPFGFGQVPDNWREVAVGDSTGMARARTSVSQQRHGGSASSVSASAFASTYRQQPSYPQQFPYPQAPFVSQYENYDPASRTYDQGFVYYRPAGGGVGAGAAAVASAGVIYPYQPRARYEEYGGGEELPEYPPQGFYPAPERPYVPPPPPPPDGLDRRYSHSLYSEGTPGFEQAYPDPGPEAAQAHGGDPRLGWYPPYANPPPEAYGPPRALEPPYLPVRSSDTPPPGGERNGAQQGRLSVGSVYRPNQNGRVTPAQTPACPGRKVEGQEQDGQAPGSGTSWGTRDHKDGGSLQTSPGRLTPGLAGERARASLRSP

SEQ ID NO: 7953 - protein, 258 aa, Homo Sapiens
MEASKVLDKSKAAAIGDQSRPLCSRKGLSGGGSGGGPPWRARSQPGHCGSLKPKSSCCFCTPPVPPSCAGPLRGIISPKTGMERPLCSHLCSCLAMLALLSPLSLAQYDSWPHYPEYFQQPAPEYHQPQAPANVAKIQLRLAGQKRKHSEGRVEVYYDGQWGTVCDDDFSIHAAHVVCRELGYVEAKSWTASSSYGKGEGPIWLDNLHCTGNEATLAACTSNGWGVTDCKHTEDVGVVCSDKRIPGFKFDNSLINQIE

SEQ ID NO: 7954 - protein, 218 aa, Homo Sapiens
MEASKVLDKSKAAESSCCFCTPPVPPSCAGPLRGIISPKTGMERPLCSHLCSCLAMLALLSPLSLAQYDSWPHYPEYFQQPAPEYHQPQAPANVAKIQLRLAGQKRKHSEGRVEVYYDGQWGTVCDDDFSIHAAHVVCRELGYVEAKSWTASSSYGKGEGPIWLDNLHCTGNEATLAACTSNGWGVTDCKHTEDVGVVCSDKRIPGFKFDNSLINQIE

SEQ ID NO: 7955 - protein, 101 aa, Homo Sapiens
MERPLCSHLCSCLAMLALLSPLSLAQYDSWPHYPEYFQQPAPEYHQPQAPANVAKIQLHLVLARRCQQQQSGHEWSEVLGNGAVPGALPPRRGGRGLPPGR

SEQ ID NO: 7956 - protein, 96 aa, Homo Sapiens
MERPLCSHLCSCLAMLALLSPLSLAQYDSWPHYPEYFQQPAPEYHQPQAPANVAKIQLRLAGQKRKHSEGRVEVYYDGQWGTVCDDDFSIHAAHVV

SEQ ID NO: 7957 - protein, 139 aa, Homo Sapiens
MERPLCSHLCSCLAMLALLSPLSLAQYDSWPHYPEYFQQPAPEYHQPQAPANVAKIQLRLAGQKRKHSEGRVEVYYDGQWGTVCDDDFSIHAAHVVCRELGYVEAKSWTASSSYGKGEGPIWLDNLHCTGNEATLAACT

SEQ ID NO: 7958 - protein, 151 aa, Homo Sapiens
MERPLCSHLCSCLAMLALLSPLSLAQYDSWPHYPEYFQQPAPEYHQPQAPANVAKIQLRLAGQKRKHSEGRVEVYYDGQWGTVCDDDFSIHAAHVVCRELGYVEAKSWTASSSYGKGEGPIWLDNLHCTGNEATLAACTSNGWGVTDCKHT

SEQ ID NO: 7959 - protein, 774 aa, Homo Sapiens
MERPLCSHLCSCLAMLALLSPLSLAQYDSWPHYPEYFQQPAPEYHQPQAPANVAKIQLRLAGQKRKHSEGRVEVYYDGQWGTVCDDDFSIHAAHVVCRELGYVEAKSWTASSSYGKGEGPIWLDNLHCTGNEATLAACTSNGWGVTDCKHTEDVGVVCSDKRIPGFKFDNSLINQIENLNIQVEDIRIRAILSTYRKRTPVMEGYVEVKEGKTWKQICDKHWTAKNSRVVCGMFGFPGERTYNTKVYKMFASRRKQRYWPFSMDCTGTEAHISSCKLGPQVSLDPMKNVTCENGLPAVVSCVPGQVFSPDGPSRFRKAYKPEQPLVRLRGGAYIGEGRVEVLKNGEWGTVCDDKWDLVSASVVCRELGFGSAKEAVTGSRLGQGIGPIHLNEIQCTGNEKSIIDCKFNAESQGCNHEEDAGVRCNTPAMGLQKKLRLNGGRNPYEGRVEVLVERNGSLVWGMVCGQNWGIVEAMVVCRQLGLGFASNAFQETWYWHGDVNSNKVVMSGVKCSGTELSLAHCRHDGEDVACPQGGVQYGAGVACSETAPDLVLNAEMVQQTTYLEDRPMFMLQCAMEENCLSASAAQTDPTTGYRRLLRFSSQIHNNGQSDFRPKNGRHAWIWHDCHRHYHSMEVFTHYDLLNLNGTKVAEGHKASFCLEDTECEGDIQKNYECANFGDQGITMGCWDMYRHDIDCQWVDITDVPPGDYLFQVVINPNFEVAESDYSNNIMKCRSRYDGHRIWMYNCHIGGSFSEETEKKFEHFSGLLNNQLSPQ

SEQ ID NO: 7960 - protein, 67 aa, Homo Sapiens
RIRAILSTYRKRTPVMEGYVEVKEGKTWKQICDKHWTAKNSRVVCGMFGFPGERTYNTKVYNNPWCD

SEQ ID NO: 7961 - protein, 207 aa, Homo Sapiens
  misc_feature (1)..(1): Xaa can be any naturally occurring amino acid
XENGLPAVVSCVPGQVFSPDGPSRFRKAYKPEQDRVSLQQPLVRLRGGAYIGEGRVEVLKNGEWGTVCDDKWDLVSASVVCRELGFGSAKEAVTGSRLGQGIGPIHLNEIQCTGNEKSIIDCKFNAESQGCNHEEDAGVRCNTPAMGLQKKLRLNGGRNPYEGRVEVLVERNGSLVWGMVCGQNWGIVEAMVVCRQLGLGFASNAFQ

SEQ ID NO: 7962 - protein, 586 aa, Homo Sapiens
MRPVSVWQWSPWGLLLCLLCSSCLGSPSPSTGPEKKAGSQGLRFRLAGFPRKPYEGRVEIQRAGEWGTICDDDFTLQAAHILCRELGFTEATGWTHSAKYGPGTGRIWLDNLSCSGTEQSVTECASRGWGNSDCTHDEDAGVICKDQRLPGFSDSNVIEARVRLKGGAHPGEGRVEVLKASTWGTVCDRKWDLHAASVVCRELGFGSAREALSGARMGQGMGAIHLSEVRCSGQELSLWKCPHKNITAEDCSHSQDAGVRCNLPYTGAETRIRLSGGRSQHEGRVEVQIGGPGPLRWGLICGDDWGTLEAMVACRQLGLGYANHGLQETWYWDSGNITEVVMSGVRCTGTELSLDQCAHHGTHITCKRTGTRFTAGVICSETASDLLLHSALVQETAYIEDRPLHMLYCAAEENCLASSARSANWPYGHRRLLRFSSQIHNLGRADFRPKAGRHSWVWHECHGHYHSMDIFTHYDILTPNGTKVAEGHKASFCLEDTECQEDVSKRYECANFGEQGITVGCWDLYRHDIDCQWIDITDVKPGNYILQVVINPNFEVAESDFTNNAMKCNCKYDGHRIWVHNCHIGI

SEQ ID NO: 7963 - protein, 608 aa, Homo Sapiens
MRPVSVWQWSPWGLLLCLLCSSCLGSPSPSTGPEKKAGSQGLRFRLAGFPRKPYEGRVEIQRAGEWGTICDDDFTLQAAHILCRELGFTEATGWTHSAKYGPGTGRIWLDNLSCSGTEQSVTECASRGWGNSDCTHDEDAGVICKDQRLPGFSDSNVIEARVRLKGGAHPGEGRVEVLKASTWGTVCDRKWDLHAASVVCRELGFGSAREALSGARMGQGMGAIHLSEVRCSGQELSLWKCPHKNITAEDCSHSQDAGVRCNLPYTGAETRIRLSGGRSQHEGRVEVQIGGPGPLRWGLICGDDWGTLEAMVACRQLGLGYANHGLQETWYWDSGNITEVVMSGVRCTGTELSLDQCAHHGTHITCKRTGTRFTAGVICSETASDLLLHSALVQETAYIEDRPLHMLYCAAEENCLASSARSANWPYGHRRLLRFSSQIHNLGRADFRPKAGRHSWVWHECHGHYHSMDIFTHYDILTPNGTKVAEGHKASFCLEDTECQEDVSKRYECANFGEQGITVGCWDLYRHDIDCQWIDITDVKPGNYILQVVINPNFEVAESDFTNNAMKCNCKYDGHRIWVHNCHIGDAFSEEANRRFERYPGQTSNQII

SEQ ID NO: 7964 - protein, 753 aa, Homo Sapiens
MRPVSVWQWSPWGLLLCLLCSSCLGSPSPSTGPEKKAGSQGLRFRLAGFPRKPYEGRVEIQRAGEWGTICDDDFTLQAAHILCRELGFTEATGWTHSAKYGPGTGRIWLDNLSCSGTEQSVTECASRGWGNSDCTHDEDAGVICKDQRLPGFSDSNVIEVEHHLQVEEVRIRPAVGWGRRPLPVTEGLVEVRLPDGWSQVCDKGWSAHNSHVVCGMLGFPSEKRVNAAFYRLLAQRQQHSFGLHGVACVGTEAHLSLCSLEFYRANDTARCPGGGPAVVSCVPGPVYAASSGQKKQQQSKPQGEARVRLKGGAHPGEGRVEVLKASTWGTVCDRKWDLHAASVVCRELGFGSAREALSGARMGQGMGAIHLSEVRCSGQELSLWKCPHKNITAEDCSHSQDAGVRCNLPYTGAETRIRLSGGRSQHEGRVEVQIGGPGPLRWGLICGDDWGTLEAMVACRQLGLGYANHGLQETWYWDSGNITEVVMSGVRCTGTELSLDQCAHHGTHITCKRTGTRFTAGVICSETASDLLLHSALVQETAYIEDRPLHMLYCAAEENCLASSARSANWPYGHRRLLRFSSQIHNLGRADFRPKAGRHSWVWHECHGHYHSMDIFTHYDILTPNGTKVAEGHKASFCLEDTECQEDVSKRYECANFGEQGITVGCWDLYRHDIDCQWIDITDVKPGNYILQVVINPNFEVAESDFTNNAMKCNCKYDGHRIWVHNCHIGDAFSEEANRRFERYPGQTSNQII

SEQ ID NO: 7965 - protein, 303 aa, Homo Sapiens
MRPVSVWQWSPWGLLLCLLCSSCLGSPSPSTGPEKKAGSQGLRFRLAGFPRKPYEGRVEIQRAGEWGTICDDDFTLQAAHILCRELGFTEATGWTHSAKYGPGTGRIWLDNLSCSGTEQSVTECASRGWGNSDCTHDEDAGVICKDQRLPGFSDSNVIEVEHHLQVEEVRIRPAVGWGRRPLPVTEGLVEVRLPDGWSQVCDKGWSAHNSHVVCGMLGFPSEKRVNAAFYRLLAQRQQHSFGLHGVACVGTEAHLSLCSLEFYRANDTARCPGGGPAVVSCVPGPVYAASSGQKKQQQSKPQG

SEQ ID NO: 7966 - protein, 471 aa, Homo Sapiens
MRPVSVWQWSPWGLLLCLLCSSCLGSPSPSTGPEKKAGSQGLRFRLAGFPRKPYEGRVEIQRAGEWGTICDDDFTLQAAHILCRELGFTEATGWTHSAKYGPGTGRIWLDNLSCSGTEQSVTECASRGWGNSDCTHDEDAGVICKDQRLPGFSDSNVIEVEHHLQVEEVRIRPAVGWGRRPLPVTEGLVEVRLPDGWSQVCDKGWSAHNSHVVCGMLGFPSEKRVNAAFYRLLAQRQQHSFGLHGVACVGTEAHLSLCSLEFYRANDTARCPGGGPAVVSCVPGPVYAASSGQKKQQQSKPQGEARVRLKGGAHPGEGRVEVLKASTWGTVCDRKWDLHAASVVCRELGFGSAREALSGARMGQDVSKRYECANFGEQGITVGCWDLYRHDIDCQWIDITDVKPGNYILQVVINPNFEVAESDFTNNAMKCNCKYDGHRIWVHNCHIGDAFSEEANRRFERYPGQTSNQII

SEQ ID NO: 7967 - protein, 697 aa, Homo Sapiens
MRPVSVWQWSPWGLLLCLLCSSCLGSPSPSTGPEKKAGSQGLRFRLAGFPRKPYEGRVEIQRAGEWGTICDDDFTLQAAHILCRELGFTEATGWTHSAKYGPGTGRIWLDNLSCSGTEQSVTECASRGWGNSDCTHDEDAGVICKDQRLPGFSDSNVIEVEHHLQVEEVRIRPAVGWGRRPLPVTEGLVEVRLPDGWSQVCDKGWSAHNSHVVCGMLGFPSEKRVNAAFYRLLAQRQQHSFGLHGVACVGTEAHLSLCSLEFYRANDTARCPGGGPAVVSCVPGPVYAASSGQKKQQQSKPQGEARVRLKGGAHPGEGRVEVLKASTWGTVCDRKWDLHAASVVCRELGFGSAREALSGARMGQGMGAIHLSEVRCSGQELSLWKCPHKNITAEDCSHSQDAGVRCNLPYTGAETRETWYWDSGNITEVVMSGVRCTGTELSLDQCAHHGTHITCKRTGTRFTAGVICSETASDLLLHSALVQETAYIEDRPLHMLYCAAEENCLASSARSANWPYGHRRLLRFSSQIHNLGRADFRPKAGRHSWVWHECHGHYHSMDIFTHYDILTPNGTKVAEGHKASFCLEDTECQEDVSKRYECANFGEQGITVGCWDLYRHDIDCQWIDITDVKPGNYILQVVINPNFEVAESDFTNNAMKCNCKYDGHRIWVHNCHIGDAFSEEANRRFERYPGQTSNQII

SEQ ID NO: 7968 - protein, 180 aa, Homo Sapiens
  misc_feature (1)..(1): Xaa can be any naturally occurring amino acid
XRQRLERPQQPRGLRDAGLPQRKEGQRGLLQARVRLKGGAHPGEGRVEVLKASTWGTVCDRKWDLHAASVVCRELGFGSAREALSGARMGQGMGAIHLSEVRCSGQELSLWKCPHKNITAEDCSHSQDAGVRCNLPYTGAETRIRLSGGRSQHEGRVEVQIGGPGPLRWGLICGDDWGTL

SEQ ID NO: 7969 - protein, 756 aa, Homo Sapiens
MAWSPPATLFLFLLLLGQPPPSRPQSLGTTKLRLVGPESKPEEGRLEVLHQGQWGTVCDDNFAIQEATVACRQLGFEAALTWAHSAKYGQGEGPIWLDNVRCVGTESSLDQCGSNGWGVSDCSHSEDVGVICHPRRHRGYLSETVSNALGPQGRRLEEVRLKPILASAKQHSPVTEGAVEVKYEGHWRQVCDQGWTMNNSRVVCGMLGFPSEVPVDSHYYRKVWDLKMRDPKSRLKSLTNKNSFWIHQVTCLGTEPHMANCQVQVAPARGKLRPACPGGMHAVVSCVAGPHFRPPKTKPQRKGSWAEEPRVRLRSGAQVGEGRVEVLMNRQWGTVCDHRWNLISASVVCRQLGFGSAREALFGARLGQGLGPIHLSEVRCRGYERTLSDCPALEGSQNGCQHENDAAVRCNVPNMGFQNQVRLAGGRIPEEGLLEVQVEVNGVPRWGSVCSENWGLTEAMVACRQLGLGFAIHAYKETWFWSGTPRAQEVVMSGVRCSGTELALQQCQRHGPVHCSHGGGRFLAGVSCMDSAPDLVMNAQLVQETAYLEDRPLSQLYCAHEENCLSKSADHMDWPYGYRRLLRFSTQIYNLGRTDFRPKTGRDSWVWHQCHRHYHSIEVFTHYDLLTLNGSKVAEGHKASFCLEDTNCPTGLQRRYACANFGEQGVTVGCWDTYRHDIDCQWVDITDVGPGNYIFQVIVNPHYEVAESDFSNNMLQCRCKYDGHRVWLHNCHTGNSYPANAELSLEQEQRLRNNLI

SEQ ID NO: 7970 - protein, 2040 aa, Homo Sapiens
MEHKEVVLLLLLFLKSAAPEQSHVVQDCYHGDGQSYRGTYSTTVTGRTCQAWSSMTPHQHNRTTENYPNAGLIMNYCRNPDAVAAPYCYTRDPGVRWEYCNLTQCSDAEGTAVAPPTVTPVPSLEAPSEQAPTEQRPGVQECYHGNGQSYRGTYSTTVTGRTCQAWSSMTPHSHSRTPEYYPNAGLIMNYCRNPDAVAAPYCYTRDPGVRWEYCNLTQCSDAEGTAVAPPTVTPVPSLEAPSEQAPTEQRPGVQECYHGNGQSYRGTYSTTVTGRTCQAWSSMTPHSHSRTPEYYPNAGLIMNYCRNPDAVAAPYCYTRDPGVRWEYCNLTQCSDAEGTAVAPPTVTPVPSLEAPSEQAPTEQRPGVQECYHGNGQSYRGTYSTTVTGRTCQAWSSMTPHSHSRTPEYYPNAGLIMNYCRNPDAVAAPYCYTRDPGVRWEYCNLTQCSDAEGTAVAPPTVTPVPSLEAPSEQAPTEQRPGVQECYHGNGQSYRGTYSTTVTGRTCQAWSSMTPHSHSRTPEYYPNAGLIMNYCRNPDAVAAPYCYTRDPGVRWEYCNLTQCSDAEGTAVAPPTVTPVPSLEAPSEQAPTEQRPGVQECYHGNGQSYRGTYSTTVTGRTCQAWSSMTPHSHSRTPEYYPNAGLIMNYCRNPDAVAAPYCYTRDPGVRWEYCNLTQCSDAEGTAVAPPTVTPVPSLEAPSEQAPTEQRPGVQECYHGNGQSYRGTYSTTVTGRTCQAWSSMTPHSHSRTPEYYPNAGLIMNYCRNPDAVAAPYCYTRDPGVRWEYCNLTQCSDAEGTAVAPPTVTPVPSLEAPSEQAPTEQRPGVQECYHGNGQSYRGTYSTTVTGRTCQAWSSMTPHSHSRTPEYYPNAGLIMNYCRNPDPVAAPYCYTRDPSVRWEYCNLTQCSDAEGTAVAPPTITPIPSLEAPSEQAPTEQRPGVQECYHGNGQSYQGTYFITVTGRTCQAWSSMTPHSHSRTPAYYPNAGLIKNYCRNPDPVAAPWCYTTDPSVRWEYCNLTRCSDAEWTAFVPPNVILAPSLEAFFEQALTEETPGVQDCYYHYGQSYRGTYSTTVTGRTCQAWSSMTPHQHSRTPENYPNAGLTRNYCRNPDAEIRPWCYTMDPSVRWEYCNLTQCLVTESSVLATLTVVPDPSTEASSEEAPTEQSPGVQDCYHGDGQSYRGSFSTTVTGRTCQSWSSMTPHWHQRTTEYYPNGGLTRNYCRNPDAEISPWCYTMDPNVRWEYCNLTQCPVTESSVLATSTAVSEQAPTEQSPTVQDCYHGDGQSYRGSFSTTVTGRTCQSWSSMTPHWHQRTTEYYPNGGLTRNYCRNPDAEIRPWCYTMDPSVRWEYCNLTQCPVMESTLLTTPTVVPVPSTELPSEEAPTENSTGVQDCYRGDGQSYRGTLSTTITGRTCQSWSSMTPHWHRRIPLYYPNAGLTRNYCRNPDAEIRPWCYTMDPSVRWEYCNLTRCPVTESSVLTTPTVAPVPSTEAPSEQAPPEKSPVVQDCYHGDGRSYRGISSTTVTGRTCQSWSSMIPHWHQRTPENYPNAGLTENYCRNPDSGKQPWCYTTDPCVRWEYCNLTQCSETESGVLETPTVVPVPSMEAHSEAAPTEQTPVVRQCYHGNGQSYRGTFSTTVTGRTCQSWSSMTPHRHQRTPENYPNDGLTMNYCRNPDADTGPWCFTMDPSIRWEYCNLTRCSDTEGTVVAPPTVIQVPSLGPPSEQDCMFGNGKGYRGKKATTVTGTPCQEWAAQEPHRHSTFIPGTNKWAGLEKNYCRNPDGDINGPWCYTMNPRKLFDYCDIPLCASSSFDCGKPQVEPKKCPGSIVGGCVAHPHSWPWQVSLRTRFGKHFCGGTLISPEWVLTAAHCLKKSSRPSSYKVILGAHQEVNLESHVQEIEVSRLFLEPTQADIALLKLSRPAVITDKVMPACLPSPDYMVTARTECYITGWGETQGTFGTGLLKEAQLLVIENEVCNHYKYICAEHLARGTDSCQGDSGGPLVCFEKDKYILQGVTSWGLGCARPNKPGVYARVSRFVTWIEGMMRNN

SEQ ID NO: 7971 - protein, 571 aa, Homo Sapiens
SGLIMNYCRNPDAVAAPYCYTRDPGVRWEYCNLTQCSDAEGTAVAPPTVTPVPSLEAPSEQAPTEQRPGVQECYHGNGQSYRGTYSTTVTGRTCQAWSSMTPHSHSRTPEYYPNAGLIMNYCRNPDAVAAPYCYTRDPGVRWEYCNLTQCSDAEGTAVAPPTVTPVPSLEAPSEQAPTEQRPGVQECYHGNGQSYRGTYSTTVTGRTCQAWSSMTPHSHSRTPEYYPNAGLIMNYCRNPDAVAAPYCYTRDPGVRWEYCNLTQCSDAEGTAVAPPTVTPVPSLEAPSEQAPTEQRPGVQECYHGNGQSYRGTYSTTVTGRTCQAWSSMTPHSHSRTPEYYPNAGLIMNYCRNPDAVAAPYCYTRDPGVRWEYCNLTQCSDAEGTAVAPPTVTPVPSLEAPSEQAPTEQRPGVQECYHGNGQSYRGTYSTTVTGRTCQAWSSMTPHSHSRTPEYYPNAGLIMNYCRNPDAVAAPYCYTRDPGVRWEYCNLTQCSDAEGTAVAPPTVTPVPSLEAPSEQAPTEQRPGVQECYHGNGQSYRGTYSTTVTGRTCQAWSSMTPHSHSRTPEYYPNA

SEQ ID NO: 7972 - protein, 613 aa, Homo Sapiens
SGLIMNYCRNPDAVAAPYCYTRDPGVRWEYCNLTQCSDAEGTAVAPPTVTPVPSLEAPSEQAPTEQRPGVQECYHGNGQSYRGTYSTTVTGRTCQAWSSMTPHSHSRTPEYYPNAGLIMNYCRNPDPVAAPYCYTRDPSVRWEYCNLTQCSDAEGTAVAPPTITPIPSLEAPSEQAPTEQRPGVQECYHGNGQSYQGTYFITVTGRTCQAWSSMTPHSHSRTPAYYPNAGLIKNYCRNPDPVAAPWCYTTDPSVRWEYCNLTRCSDAEWTAFVPPNVILAPSLEAFFEQALTEETPGVQDCYYHYGQSYRGTYSTTVTGRTCQAWSSMTPHQHSRTPENYPNAGLTRNYCRNPDAEIRPWCYTMDPSVRWEYCNLTQCLVTESSVLATLTVVPDPSTEASSEEAPTEQSPGVQDCYHGDGQSYRGSFSTTVTGRTCQSWSSMTPHWHQRTTEYYPNGGLTRNYCRNPDAEISPWCYTMDPNVRWEYCNLTQCPVTESSVLATSTAVSEQAPTEQSPTVQDCYHGDGQSYRGSFSTTVTGRTCQSWSSMTPHWHQRTTEYYPNGGLTRNYCRNPDAEIRPWCYTMDPSVRWEYCNLTQCPVMESTLLTTPTVVP

SEQ ID NO: 7973 - protein, 39 aa, Homo Sapiens
MESKALLVLTLAVWLQSLTASRGGVAAADLILKLQIFKF

SEQ ID NO: 7974 - protein, 106 aa, Homo Sapiens
MESKALLVLTLAVWLQSLTASRGGVAAADQRRDFIDIESKFALRTPEDTAEDTCHLIPGVAESVATCHFNHSSKTFMVIHGWTVTGMYESWVPKLVAALYKREPDS

SEQ ID NO: 7975 - protein, 130 aa, Homo Sapiens
MESKALLVLTLAVWLQSLTASRGGVAAADQRRDFIDIESKFALRTPEDTAEDTCHLIPGVAESVATCHFNHSSKTFMVIHGWTVTGMYESWVPKLVAALYKREPDSNVIVVDWLSRAQEHYPVSAGYTKL

SEQ ID NO: 7976 - protein, 475 aa, Homo Sapiens
MESKALLVLTLAVWLQSLTASRGGVAAADQRRDFIDIESKFALRTPEDTAEDTCHLIPGVAESVATCHFNHSSKTFMVIHGWTVTGMYESWVPKLVAALYKREPDSNVIVVDWLSRAQEHYPVSAGYTKLVGQDVARFINWMEEEFNYPLDNVHLLGYSLGAHAAGIAGSLTNKKVNRITGLDPAGPNFEYAEAPSRLSPDDADFVDVLHTFTRGSPGRSIGIQKPVGHVDIYPNGGTFQPGCNIGEAIRVIAERGLGDVDQLVKCSHERSIHLFIDSLLNEENPSKAYRCSSKEAFEKGLCLSCRKNRCNNLGYEINKVRAKRSSKMYLKTRSQMPYKVFHYQVKIHFSGTESETHTNQAFEISLYGTVAESENIPFTLPEVSTNKTYSFLIYTEVDIGELLMLKLKWKSDSYFSWSDWWSSPGFAIQKIRVKAGETQKKVIFCSREKVSHLQKGKAPAVFVKCHDKSLNKKSG

SEQ ID NO: 7977 - protein, 115 aa, Homo Sapiens
MVIHGWTVTGMYESWVPKLVAALYKREPDSNVIVVDWLSRAQEHYPVSAGYTKLVGQDVARFINWMEEEFNYPLDNVHLLGYSLGAHAAGIAGSLTNKKVNRITGLDPAGPNFEY

SEQ ID NO: 7978 - protein, 117 aa, Homo Sapiens
FPPNDPKAGTQGKCMPFFRAGFVCPTPPYKSLAREQINALTSFLDASFVYSSEPSLASRLRNLSSPLGLMAVNQEVSDHGLPYLPYDSKKPSPCEFINTTARVPCFLAGKETEAQKC

SEQ ID NO: 7979 - protein, 95 aa, Homo Sapiens
GCGAPAPVVRCDPCSPYRTITGDCNNRRKPALGAANRALARWLPAEYEDGLSLPFGWTPGKTRNGFPLPLAREVSNKIVGYLNEEGVLDQNRSTL

SEQ ID NO: 7980 - protein, 712 aa, Homo Sapiens
MRVLLHLPALLASLILLQAAASTTRAQTTRTSAISDTVSQAKVQVNKAFLDSRTRLKTAMSSETPTSRQLSEYLKHAKGRTRTAIRNGQVWEESLKRLRQKASLTNVTDPSLDLTSLSLEVGCGAPAPVVRCDPCSPYRTITGDCNNRRKPALGAANRALARWLPAEYEDGLSLPFGWTPGKTRNGFPLPLAREVSNKIVGYLNEEGVLDQNRSLLFMQWGQIVDHDLDFAPDTELGSSEYSKAQCDEYCIQGDNCFPIMFPPNDPKAGTQGKCMPFFRAGFVCPTPPYKSLAREQINALTSFLDASFVYSSEPSLASRLRNLSSPLGLMAVNQEVSDHGLPYLPYDSKKPSPCEFINTTARVPCFLAGDSRASEHILLATSHTLFLREHNRLARELKRLNPQWDGEKLYQEARKILGAFVQIITFRDYLPILLGDHMQKWIPPYQGYSESVDPRISNVFTFAFRFGHLEVPSSMFRLDENYQPWGPEPELPLHTLFFNTWRMVKDGGIDPLVRGLLAKKSKLMKQNKMMTGELRNKLFQPTHRIHGFDLAAINTQRCRDHGQPGYNSWRAFCDLSQPQTLEELNTVLKSKMLAKKLLGLYGTPDNIDIWIGAIAEPLVERGRVGPLLACLLGKQFQQIRDGDRFWWENPGVFTNEQKDSLQKMSFSRLVCDNTRITKVPRDPFWANSYPYDFVDCSAIDKLDLSPWASVKN

SEQ ID NO: 7981 - protein, 629 aa, Homo Sapiens
MRVLLHLPALLASLILLQAAASTTRDPSLDLTSLSLEVGCGAPAPVVRCDPCSPYRTITGDCNNRRKPALGAANRALARWLPAEYEDGLSLPFGWTPGKTRNGFPLPLAREVSNKIVGYLNEEGVLDQNRSLLFMQWGQIVDHDLDFAPDTELGSSEYSKAQCDEYCIQGDNCFPIMFPPNDPKAGTQGKCMPFFRAGFVCPTPPYKSLAREQINALTSFLDASFVYSSEPSLASRLRNLSSPLGLMAVNQEVSDHGLPYLPYDSKKPSPCEFINTTARVPCFLAGDSRASEHILLATSHTLFLREHNRLARELKRLNPQWDGEKLYQEARKILGAFVQIITFRDYLPILLGDHMQKWIPPYQGYSESVDPRISNVFTFAFRFGHLEVPSSMFRLDENYQPWGPEPELPLHTLFFNTWRMVKDGGIDPLVRGLLAKKSKLMKQNKMMTGELRNKLFQPTHRIHGFDLAAINTQRCRDHGQPGYNSWRAFCDLSQPQTLEELNTVLKSKMLAKKLLGLYGTPDNIDIWIGAIAEPLVERGRVGPLLACLLGKQFQQIRDGDRFWWENPGVFTNEQKDSLQKMSFSRLVCDNTRITKVPRDPFWANSYPYDFVDCSAIDKLDLSPWASVKN

SEQ ID NO: 7982 - protein, 629 aa, Homo Sapiens; identical to SEQ ID NO: 7981

SEQ ID NO: 7983 - protein, 123 aa, Homo Sapiens
MSSETPTSRQLSEYLKHAKGRTRTAIRNGQVWEESLKRLRQKASLTNVTDPSLDLTSLSLEVGCGAPAPVVRCDPCSPYRTITGDCNNRRKPALGAANRALARWLPAEYEDGLSLPFGWTPGK

SEQ ID NO: 7984 - protein, 653 aa, Homo Sapiens
MSSETPTSRQLSEYLKHAKGRTRTAIRNGQVWEESLKRLRQKASLTNVTDPSLDLTSLSLEVGCGAPAPVVRCDPCSPYRTITGDCNNRRKPALGAANRALARWLPAEYEDGLSLPFGWTPGKTRNGFPLPLAREVSNKIVGYLNEEGVLDQNRSLLFMQWGQIVDHDLDFAPDTELGSSEYSKAQCDEYCIQGDNCFPIMFPPNDPKAGTQGKCMPFFRAGFVCPTPPYKSLAREQINALTSFLDASFVYSSEPSLASRLRNLSSPLGLMAVNQEVSDHGLPYLPYDSKKPSPCEFINTTARVPCFLAGDSRASEHILLATSHTLFLREHNRLARELKRLNPQWDGEKLYQEARKILGAFVQIITFRDYLPILLGDHMQKWIPPYQGYSESVDPRISNVFTFAFRFGHLEVPSSMFRLDENYQPWGPEPELPLHTLFFNTWRMVKDGGIDPLVRGLLAKKSKLMKQNKMMTGELRNKLFQPTHRIHGFDLAAINTQRCRDHGQPGYNSWRAFCDLSQPQTLEELNTVLKSKMLAKKLLGLYGTPDNIDIWIGAIAEPLVERGRVGPLLACLLGKQFQQIRDGDRFWWENPGVFTNEQKDSLQKMSFSRLVCDNTRITKVPRDPFWANSYPYDFVDCSAIDKLDLSPWASVKN

SEQ ID NO: 7985 - protein, 69 aa, Homo Sapiens
MKNPMLEVVSLLLEKLLLISNFTLFSSGAAGEDKGRNSFYETSSFHRGDVLEVPRTHLTHYGIYLGDNR

SEQ ID NO: 7986 - protein, 230 aa, Homo Sapiens
MKNPMLEVVSLLLEKLLLISNFTLFSSGAAGEDKGRNSFYETSSFHRGDVLEVPRTHLTHYGIYLGDNRVAHMMPDILLALTDDMGRTQKVVSNKRLILGVIVKVASIRVDTVEDFAYGANILVNHLDESLQKKALLNEEVARRAEKLLGFTPYSLLWNNCEHFVTYCRYGTPISPQSDKFCETVKIIIRDQRSVLASAVLGLASIVCTGLVSYTTLPAIFIPFFLWMAG

SEQ ID NO: 7987 - protein, 230 aa, Homo Sapiens; identical to SEQ ID NO: 7986

SEQ ID NO: 7988 - protein, 214 aa, Homo Sapiens
AVLDFVKQKASQSPQKQHPLLDGVDGECPFPSRRSQHTDDSALCMSDDRPNALLSSPATETGHASPLPPSAAPTTDSTDSITGQNSRQREEELELIDQLRKHIEYRLKVSLPCDLGAALTDGVVLCHLANHVRPRSVPSIHVPSPAVPKLTMAKCRRNVENFLEACRKIGVPQEQLCLPLHILEEKGLSQVAVTVQALLELAPPKQQQHQLSAV

SEQ ID NO: 7989 - protein, 712 aa, Homo Sapiens
MAAAGLVAVAAAAEYSGTVASGGNLPGVHCGPSSGAGPGFGPGSWSRSLDRALEEAAVTGVLSLSGRKLREFPRGAANHDLTDTTRADLSRNRLSEIPIEACHFVSLENLNLYQNCIRYIPEAILNLQALTFLNISRNQLSTLPVHLCNLPLKVLIASNNKLVSLPEEIGHLRHLMELDVSCNEIQTIPSQIGNLEALRDLNVRRNHLVHLPEELAELPLIRLDFSCNKITTIPVCYRNLRHLQTITLDNNPLQSPPAQICIKGKVHIFKYLNIQACKIAPDLPDYDRRPLGFGSCHEELYSSRPYGALDSGFNSVDSGDKRWSGNEPTDEFSDLPLRVAEITKEQRLRRESQYQENRGSLVVTNGGVEHDLDQIDYIDSCTAEEEEAEVRQPKGPDPDSLSSQFMAYIEQRRISHEGSPVKPVAIREFQKTEDMRRYLHQNRVPAEPSSLLSLSASHNQLSHTDLELHQRREQLVERTRREAQLAALQYEEEKIRTKQIQRDAVLDFVKQKASQSPQKQHPLLDGVDGECPFPSRRSQHTDDSALCMSLSGLNQVGCAATLPHSSAFTPLKSDDRPNALLSSPATETVHHSPAYSFPAAIQRNQPQRPESFLFRAGVRAETNKGHASPLPPSAAPTTDSTDSITGQNSRQREEELELIDQLRKHIEYRLKVSLPCDLGAALTDGVVLCHLANHVRPRSVPSIHVPSPAVVS

SEQ ID NO: 7990 - protein, 725 aa, Homo Sapiens
MAAAGLVAVAAAAEYSGTVASGGNLPGVHCGPSSGAGPGFGPGSWSRSLDRALEEAAVTGVLSLSGRKLREFPRGAANHDLTDTTRADLSRNRLSEIPIEACHFVSLENLNLYQNCIRYIPEAILNLQALTFLNISRNQLSTLPVHLCNLPLKVLIASNNKLVSLPEEIGHLRHLMELDVSCNEIQTIPSQIGNLEALRDLNVRRNHLVHLPEELAELPLIRLDFSCNKITTIPVCYRNLRHLQTITLDNNPLQSPPAQICIKGKVHIFKYLNIQACKIAPDLPDYDRRPLGFGSCHEELYSSRPYGALDSGFNSVDSGDKRWSGNEPTDEFSDLPLRVAEITKEQRLRRESQYQENRGSLVVTNGGVEHDLDQIDYIDSCTAEEEEAEGSPVKPVAIREFQKTEDMRRYLHQNRVPAEPSSLLSLSASHNQLSHTDLELHQRREQLVERTRREAQLAALQYEEEKIRTKQIQRDAVLDFVKQKASQSPQKQHPLLDGVDGECPFPSRRSQHTDDSALCMSDDRPNALLSSPATETVHHSPAYSFPAAIQRNQPQRPESFLFRAGVRAETNKGHASPLPPSAAPTTDSTDSITGQNSRQREEELELIDQLRKHIEYRLKVSLPCDLGAALTDGVVLCHLANHVRPRSVPSIHVPSPAVPKLTMAKCRRNVENFLEACRKIGVPQEQLCLPLHILEEKGLSQVAVTVQALLELAPPKQQQHQLSAV

SEQ ID NO: 7991 - protein, 803 aa, Homo Sapiens
MAAAGLVAVAAAAEYSGTVASGGNLPGVHCGPSSGAGPGFGPGSWSRSLDRALEEAAVTGVLSLSGRKLREFPRGAANHDLTDTTRADLSRNRLSEIPIEACHFVSLENLNLYQNCIRYIPEAILNLQALTFLNISRNQLSTLPVHLCNLPLKVLIASNNKLVSLPEEIGHLRHLMELDVSCNEIQTIPSQIGNLEALRDLNVRRNHLVHLPEELAELPLIRLDFSCNKITTIPVCYRNLRHLQTITLDNNPLQSPPAQICIKGKVHIFKYLNIQACKIAPDLPDYDRRPLGFGSCHEELYSSRPYGALDSGFNSVDSGDKRWSGNEPTDEFSDLPLRVAEITKEQRLRRESQYQENRGSLVVTNGGVEHDLDQIDYIDSCTAEEEEAEVRQPKGPDPDSLSSQFMAYIEQRRISHEGSPVKPVAIREFQKTEDMRRYLHQNRVPAEPSSLLSLSASHNQLSHTDLELHQRREQLVERTRREAQLAALQYEEEKIRTKQIQRDAVLDFVKQKASQSPQKQHPLLDGVDGECPFPSRRSQHTDDSALCMSLSGLNQVGCAATLPHSSAFTPLKSDDRPNALLSSPATETVHHSPAYSFPAAIQRNQPQRPESFLFRAGVRAETNKGHASPLPPSAAPTTDSTDSITGQNSRQREEELELIDQLRKHIEYRLKVSLPCDLGAALTDGVVLCHLANHVRPRSVPSIHVPSPAVPKLTMAKCRRNVENFLEACRKIGVPQDNLCSPSDILQLNLSVKRTVETLLSLGAHSEESSFVCLSLQLLGFVAFYCTVMLTLCVLYYWLFPAR

SEQ ID NO: 7992 - protein, 777 aa, Homo Sapiens
MAAAGLVAVAAAAEYSGTVASGGNLPGVHCGPSSGAGPGFGPGSWSRSLDRALEEAAVTGVLSLSGRKLREFPRGAANHDLTDTTRADLSRNRLSEIPIEACHFVSLENLNLYQNCIRYIPEAILNLQALTFLNISRNQLSTLPVHLCNLPLKVLIASNNKLVSLPEEIGHLRHLMELDVSCNEIQTIPSQIGNLEALRDLNVRRNHLVHLPEELAELPLIRLDFSCNKITTIPVCYRNLRHLQTITLDNNPLQSPPAQICIKGKVHIFKYLNIQACKIAPDLPDYDRRPLGFGSCHEELYSSRPYGALDSGFNSVDSGDKRWSGNEPTDEFSDLPLRVAEITKEQRLRRESQYQENRGSLVVTNGGVEHDLDQIDYIDSCTAEEEEAEVRQPKGPDPDSLSSQFMAYIEQRRISHEGSPVKPVAIREFQKTEDMRRYLHQNRVPAEPSSLLSLSASHNQLSHTDLELHQRREQLVERTRREAQLAALQYEEEKIRTKQIQRDAVLDFVKQKASQSPQKQHPLLDGVDGECPFPSRRSQHTDDSALCMSLSGLNQVGCAATLPHSSAFTPLKSDDRPNALLSSPATETVHHSPAYSFPAAIQRNQPQRPESFLFRAGVRAETNKGHASPLPPSAAPTTDSTDSITGQNSRQREEELELIDQLRKHIEYRLKVSLPCDLGAALTDGVVLCHLANHVRPRSVPSIHVPSPAVPKLTMAKCRRNVENFLEACRKIGVPQEQLCLPLHILEEKGLSQVAVTVQALLELAPPKQQQHQLSAV

SEQ ID NO: 7993 - protein, 803 aa, Homo Sapiens; identical to SEQ ID NO: 7991

SEQ ID NO: 7994 - protein, 623 aa, Homo Sapiens
MAAAGLVAVAAAAEYSGTVASGGNLPGVHCGPSSGAGPGFGPGSWSRSLDRALEEAAVTGVLSLSGRKLREFPRGAANHDLTDTTRAELAELPLIRLDFSCNKITTIPVCYRNLRHLQTITLDNNPLQSPPAQICIKGKVHIFKYLNIQACKIAPDLPDYDRRPLGFGSCHEELYSSRPYGALDSGFNSVDSGDKRWSGNEPTDEFSDLPLRVAEITKEQRLRRESQYQENRGSLVVTNGGVEHDLDQIDYIDSCTAEEEEAEGSPVKPVAIREFQKTEDMRRYLHQNRVPAEPSSLLSLSASHNQLSHTDLELHQRREQLVERTRREAQLAALQYEEEKIRTKQIQRDAVLDFVKQKASQSPQKQHPLLDGVDGECPFPSRRSQHTDDSALCMSLSGLNQVGCAATLPHSSAFTPLKSDDRPNALLSSPATETVHHSPAYSFPAAIQRNQPQRPESFLFRAGVRAETNKGHASPLPPSAAPTTDSTDSITGQNSRQREEELELIDQLRKHIEYRLKVSLPCDLGAALTDGVVLCHLANHVRPRSVPSIHVPSPAVPKLTMAKCRRNVENFLEACRKIGVPQEQLCLPLHILEEKGLSQVAVTVQALLELAPPKQQQHQLSAV

SEQ ID NO: 7995 - protein, 92 aa, Homo Sapiens
MAAAGLVAVAAAAEYSGTVASGGNLPGVHCGPSSGAGPGFGPGSWSRSLDRALEEAAVTGVLSLSGRKLREFPRGAANHDLTDTTRAGCELQ

SEQ ID NO: 7996 - protein, 227 aa, Homo Sapiens
YEEEKIRTKQIQRDAVLDFVKQKASQSPQKQHPLLDGVDGECPFPSRRSQHTDDSALCMSLSGLNQVGCAATLPHSSAFTPLKSDDRPNALLSSPATETGHASPLPPSAAPTTDSTDSITGQNSRQREEELELIDQLRKHIEYRLKVSLPCDLGAALTDGVVLCHLANHVRPRSVPSIHVPSPAVPKLTMAKCRRNVENFLEACRKIGVPQDNLCSPSDILQLNLSV

SEQ ID NO: 7997 - protein, 159 aa, Homo Sapiens
MAGPGWTLLLLLLLLLLLGSMAGYGPQKKLNLSHKGIGEPCRRHEECQSNCCTINSLAPHTLCTPKTIFLQCLPWRKPNGYRCSHDSECQSSCCVRNNSPQELCTPQSVFLQCVPWRKPNGDFCSSHQECHSQCCIQLREYSPFRCIPRTGILAQCLPL

SEQ ID NO: 7998 - protein, 139 aa, Homo Sapiens
MAGPGWTLLLLLLLLLLLGSMAGYGPQKKLNLSHKGIGEPCRRHEECQSNCCTINSLAPHTLCTPKTIFLQCLPWRKVSPMGTDARTTQSARAAAASATTARRSCARPKASSCSVCPGASPTATSAAAIRSVTASAASS

SEQ ID NO: 7999 - protein, 46 aa, Homo Sapiens
MAGPGWTLLLLLLLLLLLGSMAGYGPQKKLNLSHKKLLRKPKFEGW

SEQ ID NO: 8000 - protein, 61 aa, Homo Sapiens
MAGPGWTLLLLLLLLLLLGSMAGYGPQKKLNLSHKPRAPSTDLPEPRQSGFVPETSQETQV

SEQ ID NO: 8001 - protein, 635 aa, Homo Sapiens
MAPPLLLLLLASGAAACPLPCVCQNLSESLSTLCAHRGLLFVPPNVDRRTVELRLADNFIQALGPPDFRNMTGLVDLTLSRNAITRIGARAFGDLESLRSLHLDGNRLVELGTGSLRGPVNLQHLILSGNQLGRIAPGAFDDFLESLEDLDLSYNNLRQVPWAGIGAMPALHTLNLDHNLIDALPPGAFAQLGQLSRLDLTSNRLATLAPDPLFSRGRDAEASPAPLVLSFSGNPLHCNCELLWLRRLARPDDLETCASPPGLAGRYFWAVPEGEFSCEPPLIARHTQRLWVLEGQRATLRCRALGDPAPTMHWVGPDDRLVGNSSRARAFPNGTLEIGVTGAGDAGGYTCIATNPAGEATARVELRVLALPHGGNSSAEGGRPGPSDIAASARTAAEGEGTLESEPAVQVTEVTATSGLVSWGPGRPADPVWMFQIQYNSSEDETLIYRIVPASSHHFLLKHLVPGADYDLCLLALSPAAGPSDLTATRLLGCAHFSTLPASPLCHALQAHVLGGTLTVAVGGVLVAALLVFTVALLVRGRGAGNGRLPLKLSHVQSQTNGGPSPTPKAHPPRSPPPRPQRSCSLDLGDAGCYGYARRLGGAWARRSHSVHGGLLGAGCRGVGGSAERLEESVV

SEQ ID NO: 8002 - protein, 418 aa, Homo Sapiens
MAPPLLLLLLASGAAACPLPCVCQNLSESLSTLCAHRGLLFVPPNVDRRTVELRLADNFIQALGPPDFRNMTGLVDLTLSRNAITRIGARAFGDLESLRSLHLDGNRLVELGTGSLRGPVNLQHLILSGNQLGRIAPGAFDDFLESLEDLDLSYNNLRQVPWAGIGAMPALHTLNLDHNLIDALPPGAFAQLGQLSRLDLTSNRLATLAPDPLFSRGRDAEASPAPLVLSFSGNPLHCNCELLWLRRLARPDDLETCASPPGLAGRYFWAVPEGEFSCEPPLIARHTQRLWVLEGQRATLRCRALGDPAPTMHWVGPDDRLVGNSSRARAFPNGTLEIGVTGAGDAGGYTCIATNPAGEATARVELRVLALPHGGNSRPGAAAWPGSPSLVFILSTSGSPVYLEGQGALSSVLASRPG

SEQ ID NO: 8003 - protein, 719 aa, Homo Sapiens
MEKILFYLFLIGIAVKAQICPKRCVCQILSPNLATLCAKKGLLFVPPNIDRRTVELRLADNFVTNIKRKDFANMTSLVDLTLSRNTISFITPHAFADLRNLRALHLNSNRLTKITNDMFSGLSNLHHLILNNNQLTLISSTAFDDVFALEELDLSYNNLETIPWDAVEKMVSLHTLSLDHNMIDNIPKGTFSHLHKMTRLDVTSNKLQKLPPDPLFQRAQVLATSGIISPSTFALSFGGNPLHCNCELLWLRRLSREDDLETCASPPLLTGRYFWSIPEEEFLCEPPLITRHTHEMRVLEGQRATLRCKARGDPEPAIHWISPEGKLISNATRSLVYDNGTLDILITTVKDTGAFTCIASNPAGEATQIVDLHIIKLPHLLNSTNHIHEPDPGSSDISTSTKSGSNTSSSNGDTKLSQDKIVVAEATSSTALLKFNFQRNIPGIRMFQIQYNGTYDDTLVYRMIPPTSKTFLVNNLAAGTMYDLCVLAIYDDGITSLTATRVVGCIQFTTEQDYVRCHFMQSQFLGGTMIIIIGGIIVASVLVFIIILMIRYKVCNNNGQHKVTKVSNVYSQTNGAQIQGCSVTLPQSVSKQAVGHEENAQCCKATSDNVIQSSETCSSQDSSTTTSALPPSWTSSTSVSQKQKRKTGTKPSTEPQNEAVTNVESQNTNRNNSTALQLASRPPDSVTEGPTSKRAHIKPNALLTNVDQIVQETQRLELI

SEQ ID NO: 8004 - protein, 466 aa, Homo Sapiens
MEKILFYLFLIGIAVKAQICPKRCVCQILSPNLATLCAKKGLLFVPPNIDRRTVELRLADNFVTNIKRKDFANMTSLVDLTLSRNTISFITPHAFADLRNLRALHLNSNRLTKITNDMFSGLSNLHHLILNNNQLTLISSTAFDDVFALEELDLSYNNLETIPWDAVEKMVSLHTLSLDHNMIDNIPKGTFSHLHKMTRLDVTSNKLQKLPPDPLFQRAQVLATSGIISPSTFALSFGGNPLHCNCELLWLRRLSREDDLETCASPPLLTGRYFWSIPEEEFLCEPPLITRHTHEMRVLEGQRATLRCKARGDPEPAIHWISPEGKLISNATRSLVYDNGTLDILITTVKDTGAFTCIASNPAGEATQIVDLHIIKLPHLLNSTNHIHEPDPGSSDISTSTKSGSNTSSSNGDTKLSQDKIVVAEATSSTALLKFNFQRNIPGIRMFQIQYNGTYDDTLVYRCFAD

SEQ ID NO: 8005 - protein, 465 aa, Homo Sapiens
MEKILFYLFLIGIAVKAQICPKRCVCQILSPNLATLCAKKGLLFVPPNIDRRTVELRLADNFVTNIKRKDFANMTSLVDLTLSRNTISFITPHAFADLRNLRALHLNSNRLTKITNDMFSGLSNLHHLILNNNQLTLISSTAFDDVFALEELDLSYNNLETIPWDAVEKMVSLHTLSLDHNMIDNIPKGTFSHLHKMTRLDVTSNKLQKLPPDPLFQRAQVLATSGIISPSTFALSFGGNPLHCNCELLWLRRLSREDDLETCASPPLLTGRYFWSIPEEEFLCEPPLITRHTHEMRVLEGQRATLRCKARGDPEPAIHWISPEGKLISNATRSLVYDNGTLDILITTVKDTGAFTCIASNPAGEATQIVDLHIIKLPHLLNSTNHIHEPDPGSSDISTSTKSGSNTSSSNGDTKLSQDKIVVAEATSSTALLKFNFQRNIPGIRMFQIQYNGTYDDTLVYRGWS

SEQ ID NO: 8006 - protein, 347 aa, Homo Sapiens
MSSWSRQRPKSPGGIQPHVSRTLFLLLLLAASAWGVTLSPKDCQVFRSDHGSSISCQPPAEIPGYLPADTVHLAVEFFNLTHLPANLLQGASKLQELHLSSNGLESLSPEFLRPVPQLRVLDLTRNALTGLPPGLFQASATLDTLVLKENQLEVLEVSWLHGLKALGHLDLSGNRLRKLPPGLLANFTLLRTLDLGENQLETLPPDLLRGPLQLERLHLEGNKLQVLGKDLLLPQPDLRYLFLNGNKLARVAAGAFQGLRQLDMLDLSNNSLASVPEGLWASLGQPNWDMRDGFDISGNPWICDQNLSDLYRWLQAQKDKMFSQNDTRCAGPEAVKGQTLLAVAKSQ

SEQ ID NO: 8007 - protein, 4544 aa, Homo Sapiens
MLTPPLLLLLPLLSALVAAAIDAPKTCSPKQFACRDQITCISKGWRCDGERDCPDGSDEAPEICPQSKAQRCQPNEHNCLGTELCVPMSRLCNGVQDCMDGSDEGPHCRELQGNCSRLGCQHHCVPTLDGPTCYCNSSFQLQADGKTCKDFDECSVYGTCSQLCTNTDGSFICGCVEGYLLQPDNRSCKAKNEPVDRPPVLLIANSQNILATYLSGAQVSTITPTSTRQTTAMDFSYANETVCWVHVGDSAAQTQLKCARMPGLKGFVDEHTINISLSLHHVEQMAIDWLTGNFYFVDDIDDRIFVCNRNGDTCVTLLDLELYNPKGIALDPAMGKVFFTDYGQIPKVERCDMDGQNRTKLVDSKIVFPHGITLDLVSRLVYWADAYLDYIEVVDYEGKGRQTIIQGILIEHLYGLTVFENYLYATNSDNANAQQKTSVIRVNRFNSTEYQVVTRVDKGGALHIYHQRRQPRVRSHACENDQYGKPGGCSDICLLANSHKARTCRCRSGFSLGSDGKSCKKPEHELFLVYGKGRPGIIRGMDMGAKVPDEHMIPIENLMNPRALDFHAETGFIYFADTTSYLIGRQKIDGTERETILKDGIHNVEGVAVDWMGDNLYWTDDGPKKTISVARLEKAAQTRKTLIEGKMTHPRAIVVDPLNGWMYWTDWEEDPKDSRRGRLERAWMDGSHRDIFVTSKTVLWPNGLSLDIPAGRLYWVDAFYDRIETILLNGTDRKIVYEGPELNHAFGLCHHGNYLFWTEYRSGSVYRLERGVGGAPPTVTLLRSERPPIFEIRMYDAQQQQVGTNKCRVNNGGCSSLCLATPGSRQCACAEDQVLDADGVTCLANPSYVPPPQCQPGEFACANSRCIQERWKCDGDNDCLDNSDEAPALCHQHTCPSDRFKCENNRCIPNRWLCDGDNDCGNSEDESNATCSARTCPPNQFSCASGRCIPISWTCDLDDDCGDRSDESASCAYPTCFPLTQFTCNNGRCININWRCDNDNDCGDNSDEAGCSHSCSSTQFKCNSGRCIPEHWTCDGDNDCGDYSDETHANCTNQATRPPGGCHTDEFQCRLDGLCIPLRWRCDGDTDCMDSSDEKSCEGVTHVCDPSVKFGCKDSARCISKAWVCDGDNDCEDNSDEENCESLACRPPSHPCANNTSVCLPPDKLCDGNDDCGDGSDEGELCDQCSLNNGGCSHNCSVAPGEGIVCSCPLGMELGPDNHTCQIQSYCAKHLKCSQKCDQNKFSVKCSCYEGWVLEPDGESCRSLDPFKPFIIFSNRHEIRRIDLHKGDYSVLVPGLRNTIALDFHLSQSALYWTDVVEDKIYRGKLLDNGALTSFEVVIQYGLATPEGLAVDWIAGNIYWVESNLDQIEVAKLDGTLRTTLLAGDIEHPRAIALDPRDGILFWTDWDASLPRIEAASMSGAGRRTVHRETGSGGWPNGLTVDYLEKRILWIDARSDAIYSARYDGSGHMEVLRGHEFLSHPFAVTLYGGEVYWTDWRTNTLAKANKWTGHNVTVVQRTNTQPFDLQVYHPSRQPMAPNPCEANGGQGPCSHLCLINYNRTVSCACPHLMKLHKDNTTCYEFKKFLLYARQMEIRGVDLDAPYYNYIISFTVPDIDNVTVLDYDAREQRVYWSDVRTQAIKRAFINGTGVETVVSADLPNAHGLAVDWVSRNLFWTSYDTNKKQINVARLDGSFKNAVVQGLEQPHGLVVHPLRGKLYWTDGDNISMANMDGSNRTLLFSGQKGPVGLAIDFPESKLYWISSGNHTINRCNLDGSGLEVIDAMRSQLGKATALAIMGDKLWWADQVSEKMGTCSKADGSGSVVLRNSTTLVMHMKVYDESIQLDHKGTNPCSVNNGDCSQLCLPTSETTRSCMCTAGYSLRSGQQACEGVGSFLLYSVHEGIRGIPLDPNDKSDALVPVSGTSLAVGIDFHAENDTIYWVDMGLSTISRAKRDQTWREDVVTNGIGRVEGIAVDWIAGNIYWTDQGFDVIEVARLNGSFRYVVISQGLDKPRAITVHPEKGYLFWTEWGQYPRIERSRLDGTERVVLVNVSISWPNGISVDYQDGKLYWCDARTDKIERIDLETGENREVVLSSNNMDMFSVSVFEDFIYWSDRTHANGSIKRGSKDNATDSVPLRTGIGVQLKDIKVFNRDRQKGTNVCAVANGGCQQLCLYRGRGQRACACAHGMLAEDGASCREYAGYLLYSERTILKSIHLSDERNLNAPVQPFEDPEHMKNVIALAFDYRAGTSPGTPNRIFFSDIHFGNIQQINDDGSRRITIVENVGSVEGLAYHRGWDTLYWTSYTTSTITRHTVDQTRPGAFERETVITMSGDDHPRAFVLDECQNLMFWTNWNEQHPSIMRAALSGANVLTLIEKDIRTPNGLAIDHRAEKLYFSDATLDKIERCEYDGSHRYVILKSEPVHPFGLAVYGEHIFWTDWVRRAVQRANKHVGSNMKLLRVDIPQQPMGIIAVANDTNSCELSPCRINNGGCQDLCLLTHQGHVNCSCRGGRILQDDLTCRAVNSSCRAQDEFECANGECINFSLTCDGVPHCKDKSDEKPSYCNSRRCKKTFRQCSNGRCVSNMLWCNGADDCGDGSDEIPCNKTACGVGEFRCRDGTCIGNSSRCNQFVDCEDASDEMNCSATDCSSYFRLGVKGVLFQPCERTSLCYAPSWVCDGANDCGDYSDERDCPGVKRPRCPLNYFACPSGRCIPMSWTCDKEDDCEHGEDETHCNKFCSEAQFECQNHRCISKQWLCDGSDDCGDGSDEAAHCEGKTCGPSSFSCPGTHVCVPERWLCDGDKDCADGADESIAAGCLYNSTCDDREFMCQNRQCIPKHFVCDHDRDCADGSDESPECEYPTCGPSEFRCANGRCLSSRQWECDGENDCHDQSDEAPKNPHCTSQEHKCNASSQFLCSSGRCVAEALLCNGQDDCGDSSDERGCHINECLSRKLSGCSQDCEDLKIGFKCRCRPGFRLKDDGRTCADVDECSTTFPCSQRCINTHGSYKCLCVEGYAPRGGDPHSCKAVTDEEPFLIFANRYYLRKLNLDGSNYTLLKQGLNNAVALDFDYREQMIYWTDVTTQGSMIRRMHLNGSNVQVLHRTGLSNPDGLAVDWVGGNLYWCDKGRDTIEVSKLNGAYRTVLVSSGLREPRALVVDVQNGYLYWTDWGDHSLIGRIGMDGSSRSVIVDTKITWPNGLTLDYVTERIYWADAREDYIEFASLDGSNRHVVLSQDIPHIFALTLFEDYVYWTDWETKSINRAHKTTGTNKTLLISTLHRPMDLHVFHALRQPDVPNHPCKVNNGGCSNLCLLSPGGGHKCACPTNFYLGSDGRTCVSNCTASQFVCKNDKCIPFWWKCDTEDDCGDHSDEPPDCPEFKCRPGQFQCSTGICTNPAFICDGDNDCQDNSDEANCDIHVCLPSQFKCTNTNRCIPGIFRCNGQDNCGDGEDERDCPEVTCAPNQFQCSITKRCIPRVWVCDRDNDCVDGSDEPANCTQMTCGVDEFRCKDSGRCIPARWKCDGEDDCGDGSDEPKEECDERTCEPYQFRCKNNRCVPGRWQCDYDNDCGDNSDEESCTPRPCSESEFSCANGRCIAGRWKCDGDHDCADGSDEKDCTPRCDMDQFQCKSGHCIPLRWRCDADADCMDGSDEEACGTGVRTCPLDEFQCNNTLCKPLAWKCDGEDDCGDNSDENPEECARFVCPPNRPFRCKNDRVCLWIGRQCDGTDNCGDGTDEEDCEPPTAHTTHCKDKKEFLCRNQRCLSSSLRCNMFDDCGDGSDEEDCSIDPKLTSCATNASICGDEARCVRTEKAAYCACRSGFHTVPGQPGCQDINECLRFGTCSQLCNNTKGGHLCSCARNFMKTHNTCKAEGSEYQVLYIADDNEIRSLFPGHPHSAYEQAFQGDESVRIDAMDVHVKAGRVYWTNWHTGTISYRSLPPAAPPTTSNRHRRQIDRGVTHLNISGLKMPRGIAIDWVAGNVYWTDSGRDVIEVAQMKGENRKTLISGMIDEPHAIVVDPLRGTMYWSDWGNHPKIETAAMDGTLRETLVQDNIQWPTGLAVDYHNERLYWADAKLSVIGSIRLNGTDPIVAADSKRGLSHPFSIDVFEDYIYGVTYINNRVFKIHKFGHSPLVNLTGGLSHASDVVLYHQHKQPEVTNPCDRKKCEWLCLLSPSGPVCTCPNGKRLDNGTCVPVPSPTPPPDAPRPGTCNLQCFNGGSCFLNARRQPKCRCQPRYTGDKCELDQCWEHCRNGGTCAASPSGMPTCRCPTGFTGPKCTQQVCAGYCANNSTCTVNQGNQPQCRCLPGFLGDRCQYRQCSGYCENFGTCQMAADGSRQCRCTAYFEGSRCEVNKCSRCLEGACVVNKQSGDVTCNCTDGRVAPSCLTCVGHCSNGGSCTMNSKMMPECQCPPHMTGPRCEEHVFSQQQPGHIASILIPLLLLLLLVLVAGVVFWYKRRVQGAKGFQHQRMTNGAMNVEIGNPTYKMYEGGEPDDVGGLLDADFALDPDKPTNFTNPVYATLYMGGHGSRHSLASTDEKRELLGRGPEDEIGDPLA

SEQ ID NO: 8008 - protein, 292 aa, Homo Sapiens
MLTPPLLLLLPLLSALVAAAIDAPKTCSPKQFACRDQITCISKGWRCDGERDCPDGSDEAPEICPQSKAQRCQPNEHNCLGTELCVPMSRLCNGVQDCMDGSDEGPHCRELQGNCSRLGCQHHCVPTLDGPTCYCNSSFQLQADGKTCKDFDECSVYGTCSQLCTNTDGSFICGCVEGYLLQPDNRSCKAKNEPVDRPPVLLIANSQNILATYLSGAQVSTITPTSTRQTTAMDFSYANETVCWVHVGDSAAQTQLKCARMPGLKGFVDEHTINISLSLHLCVFSKSQQEMG

SEQ ID NO: 8009 - protein, 296 aa, Homo Sapiens
MLTPPLLLLLPLLSALVAAAIDAPKTCSPKQFACRDQITCISKGWRCDGERDCPDGSDEAPEICPQSKAQRCQPNEHNCLGTELCVPMSRLCNGVQDCMDGSDEGPHCRELQGNCSRLGCQHHCVPTLDGPTCYCNSSFQLQADGKTCKDFDECSVYGTCSQLCTNTDGSFICGCVEGYLLQPDNRSCKAKNEPVDRPPVLLIANSQNILATYLSGAQVSTITPTSTRQTTAMDFSYANETVCWVHVGDSAAQTQLKCARMPGLKGFVDEHTINISLSLHRRSRKRAQENEVTQHG

SEQ ID NO: 8010 - protein, 439 aa, Homo Sapiens
MLTPPLLLLLPLLSALVAAAIDAPKTCSPKQFACRDQITCISKGWRCDGERDCPDGSDEAPEICPQSKAQRCQPNEHNCLGTELCVPMSRLCNGVQDCMDGSDEGPHCRELQGNCSRLGCQHHCVPTLDGPTCYCNSSFQLQADGKTCKDFDECSVYGTCSQLCTNTDGSFICGCVEGYLLQPDNRSCKAKNEPVDRPPVLLIANSQNILATYLSGAQVSTITPTSTRQTTAMDFSYANETVCWVHVGDSAAQTQLKCARMPGLKGFVDEHTINISLSLHHVEQMAIDWLTGNFYFVDDIDDRIFVCNRNGDTCVTLLDLELYNPKGIALDPAMGKVFFTDYGQIPKVERCDMDGQNRTKLVDSKIVFPHGITLDLVSRLVYWADAYLDYIEVVDYEGKGRQTIIQGILVRELLSEVLWGNHDPGPSGEGGSLCRGTVL

SEQ ID NO: 8011 - protein, 183 aa, Homo Sapiens
NGQDNCGDGEDERDCPEVTCAPNQFQCSITKRCIPRVWVCDRDNDCVDGSDEPANCTQMTCGVDEFRCKDSGRCIPARWKCDGEDDCGDGSDEPKEECGEPRPHSRRKTVYLDERTCEPYQFRCKNNRCVPGRWQCDYDNDCGDNSDEESCTPRPCSESEFSCANGRCIAGRWKCDGDHDCAD

SEQ ID NO: 8012 - protein, 139 aa, Homo Sapiens
  misc_feature (1)..(1): Xaa can be any naturally occurring amino acid
XRPGAFERETVITMSGDDHPRAFVLDECQNLMFWTNWNEQHPSIMRAALSGANVLTLIEKDIRTPNGLAIDHRAEKLYFSDATLDKIERCEYDGSHRYVNSLHAESTTVAARTCVCSLTRAMSTAHAEGAESSRMTSPA

SEQ ID NO: 8013 - protein, 500 aa, Homo Sapiens
MASVAQESAGSQRRLPPRHGALRGLLLLCLWLPSGRAALPPAAPLSELHAQLSGVEQLLEEFRRQLQQERPQEELELELRAGGGPQEDCPGPGSGGYSAMPDAIIRTKDSLAAGASFLRAPAAVRGWRQCVAACCSEPRCSVAVVELPRRPAPPAAVLGCYLFNCTARGRNVCKFALHSGYSSYSLSRAPDGAALATARASPRQEKDAPPLSKAGQDVVLHLPTDGVVLDGRESTDDHAIVQYEWALLQGDPSVDMKVPQSGTLKLSHLQEGTYTFQLTVTDTAGQRSSDNVSVTVLRAAYSTGGCLHTCSRYHFFCDDGCCIDITLACDGVQQCPDGSDEDFCQNLGLDRKMVTHTAASPALPRTTGPSEDAGGDSLVEKSQKATAPNKPPALSNTEKRNHSAFWGPESQIIPVMPDSSSSGKNRKEESYIFESKGDGGGGEHPAPETGAVLPLALGLAITALLLLMVACRLRLVKQKLKKARPITSEESDYLINGMYL

SEQ ID NO: 8014 - protein, 325 aa, Homo Sapiens
MASVAQESAGSQRRLPPRHGALRGLLLLCLWLPSGRAALPPAAPLSELHAQLSGVEQLLEEFRRQLQQERPQEELELELRAGGGPQEDCPGPGSGGYSAMPDAIIRTKDSLAAGASFLRAPAAVRGWRQCVAACCSEPRCSVAVVELPRRPAPPAAVLGCYLFNCTARGRNVCKFALHSGYSSYSLSRAPDGAALATARASPRQEKDAPPLSKAGQDVVLHLPTDGVVLDGRESTDDHAIVQYEWALLQGDPSVDMKVPQSGTLKLSHLQEGTYTFQLTVTDTAGQRSSDNVSVTVLRAAYSTGDGWSICCICSKREAKEFSETS

SEQ ID NO: 8015 - protein, 4599 aa, Homo Sapiens
MSEFLLALLTLSGLLPIARVLTVGADRDQQLCDPGEFLCHDHVTCVSQSWLCDGDPDCPDDSDESLDTCPEEVEIKCPLNHIACLGTNKCVHLSQLCNGVLDCPDGYDEGVHCQELLSNCQQLNCQYKCTMVRNSTRCYCEDGFEITEDGRSCKDQDECAVYGTCSQTCRNTHGSYTCSCVEGYLMQPDNRSCKAKIEPTDRPPILLIANFETIEVFYLNGSKMATLSSVNGNEIHTLDFIYNEDMICWIESRESSNQLKCIQITKAGGLTDEWTINILQSFHNVQQMAIDWLTRNLYFVDHVGDRIFVCNSNGSVCVTLIDLELHNPKAIAVDPIAGKLFFTDYGNVAKVERCDMDGMNRTRIIDSKTEQPAALALDLVNKLVYWVDLYLDYVGVVDYQGKNRHTVIQGRQVRHLYGITVFEDYLYATNSDNYNIVRINRFNGTDIHSLIKIENAWGIRIYQKRTQPTVRSHACEVDPYGMPGGCSHICLLSSSYKTRTCRCRTGFNLGSDGRSCKRPKNELFLFYGKGRPGIVRGMDLNTKIADEYMIPIENLVNPRALDFHAETNYIYFADTTSFLIGRQKIDGTERETILKDDLDNVEGIAVDWIGNNLYWTNDGHRKTINVARLEKASQSRKTLLEGEMSHPRGIVVDPVNGWMYWTDWEEDEIDDSVGRIEKAWMDGFNRQIFVTSKMLWPNGLTLDFHTNTLYWCDAYYDHIEKVFLNGTHRKIVYSGRELNHPFGLSHHGNYVFWTDYMNGSIFQLDLITSEVTLLRHERPPLFGLQIYDPRKQQGDNMCRVNNGGCSTLCLAIPGGRVCACADNQLLDENGTTCTFNPGEALPHICKAGEFRCKNRHCIQARWKCDGDDDCLDGSDEDSVNCFNHSCPDDQFKCQNNRCIPKRWLCDGANDCGSNEDESNQTCTARTCQVDQFSCGNGRCIPRAWLCDREDDCGDQTDEMASCEFPTCEPLTQFVCKSGRCISSKWHCDSDDDCGDGSDEVGCVHSCFDNQFRCSSGRCIPGHWACDGDNDCGDFSDEAQINCTKEEIHSPAGCNGNEFQCHPDGNCVPDLWRCDGEKDCEDGSDEKGCNGTIRLCDHKTKFSCWSTGRCINKAWVCDGDIDCEDQSDEDDCDSFLCGPPKHPCANDTSVCLQPEKLCNGKKDCPDGSDEGYLCDECSLNNGGCSNHCSVVPGRGIVCSCPEGLQLNKDNKTCEIVDYCSNHLKCSQVCEQHKHTVKCSCYEGWKLDVDGESCTSVDPFEAFIIFSIRHEIRRIDLHKRDYSLLVPGLRNTIALDFHFNQSLLYWTDVVEDRIYRGKLSESGGVSAIEVVVEHGLATPEGLTVDWIAGNIYWIDSNLDQIEVAKLDGSLRTTLIAGAMEHPRAIALDPRYGILFWTDWDANFPRIESASMSGAGRKTIYKDMKTGAWPNGLTVDHFEKRIVWTDARSDAIYSALYDGTNMIEIIRGHEYLSHPFAVSLYGSEVYWTDWRTNTLSKANKWTGQNVSVIQKTSAQPFDLQIYHPSRQPQAPNPCAANDGKGPCSHMCLINHNRSAACACPHLMKLSSDKKTCYEMKKFLLYARRSEIRGVDIDNPYFNFITAFTVPDIDDVTVIDFDASEERLYWTDIKTQTIKRAFINGTGLETVISRDIQSIRGLAVDWVSRNLYWISSEFDETQINVARLDGSLKTSIIHGIDKPQCLAAHPVRGKLYWTDGNTINMANMDGSNSKILFQNQKEPVGLSIDYVENKLYWISSGNGTINRCNLDGGNLEVIESMKEELTKATALTIMDKKLWWADQNLAQLGTCSKRDGRNPTILRNKTSGVVHMKVYDKEAQQGSNSCQLNNGGCSQLCLPTSETTRTCMCTVGYYLQKNRMSCQGIESFLMYSVHEGIRGIPLEPSDKMDALMPISGTSFAVGIDFHAENDTIYWTDMGFNKISRAKRDQTWKEDIITNGLGRVEGIAVDWIAGNIYWTDHGFNLIEVARLNGSFRYVIISQGLDQPRSIAVHPEKGLLFWTEWGQMPCIGKARLDGSEKVVLVSMGIAWPNGISIDYEENKLYWCDARTDKIERIDLETGGNREMVLSGSNVDMFSVAVFGAYIYWSDRAHANGSVRRGHKNDATETITMRTGLGVNLKEVKIFNRVREKGTNVCARDNGGCKQLCLYRGNSRRTCACAHGYLAEDGVTCLRHEGYLLYSGRTILKSIHLSDETNLNSPIRPYENPRYFKNVIALAFDYNQRRKGTNRIFYSDAHFGNIQLIKDNWEDRQVIVENVGSVEGLAYHRAWDTLYWTSSTTSSITRHTVDQTRPGAFDREAVITMSEDDHPHVLALDECQNLMFWTNWNEQHPSIMRSTLTGKNAQVVVSTDILTPNGLTIDYRAEKLYFSDGSLGKIERCEYDGSQRHVIVKSGPGTFLSLAVYDNYIFWSDWGRRAILRSNKYTGGDTKILRSDIPHQPMGIIAVANDTNSCELSPCALLNGGCHDLCLLTPNGRVNCSCRGDRILLEDNRCVTKNSSCNAYSEFECGNGECIDYQLTCDGIPHCKDKSDEKLLYCENRSCRRGFKPCYNRRCIPHGKLCDGENDCGDNSDELDCKVSTCATVEFRCADGTCIPRSARCNQNIDCADASDEKNCNNTDCTHFYKLGVKTTGFIRCNSTSLCVLPTWICDGSNDCGDYSDELKCPVQNKHKCEENYFSCPSGRCILNTWICDGQKDCEDGRDEFHCDSSCSWNQFACSAQKCISKHWICDGEDDCGDGLDESDSICGAITCAADMFSCQGSRACVPRHWLCDGERDCPDGSDELSTAGCAPNNTCDENAFMCHNKVCIPKQFVCDHDDDCGDGSDESPQCGYRQCGTEEFSCADGRCLLNTQWQCDGDFDCPDHSDEAPLNPKCKSAEQSCNSSFFMCKNGRCIPSGGLCDNKDDCGDGSDERNCHINECLSKKVSGCSQDCQDLPVSYKCKCWPGFQLKDDGKTCVDIDECSSGFPCSQQCINTYGTYKCLCTDGYEIQPDNPNGCKSLSDEEPFLILADHHEIRKISTDGSNYTLLKQGLNNVIAIDFDYREEFIYWIDSSRPNGSRINRMCLNGSDIKVVHNTAVPNALAVDWIGKNLYWSDTEKRIIEVSKLNGLYPTILVSKRLKFPRDLSLDPQAGYLYWIDCCEYPHIGRVGMDGTNQSVVIETKISRPMALTIDYVNRRLYWADENHIEFSNMDGSHRHKVPNQDIPGVIALTLFEDYIYWTDGKTKSLSRAHKTSGADRLSLIYSWHAITDIQVYHSYRQPDVSKHLCMINNGGCSHLCLLAPGKTHTCACPTNFYLAADNRTCLSNCTASQFRCKTDKCIPFWWKCDTVDDCGDGSDEPDDCPEFRCQPGRFQCGTGLCALPAFICDGENDCGDNSDELNCDTHVCLSGQFKCTKNQKCIPVNLRCNGQDDCGDEEDERDCPENSCSPDYFQCKTTKHCISKLWVCDEDPDCADASDEANCDKKTCGPHEFQCKNNNCIPDHWRCDSQNDCSDNSDEENCKPQTCTLKDFLCANGDCVSSRFWCDGDFDCADGSDERNCETSCSKDQFRCSNGQCIPAKWKCDGHEDCKYGEDEKSCEPASPTCSSREYICASDGCISASLKCNGEYDCADGSDEMDCVTECKEDQFRCKNKAHCIPIRWLCDGIHDCVDGSDEENCERGGNICRADEFLCNNSLCKLHFWVCDGEDDCGDNSDEAPDMCVKFLCPSTRPHRCRNNRICLQSEQMCNGIDECGDNSDEDHCGGKLTYKARPCKKDEFACSNKKCIPMDLQCDRLDDCGDGSDEQGCRIAPTEYTCEDNVNPCGDDAYCNQIKTSVFCRCKPGFQRNMKNRQCEDLNECLVFGTCSHQCINVEGSYKCVCDQNFQERNNTCIAEGSEDQVLYIANDTDILGFIYPFNYSGDHQQISHIEHNSRITGMDVYYQRDMIIWSTQFNPGGIFYKRIHGREKRQANSGLICPEFKRPRDIAVDWVAGNIYWTDHSRMHWFSYYTTHWTSLRYSINVGQLNGPNCTRLLTNMAGEPYAIAVNPKRGMMYWTVVGDHSHIEEAAMDGTLRRILVQKNLQRPTGLAVDYFSERIYWADFELSIIGSVLYDGSNSVVSVSSKQGLLHPHRIDIFEDYIYGAGPKNGVFRVQKFGHGSVEYLALNIDKTKGVLISHRYKQLDLPNPCLDLACEFLCLLNPSGATCVCPEGKYLINGTCNDDSLLDDSCKLTCENGGRCILNEKGDLRCHCWPSYSGERCEVNHCSNYCQNGGTCVPSVLGRPTCSCALGFTGPNCGKTVCEDFCQNGGTCIVTAGNQPYCHCQPEYTGDRCQYYVCHHYCVNSESCTIGDDGSVECVCPTRYEGPKCEVDKCVRCHGGHCIINKDSEDIFCNCTNGKIASSCQLCDGYCYNGGTCQLDPETNVPVCLCSTNWSGTQCERPAPKSSKSDHISTRSIAIIVPLVLLVTLITTLVIGLVLCKRKRRTKTIRRQPIINGGINVEIGNPSYNMYEVDHDHNDGGLLDPGFMIDPTKARYIGGGPSAFKLPHTAPPIYLNSDLKGPLTAGPTNYSNPVYAKLYMDGQNCRNSLGSVDERKELLPKKIEIGIRETVA

SEQ ID NO: 8016 - protein, 782 aa, Homo Sapiens [sequence omitted]

SEQ ID NO: 8017 - protein, 280 aa, Homo Sapiens
  misc_feature (1)..(1): Xaa can be any naturally occurring amino acid
XRPTCSCALGFTGPNCGKTVCEDFCQNGGTCIVTAGNQPYCHCQPEYTGDRCQYYVCHHYCVNSESCTIGDDGSVECVCPTRYEGPKCEVDKCVRCHGGHCIINKDSEDIFCNCTNGKIASSCQLCDGYCYNGGTCQLDPETNVPVCLCSVGFKSQRCDQKENPCDHYCQNEGICTLTAFNEPRCKCSTNWSGTQCERPAPKSSKSDHISTRSIAIIVPLVLLVTLITTLVIGLVLCKRKRRTKTIRRQPIINGGINVEIGNPSYNMYEVDHDHNDGGLL

SEQ ID NO: 8018 - protein, 798 aa, Homo Sapiens
  misc_feature (1)..(1): Xaa can be any naturally occurring amino acid
XSNKKCIPMDLQCDRLDDCGDGSDEQGCRIAPTEYTCEDNVNPCGDDAYCNQIKTSVFCRCKPGFQRNMKNRQCEDLNECLVFGTCSHQCINVEGSYKCVCDQNFQERNNTCIAEGSEDQVLYIANDTDILGFIYPFNYSGDHQQISHIEHNSRITGMDVYYQRDMIIWSTQFNPGGIFYKRIHGREKRQANSGLICPEFKRPRDIAVDWVAGNIYWTDHSRMHWFSYYTTHWTSLRYSINVGQLNGPNCTRLLTNMAGEPYAIAVNPKRGMMYWTVVGDHSHIEEAAMDGTLRRILVQKNLQRPTGLAVDYFSERIYWADFELSIIGSVLYDGSNSVVSVSSKQGLLHPHRIDIFEDYIYGAGPKNGVFRVQKFGHGSVEYLALNIDKTKGVLISHRYKQLDLPNPCLDLACEFLCLLNPSGATCVCPEGKYLINGTCNDDSLLDDSCKLTCENGGRCILNEKGDLRCHCWPSYSGERCEVNHCSNYCQNGGTCVPSVLGRPTCSCALGFTGPNCGKTVCEDFCQNGGTCIVTAGNQPYCHCQPEYTGDRCQYYVCHHYCVNSESCTIGDDGSVECVCPTRYEGPKCEVDKCVRCHGGHCIINKDSEDIFCNCTNGKIASSCQLCDGYCYNGGTCQLDPETNVPVCLCSTNWSGTQCERPAPKSSKSDHISTRSIAIIVPLVLLVTLITTLVIGLVLCKRKRRTKTIRRQPIINGGINVEIGNPSYNMYEVDHDHNDGGLLDPGFMIDPTKPTNYSNPVYAKLYMDGQNCRNSLGSVDERKELLPKKIEIGIRETVA

SEQ ID NO: 8019 - protein, 4655 aa, Homo Sapiens
MDRGPAAVACTLLLALVACLAPASGQECDSAHFRCGSGHCIPADWRCDGTKDCSDDADEIGCAVVTCQQGYFKCQSEGQCIPNSWVCDQDQDCDDGSDERQDCSQSTCSSHQITCSNGQCIPSEYRCDHVRDCPDGADENDCQYPTCEQLTCDNGACYNTSQKCDWKVDCRDSSDEINCTEICLHNEFSCGNGECIPRAYVCDHDNDCQDGSDEHACNYPTCGGYQFTCPSGRCIYQNWVCDGEDDCKDNGDEDGCESGPHDVHKCSPREWSCPESGRCISIYKVCDGILDCPGREDENNTSTGKYCSMTLCSALNCQYQCHETPYGGACFCPPGYIINHNDSRTCVEFDDCQIWGICDQKCESRPGRHLCHCEEGYILERGQYCKANDSFGEASIIFSNGRDLLIGDIHGRSFRILVESQNRGVAVGVAFHYHLQRVFWTDTVQNKVFSVDINGLNIQEVLNVSVETPENLAVDWVNNKIYLVETKVNRIDMVNLDGSYRVTLITENLGHPRGIAVDPTVGYLFFSDWESLSGEPKLERAFMDGSNRKDLVKTKLGWPAGVTLDMISKRVYWVDSRFDYIETVTYDGIQRKTVVHGGSLIPHPFGVSLFEGQVFFTDWTKMAVLKANKFTETNPQVYYQASLRPYGVTVYHSLRQPYATNPCKDNNGGCEQVCVLSHRTDNDGLGFRCKCTFGFQLDTDERHCIAVQNFLIFSSQVAIRGIPFTLSTQEDVMVPVSGNPSFFVGIDFDAQDSTIFFSDMSKHMIFKQKIDGTGREILAANRVENVESLAFDWISKNLYWTDSHYKSISVMRLADKTRRTVVQYLNNPRSVVVHPFAGYLFFTDWFRPAKIMRAWSDGSHLLPVINTTLGWPNGLAIDWAASRLYWVDAYFDKIEHSTFDGLDRRRLGHIEQMTHPFGLAIFGEHLFFTDWRLGAIIRVRKADGGEMTVIRSGIAYILHLKSYDVNIQTGSNACNQPTHPNGDCSHFCFPVPNFQRVCGCPYGMRLASNHLTCEGDPTNEPPTEQCGLFSFPCKNGRCVPNYYLCDGVDDCHDNSDEQLCGTLNNTCSSSAFTCGHGECIPAHWRCDKRNDCVDGSDEHNCPTHAPASCLDTQYTCDNHQCISKNWVCDTDNDCGDGSDEKNCNSTETCQPSQFNCPNHRCIDLSFVCDGDKDCVDGSDEVGCVLNCTASQFKCASGDKCIGVTNRCDGVFDCSDNSDEAGCPTRPPGMCHSDEFQCQEDGICIPNFWECDGHPDCLYGSDEHNACVPKTCPSSYFHCDNGNCIHRAWLCDRDNDCGDMSDEKDCPTQPFRCPSWQWQCLGHNICVNLSVVCDGIFDCPNGTDESPLCNGNSCSDFNGGCTHECVQEPFGAKCLCPLGFLLANDSKTCEDIDECDILGSCSQHCYNMRGSFRCSCDTGYMLESDGRTCKVTASESLLLLVASQNKIIADSVTSQVHNIYSLVENGSYIVAVDFDSISGRIFWSDATQGKTWSAFQNGTDRRVVFDSSIILTETIAIDWVGRNLYWTDYALETIEVSKIDGSHRTVLISKNLTNPRGLALDPRMNEHLLFWSDWGHHPRIERASMDGSMRTVIVQDKIFWPCGLTIDYPNRLLYFMDSYLDYMDFCDYNGHHRRQVIASDLIIRHPYALTLFEDSVYWTDRATRRVMRANKWHGGNQSVVMYNIQWPLGIVAVHPSKQPNSVNPCAFSRCSHLCLLSSQGPHFYSCVCPSGWSLSPDLLNCLRDDQPFLITVRQHIIFGISLNPEVKSNDAMVPIAGIQNGLDVEFDDAEQYIYWVENPGEIHRVKTDGTNRTVFASISMVGPSMNLALDWISRNLYSTNPRTQSIEVLTLHGDIRYRKTLIANDGTALGVGFPIGITVDPARGKLYWSDQGTDSGVPAKIASANMDGTSVKTLFTGNLEHLECVTLDIEEQKLYWAVTGRGVIERGNVDGTDRMILVHQLSHPWGIAVHDSFLYYTDEQYEVIERVDKATGANKIVLRDNVPNLRGLQVYHRRNAAESSNGCSNNMNACQQICLPVPGGLFSCACATGFKLNPDNRSCSPYNSFIVVSMLSAIRGFSLELSDHSETMVPVAGQGRNALHVDVDVSSGFIYWCDFSSSVASDNAIRRIKPDGSSLMNIVTHGIGENGVRGIAVDWVAGNLYFTNAFVSETLIEVLRINTTYRRVLLKVTVDMPRHIVVDPKNRYLFWADYGQRPKIERSFLDCTNRTVLVSEGIVTPRGLAVDRSDGYVYWVDDSLDIIARIRINGENSEVIRYGSRYPTPYGITVFENSIIWVDRNLKKIFQASKEPENTEPPTVIRDNINWLRDVTIFDKQVQPRSPAEVNNNPCLENNGGCSHLCFALPGLHTPKCDCAFGTLQSDGKNCAISTENFLIFALSNSLRSLHLDPENHSPPFQTINVERTVMSLDYDSVSDRIYFTQNLASGVGQISYATLSSGIHTPTVIASGIGTADGIAFDWITRRIYYSDYLNQMINSMAEDGSNRTVIARVPKPRAIVLDPCQGYLYWADWDTHAKIERATLGGNFRVPIVNSSLVMPSGLTLDYEEDLLYWVDASLQRIERSTLTGVDREVIVNAAVHAFGLTLYGQYIYWTDLYTQRIYRANKYDGSGQIAMTTNLLSQPRGINTVVKNQKQQCNNPCEQFNGGCSHICAPGPNGAECQCPHEGNWYLANNRKHCIVDNGERCGASSFTCSNGRCISEEWKCDNDNDCGDGSDEMESVCALHTCSPTAFTCANGRCVQYSYRCDYYNDCGDGSDEAGCLFRDCNATTEFMCNNRRCIPREFICNGVDNCHDNNTSDEKNCPDRTCQSGYTKCHNSNICIPRVYLCDGDNDCGDNSDENPTYCTTHTCSSSEFQCASGRCIPQHWYCDQETDCFDASDEPASCGHSERTCLADEFKCDGGRCIPSEWICDGDNDCGDMSDEDKRHQCQNQNCSDSEFLCVNDRPPDRRCIPQSWVCDGDVDCTDGYDENQNCTRRTCSENEFTCGYGLCIPKIFRCDRHNDCGDYSDERGCLYQTCQQNQFTCQNGRCISKTFVCDEDNDCGDGSDELMHLCHTPEPTCPPHEFKCDNGRCIEMMKLCNHLDDCLDNSDEKGCGINECHDPSISGCDHNCTDTLTSFYCSCRPGYKLMSDKRTCVDIDECTEMPFVCSQKCENVIGSYICKCAPGYLREPDGKTCRQNSNIEPYLIFSNRYYLRNLTIDGYFYSLILEGLDNVVALDFDRVEKRLYWIDTQRQVIERMFLNKTNKETIINHRLPAAESLAVDWVSRKLYWLDARLDGLFVSDLNGGHRRMLAQHCVDANNTFCFDNPRGLALHPQYGYLYWADWGHRAYIGRVGMDGTNKSVIISTKLEWPNGITIDYTNDLLYWADAHLGYIEYSDLEGHHRHTVYDGALPHPFAITIFEDTIYWTDWNTRTVEKGNKYDGSNRQTLVNTTHRPFDIHVYHPYRQPIVSNPCGTNNGGCSHLCLIKPGGKGFTCECPDDFRTLQLSGSTYCMPMCSSTQFLCANNEKCIPIWWKCDGQKDCSDGSDELALCPQRFCRLGQFQCSDGNCTSPQTLCNAHQNCPDGSDEDRLLCENHHCDSNEWQCANKRCIPESWQCDTFNDCEDNSDEDSSHCASRTCRPGQFRCANGRCIPQAWKCDVDNDCGDHSDEPIEECMSSAHLCDNFTEFSCKTNYRCIPKWAVCNGVDDCRDNSDEQGCEERTCHPVGDFRCKNHHCIPLRWQCDGQNDCGDNSDEENCAPRECTESEFRCVNQQCIPSRWICDHYNDCGDNSDERDCEMRTCHPEYFQCTSGHCVHSELKCDGSADCLDASDEADCPTRFPDGAYCQATMFECKNHVCIPPYWKCDGDDDCGDGSDEELHLCLDVPCNSPNRFRCDNNRCIYSHEVCNGVDDCGDGTDETEEHCRKPTPKPCTEYEYKCGNGHCIPHDNVCDDADDCGDWSDELGCNKGKERTCAENICEQNCTQLNEGGFICSCTAGFETNVFDRTSCLDINECEQFGTCPQHCRNTKGSYECVCADGFTSMSDRPGKRCAAEGSSPLLLLPDNVRIRKYNLSSERFSEYLQDEEYIQAVDYDWDPKDIGLSVVYYTVRGEGSRFGAIKRAYIPNFESGRNNLVQEVDLKLKYVMQPDGIAVDWVGRHIYWSDVKNKRIEVAKLDGRYRKWLISTDLDQPAAIAVNPKLGLMFWTDWGKEPKIESAWMNGEDRNILVFEDLGWPTGLSIDYLNNDRIYWSDFKEDVIETIKYDGTDRRVIAKEAMNPYSLDIFEDQLYWISKEKGEVWKQNKFGQGKKEKTLVVNPWLTQVRIFHQLRYNKSVPNLCKQICSHLCLLRPGGYSCACPQGSSFIEGSTTECDAAIELPINLPPPCRCMHGGNCYFDETDLPKCKCPSGYTGKYCEMAFSKGISPGTTAVAVLLTILLIVVIGALAIAGFFHYRRTGSLLPALPKLPSLSSLVKPSENGNGVTFRSGADLNMDIGVSGFGPETAIDRSMAMSEDFVMEMGKQPIIFENPMYSARDSAVKVVQPIQVTVSENVDNKNYGSPINPSEIVPETNPTSPAADGTQVTKWNLFKRKSKQTTNFENPIYAQMENEQKESVAATPPPSPSLPAKPKPPSRRDPTPTYSATEDTFKDTANLVKEDSEV

SEQ ID NO: 8020 - protein, 1225 aa, Homo Sapiens
MDRGPAAVACTLLLALVACLAPASGQECDSAHFRCGSGHCIPADWRCDGTKDCSDDADEIGCAVVTCQQGYFKCQSEGQCIPNSWVCDQDQDCDDGSDERQDCSQSTCSSHQITCSNGQCIPSEYRCDHVRDCPDGADENDCQYPTCEQLTCDNGACYNTSQKCDWKVDCRDSSDEINCTEICLHNEFSCGNGECIPRAYVCDHDNDCQDGSDEHACNYPTCGGYQFTCPSGRCIYQNWVCDGEDDCKDNGDEDGCESGPHDVHKCSPREWSCPESGRCISIYKVCDGILDCPGREDENNTSTGKYCSMTLCSALNCQYQCHETPYGGACFCPPGYIINHNDSRTCVEFDDCQIWGICDQKCESRPGRHLCHCEEGYILERGQYCKANDSFGEASIIFSNGRDLLIGDIHGRSFRILVESQNRGVAVGVAFHYHLQRVFWTDTVQNKVFSVDINGLNIQEVLNVSVETPENLAVDWVNNKIYLVETKVNRIDMVNLDGSYRVTLITENLGHPRGIAVDPTVGKTVVHGGSLIPHPFGVSLFEGQVFFTDWTKMAVLKANKFTETNPQVYYQASLRPYGVTVYHSLRQPYATNPCKDNNGGCEQVCVLSHRTDNDGLGFRCKCTFGFQLDTDERHCIGREILAANRVENVESLAFDWISKNLYWTDSHYKSISVMRLADKTRRTVVQYLNNPRSVVVHPFAGYLFFTDWFRPAKIMRAWSDGSHLLPVINTTLGWPNGLAIDWAASRLYWVDAYFDKIEHSTFDGLDRRRLGHIEQMTHPFGLAIFGEHLFFTDWRLGAIIRVRKADGGEMTVIRSGIAYILHLKSYDVNIQTGSNACNQPTHPNGDCSHFCFPVPNFQRVCGCPYGMRLASNHLTCEGDPTNEPPTEQCGLFSFPCKNGRCVPNYYLCDGVDDCHDNSDEQLCGTLNNTCSSSAFTCGHGECIPAHWRCDKRNDCVDGSDEHNCPTHAPASCLDTQYTCDNHQCISKNWVCDTDNDCGDGSDEKNCNSTETCQPSQFNCPNHRCIDLSFVCDGDKDCVDGSDEVGCVLNCTASQFKCASGDKCIGVTNRCDGVFDCSDNSDEAGCPTRPPGMCHSDEFQCQEDGICIPNFWECDGHPDCLYGSDEHNACVPKTCPSSYFHCDNGNCIHRAWLCDRDNDCGDMSDEKDCPTQPFRCPSWQWQCLGHNICVNLSVVCDGIFDCPNGTDESPLCSKFPDHSLLAINSF

SEQ ID NO: 8021 - protein, 1905 aa, Homo Sapiens
MRRQWGALLLGALLCAHGLASSPECACGRSHFTCAVSALGECTCIPAQWQCDGDNDCGDHSDEDGCILPTCSPLDFHCDNGKCIRRSWVCDGDNDCEDDSDEQDCPPRECEEDEFPCQNGYCIRSLWHCDGDNDCGDNSDEQCDMRKCSDKEFRCSDGSCIAEHWYCDGDTDCKDGSDEENCPSAVPAPPCNLEEFQCAYGRCILDIYHCDGDDDCGDWSDESDCSSHQPCRSGEFMCDSGLCINAGWRCDGDADCDDQSDERNCTTSMCTAEQFRCHSGRCVRLSWRCDGEDDCADNSDEENCENTGSPQCALDQFLCWNGRCIGQRKLCNGVNDCGDNSDESPQQNCRPRTGEENCNVNNGGCAQKCQMVRGAVQCTCHTGYRLTEDGHTCQDVNECAEEGYCSQGCTNSEGAFQCWCETGYELRPDRRSCKALGPEPVLLFANRIDIRQVLPHRSEYTLLLNNLENAIALDFHHRRELVFWSDVTLDRILRANLNGSNVEEVVSTGLESPGGLAVDWVHDKLYWTDSGTSRIEVANLDGAHRKVLLWQNLEKPRAIALHPMEGTIYWTDWGNTPRIEASSMDGSGRRIIADTHLFWPNGLTIDYAGRRMYWVDAKHHVIERANLDGSHRKAVISQGLPHPFAITVFEDSLYWTDWHTKSINSANKFTGKNQEIIRNKLHFPMDIHTLHPQRQPAGKNRCGDNNGGCTHLCLPSGQNYTCACPTGFRKISSHACAQSLDKFLLFARRMDIRRISFDTEDLSDDVIPLADVRSAVALDWDSRDDHVYWTDVSTDTISRAKWDGTGQEVVVDTSLESPAGLAIDWVTNKLYWTDAGTDRIEVANTDGSMRTVLIWENLDRPRDIVVEPMGGYMYWTDWGASPKIERAGMDASGRQVIISSNLTWPNGLAIDYGSQRLYWADAGMKTIEFAGLDGSKRKVLIGSQLPHPFGLTLYGERIYWTDWQTKSIQSADRLTGLDRETLQENLENLMDIHVFHRRRPPVSTPCAMENGGCSHLCLRSPNPSGFSCTCPTGINLLSDGKTCSPGMNSFLIFARRIDIRMVSLDIPYFADVVVPINITMKNTIAIGVDPQEGKVYWSDSTLHRISRANLDGSQHEDIITTGLQTTDGLAVDAIGRKVYWTDTGTNRIEVGNLDGSMRKVLVWQNLDSPRAIVLYHEMGFMYWTDWGENAKLERSGMDGSDRAVLINNNLGWPNGLTVDKASSQLLWADAHTERIEAADLNGANRHTLVSPVQHPYGLTLLDSYIYWTDWQTRSIHRADKGTGSNVILVRSNLPGLMDMQAVDRAQPLGFNKCGSRNGGCSHLCLPRPSGFSCACPTGIQLKGDGKTCDPSPETYLLFSSRGSIRRISLDTSDHTDVHVPVPELNNVISLDYDSVDGKVYYTDVFLDVIRRADLNGSNMETVIGRGLKTTDGLAVDWVARNLYWTDTGRNTIEASRLDGSCRKVLINNSLDEPRAIAVFPRKGYLFWTDWGHIAKIERANLDGSERKVLINTDLGWPNGLTLDYDTRRIYWVDAHLDRIESADLNGKLRQVLVSHVSHPFALTQQDRWIYWTDWQTKSIQRVDKYSGRNKETVLANVEGLMDIIVVSPQRQTGTNACGVNNGGCTHLCFARASDFVCACPDEPDSRPCSLVPGLVPPAPRATGMSEKSPVLPNTPPTTLYSSTTRTRTSLEEVEGRCSERDARLGLCARSNDAVPAAPGEGLHISYAIGGLLSILLILVVIAALMLYRHKKSKFTDPGMGNLTYSNPSYRTSTQEVKIEAIPKPAMYNQLCYKKEGGPDHNYTKEKIKIVEGICLLSGDDAEWDDLKQLRSSRGGLLRDHVCMKTDTVSIQASSGSLDDTETEQLLQEEQSECSSVHTAATPERRGSLPDTGWKHERKLSSESQV

SEQ ID NO: 8022 - protein, 133 aa, Homo Sapiens
MRRQWGALLLGALLCAHVLPTCSPLDFHCDNGKCIRRSWVCDGDNDCEDDSDEQDCPPRECEEDEFPCQNGYCIRSLWHCDGDNDCGDNSDEQCDMRKCSDKEFRCSDGSCIAEHWYCDGDTDCKDGSDEENC

SEQ ID NO: 8023 - protein, 357 aa, Homo Sapiens
MAPRRVRSFLRGLPALLLLLLFLGPWPAASHGGKYSREKNQPKPSPKRESGEEFRMEKLNQLWEKAQRLHLPPVRLAELHADLKIQERDELAWKKLKLDGLDEDGEKEARLIRNLNVILAKYGLDGKKDARQVTSNSLSGTQEDGLDDPRLEKLWHKAKTSGKFSGEELDKLWREFLHHKEKVHEYNVLLETLSRTEEIHENVISPSDLSDIKGSVLHSRHTELKEKLRSINQGLDRLRRVSHQGYSTEAEFEEPRVIDLWDLAQSANLTDKELEAFREELKHFEAKIEKHNHYQKQLEIAHEKLRHAESVGDGERVSRSREKHALLEGRTKELGYTVKKHLQDLSGRISRARHNEL

SEQ ID NO: 8024 - protein, 105 aa, Homo Sapiens
MAPRRVRSFLRGLPALLLLLLFLGPWPAASHGGKYSREKNQPKPSPKRESGEEFRMEKLNQLWEKAQRNLPVASLLRGQFLAVSWSVLLVAHRLLPFVRSCIFLP

SEQ ID NO: 8025 - protein, 104 aa, Homo Sapiens
MRVVTIVILLCFCKAAELRKASPGSVRSRVNHGRAGGGRRGSNPVKRYAPGLPCDVYTYLHEKYLDCQERKLVYVLPGWPQDLLHMLLARNKIRTLKNNMFSKF

SEQ ID NO: 8026 - protein, 313 aa, Homo Sapiens
MRVVTIVILLCFCKAAELRKASPGSVRSRVNHGRAGGGRRGSNPVKRYAPGLPCDVYTYLHEKYLDCQERKLVYVLPGWPQDLLHMLLARNKIRTLKNNMFSKFKKLKSLDLQQNEISKIESEAFFGLNKLTTLLLQHNQIKVLTEEVFIYTPLLSYLRLYDNPWHCTCEIETLISMLQIPRNRNLGNYAKCESPQEQKNKKLRQIKSEQLCNEEEKEQLDPKPQVSGRPPVIKPEVDSTFCHNYVFPIQTLDCKRKELKKVPNNIPPDIVKLDLSYNKINQLRPKEFEDVHELKKLNLSSNGIEFIDPGSLR

SEQ ID NO: 8027 - protein, 441 aa, Homo Sapiens
MRVVTIVILLCFCKAAELRKASPGSVRSRVNHGRAGGGRRGSNPVKRYAPGLPCDVYTYLHEKYLDCQERKLVYVLPGWPQDLLHMLLARNKIRTLKNNMFSKFKKLKSLDLQQNEISKIESEAFFGLNKLTTLLLQHNQIKVLTEEVFIYTPLLSYLRLYDNPWHCTCEIETLISMLQIPRNRNLGNYAKCESPQEQKNKKLRQIKSEQLCNEEEKEQLDPKPQVSGRPPVIKPEVDSTFCHNYVFPIQTLDCKRKELKKVPNNIPPDIVKLDLSYNKINQLRPKEFEDVHELKKLNLSSNGIEFIDPAAFLGLTHLEELDLSNNSLQNFDYGVLEDLYFLKLLWLRDNPWRCDYNIHYLYYWLKHHYNVHFNGLECKTPEEYKGWSVGKYIRSYYEECPKDKLPAYPESFDQDTEDDEWEKKHRDHTAKKQSVIITIVG

SEQ ID NO: 8028 - protein, 186 aa, Homo Sapiens
MRPQILLLLALLTLGLAAQHQDKVPCKMVDKKVSCQVLGLLQVPSVLPPDTETLDLSGNQLRSILASPLGFYTALRHLDLSTNEISFLQPGAFQALTHLEHLSLAHNRLAMATALSAGGLGPLPRVTSLDLSGNSLYSGLLERLLGEAPSLHTLSLAENSLTRLTRHTFRDMPALEQLDLHSNVLM

SEQ ID NO: 8029 - protein, 662 aa, Homo Sapiens
MRPQILLLLALLTLGLAAQHQDKVPCKMVDKKVSCQVLGLLQVPSVLPPDTETLDLSGNQLRSILASPLGFYTALRHLDLSTNEISFLQPGAFQALTHLEHLSLAHNRLAMATALSAGGLGPLPRVTSLDLSGNSLYSGLLERLLGEAPSLHTLSLAENSLTRLTRHTFRDMPALEQLDLHSNVLMDIEDGAFEGLPRLTHLNLSRNSLTCISDFSLQQLRVLDLSCNSIEAFQTASQPQAEFQLTWLDLRENKLLHFPDLAALPRLIYLNLSNNLIRLPTGPPQDSKGIHAPSEGWSALPLSAPSGNASGRPLSQLLNLDLSYNEIELIPDSFLEHLTSLCFLNLSRNCLRTFEARRLGSLPCLMLLDLSHNALETLELGARALGSLRTLLLQGNALRDLPPYTFANLASLQRLNLQGNRVSPCGGPDEPGPSGCVAFSGITSLRSLSLVDNEIELLRAGAFLHTPLTELDLSSNPGLEVATGALGGLEASLEVLALQGNGLMVLQVDLPCFICLKRLNLAENRLSHLPAWTQAVSLEVLDLRNNSFSLLPGSAMGGLETSLRRLYLQGNPLSCCGNGWLAAQLHQGRVDVDATQDLICRFSSQEEVSLSHVRPEDCEKGGLKNINLIIILTFILVSAILLTTLAACCCVRRQKFNQQYKA

SEQ ID NO: 8030 - protein, 662 aa, Homo Sapiens; identical to SEQ ID NO: 8029

SEQ ID NO: 8031 - protein, 662 aa, Homo Sapiens; identical to SEQ ID NO: 8029

SEQ ID NO: 8032 - protein, 55 aa, Homo Sapiens
MNLVDLWLTRSLSMCLLLQSFVLMILCFHSASMCPKGCLCSSSGGLNVTCSNANL

SEQ ID NO: 8033 - protein, 163 aa, Homo Sapiens
MNLVDLWLTRSLSMCLLLQSFVLMILCFHSASMCPKGCLCSSSGGLNVTCSNANLKEIPRDLPPETVLLYLDSNQITSIPNEIFKDLHQLRVLNLSKNGIEFIDEHAFKGVAETLQTLDLSDNRIQSVHKNAFNNLKARARIANNPWHCDCTLQQVLRSMASN

SEQ ID NO: 8034 - protein, 259 aa, Homo Sapiens
MNLVDLWLTRSLSMCLLLQSFVLMILCFHSASMCPKGCLCSSSGGLNVTCSNANLKEIPRDLPPETVLLYLDSNQITSIPNEIFKDLHQLRVLNLSKNGIEFIDEHAFKGVAETLQTLDLSDNRIQSVHKNAFNNLKARARIANNPWHCDCTLQQVLRSMASNHETAHNVICKTSVLDEHAGRPFLNAANDADLCNLPKKTTDYAMLVTMFGWFTMVISYVVYYVRQNQEDARRHLEYLKSLPSRQKKADEPDDISTVV

SEQ ID NO: 8035 - protein, 259 aa, Homo Sapiens; identical to SEQ ID NO: 8034

SEQ ID NO: 8036 - protein, 259 aa, Homo Sapiens; identical to SEQ ID NO: 8034

SEQ ID NO: 8037 - protein, 238 aa, Homo Sapiens
MARARGSPCPPLPPGRMSWPHGALLFLWLFSPPLGAGGGGVAVTSAAGGGSPPATSCPVACSCSNQASRVICTRRDLAEVPASIPVNTRYLNLQENGIQVIRTDTFKHLRHLEILQLSKNLVRKIEVGAFNGLPSLNTLELFDNRLTTVPTQAFEYLSKLRELWLRNNPIESIPSYAFNRVPSLRRLDLGELKRLEYISEAAFEGLVNLRYLNLGMCNLKDIPNLTALVRLEELELSG

SEQ ID NO: 8038 - protein, 713 aa, Homo Sapiens
MARARGSPCPPLPPGRMSWPHGALLFLWLFSPPLGAGGGGVAVTSAAGGGSPPATSCPVACSCSNQASRVICTRRDLAEVPASIPVNTRYLNLQENGIQVIRTDTFKHLRHLEILQLSKNLVRKIEVGAFNGLPSLNTLELFDNRLTTVPTQAFEYLSKLRELWLRNNPIESIPSYAFNRVPSLRRLDLGELKRLEYISEAAFEGLVNLRYLNLGMCNLKDIPNLTALVRLEELELSGNRLDLIRPGSFQGLTSLRKLWLMHAQVATIERNAFDDLKSLEELNLSHNNLMSLPHDLFTPLHRLERVHLNHNPWHCNCDVLWLSWWLKETVPSNTTCCARCHAPAGLKGRYIGELDQSHFTCYAPVIVEPPTDLNVTEGMAAELKCRTGTSMTSVNWLTPNGTLMTHGSYRVRISVLHDGTLNFTNVTVQDTGQYTCMVTNSAGNTTASATLNVSAVDPVAAGGTGSGGGGPGGSGGVGGGSGGYTYFTTVTVETLETQPGEEALQPRGTEKEPPGPTTDGVWGGGRPGDAAGPASSSTTAPAPRSSRPTEKAFTVPITDVTENALKDLDDVMKTTKIIIGCFVAITFMAAVMLVAFYKLRKQHQLHKHHGPTRTVEIINVEDELPAASAVSVAAAAAVASGGGVGGDSHLALPALERDHLNHHHYVAAAFKAHYSSNPSGGGCGGKGPPGLNSIHEPLLFKSGSKENVQETQI

SEQ ID NO: 8039 - protein, 713 aa, Homo Sapiens; identical to SEQ ID NO: 8038

SEQ ID NO: 8040 - protein, 71 aa, Homo Sapiens
MCGLQFSLPCLRLFLVVTCYLLLLLHKEILGCSSVCQLCTGRQINCRNLGLSSIPKNFPESTVFLLASKGP

SEQ ID NO: 8041 - protein, 622 aa, Homo Sapiens
MCGLQFSLPCLRLFLVVTCYLLLLLHKEILGCSSVCQLCTGRQINCRNLGLSSIPKNFPESTVFLYLTGNNISYINESELTGLHSLVALYLDNSNILYVYPKAFVQLRHLYFLFLNNNFIKRLDPGIFKGLLNLRNLYLQYNQVSFVPRGVFNDLVSVQYLNLQRNRLTVLGSGTFVGMVALRILDLSNNNILRISESGFQHLENLACLYLGSNNLTKVPSNAFEVLKSLRRLSLSHNPIEAIQPFAFKGLANLEYLLLKNSRIRNVTRDGFSGINNLKHLILSHNDLENLNSDTFSLLKNLIYLKLDRNRIISIDNDTFENMGASLKILNLSFNNLTALHPRVLKPLSSLIHLQANSNPWECNCKLLGLRDWLASSAITLNIYCQNPPSMRGRALRYINITNCVTSSINVSRAWAVVKSPHIHHKTTALMMAWHKVTTNGSPLENTETENITFWERIPTSPAGRFFQENAFGNPLETTAVLPVQIQLTTSVTLNLEKNSALPNDAASMSGKTSLICTQEVEKLNEAFDILLAFFILACVLIIFLIYKVVQFKQKLKASENSRENRLEYYSFYQSARYNVTASICNTSPNSLESPGLEQIRLHKQIVPENEAQVILFEHSAL

SEQ ID NO: 8042 - protein, 708 aa, Homo Sapiens
MKDMPLRIHVLLGLAITTLVQAVDKKVDCPRLCTCEIRPWFTPRSIYMEASTVDCNDLGLLTFPARLPANTQILLLQTNNIAKIEYSTDFPVNLTGLDLSQNNLSSVTNINVKKMPQLLSVYLEENKLTELPEKCLSELSNLQELYINHNLLSTISPGAFIGLHNLLRLHLNSNRLQMINSKWFDALPNLEILMIGENPIIRIKDMNFKPLINLRSLVIAGINLTEIPDNALVGLENLESISFYDNRLIKVPHVALQKVVNLKFLDLNKNPINRIRRGDFSNMLHLKELGINNMPELISIDSLAVDNLPDLRKIEATNNPRLSYIHPNAFFRLPKLESLMLNSNALSALYHGTIESLPNLKEISIHSNPIRCDCVIRWMNMNKTNIRFMEPDSLFCVDPPEFQGQNVRQVHFRDMMEICLPLIAPESFPSNLNVEAGSYVSFHCRATAEPQPEIYWITPSGQKLLPNTLTDKFYVHSEGTLDINGVTPKEGGLYTCIATNLVGADLKSVMIKVDGSFPQDNNGSLNIKIRDIQANSVLVSWKASSKILKSSVKWTAFVKTENSHAAQSARIPSDVKVYNLTHLNPSTEYKICIDIPTIYQKNRKKCVNVTTKGLHPDQKEYEKNNTTTLMACLGGLLGIIGVICLISCLSPEMNCDGGHSYVRNYLQKPTFALGELYPPLINLWEAGKEKSTSLKVKATVIGLPTNMS

SEQ ID NO: 8043 - protein, 708 aa, Homo Sapiens; identical to SEQ ID NO: 8042

SEQ ID NO: 8044 - protein, 273 aa, Homo Sapiens
MKDMPLRIHVLLGLAITTLVQAVDKKVDCPRLCTCEIRPWFTPRSIYMEASTVDCNDLGLLTFPARLPANTQILLLQTNNIAKIEYSTDFPVNLTGLDLSQNNLSSVTNINVKKMPQLLSVYLEENKLTELPEKCLSELSNLQELYINHNLLSTISPGAFIGLHNLLRLHLNSNRLQMINSKWFDALPNLEILMIGENPIIRIKDMNFKPLINLRSLVIAGINLTEIPDNALVGLENLESISFYDNRLIKVPHVALQKVVNLKFLDLNKNPIN

SEQ ID NO: 8045 - protein, 708 aa, Homo Sapiens; identical to SEQ ID NO: 8042

SEQ ID NO: 8046 - protein, 109 aa, Homo Sapiens
MDFLLLGLCLYWLLRRPSGVVLCLLGACFQMLPAAPSGCPQLCRCEGRLLYCEALNLTEAPHNLSGLLGLSLRYNSLSELRAGQFTGLMQLTWLYLDHNHICSVQGDAF

SEQ ID NO: 8047 - protein, 183 aa, Homo Sapiens
MDFLLLGLCLYWLLRRPSGVVLCLLGACFQMLPAAPSGCPQLCRCEGRLLYCEALNLTEAPHNLSGLLGLSLRYNSLSELRAGQFTGLMQLTWLYLDHNHICSVQGDAFQKLRRVKELTLSSNQITQLPNTTFRPMPNLRSVDLSYNKLQALAPDLFHGLRKLTTLHMRANAIQFVPVRIFQD

SEQ ID NO: 8048 - protein, 223 aa, Homo Sapiens
MDFLLLGLCLYWLLRRPSGVVLCLLGACFQMLPAAPSGCPQLCRCEGRLLYCEALNLTEAPHNLSGLLGLSLRYNSLSELRAGQFTGLMQLTWLYLDHNHICSVQGDAFQKLRRVKELTLSSNQITQLPNTTFRPMPNLRSVDLSYNKLQALAPDLFHGLRKLTTLHMRANAIQFVPVRIFQDCRSLKFLDIGYNQLKSLARNSFAGLFKLTELHLEHNDLVK

SEQ ID NO: 8049 - protein, 522 aa, Homo Sapiens
MDFLLLGLCLYWLLRRPSGVVLCLLGACFQMLPAAPSGCPQLCRCEGRLLYCEALNLTEAPHNLSGLLGLSLRYNSLSELRAGQFTGLMQLTWLYLDHNHICSVQGDAFQKLRRVKELTLSSNQITQLPNTTFRPMPNLRSVDLSYNKLQALAPDLFHGLRKLTTLHMRANAIQFVPVRIFQDCRSLKFLDIGYNQLKSLARNSFAGLFKLTELHLEHNDLVKVNFAHFPRLISLHSLCLRRNKVAIVVSSLDWVWNLEKMDLSGNEIEYMEPHVFETVPHLQSLQLDSNRLTYIEPRILNSWKSLTSITLAGNLWDCGRNVCALASWLNNFQGRYDGNLQCASPEYAQGEDVLDAVYAFHLCEDGAEPTSGHLLSAVTNRSDLGPPASSATTLADGGEGQHDGTFEPATVALPGGEHAENAVQIHKVVTGTMALIFSFLIVVLVLYVSWKCFPASLRQLRQCFVTQRRKQKQKQTMHQMAAMSAQEYYVDYKPNHIEGALVIINEYGSCTCHQQPARECEV

SEQ ID NO: 8050 - protein, 522 aa, Homo Sapiens; identical to SEQ ID NO: 8049

SEQ ID NO: 8051 - protein, 522 aa, Homo Sapiens; identical to SEQ ID NO: 8049

SEQ ID NO: 8052 - protein, 522 aa, Homo Sapiens; identical to SEQ ID NO: 8049

SEQ ID NO: 8053 - protein, 38 aa, Homo Sapiens
MAVISAPRALLWPSEAADLAFTFQLPADYPSTPVLGLS

SEQ ID NO: 8054 - protein, 516 aa, Homo Sapiens
MGLHFKWPLGAPMLAAIYAMSMVLKMLPALGMACPPKCRCEKLLFYCDSQGFHSVPNATDKGSLGLSLRHNHITELERDQFASFSQLTWLHLDHNQISTVKEDAFQGLYKLKELILSSNKIFYLPNTTFTQLINLQNLDLSFNQLSSLHPELFYGLRKLQTLHLRSNSLRTIPVRLFWDCRSLEFLDLSTNRLRSLARNGFAGLIKLRELHLEHNQLTKINFAHFLRLSSLHTLFLQWNKISNLTCGMEWTWGTLEKLDLTGNEIKAIDLTVFETMPNLKILLMDNNKLNSLDSKILNSLRSLTTVGLSGNLWECSARICALASWLGSFQGRWEHSILCHSPDHTQGEDILDAVHGFQLCWNLSTTVTVMATTYRDPTTEYTKRISSSSYHVGDKEIPTTAGIAVTTEEHFPEPDNAIFTQRVITGTMALLFSFFFIIFIVFISRKCCPPTLRRIRQCSMVQNHRQLRSQTRLHMSNMSDQGPYNEYEPTHEGPFIIINGYGQCKCQQLPYKECEV

SEQ ID NO: 8055 - protein, 77 aa, Homo Sapiens
MVFISRKCCPPTLRRIRQCSMVQNHRQLRSQTRLHMSNMSDQGPYNEYEPTHEGPFIIINGYGQCKCQQLPYKECEV

SEQ ID NO: 8056 - protein, 590 aa, Homo Sapiens
MGFHLITQLKGMSVVLVLLPTLLLVMLTGAQRACPKNCRCDGKIVYCESHAFADIPENISGGSQGLSLRFNSIQKLKSNQFAGLNQLIWLYLDHNYISSVDEDAFQGIRRLKELILSSNKITYLHNKTFHPVPNLRNLDLSYNKLQTLQSEQFKGLRKLIILHLRSNSLKTVPIRVFQDCRNLDFLDLGYNRLRSLSRNAFAGLLKLKELHLEHNQFSKINFAHFPRLFNLRSIYLQWNRIRSISQGLTWTWSSLHNLDLSGNDIQGIEPGTFKCLPNLQKLNLDSNKLTNISQETVNAWISLISITLSGNMWECSRSICPLFYWLKNFKGNKESTMICAGPKHIQGEKVSDAVETYNICSEVQVVNTERSHLVPQTPQKPLIIPRPTIFKPDVTQSTFETPSPSPGFQIPGAEQEYEHVSFHKIIAGSVALFLSVAMILLVIYVSWKRYPASMKQLQQHSLMKRRRKKARESERQMNSPLQEYYVDYKPTNSETMDISVNGSGPCTYTISGSRECEMPHHMKPLPYYSYDQPVIGYCQAHQPLHVTKGYETVSPEQDESPGLELGRDHSFIATIARSAAPAIYLERIAN

SEQ ID NO: 8057 - protein, 518 aa, Homo Sapiens
MGFHLITQLKGMSVVLVLLPTLLLVMLTGAQRACPKNCRCDGKIVYCESHAFADIPENISGGSQGLSLRFNSIQKLKSNQFAGLNQLIWLYLDHNYISSVDEDAFQGIRRLKELILSSNKITYLHNKTFHPVPNLRNLDLSYNKLQTLQSEQFKGLRKLIILHLRSNSLKTVPIRVFQDCRNLDFLDLGYNRLRSLSRNAFAGLLKLKELHLEHNQFSKINFAHFPRLFNLRSIYLQWNRIRSISQGLTWTWSSLHNLDLSGNDIQGIEPGTFKCLPNLQKLNLDSNKLTNISQETVNAWISLISITLSGNMWECSRSICPLFYWLKNFKGNKESTMICAGPKHIQGEKVSDAVETYNICSEVQVVNTERSHLVPQTPQKPLIIPRPTIFKPDVTQSTFETPSPSPGFQIPGAEQEYEHVSFHKIIAGSVALFLSVAMILLVIYVSWKRYPASMKQLQQHSLMKRRRKKARESERQMNSPLQEYYVDYKPTNSETMDISVNGSGPCTYTISGSRECEV

SEQ ID NO: 8058 - protein, 590 aa, Homo Sapiens; identical to SEQ ID NO: 8056

SEQ ID NO: 8059 - protein, 591 aa, Homo Sapiens
MPGFHLITQLKGMSVVLVLLPTLLLVMLTGAQRACPKNCRCDGKIVYCESHAFADIPENISGGSQGLSLRFNSIQKLKSNQFAGLNQLIWLYLDHNYISSVDEDAFQGIRRLKELILSSNKITYLHNKTFHPVPNLRNLDLSYNKLQTLQSEQFKGLRKLIILHLRSNSLKTVPIRVFQDCRNLDFLDLGYNRLRSLSRNAFAGLLKLKELHLEHNQFSKINFAHFPRLFNLRSIYLQWNRIRSISQGLTWTWSSLHNLDLSGNDIQGIEPGTFKCLPNLQKLNLDSNKLTNISQETVNAWISLISITLSGNMWECSRSICPLFYWLKNFKGNKESTMICAGPKHIQGEKVSDAVETYNICSEVQVVNTERSHLVPQTPQKPLIIPRPTIFKPDVTQSTFETPSPSPGFQIPGAEQEYEHVSFHKIIAGSVALFLSVAMILLVIYVSWKRYPASMKQLQQHSLMKRRRKKARESERQMNSPLQEYYVDYKPTNSETMDISVNGSGPCTYTISGSRECEMPHHMKPLPYYSYDQPVIGYCQAHQPLHVTKGYETVSPEQDESPGLELGRDHSFIATIARSAAPAIYLERIAN

SEQ ID NO: 8060 - protein, 519 aa, Homo Sapiens
MPGFHLITQLKGMSVVLVLLPTLLLVMLTGAQRACPKNCRCDGKIVYCESHAFADIPENISGGSQGLSLRFNSIQKLKSNQFAGLNQLIWLYLDHNYISSVDEDAFQGIRRLKELILSSNKITYLHNKTFHPVPNLRNLDLSYNKLQTLQSEQFKGLRKLIILHLRSNSLKTVPIRVFQDCRNLDFLDLGYNRLRSLSRNAFAGLLKLKELHLEHNQFSKINFAHFPRLFNLRSIYLQWNRIRSISQGLTWTWSSLHNLDLSGNDIQGIEPGTFKCLPNLQKLNLDSNKLTNISQETVNAWISLISITLSGNMWECSRSICPLFYWLKNFKGNKESTMICAGPKHIQGEKVSDAVETYNICSEVQVVNTERSHLVPQTPQKPLIIPRPTIFKPDVTQSTFETPSPSPGFQIPGAEQEYEHVSFHKIIAGSVALFLSVAMILLVIYVSWKRYPASMKQLQQHSLMKRRRKKARESERQMNSPLQEYYVDYKPTNSETMDISVNGSGPCTYTISGSRECEV

SEQ ID NO: 8061 - protein, 24 aa, Homo Sapiens
MSVVLVLLPTLLLVMLTGAQRACP

SEQ ID NO: 8062 - protein, 93 aa, Homo Sapiens
MLAPGSSPGQRGRLALQWRQVSWITCWIALYAVEALPTCPFSCKCDSRSLEVDCSGLGLTTVPPDVPAATRTLLLLNNKLSALPSWAFANLSS

SEQ ID NO: 8063 - protein, 96 aa, Homo Sapiens
MLAPGSSPGQRGRLALQWRQVSWITCWIALYAVEALPTCPFSCKCDSRSLEVDCSGLGLTTVPPDVPAATRTLLLLNNKLSALPSWAFANLSSLQR

SEQ ID NO: 8064 - protein, 370 aa, Homo Sapiens
MLAPGSSPGQRGRLALQWRQVSWITCWIALYAVEALPTCPFSCKCDSRSLEVDCSGLGLTTVPPDVPAATRTLLLLNNKLSALPSWAFANLSSLQRLDLSNNFLDRLPRSIFGDLTNLTELQLRNNSIRTLDRDLLRHSPLLRHLDLSINGLAQLPPGLFDGLLALRSLSLRSNRLQNLDRLTFEPLANLQLLQVGDNPWECDCNLREFKHWMEWFSYRGGRLDQLACTLPKELRGKDMRMVPMEMFNYCSQLEDENSSAGLDIPGPPCTKASPEPAKPKPGAEPEPEPSTACPQKQRHRPASVRRAMGTVIIAGVVCGVVCIMMVVAAAYGCIYASLMAKYHRELKKRQPLMGDPEGEHEDQKQISSVA

SEQ ID NO: 8065 - protein, 370 aa, Homo Sapiens; identical to SEQ ID NO: 8064

SEQ ID NO: 8066 - protein, 370 aa, Homo Sapiens; identical to SEQ ID NO: 8064

SEQ ID NO: 8067 - protein, 114 aa, Homo Sapiens
DSVRTVRVVATKQGNAVTLGDYYQGRRITITGNADLTFDQTAWGDSGVYYCSVVSAQDLQGNNEAYAELIVLGRTSGVAELLPGFQAGPIEVYAAGKAATSGVPSIYAPSTYAH

SEQ ID NO: 8068 - protein, 493 aa, Homo Sapiens
MALLAGGLSRGLGSHPAAAGRDAVVFVWLLLSTWCTAPARAIQVTVSNPYHVVILFQPVTLPCTYQMTSTPTQPIVIWKYKSFCRDRIADAFSPASVDNQLNAQLAAGNPGYNPYVECQDSVRTVRVVATKQGNAVTLGDYYQGRRITITGMYAAGKAATSGVPSIYAPSTYAHLSPAKTPPPPAMIPMGPAYNGYPGGYPGDVDRSSSAGGQGSYVPLLRDTDSSVASEVRSGYRIQASQQDDSMRVLYYMEKELANFDPSRPGPPSGRVERAMSEVTSLHEDDWRSRPSRGPALTPIRDEEWGGHSPRSPRGWDQEPAREQAGGGWRARRPRARSVDALDDLTPPSTAESGSRSPTSNGGRSRAYMPPRSRSRDDLYDQDDSRDFPRSRDPHYDDFRSRERPPADPRSHHHRTRDPRDNGSRSGDLPYDGRLLEEAVRKKGSEERRRPHKEEEEEAYYPPAPPPYSETDSQASRERRLKKNLALSRESLVV

SEQ ID NO: 8069 - protein, 601 aa, Homo Sapiens
MALLAGGLSRGLGSHPAAAGRDAVVFVWLLLSTWCTAPARAIQVTVSNPYHVVILFQPVTLPCTYQMTSTPTQPIVIWKYKSFCRDRIADAFSPASVDNQLNAQLAAGNPGYNPYVECQDSVRTVRVVATKQGNAVTLGDYYQGRRITITGNADLTFDQTAWGDSGVYYCSVVSAQDLQGNNEAYAELIVLGRTSGVAELLPGFQAGPIEDWLFVVVVCLAAFLIFLLLGICWCQCCPHTCCCYVRCPCCPDKCCCPEALYAAGKAATSGVPSIYAPSTYAHLSPAKTPPPPAMIPMGPAYNGYPGGYPGDVDRSSSAGGQGSYVPLLRDTDSSVASEVRSGYRIQASQQDDSMRVLYYMEKELANFDPSRPGPPSGRVERAMSEVTSLHEDDWRSRPSRGPALTPIRDEEWGGHSPRSPRGWDQEPAREQAGGGWRARRPRARSVDALDDLTPPSTAESGSRSPTSNGGRSRAYMPPRSRSRDDLYDQDDSRDFPRSRDPHYDDFRSRERPPADPRSHHHRTRDPRDNGSRSGDLPYDGRLLEEAVRKKGSEERRRPHKEEEEEAYYPPAPPPYSETDSQASRERRLKKNLALSRESLVV

SEQ ID NO: 8070 - protein, 591 aa, Homo Sapiens
MQQDGLGVGTRNGSGKGRSVHPSWPWCAPRPLRYFGRDARARRAQTAAMALAIQVTVSNPYHVVILFQPVTLPCTYQMTSTPTQPIVIWKYKSFCRDRIADAFSPASVDNQLNAQLAAGNPGYNPYVECQDSVRTVRVVATKQGNAVTLGDYYQGRRITITGNADLTFDQTAWGDSGVYYCSVVSAQDLQGNNEAYAELIVLGRTSGVAELLPGFQAGPIEDWLFVVVVCLAAFLIFLLLGICWCQCCPHTCCCYVRCPCCPDKCCCPEALYAAGKAATSGVPSIYAPSTYAHLSPAKTPPPPAMIPMGPAYNGYPGGYPGDVDRSSSVRSGYRIQASQQDDSMRVLYYMEKELANFDPSRPGPPSGRVERAMSEVTSLHEDDWRSRPSRGPALTPIRDEEWGGHSPRSPRGWDQEPAREQAGGGWRARRPRARSVDALDDLTPPSTAESGSRSPTSNGGRSRAYMPPRSRSRDDLYDQDDSRDFPRSRDPHYDDFRSRERPPADPRSHHHRTRDPRDNGSRSGDLPYDGRLLEEAVRKKGSEERRRPHKEEEEEAYYPPAPPPYSETDSQASRERRLKKNLALSRESLVV

SEQ ID NO: 8071 - protein, 630 aa, Homo Sapiens
MQQDGLGVGTRNGSGKGRSVHPSWPWCAPRPLRYFGRDARARRAQTAAMALLAGGLSRGLGSHPAAAGRDAVVFVWLLLSTWCTAPARAIQVTVSNPYHVVILFQPVTLPCTYQMTSTPTQPIVIWKYKSFCRDRIADAFSPASVDNQLNAQLAAGNPGYNPYVECQDSVRTVRVVATKQGNAVTLGDYYQGRRITITGNADLTFDQTAWGDSGVYYCSVVSAQDLQGNNEAYAELIVLDWLFVVVVCLAAFLIFLLLGICWCQCCPHTCCCYVRCPCCPDKCCCPEALYAAGKAATSGVPSIYAPSTYAHLSPAKTPPPPAMIPMGPAYNGYPGGYPGDVDRSSSAGGQGSYVPLLRDTDSSVASEVRSGYRIQASQQDDSMRVLYYMEKELANFDPSRPGPPSGRVERAMSEVTSLHEDDWRSRPSRGPALTPIRDEEWGGHSPRSPRGWDQEPAREQAGGGWRARRPRARSVDALDDLTPPSTAESGSRSPTSNGGRSRAYMPPRSRSRDDLYDQDDSRDFPRSRDPHYDDFRSRERPPADPRSHHHRTRDPRDNGSRSGDLPYDGRLLEEAVRKKGSEERRRPHKEEEEEAYYPPAPPPYSETDSQASRERRLKKNLALSRESLVV

SEQ ID NO: 8072 - protein, 629 aa, Homo Sapiens
MQQDGLGVGTRNGSGKGRSVHPSWPWCAPRPLRYFGRDARARRAQTAAMALLAGGLSRGLGSHPAAAGRDAVVFVWLLLSTWCTAPARAIQVTVSNPYHVVILFQPVTLPCTYQMTSTPTQPIVIWKYKSFCRDRIADAFSPASVDNQLNAQLAAGNPGYNPYVECQDSVRTVRVVATKQGNAVTLGDYYQGRRITITGNADLTFDQTAWGDSGVYYCSVVSAQDLQGNNEAYAELIVLDWLFVVVVCLAAFLIFLLLGICWCQCCPHTCCCYVRCPCCPDKCCCPEALYAAGKAATSGVPSIYAPSTYAHLSPAKTPPPPAMIPMGPAYNGYPGGYPGDVDRSSSAGGQGSYVPLLRDTDSSVASVRSGYRIQASQQDDSMRVLYYMEKELANFDPSRPGPPSGRVERAMSEVTSLHEDDWRSRPSRGPALTPIRDEEWGGHSPRSPRGWDQEPAREQAGGGWRARRPRARSVDALDDLTPPSTAESGSRSPTSNGGRSRAYMPPRSRSRDDLYDQDDSRDFPRSRDPHYDDFRSRERPPADPRSHHHRTRDPRDNGSRSGDLPYDGRLLEEAVRKKGSEERRRPHKEEEEEAYYPPAPPPYSETDSQASRERRLKKNLALSRESLVV

SEQ ID NO: 8073 - protein, 649 aa, Homo Sapiens
MQQDGLGVGTRNGSGKGRSVHPSWPWCAPRPLRYFGRDARARRAQTAAMALLAGGLSRGLGSHPAAAGRDAVVFVWLLLSTWCTAPARAIQVTVSNPYHVVILFQPVTLPCTYQMTSTPTQPIVIWKYKSFCRDRIADAFSPASVDNQLNAQLAAGNPGYNPYVECQDSVRTVRVVATKQGNAVTLGDYYQGRRITITGNADLTFDQTAWGDSGVYYCSVVSAQDLQGNNEAYAELIVLGRTSGVAELLPGFQAGPIEDWLFVVVVCLAAFLIFLLLGICWCQCCPHTCCCYVRCPCCPDKCCCPEALYAAGKAATSGVPSIYAPSTYAHLSPAKTPPPPAMIPMGPAYNGYPGGYPGDVDRSSSAGGQGSYVPLLRDTDSSVASEVRSGYRIQASQQDDSMRVLYYMEKELANFDPSRPGPPSGRVERAMSEVTSLHEDDWRSRPSRGPALTPIRDEEWGGHSPRSPRGWDQEPAREQAGGGWRARRPRARSVDALDDLTPPSTAESGSRSPTSNGGRSRAYMPPRSRSRDDLYDQDDSRDFPRSRDPHYDDFRSRERPPADPRSHHHRTRDPRDNGSRSGDLPYDGRLLEEAVRKKGSEERRRPHKEEEEEAYYPPAPPPYSETDSQASRERRLKKNLALSRESLVV

SEQ ID NO: 8074 - protein, 649 aa, Homo Sapiens; identical to SEQ ID NO: 8073

SEQ ID NO: 8075 - protein, 581 aa, Homo Sapiens
MQQDGLGVGTRNGSGKGRSVHPSWPWCAPRPLRYFGRDARARRAQTAAMALLAGGLSRGLGSHPAAAGRDAVVFVWLLLSTWCTAPARAIQVTVSNPYHVVILFQPVTLPCTYQMTSTPTQPIVIWKYKSFCRDRIADAFSPASVDNQLNAQLAAGNPGYNPYVECQDSVRTVRVVATKQGNAVTLGDYYQGRRITITGNADLTFDQTAWGDSGVYYCSVVSAQDLQGNNEAYAELIVLVYAAGKAATSGVPSIYAPSTYAHLSPAKTPPPPAMIPMGPAYNGYPGGYPGDVDRSSSAGGQGSYVPLLRDTDSSVASEVRSGYRIQASQQDDSMRVLYYMEKELANFDPSRPGPPSGRVERAMSEVTSLHEDDWRSRPSRGPALTPIRDEEWGGHSPRSPRGWDQEPAREQAGGGWRARRPRARSVDALDDLTPPSTAESGSRSPTSNGGRSRAYMPPRSRSRDDLYDQDDSRDFPRSRDPHYDDFRSRERPPADPRSHHHRTRDPRDNGSRSGDLPYDGRLLEEAVRKKGSEERRRPHKEEEEEAYYPPAPPPYSETDSQASRERRLKKNLALSRESLVV

SEQ ID NO: 8076 - protein, 51 aa, Homo Sapiens
MQQDGLGVGTRNGSGKGRSVHPSWPWCAPRPLSSCQGHPGDRVQPLPRGDP

SEQ ID NO: 8077 - protein, 139 aa, Homo Sapiens
MTSTPTQPIVIWKYKSFCRDRIADAFSPASVDNQLNAQLAAGNPGYNPYVECQDSVRTVRVVATKQGNAVTLGDYYQGRRITITGNADLTFDQTAWGDSGVYYCSVVSAQDLQGNNEAYAELIVLDWLFVVVVCLAAFL

SEQ ID NO: 8078 - protein, 35 aa, Homo Sapiens
MLSRNDAPSVLVPGPGLLRAGTPLCISAEAASAQQ

SEQ ID NO: 8079 - protein, 36 aa, Homo Sapiens
MLSRNDDICIYGGLGLGGLLLLAVVLLSACLCWLHR

SEQ ID NO: 8080 - protein, 66 aa, Homo Sapiens
MLSRNDDICIYGGLGLGGLLLLAVVLLSACLCWLHRRAPSVLVPGPGLLRAGTPLCISAEAASAQQ

SEQ ID NO: 8081 - protein, 44 aa, Homo Sapiens
MLSRNDDICIYGGLGLGGLLLLAVVLLSACLCWLHRREAASAQQ

SEQ ID NO: 8082 - protein, 59 aa, Homo Sapiens
MLSRNDDICIYGGLGLGGLLLLAVVLLSACLCWLHRRGPGLLRAGTPLCISAEAASAQQ

SEQ ID NO: 8083 - protein, 97 aa, Homo Sapiens
MLSRNDDICIYGGLGLGGLLLLAVVLLSACLCWLHRRVKRLERSWAQGSSEQELHYASLQRLPVPSSEGPDLRGRDKRGTKEDPRADYACIAENKPT

SEQ ID NO: 8084 - protein, 104 aa, Homo Sapiens
MLSRNDDICIYGGLGLGGLLLLAVVLLSACLCWLHRRVKRLERSWHLLSWSQAQGSSEQELHYASLQRLPVPSSEGPDLRGRDKRGTKEDPRADYACIAENKPT

SEQ ID NO: 8085 - protein, 66 aa, Homo Sapiens
MLSRNDDICIYGGLGLGGLLLLAVVLLSACLCWLHRRVKRLERSWRLPVPSSEGPDLRGRDKRGTK

SEQ ID NO: 8086 - protein, 13 aa, Homo Sapiens
MLSRNDEAASAQQ

SEQ ID NO: 8087 - protein, 28 aa, Homo Sapiens
MLSRNDGPGLLRAGTPLCISAEAASAQQ

SEQ ID NO: 8088 - protein, 28 aa, Homo Sapiens
MLSRNDGPGLLRAGTPLCISAEAASAQQ

SEQ ID NO: 8089 - protein, 28 aa, Homo Sapiens
MLSRNDGPGLLRAGTPLCISAEAASAQQ

SEQ ID NO: 8090 - protein, 66 aa, Homo Sapiens
MLSRNDVKRLERSWAQGSSEQELHYASLQRLPVPSSEGPDLRGRDKRGTKEDPRADYACIAENKPT

SEQ ID NO: 8091 - protein, 66 aa, Homo Sapiens; identical to SEQ ID NO: 8090

SEQ ID NO: 8092 - protein, 73 aa, Homo Sapiens
MLSRNDVKRLERSWHLLSWSQAQGSSEQELHYASLQRLPVPSSEGPDLRGRDKRGTKEDPRADYACIAENKPT

SEQ ID NO: 8093 - protein, 51 aa, Homo Sapiens
MLSRNDVKRLERSWRLPVPSSEGPDLRGRDKRGTKEDPRADYACIAENKPT

SEQ ID NO: 8094 - protein, 60 aa, Homo Sapiens
  misc_feature (1)..(1): Xaa can be any naturally occurring amino acid
XDICIYGGLGLGGLLLLAVVLLSACLCWLHRREAGEELGPGLLRAGTPLCISAEAASAQQ

SEQ ID NO: 8095 - protein, 35 aa, Homo Sapiens
  misc_feature (1)..(1): Xaa can be any naturally occurring amino acid
XGGLLLLAVVLLSACLCWLHRREAGEELEAASAQQ

SEQ ID NO: 8096 - protein, 205 aa, Homo Sapiens
MTPPERLFLPRVCGTTLHLLLLGLLLVLLPGAQGLPGVGLTPSAAQTARQHPKMHLAHSTLKPAAHLIGDPSKQNSLLWRANTDRAFLQDGFSLSNNSLLVPTSGIYFVYSQVVFSGKAYSPKATSSPLYLAHEVQLFSSQYPFHVPLLSSQKMVYPGLQEPWLHSMYHGAAFQLTQGDQLSTHTDGIPHLVLSPSTVFFGAFAL

SEQ ID NO: 8097 - protein, 205 aa, Homo Sapiens; identical to SEQ ID NO: 8096

SEQ ID NO: 8098 - protein, 270 aa, Homo Sapiens
ECQHRHLCAHGQCRNTEGSFQCVCDQGYRASGLGDHCEDINECLEDKSVCQRGDCINTAGSYDCTCPDGFQLDDNKTCQDINECEHPGLCGPQGECLNTEGSFHCVCQQGFSISADGRTCEDVNECELLSGVCGEAFCENVEGSFLCVCADENQEYSPMTGQCRSRTSTDLDVDVDQPKEEKKECYYNLNDASLCDNVLAPNVTKQECCCTSGVGWGDNCEIFPCPVLGTAEFTEMCPKGKGFVPAGESSSEAGGENYKDADECLLFGQE

SEQ ID NO: 8099 - protein, 1721 aa, Homo Sapiens
MAGAWLRWGLLLWAGLLASSAHGRLRRITYVVHPGPGLAAGALPLSGPPRSRTFNVALNARYSRSSAAAGAPSRASPGVPSERTRRTSKPGGAALQGLRPPPPPPPEPARPAVPGGQLHPNPGGHPAAAPFTKQGRQVVRSKVPQETQSGGGSRLQVHQKQQLQGVNVCGGRCCHGWSKAPGSQRCTKPSCVPPCQNGGMCLRPQLCVCKPGTKGKACETIAAQDTSSPVFGGQSPGAASSWGPPEQAAKHTSSKKADTLPRVSPVAQMTLTLKPKPSVGLPQQIHSQVTPLSSQSVVIHHGQTQEYVLKPKYFPAQKGISGEQSTEGSFPLRYVQDQVAAPFQLSNHTGRIKVVFTPSICKVTCTKGSCQNSCEKGNTTTLISENGHAADTLTATNFRVVICHLPCMNGGQCSSRDKCQCPPNFTGKLCQIPVHGASVPKLYQHSQQPGKALGTHVIHSTHTLPLTVTSQQGVKVKFPPNIVNIHVKHPPEASVQIHQVSRIDGPTGQKTKEAQPGQSQVSYQGLPVQKTQTIHSTYSHQQVIPHVYPVAAKTQLGRCFQETIGSQCGKALPGLSKQEDCCGTVGTSWGFNKCQKCPKKPSYHGYNQMMECLPGYKRVNNTFCQDINECQLQGVCPNGECLNTMGSYRCTCKIGFGPDPTFSSCVPDPPVISEEKGPCYRLVSSGRQCMHPLSVHLTKQLCCCSVGKAWGPHCEKCPLPGTAAFKEICPGGMGYTVSGVHRRRPIHHHVGKGPVFVKPKNTQPVAKSTHPPPLPAKEEPVEALTFSREHGPGVAEPEVATAPPEKEIPSLDQEKTKLEPGQPQLSPGISTIHLHPQFPVVIEKTSPPVPVEVAPEASTSSASQVIAPTQVTEINECTVNPDICGAGHCINLPVRYTCICYEGYRFSEQQRKCVDIDECTQVQHLCSQGRCENTEGSFLCICPAGFMASEEGTNCIDVDECLRPDVCGEGHCVNTVGAFRCEYCDSGYRMTQRGRCEDIDECLNPSTCPDEQCVNSPGSYQCVPCTEGFRGWNGQCLDVDECLEPNVCANGDCSNLEGSYMCSCHKGYTRTPDHKHCRDIDECQQGNLCVNGQCKNTEGSFRCTCGQGYQLSAAKDQCEDIDECQHRHLCAHGQCRNTEGSFQCVCDQGYRASGLGDHCEDINECLEDKSVCQRGDCINTAGSYDCTCPDGFQLDDNKTCQDINECEHPGLCGPQGECLNTEGSFHCVCQQGFSISADGRTCEDIDECVNNTVCDSHGFCDNTAGSFRCLCYQGFQAPQDGQGCVDVNECELLSGVCGEAFCENVEGSFLCVCADENQEYSPMTGQCRSRTSTDLDVDVDQPKEEKKECYYNLNDASLCDNVLAPNVTKQECCCTSGVGWGDNCEIFPCPVLGTAEFTEMCPKGKGFVPAGESSSEAGGENYKDADECLLFGQEICKNGFCLNTRPGYECYCKQGTYYDPVKLQCFDMDECQDPSSCIDGQCVNTEGSYNCFCTHPMVLDASEKRCIRPAESNEQIEETDVYQDLCWEHLSDEYVCSRPLVGKQTTYTECCCLYGEAWGMQCALCPLKDSDDYAQLCNIPVTGRRQPYGRDALVDFSEQYTPEADPYFIQDRFLNSFEELQAEECGILNGCENGRCVRVQEGYTCDCFDGYHLDTAKMTCVDVNECDELNNRMSLCKNAKCINTDGSYKCLCLPGYVPSDKPNYCTPLNTALNLEKDSDLE

SEQ ID NO: 8100 - protein, 1395 aa, Homo Sapiens
MDTKLMCLLFFFSLPPLLVSNHTGRIKVVFTPSICKVTCTKGSCQNSCEKGNTTTLISENGHAADTLTATNFRVVICHLPCMNGGQCSSRDKCQCPPNFTGKLCQIPVHGASVPKLYQHSQQPGKALGTHVIHSTHTLPLTVTSQQGVKVKFPPNIVNIHVKHPPEASVQIHQVSRIDGPTGQKTKEAQPGQSQVSYQGLPVQKTQTIHSTYSHQQVIPHVYPVAAKTQLGRCFQETIGSQCGKALPGLSKQEDCCGTVGTSWGFNKCQKCPKKPSYHGYNQMMECLPGYKRVNNTFCQDINECQLQGVCPNGECLNTMGSYRCTCKIGFGPDPTFSSCVPDPPVISEEKGPCYRLVSSGRQCMHPLSVHLTKQLCCCSVGKAWGPHCEKCPLPGTAAFKEICPGGMGYTVSGVHRRRPIHHHVGKGPVFVKPKNTQPVAKSTHPPPLPAKEEPVEALTFSREHGPGVAEPEVATAPPEKEIPSLDQEKTKLEPGQPQLSPGISTIHLHPQFPVVIEKTSPPVPVEVAPEASTSSASQVIAPTQVTEINECTVNPDICGAGHCINLPVRYTCICYEGYRFSEQQRKCVDIDECTQVQHLCSQGRCENTEGSFLCICPAGFMASEEGTNCIDVDECLRPDVCGEGHCVNTVGAFRCEYCDSGYRMTQRGRCEDIDECLNPSTCPDEQCVNSPGSYQCVPCTEGFRGWNGQCLDVDECLEPNVCANGDCSNLEGSYMCSCHKGYTRTPDHKHCRDIDECQQGNLCVNGQCKNTEGSFRCTCGQGYQLSAAKDQCEDIDECQHRHLCAHGQCRNTEGSFQCVCDQGYRASGLGDHCEDINECLEDKSVCQRGDCINTAGSYDCTCPDGFQLDDNKTCQDINECEHPGLCGPQGECLNTEGSFHCVCQQGFSISADGRTCEDIDECVNNTVCDSHGFCDNTAGSFRCLCYQGFQAPQDGQGCVDVNECELLSGVCGEAFCENVEGSFLCVCADENQEYSPMTGQCRSRTSTDLDVDVDQPKEEKKECYYNLNDASLCDNVLAPNVTKQECCCTSGVGWGDNCEIFPCPVLGTAEFTEMCPKGKGFVPAGESSSEAGGENYKDADECLLFGQEICKNGFCLNTRPGYECYCKQGTYYDPVKLQCFDMDECQDPSSCIDGQCVNTEGSYNCFCTHPMVLDASEKRCIRPAESNEQIEETDVYQDLCWEHLSDEYVCSRPLVGKQTTYTECCCLYGEAWGMQCALCPLKDSDDYAQLCNIPVTGRRQPYGRDALVDFSEQYTPEADPYFIQDRFLNSFEELQAEECGILNGCENGRCVRVQEGYTCDCFDGYHLDTAKMTCVDVNECDELNNRMSLCKNAKCINTDGSYKCLCLPGYVPSDKPNYCTPLNTALNLEKDSDLE

SEQ ID NO: 8101 - protein, 1353 aa, Homo Sapiens
MDTKLMCLLFFFSLPPLLVSNHTGRIKVVFTPSICKVTCTKGSCQNSCEKGNTTTLISENGHAADTLTATNFRVVICHLPCMNGGQCSSRDKCQCPPNFTGKLCQIPVHGASVPKLYQHSQQPGKALGTHVIHSTHTLPLTVTSQQGVKVKFPPNIVNIHVKHPPEASVQIHQVSRIDGPTGQKTKEAQPGQSQVSYQGLPVQKTQTIHSTYSHQQVIPHVYPVAAKTQLGRCFQETIGSQCGKALPGLSKQEDCCGTVGTSWGFNKCQKCPKKPSYHGYNQMMECLPGYKRVNNTFCQDINECQLQGVCPNGECLNTMGSYRCTCKIGFGPDPTFSSCVPDPPVISEEKGPCYRLVSSGRQCMHPLSVHLTKQLCCCSVGKAWGPHCEKCPLPGTAAFKEICPGGMGYTVSGVHRRRPIHHHVGKGPVFVKPKNTQPVAKSTHPPPLPAKEEPVEALTFSREHGPGVAEPEVATAPPEKEIPSLDQEKTKLEPGQPQLSPGISTIHLHPQFPVVIEKTSPPVPVEVAPEASTSSASQVIAPTQVTEINECTVNPDICGAGHCINLPVRYTCICYEGYRFSEQQRKCVDIDECTQVQHLCSQGRCENTEGSFLCICPAGFMASEEGTNCIDVDECLRPDVCGEGHCVNTVGAFRCEYCDSGYRMTQRGRCEDIDECLNPSTCPDEQCVNSPGSYQCVPCTEGFRGWNGQCLDVDECLEPNVCANGDCSNLEGSYMCSCHKGYTRTPDHKHCRDIDECQQGNLCVNGQCKNTEGSFRCTCGQGYQLSAAKDQCEDIDECQHRHLCAHGQCRNTEGSFQCVCDQGYRASGLGDHCEDINECLEDKSVCQRGDCINTAGSYDCTCPDGFQLDDNKTCQDINECEHPGLCGPQGECLNTEGSFHCVCQQGFSISADGRTCEDVNECELLSGVCGEAFCENVEGSFLCVCADENQEYSPMTGQCRSRTSTDLDVDVDQPKEEKKECYYNLNDASLCDNVLAPNVTKQECCCTSGVGWGDNCEIFPCPVLGTAEFTEMCPKGKGFVPAGESSSEAGGENYKDADECLLFGQEICKNGFCLNTRPGYECYCKQGTYYDPVKLQCFDMDECQDPSSCIDGQCVNTEGSYNCFCTHPMVLDASEKRCIRPAESNEQIEETDVYQDLCWEHLSDEYVCSRPLVGKQTTYTECCCLYGEAWGMQCALCPLKDSDDYAQLCNIPVTGRRQPYGRDALVDFSEQYTPEADPYFIQDRFLNSFEELQAEECGILNGCENGRCVRVQEGYTCDCFDGYHLDTAKMTCVDVNECDELNNRMSLCKNAKCINTDGSYKCLCLPGYVPSDKPNYCTPLNTALNLEKDSDLE

SEQ ID NO: 8102 - protein, 1342 aa, Homo Sapiens
MDTKLMCLLFFFSLPPLLVSNHTGRIKVVFTPSICKVTCTKGSCQNSCEKGNTTTLISENGHAADTLTATNFRVVICHLPCMNGGQCSSRDKCQCPPNFTGKLCQIPVHGASVPKLYQHSQQPGKALGTHVIHSTHTLPLTVTSQQGVKVKFPPNIVNIHVKHPPEASVQIHQVSRIDGPTGQKTKEAQPGQSQVSYQGLPVQKTQTIHSTYSHQQVIPHVYPVAAKTQLGRCFQETIGSQCGKALPGLSKQEDCCGTVGTSWGFNKCQKCPKKPSYHGYNQMMECLPGYKRVNNTFCQDINECQLQGVCPNGECLNTMGSYRCTCKIGFGPDPTFSSCVPDPPVISEEKGPCYRLVSSGRQCMHPLSVHLTKQLCCCSVGKAWGPHCEKCPLPGTAKEEPVEALTFSREHGPGVAEPEVATAPPEKEIPSLDQEKTKLEPGQPQLSPGISTIHLHPQFPVVIEKTSPPVPVEVAPEASTSSASQVIAPTQVTEINECTVNPDICGAGHCINLPVRYTCICYEGYRFSEQQRKCVDIDECTQVQHLCSQGRCENTEGSFLCICPAGFMASEEGTNCIDVDECLRPDVCGEGHCVNTVGAFRCEYCDSGYRMTQRGRCEDIDECLNPSTCPDEQCVNSPGSYQCVPCTEGFRGWNGQCLDVDECLEPNVCANGDCSNLEGSYMCSCHKGYTRTPDHKHCRDIDECQQGNLCVNGQCKNTEGSFRCTCGQGYQLSAAKDQCEDIDECQHRHLCAHGQCRNTEGSFQCVCDQGYRASGLGDHCEDINECLEDKSVCQRGDCINTAGSYDCTCPDGFQLDDNKTCQDINECEHPGLCGPQGECLNTEGSFHCVCQQGFSISADGRTCEDIDECVNNTVCDSHGFCDNTAGSFRCLCYQGFQAPQDGQGCVDVNECELLSGVCGEAFCENVEGSFLCVCADENQEYSPMTGQCRSRTSTDLDVDVDQPKEEKKECYYNLNDASLCDNVLAPNVTKQECCCTSGVGWGDNCEIFPCPVLGTAEFTEMCPKGKGFVPAGESSSEAGGENYKDADECLLFGQEICKNGFCLNTRPGYECYCKQGTYYDPVKLQCFDMDECQDPSSCIDGQCVNTEGSYNCFCTHPMVLDASEKRCIRPAESNEQIEETDVYQDLCWEHLSDEYVCSRPLVGKQTTYTECCCLYGEAWGMQCALCPLKDSDDYAQLCNIPVTGRRQPYGRDALVDFSEQYTPEADPYFIQDRFLNSFEELQAEECGILNGCENGRCVRVQEGYTCDCFDGYHLDTAKMTCVDVNECDELNNRMSLCKNAKCINTDGSYKCLCLPGYVPSDKPNYCTPLNTALNLEKDSDLE

SEQ ID NO: 8103 - protein, 1340 aa, Homo Sapiens
MDTKLMCLLFFFSLPPLLVSNHTGRIKVVFTPSICKVTCTKGSCQNSCEKGNTTTLISENGHAADTLTATNFRVVICHLPCMNGGQCSSRDKCQCPPNFTGKLCQIPVHGASVPKLYQHSQQPGKALGTHVIHSTHTLPLTVTSQQGVKVKFPPNIVNIHVKHPPEASVQIHQVSRIDGPTGQKTKEAQPGQSQVSYQGLPVQKTQTIHSTYSHQQVIPHVYPVAAKTQLGRCFQETIGSQCGKALPGLSKQEDCCGTVGTSWGFNKCQKCPKKPSYHGYNQMMECLPGYKRVNNTFCQDINECQLQGVCPNGECLNTMGSYRCTCKIGFGPDPTFSSCVPDPPVISEEKGPCYRLVSSGRQCMHPLSVHLTKQLCCCSVGKAWGPHCEKCPLPGTAKEEPVEALTFSREHGPGVAEPEVATAPPEKEIPSLDQEKTKLEPGQPQLSPGISTIHLHPQFPVVIEKTSPPVPVEVAPEASTSSASQVIAPTQVTEINECTVNPDICGAGHCINLPVRYTCICYEGYRFSEQQRKCVDIDECTQVQHLCSQGRCENTEGSFLCICPAGFMASEEGTNCIDVDECLRPDVCGEGHCVNTVGAFRCEYCDSGYRMTQRGRCEDIDECLNPSTCPDEQCVNSPGSYQCVPCTEGFRGWNGQCLDVDECLEPNVCANGDCSNLEGSYMCSCHKGYTRTPDHKHCRDIDECQQGNLCVNGQCKNTEGSFRCTCGQGYQLSAAKDQCEDIDECQHRHLCAHGQCRNTEGSFQCVCDQGYRASGLGDHCEDINECLEDKSVCQRGDCINTAGSYDCTCPDGFQLDDNKTCQDINECEHPGLCGPQGECLNTEGSFHCVCQQGFSISADGRTCEDIDECVNNTVCDSHGFCDNTAGSFRCLCYQGFQAPQDGQGCVDVNECELLSGVCGEAFCENVEGSFLCVCADENQEYSPMTGQCRSRTSTDVDVDQPKEEKKECYYNLNDASLCDNVLAPNVTKQECCCTSGVGWGDNCEIFPCPVLGTAEFTEMCPKGKGFVPAGESSSEAGGENYKDADECLLFGQEICKNGFCLNTRPGYECYCKQGTYYDPVKLQCFDMDECQDPSSCIDGQCVNTEGSYNCFCTHPMVLDASEKRCIRPAESNEQIEETDVYQDLCWEHLSDEYVCSRPLVGKQTTYTECCCLYGEAWGMQCALCPLKDSDDYAQLCNIPVTGRRQPYGRDALVDFSEQYTPEADPYFIQDRFLNSFEELQAEECGILNGCENGRCVRVQEGYTCDCFDGYHLDTAKMTCVDVNECDELNNRMSLCKNAKCINTDGSYKCLCLPGYVPSDKPNYCTPLNTALNLEKDSDLE

SEQ ID NO: 8104 - protein, 219 aa, Homo Sapiens
MGSYRCTCKIGFGPDPTFSSCVPDPPVISEEKGPCYRLVSSGRQCMHPLSVHLTKQLCCCSVGKAWGPHCEKCPLPGTGKGPVFVKPKNTQPVAKSTHPPPLPAKEEPVEALTFSREHGPGVAEPEVATAPPEKEIPSLDQEKTKLEPGQPQLSPGISTIHLHPQFPVVIEKTSPPVPVEVAPEASTSSASQVIAPTQVTEINECTVNPDICGAGHCIN

SEQ ID NO: 8105 - protein, 101 aa, Homo Sapiens
MNGGQCSSRDKCQCPPNFTGKLCQIPVHGASVPKLYQHSQQPGKALGTHVIHSTHTLPLTVTSQQGVKVKFPPNIVNIHVKHPPEASVQIHQVSRIDGPTG

SEQ ID NO: 8106 - protein, 221 aa, Homo Sapiens
SSGRQCMHPLSVHLTKQLCCCSVGKAWGPHCEKCPLPGTAAFKEICPGGMGYTVSGVHRRRPIHHHVGKGPVFVKPKNTQPVAKSTHPPPLPAKEEPVEALTFSREHGPGVAEPEVATAPPEKEIPSLDQEKTKLEPGQPQLSPGISTIHLHPQFPGIVIEKTSPPVPVEVAPEASTSSASQVIAPTQVTEINECTVNPDICGAGHCINLPVRYTCICYEG

SEQ ID NO: 8107 - protein, 267 aa, Homo Sapiens
  misc_feature (1)..(1): Xaa can be any naturally occurring amino acid
XGRCEDIDECLNPSTCPDEQCVNSPGSYQCVPCTEGFRGWNGQCLDIDECQQGNLCVNGQCKNTEGSFRCTCGQGYQLSAAKDQCEDIDECQHRHLCAHGQCRNTEGSFQCVCDQGYRASGLGDHCEDINECLEDKSVCQRGDCINTAGSYDCTCPDGFQLDDNKTCQDINECEHPGLCGPQGECLNTEGSFHCVCQQGFSISADGRTCEDIDECVNNTVCDSHGFCDNTAGSFRCLCYQGFQAPQDGQGCVDVNECELLSGVCGEA

SEQ ID NO: 8108 - protein, 1821 aa, Homo Sapiens
MRPRTKARSPGRALRNPWRGFLPLTLALFVGAGHAQRDPVGRYEPAGGDANRLRRPGGSYPAAAAAKVYSLFREQDAPVAGLQPVERAQPGWGSPRRPTEAEARRPSRAQQSRRVQPPAQTRRSTPLGQQQPAPRTRAAPALPRLGTPQRSGAAPPTPPRGRLTGRNVCGGQCCPGWTTANSTNHCIKPVCEPPCQNRGSCSRPQLCVCRSGFRGARCEEVIPDEEFDPQNSRLAPRRWAERSPNLRRSSAAGEGTLARAQPPAPQSPPAPQSPPAGTLSGLSQTHPSQQHVGLSRTVRLHPTATASSQLSSNALPPGPGLEQRDGTQQAVPLEHPSSPWGLNLTEKIKKIKIVFTPTICKQTCARGHCANSCERGDTTTLYSQGGHGHDPKSGFRIYFCQIPCLNGGRCIGRDECWCPANSTGKFCHLPIPQPDREPPGRGSRPRALLEAPLKQSTFTLPLSNQLASVNPSLVKVHIHHPPEASVQIHQVAQVRGGVEEALVENSVETRPPPWLPASPGHSLWDSNNIPARSGEPPRPLPPAAPRPRGLLGRCYLNTVNGQCANPLLELTTQEDCCGSVGAFWGVTLCAPCPPRPASPVIENGQLECPQGYKRLNLTHCQDINECLTLGLCKDAECVNTRGSYLCTCRPGLMLDPSRSRCVSDKAISMLQGLCYRSLGPGTCTLPLAQRITKQICCCSRVGKAWGSECEKCPLPGTEAFREICPAGHGYTYASSDIRLSMRKAEEEELARPPREQGQRSSGALPGPAERQPLRVVTDTWLEAGTIPDKGDSQAGQVTTSVTHAPAWVTGNATTPPMPEQGIAEIQEEQVTPSTDVLVTLSTPGIDRCAAGATNVCGPGTCVNLPDGYRCVCSPGYQLHPSQAYCTDDNECLRDPCKGKGRCINRVGSYSCFCYPGYTLATSGATQECQDINECEQPGVCSGGQCTNTEGSYHCECDQGYIMVRKGHCQDINECRHPGTCPDGRCVNSPGSYTCLACEEGYRGQSGSCVDVNECLTPGVCAHGKCTNLEGSFRCSCEQGYEVTSDEKGCQDVDECASRASCPTGLCLNTEGSFACSACENGYWVNEDGTACEDLDECAFPGVCPSGVCTNTAGSFSCKDCDGGYRPSPLGDSCEDVDECEDPQSSCLGGECKNTVGSYQCLCPQGFQLANGTVCEDVNECMGEEHCAPHGECLNSHGSFFCLCAPGFVSAEGGTSCQDVDECATTDPCVGGHCVNTEGSFNCLCETGFQPSPESGECVDIDECEDYGDPVCGTWKCENSPGSYRCVLGCQPGFHMAPNGDCIDIDECANDTMCGSHGFCDNTDGSFRCLCDQGFEISPSGWDCVDVNECELMLAVCGAALCENVEGSFLCLCASDLEEYDAQEGHCRPRGAGGQSMSEAPTGDHAPAPTRMDCYSGQKGHAPCSSVLGRNTTQAECCCTQGASWGDACDLCPSEDSAEFSEICPSGKGYIPVEGAWTFGQTMYTDADECVIFGPGLCPNGRCLNTVPGYVCLCNPGFHYDASHKKCEDHDECQDLACENGECVNTEGSFHCFCSPPLTLDLSQQRCMNSTSSTEDLPDHDIHMDICWKKVTNDVCSEPLRGHRTTYTECCCQDGEAWSQQCALCPPRSSEVYAQLCNVARIEAEREAGVHFRPGYEYGPGPDDLHYSIYGPDGAPFYNYLGPEDTVPEPAFPNTAGHSADRTPILESPLQPSELQPHYVASHPEPPAGFEGLQAEECGILNGCENGRCVRVREGYTCDCFEGFQLDAAHMACVDVNECDDLNGPAVLCVHGYCENTEGSYRCHCSPGYVAEAGPPHCTAKE

SEQ ID NO: 8109 - protein, 1769 aa, Homo Sapiens
MRPRTKARSPGRALRNPWRGFLPLTLALFVGAGHAQRDPVGRYEPAGGDANRLRRPGGSYPAAAAAKVYSLFREQDAPVAGLQPVERAQPGWGSPRRPTEAEARRPSRAQQSRRVQPPAQTRRSTPLGQQQPAPRTRAAPALPRLGTPQRSGAAPPTPPRGRLTGRNVCGGQCCPGWTTANSTNHCIKPVCEPPCQNRGSCSRPQLCVCRSGFRGARCEEVIPDEEFDPQNSRLAPRRWAERSPNLRRSSAAGEGTLARAQPPAPQSPPAPQSPPAGTLSGLSQTHPSQQHVGLSRTVRLHPTATASSQLSSNALPPGPGLEQRDGTQQAVPLEHPSSPWGLNLTEKIKKIKIVFTPTICKQTCARGHCANSCERGDTTTLYSQGGHGHDPKSGFRIYFCQIPCLNGGRCIGRDECWCPANSTGKFCHLPIPQPDREPPGRGSRPRALLEAPLKQSTFTLPLSNQLASVNPSLVKVHIHHPPEASVQIHQVAQVRGGVEEALVENSVETRPPPWLPASPGHSLWDSNNIPARSGEPPRPLPPAAPRPRGLLGRCYLNTVNGQCANPLLELTTQEDCCGSVGAFWGVTLCAPCPPRPASPVIENGQLECPQGYKRLNLTHCQDINECLTLGLCKDAECVNTRGSYLCTCRPGLMLDPSRSRCVSDKAISMLQGLCYRSLGPGTCTLPLAQRITKQICCCSRVGKAWGSECEKCPLPGTEAFREICPAGHGYTYASSDIRLSMRKAEEEELARPPREQGQRSSGALPGPAERQPLRVVTDTWLEAGTIPDKGDSQAGQVTTSVTHAPAWVTGNATTPPMPEQGIAEIQEEQVTPSTDVLVTLSTPGIDRCAAGATNVCGPGTCVNLPDGYRCVCSPGYQLHPSQAYCTDDNECLRDPCKGKGRCINRVGSYSCFCYPGYTLATSGATQECQDINECEQPGVCSGGQCTNTEGSYHCECDQGYIMVRKGHCQDINECRHPGTCPDGRCVNSPGSYTCLACEEGYRGQSGSCVDVNECLTPGVCAHGKCTNLEGSFRCSCEQGYEVTSDEKGCQDVDECASRASCPTGLCLNTEGSFACSACENGYWVNEDGTACEDLDECAFPGVCPSGVCTNTAGSFSCKDCDGGYRPSPLGDSCEDVDECEDPQSSCLGGECKNTVGSYQCLCPQGFQLANGTVCEDVNECMGEEHCAPHGECLNSHGSFFCLCAPGFVSAEGGTSCQDVDECATTDPCVGGHCVNTEGSFNCLCETGFQPSPESGECVDIDECEDYGDPVCGTWKCENSPGSYRCVLGCQPGFHMAPNGDCIDIDECANDTMCGSHGFCDNTDGSFRCLCDQGFEISPSGWDCVDVNECELMLAVCGAALCENVEGSFLCLCASDLEEYDAQEGHCRPRGAGGQSMSEAPTGDHAPAPTRMDCYSGQKGHAPCSSVLGRNTTQAECCCTQGASWGDACDLCPSEDSAEFSEICPSGKGYIPVEGAWTFGQTMYTDADECVIFGPGLCPNGRCLNTVPGYVCLCNPGFHYDASHKKCEDHDECQDLACENGECVNTEGSFHCFCSPPLTLDLSQQRCMNSTSSTEDLPDHDIHMDICWKKVTNDVCSEPLRGHRTTYTECCCQDGEAWSQQCALCPPRSSEVYAQLCNVARIEAEREAGVHFRPGYEYGPGPDDLHYSIYGPDGAPFYNYLGPEDTVPEPAFPNTAGHSADRTPILESPLQPSELQPHYVASHPGLCCCKTGEEVGTKAVSLPSPPPASHIASRSPQPASKGFRRRSAAS

SEQ ID NO: 8110 - protein, 1777 aa, Homo Sapiens
MRPRTKARSPGRALRNPWRGFLPLTLALFVGAGHAQRDPVGRYEPAGGDANRLRRPGGSYPAAAAAKVYSLFREQDAPVAGLQPVERAQPGWGSPRRPTEAEARRPSRAQQSRRVQPPAQTRRSTPLGQQQPAPRTRAAPALPRLGTPQRSGAAPPTPPRGRLTGRNVCGGQCCPGWTTANSTNHCIKPVCEPPCQNRGSCSRPQLCVCRSGFRGARCEEVIPDEEFDPQNSRLAPRRWAERSPNLRRSSAAGEGTLARAQPPAPQSPPAPQSPPAGTLSGLSQTHPSQQHVGLSRTVRLHPTATASSQLSSNALPPGPGLEQRDGTQQAVPLEHPSSPWGLNLTEKIKKIKIVFTPTICKQTCARGHCANSCERGDTTTLYSQGGHGHDPKSGFRIYFCQIPCLNGGRCIGRDECWCPANSTGKFCHLPIPQPDREPPGRGSRPRALLEAPLKQSTFTLPLSNQLASVNPSLVKVHIHHPPEASVQIHQVAQVRGGVEEALVENSVETRPPPWLPASPGHSLWDSNNIPARSGEPPRPLPPAAPRPRGLLGRCYLNTVNGQCANPLLELTTQEDCCGSVGAFWGVTLCAPCPPRPASPVIENGQLECPQGYKRLNLTHCQDINECLTLGLCKDAECVNTRGSYLCTCRPGLMLDPSRSRCVSDKAISMLQGLCYRSLGPGTCTLPLAQRITKQICCCSRVGKAWGSECEKCPLPGTEAFREICPAGHGYTYASSDIRLSMRKAEEEELARPPREQGQRSSGALPGPAERQPLRVVTDTWLEAGTIPDKGDSQAGQVTTSVTHAPAWVTGNATTPPMPEQGIAEIQEEQVTPSTDVLVTLSTPGIDRCAAGATNVCGPGTCVNLPDGYRCVCSPGYQLHPSQAYCTDDNECLRDPCKGKGRCINRVGSYSCFCYPGYTLATSGATQECQDINECEQPGVCSGGQCTNTEGSYHCECDQGYIMVRKGHCQDINECRHPGTCPDGRCVNSPGSYTCLACEEGYRGQSGSCVDVNECLTPGVCAHGKCTNLEGSFRCSCEQGYEVTSDEKGCQDVDECASRASCPTGLCLNTEGSFACSACENGYWVNEDGTACEDLDECAFPGVCPSGVCTNTAGSFSCKDCDGGYRPSPLGDSCEDVDECEDPQSSCLGGECKNTVGSYQCLCPQGFQLANGTVCEDVNECMGEEHCAPHGECLNSHGSFFCLCAPGFVSAEGGTSCQDVDECATTDPCVGGHCVNTEGSFNCLCETGFQPSPESGECVDIDECANDTMCGSHGFCDNTDGSFRCLCDQGFEISPSGWDCVDVNECELMLAVCGAALCENVEGSFLCLCASDLEEYDAQEGHCRPRGAGGQSMSEAPTGDHAPAPTRMDCYSGQKGHAPCSSVLGRNTTQAECCCTQGASWGDACDLCPSEDSAEFSEICPSGKGYIPVEGAWTFGQTMYTDADECVIFGPGLCPNGRCLNTVPGYVCLCNPGFHYDASHKKCEDHDECQDLACENGECVNTEGSFHCFCSPPLTLDLSQQRCMNSTSSTEDLPDHDIHMDICWKKVTNDVCSEPLRGHRTTYTECCCQDGEAWSQQCALCPPRSSEVYAQLCNVARIEAEREAGVHFRPGYEYGPGPDDLHYSIYGPDGAPFYNYLGPEDTVPEPAFPNTAGHSADRTPILESPLQPSELQPHYVASHPEPPAGFEGLQAEECGILNGCENGRCVRVREGYTCDCFEGFQLDAAHMACVDVNECDDLNGPAVLCVHGYCENTEGSYRCHCSPGYVAEAGPPHCTAKE

SEQ ID NO: 8111 - protein, 233 aa, Homo Sapiens
  misc_feature (1)..(1): Xaa can be any naturally occurring amino acid
XTEGSFACSACENGYWVNEDGTACEDLDECAFPGVCPSGVCTNTAGSFSCKDCDGGYRPSPLGDSCEDVDECEDPQSSCLGGECKNTVGSYQCLCPQGFQLANGTVCEDVNECMGEEHCAPHGECLNSHGSFFCLCAPGFVSAEGGTSCQDIDECEDYGDPVCGTWKCENSPGSYRCVLGCQPGFHMAPNGDCIDIDECANDTMCGSHGFCDNTDGSFRCLCDQGFEISPSGW

SEQ ID NO: 8112 - protein, 144 aa, Homo Sapiens
FQDTLPKQPCGSNPLPGLTKQEDCCGSIGTAWGQSKCHKCPQLQYTGVQKPGPVRGEVGADCPQGYKRLNSTHCQADKPEEKSLCFRLVSPEHQCQHPLTTRLTRQLCCCSVGKAWGARCQRCPTDGTAAFKEICPAGKGYHIL

SEQ ID NO: 8113 - protein, 140 aa, Homo Sapiens
LNECAKPHLCGDGGFCINFPGHYKCNCYPGYRLKASRPPVCEDIDECRDPSSCPDGKCENKPGSFKCIACQPGYRSQGGGACRDVNECAEGSPCSPGWCENLPGSFRCTCAQGYAPAPDGRSCLGERQHPRPGPPPPPTR

SEQ ID NO: 8114 - protein, 124 aa, Homo Sapiens
MERAPERRDVCWSQRGEDGMCAGPLAGPALTFDDCCCRQGRGWGAQCRPCPPRGAGSHCPTSQSESNSFWDTSPLLLGKPPRDEDSSEEDSDECRCVSGRCVPRPGGAVCECPGGFQLDASRAR

SEQ ID NO: 8115 - protein, 306 aa, Homo Sapiens
MLFGSEICKEGKCVNTQPGYECYCKQGFYYDGNLLECVDVDECLDESNCRNGVCENTRGGYRCACTPPAEYSPAQRQCLSPEEMDVDECQDPAACRPGRCVNLPGSYRCECRPPWVPGPSGRDCQLPESPAERAPERRDVCWSQRGEDGMCAGPLAGPALTFDDCCCRQGRGWGAQCRPCPPRGAGSHCPTSQSESNSFWDTSPLLLGKPPRDEDSSEEDSDECRCVSGRCVPRPGGAVCECPGGFQLDASRARCVDIDECRELNQRGLLCKSERCVNTSGSFRCVCKAGFARSRPHGACVPQRRR

SEQ ID NO: 8116 - protein, 222 aa, Homo Sapiens
MLFGSEICKEGKCVNTQPGYECYCKQGFYYDGNLLECVDVDECLDESNCRNGVCENTRGGYRCACTPPAEYSPAQRQCLSPEEMERAPERRDVCWSQRGEDGMCAGPLAGPALTFDDCCCRQGRGWGAQCRPCPPRGAGSHCPTSQSESNSFWDTSPLLLGKPPRDEDSSEEDSDECRCVSGRCVPRPGGAVCECPGGFQLDASRARCVDIDECRELNQRGL

SEQ ID NO: 8117 - protein, 259 aa, Homo Sapiens
MLFGSEICKEGKCVNTQPGYECYCKQGFYYDGNLLECVDVDECLDESNCRNGVCENTRGGYRCACTPPAEYSPAQRQCLSPEEMERAPERRDVCWSQRGEDGMCAGPLAGPALTFDDCCCRQGRGWGAQCRPCPPRGAGSHCPTSQSESNSFWDTSPLLLGKPPRDEDSSEEDSDECRCVSGRCVPRPGGAVCECPGGFQLDASRARCVDIDECRELNQRGLLCKSERCVNTSGSFRCVCKAGFARSRPHGACVPQRRR

SEQ ID NO: 8118 - protein, 733 aa, Homo Sapiens
MPAETDECRLNQNICGHGECVPGPPDYSCHCNPGYRSHPQHRYCVDVNECEAEPCGPGRGICMNTGGSYNCHCNRGYRLHVGAGGRSCVDLNECAKPHLCGDGGFCINFPGHYKCNCYPGYRLKASRPPVCEDIDECRDPSSCPDGKCENKPGSFKCIACQPGYRSQGGGACRDVNECAEGSPCSPGWCENLPGSFRCTCAQGYAPAPDGRSCLDVDECEAGDVCDNGICSNTPGSFQCQCLSGYHLSRDRSHCEDIDECDFPAACIGGDCINTNGSYRCLCPQGHRLVGGRKCQDIDECSQDPSLCLPHGACKNLQGSYVCVCDEGFTPTQDQHGCEEVEQPHHKKECYLNFDDTVFCDSVLATNVTQQECCCSLGAGWGDHCEIYPCPVYSSAEFHSLCPDGKGYTQDNNIVNYGIPAHRDIDECMLFGSEICKEGKCVNTQPGYECYCKQGFYYDGNLLECVDVDECLDESNCRNGVCENTRGGYRCACTPPAEYSPAQRQCLSPEEMDVDECQDPAACRPGRCVNLPGSYRCECRPPWVPGPSGRDCQLPESPAERAPERRDVCWSQRGEDGMCAGPLAGPALTFDDCCCRQGRGWGAQCRPCPPRGAGSHCPTSQSESNSFWDTSPLLLGKPPRDEDSSEEDSDECRCVSGRCVPRPGGAVCECPGGFQLDASRARCVDIDECRELNQRGLLCKSERCVNTSGSFRCVCKAGFARSRPHGACVPQRRR

SEQ ID NO: 8119 - protein, 1256 aa, Homo Sapiens
MPGPRGAAGGLAPEMRGAGAAGLLALLLLLLLLLLGLGGRVEGGPAGERGAGGGGALARERFKVVFAPVICKRTCLKGQCRDSCQQGSNMTLIGENGHSTDTLTGSGFRVVVCPLPCMNGGQCSSRNQCLCPPDFTGRFCQVPAGGAGGGTGGSGPGLSRTGALSTGALPPLAPEGDSVASKHAIYAVQVIADPPGPGEGPPAQHAAFLVPLGPGQISAEVQAPPPVVNVRVHHPPEASVQVHRIESSNAESAAPSQHLLPHPKPSHPRPPTQKPLGRCFQDTLPKQPCGSNPLPGLTKQEDCCGSIGTAWGQSKCHKCPQLQYTGVQKPGPVRGEVGADCPQGYKRLNSTHCQDINECAMPGVCRHGDCLNNPGSYRCVCPPGHSLGPSRTQCIADKPEEKSLCFRLVSPEHQCQHPLTTRLTRQLCCCSVGKAWGARCQRCPTDGTAAFKEICPAGKGYHILTSHQTLTIQGESDFSLFLHPDGPPKPQQLPESPSQAPPPEDTEEERGVTTDSPVSEERSVQQSHPTATTTPARPYPELISRPSPPTMRWFLPDLPPSRSAVEIAPTQVTETDECRLNQNICGHGECVPGPPDYSCHCNPGYRSHPQHRYCVDVNECEAEPCGPGRGICMNTGGSYNCHCNRGYRLHVGAGGRSCVDLNECAKPHLCGDGGFCINFPGHYKCNCYPGYRLKASRPPVCEDIDECRDPSSCPDGKCENKPGSFKCIACQPGYRSQGGGACRDVNECAEGSPCSPGWCENLPGSFRCTCAQGYAPAPDGRSCLDVDECEAGDVCDNGICSNTPGSFQCQCLSGYHLSRDRSHCEDIDECDFPAACIGGDCINTNGSYRCLCPQGHRLVGGRKCQDIDECSQDPSLCLPHGACKNLQGSYVCVCDEGFTPTQDQHGCEEVEQPHHKKECYLNFDDTVFCDSVLATNVTQQECCCSLGAGWGDHCEIYPCPVYSSAEFHSLCPDGKGYTQDNNIVNYGIPAHRDIDECMLFGSEICKEGKCVNTQPGYECYCKQGFYYDGNLLECVDVDECLDESNCRNGVCENTRGGYRCACTPPAEYSPAQRQCLSPEEMERAPERRDVCWSQRGEDGMCAGPLAGPALTFDDCCCRQGRGWGAQCRPCPPRGAGSHCPTSQSESNSFWDTSPLLLGKPPRDEDSSEEDSDECRCVSGRCVPRPGGAVCECPGGFQLDASRARCVDIDECRELNQRGLLCKSERCVNTSGSFRCVCKAGFARSRPHGACVPQRRR

SEQ ID NO: 8120 - protein, 1303 aa, Homo Sapiens
MPGPRGAAGGLAPEMRGAGAAGLLALLLLLLLLLLGLGGRVEGGPAGERGAGGGGALARERFKVVFAPVICKRTCLKGQCRDSCQQGSNMTLIGENGHSTDTLTGSGFRVVVCPLPCMNGGQCSSRNQCLCPPDFTGRFCQVPAGGAGGGTGGSGPGLSRTGALSTGALPPLAPEGDSVASKHAIYAVQVIADPPGPGEGPPAQHAAFLVPLGPGQISAEVQAPPPVVNVRVHHPPEASVQVHRIESSNAESAAPSQHLLPHPKPSHPRPPTQKPLGRCFQDTLPKQPCGSNPLPGLTKQEDCCGSIGTAWGQSKCHKCPQLQYTGVQKPGPVRGEVGADCPQGYKRLNSTHCQDINECAMPGVCRHGDCLNNPGSYRCVCPPGHSLGPSRTQCIADKPEEKSLCFRLVSPEHQCQHPLTTRLTRQLCCCSVGKAWGARCQRCPTDGTAAFKEICPAGKGYHILTSHQTLTIQGESDFSLFLHPDGPPKPQQLPESPSQAPPPEDTEEERGVTTDSPVSEERSVQQSHPTATTTPARPYPELISRPSPPTMRWFLPDLPPSRSAVEIAPTQVTETDECRLNQNICGHGECVPGPPDYSCHCNPGYRSHPQHRYCVDVNECEAEPCGPGRGICMNTGGSYNCHCNRGYRLHVGAGGRSCVDLNECAKPHLCGDGGFCINFPGHYKCNCYPGYRLKASRPPVCEDIDECRDPSSCPDGKCENKPGSFKCIACQPGYRSQGGGACRDVNECAEGSPCSPGWCENLPGSFRCTCAQGYAPAPDGRSCLDVDECEAGDVCDNGICSNTPGSFQCQCLSGYHLSRDRSHCEDIDECDFPAACIGGDCINTNGSYRCLCPQGHRLVGGRKCQDIDECSQDPSLCLPHGACKNLQGSYVCVCDEGFTPTQDQHGCEEVEQPHHKKECYLNFDDTVFCDSVLATNVTQQECCCSLGAGWGDHCEIYPCPVYSSAEFHSLCPDGKGYTQDNNIVNYGIPAHRDIDECMLFGSEICKEGKCVNTQPGYECYCKQGFYYDGNLLECVDVDECLDESNCRNGVCENTRGGYRCACTPPAEYSPAQRQCLSPEEMDVDECQDPAACRPGRCVNLPGSYRCECRPPWVPGPSGRDCQLPESPAERAPERRDVCWSQRGEDGMCAGPLAGPALTFDDCCCRQGRGWGAQCRPCPPRGAGSHCPTSQSESNSFWDTSPLLLGKPPRDEDSSEEDSDECRCVSGRCVPRPGGAVCECPGGFQLDASRARCVDIDECRELNQRGLLCKSERCVNTSGSFRCVCKAGFARSRPHGACVPQRRR

SEQ ID NO: 8121 - protein, 116 aa, Homo Sapiens
MPGPRGAAGGLAPEMRGAGAAGLLALLLLLLLLLLGLGGRVEGGPAGERGAGGGGALARERFKVVFAPVICKRTCLKGQCRDSCQQGSNMTLIGENGHSTDTLTGSGFRWCALSPA

SEQ ID NO: 8122 - protein, 1137 aa, Homo Sapiens
MTLIGENGHSTDTLTGSGFRVVVCPLPCMNGGQCSSRNQCLCPPDFTGRFCQVPAGGAGGGTGGSGPGLSRTGALSTGALPPLAPEGDSVASKHAIYAVQVIADPPGPGEGPPAQHAAFLVPLGPGQISAEVQAPPPVVNVRVHHPPEASVQVHRIESSNAESAAPSQHLLPHPKPSHPRPPTQKPLGRCFQDTLPKQPCGSNPLPGLTKQEDCCGSIGTAWGQSKCHKCPQLQYTGVQKPGPVRGEVGADCPQGYKRLNSTHCQDINECAMPGVCRHGDCLNNPGSYRCVCPPGHSLGPSRTQCIADKPEEKSLCFRLVSPEHQCQHPLTTRLTRQLCCCSVGKAWGARCQRCPTDGTAAFKEICPAGKGYHILTSHQTLTIQGESDFSLFLHPDGPPKPQQLPESPSQAPPPEDTEEERGVTTDSPVSEERSVQQSHPTATTTPARPYPELISRPSPPTMRWFLPDLPPSRSAVEIAPTQVTETDECRLNQNICGHGECVPGPPDYSCHCNPGYRSHPQHRYCVDVNECEAEPCGPGRGICMNTGGSYNCHCNRGYRLHVGAGGRSCVDLNECAKPHLCGDGGFCINFPGHYKCNCYPGYRLKASRPPVCEDIDECRDPSSCPDGKCENKPGSFKCIACQPGYRSQGGGACRDVNECAEGSPCSPGWCENLPGSFRCTCAQGYAPAPDGRSCLDVDECEAGDVCDNGICSNTPGSFQCQCLSGYHLSRDRSHCEDIDECDFPAACIGGDCINTNGSYRCLCPQGHRLVGGRKCQDIDECSQDPSLCLPHGACKNLQGSYVCVCDEGFTPTQDQHGCEEVEQPHHKKECYLNFDDTVFCDSVLATNVTQQECCCSLGAGWGDHCEIYPCPVYSSAEFHSLCPDGKGYTQDNNIVNYGIPAHRDIDECMLFGSEICKEGKCVNTQPGYECYCKQGFYYDGNLLECVDVDECLDESNCRNGVCENTRGGYRCACTPPAEYSPAQRQCLSPEEMDVDECQDPAACRPGRCVNLPGSYRCECRPPWVPGPSGRDCQLPESPAERAPERRDVCWSQRGEDGMCAGPLAGPALTFDDCCCRQGRGWGAQCRPCPPRGAGSHCPTSQSESNSFWDTSPLLLGKPPRDEDSSEEDSDECRCVSG

SEQ ID NO: 8123 - protein, 907 aa, Homo Sapiens
  misc_feature (1)..(1): Xaa can be any naturally occurring amino acid
XFAPVICKRTCLKGQCRDSCQQGSNMTLIGENGHSTDTLTGSGFRVADKPEEKSLCFRLVSPEHQCQHPLTTRLTRQLCCCSVGKAWGARCQRCPTDGTAAFKEICPAGKGYHILTSHQTLTIQGESDFSLFLHPDGPPKPQQLPESPSQAPPPEDTEEERGVTTDSPVSEERSVQQSHPTATTTPARPYPELISRPSPPTMRWFLPDLPPSRSAVEIAPTQVTETDECRLNQNICGHGECVPGPPDYSCHCNPGYRSHPQHRYCVDVNECEAEPCGPGRGICMNTGGSYNCHCNRGYRLHVGAGGRSCVDLNECAKPHLCGDGGFCINFPGHYKCNCYPGYRLKASRPPVCEDIDECRDPSSCPDGKCENKPGSFKCIACQPGYRSQGGGACRDVNECAEGSPCSPGWCENLPGSFRCTCAQGYAPAPDGRSCLDVDECEAGDVCDNGICSNTPGSFQCQCLSGYHLSRDRSHCEDIDECDFPAACIGGDCINTNGSYRCLCPQGHRLVGGRKCQDIDECSQDPSLCLPHGACKNLQGSYVCVCDEGFTPTQDQHGCEEVEQPHHKKECYLNFDDTVFCDSVLATNVTQQECCCSLGAGWGDHCEIYPCPVYSSAEFHSLCPDGKGYTQDNNIVNYGIPAHRDIDECMLFGSEICKEGKCVNTQPGYECYCKQGFYYDGNLLECVDVDECLDESNCRNGVCENTRGGYRCACTPPAEYSPAQRQCLSPEEMERAPERRDVCWSQRGEDGMCAGPLAGPALTFDDCCCRQGRGWGAQCRPCPPRGAGSHCPTSQSESNSFWDTSPLLLGKPPRDEDSSEEDSDECRCVSGRCVPRPGGAVCECPGGFQLDASRARCVDIDECRELNQRGLLCKSERCVNTSGSFRCVCKAGFARSRPHGACVPQRRR

SEQ ID NO: 8124 - protein, 69 aa, Homo Sapiens
  misc_feature (1)..(1): Xaa can be any naturally occurring amino acid
XFAPVICKRTCLKGQCRDSCQQGSNMTLIGENGHSTDTLTGSGFRVGPAPRGECARPSPARGLSPGAPH

SEQ ID NO: 8125 - protein, 303 aa, Homo Sapiens
ECLNTDGSFACTCAPGYRPGPRGASCLDVDECSEEDLCQSGICTNTDGSFECICPPGHRAGPDLASCLDVDECRERGPALCGSQRCENSPGSYRCVRDCDPGYHAGPEGTCDDVNECETLQGVCGAALCENVEGSFLCVCPNSPEEFDPMTGRCVPPRTSADVDECQLFRDQVCKSGVCVNTAPGYSCYCSNGYYYHTQRLECIDNDECADEEPACEGGRCVNTVGSYHCTCEPPLVLDGSQRRCVSNESQSLDDNLGVCWQEVGADLVCSHPRLDRQATYTECCCLYGEAWGMDCALCPAQD

SEQ ID NO: 8126 - protein, 1557 aa, Homo Sapiens
MAGGVRLLWVSLLVLLAQLGPQPGLGRLGERLRVRFTPVVCGLRCVHGPTGSRCTPTCAPRNATSVDSGAPGGAAPGGPGFRAFLCPLICHNGGVCVKPDRCLCPPDFAGKFCQLHSSGARPPAPAVPGLTRSVYTMPLANHRDDEHGVASMVSVHVEHPQEASVVVHQVERVSGPWEEADAEAVARAEAAARAEAAAPYTVLAQSAPREDGYSDASGFGYCFRELRGGECASPLPGLRTQEVCCRGAGLAWGVHDCQLCSERLGNSERVSAPDGPCPTGFERVNGSCEDVDECATGGRCQHGECANTRGGYTCVCPDGFLLDSSRSSCISQHVISEAKGPCFRVLRDGGCSLPILRNITKQICCCSRVGKAWGRGCQLCPPFGSEGFREICPAGPGYHYSASDLRYNTRPLGQEPPRVSLSQPRTLPATSRPSAGFLPTHRLEPRPEPRPDPRPGPELPLPSIPAWTGPEIPESGPSSGMCQRNPQVCGPGRCISRPSGYTCACDSGFRLSPQGTRCIDVDECRRVPPPCAPGRCENSPGSFRCVCGPGFRAGPRAAECLDVDECHRVPPPCDLGRCENTPGSFLCVCPAGYQAAPHGASCQDVDECTQSPGLCGRGACKNLPGSFRCVCPAGFRGSACEEDVDECAQEPPPCGPGRCDNTAGSFHCACPAGFRSRGPGAPCQDVDECARSPPPCTYGRCENTEGSFQCVCPMGFQPNTAGSECEDVDECENHLACPGQECVNSPGSFQCRTCPSGHHLHRGRCTDVDECSSGAPPCGPHGHCTNTEGSFRCSCAPGYRAPSGRPGPCADVNECLEGDFCFPHGECLNTDGSFACTCAPGYRPGPRGASCLDVDECSEEDLCQSGICTNTDGSFECICPPGHRAGPDLASCLDVDECRERGPALCGSQRCENSPGSYRCVRDCDPGYHAGPEGTCDDVDECQEYGPEICGAQRCENTPGSYRCTPACDPGYQPTPGGGCQDVDECRNRSFCGAHAVCQNLPGSFQCLCDQGYEGARDGRHCVDVNECETLQGVCGAALCENVEGSFLCVCPNSPEEFDPMTGRCVPPRTSAGTFPGSQPQAPASPVLPARPPPPPLPRRPSTPRQGPVGSGRRECYFDTAAPDACDNILARNVTWQECCCTVGEGWGSGCRIQQCPGTETAEYQSLCPHGRGYLAPSGDLSLRRDVDECQLFRDQVCKSGVCVNTAPGYSCYCSNGYYYHTQRLECIDNDECADEEPACEGGRCVNTVGSYHCTCEPPLVLDGSQRRCVSNESQSLDDNLGVCWQEVGADLVCSHPRLDRQATYTECCCLYGEAWGMDCALCPAQDSDDFEALCNVLRPPAYSPPRPGGFGLPYEYGPDLGPPYQGLPYGPELYPPPALPYDPYPPPPGPFARREAPYGAPRFDMPDFEDDGGPYGESEAPAPPGPGTRWPYRSRDTRRSFPEPEEPPEGGSYAGSLAEPYEELEAEECGILDGCTNGRCVRVPEGFTCRCFDGYRLDMTRMACVDINECDEAEAASPLCVNARCLNTDGSFRCICRPGFAPTHQPHHCAPARPRA

SEQ ID NO: 8127 - protein, 44 aa, Homo Sapiens
MGDVKALLFVAAARARRLGGAAASEPSAGSEAASPKSVQAPSGA

SEQ ID NO: 8128 - protein, 1587 aa, Homo Sapiens
MGDVKALLFVAAARARRLGGAAASESLAVSEAFCRVRSCQPKKCAGPQRCLNPVPAVPSPSPSVRKRQVSLNWQPLTLQEARALLKRRRPRGPGGRGLLRRRPPQRAPAGKAPVLCPLICHNGGVCVKPDRCLCPPDFAGKFCQLHSSGARPPAPAVPGLTRSVYTMPLANHRDDEHGVASMVSVHVEHPQEASVVVHQVERVSGPWEEADAEAVARAEAAARAEAAAPYTVLAQSAPREDGYSDASGFGYCFRELRGGECASPLPGLRTQEVCCRGAGLAWGVHDCQLCSERLGNSERVSAPDGPCPTGFERVNGSCEDVDECATGGRCQHGECANTRGGYTCVCPDGFLLDSSRSSCISQHVISEAKGPCFRVLRDGGCSLPILRNITKQICCCSRVGKAWGRGCQLCPPFGSEGFREICPAGPGYHYSASDLRYNTRPLGQEPPRVSLSQPRTLPATSRPSAGFLPTHRLEPRPEPRPDPRPGPELPLPSIPAWTGPEIPESGPSSGMCQRNPQVCGPGRCISRPSGYTCACDSGFRLSPQGTRCIDVDECRRVPPPCAPGRCENSPGSFRCVCGPGFRAGPRAAECLDVDECHRVPPPCDLGRCENTPGSFLCVCPAGYQAAPHGASCQDVDECTQSPGLCGRGACKNLPGSFRCVCPAGFRGSACEEDVDECAQEPPPCGPGRCDNTAGSFHCACPAGFRSRGPGAPCQDVDECARSPPPCTYGRCENTEGSFQCVCPMGFQPNTAGSECEDVDECENHLACPGQECVNSPGSFQCRTCPSGHHLHRGRCTDVDECSSGAPPCGPHGHCTNTEGSFRCSCAPGYRAPSGRPGPCADVNECLEGDFCFPHGECLNTDGSFACTCAPGYRPGPRGASCLDVDECSEEDLCQSGICTNTDGSFECICPPGHRAGPDLASCLDVDECRERGPALCGSQRCENSPGSYRCVRDCDPGYHAGPEGTCDDVDECQEYGPEICGAQRCENTPGSYRCTPACDPGYQPTPGGGCQDVDECRNRSFCGAHAVCQNLPGSFQCLCDQGYEGARDGRHCVDVNECETLQGVCGAALCENVEGSFLCVCPNSPEEFDPMTGRCVPPRTSAGTFPGSQPQAPASPVLPARPPPPPLPRRPSTPRQGPVGSGRRECYFDTAAPDACDNILARNVTWQECCCTVGEGWGSGCRIQQCPGTETAEYQSLCPHGRGYLAPSGDLSLRRDVDECQLFRDQVCKSGVCVNTAPGYSCYCSNGYYYHTQRLECIDNDECADEEPACEGGRCVNTVGSYHCTCEPPLVLDGSQRRCVSNESQSLDDNLGVCWQEVGADLVCSHPRLDRQATYTECCCLYGEAWGMDCALCPAQDSDDFEALCNVLRPPAYSPPRPGGFGLPYEYGPDLGPPYQGLPYGPELYPPPALPYDPYPPPPGPFARREAPYGAPRFDMPDFEDDGGPYGESEAPAPPGPGTRWPYRSRDTRRSFPEPEEPPEGGSYAGSLAEPYEELEAEECGILDGCTNGRCVRVPEGFTCRCFDGYRLDMTRMACVDINECDEAEAASPLCVNARCLNTDGSFRCICRPGFAPTHQPHHCAPARPRA

SEQ ID NO: 8129 - protein, 44 aa, Homo Sapiens
MLQPQALLFVAAARARRLGGAAASEPSAGSEAASPKSVQAPSGA

SEQ ID NO: 8130 - protein, 1624 aa, Homo Sapiens
MPRPGTSGRRPLLLVLLLPLFAAATSAASPSPSPSQVVEVPGVPSRPASVAVCRCCPGQTSRRSRCIRAFCRVRSCQPKKCAGPQRCLNPVPAVPSPSPSVRKRQVSLNWQPLTLQEARALLKRRRPRGPGGRGLLRRRPPQRAPAGKAPVLCPLICHNGGVCVKPDRCLCPPDFAGKFCQLHSSGARPPAPAVPGLTRSVYTMPLANHRDDEHGVASMVSVHVEHPQEASVVVHQVERVSGPWEEADAEAVARAEAAARAEAAAPYTVLAQSAPREDGYSDASGFGYCFRELRGGECASPLPGLRTQEVCCRGAGLAWGVHDCQLCSERLGNSERVSAPDGPCPTGFERVNGSCEDVDECATGGRCQHGECANTRGGYTCVCPDGFLLDSSRSSCISQHVISEAKGPCFRVLRDGGCSLPILRNITKQICCCSRVGKAWGRGCQLCPPFGSEGFREICPAGPGYHYSASDLRYNTRPLGQEPPRVSLSQPRTLPATSRPSAGFLPTHRLEPRPEPRPDPRPGPELPLPSIPAWTGPEIPESGPSSGMCQRNPQVCGPGRCISRPSGYTCACDSGFRLSPQGTRCIDVDECRRVPPPCAPGRCENSPGSFRCVCGPGFRAGPRAAECLDVDECHRVPPPCDLGRCENTPGSFLCVCPAGYQAAPHGASCQDVDECTQSPGLCGRGACKNLPGSFRCVCPAGFRGSACEEDVDECAQEPPPCGPGRCDNTAGSFHCACPAGFRSRGPGAPCQDVDECARSPPPCTYGRCENTEGSFQCVCPMGFQPNTAGSECEDVDECENHLACPGQECVNSPGSFQCRTCPSGHHLHRGRCTDVDECSSGAPPCGPHGHCTNTEGSFRCSCAPGYRAPSGRPGPCADVNECLEGDFCFPHGECLNTDGSFACTCAPGYRPGPRGASCLDVDECSEEDLCQSGICTNTDGSFECICPPGHRAGPDLASCLDVDECRERGPALCGSQRCENSPGSYRCVRDCDPGYHAGPEGTCDDVDECQEYGPEICGAQRCENTPGSYRCTPACDPGYQPTPGGGCQDVDECRNRSFCGAHAVCQNLPGSFQCLCDQGYEGARDGRHCVDVNECETLQGVCGAALCENVEGSFLCVCPNSPEEFDPMTGRCVPPRTSAGTFPGSQPQAPASPVLPARPPPPPLPRRPSTPRQGPVGSGRRECYFDTAAPDACDNILARNVTWQECCCTVGEGWGSGCRIQQCPGTETAEYQSLCPHGRGYLAPSGDLSLRRDVDECQLFRDQVCKSGVCVNTAPGYSCYCSNGYYYHTQRLECIDNDECADEEPACEGGRCVNTVGSYHCTCEPPLVLDGSQRRCVSNESQSLDDNLGVCWQEVGADLVCSHPRLDRQATYTECCCLYGEAWGMDCALCPAQDSDDFEALCNVLRPPAYSPPRPGGFGLPYEYGPDLGPPYQGLPYGPELYPPPALPYDPYPPPPGPFARREAPYGAPRFDMPDFEDDGGPYGESEAPAPPGPGTRWPYRSRDTRRSFPEPEEPPEGGSYAGSLAEPYEELEAEECGILDGCTNGRCVRVPEGFTCRCFDGYRLDMTRMACVDINECDEAEAASPLCVNARCLNTDGSFRCICRPGFAPTHQPHHCAPARPRA

SEQ ID NO: 8131 - protein, 70 aa, Homo Sapiens
MSARTAPFSWSGGKLRPKDQETLASGHTSWKALLFVAAARARRLGGAAASEPSAGSEAASPKSVQAPSGA

SEQ ID NO: 8132 - protein, 145 aa, Homo Sapiens
PPGPGTRWPYRSRDTRRSFPEPEEPPEGGSYAGSLAEPYEELEAEECGILDGCTNGRCVRVPEGFTCRCFDGYRLDMTRMACVAFSSDRCLPSADINECDEAEAASPLCVNARCLNTDGSFRCICRPGFAPTHQPHHCAPARPRA

SEQ ID NO: 8133 - protein, 252 aa, Homo Sapiens
  misc_feature (1)..(1): Xaa can be any naturally occurring amino acid
XFRCSCAPGYRAPSGRPGPCADVNECLEGDFCFPHGECLNTDGSFACTCAPGYRPGPRGASCLDVDECSEEDLCQSGICTNTDGSFECICPPGHRAGPDLASCLDVDECRERGPALCGSQRCENSPGSYRCVRDCDPGYHAGPEGTCDDVDECRNRSFCGAHAVCQNLPGSFQCLCDQGYEGARDGRHCVDVNECETLQGVCGAALCENVEGSFLCVCPNSPEEFDPMTGRCVPPRTSAGTFPGSQPQAPAS

SEQ ID NO: 8134 - protein, 182 aa, Homo Sapiens
  misc_feature (1)..(1): Xaa can be any naturally occurring amino acid
XGPEICGAQRCENTPGSYRCTPACDPGYQPTPGGGCQDVDECRNRSFCGAHAVCQNLPGSFQCLCDQGYEGARDGRHCVDVNECETLQGVCGAALCENVEGSFLCVCPNSPEEFDPMTGRCVPPRTSADVDECQLFRDQVCKSGVCVNTAPGYSCYCSNGYYYHTQRLECIDNDECADEEPA

SEQ ID NO: 8135 - protein, 224 aa, Homo Sapiens
  misc_feature (1)..(1): Xaa can be any naturally occurring amino acid
XNTDGSFACTCAPGYRPGPRGASCLDVDECSEEDLCQSGICTNTDGSFECICPPGHRAGPDLASCLDVDECRERGPALCGSQRCENSPGSYRCVRDCDPGYHAGPEGTCDDVDECQEYGPEICGAQRCENTPGSYRCTPACDPGYQPTPGGGCQDVNECETLQGVCGAALCENVEGSFLCVCPNSPEEFDPMTGRCVPPRTSAGTFPGSQPQAPASPVLPARPP

SEQ ID NO: 8136 - protein, 674 aa, Homo Sapiens
  misc_feature (1)..(1): Xaa can be any naturally occurring amino acid
XNTEGSFQCVCPMGFQPNTAGSECEDVDECENHLACPGQECVNSPGSFQCRTCPSGHHLHRGRCTDVDECSSGAPPCGPHGHCTNTEGSFRCSCAPGYRAPSGRPGPCADVNECLEGDFCFPHGECLNTDGSFACTCAPGYRPGPRGASCLDVDECSEEDLCQSGICTNTDGSFECICPPGHRAGPDLASCLDVDECRERGPALCGSQRCENSPGSYRCVRDCDPGYHAGPEGTCDDVNECETLQGVCGAALCENVEGSFLCVCPNSPEEFDPMTGRCVPPRTSAGTFPGSQPQAPASPVLPARPPPPPLPRRPSTPRQGPVGSGRRECYFDTAAPDACDNILARNVTWQECCCTVGEGWGSGCRIQQCPGTETAEYQSLCPHGRGYLAPSGDLSLRRDVDECQLFRDQVCKSGVCVNTAPGYSCYCSNGYYYHTQRLECIDNDECADEEPACEGGRCVNTVGSYHCTCEPPLVLDGSQRRCVSNESQSLDDNLGVCWQEVGADLVCSHPRLDRQATYTECCCLYGEAWGMDCALCPAQDSDDFEALCNVLRPPAYSPPRPGGFGLPYEYGPDLGPPYQGLPYGPELYPPPALPYDPYPPPPGPFARREAPYGAPRFDMPDFEDDGGPYGESEAPAPPGPGTRWPYRSRDTRRSFPEPEEPPEGGSYAGSLAEP

SEQ ID NO: 8137 - protein, 94 aa, Homo Sapiens
  misc_feature (1)..(1): Xaa can be any naturally occurring amino acid
XRFDMPDFEDDGGPYGESEAEECGILDGCTNGRCVRVPEGFTCRCFDGYRLDMTRMACVDINECDEAEAASPLCVNARCLNTDGSFRCICRPGF

SEQ ID NO: 8138 - protein, 957 aa, Homo Sapiens
  misc_feature (1)..(1): Xaa can be any naturally occurring amino acid
XVDECRRVPPPCAPGRCENSPGSFRCVCGPGFRAGPRAAECLDVDECHRVPPPCDLGRCENTPGSFLCVCPAGYQAAPHGASCQDVDECARSPPPCTYGRCENTEGSFQCVCPMGFQPNTAGSECEDVDECENHLACPGQECVNSPGSFQCRTCPSGHHLHRGRCTDVDECSSGAPPCGPHGHCTNTEGSFRCSCAPGYRAPSGRPGPCADVNECLEGDFCFPHGECLNTDGSFACTCAPGYRPGPRGASCLDVDECSEEDLCQSGICTNTDGSFECICPPGHRAGPDLASCLDVDECRERGPALCGSQRCENSPGSYRCVRDCDPGYHAGPEGTCDDVDECQEYGPEICGAQRCENTPGSYRCTPACDPGYQPTPGGGCQDVDECRNRSFCGAHAVCQNLPGSFQCLCDQGYEGARDGRHCVDVNECETLQGVCGAALCENVEGSFLCVCPNSPEEFDPMTGRCVPPRTSAGTFPGSQPQAPASPVLPARPPPPPLPRRPSTPRQGPVGSGRRECYFDTAAPDACDNILARNVTWQECCCTVGEGWGSGCRIQQCPGTETAEYQSLCPHGRGYLAPSGDLSLRRDVDECQLFRDQVCKSGVCVNTAPGYSCYCSNGYYYHTQRLECIDNDECADEEPACEGGRCVNTVGSYHCTCEPPLVLDGSQRRCVSNESQSLDDNLGVCWQEVGADLVCSHPRLDRQATYTECCCLYGEAWGMDCALCPAQDSDDFEALCNVLRPPAYSPPRPGGFGLPYEYGPDLGPPYQGLPYGPELYPPPALPYDPYPPPPGPFARREAPYGAPRFDMPDFEDDGGPYGESEAPAPPGPGTRWPYRSRDTRRSFPEPEEPPEGGSYAGSLAEPYEELEAEECGILDGCTNGRCVRVPEGFTCRCFDGYRLDMTRMACVDINECDEAEAASPLCVNARCLNTDGSFRCICRPGFAPTHQPHHCAPARPRA

SEQ ID NO: 8139 - protein, 191 aa, Homo Sapiens
  misc_feature (1)..(1): Xaa can be any naturally occurring amino acid
XVDECSEEDLCQSGICTNTDGSFECICPPGHRAGPDLASCLDVDECRERGPALCGSQRCENSPGSYRCVRDCDPGYHAGPEGTCDDVDECQEYGPEICGAQRCENTPGSYRCTPACDPGYQPTPGGGCQDVNECETLQGVCGAALCENVEGSFLCVCPNSPEEFDPMTGRCVPPRTSADVDECQLFRDQVC

SEQ ID NO: 8140 - protein, 189 aa, Homo Sapiens
  misc_feature (1)..(1): Xaa can be any naturally occurring amino acid
XVDECSEEDLCQSGICTNTDGSFECICPPGHRAGPDLASCLDVDECRERGPALCGSQRCENSPGSYRCVRDCDPGYHAGPEGTCDDVDECRNRSFCGAHAVCQNLPGSFQCLCDQGYEGARDGRHCVDVNECETLQGVCGAALCENVEGSFLCVCPNSPEEFDPMTGRCVPPRTSAGTFPGSQPQAPAS

SEQ ID NO: 8141 - protein, 416 aa, Homo Sapiens
MEATGISLASQLKVPPYASENQTCRDQEKEYYEPQHRICCSRCPPGTYVSAKCSRIRDTVCATCAENSYNEHWNYLTICQLCRPCDPVMGLEEIAPCTSKRKTQCRCQPGMFCAAWALECTHCELLSDCPPGTEAELKDEVGKGNNHCVPCKAGHFQNTSSPSARCQPHTRCENQGLVEAAPGTAQSDTTCKNPLEPLPPEMSGTMLMLAVLLPLAFFLLLATVFSCIWKSHPSLCRKLGSLLKRRPQGEGPNPVAGSWEPPKAHPYFPDLVQPLLPISGDVSPVSTGLPAAPVLEAGVPQQQSPLDLTREPQLEPGEQSQVAHGTNGIHVTGGSMTITGNIYIYNGPVLGGPPGPGDLPATPEPPYPIPEEGDPGPPGLSTPHQEDGKAWHLAETEHCGATPSNRGPRNQFITHD

SEQ ID NO: 8142 - protein, 148 aa, Homo Sapiens
MGLEEIAPCTSKRKTQCRCQPGMFCAAWALECTHCELLSDCPPGTEAELKDEVGKGNNHCVPCKAGHFQNTSSPSARCQPHTRCENQGLVEAAPGTAQSDTTCKNPLEPLPPEMSEPALSKGVENLQALLYQAATGSSEASFPTLSPL

SEQ ID NO: 8143 - protein, 292 aa, Homo Sapiens
MGLEEIAPCTSKRKTQCRCQPGMFCAAWALECTHCELLSDCPPGTEAELKDEVGKGNNHCVPCKAGHFQNTSSPSARCQPHTRCENQGLVEAAPGTAQSDTTCKNPLEPLPPEMSGSLLKRRPQGEGPNPVAGSWEPPKAHPYFPDLVQPLLPISGDVSPVSTGLPAAPVLEAGVPQQQSPLDLTREPQLEPGEQSQVAHGTNGIHVTGGSMTITGNIYIYNGPVLGGPPGPGDLPATPEPPYPIPEEGDPGPPGLSTPHQEDGKAWHLAETEHCGATPSNRGPRNQFITHD

SEQ ID NO: 8144 - protein, 74 aa, Homo Sapiens
MGLEEIAPCTSKRKTQCRCQPGMFCAAWALECTHCELLSDCPPGTEAELKGVRTKVWWRQLQALPSPTQPAKIH

SEQ ID NO: 8145 - protein, 218 aa, Homo Sapiens
MLLPWATSAPGLAWGPLVLGLFGLLAASQPQAVPPYASENQTCRDQEKEYYEPQHRICCSRCPPAKCSRIRDTVCATCAENSYNEHWNYLTICQLCRPCDPVMGLEEIAPCTSKRKTQCRCQPGMFCAAWALECTHCELLSDCPPGTEAELKDEVGKGNNHCVPCKAGHFQNTSSPSARCQPHTRCENQGLVEAAPGTAQSDTTCKNPLEPLPPEMSG

SEQ ID NO: 8146 - protein, 435 aa, Homo Sapiens
MLLPWATSAPGLAWGPLVLGLFGLLAASQPQAVPPYASENQTCRDQEKEYYEPQHRICCSRCPPGTYVSAKCSRIRDTVCATCAENSYNEHWNYLTICQLCRPCDPVMGLEEIAPCTSKRKTQCRCQPGMFCAAWALECTHCELLSDCPPGTEAELKDEVGKGNNHCVPCKAGHFQNTSSPSARCQPHTRCENQGLVEAAPGTAQSDTTCKNPLEPLPPEMSGTMLMLAVLLPLAFFLLLATVFSCIWKSHPSLCRKLGSLLKRRPQGEGPNPVAGSWEPPKAHPYFPDLVQPLLPISGDVSPVSTGLPAAPVLEAGVPQQQSPLDLTREPQLEPGEQSQVAHGTNGIHVTGGSMTITGNIYIYNGPVLGGPPGPGDLPATPEPPYPIPEEGDPGPPGLSTPHQEDGKAWHLAETEHCGATPSNRGPRNQFITHD

SEQ ID NO: 8147 - protein, 696 aa, Homo Sapiens
MGLCLAGRRRSVQWCAVSQPEATKCFQWQRNMRKVRGPPVSCIKRDSPIQCIQAIAENRADAVTLDGGFIYEAGLAPYKLRPVAAEVYGTERQPRTHYYAVAVVKKGGSFQLNELQGLKSCHTGLRRTAGWNVPIGTLRPFLNWTGPPEPIEAAVARFFSASCVPGADKGQFPNLCRLCAGTGENKCAFSSQEPYFSYSGAFKCLRDGAGDVAFIRESTVFEDLSDEAERDEYELLCPDNTRKPVDKFKDCHLARVPSHAVVARSVNGKEDAIWNLLRQAQEKFGKDKSPKFQLFGSPSGQKDLLFKDSAIGFSRVPPRIDSGLYLGSGYFTAIQNLRKSEEEVAARRARVVWCAVGEQELRKCNQWSGLSEGSVTCSSASTTEDCIALVLKGEADAMSLDGGYVYTAGKCGLVPVLAENYKSQQSSDPDPNCVDRPVEGYLAVAVVRRSDTSLTWNSVKGKKSCHTAVDRTAGWNIPMGLLFNQTGSCKFDEYFSQSCAPGSDPRSNLCALCIGDEQGENKCVPNSNERYYGYTGAFRCLAENAGDVAFVKDVTVLQNTDGNNNEAWAKDLKLADFALLCLDGKRKPVTEARSCHLAMAPNHAVVSRMDKVERLKQVLLHQQAKFGRNGSDCPDKFCLFQSETKNLLFNDNTECLARLHGKTTYEKYLGPQYVAGITNLKKCSTSPLLEACEFLR

SEQ ID NO: 8148 - protein, 182 aa, Homo Sapiens
MKLVFLVLLFLGALGFLWMPFIRQPGLCLAGRRRSVQWCAVSQPEATKCFQWQRNMRKVRGPPVSCIKRDSPIQCIQAIAENRADAVTLDGGFIYEAGLAPYKLRPVAAEVYGTERQPRTHYYAVAVVKKGGSFQLNELQGLKSCHTGLRRTAGWNVPIGTLRPFLNWTGPPEPIEAAVARF

SEQ ID NO: 8149 - protein, 710 aa, Homo Sapiens
MKLVFLVLLFLGALGLCLAGRRRSVQWCAVSQPEATKCFQWQRNMRKVRGPPVSCIKRDSPIQCIQAIAENRADAVTLDGGFIYEAGLAPYKLRPVAAEVYGTERQPRTHYYAVAVVKKGGSFQLNELQGLKSCHTGLRRTAGWNVPIGTLRPFLNWTGPPEPIEAAVARFFSASCVPGADKGQFPNLCRLCAGTGENKCAFSSQEPYFSYSGAFKCLRDGAGDVAFIRESTVFEDLSDEAERDEYELLCPDNTRKPVDKFKDCHLARVPSHAVVARSVNGKEDAIWNLLRQAQEKFGKDKSPKFQLFGSPSGQKDLLFKDSAIGFSRVPPRIDSGLYLGSGYFTAIQNLRKSEEEVAARRARVVWCAVGEQELRKCNQWSGLSEGSVTCSSASTTEDCIALVLKGEADAMSLDGGYVYTAGKCGLVPVLAENYKSQQSSDPDPNCVDRPVEGYLAVAVVRRSDTSLTWNSVKGKKSCHTAVDRTAGWNIPMGLLFNQTGSCKFDEYFSQSCAPGSDPRSNLCALCIGDEQGENKCVPNSNERYYGYTGAFRCLAENAGDVAFVKDVTVLQNTDGNNNEAWAKDLKLADFALLCLDGKRKPVTEARSCHLAMAPNHAVVSRMDKVERLKQVLLHQQAKFGRNGSDCPDKFCLFQSETKNLLFNDNTECLARLHGKTTYEKYLGPQYVAGITNLKKCSTSPLLEACEFLRK

SEQ ID NO: 8150 - protein, 708 aa, Homo Sapiens
MKLVFLVLLFLGALGLCLAGRRRSVQWCAVSQPEATKCFQWQRNMRKVRGPPVSCIKRDSPIQCIQAIAENRADAVTLDGGFIYEAGLAPYKLRPVAAEVYGTERQPRTHYYAVAVVKKGGSFQLNELQGLKSCHTGLRRTAGWNVPIGTLRPFLNWTGPPEPIEAAVARFFSASCVPGADKGQFPNLCRLCAGTGENKCAFSSQEPYFSYSGAFKCLRDGAGDVAFIRESTVFEDLSDEAERDEYELLCPDNTRKPVDKFKDCHLARVPSHAVVARSVNGKEDAIWNLLRQAQEKFGKDKSPKFQLFGSPSGQKDLLFKDSAIGFSRVPPRIDSGLYLGSGYFTAIQNLRKSEEEVAARRARVVWCAVGEQELRKCNQWSGLSEGSVTCSSASTTEDCIALKGEADAMSLDGGYVYTAGKCGLVPVLAENYKSQQSSDPDPNCVDRPVEGYLAVAVVRRSDTSLTWNSVKGKKSCHTAVDRTAGWNIPMGLLFNQTGSCKFDEYFSQSCAPGSDPRSNLCALCIGDEQGENKCVPNSNERYYGYTGAFRCLAENAGDVAFVKDVTVLQNTDGNNNEAWAKDLKLADFALLCLDGKRKPVTEARSCHLAMAPNHAVVSRMDKVERLKQVLLHQQAKFGRNGSDCPDKFCLFQSETKNLLFNDNTECLARLHGKTTYEKYLGPQYVAGITNLKKCSTSPLLEACEFLRK

SEQ ID NO: 8151 - protein, 666 aa, Homo Sapiens
MRKVRGPPVSCIKRDSPIQCIQAIAENRADAVTLDGGFIYEAGLAPYKLRPVAAEVYGTERQPRTHYYAVAVVKKGGSFQLNELQGLKSCHTGLRRTAGWNVPIGTLRPFLNWTGPPEPIEAAVARFFSASCVPGADKGQFPNLCRLCAGTGENKCAFSSQEPYFSYSGAFKCLRDGAGDVAFIRESTVFEDLSDEAERDEYELLCPDNTRKPVDKFKDCHLARVPSHAVVARSVNGKEDAIWNLLRQAQEKFGKDKSPKFQLFGSPSGQKDLLFKDSAIGFSRVPPRIDSGLYLGSGYFTAIQNLRKSEEEVAARRARVVWCAVGEQELRKCNQWSGLSEGSVTCSSASTTEDCIALVLKGEADAMSLDGGYVYTAGKCGLVPVLAENYKSQQSSDPDPNCVDRPVEGYLAVAVVRRSDTSLTWNSVKGKKSCHTAVDRTAGWNIPMGLLFNQTGSCKFDEYFSQSCAPGSDPRSNLCALCIGDEQGENKCVPNSNERYYGYTGAFRCLAENAGDVAFVKDVTVLQNTDGNNNEAWAKDLKLADFALLCLDGKRKPVTEARSCHLAMAPNHAVVSRMDKVERLKQVLLHQQAKFGRNGSDCPDKFCLFQSETKNLLFNDNTECLARLHGKTTYEKYLGPQYVAGITNLKKCSTSPLLEACEFLRK

SEQ ID NO: 8152 - protein, 864 aa, Homo Sapiens
MGCWGQLLVWFGAAGAILCSSPGSQETFLRSSPLPLASPSPRDPKVSAPPSILEPASPLNSPGTEGSWLFSTCGASGRHGPTQTQCDGAYAGTSVVVTVGAAGQLRGVQLWRVPGPGQYLISAYGAAGGKGAKNHLSRAHGVFVSAIFSLGLGESLYILVGQQGEDACPGGSPESQLVCLGESRAVEEHAAMDGSEGVPGSRRWAGGGGGGGGATYVFRVRAGELEPLLVAAGGGGRAYLRPRDRGRTQASPEKLENRSEAPGSGGRGGAAGGGGGWTSRAPSPQAGRSLQEGAEGGQGCSEAWATLGWAAAGGFGGGGGACTAGGGGGGYRGGDASETDNLWADGEDGVSFIHPSSELFLQPLAVTENHGEVEIRRHLNCSHCPLRDCQWQAELQLAECLCPEGMELAVDNVTCMDLHKPPGPLVLMVAVVATSTLSLLMVCGVLILVKQKKWQGLQEMRLPSPELELSKLRTSAIRTAPNPYYCQVGLGPAQSWPLPPGVTEVSPANVTLLRALGHGAFGEVYEGLVIGLPGDSSPLQVAIKTLPELCSPQDELDFLMEALIISKFRHQNIVRCVGLSLRATPRLILLELMSGGDMKSFLRHSRPHLGQPSPLVMRDLLQLAQDIAQGCHYLEENHFIHRDIAARNCLLSCAGPSRVAKIGDFGMARDIYRASYYRRGDRALLPVKWMPPEAFLEGIFTSKTDSWSFGVLLWEIFSLGYMPYPGRTNQEVLDFVVGGGRMDPPRGCPGPVYRIMTQCWQHEPELRPSFASILERLQYCTQDPDVLNSLLPMELGPTPEEEGTSGLGNRSLECLRPPQPQELSPEKLKSWGGSPLGPWLSSGLKPLKSRGLQPQNLWNPTYRS

SEQ ID NO: 8153 - protein, 803 aa, Homo Sapiens
MGCWGQLLVWFGAAGAILCSSPGSQETFLRSSPLPLASPSPRDPKVSAPPSILEPASPLNSPGTEGSWLFSTCGASGRHGPTQTQCDGAYAGTSVVVTVGAAGQLRGVQLWRVPGPGQYLISAYGAAGGKGAKNHLSRAHGVFVSAIFSLGLGESLYILVGQQGEDACPGGSPESQLVCLGESRAVEEHAAMDGSEGVPGSRRWAGGGGGGGGATYVFRVRAGELEPLLVAAGGGGRAYLRPRDRGRTQASPEKLENRSEAPGSGGRGGAAGGDASETDNLWADGEDGVSFIHPSSELFLQPLAVTENHGEVEIRRHLNCSHCPLRDCQWQAELQLAECLCPEGMELAVDNVTCMDLHKPPGPLVLMVAVVATSTLSLLMVCGVLILVKQKKWQGLQEMRLPSPELELSKLRTSAIRTAPNPYYCQVGLGPAQSWPLPPGVTEVSPANVTLLRALGHGAFGEVYEGLVIGLPGDSSPLQVAIKTLPELCSPQDELDFLMEALIISKFRHQNIVRCVGLSLRATPRLILLELMSGGDMKSFLRHSRPHLGQPSPLVMRDLLQLAQDIAQGCHYLEENHFIHRDIAARNCLLSCAGPSRVAKIGDFGMARDIYRASYYRRGDRALLPVKWMPPEAFLEGIFTSKTDSWSFGVLLWEIFSLGYMPYPGRTNQEVLDFVVGGGRMDPPRGCPGPVYRIMTQCWQHEPELRPSFASILERLQYCTQDPDVLNSLLPMELGPTPEEEGTSGLGNRSLECLRPPQPQELSPEKLKSWGGSPLGPWLSSGLKPLKSRGLQPQNLWNPTYRS

SEQ ID NO: 8154 - protein, 734 aa, Homo Sapiens
MGCWGQLLVWFGAAGAILCSSPGSQETFLRSSPLPLASPSPRDPKVSAPPSILEPASPLNSPGTEGSWLFSTCGASGRHGPTQTQCDGAYAGTSVVVTVGAAGQLRGVQLWRVPGPGQYLISAYGAAGGKGAKNHLSRAHGVFVSAIFSLGLGESLYILVGQQGEDACPGGSPESQLVCLGESRAVEEHAAMDGSEGVPGSRRWAGGGGGGGGATYVFRVRAGELEPLLVAAGGGGRAYLRPRDRGRTQASPEKLENRSEAPGSGGRGGAAGGDASETDNLWADGEDGVSFIHPSSELFLQPLAVTENHGEVEIRRHLNCSHCPLRDCQWQAELQLAECLCPEGMELAVDNVTCMDLHKPPGPLVLMVAVVATSTLSLLMVCGVLILGGAWPGPVLASATRCHRGFPSQCYSAQTLPELCSPQDELDFLMEALIISKFRHQNIVRCVGLSLRATPRLILLELMSGGDMKSFLRHSRPHLGQPSPLVMRDLLQLAQDIAQGCHYLEENHFIHRDIAARNCLLSCAGPSRVAKIGDFGMARDIYRASYYRRGDRALLPVKWMPPEAFLEGIFTSKTDSWSFGVLLWEIFSLGYMPYPGRTNQEVLDFVVGGGRMDPPRGCPGPVYRIMTQCWQHEPELRPSFASILERLQYCTQDPDVLNSLLPMELGPTPEEEGTSGLGNRSLECLRPPQPQELSPEKLKSWGGSPLGPWLSSGLKPLKSRGLQPQNLWNPTYRS

SEQ ID NO: 8155 - protein, 562 aa, Homo Sapiens
MGCWGQLLVWFGAAGGDASETDNLWADGEDGVSFIHPSSELFLQPLAVTENHGEVEIRRHLNCSHCPLRDCQWQAELQLAECLCPEGMELAVDNVTCMDLHKPPGPLVLMVAVVATSTLSLLMVCGVLILGTKRLAGTVDSRLLLSMKQKKWQGLQEMRLPSPELELSKLRTSAIRTAPNPYYCQVGLGPAQSWPLPPGVTEVSPANVTLLRALGHGAFGEVYEGLVIGLPGDSSPLQVAIKTLPELCSPQDELDFLMEALIISKFRHQNIVRCVGLSLRATPRLILLELMSGGDMKSFLRHSRPHLGQPSPLVMRDLLQLAQDIAQGCHYLEENHFIHRDIAARNCLLSCAGPSRVAKIGDFGMARDIYRASYYRRGDRALLPVKWMPPEAFLEGIFTSKTDSWSFGVLLWEIFSLGYMPYPGRTNQEVLDFVVGGGRMDPPRGCPGPVYRIMTQCWQHEPELRPSFASILERLQYCTQDPDVLNSLLPMELGPTPEEEGTSGLGNRSLECLRPPQPQELSPEKLKSWGGSPLGPWLSSGLKPLKSRGLQPQNLWNPTYRS

SEQ ID NO: 8156 - protein, 338 aa, Homo Sapiens
MSLSAFTLFLALIGGTSGQYYDYDFPLSIYGQSSPNCAPECNCPESYPSAMYCDELKLKSVPMVPPGIKYLYLRNNQIDHIDEKAFENVTDLQWLILDHNLLENSKIKGRVFSKLKQLKKLHINHNNLTESVGPLPKSLEDLQLTHNKITKLGSFEGLVNLTFIHLQHNRLKEDAVSAAFKGLKSLEYLDLSFNQIARLPSGLPVSLLTLYLDNNKISNIPDEYFKRFNALQYLRLSHNELADSGIPGNSFNVSSLVELDLSYNKLKNIPTVNENLENYYLEVNQLEKFDIKSFCKILGPLSYSKIKHLRLDGNRISETSLPPDMYECLRVANEVTLN

SEQ ID NO: 8157 - protein, 176 aa, Homo Sapiens
MKFSPAHYLLPLLPALVLSTRQDYEELEKQLKEVFKERSTILRQLTKTSRELDGIKVNLQSLKNDEQSAKTDVQKLLELGQKQREEMKSLQEALQNQLKETSEKAEKHQATINFLKTEVERKSKMIRDLQNEAQQLTDLEQKLAVAKNELEKAALDRESQMKAMKETVQLCLTSVF

SEQ ID NO: 8158 - protein, 346 aa, Homo Sapiens
MKFSPAHYLLPLLPALVLSTRQDYEELEKQLKEVFKERSTILRQLTKTSRELDGIKVNLQSLKNDEQSAKTDVQKLLELGQKQREEMKSLQEALQNQLKETSEKAEKHQATINFLKTEVERKSKMIRDLQNENKSLKNKLLSGNKLCGIHAEESKKIQAQLKELRYGKKDLLFKAQQLTDLEQKLAVAKNELEKAALDRESQMKAMKETVQLCLTSVFRDQPPPPLSLITSNPTRMLLPPRNIASKLPDAAAKSKPQQSASGNNESSQVESTKEGNPSTTACDSQDEGRPCSMKHKESPPSNATAETEPIPQKLQMPPCSECEVKKAPEKPLTSFEGMAAREEKIL

SEQ ID NO: 8159 - protein, 260 aa, Homo Sapiens
MKSLQEALQNQLKETSEKAEKHQATINFLKTEVERKSKMIRDLQNENKSLKNKLLSGNKLCGIHAEESKKIQAQLKELRYGKKDLLFKAQQLTDLEQKLAVAKNELEKAALDRESQMKAMKETVQLCLTSVFRDQPPPPLSLITSNPTRMLLPPRNIASKLPDAAAKSKPQQSASGNNESSQVESTKEGNPSTTACDSQDEGRPCSMKHKESPPSNATAETEPIPQKLQMPPCSECEVKKAPEKPLTSFEGMAAREEKIL

SEQ ID NO: 8160 - protein, 260 aa, Homo Sapiens; identical to SEQ ID NO: 8159

SEQ ID NO: 8161 - protein, 978 aa, Homo Sapiens
MGPPSSSGFYVSRAVALLLAGLVAALLLALAVLAALYGHCERVPPSELPGLRDLEAESSPPLRQKPTPTPKPSSARELAVTTTPSNWRPPGPWDQLRLPPWLVPLHYDLELWPQLRPDELPAGSLPFTGRVNITVRCTVATSRLLLHSLFQDCERAEVRGPLSPDDVWFALDTEYMVLELSEPLKPGSSYELQLSFSGLVKEDLREGLFLNVYTDQGERRALLASQLEPTFARYVFPCFDEPALKATFNITMIHHPSYVALSNMPKLGQSEKEDVNGSKWTVTTFSTTPHMPTYLVAFVICDYDHVNRTERGKEIRIWARKDAIANGSADFALNITGPIFSFLEDLFNISYSLPKTDIIALPSFDNHAMENWGLMIFDESGLLLEPKDQLTEKKTLISYVVSHEIGHQWFGNLVTMNWWNNIWLNEGFASYFEFEVINYFNPKLPRNEIFFSNILHNILREDHALVTRAVAMKVENFKTSEIQELFDIFTYSKGASMARMLSCFLNEHLFVSALKSYLKTFSYSNAEQDDLWRHFQMAIDDQSTVILPATIKNIMDSWTHQSGFPVITLNVSTGVMKQEPFYLENIKNRTLLTSNDTWIVPILWIKNGTTQPLVWLDQSSKVFPEMQVSDSDHDWVILNLNMTGYYRVNYDKLGWKKLNQQLEKDPKAIPVIHRLQLIDDAFSLSKNNYIEIETALELTKYLAEEDEIIVWHTVLVNLVTRDLVSEVNIYDIYSLLKRYLLKRLNLIWNIYSTIIRENVLALQDDYLALISLEKLFVTACWLGLEDCLQLSKELFAKWVDHPENEIPYPIKDVVLCYGIALGSDKEWDILLNTYTNTTNKEEKIQLAYAMSCSKDPWILNRYMEYAISTSPFTSNETNIIEVVASSEVGRYVAKDFLVNNWQAVSKRYGTQSLINLIYTIGRTVTTDLQIVELQQFFSNMLEEHQRIRVHANLQTIKNENLKNKKLSARIAAWLRRNT

SEQ ID NO: 8162 - protein, 990 aa, Homo Sapiens
MGPPSSSGFYVSRAVALLLAGLVAALLLALAVLAALYGHCERVPPSELPGLRDLEAESSPPLRQKPTPTPKPSSARELAVTTTPSNWRPPGPWDQLRLPPWLVPLHYDLELWPQLRPDELPAGSLPFTGRVNITVRCTVATSRLLLHSLFQDCERAEVRGPLSPGTGNATVGRVPVDDVWFALDTEYMVLELSEPLKPGSSYELQLSFSGLVKEDLREGLFLNVYTDQGERRALLASQLEPTFARYVFPCFDEPALKATFNITMIHHPSYVALSNMPKLGQSEKEDVNGSKWTVTTFSTTPHMPTYLVAFVICDYDHVNRTERGKEIRIWARKDAIANGSADFALNITGPIFSFLEDLFNISYSLPKTDIIALPSFDNHAMENWGLMIFDESGLLLEPKDQLTEKKTLISYVVSHEIGHQWFGNLVTMNWWNNIWLNEGFASYFEFEVINYFNPKLPRNEIFFSNILHNILREDHALVTRAVAMKVENFKTSEIQELFDIFTYSKGASMARMLSCFLNEHLFVSALKSYLKTFSYSNAEQDDLWRHFQMAIDDQSTVILPATIKNIMDSWTHQSGFPVITLNVSTGVMKQEPFYLENIKNRTLLTSNDTWIVPILWIKNGTTQPLVWLDQSSKVFPEMQVSDSDHDWVILNLNMTGYYRVNYDKLGWKKLNQQLEKDPKAIPVIHRLQLIDDAFSLSKNNYIEIETALELTKYLAEEDEIIVWHTVLVNLVTRDLVSEVNIYDIYSLLKRYLLKRLNLIWNIYSTIIRENVLALQDDYLALISLEKLFVTACWLGLEDCLQLSKELFAKWVDHPENEIPYPIKDVVLCYGIALGSDKEWDILLNTYTNTTNKEEKIQLAYAMSCSKDPWILNRYMEYAISTSPFTSNETNIIEVVASSEVGRYVAKDFLVNNWQAVSKRYGTQSLINLIYTIGRTVTTDLQIVELQQFFSNMLEEHQRIRVHANLQTIKNENLKNKKLSARIAAWLRRNT

SEQ ID NO: 8163 - protein, 701 aa, Homo Sapiens
MGPPSSSGFYVSRAVALLLAGLVAALLLALAVLAALYGHCERVPPSELPGLRDLEAESSPPLRQKPTPTPKPSSARELAVTTTPSNWRPPGPWDQLRLPPWLVPLHYDLELWPQLRPDELPAGSLPFTGRVNITVRCTVATSRLLLHSLFQDCERAEVRGPLSPGTGNATVGRVPVDDVWFALDTEYMVLELSEPLKPGSSYELQLSFSGLVKEDLREGLFLNVYTDQGERRALLASQLEPTFARYVFPCFDEPALKATFNITMIHHPSYVALSNMPKLGQSEKEDVNGSKWTVTTFSTTPHMPTYLVAFVICDYDHVNRTERGKEIRIWARKDAIANGSADFALNITGPIFSFLEDLFNISYSLPKTDIIALPSFDNHAMENWGLMIFDESGLLLEPKDQLTEKKTLISYVVSHEIGHQWFGNLVTMNWWNNIWLNEGFASYFEFEVINYFNPKLPRNEIFFSNILHNILREDHALVTRAVAMKVENFKTSEIQELFDIFTYSKGASMARMLSCFLNEHLFVSALKSYLKTFSYSNAEQDDLWRHFQMAIDDQSTVILPATIKNIMDSWTHQSGFPVITLNVSTGVMKQEPFYLENIKNRTLLTSNDTWIVPILWIKNGTTQPLVWLDQSSKVFPEMQVSDSDHDWVILNLNMTGYYRVNYDKLGWKKLNQQLEKDPKAIPVIHRLQLIDDAFSLSKGTY

SEQ ID NO: 8164 - protein, 226 aa, Homo Sapiens
MKVENFKTSEIQELFDIFTYSKGASMARMLSCFLNEHLFVSALKSYLKTFSYSNAEQDDLWRHFQMAIDDQSTVILPATIKNIMDSWTHQSGFPVITLNVSTGVMKQEPFYLENIKNRTLLTSNDTWIVPILWIKNGTTQPLVWLDQSSKVFPEMQVSDSDHDWVILNLNMTGYYRVNYDKLGWKKLNQQLEKDPKAIPVIHRLQLIDDAFSLSNLQDFGHLKVPN

SEQ ID NO: 8165 - protein, 198 aa, Homo Sapiens
MKVENFKTSEIQELFDIFTYSKGASMARMLSCFLNEHLFVSALKSYLKTFSYSNAEQDDLWRHFQMAIDDQSTVILPATIKNIMDSWTHQSGFPVITLNVSTGVMKQEPFYLENIKNRTLLTSNDTWIVPILWIKNGTTQPLVWLDQSSKVFPEMQVSDSDHDWVILNLNMTGYYRVNYDKLGWKKLNQQLEKDPKMR

SEQ ID NO: 8166 - protein, 198 aa, Homo Sapiens; identical to SEQ ID NO: 8165

SEQ ID NO: 8167 - protein, 66 aa, Homo Sapiens
MKIFLPVLLAALLGVERASSLMCFSCLNQKSNLYCLKPTICSDQDNYCVTVSASAGIASFPMQGIS

SEQ ID NO: 8168 - protein, 66 aa, Homo Sapiens; identical to SEQ ID NO: 8167

SEQ ID NO: 8169 - protein, 73 aa, Homo Sapiens
MKIFLPVLLAALLGVERASSLMCFSCLNQKSNLYCLKPTICSDQDNYCVTVSASAGIGECQASDRAFLPWPSP

SEQ ID NO: 8170 - protein, 66 aa, Homo Sapiens
MKIFLPVLLAALLGVERASSLMCFSCLNQKSNLYCLKPTICSDQDNYCVTVSASAGIGGFAGGTDS

SEQ ID NO: 8171 - protein, 131 aa, Homo Sapiens
MKIFLPVLLAALLGVERASSLMCFSCLNQKSNLYCLKPTICSDQDNYCVTVSASAGIGNLVTFGHSLSKTCSPACPIPEGVNVGVASMGISCCQSFLCNFSAADGGLRASVTLLGAGLLLSLLPALLRFGP

SEQ ID NO: 8172 - protein, 131 aa, Homo Sapiens; identical to SEQ ID NO: 8171

SEQ ID NO: 8173 - protein, 131 aa, Homo Sapiens; identical to SEQ ID NO: 8171

SEQ ID NO: 8174 - protein, 131 aa, Homo Sapiens; identical to SEQ ID NO: 8171

SEQ ID NO: 8175 - protein, 131 aa, Homo Sapiens; identical to SEQ ID NO: 8171

SEQ ID NO: 8176 - protein, 131 aa, Homo Sapiens; identical to SEQ ID NO: 8171

SEQ ID NO: 8177 - protein, 131 aa, Homo Sapiens; identical to SEQ ID NO: 8171

SEQ ID NO: 8178 - protein, 41 aa, Homo Sapiens
MKIFLPVLLAALLGVEREEQSVLPEADHLLRPGQLLRDCVC

SEQ ID NO: 8179 - protein, 41 aa, Homo Sapiens; identical to SEQ ID NO: 8178

SEQ ID NO: 8180 - protein, 147 aa, Homo Sapiens
MTSGIPGCGGACVLPSRAPLRRRDPQHCSPTLSEAPLLRAHTQTRLLTRGLPTPNTTRTVQVSVTVTPTWSPVRPRQDRLLWFVTSRQDGHPLQNEDLLASAAGCPSGCGASQLADVLLLLEPEEQSVLPEADHLLRPGQLLRDCVC

SEQ ID NO: 8181 - protein, 201 aa, Homo Sapiens
MKVHMLVGVLVMVGFTVGKVPVPDIRTCHFCLVEDPSVGCISGSEKCTISSSSLCMVITIYYDVKVRFIVRGCGQYISYRCQEKRNTYFAEYWYQAQCCQYDYCNSWSSPQLQSSLPEPHDRPLALPLSDSQIQWFYQALNLSLPLPNFHAGTEPDGLDPMVTLSLNLGLSFAELRRMYLFLNSSGLLVLPQAGLLTPHPS

SEQ ID NO: 8182 - protein, 146 aa, Homo Sapiens
MVITIYYDVKVRFIVRGCGQYISYRCQEKRNTYFAEYWYQAQCCQYDYCNSWSSPQLQSSLPEPHDRPLALPLSDSQIQWFYQALNLSLPLPNFHAGTEPDGLDPMVTLSLNLGLSFAELRRMYLFLNSSGLLVLPQAGLLTPHPS

SEQ ID NO: 8183 - protein, 133 aa, Homo Sapiens
MKPQFVGILLSSLLGAALGNRMRCYNCGGSPSSSCKEAVTTCGEGRPQPGLEQIKLPGNPPVTLIHQHPACVAAHHCNQVETESVGDVTYPAHRDCYLGDLCNSAVASHVAPAGILAAAATALTCLLPGLWSG

SEQ ID NO: 8184 - protein, 174 aa, Homo Sapiens
MKPQFVGILLSSLLGAALGNRMRCYNCGGSPSSSCKEAVTTCGEGRPQPGLEQIKLPGNRRCFLRGLKIPLGSLKSHLLCPRRQVLKPGVQHPSFILSLSPSDLDSPTSSLRRSPSLQSSGDRVGGRRDLSSPQGLLPGRPVQQRRGKPCGPCRHFGCSSYRPDLSLARTVERI

SEQ ID NO: 8185 - protein, 66 aa, Homo Sapiens
MGTSSIFLCVLFLCGALGLTMSPARGRLRCYICGFTKPCHPVPTECRDDEACGISIGTSDQSEITE

SEQ ID NO: 8186 - protein, 125 aa, Homo Sapiens
MGTSSIFLCVLFLCGALGLTMSPARGRLRCYICGFTKPCHPVPTECRDDEACGISIGTSGKSCLSRAQCPLPGYATYWLHSYTLWHHCCEQDLCNIAASPQQLTSLLASLPLFVASFAGRGHLLH

SEQ ID NO: 8187 - protein, 100 aa, Homo Sapiens
MGTSSIFLCVLFLCGALGLTMSPARGRLRCYICGFTKPCHPVPTECRDDEACGISIGTSGRTLVQWPFSRRLPTSIHPAFPVAPASACLFHPTDQSEITE

SEQ ID NO: 8188 - protein, 88 aa, Homo Sapiens
MLQLYKSRDLGVQITSPRFLSLCLAMGTSSIFLCVLFLCGALGLTMSPARGRLRCYICGFTKPCHPVPTECRDDEACGISIGTSDAHC

SEQ ID NO: 8189 - protein, 161 aa, Homo Sapiens
MLAPQRTRAPSPRAAPRPTRSMLPAAMKGLGLALLAVLLCSAPAHGLWCQDCTLTTNSSHCTPKQCQPSDTVCASVRITDPSSSRKDHSVNKMCASSCDFVKRHFFSDYLMGFINSGILKVDVDCCEKDLCNGAAGAGHSPWALAGGLLLSLGPALLWAGP

SEQ ID NO: 8190 - protein, 161 aa, Homo Sapiens; identical to SEQ ID NO: 8189

SEQ ID NO: 8191 - protein, 140 aa, Homo Sapiens
MLPAAMKGLGLALLAVLLCSAPAHGLWCQDCTLTTNSSHCTPKQCQPSDTVCASVRITDPSSSRKDHSVNKMCASSCDFVKRHFFSDYLMGFINSGILKVDVDCCEKDLCNGAAGAGHSPWALAGGLLLSLGPALLWAGP

SEQ ID NO: 8192 - protein, 140 aa, Homo Sapiens; identical to SEQ ID NO: 8191

SEQ ID NO: 8193 - protein, 165 aa, Homo Sapiens
MALLALLLVVALPRVWTDANLTARQRDPEDSQRTDEGDNRVWCHVCERENTFECQNPRRCKWTEPYCVIAAVKIFPRFFMVAKQCSAGCAAMERPKPEEKRFLLEEPMPFFYLKCCKIRYCNLEGPPINSSVFKEYAGSMGESCGGLWLAILLLLASIAAGLSLS

SEQ ID NO: 8194 - protein, 100 aa, Homo Sapiens
MALLALLLVVALPRVWTDANLTARQRDPEDSQRTDEGDNRVWCHVCERENTFECQNPRRCKWTEPYCVIAAVRRSSGLVNSDSAQQSLSSPSVSTKLVGC

SEQ ID NO: 8195 - protein, 85 aa, Homo Sapiens
MALLALLLVVALPRVWTDANLTARQRDPEDSQRTDEGDNRVWCHVCERENTFECQNPRRCKWTEPYCVIAAVSEYLRSCWGPKGR

SEQ ID NO: 8196 - protein, 105 aa, Homo Sapiens
MALLALLLVVALPRVWTDANLTARQRDPEDSQRTDEGDNRVWCHVCERENTFECQNPRRCKWTEPYCVIAAVTVLRWLCSDGETQARGEAVSPGRAHALLLPQVL

SEQ ID NO: 8197 - protein, 138 aa, Homo Sapiens
MERLVLTLCTLPLAVASAGCATTPARNLSCYQCFKVSSWTECPPTWCSPLDQVCISNEVVVSFKWSVRVLLSKRCAPRCPNDNMKFEWSPAPMVQGVITRRCCSWALCNRALTPQEGRWALRGGLLLQVGLSLLRALL

SEQ ID NO: 8198 - protein, 162 aa, Homo Sapiens
MKGFTATLFLWTLIFPSCSGGGGGKAWPTHVVCSDSGLEVLYQSCDPLQDFGFSVEKCSKQLKSNINIRFGIILREDIKELFLDLALMSQGSSVLNFSYPICEAALPKFSFCGRRKGEQIYYAGPVNNPEFTIPQGEYQVLLELYTEKRSTVACANATIMCS

SEQ ID NO: 8199 - protein, 162 aa, Homo Sapiens; identical to SEQ ID NO: 8198

SEQ ID NO: 8200 - protein, 160 aa, Homo Sapiens [sequence omitted]

SEQ ID NO: 8201 - protein, 130 aa, Homo Sapiens
MLPFLFFSTLFSSIFTEAQKQYWVCNSSDASISYTYCGRDLKQLYFNLYITVNTMNLPKRKEVICRGSDDDYSFCRALKGETVNTTISFSFKGIKFSKGKYKCVVEAISGSPEEMLFCLEFVILHQPNSN

SEQ ID NO: 8202 - protein, 194 aa, Homo Sapiens
MSALWLLLGLLALMDLSESSNWGCYGNIQSLDTPGASCGIGRRHGLNYCGVRASERLAEIDMPYLLKYQPMMQTIGQKYCMDPAVIAGVLSRKSPGDKILVNMGDRTSMVQDPGSQAPTSWISESQVSQTTEVLTTRIKEIQRRFPTWTPDQYLRGGLCAYSGGAGYVRSSQDLSCDFCNDVLARAKYLKRHGF

SEQ ID NO: 8203 - protein, 194 aa, Homo Sapiens; identical to SEQ ID NO: 8202

SEQ ID NO: 8204 - protein, 169 aa, Homo Sapiens
MLSSVVFWGLIALIGTSRGSYPFSHSMKPHLHPRLYHGCYGDIMTMKTSGATCDANSVMNCGIRGSEMFAEMDLRAIKPYQTLIKEVGQRHCVDPAVIAAIISRESHGGSVLQDGWDHRGLKFGLMQLDKQTYHPVGAWDSKEHLSQATGILTERIKAIQKKFPTWSVA

SEQ ID NO: 8205 - protein, 178 aa, Homo Sapiens
MLSSVVFWGLIALIGTSRGSYPFSHSMKPHLHPRLYHGCYGDIMTMKTSGATCDANSVMNCGIRGSEMFAEMDLRAIKPYQTLIKEVGQRHCVDPAVIAAIISRESHGGSVLQDGWDHRGLKFGLMQLDKQTYHPVGAWDSKEHLSQATGILTERIKAIQKKFPTWSVAQHLKGFFLL

SEQ ID NO: 8206 - protein, 178 aa, Homo Sapiens; identical to SEQ ID NO: 8205

SEQ ID NO: 8207 - protein, 212 aa, Homo Sapiens
MLSSVVFWGLIALIGTSRGSYPFSHSMKPHLHPRLYHGCYGDIMTMKTSGATCDANSVMNCGIRGSEMFAEMDLRAIKPYQTLIKEVGQRHCVDPAVIAAIISRESHGGSVLQDGWDHRGLKFGLMQLDKQTYHPVGAWDSKEHLSQATGILTERIKAIQKKFPTWSVAQHLKGGLSAFKSGIEAIATPSDIDNDFVNDIIARAKFYKRQSF

SEQ ID NO: 8208 - protein, 212 aa, Homo Sapiens; identical to SEQ ID NO: 8207

SEQ ID NO: 8209 - protein, 182 aa, Homo Sapiens
MLSSVVFWGLIALIGTSRGSYPFSHSMKPHLHPRLYHGCYGDIMTMKTSGATCDANSVMNCGIRGSEMFAEMDLRAIKPYQTLIKEVGQRHCVDPAVIAAIISRESHGGSVLQDGWDHRGLKFGLMQLDKQTYHPVGAWDSKEHLSQATGILTERIKAIQKKFPTWSVAQHLKGRLYSEYFV

SEQ ID NO: 8210 - protein, 82 aa, Homo Sapiens
MTPLLTLILVVLMGLPLAQALDCHVCAYNGDNCFNPMRCPAMVAYCMTTRTYYTPTRMKVSKSCVPRCFETVYDGYSKHAST

SEQ ID NO: 8211 - protein, 84 aa, Homo Sapiens
MTPLLTLILVVLMGLPLAQALDCHVCAYNGDNCFNPMRCPAMVAYCMTTRTYYTPTRMKVSKSCVPRCFETVYDGYSKHASTTS

SEQ ID NO: 8212 - protein, 116 aa, Homo Sapiens
MTPLLTLILVVLMGLPLAQALDCHVCAYNGDNCFNPMRCPAMVAYCMTTRTYYTPTRMKVSKSCVPRCFETVYDGYSKHASTTSCCQYDLCNGTGLATPATLALAPILLATLWGLL

SEQ ID NO: 8213 - protein, 116 aa, Homo Sapiens; identical to SEQ ID NO: 8212

SEQ ID NO: 8214 - protein, 116 aa, Homo Sapiens; identical to SEQ ID NO: 8212

SEQ ID NO: 8215 - protein, 89 aa, Homo Sapiens
MCQKEVMEQSAGIMYRKSCASSAACLIASAGYQSFCSPGKLNSVCISCCNTPLCNGPRPKKRGSSASALRPGLRTTILFLKLALFSAHC

SEQ ID NO: 8216 - protein, 39 aa, Homo Sapiens
MWVLGIAATFCGLFLLPGENTQRPAAEARLCAANPVLPV

SEQ ID NO: 8217 - protein, 141 aa, Homo Sapiens
MWVLGIAATFCGLFLLPGFALQIQCYQCEEFQLNNDCSSPEFIVNCTVNVQDMCQKEVMEQSAGIMYRKSCASSAACLIASAGYQSFCSPGKLNSVCISCCNTPLCNGPRPKKRGSSASALRPGLRTTILFLKLALFSAHC

SEQ ID NO: 8218 - protein, 125 aa, Homo Sapiens
MRGTRLALLALVLAACGELAPALRCYVCPEPTGVSDCVTIATCTTNETMCKTTLYSREIVYPFQGDSTVTKSCASKCKPSDVDGIGQTLPVSCCNTELCNVDGAPALNSLHCGALTLLPLLSLRL

SEQ ID NO: 8219 - protein, 246 aa, Homo Sapiens
MGPQHLRLVQLFCLLGAISTLPRAGALLCYEATASRFRAVAFHNWKWLLMRNMVCKLQEGCEETLVFIETGTARGVVGFKGCSSSSSYPAQISYLVSPPGVSIASYSRVCRSYLCNNLTNLEPFVKLKASTPKSITSASCSCPTCVGEHMKDCLPNFVTTNSCPLAASTCYSSTLKFQAGFLNTTFLLMGCAREHNQLLADFHHIGSIKVTEVLNILEKSQIVGAASSRQDPAWGVVLGLLFAFRD

SEQ ID NO: 8220 - protein, 211 aa, Homo Sapiens
MGPQHLRLVQLFCLLGAISTLPRMSCGAGCYKTQKGTARGVVGFKGCSSSSSYPAQISYLVSPPGVSIASYSRVCRSYLCNNLTNLEPFVKLKASTPKSITSASCSCPTCVGEHMKDCLPNFVTTNSCPLAASTCYSSTLKFQAGFLNTTFLLMGCAREHNQLLADFHHIGSIKVTEVLNILEKSQIVGAASSRQDPAWGVVLGLLFAFRD

SEQ ID NO: 8221 - protein, 211 aa, Homo Sapiens; identical to SEQ ID NO: 8220

SEQ ID NO: 8222 - protein, 53 aa, Homo Sapiens
MEPGPALAWLLLLSLLADCLKAAQSRDFTVKDIIYLHPSTTPYPGGFKCFTCE

SEQ ID NO: 8223 - protein, 171 aa, Homo Sapiens
MEPGPALAWLLLLSLLADCLKAAQSRDFTVKDIIYLHPSTTPYPGGFKCFTCEKAADNYECNRWAPDIYCPRETRYCYTQHTMEVTGNSISVTKRCVPLEECLSTGCRDSEHEGHKVCTSCCEGNICNLPLPRNETDATFATTSPINQTNGHPRCMSVIVSCLWLWLGLML

SEQ ID NO: 8224 - protein, 171 aa, Homo Sapiens; identical to SEQ ID NO: 8223

SEQ ID NO: 8225 - protein, 76 aa, Homo Sapiens
MEPGPALAWLLLLSLLADCLKAAQSRDFTVKDIIYLHPSTTPYPGGFKCFTCEKAADNYECNRWAPDIYCPRGTMI

SEQ ID NO: 8226 - protein, 76 aa, Homo Sapiens; identical to SEQ ID NO: 8225

SEQ ID NO: 8227 - protein, 50 aa, Homo Sapiens
MLCERHCTEEDENHSKPNKGNAEEIFSAEYWKVRFPASRISGNVNEQHEA

SEQ ID NO: 8228 - protein, 74 aa, Homo Sapiens
MLLITLSANLFTVPERSLTTTFSFSRCERHCTEEDENHSKPNKGNAEEIFSAEYWKVRFPASRISGNVNEQHEA

SEQ ID NO: 8229 - protein, 207 aa, Homo Sapiens
MLLITLSANLFTVPERSLTTTFSFSRYKSSDRPAHKVSMLLLCHALAIAVVQIVIFSESWAFAKNINFYNVRPPLDPTPFPNSFKCFTCENAGDNYNCNRWAEDKWCPQNTQYCLTVHHFTSHGRSTSITKKCASRSECHFVGCHHSRDSEHTECRSCCEGMICNVELPTNHTNAVFAVMHAQRTSGSSAPTLYLPVLAWVFVLPLL

SEQ ID NO: 8230 - protein, 54 aa, Homo Sapiens
MLYKSSDRPAHKVSMLLLCHALAIAVVQIVIFSESWAFAKNINFYNVRPPLDHK

SEQ ID NO: 8231 - protein, 183 aa, Homo Sapiens
MLYKSSDRPAHKVSMLLLCHALAIAVVQIVIFSESWAFAKNINFYNVRPPLDPTPFPNSFKCFTCENAGDNYNCNRWAEDKWCPQNTQYCLTVHHFTSHGRSTSITKKCASRSECHFVGCHHSRDSEHTECRSCCEGMICNVELPTNHTNAVFAVMHAQRTSGSSAPTLYLPVLAWVFVLPLL

SEQ ID NO: 8232 - protein, 183 aa, Homo Sapiens; identical to SEQ ID NO: 8231

SEQ ID NO: 8233 - protein, 183 aa, Homo Sapiens
MRYKSSDRPAHKVSMLLLCHALAIAVVQIVIFSESWAFAKNINFYNVRPPLDPTPFPNSFKCFTCENAGDNYNCNRWAEDKWCPQNTQYCLTVHHFTSHGRSTSITKKCASRSECHFVGCHHSRDSEHTECRSCCEGMICNVELPTNHTNAVFAVMHAQRTSGSSAPTLYLPVLAWVFVLPLL

SEQ ID NO: 8234 - protein, 237 aa, Homo Sapiens
MKGILVAGITAVLVAAVESLSCVQCNSWEKSCVNSIASECPSHANTSCISSSASSSLETPVRLYQNMFCSAENCSEETHITAFTVHVSAEEHFHFVSQCCQGKECSNTSDALDPPLKNVSSNAECPACYESNGTSCHGKPWKCYEEEQCVFLVAELKNDIESKSLVLKGCSNVSNATCQFLSGENKTLGGVIFRKFECANVNSLTPTSAPTTSHNVGSKASLYLLALASLLLRGLLP

SEQ ID NO: 8235 - protein, 54 aa, Homo Sapiens
  misc_feature (1)..(1): Xaa can be any naturally occurring amino acid
XPPLKNVSSNAECPACYESNGTSCHGKPWKCYEEEQCVFLVAELKNGTPGDGAD

SEQ ID NO: 8236 - protein, 148 aa, Homo Sapiens
MKALIVLGLVLLSVTVQGKVFERCELARTLKRLGMDGYRGISLANWMCLAKWESGYNTRATNYNAGDRSTDYGIFQINSRYWCNDGKTPGAVNACHLSCSALLQDNIADAVACAKRVVRDPQGIRAWVAWRNRCQNRDVRQYVQGCGV

SEQ ID NO: 8237 - protein, 104 aa, Homo Sapiens
MKALIVLGLVLLSVTVQGKVFERCELARTLKRLGMDGYRGISLANWMCLAKWESGYNTRATNYNAGDRSTDYGIFQINSRYWCNDGKTPGAVNACHLSCSGKTS

SEQ ID NO: 8238 - protein, 137 aa, Homo Sapiens
MKALIVLGLVLLSVTVQGKVFERCELARTLKRLGMDGYRGISLANWMCLAKWESGYNTRATNYNAGDRSTDYGIFQINSRYWCNDGKTPGAVNACHLSCSGWHGEIVVKTEMSVSMFKVVECNSRIFLLQLILSLSH

SEQ ID NO: 8239 - protein, 146 aa, Homo Sapiens
MKASVVLSLLGYLVVPSGAYILGRCTVAKKLHDGGLDYFEGYSLENWVCLAYFESKFNPMAIYENTREGYTGFGLFQMRGSDWCGDHGRNRCHMSCSALLNPNLEKTIKCAKTIVKGKEGMGAWPTWSRYCQYSDTLARWLDGCKL

SEQ ID NO: 8240 - protein, 146 aa, Homo Sapiens; identical to SEQ ID NO: 8239

SEQ ID NO: 8241 - protein, 148 aa, Homo Sapiens
MTKALLIYLVSSFLALNQASLISRCDLAQVLQLEDLDGFEGYSLSDWLCLAFVESKFNISKINENADGSFDYGLFQINSHYWCNDYKSYSENLCHVDCQDLLNPNLLAGIHCAKRIVSGARGMNNWVEWRLHCSGRPLFYWLTGCRLR

SEQ ID NO: 8242 - protein, 148 aa, Homo Sapiens; identical to SEQ ID NO: 8241

SEQ ID NO: 8243 - protein, 86 aa, Homo Sapiens
  misc_feature (1)..(1): Xaa can be any naturally occurring amino acid
XLEDLDGFEGYSLSDWLCLAFVESKFNISKINENADGSFDYGLFQINSHYWCNDYKSYSENLCHVDCQGIHCAKRIVSGARGMNNW

SEQ ID NO: 8244 - protein, 148 aa, Homo Sapiens
LLLLLAVAVRESWQTEEKTCDLDNFNPVSEERGKVQDCFYLFEMDSSLACSPEISHLSVGSILLVTFASLVAVYVVGGFLYQRLVVGAKGMEQFPHLAFWQDLGNLVADGCDFVCRSKPRNVPAAYRGVGDDQLGEESEERDDHLLPM

SEQ ID NO: 8245 - protein, 92 aa, Homo Sapiens
MFPFYSCWRTGLLLLLLAVAVRESWQTEEKTCDLVGEKGKESEKELALVKRLKPLFNKSFESTVGQGSDTYIYIFRVCREAGNHTSGAGLVQ

SEQ ID NO: 8246 - protein, 109 aa, Homo Sapiens
MFPFYSCWRTGLLLLLLAVAVRESWQTEEKTCDLVGEKGKESEKELALVKRLKPLFNKSFESTVGQGSDTYIYIFRVCREAGNHTSGAGLVQINKSNGKETVVGRLNET

SEQ ID NO: 8247 - protein, 133 aa, Homo Sapiens
MFPFYSCWRTGLLLLLLAVAVRESWQTEEKTCDLVGEKGKESEKELALVKRLKPLFNKSFESTVGQGSDTYIYIFRVCREAGNHTSGAGLVQINKSNGKETVVGRLNETHIFNGSLHHWLLFMLLGGSYTSDW

SEQ ID NO: 8248 - protein, 191 aa, Homo Sapiens
MFPFYSCWRTGLLLLLLAVAVRESWQTEEKTCDLVGEKGKESEKELALVKRLKPLFNKSFESTVGQGSDTYIYIFRVCREAGNHTSGAGLVQINKSNGKETVVGRLNETHIFNGSNWIMLIYKGGDEYDNHCGKEQRRAVVMISCNRHTLADGCDFVCRSKPRNVPAAYRGVGDDQLGEESEERDDHLLPM

SEQ ID NO: 8249 - protein, 277 aa, Homo Sapiens
MFPFYSCWRTGLLLLLLAVAVRESWQTEEKTCDLVGEKGKESEKELALVKRLKPLFNKSFESTVGQGSDTYIYIFRVCREAGNHTSGAGLVQINKSNGKETVVGRLNETHIFNGSNWIMLIYKGGDEYDNHCGKEQRRAVVMISCNRHTLADNFNPVSEERGKVQDCFYLFEMDSSLACSPEISHLSVGSILLVTFASLVAVYVVGGFLYQRLVVGAKGMEQFPHLAFWQDLGNLVADGCDFVCRSKPRNVPAAYRGVGDDQLGEESEERDDHLLPM

SEQ ID NO: 8250 - protein, 25 aa, Homo Sapiens
MLIYKGGDEYDNHCGKEQRRAVVMI

SEQ ID NO: 8251 - protein, 85 aa, Homo Sapiens
VVGGFLYQRLVVGAKGMEQFPHLAFWQDLGNLVAACGFDLFFNLLERERKQKWDIEGSAVLCAGCGMLLHLSLLLAQGSVFLPTF

SEQ ID NO: 8252 - protein, 104 aa, Homo Sapiens
  misc_feature (1)..(1): Xaa can be any naturally occurring amino acid
XFNKSFESTVGQGSDTYIYIFRVCREAGNHTSGAGLVQINKSNGKETVVGRLNETHIFNGSNWIMLIYKGGDEYDNHCGKEQRRAVVMISCNRHTLAESKHLTT

SEQ ID NO: 8253 - protein, 122 aa, Homo Sapiens
  misc_feature (1)..(1): Xaa can be any naturally occurring amino acid
XGGDEYDNHCGKEQRRAVVMISCNRHTLADNFNPVSEERGKVQDCFYLFEMDSSLACSPEISHLSVGSILLVTFASLVAVYVVGGFLYQRLVVGAKGMEQFPHLAFWQDLGNLVAVSNRAAG

SEQ ID NO: 8254 - protein, 96 aa, Homo Sapiens
  misc_feature (1)..(1): Xaa can be any naturally occurring amino acid
XILLVTFASLVAVYVVGGFLYQRLVVGAKGMEQFPHLAFWQDLGNLVAKGNGSRSGTSRALLSSALGVECCCTCPFCWLREVSSCPHFCGERFLIL

SEQ ID NO: 8255 - protein, 157 aa, Homo Sapiens
MEDLGENTMVLSTLRSLNNFISQRVEGGSGLDISTSAPGSLQMQYQQSMQLEERAEQIRSKSHLIQVEREKMQMELSHKRARVELERAASTSARNYEREVDRNQELLTRIRQLQEREAGAEEKMQEQLERNRQCQQNLDAASKRLREKEDSLAQAGE

SEQ ID NO: 8256 - protein, 718 aa, Homo Sapiens
MEDLGENTMVLSTLRSLNNFISQRVEGGSGLDISTSAPGSLQMQYQQSMQLEERAEQIRSKSHLIQVEREKMQMELSHKRARVELERAASTSARNYEREVDRNQELLTRIRQLQEREAGAEEKMQEQLERNRQCQQNLDAASKRLREKEDSLAQAGETINALKGRISELQWSVMDQEMRVKRLESEKQELQEQLDLQHKKCQEANQKIQELQASQEARADHEQQIKDLEQKLSLQEQDAAIVKNMKSELVRLPRLERELKQLREESAHLREMRETNGLLQEELEGLQRKLGRQEKMQETLVGLELENERLLAKLQSWERLDQTMGLSIRTPEDLSRFVVELQQRELALKDKNSAVTSSARGLEKARQQLQEELRQVSGQLLEERKKRETHEALARRLQKRVLLLTKERDGMRAILGSYDSELTPAEYSPQLTRRMREAEDMVQKVHSHSAEMEAQLSQALEELGGQKQRADMLEMELKMLKSQSSSAEQSFLFSREEADTLRLKVEELEGERSRLEEEKRMLEAQLERRALQGDYDQSRTKVLHMSLNPTSVARQRLREDHSQLQAECERLRGLLRAMERGGTVPADLEAAAASLPSSKEVAELKKQVESAELKNQRLKEVFQTKIQEFRKACYTLTGYQIDITTENQYRLTSLYAEHPGDCLIFKATSPSGSKMQLLETEFSHTVGELIEVHLRRQDSIPAFLSSLTLELFSRQTVA

SEQ ID NO: 8257 - protein, 718 aa, Homo Sapiens; identical to SEQ ID NO: 8256

SEQ ID NO: 8258 - protein, 718 aa, Homo Sapiens; identical to SEQ ID NO: 8256

SEQ ID NO: 8259 - protein, 144 aa, Homo Sapiens
MEDLGENTMVLSTLRSLNNFISQRVEGGSGLDISTSAPGSLQMQYQQSMQREVDRNQELLTRIRQLQEREAGAEEKMQEQLERNRQCQQNLDAASKRLREKEDSLAQAGETINALKGRISELQWSVMDQEMRVKRLESEKQELQ

SEQ ID NO: 8260 - protein, 626 aa, Homo Sapiens
MLPARGCVRKRTVWPRLARVLIVTLLTLELSYAPLPCQLSGVPYNTGDPVGRWARPCIWPCPWHTTINALKGRISELQWSVMDQEMRVKRLESEKQELQEQLDLQHKKCQEANQKIQELQASQEARADHEQQIKDLEQKLSLQEQDAAIVKNMKSELVRLPRLERELKQLREESAHLREMRETNGLLQEELEGLQRKLGRQEKMQETLVGLELENERLLAKLQSWERLDQTMGLSIRTPEDLSRFVVELQQRELALKDKNSAVTSSARGLEKARQQLQEELRQVSGQLLEERKKRETHEALARRLQKRVLLLTKERDGMRAILGSYDSELTPAEYSPQLTRRMREAEDMVQKVHSHSAEMEAQLSQALEELGGQKQRADMLEMELKMLKSQSSSAEQSFLFSREEADTLRLKVEELEGERSRLEEEKRMLEAQLERRALQGDYDQSRTKVLHMSLNPTSVARQRLREDHSQLQAECERLRGLLRAMERGGTVPADLEAAAASLPSSKEVAELKKQVESAELKNQRLKEVFQTKIQEFRKACYTLTGYQIDITTENQYRLTSLYAEHPGDCLIFKATSPSGSKMQLLETEFSHTVGELIEVHLRRQDSIPAFLSSLTLELFSRQTVA

SEQ ID NO: 8261 - protein, 205 aa, Homo Sapiens
MQEQLERNRQCQQNLDAASKRLREKEDSLAQAGETINALKGRISELQWSVMDQEMRVKRLESEKQELQEQLDLQHKKCQEANQKIQELQASQEARADHEQQIKDLEQKLSLQEQDAAIVKNMKSELVRLPRLERELKQLREESAHLREMRETNGLLQEELEGLQRKLGRQEKMQETLVGLELENERLLAKLQSWERLDQTMGLSI

SEQ ID NO: 8262 - protein, 213 aa, Homo Sapiens
MQMELSHKRARVELERAASTSARNYEREVDRNQELLTRIRQLQEREAGAEEKMQEQLERNRQCQQNLDAASKRLREKEDSLAQAGETINALKGRISELQWSVMDQEMRVKRLESEKQELQEQLDLQHKKCQEANQKIQELQASQEARADHEQQIKDLEQKLSLQEQDAAIVKNMKSELVRLPRLERELKQLREESAHLREMRETNGLLQEELE

SEQ ID NO: 8263 - protein, 41 aa, Homo Sapiens
MRAILGSYDSELTPAEYSPQLTRRMREAEDMVQKVHSHSAE

SEQ ID NO: 8264 - protein, 80 aa, Homo Sapiens
MRAILGSYDSELTPAEYSPQLTRRMREAEDMVQKVHSHSAEMEAQLSQALEELGGQKQRADMLEMELKMLKSQSSSAEQS

SEQ ID NO: 8265 - protein, 266 aa, Homo Sapiens
MRELEFAKLECCLAWQLQASRRELEMELKMLKSQSSSAEQSFLFSREEADTLRLKVEELEGERSRLEEEKRMLEAQLERRALQGDYDQSRTKVLHMSLNPTSVARQRLREDHSQLQAECERLRGLLRAMERGGTVPADLEAAAASLPSSKEVAELKKQVESAELKNQRLKEVFQTKIQEFRKACYTLTGYQIDITTENQYRLTSLYAEHPGDCLIFKATSPSGSKMQLLETEFSHTVGELIEVHLRRQDSIPAFLSSLTLELFSRQ

SEQ ID NO: 8266 - protein, 122 aa, Homo Sapiens
MSLNPTSVARQRLREDHSQLQAECERLRGLLRAMERGGTVPADLEAAAASLPSSKEVAELKKQVESAELKNQRLKEVFQTKIQEFRKACYTLTGYQIDITTENQYRLTSLYAEHPGDCLIFK

SEQ ID NO: 8267 - protein, 199 aa, Homo Sapiens
MVSLRPCLPGLPTQHLEEPCPGDYSARGLEKARQQLQEELRQVSGQLLEERKKRETHEALARRLQKRVLLLTKERDGMRAILGSYDSELTPAEYSPQLTRRMREAEDMVQKVHSHSAEMEAQLSQALEELGGQKQRADMLEMELKMLKSQSSSAEQSFLFSREEADTLRLKVEELEGERSRLEEEKRMLEAQLERRALQ

SEQ ID NO: 8268 - protein, 58 aa, Homo Sapiens
MIFLTALPLFWIMISASRGGHWGAWMPSSISAFEGTCVSIPCRFDFPDELRPAVVHGV

SEQ ID NO: 8269 - protein, 158 aa, Homo Sapiens
MIFLTALPLFWIMISASRGGHWGAWMPSSISAFEGTCVSIPCRFDFPDELRPAVVHGVWYFNSPYPKNYPPVVFKSRTQVVHESFQGRSRLLGDLGLRNCTLLLSNVSPELGGKYYFRGDLGGYNQYTFSEHSVLDIVNTPNIVVPPEVVAGTEVEVS

SEQ ID NO: 8270 - protein, 582 aa, Homo Sapiens
MIFLTALPLFWIMISASRGGHWGAWMPSSISAFEGTCVSIPCRFDFPDELRPAVVHGVWYFNSPYPKNYPPVVFKSRTQVVHESFQGRSRLLGDLGLRNCTLLLSNVSPELGGKYYFRGDLGGYNQYTFSEHSVLDIVNTPNIVVPPEVVAGTEVEVSCMVPDNCPELRPELSWLGHEGLGEPAVLGRLREDEGTWVQVSLLHFVPTREANGHRLGCQASFPNTTLQFEGYASMDVKYPPVIVEMNSSVEAIEGSHVSLLCGADSNPPPLLTWMRDGTVLREAVAESLLLELEEVTPAEDGVYACLAENAYGQDNRTVGLSVMYAPWKPTVNGTMVAVEGETVSILCSTQSNPDPILTIFKEKQILSTVIYESELQLELPAVSPEDDGEYWCVAENQYGQRATAFNLSVEFAPVLLLESHCAAARDTVQCLCVVKSNPEPSVAFELPSRNVTVNESEREFVYSERSGLVLTSILTLRGQAQAPPRVICTARNLYGAKSLELPFQGAHRLMWAKIGPVGAVVAFAILIAIVCYITQTRRKKNVTESPSFSAGDNPPVLFSSDFRISGAPEKYESKEVSTLESH

SEQ ID NO: 8271 - protein, 626 aa, Homo Sapiens
MIFLTALPLFWIMISASRGGHWGAWMPSSISAFEGTCVSIPCRFDFPDELRPAVVHGVWYFNSPYPKNYPPVVFKSRTQVVHESFQGRSRLLGDLGLRNCTLLLSNVSPELGGKYYFRGDLGGYNQYTFSEHSVLDIVNTPNIVVPPEVVAGTEVEVSCMVPDNCPELRPELSWLGHEGLGEPAVLGRLREDEGTWVQVSLLHFVPTREANGHRLGCQASFPNTTLQFEGYASMDVKYPPVIVEMNSSVEAIEGSHVSLLCGADSNPPPLLTWMRDGTVLREAVAESLLLELEEVTPAEDGVYACLAENAYGQDNRTVGLSVMYAPWKPTVNGTMVAVEGETVSILCSTQSNPDPILTIFKEKQILSTVIYESELQLELPAVSPEDDGEYWCVAENQYGQRATAFNLSVEFAPVLLLESHCAAARDTVQCLCVVKSNPEPSVAFELPSRNVTVNESEREFVYSERSGLVLTSILTLRGQAQAPPRVICTARNLYGAKSLELPFQGAHRLMWAKIGPVGAVVAFAILIAIVCYITQTRRKKNVTESPSFSAGDNPPVLFSSDFRISGAPEKYESERRLGSERRLLGLRGEPPELDLSYSHSDLGKRPTKDSYTLTEELAEYAEIRVK

SEQ ID NO: 8272 - protein, 131 aa, Homo Sapiens
MPSSISAFEGTCVSIPCRFDFPDELRPAVVHGVWYFNSPYPKNYPPVVFKSRTQVVHESFQGRSRLLGDLGLRNCTLLLSNVSPELGGKYYFRGDLGGYNQYTFSEHSVLDIVNTPNIVVPPEVVAGTEVE

SEQ ID NO: 8273 - protein, 601 aa, Homo Sapiens
MPSSISAFEGTCVSIPCRFDFPDELRPAVVHGVWYFNSPYPKNYPPVVFKSRTQVVHESFQGRSRLLGDLGLRNCTLLLSNVSPELGGKYYFRGDLGGYNQYTFSEHSVLDIVNTPNIVVPPEVVAGTEVEVSCMVPDNCPELRPELSWLGHEGLGEPAVLGRLREDEGTWVQVSLLHFVPTREANGHRLGCQASFPNTTLQFEGYASMDVKYPPVIVEMNSSVEAIEGSHVSLLCGADSNPPPLLTWMRDGTVLREAVAESLLLELEEVTPAEDGVYACLAENAYGQDNRTVGLSVMYAPWKPTVNGTMVAVEGETVSILCSTQSNPDPILTIFKEKQILSTVIYESELQLELPAVSPEDDGEYWCVAENQYGQRATAFNLSVEFAPVLLLESHCAAARDTVQCLCVVKSNPEPSVAFELPSRNVTVNESEREFVYSERSGLVLTSILTLRGQAQAPPRVICTARNLYGAKSLELPFQGAHRLMWAKIGPVGAVVAFAILIAIVCYITQTRRKKNVTESPSFSAGDNPPVLFSSDFRISGAPEKYESERRLGSERRLLGLRGEPPELDLSYSHSDLGKRPTKDSYTLTEELAEYAEIRVK

SEQ ID NO: 8274 - protein, 134 aa, Homo Sapiens
MAARWRFWCVSVTMVVALLIVCDVPSASAQRKKEMVLSEKVSQLMEWTNKRPVIRMNGDKFRRLVKAPPRNYSVIVMFTALQLHRQCVVCKQADEEFQILANSWRYSSAFTNRIFFAMVDFDEGSDVFQMFQVF

SEQ ID NO: 8275 - protein, 335 aa, Homo Sapiens
MAARWRFWCVSVTMVVALLIVCDVPSASAQRKKEMVLSEKVSQLMEWTNKRPVIRMNGDKFRRLVKAPPRNYSVIVMFTALQLHRQCVVCKQADEEFQILANSWRYSSAFTNRIFFAMVDFDEGSDVFQMLNMNSAPTFINFPAKGKPKRGDTYELQVRGFSAEQIARWIADRTDVNIRVIRPPNYAGPLMLGLLLAVIGGLVYLRRSNMEFLFNKTGWAFAALCFVLAMTSGQMWNHIRGPPYAHKNPHTGHVNYIHGSSQAQFVAETHIVLLFNGGVTLGMVLLCEAATSDMDIGKRKIMCVAGIGLVVLFFSWMLSIFRSKYHGYPYSFLMS

SEQ ID NO: 8276 - protein, 367 aa, Homo Sapiens
MRKGKGPICLFSRPTLRPSRSKVSLIEGRGANMAARWRFWCVSVTMVVALLIVCDVPSASAQRKKEMVLSEKVSQLMEWTNKRPVIRMNGDKFRRLVKAPPRNYSVIVMFTALQLHRQCVVCKQADEEFQILANSWRYSSAFTNRIFFAMVDFDEGSDVFQMLNMNSAPTFINFPAKGKPKRGDTYELQVRGFSAEQIARWIADRTDVNIRVIRPPNYAGPLMLGLLLAVIGGLVYLRRSNMEFLFNKTGWAFAALCFVLAMTSGQMWNHIRGPPYAHKNPHTGHVNYIHGSSQAQFVAETHIVLLFNGGVTLGMVLLCEAATSDMDIGKRKIMCVAGIGLVVLFFSWMLSIFRSKYHGYPYSFLMS

SEQ ID NO: 8277 - protein, 367 aa, Homo Sapiens; identical to SEQ ID NO: 8276

SEQ ID NO: 8278 - protein, 234 aa, Homo Sapiens
MGPGGRVARLLAPLMWRRAVSSVAGSAVGAEPGLRLLAVQRLPVGAAFCRACQTPNFVRGLHSEPGLEERAEGTVNEGRPESDAADHTGPKFDIDMMVSLLRQENARDICVIQVPPEMRYTDYFVIVSGTSTRHLHAMAFYVVKMYKHLKCKRDPHVKIEGKDTDDWLCVDFGSMVIHLMLPETREIYELEKLWTLRSYDDQLAQIAPETVPEDFILGIEDDTSSVTPVELKCE

SEQ ID NO: 8279 - protein, 686 aa, Homo Sapiens
MLLRGVLLALQALQLAGALDLPAGSCAFEESTCGFDSVLASLPWILNEEGHYIYVDTSFGKQGEKAVLLSPDLQAEEWSCLRLVYQITTSSESLSDPSQLNLYMRFEDESFDRLLWSAKEPSDSWLIASLDLQNSSKKFKILIEGVLGQGNTASIALFEIKMTTGYCIECDFEENHLCGFVNRWNPNVNWFVGGGSIRNVHSILPQDHTFKSELGHYMYVDSVYVKHFQEVAQLISPLTTAPMAGCLSFYYQIQQGNDNVFSLYTRDVAGLYEEIWKADRPGNAAWNLAEVEFSAPYPMEVIFEVAFNGPKGGYVALDDISFSPVHCQNQTELLFSAVEASCNFEQDLCNFYQDKEGPGWTRVKVKPNMYRAGDHTTGLGYYLLANTKFTSQPGYIGRLYGPSLPGNLQYCLRFHYAIYGFLKMSDTLAVYIFEENHVVQEKIWSVLESPRGVWMQAEITFKKPMPTKVVFMSLCKSFWDCGLVALDDITIQLGSCSSSEKLPPPPGECTFEQDECTFTQEKRNRSSWHRRRGETPTSYTGPKGDHTTGVGYYMYIEASHMVYGQKARLLSRPLRGVSGKHCLTFFYHMYGGGTGLLSVYLKKEEDSEESLLWRRRGEQSISWLRALIEYSCERQHQIIFEAIRGVSIRSDIAIDDVKFQAGPCGEMEDTTQQSSGYSEDLNEIEY

SEQ ID NO: 8280 - protein, 165 aa, Homo Sapiens [sequence omitted]

SEQ ID NO: 8281 - protein, 1010 aa, Homo Sapiens
MGAYARASGVCARGCLDSAGPWTMSRALRPPLPPLCFFLLLLAAAGARAGGYETCPTVQPNMLNVHLLPHTHDDVGWLKTVDQYFYGIKNDIQHAGVQYILDSVISALLADPTRRFIYVEIAFFSRWWHQQTNATQEVVRDLVRQGRLEFANGGWVMNDEAATHYGAIVDQMTLGLRFLEDTFGNDGRPRVAWHIDPFGHSREQASLFAQMGFDGFFFGRLDYQDKWVRMQKLEMEQVWRASTSLKPPTADLFTGVLPNGYNPPRNLCWDVLCVDQPLVEDPRSPEYNAKELVDYFLNVATAQGRYYRTNHTVMTMGSDFQYENANMWFKNLDKLIRLVNAQAKGSSVHVLYSTPACYLWELNKANLTWSVKHDDFFPYADGPHQFWTGYFSSRPALKRYERLSYNFLQVCNQLEALVGLAANVGPYGSGDSAPLNEAMAVLQHHDAVSGTSRQHVANDYARQLAAGWGPCEVLLSNALARLRGFKDHFTFCQQLNISICPLSQTAARFQVIVYNPLGRKVNWMVRLPVSEGVFVVKDPNGRTVPSDVVIFPSSDSQAHPPELLFSASLPALGFSTYSVAQVPRWKPQARAPQPIPRRSWSPALTIENEHIRATFDPDTGLLMEIMNMNQQLLLPVRQTFFWYNASIGDNESDQASGAYIFRPNQQKPLPVSRWAQIHLVKTPLVQEVHQNFSAWCSQVVRLYPGQRHLELEWSVGPIPVGDTWGKEVISRFDTPLETKGRFYTDSNGREILERRRDYRPTWKLNQTEPVAGNYYPVNTRIYITDGNMQLTVLTDRSQGGSSLRDGSLELMVHRRLLKDDGRGVSEPLMENGSGAWVRGRHLVLLDTAQAAAAGHRLLAEQEVLAPQVVLAPGGGAAYNLGAPPRTQFSGLRRDLPPSVHLLTLASWGPEMVLLRLEHQFAVGEDSGRNLSAPVTLNLRDLFSTFTITRLQETTLVANQLREAASRLKWTTNTGPTPHQTPYQLDPANITLEPMEIRTFLASVQWKEVDG

SEQ ID NO: 8282 - protein, 1011 aa, Homo Sapiens
MGAYARASGVCARGCLDSAGPWTMSRALRPPLPPLCFFLLLLAAAGARAGGYETCPTVQPNMLNVHLLPHTHDDVGWLKTVDQYFYGIKNDIQHAGVQYILDSVISALLADPTRRFIYVEIAFFSRWWHQQTNATQEVVRDLVRQGRLEFANGGWVMNDEAATHYGAIVDQMTLGLRFLEDTFGNDGRPRVAWHIDPFGHSREQASLFAQMGFDGFFFGRLDYQDKWVRMQKLEMEQVWRASTSLKPPTADLFTGVLPNGYNPPRNLCWDVLCVDQPLVEDPRSPEYNAKELVDYFLNVATAQGRYYRTNHTVMTMGSDFQYENANMWFKNLDKLIRLVNAQQAKGSSVHVLYSTPACYLWELNKANLTWSVKHDDFFPYADGPHQFWTGYFSSRPALKRYERLSYNFLQVCNQLEALVGLAANVGPYGSGDSAPLNEAMAVLQHHDAVSGTSRQHVANDYARQLAAGWGPCEVLLSNALARLRGFKDHFTFCQQLNISICPLSQTAARFQVIVYNPLGRKVNWMVRLPVSEGVFVVKDPNGRTVPSDVVIFPSSDSQAHPPELLFSASLPALGFSTYSVAQVPRWKPQARAPQPIPRRSWSPALTIENEHIRATFDPDTGLLMEIMNMNQQLLLPVRQTFFWYNASIGDNESDQASGAYIFRPNQQKPLPVSRWAQIHLVKTPLVQEVHQNFSAWCSQVVRLYPGQRHLELEWSVGPIPVGDTWGKEVISRFDTPLETKGRFYTDSNGREILERRRDYRPTWKLNQTEPVAGNYYPVNTRIYITDGNMQLTVLTDRSQGGSSLRDGSLELMVHRRLLKDDGRGVSEPLMENGSGAWVRGRHLVLLDTAQAAAAGHRLLAEQEVLAPQVVLAPGGGAAYNLGAPPRTQFSGLRRDLPPSVHLLTLASWGPEMVLLRLEHQFAVGEDSGRNLSAPVTLNLRDLFSTFTITRLQETTLVANQLREAASRLKWTTNTGPTPHQTPYQLDPANITLEPMEIRTFLASVQWKEVDG

SEQ ID NO: 8283 - protein, 172 aa, Homo Sapiens
MGAYARASGVCARGCLDSAGPWTMSRALRPPLPPLCFFLLLLAAAGARAGGYEVCVFGVPVQTCPTVQPNMLNVHLLPHTHDDVGWLKTVDQYFYGIKNDIQHAGVQYILDSVISALLADPTRRFIYVEIAFFSRWWHQQTNATQEVVRDLVRQGRLEFANGGWVMNDEAAT

SEQ ID NO: 8284 - protein, 140 aa, Homo Sapiens
  misc_feature (1)..(1): Xaa can be any naturally occurring amino acid
XLAAGWGPCEVLLSNALARLRGFKDHFTFCQQLNISICPLSQTAARFQVIVYNPLGRKVNWMVRLPVSEGVFVVKDPNGRTVPSDLRQPGAPSGAAVLSLTARPGLQHLFSSPGASLEAPGPRTTAHPQKILVPCFNHRK

SEQ ID NO: 8285 - protein, 67 aa, Homo Sapiens
  misc_feature (1)..(1): Xaa can be any naturally occurring amino acid
XSDVVIFPSSDSQAHPPELLFSASLPALGFSTYSVAQVPRWKPQARAPQPIPRRSWSPALTIENEGC

SEQ ID NO: 8286 - protein, 1009 aa, Homo Sapiens
MGQLCWLPLLAPLLLLRPPGVQSAGPIRAFVVPHSHMDVGWVYTVQESMRAYAANVYTSVVEELARGQQRRFIAVEQEFFRLWWDGVASDQQKYQVRQLLEEGRLEFVIGGQVMHDEAVTHLDDQILQLTEGHGFLYETFGIRPQFSWHVDPFGASATTPTLFALAGFNAHLGSRIDYDLKAAMQEARGLQFVWRGSPSLSERQEIFTHIMDQYSYCTPSHIPFSNRSGFYWNGVAVFPKPPQDGVYPNMSEPVTPANINLYAEALVANVKQRAAWFRTPHVLWPWGCDKQFFNASVQFANMDPLLDHINSHAAELGVSVQYATLGDYFRALHALNVTWRVRDHHDFLPYSTEPFQAWTGFYTSRSSLKGLARRASALLYAGESMFTRYLWPAPRGHLDPTWALQQLQQLRWAVSEVQHHDAITGTESPKVRDMYATHLASGMLGMRKLMASIVLDELQPQAPMAASSDAGPAGHFASVYNPLAWTVTTIVTLTVGFPGVRVTDEAGHPVPSQIQNSTETPSAYDLLILTTIPGLSYRHYNIRPTAGAQEGTQEPAATVASTLQFGRRLRRRTSHAGRYLVPVANDCYIVLLDQDTNLMHSIWERQSNRTVRVTQEFLEYHVNGDVKQGPISDNYLFTPGKAAVPAWEAVEMEIVAGQLVTEIRQYFYRNMTAQNYTYAIRSRLTHVPQGHDGELLCHRIEQEYQAGPLELNREAVLRTSTNLNSQQVIYSDNNGYQMQRRPYVSYVNNSIARNYYPMVQSAFMEDGKSRLVLLSERAHGISSQGNGQVEVMLHRRLWNNFDWDLGYNLTLNDTSVVHPVLWLLLGSWSLTTALRQRSALALQHRPVVLFGDLAGTAPKLPGPQQQEAVTLPPNLHLQILSIPGWRYSSNHTEHSQNLRKGHRGEAQADLRRVLLRLYHLYEVGEDPVLSQPVTVNLEAVLQALGSVVAVEERSLTGTWDLSMLHRWSWRTGPGRHRGDTTSPSRPPGGPIITVHPKEIRTFFIHFQQQ

SEQ ID NO: 8287 - protein, 958 aa, Homo Sapiens
MGQLCWLPLLAPLLLLRPPGVQSAGPIRAFVVPHSHMDVGWVYTVQESMRAYAANVYTSVVEELARGQQRRFIAVEQEFFRLWWDGVASDQQKYQVRQLLEEGRLEFVIGGQVMHDEAVTHLDDQILQLTEGHGFLYETFGIRPQFSWHVDPFGASATTPTLFALAGFNAHLGSRIDYDLKAAMQEARGLQFVWRGSPSLSERQEIFTHIMDQYSYCTPSHIPFSNRSGFYWNGVAVFPKPPQDGVYPNMSEPVTPANINLYAELGVSVQYATLGDYFRALHALNVTWRVRDHHDFLPYSTEPFQAWTGFYTSRSSLKGLARRASALLYAGESMFTRYLWPAPRGHLDPTWALQQLQQLRWAVSEVQHHDAITGTESPKVRDMYATHLASGMLGMRKLMASIVLDELQPQAPMAASSDAGPAGHFASVYNPLAWTVTTIVTLTVGFPGVRVTDEAGHPVPSQIQNSTETPSAYDLLILTTIPGLSYRHYNIRPTAGAQEGTQEPAATVASTLQFGRRLRRRTSHAGRYLVPVANDCYIVLLDQDTNLMHSIWERQSNRTVRVTQEFLEYHVNGDVKQGPISDNYLFTPGKAAVPAWEAVEMEIVAGQLVTEIRQYFYRNMTAQNYTYAIRSRLTHVPQGHDGELLCHRIEQEYQAGPLELNREAVLRTSTNLNSQQVIYSDNNGYQMQRRPYVSYVNNSIARNYYPMVQSAFMEDGKSRLVLLSERAHGISSQGNGQVEVMLHRRLWNNFDWDLGYNLTLNDTSVVHPVLWLLLGSWSLTTALRQRSALALQHRPVVLFGDLAGTAPKLPGPQQQEAVTLPPNLHLQILSIPGWRYSSNHTEHSQNLRKGHRGEAQADLRRVLLRLYHLYEVGEDPVLSQPVTVNLEAVLQALGSVVAVEERSLTGTWDLSMLHRWSWRTGPGRHRGDTTSPSRPPGGPIITVHPKEIRTFFIHFQQQ

SEQ ID NO: 8288 - protein, 953 aa, Homo Sapiens
  misc_feature (1)..(1): Xaa can be any naturally occurring amino acid
XQLCWLPLLAPLLLLRPPGVQSAGPIRAFVVPHSHMDVGWVYTVQESMRAYAANVYTSVVEELARGQQRRFIAVEQEFFRLWWDGVASDQQKYQVRQLLEEGRLEFVIGGQVMHDEAVTHLDDQILQLTEGHGFLYETFGIRPQFSWHVDPFGASATTPTLFALAGFNAHLGSRIDYDLKAAMQEARGLQFVWRGSPSLSERQEIFTHIMDQYSYCTPSHIPFSNRSGFYWNGVAVFPKPPQDGVYPNMSEPVTPANINLYAEALVANVKQRAAWFRTPHVLWPWGCDKQFFNASVQFANMDPLLDHINSHAAELGVSVQYATLGDYFRALHALNVTWRVRDHHDFLPYSTEPFQAWTGFYTSRSSLKGLARRASALLYAGESMFTRYLWPAPRGHLDPTWALQQLQQLRWAVSEVQHHDAITGTESPKVRDMYATHLASGMLGMRKLMASIVLDELQPQAPMAASSDAGPAGHFASVYNPLAWTVTTIVTLTVGFPGVRVTDEAGHPVPSQIQNSTETPSAYDLLILTTIPGLSYRHYNIRPTAGAQEGTQEPAATVASTLQFGRRLRRRTSHAGRYLVPVANDCYIVLLDQDTNLMHSIWERQSNRTVRVTQEFLEYHVNGDVKQGPISDNYLFTPGKAAVPAWEAVEMEIVAGQLVTEIRQYFYRNMTAQNYTYAIRSRLTHVPQGHDGELLCHRIEQEYQAGPLELNREAVLRTSTNLNSQQVIYSDNNGYQMQRRPYVSYVNNSIARNYYPMVQSAFMEDGKSRLVLLSERAHGISSQGNGQVEVMLHRRLWNNFDWDLGYNLTLNDTSVVHPVLWLLLGSWSLTTALRQRSALALQHRPVVLFGDLAGTAPKLPGPQQQEAVTLPPNLHLQILSIPGWRYSSNHTEHSQNLRKGHRGEAQADLRRVLLRLYHLYEVGEDPVLSQPVTVNLEVNFPTPIQTISQGSKP

SEQ ID NO: 8289 - protein, 822 aa, Homo Sapiens
MRLHLLLLLALCGAGTTAAELSYSLRGNWSICNGNGSLELPGAVPGCVHSALFQQGLIQDSYYRFNDLNYRWVSLDNWTYSKEFKIPFEISKWQKVNLILEGVDTVSKILFNEVTIGETDNMFNRYEQCSFSWDWGPSFPTQGIWKDVRIEAYNICHLNYFTFSPIYDKSAQEWNLEIESTFDVVSSKPVGGQVIVAIPKLQTQQTYSIELQPGKRIVELFVNISKNITVETWWPHGHGNQTGYNMTVLFELDGGLNIEKSAKVYFRTVELIEEPIKGSPGLSFYFKINGFPIFLKGSNWIPADSFQDRVTSELLRLLLQSVVDANMNTLRVWGGGIYEQDEFYELCDELGIMVWQDFMFACALYPTDQGFLDSVTAEVAYQIKRLKSHPSIIIWSGNNENEEALMMNWYHISFTDRPIYIKDYVTLYVKNIRELVLAGDKSRPFITSSPTNGAETVAEAWVSQNPNSNYFGDVHFYDYISDCWNWKVFPKARFASEYGYQSWPSFSTLEKVSSTEDWSFNSKFSLHRQHHEGGNKQMLYQAGLHFKLPQSTDPLRTFKDTIYLTQVMQAQCVKTETEFYRRSRSEIVDQQGHTMGALYWQLNDIWQAPSWASLEYGGKWKMLHYFAQNFFAPLLPVGFENENTFYIYGVSDLHSDYSMTLSVRVHTWSSLEPVCSRVTERFVMKGGEAVCLYEEPVSELLRRCGNCTRESCVVSFYLSADHELLSPTNYHFLSSPKEAVGLCKAQITAIISQQGDIFVFDLETSAVAPFVWLDVGSIPGRFSDNGFLMTEKTRTILFYPWEPTSKNELEQSFHVTSLTDIY

SEQ ID NO: 8290 - protein, 879 aa, Homo Sapiens
MRLHLLLLLALCGAGTTAAELSYSLRGNWSICNGNGSLELPGAVPGCVHSALFQQGLIQDSYYRFNDLNYRWVSLDNWTYSKEFKIPFEISKWQKVNLILEGVDTVSKILFNEVTIGETDNMFNRYSFDITNVVRDVNSIELRFQSAVLYAAQQSKAHTRYQVPPDCPPLVQKGECHVNFVRKEQCSFSWDWGPSFPTQGIWKDVRIEAYNICHLNYFTFSPIYDKSAQEWNLEIESTFDVVSSKPVGGQVIVAIPKLQTQQTYSIELQPGKRIVELFVNISKNITVETWWPHGHGNQTGYNMTVLFELDGGLNIEKSAKVYFRTVELIEEPIKGSPGLSFYFKINGFPIFLKGSNWIPADSFQDRVTSELLRLLLQSVVDANMNTLRVWGGGIYEQDEFYELCDELGIMVWQDFMFACALYPTDQGFLDSVTAEVAYQIKRLKSHPSIIIWSGNNENEEALMMNWYHISFTDRPIYIKDYVTLYVKNIRELVLAGDKSRPFITSSPTNGAETVAEAWVSQNPNSNYFGDVHFYDYISDCWNWKVFPKARFASEYGYQSWPSFSTLEKVSSTEDWSFNSKFSLHRQHHEGGNKQMLYQAGLHFKLPQSTDPLRTFKDTIYLTQVMQAQCVKTETEFYRRSRSEIVDQQGHTMGALYWQLNDIWQAPSWASLEYGGKWKMLHYFAQNFFAPLLPVGFENENTFYIYGVSDLHSDYSMTLSVRVHTWSSLEPVCSRVTERFVMKGGEAVCLYEEPVSELLRRCGNCTRESCVVSFYLSADHELLSPTNYHFLSSPKEAVGLCKAQITAIISQQGDIFVFDLETSAVAPFVWLDVGSIPGRFSDNGFLMTEKTRTILFYPWEPTSKNELEQSFHVTSLTDIY

SEQ ID NO: 8291 - protein, 509 aa, Homo Sapiens
MRLHLLLLLALCGAGTTAAELSYSLRGNWSICNGNGSLELPGAVPGCVHSALFQQGLIQDSYYRFNDLNYRWVSLDNWTYSKEFKIPFEISKWQKVNLILEGVDTVSKILFNEVTIGETDNMFNRYSFDITNVVRDVNSIELRFQSAVLYAAQQSKAHTRYQVPPDCPPLVQKGECHVNFVRKEQCSFSWDWGPSFPTQGIWKDVRIEAYNICHLNYFTFSPIYDKSAQEWNLEIESTFDVVSSKPVGGQVIVAIPKLQTQQTYSIELQPGKRIVELFVNISKNITVETWWPHGHGNQTGYNMTVLFELDGGLNIEKSAKVYFRTVELIEEPIKGSPGLSFYFKINGFPIFLKGSNWIPADSFQDRVTSELLRLLLQSVVDANMNTLRVWGGGIYEQDEFYELCDELGIMVWQDFMFACALYPTDQGFLDSVTAEVAYQIKRLKSHPSIIIWSGNNENEEALMMNWYHISFTDRPIYIKDYVTLYVKNIRELVLACGKMPDTIDLTNTC

SEQ ID NO: 8292 - protein, 886 aa, Homo Sapiens
MRLHLLLLLALCGAGTTAAELSYSLRGNWSICNGNGSLELPGAVPGCVHSALFQQGLIQDSYYRFNDLNYRWVSLDNWTYSKEFKIPFEISKWQKVNLILEGVDTVSKILFNEVTIGETDNMFNRYSFDITNVVRDVNSIELRFQSAVLYAAQQSKAHTRYQVPPDCPPLVQKGECHVNFVRKEQCSFSWDWGPSFPTQGIWKDVRIEAYNICHLNYFTFSPIYDKSAQEWNLEIESTFDVVSSKPVGGQVIVAIPKLQTQQTYSIELQPGKRIVELFVNISKNITVETWWPHGHGNQTGYNMTVLFELDGGLNIEKSAKVYFRTVELIEEPIKGSPGLSFYFKINGFPIFLKGSNWIPADSFQDRVTSELLRLLLQSVVDANMNTLRVWGGGIYEQDEFYELCDELGIMVWQDFMFACALYPTDQGFLDSVTAEVAYQIKRLKSHPSIIIWSGNNENEEALMMNWYHISFTDRPIYIKDYVTLYVKNIRELVLAGDKSRPFITSSPTNGAETVAEAWVSQNPNSNYFGDVHFYDYISDCWNWKVFPKARFASEYGYQSWPSFSTLEKVSSTEDWSFNSKFSLHRQHHEGGNKQMLYQAGLHFKLPQSTDPLRTFKDTIYLTQVMQAQCVKTETEFYRRSRSEIVDQQGHTMGALYWQLNDIWQAPSWASLEYGGKWKMLHYFAQNFFAPLLPVGFENENTFYIYGVSDLHSDYSMTLSVRVHTWSSLEPVCSRVTERFVMKGGEAVCLYEEPVSELLRRCGNCTRESCVVSFYLSADHELLSPTNYHFLSSPKEAVGLCKAQITGASLNPRLCSQTYREEISNPTKITSISMTPASLSALVLEQQKLMLPWQLPGQAGMSRMNLVPVAALGPSLEQLGGHHLSAR

SEQ ID NO: 8293 - protein, 397 aa, Homo Sapiens
MRLHLLLLLALCGAGTTAAELSYSLRGNWSICNGNGSLELPGAVPGCVHSALFQQGLIQDSYYRFNDLNYRWVSLDNWTYSKEFKIPFEISKWQKVNLILEGVDTVSKILFNEVTIGETDNMFNRYSFDITNVVRDVNSIELRFQSAVLYAAQQSKAHTRYQVPPDCPPLVQKGECHVNFVRKEQCSFSWDWGPSFPTQGIWKDVRIEAYNICHLNYFTFSPIYDKSAQEWNLEIESTFDVVSSKPVGGQVIVAIPKLQTQQTYSIELQPGKRIVELFVNISKNITVETWWPHGHGNQTGYNMTVLFELDGGLNIEKSAKVYFRTVELIEEPIKGSPGLSFYFKINGFPIFLKGSNWIPADSFQDRVTSEFWGWVGCGPSAQLGQLVTAPFTVCCGC

SEQ ID NO: 8294 - protein, 413 aa, Homo Sapiens
MRLHLLLLLALCGAGTTAAELSYSLRGNWSICNGNGSLELPGAVPGCVHSALFQQGLIQDSYYRFNDLNYRWVSLDNWTYSKEFKIPFEISKWQKVNLILEGVDTVSKILFNEVTIGETDNMFNRYSFDITNVVRDVNSIELRFQSAVLYAAQQSKAHTRYQVPPDCPPLVQKGECHVNFVRKEQCSFSWDWGPSFPTQGIWKDVRIEAYNICHLNYFTFSPIYDKSAQEWNLEIESTFDVVSSKPVGGQVIVAIPKLQTQQTYSIELQPGKRIVELFVNISKNITVETWWPHGHGNQTGYNMTVLFELDGGLNIEKSAKVYFRTVELIEEPIKGSPGLSFYFKINGFPIFLKGSNWIPADSFQDRVTSELLRLLLQSVVDANMNTLRVWGGGIYEQDEFYELCDELGIMVCI

SEQ ID NO: 8295 - protein, 879 aa, Homo Sapiens; identical to SEQ ID NO: 8290

SEQ ID NO: 8296 - protein, 365 aa, Homo Sapiens
MRLHLLLLLALCGAGTTAAELSYSLRGNWSICNGNGSLELPGAVPGCVHSALFQQGLIQDSYYRFNDLNYRWVSLDNWTYSKEFKIPFEISKWQKVNLILEGVDTVSKILFNEVTIGETDNMFNRYSFDITNVVRDVNSIELRFQSAVLYAAQQSKAHTRYQVPPDCPPLVQKGECHVNFVRKEQCSFSWDWGPSFPTQGIWKDVRIEAYNICHLNYFTFSPIYDKSAQEWNLEIESTFDVVSSKPVGGQVIVAIPKLQTQQTYSIELQPGKRIVELFVNISKNITVETWWPHGHGNQTGYNMTVLFELDGGLNIEKSAKSWRLESKIKVSAELCSFRRLWERILPCPFQFLIIAGNPWLVDASL

SEQ ID NO: 8297 - protein, 925 aa, Homo Sapiens
MRLHLLLLLALCGAGTTAAELSYSLRGNWSICNGNGSLELPGAVPGCVHSALFQQGLIQDSYYRFNDLNYRWVSLDNWTYSKEFKIPFEISKWQKVNLILEGVDTVSKILFNEVTIGETDNMFNRYSFDITNVVRDVNSIELRFQSAVLYAAQQSKAHTRYQVPPDCPPLVQKGECHVNFVRKEQCSFSWDWGPSFPTQGIWKDVRIEAYNICHLNYFTFSPIYDKSAQEWNLEIESTFDVVSSKPVGGQVIVAIPKLQTQQTYSIELQPGKRIVELFVNISKNITVETWWPHGHGNQTGYNMTVLFELDGGLNIEKSAKVYFRTVELIEEPIKGSPGLSFYFKINGFPIFLKGSNWIPADSFQDRVTSELFHKKMKFFSRHSHGIIGSIFFLFKCSSPLPAGAGLAVVLQPNWANWLRLLLQSVVDANMNTLRVWGGGIYEQDEFYELCDELGIMVWQDFMFACALYPTDQGFLDSVTAEVAYQIKRLKSHPSIIIWSGNNENEEALMMNWYHISFTDRPIYIKDYVTLYVKNIRELVLAGDKSRPFITSSPTNGAETVAEAWVSQNPNSNYFGDVHFYDYISDCWNWKVFPKARFASEYGYQSWPSFSTLEKVSSTEDWSFNSKFSLHRQHHEGGNKQMLYQAGLHFKLPQSTDPLRTFKDTIYLTQVMQAQCVKTETEFYRRSRSEIVDQQGHTMGALYWQLNDIWQAPSWASLEYGGKWKMLHYFAQNFFAPLLPVGFENENTFYIYGVSDLHSDYSMTLSVRVHTWSSLEPVCSRVTERFVMKGGEAVCLYEEPVSELLRRCGNCTRESCVVSFYLSADHELLSPTNYHFLSSPKEAVGLCKAQITAIISQQGDIFVFDLETSAVAPFVWLDVGSIPGRFSDNGFLMTEKTRTILFYPWEPTSKNELEQSFHVTSLTDIY

SEQ ID NO: 8298 - protein, 62 aa, Homo Sapiens
MRLHLLLLLALCGAGTTAAELSYSLRGNWSICNGNGSLELPGAVPGCVHSALFQQGLIQKEQ

SEQ ID NO: 8299 - protein, 68 aa, Homo Sapiens
MRLHLLLLLALCGAGTTAAELSYSLRGNWSICNGNGSLELPGAVPGCVHSALFQQGLIQSLTLSPRLE

SEQ ID NO: 8300 - protein, 199 aa, Homo Sapiens
MSKAEWDTDQWKTENYINESTEAQSKQKEQKSSEDSYYRFNDLNYRWVSLDNWTYSKEFKIPFEISKWQKVNLILEGVDTVSKILFNEVTIGETDNMFNRYSFDITNVVRDVNSIELRFQSAVLYAAQQSKAHTRYQVPPDCPPLVQKGECHVNFVRKEQCSFSWDWGPSFPTQGIWKDVRIEAYNICHLNYFTFSPIY

SEQ ID NO: 8301 - protein, 215 aa, Homo Sapiens
SKILFNEVTIGETDNMFNRYSFDITNVVRDVNSIELRFQSAVLYAAQQSKAHTRYQVPPDCPPLVQKGECHVNFVRKEQCSFSWDWGPSFPTQGIWKDVRIEAYNICHLNYFTFSPIYDKSAQEWNLEIESTFDVVSSKPVGGQVIVAIPKLQTQQTYSIELQPGKRIVELFVNISKNITVETWWPHGHGNQTGYNMTVLFELDGGLNIEKSAKL

SEQ ID NO: 8302 - protein, 230 aa, Homo Sapiens
  misc_feature (1)..(1): Xaa can be any naturally occurring amino acid
XDCPPLVQKGECHVNFVRKEQCSFSWDWGPSFPTQGIWKDVRIEAYNICHLNYFTFSPIYDKSAQEWNLEIESTFDVVSSKPVGGQVIVAIPKLQTQQTYSIELQPGKRIVELFVNISKNITVETWWPHGHGNQTGYNMTVLFELDGGLNIEKSAKVYFRTVELIEEPIKGSPGLSFYFKINGFPIFLKGSNWIPADSFQDRVTSEFWGWVGCGPSAQLGQLVSLPWCLC

SEQ ID NO: 8303 - protein, 263 aa, Homo Sapiens
MADDNGEPSDDLVPAILDTAHQYSIQVAFHIQPYKGRDDITVHDNIKYIIDTYGSHGAFYRYKNSMGKSLPLFYIYDSYLTSPEAWAHLLTPNGPHSIRNTPYDGVFIALLVEEGHTHDILAAGFDGMYTYFASNGFSFGSSHQNWKAVKNFCDANNLMFIPSVGPGYIDTSIRPWNNHNTRNRVNGKYYETALQAALTVRPEIVSITSFNEWHEGTQIEKAIPKKTPTRLYLDYLPHQPSLYLELTRRWAEHFIKEKEQWLM

SEQ ID NO: 8304 - protein, 250 aa, Homo Sapiens
MARRRRRACIALFLVLLFAFGTLMGLRTLKAPDGLPALGPGLELAPFERRPEGAPAPAARAPAAPAAPPPPPPPPRTADPGGSPGPAPAEAEPAPVQSLRVYSDLHAFYYSWYGSPRREGHYIHWDHVMVPHWDPKISASYPRGRHSPPDDLGSSFYPELGPYSSRDPEVLREHMTQLKEAAIGVLVLSWYPPGMADDNGEPSDDLVPAILDTAHQYSIQVAFHIQPYKGRDDITVHDNIKYIIDTTGKL

SEQ ID NO: 8305 - protein, 457 aa, Homo Sapiens
MARRRRRACIALFLVLLFAFGTLMGLRTLKAPDGLPALGPGLELAPFERRPEGAPAPAARAPAAPAAPPPPPPPPRTADPGGSPGPAPAEAEPAPVQSLRVYSDLHAFYYSWYGSPRREGHYIHWDHVMVPHWDPKISASYPRGRHSPPDDLGSSFYPELGPYSSRDPEVLREHMTQLKEAAIGVLVLSWYPPGMADDNGEPSDDLVPAILDTAHQYSIQVAFHIQPYKGRDDITVHDNIKYIIDTYGSHGAFYRYKNSMGKSLPLFYIYDSYLTSPEAWAHLLTPNGPHSIRNTPYDGVFIALLVEEGHTHDILAAGFDGMYTYFASNGFSFGSSHQNWKAVKNFCDANNLMFIPSVGPGYIDTSIRPWNNHNTRNRVNGKYYETALQAALTVRPEIVSITSFNEWHEGTQIEKAIPKKTPTRLYLDYLPHQPSLYLELTRRWAEHFIKEKEQWLM

SEQ ID NO: 8306 - protein, 235 aa, Homo Sapiens
MITGSPQMTWCPPFWTPPISTASRYGSHGAFYRYKNSMGKSLPLFYIYDSYLTSPEAWAHLLTPNGPHSIRNTPYDGVFIALLVEEGHTHDILAAGFDGMYTYFASNGFSFGSSHQNWKAVKNFCDANNLMFIPSVGPGYIDTSIRPWNNHNTRNRVNGKYYETALQAALTVRPEIVSITSFNEWHEGTQIEKAIPKKTPTRLYLDYLPHQPSLYLELTRRWAEHFIKEKEQWLM

SEQ ID NO: 8307 - protein, 130 aa, Homo Sapiens
VYSDLHAFYYSWYGSPRREGHYIHWDHVMVPHWDPKISASYPRGRHSPPDDLGSSFYPELGPYSSRDPEVLREHMTQLKEAAIGVLVLSWYPPGMADDNGEPSDDLVPAILDTAHQYSIQVWLPWCILPL

SEQ ID NO: 8308 - protein, 185 aa, Homo Sapiens
MRRMRRMWATQGLAVALALSVLPGSRALRPGDCEVCISYLGRFYQDLKDRDVTFSPATIENELIKFCREARGKENRLCYYIGATDDAATKIINEVSKPLAHHIPVEKICEKLKKKDSQICELKYDKQIDLSTVDLKKLRVKELKKILDDWGETCKGCAEKSDYIRKINELMPKYAPKAASARTDL

SEQ ID NO: 8309 - protein, 71 aa, Homo Sapiens
  misc_feature (1)..(1): Xaa can be any naturally occurring amino acid
XATQGLAVALALSVLPGSRALRPGDCEVCISYLGRFYQDLKDRDVTFSPATIENELIKFCREARGKENRLV

SEQ ID NO: 8310 - protein, 397 aa, Homo Sapiens
MFFGGEGSLTYTLGIRGNEPVYTSTQEDCINSCCSTKNISGDKACNLMIFDTRKTARQPNCYLFFCPNEEACPLKPAKGLMSYRIITDFPSLTRNLPSQELPQEDSLLHGQFSQAVTPLAHHHTDYSKPTDISWRDTLSQKFGSSDHLEKLFKMDEASAQLLAYKEKGHSQSSQFSSDQEIAHLLPENVSALPATVAVASPHTTSATPKPATLLPTNASVTPSGTSQPQLATTAPPVTTVTSQPPTTLISTVFTRAAATLQAMATTAVLTTTFQAPTDSKGSLETIPFTEISNLTLNTGNVYNPTALSMSNVESSTMNKTASWEGREASPGSSSQGSVPENQYGLPFEKWLLIGSLLFGVLFLVIGLVLLGRILSESLRRKRYSRLDYLINGIYVDI

SEQ ID NO: 8311 - protein, 57 aa, Homo Sapiens
MFFGGEGSLTYTLVIICFLTLRLSASQNCLKKSLEDVVIDIQSSLSKGIRGNEPVYT

SEQ ID NO: 8312 - protein, 431 aa, Homo Sapiens
MFFGGEGSLTYTLVIICFLTLRLSASQNCLKKSLEDVVIDIQSSLSKGIRGNEPVYTSTQEDCINSCCSTKNISGDKACNLMIFDTRKTARQPNCYLFFCPNEEACPLKPAKGLMSYRIITDFPSLTRNLPSQELPQEDSLLHGQFSQAVTPLAHHHTDYSKPTDISWRDTLSQKFGSSDHLEKLFKMDEASAQLLAYKEKGHSQSSQFSSDQEIAHLLPENVSALPATVAVASPHTTSATPKPATLLPTNASVTPSGTSQPQLATTAPPVTTVTSQPPTTLISTVFTRAAATLQAMATTAVLTTTFQAPTDSKGSLETIPFTEISNLTLNTGNVYNPTALSMSNVESSTMNKTASWEGREASPGSSSQGSVPENQYGLPFEKWLLIGSLLFGVLFLVIGLVLLGRILSESLRRKRYSRLDYLINGIYVDI

SEQ ID NO: 8313 - protein, 350 aa, Homo Sapiens
MIFDTRKTARQPNCYLFFCPNEEACPLKPAKGLMSYRIITDFPSLTRNLPSQELPQEDSLLHGQFSQAVTPLAHHHTDYSKPTDISWRDTLSQKFGSSDHLEKLFKMDEASAQLLAYKEKGHSQSSQFSSDQEIAHLLPENVSALPATVAVASPHTTSATPKPATLLPTNASVTPSGTSQPQLATTAPPVTTVTSQPPTTLISTVFTRAAATLQAMATTAVLTTTFQAPTDSKGSLETIPFTEISNLTLNTGNVYNPTALSMSNVESSTMNKTASWEGREASPGSSSQGSVPENQYGLPFEKWLLIGSLLFGVLFLVIGLVLLGRILSESLRRKRYSRLDYLINGIYVDI

SEQ ID NO: 8314 - protein, 832 aa, Homo Sapiens
MELTGLEVALVLILQKVENGDLSNKILKITDFGLAREWHRTTKMSAAGTYAWMAPEVIRASMFSKGSDVWSYGVLLWELLTGEVPFRGIDGLAVAYGVAMNKLALPIPSTCPEPFAKLMEDCWNPDPHSRPSFTNILDQLTTIEESGFFEMPKDSFHCLQDNWKHEIQEMFDQLRAKEKELRTWEEELTRAALQQKNQEELLRRREQELAEREIDILERELNIIIHQLCQEKPRVKKRKGKFRKSRLKLKDGNRISLPSDFQHKFTVQASPTMDKRKSLINSRSSPPASPTIIPRLRAIQLTPGESSKTWGRSSVVPKEEGEEEEKRAPKKKGRTWGPGTLGQKELASGDEGLKSLVDGYKQWSSSAPNLVKGPRSSPALPGFTSLMEMALLAASWVVPIDIEEDEDSEGPGSGESRLQHSPSQSYLCIPFPRGEDGDGPSSDGIHEEPTPVNSATSTPQLTPTNSLKRGGAHHRRCEVALLGCGAVLAATGLGFDLLEAGKCQLLPLEEPEPPAREEKKRREGLFQRSSRPRRSTSPPSRKLFKKEEPMLLLGDPSASLTLLSLSSISECNSTRSLLRSDSDEIVVYEMPVSPVEAPPLSPCTHNPLVNVRVERFKRDPNQSLTPTHVTLTTPSQPSSHRRTPSDGALKPETLLASRSPSSNGLSPSPGAGMLKTPSPSRDPGEFPRLPDPNVVFPPTPRRWNTQQDSTLERPKTLEFLPRPRPSANRQRLDPWWFVSPSHARSTSPANSSSTETPSNLDSCFASSSSTVEERPGLPALLPFQAGPLPPTERTLLDLDAEGQSQDSTVPLCRAELNTHRPAPYEIQQEFWS

SEQ ID NO: 8315 - protein, 880 aa, Homo Sapiens
MELTGLEVALVLILQKVENGDLSNKILKITDFGLAREWHRTTKMSAAGTYAWMAPEVIRASMFSKGSDVWSYGVLLWELLTGEVPFRGIDGLAVAYGVAMNKLALPIPSTCPEPFAKLMEDCWNPDPHSRPSFTNILDQLTTIEESGFFEMPKDSFHCLQDNWKHEIQEMFDQLRAKEKELRTWEEELTRAALQQKNQEELLRRREQELAEREIDILERELNIIIHQLCQEKPRVKKRKGKFRKSRLKLKDGNRISLPSDFQHKFTVQASPTMDKRKSLINSRSSPPASPTIIPRLRAIQCETVSQISWGQNTQGHLSPALSSHRLVQACSIHNFCHLSSTMCIYMHILTPGESSKTWGRSSVVPKEEGEEEEKRAPKKKGRTWGPGTLGQKELASGDEGLKSLVDGYKQWSSSAPNLVKGPRSSPALPGFTSLMEMALLAASWVVPIDIEEDEDSEGPGSGESRLQHSPSQSYLCIPFPRGEDGDGPSSDGIHEEPTPVNSATSTPQLTPTNSLKRGGAHHRRCEVALLGCGAVLAATGLGFDLLEAGKCQLLPLEEPEPPAREEKKRREGLFQRSSRPRRSTSPPSRKLFKKEEPMLLLGDPSASLTLLSLSSISECNSTRSLLRSDSDEIVVYEMPVSPVEAPPLSPCTHNPLVNVRVERFKRDPNQSLTPTHVTLTTPSQPSSHRRTPSDGALKPETLLASRSPSSNGLSPSPGAGMLKTPSPSRDPGEFPRLPDPNVVFPPTPRRWNTQQDSTLERPKTLEFLPRPRPSANRQRLDPWWFVSPSHARSTSPANSSSTETPSNLDSCFASSSSTVEERPGLPALLPFQAGPLPPTERTLLDLDAEGQSQDSTVPLCRAELNTHRPAPYEIQQEFWS

SEQ ID NO: 8316 - protein, 1081 aa, Homo Sapiens
MEPSRALLGCLASAAAAAPPGEDGAGAGAEEEEEEEEEAAAAVGPGELGCDAPLPYWTAVFEYEAAGEDELTLRLGDVVEVLSKDSQVSGDEGWWTGQLNQRVGIFPSNYVTPRSAFSSRCQPGGEDPSCYPPIQLLEIDFAELTLEEIIGIGGFGKVYRAFWIGDEVAVKAARHDPDEDISQTIENVRQEAKLFAMLKHPNIIALRGVCLKEPNLCLVMEFARGGPLNRVLSGKRIPPDILVNWAVQIARGMNYLHDEAIVPIIHRDLKSSNILILQKVENGDLSNKILKITDFGLAREWHRTTKMSAAGTYAWMAPEVIRASMFSKGSDVWSYGVLLWELLTGEVPFRGIDGLAVAYGVAMNKLALPIPSTCPEPFAKLMEDCWNPDPHSRPSFTNILDQLTTIEESGFFEMPKDSFHCLQDNWKHEIQEMFDQLRAKEKELRTWEEELTRAALQQKNQEELLRRREQELAEREIDILERELNIIIHQLCQEKPRVKKRKGKFRKSRLKLKDGNRISLPSDFQHKFTVQASPTMDKRKSLINSRSSPPASPTIIPRLRAIQLTPGESSKTWGRSSVVPKEEGEEEEKRAPKKKGRTWGPGTLGQKELASGDEGLKSLVDGYKQWSSSAPNLVKGPRSSPALPGFTSLMEMEDEDSEGPGSGESRLQHSPSQSYLCIPFPRGEDGDGPSSDGIHEEPTPVNSATSTPQLTPTNSLKRGGAHHRRCEVALLGCGAVLAATGLGFDLLEAGKCQLLPLEEPEPPAREEKKRREGLFQRSSRPRRSTSPPSRKLFKKEEPMLLLGDPSASLTLLSLSSISECNSTRSLLRSDSDEIVVYEMPVSPVEAPPLSPCTHNPLVNVRVERFKRDPNQSLTPTHVTLTTPSQPSSHRRTPSDGALKPETLLASRSPSSNGLSPSPGAGMLKTPSPSRDPGEFPRLPDPNVVFPPTPRRWNTQQDSTLERPKTLEFLPRPRPSANRQRLDPWWFVSPSHARSTSPANSSSTETPSNLDSCFASSSSTVEERPGLPALLPFQAGPLPPTERTLLDLDAEGQSQDSTVPLCRAELNTHRPAPYEIQQEFWS

SEQ ID NO: 8317 - protein, 1118 aa, Homo Sapiens
MEPSRALLGCLASAAAAAPPGEDGAGAGAEEEEEEEEEAAAAVGPGELGCDAPLPYWTAVFEYEAAGEDELTLRLGDVVEVLSKDSQVSGDEGWWTGQLNQRVGIFPSNYVTPRSAFSSRCQPGGEDPSCYPPIQLLEIDFAELTLEEIIGIGGFGKVYRAFWIGDEVAVKAARHDPDEDISQTIENVRQEAKLFAMLKHPNIIALRGVCLKEPNLCLVMEFARGGPLNRVLSGKRIPPDILVNWAVQIARGMNYLHDEAIVPIIHRDLKSSNILILQKVENGDLSNKILKITDFGLAREWHRTTKMSAAGTYAWMAPEVIRASMFSKGSDVWSYGVLLWELLTGEVPFRGIDGLAVAYGVAMNKLALPIPSTCPEPFAKLMEDCWNPDPHSRPSFTNILDQLTTIEESGFFEMPKDSFHCLQDNWKHEIQEMFDQLRAKEKELRTWEEELTRAALQQKNQEELLRRREQELAEREIDILERELNIIIHQLCQEKPRVKKRKGKFRKSRLKLKDGNRISLPSDFQHKFTVQASPTMDKRKSLINSRSSPPASPTIIPRLRAIQLTPGESSKTWGRSSVVPKEEGEEEEKRAPKKKGRTWGPGTLGQKELASGDEGSPQRREKANGLSTPSESPHFHLGLKSLVDGYKQWSSSAPNLVKGPRSSPALPGFTSLMEMALLAASWVVPIDIEEDEDSEGPGSGESRLQHSPSQSYLCIPFPRGEDGDGPSSDGIHEEPTPVNSATSTPQLTPTNSLKRGGAHHRRCEVALLGCGAVLAATGLGFDLLEAGKCQLLPLEEPEPPAREEKKRREGLFQRSSRPRRSTSPPSRKLFKKEEPMLLLGDPSASLTLLSLSSISECNSTRSLLRSDSDEIVVYEMPVSPVEAPPLSPCTHNPLVNVRVERFKRDPNQSLTPTHVTLTTPSQPSSHRRTPSDGALKPETLLASRSPSSNGLSPSPGAGMLKTPSPSRDPGEFPRLPDPNVVFPPTPRRWNTQQDSTLERPKTLEFLPRPRPSANRQRLDPWWFVSPSHARSTSPANSSSTETPSNLDSCFASSSSTVEERPGLPALLPFQAGPLPPTERTLLDLDAEGQSQDSTVPLCRAELNTHRPAPYEIQQEFWS

SEQ ID NO: 8318 - protein, 1104 aa, Homo Sapiens
MEPSRALLGCLASAAAAAPPGEDGAGAGAEEEEEEEEEAAAAVGPGELGCDAPLPYWTAVFEYEAAGEDELTLRLGDVVEVLSKDSQVSGDEGWWTGQLNQRVGIFPSNYVTPRSAFSSRCQPGGEDPSCYPPIQLLEIDFAELTLEEIIGIGGFGKVYRAFWIGDEVAVKAARHDPDEDISQTIENVRQEAKLFAMLKHPNIIALRGVCLKEPNLCLVMEFARGGPLNRVLSGKRIPPDILVNWAVQIARGMNYLHDEAIVPIIHRDLKSSNILILQKVENGDLSNKILKITDFGLAREWHRTTKMSAAGTYAWMAPEVIRASMFSKGSDVWSYGVLLWELLTGEVPFRGIDGLAVAYGVAMNKLALPIPSTCPEPFAKLMEDCWNPDPHSRPSFTNILDQLTTIEESGFFEMPKDSFHCLQDNWKHEIQEMFDQLRAKEKELRTWEEELTRAALQQKNQEELLRRREQELAEREIDILERELNIIIHQLCQEKPRVKKRKGKFRKSRLKLKDGNRISLPSDFQHKFTVQASPTMDKRKSLINSRSSPPASPTIIPRLRAIQLTPGESSKTWGRSSVVPKEEGEEEEKRAPKKKGRTWGPGTLGQKELASGDEGSPQRREKANGLSTPSESPHFHLGLKSLVDGYKQWSSSAPNLVKGPRSSPALPGFTSLMEMEDEDSEGPGSGESRLQHSPSQSYLCIPFPRGEDGDGPSSDGIHEEPTPVNSATSTPQLTPTNSLKRGGAHHRRCEVALLGCGAVLAATGLGFDLLEAGKCQLLPLEEPEPPAREEKKRREGLFQRSSRPRRSTSPPSRKLFKKEEPMLLLGDPSASLTLLSLSSISECNSTRSLLRSDSDEIVVYEMPVSPVEAPPLSPCTHNPLVNVRVERFKRDPNQSLTPTHVTLTTPSQPSSHRRTPSDGALKPETLLASRSPSSNGLSPSPGAGMLKTPSPSRDPGEFPRLPDPNVVFPPTPRRWNTQQDSTLERPKTLEFLPRPRPSANRQRLDPWWFVSPSHARSTSPANSSSTETPSNLDSCFASSSSTVEERPGLPALLPFQAGPLPPTERTLLDLDAEGQSQDSTVPLCRAELNTHRPAPYEIQQEFWS

SEQ ID NO: 8319 - protein, 837 aa, Homo Sapiens
MSAAGTYAWMAPEVIRASMFSKGSDVWSYGVLLWELLTGEVPFRGIDGLAVAYGVAMNKLALPIPSTCPEPFAKLMEDCWNPDPHSRPSFTNILDQLTTIEESGFFEMPKDSFHCLQDNWKHEIQEMFDQLRAKEKELRTWEEELTRAALQQKNQEELLRRREQELAEREIDILERELNIIIHQLCQEKPRVKKRKGKFRKSRLKLKDGNRISLPSDFQHKFTVQASPTMDKRKSLINSRSSPPASPTIIPRLRAIQCETVSQISWGQNTQGHLSPALSSHRLVQACSIHNFCHLSSTMCIYMHILTPGESSKTWGRSSVVPKEEGEEEEKRAPKKKGRTWGPGTLGQKELASGDEGLKSLVDGYKQWSSSAPNLVKGPRSSPALPGFTSLMEMALLAASWVVPIDIEEDEDSEGPGSGESRLQHSPSQSYLCIPFPRGEDGDGPSSDGIHEEPTPVNSATSTPQLTPTNSLKRGGAHHRRCEVALLGCGAVLAATGLGFDLLEAGKCQLLPLEEPEPPAREEKKRREGLFQRSSRPRRSTSPPSRKLFKKEEPMLLLGDPSASLTLLSLSSISECNSTRSLLRSDSDEIVVYEMPVSPVEAPPLSPCTHNPLVNVRVERFKRDPNQSLTPTHVTLTTPSQPSSHRRTPSDGALKPETLLASRSPSSNGLSPSPGAGMLKTPSPSRDPGEFPRLPDPNVVFPPTPRRWNTQQDSTLERPKTLEFLPRPRPSANRQRLDPWWFVSPSHARSTSPANSSSTETPSNLDSCFASSSSTVEERPGLPALLPFQAGPLPPTERTLLDLDAEGQSQDSTVPLCRAELNTHRPAPYEIQQEFWS

SEQ ID NO: 8320 - protein, 55 aa, Homo Sapiens
MFGQIQSPGYPDSYPSDSEVTWNITVPDGFRIKLYFMHFNLESSYLCEYDYVKVE

SEQ ID NO: 8321 - protein, 354 aa, Homo Sapiens
MFGQIQSPGYPDSYPSDSEVTWNITVPDGFRIKLYFMHFNLESSYLCEYDYVKVETEDQVLATFCGRETTDTEQTPGQEVVLSPGSFMSITFRSDFSNEERFTGFDAHYMAVDVDECKEREDEELSCDHYCHNYIGGYYCSCRFGYILHTDNRTCRVECSDNLFTQRTGVITSPDFPNPYPKSSECLYTIELEEGFMVNLQFEDIFDIEDHPEVPCPYDYIKIKVGPKVLGPFCGEKAPEPISTQSHSVLILFHSDNSGENRGWRLSYRAAGNECPELQPPVHGKIEPSQAKYFFKDQVLVSCDTGYKVLKDNVEMDTFQIECLKDGTWSNKIPTCKKNEIDLESELKSEQVTE

SEQ ID NO: 8322 - protein, 118 aa, Homo Sapiens
MPANSRDTQGPQNKDKASRTPHRARAHRWLLLYYALCFSLSKASAHTVELNNMFGQIQSPGYPDSYPSDSEVTWNITVPDGFRIKLYFMHFNLESSYLCEYDYVKVETEDQVLATFCG

SEQ ID NO: 8323 - protein, 205 aa, Homo Sapiens [sequence omitted]

SEQ ID NO: 8324 - protein, 380 aa, Homo Sapiens
MRWLLLYYALCFSLSKASAHTVELNNMFGQIQSPGYPDSYPSDSEVTWNITVPDGFRIKLYFMHFNLESSYLCEYDYVKVETEDQVLATFCGRETTDTEQTPGQEVVLSPGSFMSITFRSDFSNEERFTGFDAHYMAVDVDECKEREDEELSCDHYCHNYIGGYYCSCRFGYILHTDNRTCRVECSDNLFTQRTGVITSPDFPNPYPKSSECLYTIELEEGFMVNLQFEDIFDIEDHPEVPCPYDYIKIKVGPKVLGPFCGEKAPEPISTQSHSVLILFHSDNSGENRGWRLSYRAAGNECPELQPPVHGKIEPSQAKYFFKDQVLVSCDTGYKVLKDNVEMDTFQIECLKDGTWSNKIPTCKKNEIDLESELKSEQVTE

SEQ ID NO: 8325 - protein, 728 aa, Homo Sapiens
MRWLLLYYALCFSLSKASAHTVELNNMFGQIQSPGYPDSYPSDSEVTWNITVPDGFRIKLYFMHFNLESSYLCEYDYVKVETEDQVLATFCGRETTDTEQTPGQEVVLSPGSFMSITFRSDFSNEERFTGFDAHYMAVDVDECKEREDEELSCDHYCHNYIGGYYCSCRFGYILHTDNRTCRVECSDNLFTQRTGVITSPDFPNPYPKSSECLYTIELEEGFMVNLQFEDIFDIEDHPEVPCPYDYIKIKVGPKVLGPFCGEKAPEPISTQSHSVLILFHSDNSGENRGWRLSYRAAGNECPELQPPVHGKIEPSQAKYFFKDQVLVSCDTGYKVLKDNVEMDTFQIECLKDGTWSNKIPTCKIVDCRAPGELEHGLITFSTRNNLTTYKSEIKYSCQEPYYKMLNNNTGIYTCSAQGVWMNKVLGRSLPTCLPECGQPSRSLPSLVKRIIGGRNAEPGLFPWQALIVVEDTSRVPNDKWFGSGALLSASWILTAAHVLRSQRRDTTVIPVSKEHVTVYLGLHDVRDKSGAVNSSAARVVLHPDFNIQNYNHDIALVQLQEPVPLGPHVMPVCLPRLEPEGPAPHMLGLVAGWGISNPNVTVDEIISSGTRTLSDVLQYVKLPVVPHAECKTSYESRSGNYSVTENMFCAGYYEGGKDTCLGDSGGAFVIFDDLSQRWVVQGLVSWGGPEECGSKQVYGVYTKVSNYVDWVWEQMGLPQSVVEPQVER

SEQ ID NO: 8326 - protein, 699 aa, Homo Sapiens
MRWLLLYYALCFSLSKASAHTVELNNMFGQIQSPGYPDSYPSDSEVTWNITVPDGFRIKLYFMHFNLESSYLCEYDYVKVETEDQVLATFCGRETTDTEQTPGQEVVLSPGSFMSITFRSDFSNEERFTGFDAHYMAVDVDECKEREDEELSCDHYCHNYIGGYYCSCRFGYILHTDNRTCRVECSDNLFTQRTGVITSPDFPNPYPKSSECLYTIELEEGFMVNLQFEDIFDIEDHPEVPCPYDYIKIKVGPKVLGPFCGEKAPEPISTQSHSVLILFHSDNSGENRGWRLSYRAAGNECPELQPPVHGKIEPSQAKYFFKDQVLVSCDTGYKVLKDNVEMDTFQIECLKDGTWSNKIPTCKIVDCRAPGELEHGLITFSTRNNLTTYKSEIKYSCQEPYYKMLNNNTGIYTCSAQGVWMNKVLGRSLPTCLPVCGLPKFSRKLMARIFNGRPAQKGTTPWIAMLSHLNGQPFCGGSLLGSSWIVTAAHCLHQSLDPEDPTLRDSDLLSPSDFKIILGKHWRLRSDENEQHLGVKHTTLHPQYDPNTFENDVALVELLESPVLNAFVMPICLPEGPQQEGAMVIVSGWGKQFLQRFPETLMEIEIPIVDHSTCQKAYAPLKKKVTRDMICAGEKEGGKDACAGDSGGPMVTLNRERGQWYLVGTVSWGDDCGKKDRYGVYSYIHHNKDWIQRVTGVRN

SEQ ID NO: 8327 - protein, 615 aa, Homo Sapiens
MSITFRSDFSNEERFTGFDAHYMAVDVDECKEREDEELSCDHYCHNYIGGYYCSCRFGYILHTDNRTCRVECSDNLFTQRTGVITSPDFPNPYPKSSECLYTIELEEGFMVNLQFEDIFDIEDHPEVPCPYDYIKIKVGPKVLGPFCGEKAPEPISTQSHSVLILFHSDNSGENRGWRLSYRAAGNECPELQPPVHGKIEPSQAKYFFKDQVLVSCDTGYKVLKDNVEMDTFQIECLKDGTWSNKIPTCKIVDCRAPGELEHGLITFSTRNNLTTYKSEIKYSCQEPYYKMLNNNTGIYTCSAQGVWMNKVLGRSLPTCLPECGQPSRSLPSLVKRIIGGRNAEPGLFPWQALIVVEDTSRVPNDKWFGSGALLSASWILTAAHVLRSQRRDTTVIPVSKEHVTVYLGLHDVRDKSGAVNSSAARVVLHPDFNIQNYNHDIALVQLQEPVPLGPHVMPVCLPRLEPEGPAPHMLGLVAGWGISNPNVTVDEIISSGTRTLSDVLQYVKLPVVPHAECKTSYESRSGNYSVTENMFCAGYYEGGKDTCLGDSGGAFVIFDDLSQRWVVQGLVSWGGPEECGSKQVYGVYTKVSNYVDWVWEQMGLPQSVVEPQVER

SEQ ID NO: 8328 - protein, 686 aa, Homo Sapiens
MRLLTLLGLLCGSVATPLGPKWPEPVFGRLASPGFPGEYANDQERRWTLTAPPGYRLRLYFTHFDLELSHLCEYDFVKLSSGAKVLATLCGQESTDTERAPGKDTFYSLGSSLDITFRSDYSNEKPFTGFEAFYAAEDIDECQVAPGEAPTCDHHCHNHLGGFYCSCRAGYVLHRNKRTCSALCSGQVFTQRSGELSSPEYPRPYPKLSSCTYSISLEEGFSVILDFVESFDVETHPETLCPYDFLKIQTDREEHGPFCGKTLPHRIETKSNTVTITFVTDESGDHTGWKIHYTSTAQPCPYPMAPPNGHVSPVQAKYILKDSFSIFCETGYELLQGHLPLKSFTAVCQKDGSWDRPMPACSIVDCGPPDDLPSGRVEYITGPGVTTYKAVIQYSCEETFYTMKVNDGKYVCEADGFWTSSKGEKSLPVCEPVCGLSARTTGGRIYGGQKAKPGDFPWQVLILGGTTAAGALLYDNWVLTAAHAVYEQKHDASALDIRMGTLKRLSPHYTQAWSEAVFIHEGYTHDAGFDNDIALIKLNNKVVINSNITPICLPRKEAESFMRTDDIGTASGWGLTQRGFLARNLMYVDIPIVDHQKCTAAYEKPPYPRGSVTANMLCAGLESGGKDSCRGDSGGALVFLDSETERWFVGGIVSWGSMNCGEAGQYGVYTKVINYIPWIENIISDF

SEQ ID NO: 8329 - protein, 185 aa, Homo Sapiens
MRLLTLLGLLCGSVATPLGPKWPEPVFGRLASPGFPGEYANDQERRWTLTAPPGYRLRLYFTHFDLELSHLCEYDFVKLSSGAKVLATLCGQESTDTERAPGKDTFYSLGSSLDITFRSDYSNEKPFTGFEAFYAAEDIDECQVAPGEAPTCDHHCHNHLGGFYCSCRAGYVLHRNKRTCSEQSL

SEQ ID NO: 8330 - protein, 496 aa, Homo Sapiens
MRVLSGTSLMLCSLLLLLQALCSPGLAPQSRGHLCRTRPTDLVFVVDSSRSVRPVEFEKVKVFLSQVIESLDVGPNATRVGMVNYASTVKQEFSLRAHVSKAALLQAVRRIQPLSTGTMTGLAIQFAITKAFGDAEGGRSRSPDISKVVIVVTDGRPQDSVQDVSARARASGVELFAIGVGSVDKATLRQIASEPQDEHVDYVESYSVIEKLSRKFQEAFCVVSDLCATGDHDCEQVCISSPGSYTCACHEGFTLNSDGKTCNVCSGGGGSSATDLVFLIDGSKSVRPENFELVKKFISQIVDTLDVSDKLAQVGLVQYSSSVRQEFPLGRFHTKKDIKAAVRNMSYMEKGTMTGAALKYLIDNSFTVSSGARPGAQKVGIVFTDGRSQDYINDAAKKAKDLGFKMFAVGVGNAVEDELREIASEPVAEHYFYTADFKTINQIGKKLQKKICVEEDPCACESLVKFQAKVEGLLQALTRKLEAVSKRLAILENTVV

SEQ ID NO: 8331 - protein, 115 aa, Homo Sapiens
MEDHNCEQLCVNVPGSFVCQCYSGYALAEDGKRCVAVDYCASENHGCEHECVNADGSYLCQCHEGFALNPDKKTCTKIDYCASSNHGCQHECVNTDDSYSCHCLKGFTLNPDKKT

SEQ ID NO: 8332 - protein, 672 aa, Homo Sapiens
MEDHNCEQLCVNVPGSFVCQCYSGYALAEDGKRCVAVDYCASENHGCEHECVNADGSYLCQCHEGFALNPDKKTCTKIDYCASSNHGCQHECVNTDDSYSCHCLKGFTLNPDKKTCRRINYCALNKPGCEHECVNMEESYYCRCHRGYTLDPNGKTCSRVDHCAQQDHGCEQLCLNTEDSFVCQCSEGFLINEDLKTCSRVDYCLLSDHGCEYSCVNMDRSFACQCPEGHVLRSDGKTCAKLDSCALGDHGCEHSCVSSEDSFVCQCFEGYILREDGKTCRRKDVCQAIDHGCEHICVNSDDSYTCECLEGFRLAEDGKRCRRKDVCKSTHHGCEHICVNNGNSYICKCSEGFVLAEDGRRCKKCTEGPIDLVFVIDGSKSLGEENFEVVKQFVTGIIDSLTISPKAARVGLLQYSTQVHTEFTLRNFNSAKDMKKAVAHMKYMGKGSMTGLALKHMFERSFTQGEGARPLSTRVPRAAIVFTDGRAQDDVSEWASKAKANGITMYAVGVGKAIEEELQEIASEPTNKHLFYAEDFSTMDEISEKLKKGICEALEDSDGRQDSPAGELPKTVQQPTESEPVTINIQDLLSCSNFAVQHRYLFEEDNLLRSTQKLSHSTKPSGSPLEEKHDQCKCENLIMFQNLANEEVRKLTQRLEEMTQRMEALENRLRYR

SEQ ID NO: 8333 - protein, 956 aa, Homo Sapiens
MEKMLAGCFLLILGQIVLLPAEARERSRGRSISRGRHARTHPQTALLESSCENKRADLVFIIDSSRSVNTHDYAKVKEFIVDILQFLDIGPDVTRVGLLQYGSTVKNEFSLKTFKRKSEVERAVKRMRHLSTGTMTGLAIQYALNIAFSEAEGARPLRENVPRVIMIVTDGRPQDSVAEVAAKARDTGILIFAIGVGQVDFNTLKSIGSEPHEDHVFLVANFSQIETLTSVFQKKLCTAHMCSTLEHNCAHFCINIPGSYVCRCKQGYILNSDQTTCRIQDLCAMEDHNCEQLCVNVPGSFVCQCYSGYALAEDGKRCVAVDYCASENHGCEHECVNADGSYLCQCHEGFALNPDKKTCTKIDYCASSNHGCQHECVNTDDSYSCHCLKGFTLNPDKKTCRRINYCALNKPGCEHECVNMEESYYCRCHRGYTLDPNGKTCSRVDHCAQQDHGCEQLCLNTEDSFVCQCSEGFLINEDLKTCSRVDYCLLSDHGCEYSCVNMDRSFACQCPEGHVLRSDGKTCAKLDSCALGDHGCEHSCVSSEDSFVCQCFEGYILREDGKTCRRKDVCQAIDHGCEHICVNSDDSYTCECLEGFRLAEDGKRCRRKDVCKSTHHGCEHICVNNGNSYICKCSEGFVLAEDGRRCKKCTEGPIDLVFVIDGSKSLGEENFEVVKQFVTGIIDSLTISPKAARVGLLQYSTQVHTEFTLRNFNSAKDMKKAVAHMKYMGKGSMTGLALKHMFERSFTQGEGARPLSTRVPRAAIVFTDGRAQDDVSEWASKAKANGITMYAVGVGKAIEEELQEIASEPTNKHLFYAEDFSTMDEISEKLKKGICEALEDSDGRQDSPAGELPKTVQQPTESEPVTINIQDLLSCSNFAVQHRYLFEEDNLLRSTQKLSHSTKPSGSPLEEKHDQCKCENLIMFQNLANEEVRKLTQRLEEMTQRMEALENRLRYR

SEQ ID NO: 8334 - protein, 915 aa, Homo Sapiens
MEKMLAGCFLLILGQIVLLPAEARERSRGRSISRGRHARTHPQTALLESSCENKRADLVFIIDSSRSVNTHDYAKVKEFIVDILQFLDIGPDVTRVGLLQYGSTVKNEFSLKTFKRKSEVERAVKRMRHLSTGTMTGLAIQYALNIAFSEAEGARPLRENVPRVIMIVTDGRPQDSVAEVAAKARDTGILIFAIGVGQVDFNTLKSIGSEPHEDHVFLVANFSQIETLTSVFQKKLCTAHMCSTLEHNCAHFCINIPGSYVCRCKQGYILNSDQTTCRIQDLCAMEDHNCEQLCVNVPGSFVCQCYSGYALAEDGKRCVAVDYCASENHGCEHECVNADGSYLCQCHEGFALNPDKKTCTRINYCALNKPGCEHECVNMEESYYCRCHRGYTLDPNGKTCSRVDHCAQQDHGCEQLCLNTEDSFVCQCSEGFLINEDLKTCSRVDYCLLSDHGCEYSCVNMDRSFACQCPEGHVLRSDGKTCAKLDSCALGDHGCEHSCVSSEDSFVCQCFEGYILREDGKTCRRKDVCQAIDHGCEHICVNSDDSYTCECLEGFRLAEDGKRCRRKDVCKSTHHGCEHICVNNGNSYICKCSEGFVLAEDGRRCKKCTEGPIDLVFVIDGSKSLGEENFEVVKQFVTGIIDSLTISPKAARVGLLQYSTQVHTEFTLRNFNSAKDMKKAVAHMKYMGKGSMTGLALKHMFERSFTQGEGARPLSTRVPRAAIVFTDGRAQDDVSEWASKAKANGITMYAVGVGKAIEEELQEIASEPTNKHLFYAEDFSTMDEISEKLKKGICEALEDSDGRQDSPAGELPKTVQQPTESEPVTINIQDLLSCSNFAVQHRYLFEEDNLLRSTQKLSHSTKPSGSPLEEKHDQCKCENLIMFQNLANEEVRKLTQRLEEMTQRMEALENRLRYR

SEQ ID NO: 8335 - protein, 956 aa, Homo Sapiens; identical to SEQ ID NO: 8333

SEQ ID NO: 8336 - protein, 937 aa, Homo Sapiens
MEKMLAGCFLLILGQIVLLPAEARERSRGRSISRGRHARTHPQTALLESSCENKRADLVFIIDSSRSVNTHDYAKVKEFIVDILQFLDIGPDVTRVGLLQYGSTVKNEFSLKTFKRKSEVERAVKRMRHLSTGTMTGLAIQYALNIAFSEAEGARPLRENVPRVIMIVTDGRPQDSVAEVAAKARDTGILIFAIGVGQVDFNTLKSIGSEPHEDHVFLVANFSQIETLTSVFQKKLCTAHMCSTLEHNCAHFCINIPGSYVCRCKQGYILNSDQTTCRIQDLCAMEDHNCEQLCVNVPGSFVCQCYSGYALAEDGKRCVAVDYCASENHGCEHECVNADGSYLCQCHEGFALNPDKKTCTKIDYCASSNHGCQHECVNTDDSYSCHCLKGFTLNPDKKTCRRINYCALNKPGCEHECVNMEESYYCRCHRGYTLDPNGKTCSRVDHCAQQDHGCEQLCLNTEDSFVCQCSEGFLINEDLKTCSRVDYCLLSDHGCEYSCVNMDRSFACQCPEGHVLRSDGKTCAKLDSCALGDHGCEHSCVSSEDSFVCQCFEGYILREDGKTCRRKDVCQAIDHGCEHICVNSDDSYTCECLEGFRLAEDGKRCRRKDVCKSTHHGCEHICVNNGNSYICKCSEGFVLAEDGRRCKKCTEGPIDLVFVIDGSKSLGEENFEVVKQFVTGIIDSLTISPKAARVGLLQYSTQVHTEFTLRNFNSAKDMKKAVAHMKYMGKGSMTGLALKHMFERSFTQGEGARPLSTRVPRAAIVFTDGRAQDDVSEWASKAKANGITMYAVGVGKAIEEELQEIASEPTNKHLFYAEDFSTMDEISEKLKKGICEALEDSDGRQDSPAGELPKTVQQPTVQHRYLFEEDNLLRSTQKLSHSTKPSGSPLEEKHDQCKCENLIMFQNLANEEVRKLTQRLEEMTQRMEALENRLRYR

SEQ ID NO: 8337 - protein, 195 aa, Homo Sapiens
QCYSGYALAEDGKRCVAVDYCASENHGCEHECVNADGSYLCQCHEGFALNPDKKTCTKIDYCASSNHGCQHECVNTDDSYSCHCLKGFTLNPDKKTCRSLPFFPSGINYCALNKPGCEHECVNMEESYYCRCHRGYTLDPNGKTCSRVDHCAQQDHGCEQLCLNTEDSFVCQCSEGFLINEDLKTCSRVDYCLLS

SEQ ID NO: 8338 - protein, 720 aa, Homo Sapiens
  misc_feature (1)..(1): Xaa can be any naturally occurring amino acid
XAEVAAKARDTGILIFAIGVGQVDFNTLKSIGSEPHEDHVFLVANFSQIETLTSVFQKKLCTAHMCSTLEHNCAHFCINIPGSYVCRCKQGYILNSDQTTCRTVDYCASENHGCEHECVNADGSYLCQCHEGFALNPDKKTCTKIDYCASSNHGCQHECVNTDDSYSCHCLKGFTLNPDKKTCRRINYCALNKPGCEHECVNMEESYYCRCHRGYTLDPNGKTCSRVDHCAQQDHGCEQLCLNTEDSFVCQCSEGFLINEDLKTCSRVDYCLLSDHGCEYSCVNMDRSFACQCPEGHVLRSDGKTCAKLDSCALGDHGCEHSCVSSEDSFVCQCFEGYILREDGKTCRRKDVCQAIDHGCEHICVNSDDSYTCECLEGFRLAEDGKRCRRKDVCKSTHHGCEHICVNNGNSYICKCSEGFVLAEDGRRCKKCTEGPIDLVFVIDGSKSLGEENFEVVKQFVTGIIDSLTISPKAARVGLLQYSTQVHTEFTLRNFNSAKDMKKAVAHMKYMGKGSMTGLALKHMFERSFTQGEGARPLSTRVPRAAIVFTDGRAQDDVSEWASKAKANGITMYAVGVGKAIEEELQEIASEPTNKHLFYAEDFSTMDEISEKLKKGICEALEDSDGRQDSPAGELPKTVQQPTVQHRYLFEEDNLLRSTQKLSHSTKPSGSPLEEKHDQCKCENLIMFQNLANEEVRKLTQRLEEMTQRMEALENRLRYR

SEQ ID NO: 8339 - protein, 183 aa, Homo Sapiens
  misc_feature (1)..(1): Xaa can be any naturally occurring amino acid
XDSCALGDHGCEHSCVSSEDSFVCQCFEGYILREDGKTCRRKDVCQAIDHGCEHICVNSDDSYTCECLEGFRLAEDGKRCRKCTEGPIDLVFVIDGSKSLGEENFEVVKQFVTGIIDSLTISPKAARVGLLQYSTQVHTEFTLRNFNSAKDMKKAVAHMKYMGKGSMTGLALKHMFERSFTQG

SEQ ID NO: 8340 - protein, 131 aa, Homo Sapiens
  misc_feature (1)..(1): Xaa can be any naturally occurring amino acid
XEDSDGRQDSPAGELPKTVQQPTESEPVTINIQDLLSCSNFAVQHRYLFEEDNLLRSTQKLSHSTKPSGSPLEEKHDQCKCENLIMFQNLANEEVRKLTQRYILFLHYASVWNAKNIIKTSHTLCRFYQLK

SEQ ID NO: 8341 - protein, 176 aa, Homo Sapiens
  misc_feature (1)..(1): Xaa can be any naturally occurring amino acid
XFTQGEGARPLSTRVPRAAIVFTDGRAQDDVSEWASKAKANGITMYAVGVGKAIEEELQEIASEPTNKHLFYAEDFSTMDEISEKLKKGICEALEDSDGRQDSPAGELPKTVQQPTVQHRYLFEEDNLLRSTQKLSHSTKPSGSPLEEKHDQCKCENLIMFQNLANEEQRSSLSAL

SEQ ID NO: 8342 - protein, 181 aa, Homo Sapiens
  misc_feature (1)..(1): Xaa can be any naturally occurring amino acid
XSIGSEPHEDHVFLVANFSQIETLTSVFQKKLCIQDLCAMEDHNCEQLCVNVPGSFVCQCYSGYALAEDGKRCVAVDYCASENHGCEHECVNADGSYLCQCHEGFALNPDKKTCTKIDYCASSNHGCQHECVNTDDSYSCHCLKGFTLNPDKKTCRRINYCALNKPGCEHECVNMEESYYC

SEQ ID NO: 8343 - protein, 155 aa, Homo Sapiens
  misc_feature (1)..(1): Xaa can be any naturally occurring amino acid
XVDYCLLSDHGCEYSCVNMDRSFACQCPEGHVLRSDGKTCAKLDSCALGDHGCEHSCVSSEDSFVCQCFEGYILREDGKTCRRKDVCQAIDHGCEHICVNSDDSYTCECLEGFRLAEDGKRCRSKMSANQPTMAANTFVLIMGIPTSANAQRDLF

SEQ ID NO: 8344 - protein, 444 aa, Homo Sapiens
MPRPAPARRLPGLLLLLWPLLLLPSAAPDPVARPGFRRLETRGPGGSPGRRPSPAAPDGAPASGTSEPGRARGAGVCKSRPLDLVFIIDSSRSVRPLEFTKVKTFVSRIIDTLDIGPADTRVAVVNYASTVKIEFQLQAYTDKQSLKQAVGRITPLSTGTMSGLAIQTAMDEAFTVEAGAREPSSNIPKVAIIVTDGRPQDQVNEVAARAQASGIELYAVGVDRADMASLKMMASEPLEEHVFYVETYGVIEKLSSRFQETFCALDRCALNTHGCEHICVNDRSGSYHCECYEGYTLNEDRKTCSAQDKCALGTHGCQHICVNDRTGSHHCECYEGYTLNADKKTCSVRDKCALGSHGCQHICVSDGAASYHCDCYPGYTLNEDKKTCSATEEARRLVSTEDACGCEATLAFQDKVSSYLQRLNTKLDDILEKLKINEYGQIHR

SEQ ID NO: 8345 - protein, 486 aa, Homo Sapiens
MPRPAPARRLPGLLLLLWPLLLLPSAAPDPVARPGFRRLETRGPGGSPGRRPSPAAPDGAPASGTSEPGRARGAGVCKSRPLDLVFIIDSSRSVRPLEFTKVKTFVSRIIDTLDIGPADTRVAVVNYASTVKIEFQLQAYTDKQSLKQAVGRITPLSTGTMSGLAIQTAMDEAFTVEAGAREPSSNIPKVAIIVTDGRPQDQVNEVAARAQASGIELYAVGVDRADMASLKMMASEPLEEHVFYVETYGVIEKLSSRFQETFCALDPCVLGTHQCQHVCISDGEGKHHCECSQGYTLNADKKTCSALDRCALNTHGCEHICVNDRSGSYHCECYEGYTLNEDRKTCSAQDKCALGTHGCQHICVNDRTGSHHCECYEGYTLNADKKTCSVRDKCALGSHGCQHICVSDGAASYHCDCYPGYTLNEDKKTCSATEEARRLVSTEDACGCEATLAFQDKVSSYLQRLNTKLDDILEKLKINEYGQIHR

SEQ ID NO: 8346 - protein, 581 aa, Homo Sapiens
MRGLLCWPVLLLLLQPWETQLQLTGPRCHTGPLDLVFVIDSSRSVRPFEFETMRQFLMGLLRGLNVGPNATRVGVIQYSSQVQSVFPLRAFSRREDMERAIRDLVPLAQGTMTGLAIQYAMNVAFSVAEGARPPEERVPRVAVIVTDGRPQDRVAEVAAQARARGIEIYAVGVQRADVGSLRAMASPPLDEHVFLVESFDLIQEFGLQFQSRLCAIDLCAEGTHGCEHHCVNSPGSYFCHCQVGFVLQQDQRSCRAIDYCSFGNHSCQHECVSTPGGPRCHCREGHDLQPDGRSCQVRDLCNGVDHGCEFQCVSEGLSYRCLCPEGRQLQADGKSCNRCREGHVDLVLLVDGSKSVRPQNFELVKRFVNQIVDFLDVSPEGTRVGLVQFSSRVRTEFPLGRYGTAAEVKQAVLAVEYMERGTMTGLALRHMVEHSFSEAQGARPRALNVPRVGLVFTDGRSQDDISVWAARAKEEGIVMYAVGVGKAVEAELREIASEPAELHVSYAPDFGTMTHLLENLRGSICPEEGISAGTELRSPCECESLVEFQGRTLGALESLTLNLAQLTARLEDLENQLANQK

SEQ ID NO: 8347 - protein, 581 aa, Homo Sapiens; identical to SEQ ID NO: 8346

SEQ ID NO: 8348 - protein, 540 aa, Homo Sapiens
MRGLLCWPVLLLLLQPWETQLQLTGPRCHTGPLDLVFVIDSSRSVRPFEFETMRQFLMGLLRGLNVGPNATRVGVIQYSSQVQSVFPLRAFSRREDMERAIRDLVPLAQGTMTGLAIQYAMNVAFSVAEGARPPEERVPRVAVIVTDGRPQDRVAEVAAQARARGIEIYAVGVQRADVGSLRAMASPPLDEHVFLVESFDLIQEFGLQFQSRLCAIDYCSFGNHSCQHECVSTPGGPRCHCREGHDLQPDGRSCQVRDLCNGVDHGCEFQCVSEGLSYRCLCPEGRQLQADGKSCNRCREGHVDLVLLVDGSKSVRPQNFELVKRFVNQIVDFLDVSPEGTRVGLVQFSSRVRTEFPLGRYGTAAEVKQAVLAVEYMERGTMTGLALRHMVEHSFSEAQGARPRALNVPRVGLVFTDGRSQDDISVWAARAKEEGIVMYAVGVGKAVEAELREIASEPAELHVSYAPDFGTMTHLLENLRGSICPEEGISAGTELRSPCECESLVEFQGRTLGALESLTLNLAQLTARLEDLENQLANQK

SEQ ID NO: 8349 - protein, 622 aa, Homo Sapiens
MRGLLCWPVLLLLLQPWETQLQLTGPRCHTGPLDLVFVIDSSRSVRPFEFETMRQFLMGLLRGLNVGPNATRVGVIQYSSQVQSVFPLRAFSRREDMERAIRDLVPLAQGTMTGLAIQYAMNVAFSVAEGARPPEERVPRVAVIVTDGRPQDRVAEVAAQARARGIEIYAVGVQRADVGSLRAMASPPLDEHVFLVESFDLIQEFGLQFQSRLCGKDQCAEGGHGCQHQCVNAWAMFHCTCNPGYKLAADNKSCLAIDLCAEGTHGCEHHCVNSPGSYFCHCQVGFVLQQDQRSCRAIDYCSFGNHSCQHECVSTPGGPRCHCREGHDLQPDGRSCQVRDLCNGVDHGCEFQCVSEGLSYRCLCPEGRQLQADGKSCNRCREGHVDLVLLVDGSKSVRPQNFELVKRFVNQIVDFLDVSPEGTRVGLVQFSSRVRTEFPLGRYGTAAEVKQAVLAVEYMERGTMTGLALRHMVEHSFSEAQGARPRALNVPRVGLVFTDGRSQDDISVWAARAKEEGIVMYAVGVGKAVEAELREIASEPAELHVSYAPDFGTMTHLLENLRGSICPEEGISAGTELRSPCECESLVEFQGRTLGALESLTLNLAQLTARLEDLENQLANQK

SEQ ID NO: 8350 - protein, 499 aa, Homo Sapiens
MRGLLCWPVLLLLLQPWETQLQLTGPRCHTGPLDLVFVIDSSRSVRPFEFETMRQFLMGLLRGLNVGPNATRVGVIQYSSQVQSVFPLRAFSRREDMERAIRDLVPLAQGTMTGLAIQYAMNVAFSVAEGARPPEERVPRVAVIVTDGRPQDRVAEVAAQARARGIEIYAVGVQRADVGSLRAMASPPLDEHVFLVESFDLIQEFGLQFQSRLCVRDLCNGVDHGCEFQCVSEGLSYRCLCPEGRQLQADGKSCNRCREGHVDLVLLVDGSKSVRPQNFELVKRFVNQIVDFLDVSPEGTRVGLVQFSSRVRTEFPLGRYGTAAEVKQAVLAVEYMERGTMTGLALRHMVEHSFSEAQGARPRALNVPRVGLVFTDGRSQDDISVWAARAKEEGIVMYAVGVGKAVEAELREIASEPAELHVSYAPDFGTMTHLLENLRGSICPEEGISAGTELRSPCECESLVEFQGRTLGALESLTLNLAQLTARLEDLENQLANQK

SEQ ID NO: 8351 - protein, 121 aa, Homo Sapiens
MDFQRGKNLRYQLLQLVEPFGVISNHLILNKINEAFIEMATTEDAQAAVDYYTTTPALVFGKPVRVHLSQKYKRIKKPEGKPDQKFDQKQELGRVIHLSNLPHSGYSDSAVLKLAEPYGKI

SEQ ID NO: 8352 - protein, 6 aa, Homo Sapiens
MGDPFM

SEQ ID NO: 8353 - protein, 25 aa, Homo Sapiens
MGDPFMLQQSTNPAPGILGPPPPSF

SEQ ID NO: 8354 - protein, 81 aa, Homo Sapiens
MGDPFMLQQSTNPAPGILGPPPPSFHLGGPAVGPRGNLGAGNGNLQGPRHMQKGRVETSRVVHIMDFQRGKNLRYQLLQLV

SEQ ID NO: 8355 - protein, 86 aa, Homo Sapiens
MGDPFMLQQSTNPAPGILGPPPPSFHLGGPAVGPRGNLGAGNGNLQGPRHMQKGRVETSRVVHIMDFQRGKNLRYQLLQLVEPFGV

SEQ ID NO: 8356 - protein, 109 aa, Homo Sapiens
MGDPFMLQQSTNPAPGILGPPPPSFHLGGPAVGPRGNLGAGNGNLQGPRHMQKGRVETSRVVHIMDFQRGKNLRYQLLQLVEPFGVISNHLILNKINEAFIEMATTEDA

SEQ ID NO: 8357 - protein, 125 aa, Homo Sapiens
MGDPFMLQQSTNPAPGILGPPPPSFHLGGPAVGPRGNLGAGNGNLQGPRHMQKGRVETSRVVHIMDFQRGKNLRYQLLQLVEPFGVISNHLILNKINEAFIEMATTEDAQAAVDYYTTTPALVFG

SEQ ID NO: 8358 - protein, 509 aa, Homo Sapiens
MGDPFMLQQSTNPAPGILGPPPPSFHLGGPAVGPRGNLGAGNGNLQGPRHMQKGRVETSRVVHIMDFQRGKNLRYQLLQLVEPFGVISNHLILNKINEAFIEMATTEDAQAAVDYYTTTPALVFGKPVRVHLSQKYKRIKKPEGKPDQKFDQKQELGRVIHLSNLPHSGYSDSAVLKLAEPYGKIKNYILMRMKSQAFIEMETREDAMAMVDHCLKKALWFQGRCVKVDLSEKYKKLVLRIPNRGIDLLKKDKSRKRSYSPDGKESPSDKKSKTDGSQKTESSTEGKEQEEKSGEDGEKDTKDDQTEQEPNMLLESEDELLVDEEEAAALLESGSSVGDETDLANLGDVASDGKKEPSDKAVKKDGSASAAAKKKLKKVDKIEELDQENEAALENGIKNEENTEPGAESSENADDPNKDTSENADGQSDENKDDYTIPDEYRIGPYQPNVPVGIDYVIPKTGFYCKLCSLFYTNEEVAKNTHCSSLPHYQKLKKFLNKLAEERRQKKET

SEQ ID NO: 8359 - protein, 509 aa, Homo Sapiens; identical to SEQ ID NO: 8358

SEQ ID NO: 8360 - protein, 559 aa, Homo Sapiens
MLGAQWRRNQPSRAAEEWSQHINGASHSRRCQLLLEIYPEWNPDNDTGHTMGDPFMLQQSTNPAPGILGPPPPSFHLGGPAVGPRGNLGAGNGNLQGPRHMQKGRVETSRVVHIMDFQRGKNLRYQLLQLVEPFGVISNHLILNKINEAFIEMATTEDAQAAVDYYTTTPALVFGKPVRVHLSQKYKRIKKPEGKPDQKFDQKQELGRVIHLSNLPHSGYSDSAVLKLAEPYGKIKNYILMRMKSQAFIEMETREDAMAMVDHCLKKALWFQGRCVKVDLSEKYKKLVLRIPNRGIDLLKKDKSRKRSYSPDGKESPSDKKSKTDGSQKTESSTEGKEQEEKSGEDGEKDTKDDQTEQEPNMLLESEDELLVDEEEAAALLESGSSVGDETDLANLGDVASDGKKEPSDKAVKKDGSASAAAKKKLKKVDKIEELDQENEAALENGIKNEENTEPGAESSENADDPNKDTSENADGQSDENKDDYTIPDEYRIGPYQPNVPVGIDYVIPKTGFYCKLCSLFYTNEEVAKNTHCSSLPHYQKLKKFLNKLAEERRQKKET

SEQ ID NO: 8361 - protein, 172 aa, Homo Sapiens
MLGAQWRRNQPSRAAEVSGPGGKHAAGQGPRVRREILGEEEWSQHINGASHSRRCQLLLEIYPEWNPDNDTGHTMGDPFMLQQSTNPAPGILGPPPPSFHLGGPAVGPRGNLGAGNGNLQGPRHMQKGRVETSRVVHIMDFQRGKNLRYQLLQLVEPFGVISNHLILNKINE

SEQ ID NO: 8362 - protein, 283 aa, Homo Sapiens
MSKSFQQSSLSRDSQGHGRDLSAAGIGLLAAATQSLSMLLESEDELLVDEEEAAALLESGSSVGDETDLANLGDVASDGKKEPSDKAVKKDGSASAAAKKKLKKRRFPGSMEGFVTLDEVGDEEDSELQKLRKSGMAFKSGDKNDDGLVEIKVDKIEELDQENEAALENGIKNEENTEPGAESSENADDPNKDTSENADGQSDENKDDYTIPDEYRIGPYQPNVPVGIDYVIPKTGFYCKLCSLFYTNEEVAKNTHCSSLPHYQKLKKFLNKLAEERRQKKET

SEQ ID NO: 8363 - protein, 47 aa, Homo Sapiens
MSKSFQQSSLSRDSQGHGRDLSAAGIGLLAAATQSLSMPASLGRMNQ

SEQ ID NO: 8364 - protein, 78 aa, Homo Sapiens
MSKSFQQSSLSRDSQGHGRDLSAAGIGLLAAATQSLSMPASLGRMNQGTARLASLMNLGMSSSLNQQGAHSALSSAST

SEQ ID NO: 8365 - protein, 78 aa, Homo Sapiens; identical to SEQ ID NO: 8364

SEQ ID NO: 8366 - protein, 87 aa, Homo Sapiens
MSKSFQQSSLSRDSQGHGRDLSAAGIGLLAAATQSLSMPASLGRMNQGTARLASLMNLGMSSSLNQQGAHSALSSASTSSHNLQSIF

SEQ ID NO: 8367 - protein, 99 aa, Homo Sapiens
MSKSFQQSSLSRDSQGHGRDLSAAGIGLLAAATQSLSMPASLGRMNQGTARLASLMNLGMSSSLNQQGAHSALSSASTSSHNLQSIFNIGSRGPLPLSS

SEQ ID NO: 8368 - protein, 100 aa, Homo Sapiens
MSKSFQQSSLSRDSQGHGRDLSAAGIGLLAAATQSLSMPASLGRMNQGTARLASLMNLGMSSSLNQQGAHSALSSASTSSHNLQSIFNIGSRGPLPLSSQ

SEQ ID NO: 8369 - protein, 107 aa, Homo Sapiens
MSKSFQQSSLSRDSQGHGRDLSAAGIGLLAAATQSLSMPASLGRMNQGTARLASLMNLGMSSSLNQQGAHSALSSASTSSHNLQSIFNIGSRGPLPLSSQHRGDADQ

SEQ ID NO: 8370 - protein, 847 aa, Homo Sapiens
MSKSFQQSSLSRDSQGHGRDLSAAGIGLLAAATQSLSMPASLGRMNQGTARLASLMNLGMSSSLNQQGAHSALSSASTSSHNLQSIFNIGSRGPLPLSSQHRGDADQASNILASFGLSARDLDELSRYPEDKITPENLPQILLQLKRRRTEEGPTLSYGRDGRSATREPPYRVPRDDWEEKRHFRRDSFDDRGPSLNPVLDYDHGSRSQESGYYDRMDYEDDRLRDGERCRDDSFFGETSHNYHKFDSEYERMGRGPGPLQERSLFEKKRGAPPSSNIEDFHGLLPKGYPHLCSICDLPVHSNKEWSQHINGASHSRRCQLLLEIYPEWNPDNDTGHTMGDPFMLQQSTNPAPGILGPPPPSFHLGGPAVGPRGNLGAGNGNLQGPRHMQKGRVETSRVVHIMDFQRGKNLRYQLLQLVEPFGVISNHLILNKINEAFIEMATTEDAQAAVDYYTTTPALVFGKPVRVHLSQKYKRIKKPEGKPDQKFDQKQELGRVIHLSNLPHSGYSDSAVLKLAEPYGKIKNYILMRMKSQAFIEMETREDAMAMVDHCLKKALWFQGRCVKVDLSEKYKKLVLRIPNRGIDLLKKDKSRKRSYSPDGKESPSDKKSKTDGSQKTESSTEGKEQEEKSGEDGEKDTKDDQTEQEPNMLLESEDELLVDEEEAAALLESGSSVGDETDLANLGDVASDGKKEPSDKAVKKDGSASAAAKKKLKKVDKIEELDQENEAALENGIKNEENTEPGAESSENADDPNKDTSENADGQSDENKDDYTIPDEYRIGPYQPNVPVGIDYVIPKTGFYCKLCSLFYTNEEVAKNTHCSSLPHYQKLKKFLNKLAEERRQKKET

SEQ ID NO: 8371 - protein, 895 aa, Homo Sapiens
MSKSFQQSSLSRDSQGHGRDLSAAGIGLLAAATQSLSMPASLGRMNQGTARLASLMNLGMSSSLNQQGAHSALSSASTSSHNLQSIFNIGSRGPLPLSSQHRGDADQASNILASFGLSARDLDELSRYPEDKITPENLPQILLQLKRRRTEEGPTLSYGRDGRSATREPPYRVPRDDWEEKRHFRRDSFDDRGPSLNPVLDYDHGSRSQESGYYDRMDYEDDRLRDGERCRDDSFFGETSHNYHKFDSEYERMGRGPGPLQERSLFEKKRGAPPSSNIEDFHGLLPKGYPHLCSICDLPVHSNKEWSQHINGASHSRRCQLLLEIYPEWNPDNDTGHTMGDPFMLQQSTNPAPGILGPPPPSFHLGGPAVGPRGNLGAGNGNLQGPRHMQKGRVETSRVVHIMDFQRGKNLRYQLLQLVEPFGVISNHLILNKINEAFIEMATTEDAQAAVDYYTTTPALVFGKPVRVHLSQKYKRIKKPEGKPDQKFDQKQELGRVIHLSNLPHSGYSDSAVLKLAEPYGKIKNYILMRMKSQAFIEMETREDAMAMVDHCLKKALWFQGRCVKVDLSEKYKKLVLRIPNRGIDLLKKDKSRKRSYSPDGKESPSDKKSKTDGSQKTESSTEGKEQEEKSGEDGEKDTKDDQTEQEPNMLLESEDELLVDEEEAAALLESGSSVGDETDLANLGDVASDGKKEPSDKAVKKDGSASAAAKKKLKKRRFPGSMEGFVTLDEVGDEEDSELQKLRKSGMAFKSGDKNDDGLVEIKVDKIEELDQENEAALENGIKNEENTEPGAESSENADDPNKDTSENADGQSDENKDDYTIPDEYRIGPYQPNVPVGIDYVIPKTGFYCKLCSLFYTNEEVAKNTHCSSLPHYQKLKKFLNKLAEERRQKKET

SEQ ID NO: 8372 - protein, 847 aa, Homo Sapiens; identical to SEQ ID NO: 8370

SEQ ID NO: 8373 - protein, 895 aa, Homo Sapiens; identical to SEQ ID NO: 8371

SEQ ID NO: 8374 - protein, 847 aa, Homo Sapiens; identical to SEQ ID NO: 8370

SEQ ID NO: 8375 - protein, 794 aa, Homo Sapiens
MSKSFQQSSLSRDSQGHGRDLSAAGIGLLAAATQSLSMPASLGRMNQGTARLASLMNLGMSSSLNQQGAHSALSSASTSSHNLQSIFNIGSRGPLPLSSQHRGDADQASNILASFGLSARDLDELSRYPEDKITPENLPQILLQLKRRRTEEGPTLSYGRDGRSATREPPYRVPRDDWEEKRHFRRDSFDDRGPSLNPVLDYDHGSRSQESGYYDRMDYEDDRLRDGERCRDDSFFGETSHNYHKFDSEYERMGRGPGPLQERSLFEKKRGAPPSSNIEDFHGLLPKGYPHLCSICDLPVHSNKEWSQHINGASHSRRCQLLLEIYPEWNPDNDTGHTMGDPFMLQQSTNPAPGILGPPPPSFHLGGPAVGPRGNLGAGNGNLQGPRHMQKGRVETSRVVHIMDFQRGKNLRYQLLQLVEPFGVISNHLILNKINEAFIEMATTEDAQAAVDYYTTTPALVFGKPVRVHLSQKYKRIKKPEGKPDQKFDQKQELGRVIHLSNLPHSGYSDSAVLKLAEPYGKIKNYILMRMKSQAFIEMETREDAMAMVDHCLKKALWFQGRCVKVDLSEKYKKLVLRIPNRGIDLLKKDKSRKRSYSPDGKESPSDKKSKTDGSQKTESSTEGKEQEEKSGEDGEKDTKDDQTEQEPNMLLESEDELLVDEEEAAALLESGSSVGDETDLANLGDVASDGKKEPSDKAVKKDGSASAAAKKKLKKVDKIEELDQENEAALENGIKNEENTEPGAESSENADDPNKDTSENADGQSDENKDDYTIPDEYRIGPYQPNVPVEISE

SEQ ID NO: 8376 - protein, 433 aa, Homo Sapiens
MSKSFQQSSLSRDSQGHGRDLSAAGIGLLAAATQSLSMPASLGRMNQGTARLASLMNLGMSSSLNQQGAHSALSSASTSSHNLQSIFNIGSRGPLPLSSQHRGDADQASNILASFGLSARDLDELSRYPEDKITPENLPQILLQLKRRRTEEGPTLSYGRDGRSATREPPYRVPRDDWEEKRHFRRDSFDDRGPSLNPVLDYDHGSRSQESGYYDRMDYEDDRLRDGERCRDDSFFGETSHNYHKFDSEYERMGRGPGPLQERSLFEKKRGAPPSSNIEDFHGLLPKGYPHLCSICDLPVHSNKEWSQHINGASHSRRCQLLLEIYPEWNPDNDTGHTMGDPFMLQQSTNPAPGILGPPPPSFHLGGPAVGPRGNLGAGNGNLQGPRHMQKGRVETSRVVHIMDFQRGKNLRYQLLQLVEPFGVISNHLILNK

SEQ ID NO: 8377 - protein, 847 aa, Homo Sapiens; identical to SEQ ID NO: 8370

SEQ ID NO: 8378 - protein, 334 aa, Homo Sapiens
  misc_feature (1)..(1): Xaa can be any naturally occurring amino acid
XERCRDDSFFGETSHNYHKFDSEYERMGRGPGPLQERSLFEKKRGAPPSSNIEDFHGLLPKGYPHLCSICDLPVHSNKEWSQHINGASHSRRCQLLLEMGDPFMLQQSTNPAPGILGPPPPSFHLGGPAVGPRGNLGAGNGNLQGPRHMQKGRVETSRVVHIMDFQRGKNLRYQLLQLVEPFGVISNHLILNKINEAFIEMATTEDAQAAVDYYTTTPALVFGKPVRVHLSQKYKRIKKPEGKPDQKFDQKQELGRVIHLSNLPHSGYSDSAVLKLAEPYGKIKNYILMRMKSQAFIEMETREDAMAMVDHCLKKALWFQGRCVKVDLSEKYKK

SEQ ID NO: 8379 - protein, 235 aa, Homo Sapiens
AIQISQQTPYWHCRLLFQLAQLHTLEKDLVSACDLLGVGAEYARVVGSEYTRALFLLSKGMLLLMERKLQEVHPLLTLCGQIVENWQGNPIQKESLRVFFLVLQVTHYLDAGQVKSVKPCLKQLQQCIQTISTLHDDEILPSNPADLFHWLPKEHMCVLVYLVTVMHSMQAGYLEKAQKYTDKALMQLEKLKSKSVLDCSPILSSFQVILLEHIIMCRLVTGHKATALQEISQVC

SEQ ID NO: 8380 - protein, 183 aa, Homo Sapiens
KIRLCVHCLQAVFPFKPPQRIEARTHLQLGSVLYHHTKNSEQARSHLEKANSVDAAKPLLRKAIQISQQTPYWHCRLLFQLAQLHTLEKDLVSACDLLGVGAEYARVVGSEYTRALFLLSKGMLLLMERKLQEVHPLLTLCGQIVENWQGNPIQKESLRVFFLVLQVTHYLDAGQVKSVKPCL

SEQ ID NO: 8381 - protein, 613 aa, Homo Sapiens
MAAQAAAAAQAAAAQAAQAEAADSWYLALLGFAEHFRTSSPPKIRLCVHCLQAVFPFKPPQRIEARTHLQLGSVLYHHTKNSEQARSHLEKAWLISQQIPQFEDVKFEAASLLSELYCQENSVDAAKPLLRKAIQISQQTPYWHCRLLFQLAQLHTLEKDLVSACDLLGVGAEYARVVGSEYTRALFLLSKGMLLLMERKLQEVHPLLTLCGQIVENWQGNPIQKESLRVFFLVLQVTHYLDAGQVKSVKPCLKQLQQCIQTISTLHDDEILPSNPADLFHWLPKEHMCVLVYLVTVMHSMQAGYLEKAQKYTDKALMQLEKLKMLDCSPILSSFQVILLEHIIMCRLVTGHKATALQEISQVCQLCQQSPRLFSNHAAQLHTLLGLYCVSVNCMDNAEAQFTTALRLTNHQELWAFIVTNLASVYIREGNRHQEVLYSLLERINPDHSFPVSSHCLRAAAFYVRGLFSFFQGRYNEAKRFLRETLKMSNAEDLNRLTACSLVLLGHIFYVLGNHRESNNMVVPAMQLASKIPDMSVQLWSSALLRDLNKACGNAMDAHEAAQMHQNFSQQLLQDHIEACSLPEHNLITWTDGPPPVQFQAQNGPNTSLASLL

SEQ ID NO: 8382 - protein, 202 aa, Homo Sapiens
AGAGGGAAAVAAGGVVTTTASGKRIRKNHACEMCGKAFRDVYHLNRHKLSHSDEKPYQCPVCQQRFKRKDRMSYHVRSHDGAVHKPYNCSHCGKSFSRPDHLNSHVRQVHSTERPFKCEKCEAAFATKDRLRAHTVRHEEKVPCHVCGKMLSSAYISDHMKVHSQGPHHVCELCNKGTCRGLPGGPGAEGGRLARRLATDTG

SEQ ID NO: 8383 - protein, 454 aa, Homo Sapiens
MDPSNWSSFIFQGHAQNPLQVGAELQSRFFASQGCAQSPFQAAPAPPPTPQAPAAEPLQVDLLPVLAAAQESAAAAAAAAAAAAAVAAAPPAPAAASTVDTAALKQPPAPPPPPPPVSAPAAEAAPPASAATIAAAAATAVVAPTSTVAVAPVASALEKKTKSKGPYICALCAKEFKNGYNLRRHEAIHTGAKAGRVPSGAMKMPTMVPLSLLSVPQLSGAGGGGGEAGAGGGAAAVAAGGVVTTTASGKRIRKNHACEMCGKAFRDVYHLNRHKLSHSDEKPYQCPVCQQRFKRKDRMSYHVRSHDGAVHKPYNCSHCGKSFSRPDHLNSHVRQVHSTERPFKCEKCEAAFATKDRLRAHTVRHEEKVPCHVCGKMLSSAYISDHMKVHSQGPHHVCELCNKGTGEVCPMAAAAAAAAAAAAAAVAAPPTAVGSLSGAEGVPVSSQPLPSQPW

SEQ ID NO: 8384 - protein, 184 aa, Homo Sapiens
MFPVFPCTLLAPPFPVLGLDSRGVGGLMNSFPPPQGHAQNPLQVGAELQSRFFASQGCAQSPFQAAPAPPPTPQAPAAEPLQVDLLPVLAAAQDGGSGSSGSSSSPSHSCGLPLGGGGGACELSATSLPTLVSSKLVAGERGEWSRVPWYKLLSPLFSHQLLFPYQPRSLQKERRKKCFLRGIR

SEQ ID NO: 8385 - protein, 186 aa, Homo Sapiens
MFPVFPCTLLAPPFPVLGLDSRGVGGLMNSFPPPQGHAQNPLQVGAELQSRFFASQGCAQSPFQAAPAPPPTPQAPAAEPLQVDLLPVLAAAQDGSGGSGSSGSSSSPSHSCGLPLGGGGGACELSATSLPTLVSSKLVAGERGEWSRVPWYKLLSPLFSHQLLFPYQPRSLQKERRKKCFLRGIR

SEQ ID NO: 8386 - protein, 493 aa, Homo Sapiens
MFPVFPCTLLAPPFPVLGLDSRGVGGLMNSFPPPQGHAQNPLQVGAELQSRFFASQGCAQSPFQAAPAPPPTPQAPAAEPLQVDLLPVLAAAQESAAAAAAAAAAAAAVAAAPPAPAAASTVDTAALKQPPAPPPPPPPVSAPAAEAAPPASAATIAAAAATAVVAPTSTVAVAPVASALEKKTKSKGPYICALCAKEFKNGYNLRRHEAIHTGAKAGRVPSGAMKMPTMVPLSLLSVPQLSGAGGGGGEAGAGGGAAAVAAGGVVTTTASGKRIRKNHACEMCGKAFRDVYHLNRHKLSHSDEKPYQCPVCQQRFKRKDRMSYHVRSHDGAVHKPYNCSHCGKSFSRPDHLNSHVRQVHSTERPFKCEKCEAAFATKDRLRAHTVRHEEKVPCHVCGKMLSSAYISDHMKVHSQGPHHVCELCNKGFTTAAYLRIHAVKDHGLQAPRADRILCKLCSVHCKTPAQLAGHMQTHLGGAAPPVPGDAPQPQPTC

SEQ ID NO: 8387 - protein, 477 aa, Homo Sapiens
MFPVFPCTLLAPPFPVLGLDSRGVGGLMNSFPPPQGHAQNPLQVGAELQSRFFASQGCAQSPFQAAPAPPPTPQAPAAEPLQVDLLPVLAAAQESAAAAAAAAAAAAAVAAAPPAPAAASTVDTAALKQPPAPPPPPPPVSAPAAEAAPPASAATIAAAAATAVVAPTSTVAVAPVASALEKKTKSKGPYICALCAKEFKNGYNLRRHEAIHTGAKAGRVPSGAMKMPTMVPLSLLSVPQLSGAGGGGGEAGAGGGAAAVAAGGVVTTTASGKRIRKNHACEMCGKAFRDVYHLNRHKLSHSDEKPYQCPVCQQRFKRKDRMSYHVRSHDGAVHKPYNCSHCGKSFSRPDHLNSHVRQVHSTERPFKCEKCEAAFATKDRLRAHTVRHEEKVPCHVCGKMLSSAYISDHMKVHSQGPHHVCELCNKGTGEVCPMAAAAAAAAAAAAAAVAAPPTAVGSLSGAEGVPVSSQPLPSQPW

SEQ ID NO: 8388 - protein, 84 aa, Homo Sapiens
MFPVFPCTLLAPPFPVLGLDSRGVGGLMNSFPPPQGHAQNPLQVGAELQSRFFASQGCAQSPFQAGSPQQSRQTSALNRTALQM

SEQ ID NO: 8389 - protein, 172 aa, Homo Sapiens
MFPVFPCTLLAPPFPVLGLDSRGVGGLMNSFPPPQGHAQNPLQVGAELQSRFFASQGCAQSPFQKCEAAFATKDRLRAHTVRHEEKVPCHVCGKMLSSAYISDHMKVHSQGPHHVCELCNKGTGEVCPMAAAAAAAAAAAAAAVAAPPTAVGSLSGAEGVPVSSQPLPSQPW

SEQ ID NO: 8390 - protein, 252 aa, Homo Sapiens [sequence omitted]

SEQ ID NO: 8391 - protein, 79 aa, Homo Sapiens
MLSSAYISDHMKVHSQGPHHVCELCNKGFTTAAYLRIHAVKDHGLQAPRADRILCKLCSVHCKTPAQLAGHMQTHLGGA

SEQ ID NO: 8392 - protein, 94 aa, Homo Sapiens
MLSSAYISDHMKVHSQGPHHVCELCNKGFTTAAYLRIHAVKDHGLQAPRADRILCKLCSVHCKTPAQLAGHMQTHLGGAAPPVPGDAPQPQPTC

SEQ ID NO: 8393 - protein, 53 aa, Homo Sapiens
MLSSAYISDHMKVHSQGPHHVCELCNKGTCRGLPGGPGAEGGRLARRLATDTG

SEQ ID NO: 8394 - protein, 78 aa, Homo Sapiens
MLSSAYISDHMKVHSQGPHHVCELCNKGTGEVCPMAAAAAAAAAAAAAAVAAPPTAVGSLSGAEGVPVSSQPLPSQPW

SEQ ID NO: 8395 - protein, 152 aa, Homo Sapiens
SFSRCARGLGRPLGRGEGGTRRRPDHLNSHVRQVHSTERPFKCEKCEAAFATKDRLRAHTVRHEEKVPCHVCGKMLSSAYISDHMKVHSQGPHHVCELCNKGTGEVCPMAAAAAAAAAAAAAAVAAPPTAVGSLSGAEGVPVSSQPLPSQPW

SEQ ID NO: 8396 - protein, 196 aa, Homo Sapiens
  misc_feature (1)..(1): Xaa can be any naturally occurring amino acid
XGAVHKPYNCSHCGKSFSRPDHLNSHVRQVHSTERPFKCEKCEAAFATKDRLRAHTVRHEEKVPCHVCGKMLSSAYISDHMKVHSQGPHHVCELCNKGTGEVCPMAAAAAAAAAAAAAAVAAPPTAVGSLSGAEGVPVSSQPLPSQPCSSPGLVFSSLFPTTEEVVALAMSSCSCVPCMYPTLHPFLLRGPHYNKF

SEQ ID NO: 8397 - protein, 177 aa, Homo Sapiens [sequence omitted]

SEQ ID NO: 8398 - protein, 504 aa, Homo Sapiens
GMGAGPACPLPPLAGGEAFPFPSPEQGLALSGAGFPGMLGALPLPLSLGQPPPSPLLNHSLFGVLTGGGGQPPPEPLLPPPGGPGPPLAPGEPEGPSLLVASLLPPPPSDLLPPPSAPPSNLLASFLPLLALGPTAGDGEGSAEGAGGPSGEPFSGLGDLSPLLFPPLSAPPTLIALNSALLAATLDPPSGTPPQPCVLSAPQPGPPTSSVTTATTDPGASSLGKAPSNSGRPPQLLSPLLGASLLGDLSSLTSSPGALPSLLQPPGPLLSGQLGLQLLPGGGAPPPLSEASSPLACLLQSLQIPPEQPEAPCLPPESPASALEPEPARPPLSALAPPHGSPDPPVPELLTGRGSGKRGRRGGGGLRGINGEARPARGRKPGSRREPGRLALKWGTRGGFNGQMERSPRRTHHWQHNGELAEGGAEPKDPPPPGPHSEDLKVPPGVVRKSRRGRRRKYNPTRNSNSSRQDITLEPSPTARAAVPLPPRARPGRPAKNKRRKLAP

SEQ ID NO: 8399 - protein, 47 aa, Homo Sapiens
MNGGNESSGADRAGGPVATSVPIGWQRCVREGAVLYIRRICNLSTVL

SEQ ID NO: 8400 - protein, 45 aa, Homo Sapiens
MNGGNESSGADRAGGPVATSVPIGWQRCVREGAVLYISPSGTELS

SEQ ID NO: 8401 - protein, 53 aa, Homo Sapiens
MNGGNESSGADRAGGPVATSVPIGWQRCVREGAVLYISPSGTELSSLEQTRSY

SEQ ID NO: 8402 - protein, 53 aa, Homo Sapiens; identical to SEQ ID NO: 8401

SEQ ID NO: 8403 - protein, 73 aa, Homo Sapiens
MNGGNESSGADRAGGPVATSVPIGWQRCVREGAVLYISPSGTELSSLEQTRSYLLSDGTCKCGLECPLNVPKV

SEQ ID NO: 8404 - protein, 148 aa, Homo Sapiens
MNGGNESSGADRAGGPVATSVPIGWQRCVREGAVLYISPSGTELSSLEQTRSYLLSDGTCKCGLECPLNVPKVFNFDPLAPVTPGGAGVGPASEEDMTKLCNHRRKAVAMATLYRSMETTCSHSSPGEGASPQMFHTVSPGPPSARPP

SEQ ID NO: 8405 - protein, 1003 aa, Homo Sapiens
MNGGNESSGADRAGGPVATSVPIGWQRCVREGAVLYISPSGTELSSLEQTRSYLLSDGTCKCGLECPLNVPKVFNFDPLAPVTPGGAGVGPASEEDMTKLCNHRRKAVAMATLYRSMETTCSHSSPGEGASPQMFHTVSPGPPSARPPCRVPPTTPLNGGPGSLPPEPPSVSQAFPTLAGPGGLFPPRLADPVPSGGSSSPRFLPRGNAPSPAPPPPPAISLNAPSYNWGAALRSSLVPSDLGSPPAPHASSSPPSDPPLFHCSDALTPPPLPPSNNLPAHPGPASQPPVSSATMHLPLVLGPLGGAPTVEGPGAPPFLASSLLSAAAKAQHPPLPPPSTLQGRRPRAQAPSASHSSSLRPSQRRPRRPPTVFRLLEGRGPQTPRRSRPRAPAPVPQPFSLPEPSQPILPSVLSLLGLPTPGPSHSDGSFNLLGSDAHLPPPPTLSSGSPPQPRHPIQPSLPGTTSGSLSSVPGAPAPPAASKAPVVPSPVLQSPSEGLGMGAGPACPLPPLAGGEAFPFPSPEQGLALSGAGFPGMLGALPLPLSLGQPPPSPLLNHSLFGVLTGGGGQPPPEPLLPPPGGPGPPLAPGEPEGPSLLVASLLPPPPSDLLPPPSAPPSNLLASFLPLLALGPTAGDGEGSAEGAGGPSGEPFSGLGDLSPLLFPPLSAPPTLIALNSALLAATLDPPSGTPPQPCVLSAPQPGPPTSSVTTATTDPGASSLGKAPSNSGRPPQLLSPLLGASLLGDLSSLTSSPGALPSLLQPPGPLLSGQLGLQLLPGGGAPPPLSEASSPLACLLQSLQIPPEQPEAPCLPPESPASALEPEPARPPLSALAPPHGSPDPPVPELLTGRGSGKRGRRGGGGLRGINGEARPARGRKPGSRREPGRLALKWGTRGGFNGQMERSPRRTHHWQHNGELAEGGAEPKDPPPPGPHSEDLKVPPGVVRKSRRGRRRKYNPTRNSNSSRQDITLEPSPTARAAVPLPPRARPGRPAKNKRRKLAP

SEQ ID NO: 8406 - protein, 66 aa, Homo Sapiens
MTKLCNHRRKAVAMATLYRSMETTCSHSSPGEGASPQMFHTVSPGPPSARPPCRVPPTTPLNGGPG

SEQ ID NO: 8407 - protein, 27 aa, Homo Sapiens
  misc_feature (1)..(1): Xaa can be any naturally occurring amino acid
XARAAVPLPPRARPGRPAKNKRRKLAP

SEQ ID NO: 8408 - protein, 190 aa, Homo Sapiens
  misc_feature (1)..(1): Xaa can be any naturally occurring amino acid
XLLSGQLGLQLLPGGGAPPPLSEASSPLACLLQSLQQIPPEQPEAPCLPPESPASALEPEPARPPLSALAPPHGSPDPPVPELLTGRGSGKRGRRGGGGLRGINGEARPARGRKPGSRREPGRLALKWGTRGGFNGQMERSPRRTHHWQHNGELAEGGAEPKDPPPPGPHSEDLKVPPGVVRKSRRGRRR

SEQ ID NO: 8409 - protein, 248 aa, Homo Sapiens
MSLFPSLPLLLLSMVAASYSETVTCEDAQKTCPAVIACSSPGINGFPGKDGRDGTKGEKGEPGQGLRGLQGPPGKLGPPGNPGPSGSPGPKGQKGDPGKSPDGDSSLAASERKALQTEMARIKKWLTFSLGKQVGNKFFLTNGEIMTFEKVKALCVKFQASVATPRNAAENGAIQNLIKEEAFLGITDEKTEGQFVDLTGNRLTYTNWNEGEPNNAGSDEDCVLLLKNGQWNDVPCSTSHLAVCEFPI

SEQ ID NO: 8410 - protein, 90 aa, Homo Sapiens
MAMLAQQMQLANAMMPGAPLQPVPMFSVAPSLATNASAAAFNPYLGPVSPSLVPAEILPTAPMLVTGNPGVPVPAAAAAAAQKLMRTDRL

SEQ ID NO: 8411 - protein, 155 aa, Homo Sapiens
MAMLAQQMQLANAMMPGAPLQPVPMFSVAPSLATNASAAAFNPYLGPVSPSLVPAEILPTAPMLVTGNPGVPVPAAAAAAAQKLMRTDRLEVCREYQRGNCNRGENDCRFAHPADSTMIDTNDNTVTVCMDYIKGRCSREKCKYFHPPAHLQAKI

SEQ ID NO: 8412 - protein, 388 aa, Homo Sapiens
MAVSVTPIRDTKWLTLEVCREFQRGTCSRPDTECKFAHPSKSCQVENGRVIACFDSLKGRCSRENCKYLHPPPHLKTQLEINGRNNLIQQKNMAMLAQQMQLANAMMPGAPLQPVPMFSVAPSLATNASAAAFNPYLGPVSPSLVPAEILPTAPMLVTGNPGVPVPAAAAAAAQKLMRTDRLEVCREYQRGNCNRGENDCRFAHPADSTMIDTNDNTVTVCMDYIKGRCSREKCKYFHPPAHLQAKIKAAQYQVNQAAAAQAAATAAAMTQSAVKSLKRPLEATFDLGIPQAVLPPLPKRPALEKTNGATAVFNTGIFQYQQALANMQLQQHTAFLPPVPMVHGATPATVSAATTSATSVPFAATATANQIPIISAEHLTSHKYVTQM

SEQ ID NO: 8413 - protein, 400 aa, Homo Sapiens
MAVSVTPIRDTKWLTLEVCREFQRGTCSRPDTECKFAHPSKSCQVENGRVIACFDSLKGRCSRENCKYLHPPPHLKTQLEINGRNNLIQQKNMAMLAQQMQLANAMMPGAPLQPVPMFSVAPSLATNASAAAFNPYLGPVSPSLVPAEILPTAPMLVTGNPGVPVPAAAAAAAQKLMRTDRLEVCREYQRGNCNRGENDCRFAHPADSTMIDTNDNTVTVCMDYIKGRCSREKCKYFHPPAHLQAKIKAAQYQVNQAAAAQAAATAAAMTQSAVKSLKRPLEATFDLGIPQAVLPPLPKRPALEKTNGATAVFNTGIFQYQQALANMQLQQHTAFLPPGSILCMTPATSVVPMVHGATPATVSAATTSATSVPFAATATANQIPIISAEHLTSHKYVTQM

SEQ ID NO: 8414 - protein, 370 aa, Homo Sapiens
MAVSVTPIRDTKWLTLEVCREFQRGTCSRPDTECKFAHPSKSCQVENGRVIACFDSLKGRCSRENCKYLHPPPHLKTQLEINGRNNLIQQKNMAMLAQQMQLANAMMPGAPLQPVPMFSVAPSLATNASAAAFNPYLGPVSPSLVPAEILPTAPMLVTGNPGVPVPAAAAAAAQKLMRTDRLEVCREYQRGNCNRGENDCRFAHPADSTMIDTNDNTVTVCMDYIKGRCSREKCKYFHPPAHLQAKIKAAQYQVNQAAAAQAAATAAAMGIPQAVLPPLPKRPALEKTNGATAVFNTGIFQYQQALANMQLQQHTAFLPPVPMVHGATPATVSAATTSATSVPFAATATANQIPIISAEHLTSHKYVTQM

SEQ ID NO: 8415 - protein, 382 aa, Homo Sapiens
MAVSVTPIRDTKWLTLEVCREFQRGTCSRPDTECKFAHPSKSCQVENGRVIACFDSLKGRCSRENCKYLHPPPHLKTQLEINGRNNLIQQKNMAMLAQQMQLANAMMPGAPLQPVPMFSVAPSLATNASAAAFNPYLGPVSPSLVPAEILPTAPMLVTGNPGVPVPAAAAAAAQKLMRTDRLEVCREYQRGNCNRGENDCRFAHPADSTMIDTNDNTVTVCMDYIKGRCSREKCKYFHPPAHLQAKIKAAQYQVNQAAAAQAAATAAAMGIPQAVLPPLPKRPALEKTNGATAVFNTGIFQYQQALANMQLQQHTAFLPPGSILCMTPATSVVPMVHGATPATVSAATTSATSVPFAATATANQIPIISAEHLTSHKYVTQM

SEQ ID NO: 8416 - protein, 340 aa, Homo Sapiens
MAVSVTPIRDTKWLTLEVCREFQRGTCSRPDTECKFAHPSKSCQVENGRVIACFDSLKGRCSRENCKYLHPPPHLKTQLEINGRNNLIQQKNMAMLAQQMQLANAMMPGAPLQPVPMFSVAPSLATNASAAAFNPYLGPVSPSLVPAEILPTAPMLVTGNPGVPVPAAAAAAAQKLMRTDRLEVCREYQRGNCNRGENDCRFAHPADSTMIDTNDNTVTVCMDYIKGRCSREKCKYFHPPAHLQAKIKAAQYQVNQAAAAQAAATAAAMFPWCTVLRQPLCPQQQHLPQVFPSLQQPQPTSPILDASTLLGATSCPAAAGKMIPIISAEHLTSHKYVTQM

SEQ ID NO: 8417 - protein, 342 aa, Homo Sapiens
MAVSVTPIRDTKWLTLEVCREFQRGTCSRPDTECKFAHPSKSCQVENGRVIACFDSLKGRCSRENCKYLHPPPHLKTQLEINGRNNLIQQKNMAMLAQQMQLANAMMPGAPLQPVPMFSVAPSLATNASAAAFNPYLGPVSPSLVPAEILPTAPMLVTGNPGVPVPAAAAAAAQKLMRTDRLEVCREYQRGNCNRGENDCRFAHPADSTMIDTNDNTVTVCMDYIKGRCSREKCKYFHPPAHLQAKIKAAQYQVNQAAAAQAAATAAAMGIPQAVLPPLPKRPALEKTNGATAVFNTGIFQYQQALANMQLQQHTAFLPPGSILCMTPATSVDTHNICRTSD

SEQ ID NO: 8418 - protein, 340 aa, Homo Sapiens; identical to SEQ ID NO: 8416

SEQ ID NO: 8419 - protein, 342 aa, Homo Sapiens; identical to SEQ ID NO: 8417

SEQ ID NO: 8420 - protein, 388 aa, Homo Sapiens; identical to SEQ ID NO: 8412

SEQ ID NO: 8421 - protein, 348 aa, Homo Sapiens
MAVSVTPIRDTKWLTLEVCREFQRGTCSRPDTECKFAHPSKSCQVENGRVIACFDSLKGRCSRENCKYLHPPPHLKTQLEINGRNNLIQQKNMAMLAQQMQLANAMMPGAPLQPVPMFSVAPSLATNASAAAFNPYLGPVSPSLVPAEILPTAPMLVTGNPGVPVPAAAAAAAQKLMRTDRLEVCREYQRGNCNRGENDCRFAHPADSTMIDTNDNTVTVCMDYIKGRCSREKCKYFHPPAHLQAKIKAAQYQVNQAAAAQAAATAAAMTQSAVKSLKRPLEATFDLGIPQAVLPPLPKRPALEKTNGATAVFNTGIFQYQQALANMQLQQHTAFLPPDTHNICRTSD

SEQ ID NO: 8422 - protein, 314 aa, Homo Sapiens
MAVSVTPIRDTKWLTLEVCREFQRGTCSRPDTECKFAHPSKSCQVENGRVIACFDSLKGRCSRENCKYLHPPPHLKTQLEINGRNNLIQQKNMAMLAQQMQLANAMMPGAPLQPVVCREYQRGNCNRGENDCRFAHPADSTMIDTNDNTVTVCMDYIKGRCSREKCKYFHPPAHLQAKIKAAQYQVNQAAAAQAAATAAAMGIPQAVLPPLPKRPALEKTNGATAVFNTGIFQYQQALANMQLQQHTAFLPPGSILCMTPATSVVPMVHGATPATVSAATTSATSVPFAATATANQIPIISAEHLTSHKYVTQM

SEQ ID NO: 8423 - protein, 314 aa, Homo Sapiens; identical to SEQ ID NO: 8422

SEQ ID NO: 8424 - protein, 302 aa, Homo Sapiens
MAVSVTPIRDTKWLTLEVCREFQRGTCSRPDTECKFAHPSKSCQVENGRVIACFDSLKGRCSRENCKYLHPPPHLKTQLEINGRNNLIQQKNMAMLAQQMQLANAMMPGAPLQPVVCREYQRGNCNRGENDCRFAHPADSTMIDTNDNTVTVCMDYIKGRCSREKCKYFHPPAHLQAKIKAAQYQVNQAAAAQAAATAAAMGIPQAVLPPLPKRPALEKTNGATAVFNTGIFQYQQALANMQLQQHTAFLPPVPMVHGATPATVSAATTSATSVPFAATATANQIPIISAEHLTSHKYVTQM

SEQ ID NO: 8425 - protein, 343 aa, Homo Sapiens
MGRCSRENCKYLHPPPHLKTQLEINGRNNLIQQKNMAMLAQQMQLANAMMPGAPLQPVPMFSVAPSLATNASAAAFNPYLGPVSPSLVPAEILPTAPMLVTGNPGVPVPAAAAAAAQKLMRTDRLEVCREYQRGNCNRGENDCRFAHPADSTMIDTNDNTVTVCMDYIKGRCSREKCKYFHPPAHLQAKIKAAQYQVNQAAAAQAAATAAAMTQSAVKSLKRPLEATFDLGIPQAVLPPLPKRPALEKTNGATAVFNTGIFQYQQALANMQLQQHTAFLPPGSILCMTPATSVVPMVHGATPATVSAATTSATSVPFAATATANQIPIISAEHLTSHKYVTQM

SEQ ID NO: 8426 - protein, 58 aa, Homo Sapiens
MLGRCSRENCKYLHPPPHLKTQLEINGRNNLIQQKNMAMLAQQMQLANAMMPGAPLQP

SEQ ID NO: 8427 - protein, 210 aa, Homo Sapiens
QQMQLANAMMPGAPLQPVPMFSVAPSLATNASAAAFNPYLGPVSPSLVPAEILPTAPMLVTGNPGVPVPAAAAAAAQKLMRTDRLEVCREYQRGNCNRGENDCRFAHPADSTMIDTNDNTVTVCMDYIKGRCSREKCKYFHPPAHLQAKIKAAQYQVNQAAAAQAAATAAAMALANMQLQQHTAFLPPGSILCMTPATSVDTHNICRTSD

SEQ ID NO: 8428 - protein, 329 aa, Homo Sapiens
  misc_feature (1)..(1): Xaa can be any naturally occurring amino acid
XVSVTPIRDTKWLTLEVCREFQRGTCSRPDTECKFAHPSKSCQVENGRVIACFDSLKGRCSRENCKYLHPPPHLKTQLEINGRNNLIQQKNMAMLAQQMQLANAMMPGAPLQPVPMFSVAPSLATNASAAAFNPYLGPVSPSLVPAEILPTAPMLVTGNPGVPVPAAAAAAAQKLMRTDRLEVCREYQRGNCNRGENDCRFAHPADSTMIDTNDNTVTVCMDYIKGRCSREKCKYFHPPAHLQAKIKAAQYQVNQAAAAQAAATAAAMGIPQAVLPPLPKRPALEKTNGATAVFNTGIFQYQQALANMQLQQHTAFLPPDTHNICRTSD

SEQ ID NO: 8429 - protein, 56 aa, Homo Sapiens
MAAASAVSVLLVAAERNRWHRLPSLLLPPRLSIQDAVFSQKTWNLLNFVSKKELFL

SEQ ID NO: 8430 - protein, 598 aa, Homo Sapiens
MAAASAVSVLLVAAERNRWHRLPSLLLPPRTWVWRQRTMKYTTATDEAYSIGPAPSQQSYLSMEKIIQVAKTSAAQAIHPGCGFLSENMEFAELCKQEGIIFIGPPPSAIRDMGIKSTSKSIMAAAGVPVVEGYHGEDQSDQCLKEHARRIGYPVMIKAVRGGGGKGMRIVRSEQEFQEQLESARREAKKSFNDDAMLIEKFVDTPRHVEVQVFGDHHGNAVYLFERDCSVQRRHQKIIEEAPAPGIKSEVRKKLGEAAVRAAKAVNYVGAGTVEFIMDSKHNFCFMEMNTRLQVEHPVTEMITGTDLVEWQLRIAAGEKIPLSQEEITLQGHAFEARIYAEDPSNNFMPVAGPLVHLSTPRADPSTRIETGVRQGDEVSVHYDPMIAKLVVWAADRQAALTKLRYSLRQYNIVGLHTNIDFLLNLSGHPEFEAGNVHTDFIPQHHKQLLLSRKAAAKESLCQAALGLILKEKAMTDTFTLQAHDQFSPFSSSSGRRLNISYTRNMTLKDGKNNVAIAVTYNHDGSYSMQIEDKTFQVLGNLYSEGDCTYLKCSVNGVASKAKLIILENTIYLFSKEGSIEIDIPVPKYLSSVSSQET

SEQ ID NO: 8431 - protein, 47 aa, Homo Sapiens
MAAASAVSVLLVAAERNRWHRLPSLLLPPRTWVWRQRTMKYTTATGR

SEQ ID NO: 8432 - protein, 47 aa, Homo Sapiens; identical to SEQ ID NO: 8431

SEQ ID NO: 8433 - protein, 725 aa, Homo Sapiens
MAAASAVSVLLVAAERNRWHRLPSLLLPPRTWVWRQRTMKYTTATGRNITKVLIANRGEIACRVMRTAKKLGVQTVAVYSEADRNSMHVDMADEAYSIGPAPSQQSYLSMEKIIQVAKTSAAQAIHPGCGFLSENMEFAELCKQEGIIFIGPPPSAIRDMGIKSTSKSIMAAAGVPVVEGYHGEDQSDQCLKEHARRIGYPVMIKAVRGGGGKGMRIVRSEQEFQEQLESARREAKKSFNDDAMLIEKFVDTPRHVEVQVFGDHHGNAVYLFERDCSVQRRHQKIIEEAPAPGIKSEVRKKLGEAAVRAAKAVNYVGAGTVEFIMDSKHNFCFMEMNTRLQVEHPVTEMITGTDLVEWQLRIAAGEKIPLSQEEITLQGHAFEARIYAEDPSNNFMPVAGPLVHLSTPRADPSTRIETGVRQGDEVSVHYDPMIAKLVVWAADRQAALTKLRYSLRQYNIVGLHTNIDFLLNLSGHPEFEAGNVHTDFIPQHHKQLLLSRKAAAKESLCQAALGLILKEKAMTDTFTLQAHDQFSPFSSSSGRRLNISYTRNMTLKDGKNNVAIAVTYNHDGSYSMQIEDKTFQVLGNLYSEGDCTYLKCSVNGVASKAKLIILENTIYLFSKEGSIEIDIPVPKYLSSVSSQETQGGPLAPMTGTIEKVFVKAGDKVKAGDSLMVMIAMKMEHTIKSPKDGTVKKVFYREGAQANRHTPLVEFEEEESDKRESE

SEQ ID NO: 8434 - protein, 112 aa, Homo Sapiens
MAAASAVSVLLVAAERNRWHRLPSLLLPPRTWVWRQRTMKYTTATGRNITKVLIANRGEIACRVMRTAKKLGVQTVAVYSEADRNSMHVDMQDDLDFTEKIKLRFLPQNLLT

SEQ ID NO: 8435 - protein, 61 aa, Homo Sapiens
MAAASAVSVLLVAAERNRWHRLPSLLLPPRTWVWRQRTMKYTTATGYPSRMRFSLRKHGIC

SEQ ID NO: 8436 - protein, 61 aa, Homo Sapiens; identical to SEQ ID NO: 8435

SEQ ID NO: 8437 - protein, 616 aa, Homo Sapiens
MEKIIQVAKTSAAQAIHPGCGFLSENMEFAELCKQEGIIFIGPPPSAIRDMGIKSTSKSIMAAAGVPVVEGYHGEDQSDQCLKEHARRIGYPVMIKAVRGGGGKGMRIVRSEQEFQEQLESARREAKKSFNDDAMLIEKFVDTPRHVEVQVFGDHHGNAVYLFERDCSVQRRHQKIIEEAPAPGIKSEVRKKLGEAAVRAAKAVNYVGAGTVEFIMDSKHNFCFMEMNTRLQVEHPVTEMITGTDLVEWQLRIAAGEKIPLSQEEITLQGHAFEARIYAEDPSNNFMPVAGPLVHLSTPRADPSTRIETGVRQGDEVSVHYDPMIAKLVVWAADRQAALTKLRYSLRQYNIVGLHTNIDFLLNLSGHPEFEAGNVHTDFIPQHHKQLLLSRKAAAKESLCQAALGLILKEKAMTDTFTLQAHDQFSPFSSSSGRRLNISYTRNMTLKDGKNNVAIAVTYNHDGSYSMQIEDKTFQVLGNLYSEGDCTYLKCSVNGVASKAKLIILENTIYLFSKEGSIEIDIPVPKYLSSVSSQETQGGPLAPMTGTIEKVFVKAGDKVKAGDSLMVMIAMKMEHTIKSPKDGTVKKVFYREGAQANRHTPLVEFEEEESDKRESE

SEQ ID NO: 8438 - protein, 575 aa, Homo Sapiens
MEKIIQVAKTSAAQHIQSIMAAAGVPVVEGYHGEDQSDQCLKEHARRIGYPVMIKAVRGGGGKGMRIVRSEQEFQEQLESARREAKKSFNDDAMLIEKFVDTPRHVEVQVFGDHHGNAVYLFERDCSVQRRHQKIIEEAPAPGIKSEVRKKLGEAAVRAAKAVNYVGAGTVEFIMDSKHNFCFMEMNTRLQVEHPVTEMITGTDLVEWQLRIAAGEKIPLSQEEITLQGHAFEARIYAEDPSNNFMPVAGPLVHLSTPRADPSTRIETGVRQGDEVSVHYDPMIAKLVVWAADRQAALTKLRYSLRQYNIVGLHTNIDFLLNLSGHPEFEAGNVHTDFIPQHHKQLLLSRKAAAKESLCQAALGLILKEKAMTDTFTLQAHDQFSPFSSSSGRRLNISYTRNMTLKDGKNNVAIAVTYNHDGSYSMQIEDKTFQVLGNLYSEGDCTYLKCSVNGVASKAKLIILENTIYLFSKEGSIEIDIPVPKYLSSVSSQETQGGPLAPMTGTIEKVFVKAGDKVKAGDSLMVMIAMKMEHTIKSPKDGTVKKVFYREGAQANRHTPLVEFEEEESDKRESE

SEQ ID NO: 8439 - protein, 434 aa, Homo Sapiens
MKYTTATGRNITKVLIANRGEIACRVMRTAKKLGVQTVAVYSEADRNSMHVDMADEAYSIGPAPSQQSYLSMEKIIQVAKTSAAQAIHPGCGFLSENMEFAELCKQEGIIFIGPPPSAIRDMGIKSTSKSIMAAAGVPVVEGYHGEDQSDQCLKEHARRIGYPVMIKAVRGGGGKGMRIVRSEQEFQEQLESARREAKKSFNDDAMLIEKFVDTPRHVEVQVFGDHHGNAVYLFERDCSVQRRHQKIIEEAPAPGIKSEVRKKLGEAAVRAAKAVNYVGAGTVEFIMDSKHNFCFMEMNTRLQVEHPVTEMITGTDLVEWQLRIAAGEKIPLSQEEITLQGHAFEARIYAEDPSNNFMPVAGPLVHLSTPRADPSTRIETGVRQGDEVSVHYDPMIAKLVVWAADRQAALTKLRYSLRQYNINSLHFRLAVEED

SEQ ID NO: 8440 - protein, 434 aa, Homo Sapiens; identical to SEQ ID NO: 8439

SEQ ID NO: 8441 - protein, 119 aa, Homo Sapiens
MVLPLPWLSRYHFLRLLLPSWSLAPQGSHGCCSQNPKASMEEQTSSRGNGKMTSPPRGPGTHRTAELARAEELLEQQLELYQALLEGQEGAWEAQALVLKIQKLKEQMRRHQESLGGGA

SEQ ID NO: 8442 - protein, 78 aa, Homo Sapiens
LGRLNHVAIAVPDLEKAAAFYKNILGAQVDNINAAVMDLKKKKIRSLSEEVKIGAHGKPVIFLHPKDCGGVLVELEQA

SEQ ID NO: 8443 - protein, 176 aa, Homo Sapiens
MARVLKAAAANAVGLFSRLQAPIPTVRASSTSQPLDQVTGSVWNLGRLNHVAIAVPDLEKAAAFYKNILGAQVSEAVPLPEHGVSVVFVNLGNTKMELLHPLGRDSPIAGFLQKNKAGGMHHICIEVDNINAAVMDLKKKKIRSLSEEVKIGAHGKPVIFLHPKDCGGVLVELEQA

SEQ ID NO: 8444 - protein, 31 aa, Homo Sapiens
MELLHPLGRDSPIAGFLQKNKAGGMHHICIE

SEQ ID NO: 8445 - protein, 31 aa, Homo Sapiens; identical to SEQ ID NO: 8444

SEQ ID NO: 8446 - protein, 1067 aa, Homo Sapiens
MAEKGASRGTLRRLWSLPRRRRGTAGRSRPDEIMHQDIVPLCAADIQDQLKKRFAYLSGGRGQDGSPVITFPDYPAFSEIPDKEFQNVMTYLTSIPSLQDAGIGFILVIDRRRDKWTSVKASVLRIAASFPANLQLVLVLRPTGFFQRTLSDIAFKFNRDDFKMKVPVIMLSSVPDLHGYIDKSQLTEDLGGTLDYCHSRWLCQRTAIESFALMVKQTAQMLQSFGTELAETELPNDVQSTSSVLCAHTEKKDKAKEDLRLALKEGHSVLESLRELQAEGSEPSVNQDQLDNQATVQRLLAQLNETEAAFDEFWAKHQQKLEQCLQLRHFEQGFREVKAILDAASQKIATFTDIGNSLAHVEHLLRDLASFEEKSGVAVERARALSLDGEQLIGNKHYAVDSIRPKCQELRHLCDQFSAEIARRRGLLSKSLELHRRLETSMKWCDEGIYLLASQPVDKCQSQDGAEAALQEIEKFLETGAENKIQELNAIYKEYESILNQDLMEHVRKVFQKQASMEEVFHRRQASLKKLAARQTRPVQPVAPRPEALAKSPCPSPGIRRGSENSSSEGGALRRGPYRRAKSEMSESRQGRGSAGEEEESLAILRRHVMSELLDTERAYVEELLCVLEGYAAEMDNPLMAHLLSTGLHNKKDVLFGNMEEIYHFHNRIFLRELENYTDCPELVGRCFLERMEDFQIYEKYCQNKPRSESLWRQCSDCPFFQECQRKLDHKLSLDSYLLKPVQRITKYQLLLKEMLKYSRNCEGAEDLQEALSSILGILKAVNDSMHLIAITGYDGNLGDLGKLLMQGSFSVWTDHKRGHTKVKELARFKPMQRHLFLHEKAVLFCKKREENGEGYEKAPSYSYKQSLNMAAVGITENVKGDAKKFEIWYNAREEVYIVQAPTPEIKAAWVNEIRKVLTSQLQACREASQHRALEQSQSLPLPAPTSTSPSRGNSRNIKKLEERKTDPLSLEGYVSSAPLTKPPEKGKGWSKTSHSLEAPEDDGGWSSAEEQINSSDAEEDGGLGPKKLVPGKYTVVADHEKGGPDALRVRSGDVVELVQEGDEGLW

SEQ ID NO: 8447 - protein, 66 aa, Homo Sapiens
MFDCWRFILCKRPGSNSYSSPQRPNEAKKEETDHQIDVSDVIRLVQDTPEATAMATAPRRSQSPGL

SEQ ID NO: 8448 - protein, 1137 aa, Homo Sapiens
MFDCWRFILCKRPGSNSYSSPQRPNEAKKEETDHQIDVSDVIRLVQDTPEATAMATDEIMHQDIVPLCAADIQDQLKKRFAYLSGGRGQDGSPVITFPDYPAFSEIPDKEFQNVMTYLTSIPSLQDAGIGFILVIDRRRDKWTSVKASVLRIAASFPANLQLVLVLRPTGFFQRTLSDIAFKFNRDDFKMKVPVIMLSSVPDLHGYIDKSQLTEDLGGTLDYCHSRWLCQRTAIESFALMVKQTAQMLQSFGTELAETELPNDVQSTSSVLCAHTEKKDKAKEDLRLALKEGHSVLESLRELQAEGSEPSVNQDQLDNQATVQRLLAQLNETEAAFDEFWAKHQQKLEQCLQLRHFEQGFREVKAILDAASQKIATFTDIGNSLAHVEHLLRDLASFEEKSGVAVERARALSLDGEQLIGNKHYAVDSIRPKCQELRHLCDQFSAEIARRRGLLSKSLELHRRLETSMKWCDEGIYLLASQPVDKCQSQDGAEAALQEIEKFLETGAENKIQELNAIYKEYESILNQDLMEHVRKVFQKQASMEEVFHRRQASLKKLAARQTRPVQPVAPRPEALAKSPCPSPGIRRGSENSSSEGGALRRGPYRRAKSEMSESRQGRGSAGEEEESLAILRRHVMSELLDTERAYVEELLCVLEGYAAEMDNPLMAHLLSTGLHNKKDVLFGNMEEIYHFHNRIFLRELENYTDCPELVGRCFLERMEDFQIYEKYCQNKPRSESLWRQCSDCPFFQECQRKLDHKLSLDSYLLKPVQRITKYQLLLKEMLKYSRNCEGAEDLQEALSSILGILKAVNDSMHLIAITGYDGNLGDLGKLLMQGSFSVWTDHKRGHTKVKELARFKPMQRHLFLHEKAVLFCKKREENGEGYEKAPSYSYKQSLNMAAVGITENVKGDAKKFEIWYNAREEVYIVQAPTPEIKAAWVNEIRKVLTSQLQACREASQHRALEQSQSLPLPAPTSTSPSRGNSRNIKKLEERKTDPLSLEGYVSSAPLTKPPEKGKGWSKTSHSLEAPEDDGGWSSAEEQINSSDAEEDGGLGPKKLVPGKYTVVADHEKGGPDALRVRSGDVVELVQEGDEGLWYVRDPTTGKEGWVPASSLSVRLGPSGSAQCLSSSGKAHVPRAHP

SEQ ID NO: 8449 - protein, 64 aa, Homo Sapiens
MFDCWRFILCKRPGSNSYSSPQRPNEAKKEETDHQIDVSDVIRLVQDTPEATAMATEVSASRPQ

SEQ ID NO: 8450 - protein, 97 aa, Homo Sapiens
MGDGKAVRISVAEMKSYYLYSEWCSWLLSVAEDEIMHQDIVPLCAADIQDQLKKRFAYLSGGRGQDGSPVITFPDYPAFSEIPDKEFQNVMTYLTSI

SEQ ID NO: 8451 - protein, 136 aa, Homo Sapiens
MHQDIVPLCAADIQDQLKKRFAYLSGGRGQDGSPVITFPDYPAFSEIPDKEFQNVMTYLTSIPSLQDAGIGFILVIDRRRDKWTSVKASVLRIAASFPANLQLVLVLRPTGFFQRTLSDIAFKFNRDDFKMKVPVI

SEQ ID NO: 8452 - protein, 1096 aa, Homo Sapiens
MPLRGGAGPSPASHGPTHGPSDPRTCLPGRGAGGMRPHGRGALGCCGLCSFYTCHGAAGDEIMHQDIVPLCAADIQDQLKKRFAYLSGGRGQDGSPVITFPDYPAFSEIPDKEFQNVMTYLTSIPSLQDAGIGFILVIDRRRDKWTSVKASVLRIAASFPANLQLVLVLRPTGFFQRTLSDIAFKFNRDDFKMKVPVIMLSSVPDLHGYIDKSQLTEDLGGTLDYCHSRWLCQRTAIESFALMVKQTAQMLQSFGTELAETELPNDVQSTSSVLCAHTEKKDKAKEDLRLALKEGHSVLESLRELQAEGSEPSVNQDQLDNQATVQRLLAQLNETEAAFDEFWAKHQQKLEQCLQLRHFEQGFREVKAILDAASQKIATFTDIGNSLAHVEHLLRDLASFEEKSGVAVERARALSLDGEQLIGNKHYAVDSIRPKCQELRHLCDQFSAEIARRRGLLSKSLELHRRLETSMKWCDEGIYLLASQPVDKCQSQDGAEAALQEIEKFLETGAENKIQELNAIYKEYESILNQDLMEHVRKVFQKQASMEEVFHRRQASLKKLAARQTRPVQPVAPRPEALAKSPCPSPGIRRGSENSSSEGGALRRGPYRRAKSEMSESRQGRGSAGEEEESLAILRRHVMSELLDTERAYVEELLCVLEGYAAEMDNPLMAHLLSTGLHNKKDVLFGNMEEIYHFHNRIFLRELENYTDCPELVGRCFLERMEDFQIYEKYCQNKPRSESLWRQCSDCPFFQECQRKLDHKLSLDSYLLKPVQRITKYQLLLKEMLKYSRNCEGAEDLQEALSSILGILKAVNDSMHLIAITGYDGNLGDLGKLLMQGSFSVWTDHKRGHTKVKELARFKPMQRHLFLHEKAVLFCKKREENGEGYEKAPSYSYKQSLNMAAVGITENVKGDAKKFEIWYNAREEVYIVQAPTPEIKAAWVNEIRKVLTSQLQACREASQHRALEQSQSLPLPAPTSTSPSRGNSRNIKKLEERKTDPLSLEGYVSSAPLTKPPEKGKGWSKTSHSLEAPEDDGGWSSAEEQINSSDAEEDGGLGPKKLVPGKYTVVADHEKGGPDALRVRSGDVVELVQEGDEGLW

SEQ ID NO: 8453 - protein, 1125 aa, Homo Sapiens
MRFWLRTEEMALEEMVQRLNAVSKHTDEIMHQDIVPLCAADIQDQLKKRFAYLSGGRGQDGSPVITFPDYPAFSEIPDKEFQNVMTYLTSIPSLQDAGIGFILVIDRRRDKWTSVKASVLRIAASFPANLQLVLVLRPTGFFQRTLSDIAFKFNRDDFKMKVPVIMLSSVPDLHGYIDKSQLTEDLGGTLDYCHSRWLCQRTAIESFALMVKQTAQMLQSFGTELAETELPNDVQSTSSVLCAHTEKKDKAKEDLRLALKEGHSVLESLRELQAEGSEPSVNQDQLDNQATVQRLLAQLNETEAAFDEFWAKHQQKLEQCLQLRHFEQGFREVKAILDAASQKIATFTDIGNSLAHVEHLLRDLASFEEKSGVAVERARALSLDGEQLIGNKHYAVDSIRPKCQELRHLCDQFSAEIARRRGLLSKSLELHRRLETSMKWCDEGIYLLASQPVDKCQSQDGAEAALQEIEKFLETGAENKIQELNAIYKEYESILNQDLMEHVRKVFQKQASMEEVFHRRQASLKKLAARQTRPVQPVAPRPEALAKSPCPSPGIRRGSENSSSEGGALRRGPYRRAKSEMSESRQGRGSAGEEEESLAILRRHVMSELLDTERAYVEELLCVLEGYAAEMDNPLMAHLLSTGLHNKKDVLFGNMEEIYHFHNRIFLRELENYTDCPELVGRCFLERMEDFQIYEKYCQNKPRSESLWRQCSDCPFFQECQRKLDHKLSLDSYLLKPVQRITKYQLLLKEMLKYSRNCEGAEDLQEALSSILGILKAVNDSMHLIAITGYDGNLGDLGKLLMQGSFSVWTDHKRGHTKVKELARFKPMQRHLFLHEKAVLFCKKREENGEGYEKAPSYSYKQSLNMAAVGITENVKGDAKKFEIWYNAREEVYIVQAPTPEIKAAWVNEIRKVLTSQLQACREASQHRALEQSQSLPLPAPTSTSPSRGNSRNIKKLEERKTDPLSLEGYVSSAPLTKPPEKGKGWSKTSHSLEAPEDDGGWSSAEEQINSSDAEEDGGLGPKKLVPGKYTVVADHEKGGPDALRVRSGDVVELVQEGDEGLWYVRDPTTGKEGWVPASSLSVRLGPSGSAQCLSSSESSPGSAVLSNSSSCSEGGQAPFSDLQG

SEQ ID NO: 8454 - protein, 136 aa, Homo Sapiens
MTVRRLSLLCRDLWALWLLLKAGADEIMHQDIVPLCAADIQDQLKKRFAYLSGGRGQDGSPVITFPDYPAFSEIPDKEFQNVMTYLTSIPSGGQESSIRPVSCRLTWEGCRGGLSSDVLVPASRKMLRMSASHQTV

SEQ ID NO: 8455 - protein, 1123 aa, Homo Sapiens
MTVRRLSLLCRDLWALWLLLKAGADEIMHQDIVPLCAADIQDQLKKRFAYLSGGRGQDGSPVITFPDYPAFSEIPDKEFQNVMTYLTSIPSLQDAGIGFILVIDRRRDKWTSVKASVLRIAASFPANLQLVLVLRPTGFFQRTLSDIAFKFNRDDFKMKVPVIMLSSVPDLHGYIDKSQLTEDLGGTLDYCHSRWLCQRTAIESFALMVKQTAQMLQSFGTELAETELPNDVQSTSSVLCAHTEKKDKAKEDLRLALKEGHSVLESLRELQAEGSEPSVNQDQLDNQATVQRLLAQLNETEAAFDEFWAKHQQKLEQCLQLRHFEQGFREVKAILDAASQKIATFTDIGNSLAHVEHLLRDLASFEEKSGVAVERARALSLDGEQLIGNKHYAVDSIRPKCQELRHLCDQFSAEIARRRGLLSKSLELHRRLETSMKWCDEGIYLLASQPVDKCQSQDGAEAALQEIEKFLETGAENKIQELNAIYKEYESILNQDLMEHVRKVFQKQASMEEVFHRRQASLKKLAARQTRPVQPVAPRPEALAKSPCPSPGIRRGSENSSSEGGALRRGPYRRAKSEMSESRQGRGSAGEEEESLAILRRHVMSELLDTERAYVEELLCVLEGYAAEMDNPLMAHLLSTGLHNKKDVLFGNMEEIYHFHNRIFLRELENYTDCPELVGRCFLERMEDFQIYEKYCQNKPRSESLWRQCSDCPFFQECQRKLDHKLSLDSYLLKPVQRITKYQLLLKEMLKYSRNCEGAEDLQEALSSILGILKAVNDSMHLIAITGYDGNLGDLGKLLMQGSFSVWTDHKRGHTKVKELARFKPMQRHLFLHEKAVLFCKKREENGEGYEKAPSYSYKQSLNMAAVGITENVKGDAKKFEIWYNAREEVYIVQAPTPEIKAAWVNEIRKVLTSQLQACREASQHRALEQSQSLPLPAPTSTSPSRGNSRNIKKLEERKTDPLSLEGYVSSAPLTKPPEKGKGWSKTSHSLEAPEDDGGWSSAEEQINSSDAEEDGGLGPKKLVPGKYTVVADHEKGGPDALRVRSGDVVELVQEGDEGLWYVRDPTTGKEGWVPASSLSVRLGPSGSAQCLSSSESSPGSAVLSNSSSCSEGGQAPFSDLQG

SEQ ID NO: 8456 - protein, 984 aa, Homo Sapiens
MTVRRLSLLCRDLWALWLLLKAGADEIMHQDIVPLCAADIQDQLKKRFAYLSGGRGQDGSPVITFPDYPAFSEIPDKEFQNVMTYLTSIPSLQDAGIGFILVIDRRRDKWTSVKASVLRIAASFPANLQLVLVLRPTGFFQRTLSDIAFKFNRDDFKMKVPVIMLSSVPDLHGYIDKSQLTEDLGGTLDYCHSRWLCQRTAIESFALMVKQTAQMLQSFGTELAETELPNDVQSTSSVLCAHTEKKDKAKEDLRLALKEGHSVLESLRELQAEGSEPSVNQDQLDNQATVQRLLAQLNETEAAFDEFWAKHQQKLEQCLQLRHFEQGFREVKAILDAASQKIATFTDIGNSLAHVEHLLRDLASFEEKSGVAVERARALSLDGEQLIGNKHYAVDSIRPKCQELRHLCDQFSAEIARRRGLLSKSLELHRRLETSMKWCDEGIYLLASQPVDKCQSQDGAEAALQEIEKFLETGAENKIQELNAIYKEYESILNQDLMEHVRKVFQKQASMEEVFHRRQASLKKLAARQTRPVQPVAPRPEALAKSPCPSPGIRRGSENSSSEGGALRRGPYRRAKSEMSESRQGRGSAGEEEESLAILRRHVMSELLDTERAYVEELLCVLEGYAAEMDNPLMAHLLSTGLHNKKDVLFGNMEEIYHFHNRIFLRELENYTDCPELVGRCFLERMEDFQIYEKYCQNKPRSESLWRQCSDCPFFQECQRKLDHKLSLDSYLLKPVQRITKYQLLLKEMLKYSRNCEGAEDLQEALSSILGILKAVNDSMHLIAITGYDGNLGDLGKLLMQGSFSVWTDHKRGHTKVKELARFKPMQRHLFLHEKAVLFCKKREENGEGYEKAPSYSYKQSLNMAAVGITENVKGDAKKFEIWYNAREEVYIVQAPTPEIKAAWVNEIRKVLTSQLQACREASQHRALEQSQSLPLPAPTSTSPSRGNSRNIKKLEERKTDPLSLEGYVSSAPLTKPPEKGKEP

SEQ ID NO: 8457 - protein, 86 aa, Homo Sapiens
MWLSQRVLPPLPFPADAWEPSEVLGIFSQHRSHATTSESLTWTSTGTSDARTGVILQDAGIGFILVIDRRRDKWTSVKASVLRIAN

SEQ ID NO: 8458 - protein, 93 aa, Homo Sapiens
SPVITFPDYPAFSEIPDKEFQNVMTYLTSIPSILFMESAASEHWGQVAEALPFLPPGSARTAVTTSPRGPLPAPSQNVFPRSFSVTAVEFNSY

SEQ ID NO: 8459 - protein, 213 aa, Homo Sapiens
TSTGTSDARTGVILQDAGIGFILVIDRRRDKWTSVKASVLRIAASFPANLQLVLVLRPTGFFQRTLSDIAFKFNRDDFKMKVPVIMLSSVPDLHGYIDKSQLTEDLGGTLDYCHSRWLCQRTAIESFALMVKQTAQMLQSFGTELAETELPNDVQSTSSVLCAHTEKKDKAKVHGGCSGWKLWGAPVSQKLRGAPVGSCGGSFVPAGVCVSST

SEQ ID NO: 8460 - protein, 336 aa, Homo Sapiens
  misc_feature (1)..(1): Xaa can be any naturally occurring amino acid
XENGEGYEKAPSYSYKQSLNMAAVGITENVKGDAKKFEIWYNAREEVYIVQAPTPEIKAAWVNEIRKVLTSQLQACREASQHRALEQSQSLPLPAPTSTSPSRGNSRNIKKLEERKTDPLSLEGYVSSAPLTKPPEKGKDDTVTSSASESSALSRKRFTLQGFANLKGQKASPTSPDKKAKRHEVKSDPTPFGVRGWSKTSHSLEAPEDDGGWSSAEEQINSSDAEEDGGLGPKKLVPGKYTVVADHEKGGPDALRVRSGDVVELVQEGDEGLWYVRDPTTGKEGWVPASSLSVRLGPSGSAQCLSSSESSPGSAVLSNSSSCSEGGQAPFSDLQG

SEQ ID NO: 8461 - protein, 296 aa, Homo Sapiens
  misc_feature (1)..(1): Xaa can be any naturally occurring amino acid
XHLFLHEKAVLFCKKREENGEGYEKAPSYSYKQSLNMAAVGITENVKGDAKKFEIWYNAREEVYIVQAPTPEIKAAWVNEIRKVLTSQLQACREASQHRALEQSQSLPLPAPTSTSPSRGNSRNIKKLEERKTDPLSLEGYVSSAPLTKPPEKGKGWSKTSHSLEAPEDDGGWSSAEEQINSSDAEEDGGLGPKKLVPGKYTVVADHEKGGPDALRVRSGDVVELVQEGDEGLWYVRDPTTGKEGWVPASSLSVRLGPSGSAQCLSSSESSPGSAVLSNSSSCSEGGQAPFSDLQG

SEQ ID NO: 8462 - protein, 189 aa, Homo Sapiens
  misc_feature (1)..(1): Xaa can be any naturally occurring amino acid
XKKLEERKTDPLSLEGYVSSAPLTKPPEKGKASPTSPDKKAKRHEVKSDPTPFGVRGWSKTSHSLEAPEDDGGWSSAEEQINSSDAEEDGGLGPKKLVPGKYTVVADHEKGGPDALRVRSGDVVELVQEGDEGLWYVRDPTTGKEGWVPASSLSVRLGPSGSAQCLSSSESSPGSAVLSNSSSCSEGGQ

SEQ ID NO: 8463 - protein, 317 aa, Homo Sapiens
  misc_feature (1)..(1): Xaa can be any naturally occurring amino acid
XLGILKAVNDSMHLIAITGYDGNLGDLGKLLMQGSFSVWTDHKRGHTKVKELARFKPMQRHLFLHEKAVLFCKKREENGEGYEKAPSYSYKQSLNMAAVGITENVKGDAKKFEIWYNAREEVYIVQAPTPEIKAAWVNEIRKVLTSQLQACREASQHRALEQSQSLPLPAPTSTSPSRGNSRNIKKLEERKTDPLSLEGYVSSAPLTKPPEKGKDDTVTSSASESSALSRKRFTLQGFANLKASPTSPDKKAKRHEVKSDPTPFGVRGWSKTSHSLEAPEDDGGWSSAEEQINSSDAEEDGGLGPKKLVPGKYTVVA

SEQ ID NO: 8464 - protein, 151 aa, Homo Sapiens
  misc_feature (1)..(1): Xaa can be any naturally occurring amino acid
XQAPTPEIKAAWVNEIRKVLTSQLQACREASQHRALEQSQSLPLPAPTSTSPSRGNSRNIKKLEERKTDPLSLEGYVSSAPLTKPPEKGKDDTVTSSASESSALSRKRFTLQGFANLKGQKGWSKTSHSLEAPEDDGGWSSAEEQINSSDA

SEQ ID NO: 8465 - protein, 87 aa, Homo Sapiens
  misc_feature (1)..(1): Xaa can be any naturally occurring amino acid
XSAPLTKPPEKGKGWSKTSHSLEAPEDDGGWSSAEEQINSSDAEEDGGLGPKKLVPTQPPVEPTRGCTFLRGDSPHPPTLYVIECCH

SEQ ID NO: 8466 - protein, 69 aa, Homo Sapiens
  misc_feature (1)..(1): Xaa can be any naturally occurring amino acid
XSEIPDKEFQNVMTYLTSIPSLQDAGIGFILVIDRRRDKWTSVKASVLRIALRARCTESEPLHPGGSGI

SEQ ID NO: 8467 - protein, 793 aa, Homo Sapiens
  misc_feature (1)..(1): Xaa can be any naturally occurring amino acid
XSQKIATFTDIGNSLAHVEHLLRDLASFEEKSGVAVERARALSLDGEQLIGNKHYAVDSIRPKCQELRHLCDQFSAEIARRRGLLSKSLELHRRLETSMKWCDEGIYLLASQPVDKCQSQDGAEAALQEIEKFLETGAENKIQELNAIYKEYESILNQDLMEHVRKVFQKQASMEEVFHRRQASLKKLAARQTRPVQPVAPRPEALAKSPCPSPGIRRGSENSSSEGGALRRGPYRRAKSEMSESRQGRGSAGEEEESLAILRRHVMSELLDTERAYVEELLCVLEGYAAEMDNPLMAHLLSTGLHNKKDVLFGNMEEIYHFHNRIFLRELENYTDCPELVGRCFLERMEDFQIYEKYCQNKPRSESLWRQCSDCPFFQECQRKLDHKLSLDSYLLKPVQRITKYQLLLKEMLKYSRNCEGAEDLQEALSSILGILKAVNDSMHLIAITGYDGNLGDLGKLLMQGSFSVWTDHKRGHTKVKELARFKPMQRHLFLHEKAVLFCKKREENGEGYEKAPSYSYKQSLNMAAVGITENVKGDAKKFEIWYNAREEVYIVQAPTPEIKAAWVNEIRKVLTSQLQACREASQHRALEQSQSLPLPAPTSTSPSRGNSRNIKKLEERKTDPLSLEGYVSSAPLTKPPEKGKASPTSPDKKAKRHEVKSDPTPFGVRGWSKTSHSLEAPEDDGGWSSAEEQINSSDAEEDGGLGPKKLVPGKYTVVADHEKGGPDALRVRSGDVVELVQEGDEGLWYVRDPTTGKEGWVPASSLSVRLGPSGSAQCLSSSGKAHVPRAHP

SEQ ID NO: 8468 - protein, 94 aa, Homo Sapiens
MEHLEGVINKPEAEMSPQELQLHYFKMHDYDGNNLLDGLELSTAITHVHKEEGSEQAPLMSEDELINIIDGVLRDDDKNNDGYIDYAEFAKSLQ

SEQ ID NO: 8469 - protein, 94 aa, Homo Sapiens; identical to SEQ ID NO: 8468

SEQ ID NO: 8470 - protein, 94 aa, Homo Sapiens; identical to SEQ ID NO: 8468

SEQ ID NO: 8471 - protein, 127 aa, Homo Sapiens
MLSVCSCRTSSGMRSQWPSARQRSSSLSTFRHIMEHLEGVINKPEAEMSPQELQLHYFKMHDYDGNNLLDGLELSTAITHVHKEEGSEQAPLMSEDELINIIDGVLRDDDKNNDGYIDYAEFAKSLQ

SEQ ID NO: 8472 - protein, 61 aa, Homo Sapiens
MTMRSLLRTPFLCGLLWAFCAPGARAEEPAASFSQPGSMGLDKNTVHDQEHIMEHLEGVIN

SEQ ID NO: 8473 - protein, 146 aa, Homo Sapiens
MTMRSLLRTPFLCGLLWAFCAPGARAEEPAASFSQPGSMGLDKNTVHDQEHIMEHLEGVINKPEAEMSPQELQLHYFKMHDYDGNNLLDGLELSTAITHVHKEEGSEQAPLMSEDELINIIDGVLRDDDKNNDGYIDYAEFAKSLQ

SEQ ID NO: 8474 - protein, 146 aa, Homo Sapiens; identical to SEQ ID NO: 8473

SEQ ID NO: 8475 - protein, 146 aa, Homo Sapiens; identical to SEQ ID NO: 8473

SEQ ID NO: 8476 - protein, 146 aa, Homo Sapiens; identical to SEQ ID NO: 8473

SEQ ID NO: 8477 - protein, 146 aa, Homo Sapiens; identical to SEQ ID NO: 8473

SEQ ID NO: 8478 - protein, 146 aa, Homo Sapiens; identical to SEQ ID NO: 8473

SEQ ID NO: 8479 - protein, 90 aa, Homo Sapiens
SQPGSMGLDKNTVHDQEHIMEHLEGVINKPEAEMSPQELQLHYFKMHDYDGNNLLDGLELSTAITHVHKEANLCTELTLRRTGTFPIKEE

SEQ ID NO: 8480 - protein, 156 aa, Homo Sapiens
GPVGPQRVAEAGGGQLGSTAQGKCDKDNTEKDITQATNSHFTHGEMQDQSIWGNPSDGELIRTQPQRLPQLQTSAQVPSGEEIGKIKNGHTGLSNGNGIHHGAKHGSADNRKLSAPVSQKMHRKIQSSLSVNSDISKKSKVNAVFSQKTGSSPEVC

SEQ ID NO: 8481 - protein, 135 aa, Homo Sapiens
MQDQSIWGNPSDGELIRTQPQRLPQLQTSAQVPSGEEIGKIKNGHTGLSNGNGIHHGAKHGSADNRKLSAPVSQKMHRKIQSSLSVNSDISKKSKVNAVFSQKTGSSPEDCCVHCILACLFCEFLTLCNIVLGQA

SEQ ID NO: 8482 - protein, 246 aa, Homo Sapiens
MSGAGEALAPGPVGPQRVAEAGGGQLGSTAQGKCDKDNTEKDITQATNSHFTHGEMQDQSIWGNPSDGELIRTQPQRLPQLQTSAQVPSGEEIGKIKNGHTGLSNGNGIHHGAKHGSADNRKLSAPVSQKMHRKIQSSLSVNSDISKKSKVNAVFSQKTGSSPEDCCVHCILACLFCEFLTLCNIVLGQASCGICTSEACCCCCGDEMGDDCNCPCDMDCGIMDACCESSDCLEICMECCGICFPS

SEQ ID NO: 8483 - protein, 43 aa, Homo Sapiens
MSGAGEALAPGPVGPQRVAEAGGGQLGSTAQGLFSRSRTAAAL

SEQ ID NO: 8484 - protein, 43 aa, Homo Sapiens; identical to SEQ ID NO: 8483

SEQ ID NO: 8485 - protein, 156 aa, Homo Sapiens
PQRVAEAGGGQLGSTAQGKCDKDNTEKDITQATNSHFTHGEMQDQSIWGNPSDGELIRTQPQRLPQLQTSAQVPSGEEIGKIKNGHTGLSNGNGIHHGAKHGSADNRKLSAPVSQKMHRKIQSSLSVNSDISKKSKVNAVFSQKTGSSPEDKQEFW

SEQ ID NO: 8486 - protein, 355 aa, Homo Sapiens
VRGVRAATAAAVAATAASGLSRREAGGRAGAAAAVVRPPGRKCGRCRRLANFPGRKRRRRRRKGLGATTGGCGEAVSSLHPAPHSPSSVRPAGRRARRQRRGAGSAERPMSGAGEALAPGPVGPQRVAEAGGGQLGSTAQGKCDKDNTEKDITQATNSHFTHGEMQDQSIWGNPSDGELIRTQPQRLPQLQTSAQVPSGEEIGKIKNGHTGLSNGNGIHHGAKHGSADNRKLSAPVSQKMHRKIQSSLSVNSDISKKSKVNAVFSQKTGSSPEDCCVHCILACLFCEFLTLCNIVLGQASCGICTSEACCCCCGDEMGDDCNCPCDMDCGIMDACCESSDCLEICMECCGICFPS

SEQ ID NO: 8487 - protein, 355 aa, Homo Sapiens; identical to SEQ ID NO: 8486

SEQ ID NO: 8488 - protein, 973 aa, Homo Sapiens
MEVTCLLLLALIPFHCRGQGVYAPAQAQIVHAGQACVVKEDNISERVYTIREGDTLMLQCLVTGHPRPQVRWTKTAGSASDKFQETSVFNETLRIERIARTQGGRYYCKAENGVGVPAIKSIRVDVQYLDEPMLTVHQTVSDVRGNFYQEKTVFLRCTVNSNPPARFIWKRGSDTLSHSQDNGVDIYEPLYTQGETKVLKLKNLRPQDYASYTCQVSVRNVCGIPDKAITFRLTNTTAPPALKLSVNETLVVNPGENVTVQCLLTGGDPLPQLQWSHGPGPLPLGALAQGGTLSIPSVQARDSGYYNCTATNNVGNPAKKTVNLLVRSMKNATFQITPDVIKESENIQLGQDLKLSCHVDAVPQEKVTYQWFKNGKPARMSKRLLVTRNDPELPAVTSSLELIDLHFSDYGTYLCMASFPGAPVPDLSVEVNISSETVPPTISVPKGRAVVTVREGSPAELQCEVRGKPRPPVLWSRVDKEAALLPSGLPLEETPDGKLRLERVSRDMSGTYRCQTARYNGFNVRPREAQVQLNVQFPPEVEPSSQDVRQALGRPVLLRCSLLRGSPQRIASAVWRFKGQLLPPPPVVPAAAEAPDHAELRLDAVTRDSSGSYECSVSNDVGSAACLFQVSAKAYSPEFYFDTPNPTRSHKLSKNYSYVLQWTQREPDAVDPVLNYRLSIRQLNQHNAVVKAIPVRRVEKGQLLEYILTDLRVPHSYEVRLTPYTTFGAGDMASRIIHYTEPINSPNLSDNTCHFEDEKICGYTQDLTDNFDWTRQNALTQNPKRSPNTGPPTDISGTPEGYYMFIETSRPRELGDRARLVSPLYNASAKFYCVSFFYHMYGKHIGSLNLLVRSRNKGALDTHAWSLSGNKGNVWQQAHVPISPSGPFQIIFEGVRGPGYLGDIAIDDVTLKKGECPRKQTDPNKGARREGGGGAESGGSCAWRGFLSVEGGCLGLNRGSECLSDGNHVALTV

SEQ ID NO: 8489 - protein, 955 aa, Homo Sapiens
MEVTCLLLLALIPFHCRGQGVYAPAQAQIVHAGQACVVKEDNISERVYTIREGDTLMLQCLVTGHPRPQVRWTKTAGSASDKFQETSVFNETLRIERIARTQGGRYYCKAENGVGVPAIKSIRVDVQYLDEPMLTVHQTVSDVRGNFYQEKTVFLRCTVNSNPPARFIWKRGSDTLSHSQDNGVDIYEPLYTQGETKVLKLKNLRPQDYASYTCQVSVRNVCGIPDKAITFRLTNTTAPPALKLSVNETLVVNPGENVTVQCLLTGGDPLPQLQWSHGPGPLPLGALAQGGTLSIPSVQARDSGYYNCTATNNVGNPAKKTVNLLVRSMKNATFQITPDVIKESENIQLGQDLKLSCHVDAVPQEKVTYQWFKNGKPARMSKRLLVTRNDPELPAVTSSLELIDLHFSDYGTYLCMASFPGAPVPDLSVEVNISSETVPPTISVPKGRAVVTVREGSPAELQCEVRGKPRPPVLWSRVDKEAALLPSGLPLEETPDGKLRLERVSRDMSGTYRCQTARYNGFNVRPREAQVQLNVQFPPEVEPSSQDVRQALGRPVLLRCSLLRGSPQRIASAVWRFKGQLLPPPPVVPAAAEAPDHAELRLDAVTRDSSGSYECSVSNDVGSAACLFQVSAKAYSPEFYFDTPNPTRSHKLSKNYSYVLQWTQREPDAVDPVLNYRLSIRQLNQHNAVVKAIPVRRVEKGQLLEYILTDLRVPHSYEVRLTPYTTFGAGDMASRIIHYTEPINSPNLSDNTCHFEDEKICGYTQDLTDNFDWTRQNALTQNPKRSPNTGPPTDISGTPEGYYMFIETSRPRELGDRARLVSPLYNASAKFYCVSFFYHMYGKHIGSLNLLVRSRNKGALDTHAWSLSGNKGNVWQQAHVPISPSGPFQIIFEGVRGPGYLGDIAIDDVTLKKGECPRKQTDPNKVVVMPGSGAPCQSSPQLWGPMAIFLLALQR

SEQ ID NO: 8490 - protein, 77 aa, Homo Sapiens
MLQCLVTGHPRPQVRWTKTAGSASDKFQETSVFNETLRIERIARTQGGRYYCKAENGVGVPAIKSIRVDVQYLDEPM

SEQ ID NO: 8491 - protein, 129 aa, Homo Sapiens
MLQCLVTGHPRPQVRWTKTAGSASDKFQETSVFNETLRIERIARTQGGRYYCKAENGVGVPAIKSIRVDVQYLDEPMLTVHQTVSDVRGNFYQEKTVFLRCTVNSNPPARFIWKRGSDTLSHSQDNGVD

SEQ ID NO: 8492 - protein, 87 aa, Homo Sapiens
  misc_feature (1)..(1): Xaa can be any naturally occurring amino acid
XHKLSKNYSYVLQWTQREPDAVDPVLNYRLSIRQLNQHNAVVKAIPVRRVEKGQLLEYILTDLRVPHSYETTPATLRMRRSVAIPRT

SEQ ID NO: 8493 - protein, 160 aa, Homo Sapiens
  misc_feature (1)..(1): Xaa can be any naturally occurring amino acid
XNQHNAVVKAIPVRRVEKGQLLEYILTDLRVPHSYEVRLTPYTTFGAGDMASRIIHYTEHNTCHFEDEKICGYTQDLTDNFDWTRQNALTQNPKRSPNTGPPTDISGTPEGYYMFIETSRPRELGDRARLVSPLYNASAKFYCVSFFYHMYGKHIGSLNL

SEQ ID NO: 8494 - protein, 87 aa, Homo Sapiens
MQHRGFLLLTLLALLALTSAVAKKKADCKYKFENWGACDGGTGTKVRQGTLKKARYNAQCQETIRVTKPCTPKTKAKAKAKKGKGKD

SEQ ID NO: 8495 - protein, 49 aa, Homo Sapiens
MQHRGFLLLTLLALLALTSAVAKKKDKVKKGGPGSECAEWAWGPCTPSS

SEQ ID NO: 8496 - protein, 131 aa, Homo Sapiens
MQHRGFLLLTLLALLALTSAVAKKKDKVKKGGPGSECAEWAWGPCTPSSKDCGVGFREGTCGAQTQRIRCRVPCNWKKEFGADCKYKFENWGACDGGTGTKVRQGTLKKARYNAQCQETIRVTKPCTPKTK

SEQ ID NO: 8497 - protein, 143 aa, Homo Sapiens
MQHRGFLLLTLLALLALTSAVAKKKDKVKKGGPGSECAEWAWGPCTPSSKDCGVGFREGTCGAQTQRIRCRVPCNWKKEFGADCKYKFENWGACDGGTGTKVRQGTLKKARYNAQCQETIRVTKPCTPKTKAKAKAKKGKGKD

SEQ ID NO: 8498 - protein, 143 aa, Homo Sapiens; identical to SEQ ID NO: 8497

SEQ ID NO: 8499 - protein, 143 aa, Homo Sapiens; identical to SEQ ID NO: 8497

SEQ ID NO: 8500 - protein, 143 aa, Homo Sapiens; identical to SEQ ID NO: 8497

SEQ ID NO: 8501 - protein, 143 aa, Homo Sapiens; identical to SEQ ID NO: 8497

SEQ ID NO: 8502 - protein, 156 aa, Homo Sapiens
MQHRGFLLLTLLALLALTSAVAKKKDKVKKGGPGSECAEWAWGPCTPSSKDCGVGFREGTCGAQTQRIRCRVPCNWKKEFGADCKYKFENWGACDGGTGTKVRQGTLKKARYNAQCQETIRVTKPCTPKTKAKAKGQRKEKGVGLSRGAAPPPPRL

SEQ ID NO: 8503 - protein, 152 aa, Homo Sapiens
MQHRGFLLLTLLALLALTSAVAKKKEEGALQCSVPGDHPRHQALHPQDQSKGQSQEREGKGLDAKPGCQGAPGVTWGLAHALPLPGPRCDPPVPSVCSLALINHALPCPSHSPAPPLSAQSGEGQGILGSLSLPQSNVSPRARFCSSPQFHY

SEQ ID NO: 8504 - protein, 123 aa, Homo Sapiens
MGVTCVSQMPVAEGKSVQQTVELLTRKLEMLGAEKQGTFCVDCETYHTAASTLGSQGQTGKLMYVMHNSEYPLSCFALFENGPCLIADTNFDVLMVKLKGFFQSAKASKIETRGTRWSMAPVW

SEQ ID NO: 8505 - protein, 212 aa, Homo Sapiens
MGVTCVSQMPVAEGKSVQQTVELLTRKLEMLGAEKQGTFCVDCETYHTAASTLGSQGQTGKLMYVMHNSEYPLSCFALFENGPCLIADTNFDVLMVKLKGFFQSAKASKIETRGTRYQYCDFLVKVGTVTMGPSARGISVEVEYGPCVVASDCWSLLLEFLQSFLGSHTPGAPAVFGNRHDAVYGPADTMVQYMELFNKIRKQQQVPVAGIR

SEQ ID NO: 8506 - protein, 145 aa, Homo Sapiens
MGVTCVSQMPVAEGKSVQQTVELLTRKLEMLGAEKQGTFCVDCETYHTAASTLGSQGQTGKLMYVMHNSEYPLSCFALFENGPCLIADTNFDVLMVKLKGFFQSAKASKIETRGTRYQYCDFLVKVGTVTMGPSARGISVEVRPW

SEQ ID NO: 8507 - protein, 61 aa, Homo Sapiens [sequence omitted]

SEQ ID NO: 8508 - protein, 140 aa, Homo Sapiens
MPVAEGKSVQQTVELLTRKLEMLGAEKQGTFCVDCETYHTAASTLGSQGQTGKLMYVMHNSEYPLSCFALFENGPCLIADTNFDVLMVKLKGFFQSAKASKIETRGTRYQYCDFLVKVGTVTMGPSARGISVEVEYGPCV

SEQ ID NO: 8509 - protein, 1140 aa, Homo Sapiens
MVISLNSCLSFICLLLCHWIGTASPLNLEDPNVCSHWESYSVTVQESYPHPFDQIYYTSCTDILNWFKCTRHRVSYRTAYRHGEKTMYRRKSQCCPGFYESGEMCVPHCADKCVHGRCIAPNTCQCEPGWGGTNCSSACDGDHWGPHCTSRCQCKNGALCNPITGACHCAAGFRGWRCEDRCEQGTYGNDCHQRCQCQNGATCDHVTGECRCPPGYTGAFCEDLCPPGKHGPQCEQRCPCQNGGVCHHVTGECSCPSGWMGTVCGQPCPEGRFGKNCSQECQCHNGGTCDAATGQCHCSPGYTGERCQDECPVGTYGVLCAETCQCVNGGKCYHVSGACLCEAGFAGERCEARLCPEGLYGIKCDKRCPCHLENTHSCHPMSGECACKPGWSGLYCNETCSPGFYGEACQQICSCQNGADCDSVTGKCTCAPGFKGIDCSTPCPLGTYGINCSSRCGCKNDAVCSPVDGSCTCKAGWHGVDCSIRCPSGTWGFGCNLTCQCLNGGACNTLDGTCTCAPGWRGEKCELPCQDGTYGLNCAERCDCSHADGCHPTTGHCRCLPGWSGVHCDSVCAEGRWGPNCSLPCYCKNGASCSPDDGICECAPGFRGTTCQRICSPGFYGHRCSQTCPQCVHSSGPCHHITGLCDCLPGFTGALCNEVCPSGRFGKNCAGICTCTNNGTCNPIDRSCQCYPGWIGSDCSQPCPPAHWGPNCIHTCNCHNGAFCSAYDGECKCTPGWTGLYCTQRCPLGFYGKDCALICQCQNGADCDHISGQCTCRTGFMGRHCEQKCPSGTYGYGCRQICDCLNNSTCDHITGTCYCSPGWKGARCDQAGVIIVGNLNSLSRTSTALPADSYQIGAIAGIIILVLVVLFLLALFIIYRHKQKGKESSMPAVTYTPAMRVVNADYTISGTLPHSNGGNANSHYFTNPSYHTLTQCATSPHVNNRDRMTVTKSKNNQLFVNLKNVNPGKRGPVGDCTGTLPADWKHGGYLNELGAFGLDRSYMGKSLKDLGKNSEYNSSNCSLSSSENPYATIKDPPVLIPKSSECGYVEMKSPARRDSPYAEINNSTSANRNVYEVEPTVSVVQGVFSNNGRLSQDPYDLPKNSHIPCHYDLLPVRDSSSSPKQEDSGGSSSNSSSSSE

SEQ ID NO: 8510 - protein, 567 aa, Homo Sapiens
MVISLNSCLSFICLLLCHWIGTASPLNLEDPNVCSHWESYSVTVQESYPHPFDQIYYTSCTDILNWFKCTRHRVSYRTAYRHGEKTMYRRKSQCCPGFYESGEMCVPHCADKCVHGRCIAPNTCQCEPGWGGTNCSSACDGDHWGPHCTSRCQCKNGALCNPITGACHCAAGFRGWRCEDRCEQGTYGNDCHQRCQCQNGATCDHVTGECRCPPGYTGAFCEDLCPPGKHGPQCEQRCPCQNGGVCHHVTGECSCPSGWMGTVCGQPCPEGRFGKNCSQECQCHNGGTCDAATGQCHCSPGYTGERCQDECPVGTYGVLCAETCQCVNGGKCYHVSGACLCEAGFAGERCEARLCPEGLYGIKCDKRCPCHLENTHSCHPMSGECACKPGWSGLYCNETCSPGFYGEACQQICSCQNGADCDSVTGKCTCAPGFKGIDCSTPCPLGTYGINCSSRCGCKNDAVCSPVDGSCTCKAGWHGVDCSIRCPSGTWGFGCNLTCQCLNGGACNTLDGTCTCAPGWRGEKCELPCQDGTYGLNCAERCDCSHADGCHPTTGHCRCLPGWSGLF

SEQ ID NO: 8511 - protein, 1140 aa, Homo Sapiens; identical to SEQ ID NO: 8509

SEQ ID NO: 8512 - protein, 567 aa, Homo Sapiens; identical to SEQ ID NO: 8510

SEQ ID NO: 8513 - protein, 1229 aa, Homo Sapiens
MGASRDRGLAALWCLGLLGGLARVAGTHYRYLWRGCYPCHLGQAGYPVSAGDQRPDVDECRTHNGGCQHRCVNTPGSYLCECKPGFRLHTDSRTCLAINSCALGNGGCQHHCVQLTITRHRCQCRPGFQLQEDGRHCVRRSPCANRNGSCMHRCQVVRGLARCECHVGYQLAADGKACEDVDECAAGLAQCAHGCLNTQGSFKCVCHAGYELGADGRQCYRIEMEIVNSCEANNGGCSHGCSHTSAGPLCTCPRGYELDTDQRTCIDVDDCADSPCCQQVCTNNPGGYECGCYAGYRLSADGCGCEDVDECASSRGGCEHHCTNLAGSFQCSCEAGYRLHEDRRGCSPLEEPMVDLDGELPFVRPLPHIAVLQDELPQLFQDDDVGADEEEAELRGEHTLTEKFVCLDDSFGHDCSLTCDDCRNGGTCLLGLDGCDCPEGWTGLICNETCPPDTFGKNCSFSCSCQNGGTCDSVTGACRCPPGVSGTNCEDGCPKGYYGKHCRKKCNCANRGRCHRLYGACLCDPGLYGRFCHLTCPPWAFGPGCSEECQCVQPHTQSCDKRDGSCSCKAGFRGERCQAECELGYFGPGCWQACTCPVGVACDSVSGECGKRCPAGFQGEDCGQECPVGTFGVNCSSSCSCGGAPCHGVTGQCRCPPGRTGEDCEADCPEGRWGLGCQEICPACQHAARCDPETGACLCLPGFVGSRCQDVCPAGWYGPSCQTRCSCANDGHCHPATGHCSCAPGWTGFSCQRACDTGHWGPDCSHPCNCSAGHGSCDAISGLCLCEAGYVGPRCEQQCPQGHFGPGCEQRCQCQHGAACDHVSGACTCPAGWRGTFCEHACPAGFFGLDCRSACNCTAGAACDAVNGSCLCPAGRRGPRCAEKCLPRDVRAGCRHSGGCLNGGLCDPHTGRCLCPAGWTGDKCQSPCLRGWFGEACAQRCSCPPGAACHHVTGACRCPPGFTGSGCEQGCPPGRYGPGCEQLCGCLNGGSCDAATGACRCPTGFLGTDCNLTCPQGRFGPNCTHVCGCGQGAACDPVTGTCLCPPGRAGVRCERGCPQNRFGVGCEHTCSCRNGGLCHASNGSCSCGLGWTGRHCELACPPGRYGAACHLECSCHNNSTCEPATGTCRCGPGFYGQACEHRRSGATCNLDCRRGQFGPSCTLHCDCGGGADCDPVSGQCHCVDGYMGPTCREGGPLRLPENPSLAQGSAGTLPASSRPTSRSGGPARH

SEQ ID NO: 8514 - protein, 1541 aa, Homo Sapiens
MSFLEEARAAGRAVVLALVLLLLPAVPVGASVPPRPLLPLQPGMPHVCAEQELTLVGRRQPCVQALSHTVPVWKAGCGWQAWCVGHERRTVYYMGYRQVYTTEARTVLRCCRGWMQQPDEEGCLSAECSASLCFHGGRCVPGSAQPCHCPPGFQGPRCQYDVDECRTHNGGCQHRCVNTPGSYLCECKPGFRLHTDSRTCLAINSCALGNGGCQHHCVQLTITRHRCQCRPGFQLQEDGRHCVRRSPCANRNGSCMHRCQVVRGLARCECHVGYQLAADGKACEDVDECAAGLAQCAHGCLNTQGSFKCVCHAGYELGADGRQCYRIEMEIVNSCEANNGGCSHGCSHTSAGPLCTCPRGYELDTDQRTCIDVDDCADSPCCQQVCTNNPGGYECGCYAGYRLSADGCGCEDVDECASSRGGCEHHCTNLAGSFQCSCEAGYRLHEDRRGCSPLEEPMVDLDGELPFVRPLPHIAVLQDELPQLFQDDDVGADEEEAELRGEHTLTEKFVCLDDSFGHDCSLTCDDCRNGGTCLLGLDGCDCPEGWTGLICNETCPPDTFGKNCSFSCSCQNGGTCDSVTGACRCPPGVSGTNCEDGCPKGYYGKHCRKKCNCANRGRCHRLYGACLCDPGLYGRFCHLTCPPWAFGPGCSEECQCVQPHTQSCDKRDGSCSCKAGFRGERCQAECELGYFGPGCWQACTCPVGVACDSVSGECGKRCPAGFQGEDCGQECPVGTFGVNCSSSCSCGGAPCHGVTGQCRCPPGRTGEDCEADCPEGRWGLGCQEICPACQHAARCDPETGACLCLPGFVGSRCQDVCPAGWYGPSCQTRCSCANDGHCHPATGHCSCAPGWTGFSCQRACDTGHWGPDCSHPCNCSAGHGSCDAISGLCLCEAGYVGPRCEQQCPQGHFGPGCEQRCQCQHGAACDHVSGACTCPAGWRGTFCEHACPAGFFGLDCRSACNCTAGAACDAVNGSCLCPAGRRGPRCAETCPAHTYGHNCSQACACFNGASCDPVHGQCHCAPGWMGPSCLQACPAGLYGDNCRHSCLCQNGGTCDPVSGHCACPEGWAGLACEKECLPRDVRAGCRHSGGCLNGGLCDPHTGRCLCPAGWTGDKCQSPCLRGWFGEACAQRCSCPPGAACHHVTGACRCPPGFTGSGCEQACPPGSFGEDCAQMCQCPGENPACHPATGTCSCAAGYHGPSCQQRCPPGRYGPGCEQLCGCLNGGSCDAATGACRCPTGFLGTDCNLTCPQGRFGPNCTHVCGCGQGAACDPVTGTCLCPPGRAGVRCERGCPQNRFGVGCEHTCSCRNGGLCHASNGSCSCGLGWTGRHCELACPPGRYGAACHLECSCHNNSTCEPATGTCRCGPGFYGQACEHPCPPGFHGAGCQGLCWCQHGAPCDPISGRCLCPAGFHGHFCERGCEPGSFGEGCHQRCDCDGGAPCDPVTGLCLCPPGRSGATCNLDCRRGQFGPSCTLHCDCGGGADCDPVSGQCHCVDGYMGPTCREGGPLRLPENPSLAQGSAGTLPASSRPTSRSGGPARH

SEQ ID NO: 8515 - protein, 1323 aa, Homo Sapiens
MSFLEEARAAGRAVVLALVLLLLPAVPVGASVPPRPLLPLQPGMPHVCAEQELTLVGRRQPCVQALSHTVPVWKAGCGWQAWCVGHERRTVYYMGYRQVYTTEARTVLRCCRGWMQQPDEEGCLSDVGECANANGGCAGRCRDTVGGFYCRWPPPSHQLQGDGETCQDVDECRTHNGGCQHRCVNTPGSYLCECKPGFRLHTDSRTCLAINSCALGNGGCQHHCVQLTITRHRCQCRPGFQLQEDGRHCVRRSPCANRNGSCMHRCQVVRGLARCECHVGYQLAADGKACEDVDECAAGLAQCAHGCLNTQGSFKCVCHAGYELGADGRQCYRIEMEIVNSCEANNGGCSHGCSHTSAGPLCTCPRGYELDTDQRTCIDVDDCADSPCCQQVCTNNPGGYECGCYAGYRLSADGCGCEDVDECASSRGGCEHHCTNLAGSFQCSCEAGYRLHEDRRGCSPLEEPMVDLDGELPFVRPLPHIAVLQDELPQLFQDDDVGADEEEAELRGEHTLTEKFVCLDDSFGHDCSLTCDDCRNGGTCLLGLDGCDCPEGWTGLICNETCPPDTFGKNCSFSCSCQNGGTCDSVTGACRCPPGVSGTNCEDGCPKGYYGKHCRKKCNCANRGRCHRLYGACLCDPGLYGRFCHLTCPPWAFGPGCSEECQCVQPHTQSCDKRDGSCSCKAGFRGERCQAECELGYFGPGCWQACTCPVGVACDSVSGECGKRCPAGFQGEDCGQECPVGTFGVNCSSSCSCGGAPCHGVTGQCRCPPGRTGEDCEADCPEGRWGLGCQEICPACQHAARCDPETGACLCLPGFVGSRCQDVCPAGWYGPSCQTRCSCANDGHCHPATGHCSCAPGWTGFSCQRACDTGHWGPDCSHPCNCSAGHGSCDAISGLCLCEAGYVGPRCEQQCPQGHFGPGCEQRCQCQHGAACDHVSGACTCPAGWRGTFCEHACPAGFFGLDCRSACNCTAGAACDAVNGSCLCPAGRRGPRCAETCPAHTYGHNCSQACACFNGASCDPVHGQCHCAPGWMGPSCLQACPAGLYGDNCRHSCLCQNGGTCDPVSGHCACPEGWAGLACEKECLPRDVRAGCRHSGGCLNGGLCDPHTGRCLCPAGWTGDKCQSPCAKGTFGPHCEGRCACRWGGPCHLATGACLCPPGWRGAPGVRMPACGAGLERPVPSAAAARLALPATTSLGPAAVPLASLAPAASRPAHPAALGRTVRRCASVPVRTRPATLPPGPAHVLLATTAPAASNDVRPGGMGQAVNSCVGVSTGAPVMRPRGPAAAPLGSSGRTATSPVRRAASAPTAPTCVGVGRGRPATL

SEQ ID NO: 8516 - protein, 248 aa, Homo Sapiens
  misc_feature (1)..(1): Xaa can be any naturally occurring amino acid
XDAATGACRCPTGFLGTDCNLTCPQGRFGPNCTHVCGCGQGAACDPVTGTCLCPPGRAGVRCERGCPQNRFGVGCEHTCSCRNGGLCHASNGSCSCGLGWTGRHCELACPPGRYGAACHLECSCHNNSTCEPATGTCRCGPGFYGQACEHPCPPGFHGAGCQGLCWCQHGAPCDPISGRCLCPAGFHGHFCERDCRRGQFGPSCTLHCDCGGGADCDPVSGQCHCVDGYMGPTCREGGPLRLPENPSL

SEQ ID NO: 8517 - protein, 1274 aa, Homo Sapiens
MAVRQAATAGTPGPRREEEAALLFERAHYRHDPRWLLPVTPRLCLACALELLPDPGVSLVRKKHMLSCFQDALVRHTSLVTQLVSQDQRVCIHFISVLFGLLCSMEDGSVTDLCIEVLIQITTQLKLEQTIRCLLDECHKELCNMPSMRGSLATLTLLGKLVDAIPALADELVMEHGNLMEHLLRGLVYPSEGIQASVCYLYGKLYSSPVAAEMLSGHFREKLFPLFLSILDGAQTKELQINCLGLLRQLLKYDLFVSMIMNQDGLGESAKNIEGSSGNTSLPLVLKKLLLSRDETLQVASAHCITAVLVHSPAKHASAFIHADIPEFLFEHLSSSSEVLVWSSCNCLTLLVEEPLFFSKCHTVYGIEAVVRSLQGSLKMNNIELHKQGLLLFAEILTRQPEEIKLFTSSAMCRDAGRALQEAVSSPVLEVAAEALKATSAFLRKDHQSTPPVQYGELQALLEAMLNRCAEFSQTLLSRRPLGHASSRDSEKAILQRGKFLLSTLEGFRSACRLAIEFQSEPSAQENPFTAPSAKKEDTLEAFSEFLLSACDSLCIPMVMRHLEQTTHPALMEVFLSILHNLFVIVPHMKEKFSKKLASSSFIRLTLELKARFCSGLSHSALNQVCSNFLYYMCLNLLSAPEKTGPPSKEELSAVSELLQHGLPQISSRSPESLAFLSDRQYMEGAARQRQYCILLLFYLAYIHEDRFVSEAELFEAVQSFLLSLQDQGERPPLVVFKASIYLLAICQDKDNTLRETMVSAIRKFLEGIPDLQLVYTHHPLLLRFFLLYPELMSRYGHRVLELWFFWEESSYEELDDVTSAGQPALPASLVVLFQLLRSIPSILLILLDLIYSSPVDTAHKVLISLRTFLRRNEDIQVGGLIRGHFLLILQRLLVEHGASPSGASGNLPLLLSLLSLMQLRNVSEQELDSVAMKLLHQVSKLCGKCSPTDVDILQPSFNFLYWSLHQTTPSSQKRAAAVLLSSTGLMELLEKMLALTLAKADSPRTALLCSAWLLTASFSAQQHKGSLQVHQTLSVEMDQVLKALSFPKKKAALLSAAILCFLRTALRQSFSSALVALVPSGAQPLPATKDTVLAPLRMSQVRSLVIGLQNLLVQKDPLLSQACVGCLEALLDYLDARSPDIALHVASQPWNRFLLFTLLDAGENSFLRPEILRLMTLFMRYRSSSVLSHEEVGDVLQGVALADLSTLSNTTLQALHGFFQQLQSMGHLADHSMAQTLQASLEGLPPSTSSGQPPLQDMLCLGGVAVSLSHIRN

SEQ ID NO: 8518 - protein, 238 aa, Homo Sapiens
MLALTLAKADSPRTALLCSAWLLTASFSAQQHKGSLQVHQTLSVEMDQVLKALSFPKKKAALLSAAILCFLRTALRQSFSSALVALVPSGAQPLPATKDTVLAPLRMSQVRSLVIGLQNLLVQKDPLLSQACVGCLEALLDYLDARSPDIALHVASQPWNRFLLFTLLDAGENSFLRPEILRLMTLLQSMGHLADHSMAQTLQASLEGLPPSTSSGQPPLQDMLCLGGVAVSLSHIRN

SEQ ID NO: 8519 - protein, 506 aa, Homo Sapiens
MNQDGLGESAKNIEGSSGNTSLPLVLKKLLLSRDETLQVASAHCITAVLVHSPAKHASAFIHADIPEFLFEHLSSSSEVLVWSSCNCLTLLVEEPLFFSKCHTVYGIEAVVRSLQGSLKMNNIELHKQGLLLFAEILTRQPEEIKLFTSSAMCRDAGRALQEAVSSPVLEVAAEALKATSAFLRKDHQSTPPVQYGELQALLEAMLNRCAEFSQTLLSRRPLGHASSRDSEKAILQRGKFLLSTLEGFRSACRLAIEFQSEPSAQENPFTAPSAKKEDTLEAFSEFLLSACDSLCIPMVMRHLEQTTHPALMEVFLSILHNLFVIVPHMKEKFSKKLASSSFIRLTLELKARFCSGLSHSALNQVCSNFLYYMCLNLLSAPEKTGPPSKEELSAVSELLQHGLPQISSRSPESLAFLSDRQYMEGAARQRQYCILLLFYLAYIHEDRFVSEAELFEAVQSFLLSLQDQGERPPLVVFKASIYLLAICQDKDNTLREQLHCSLISIS

SEQ ID NO: 8520 - protein, 63 aa, Homo Sapiens
  misc_feature (1)..(1): Xaa can be any naturally occurring amino acid
XRSSSVLSHEELQSMGHLADHSMAQTLQASLEGLPPSTSSGQPPLQDMLCLGGVAVSLSHIRN

SEQ ID NO: 8521 - protein, 385 aa, Homo Sapiens
MDVQKWYLRTSKLALALAIIRSKPADKSSREYTEHLAMLLSEEQSKWRSKVEILEAEVMQLRQKLLVSRLCSGSFKSGYVSSQLEAQEPKSSESTLTSMEDSGCDLSNEQRTESSDLSQHFVESCTPTHFPPLPLVKRPCAILQNPLSSHMQFLQYLLELKNLTESGNLKRDLTHFEKDSSTVSDSVFQLLDGLITFYRNPKLPFSRFWTEAVGTLASLISDYNLSSHILKKCSKKLEEFEKTLLHAILGNNHINQFQVQHYVSQSLVTLGNCSLLRKSIISLLLSEVNGFADDLGAINQEQASYDVSRYENIFYLFWVLEQLLQKETEEGNTSSIGHDDQEIKKFLQKHDETIFQLSDAFPLFTFYLWRVGILLSSAQIETLRK

SEQ ID NO: 8522 - protein, 325 aa, Homo Sapiens
MAQGLRLQGSRRKGRHPLFPLLALIFEKCELATCTPREPGVAGGDVCSSESFNEDIAVFAKQIRAEKPLFSSNPELDNLMIQAIQVLRFHLLELEKVHELCDNFCHRYISCLKGKMPIDLVIDDREGGSKSDSEDITRSANLTDQPSWNRDHDDTASTRSGGTPGPSSGGHTSHSGDNSSEQGDGLDNSVASPSTGDDDDPDKDKKRHKKRGIFPKVATNIMRAWLFQHLTHPYPSEEQKKQLAQDTGLTILQVNNWFINARRRIVQPMIDQSNRAVSQGTPYNPDGQPMGGFVMDGQQHMGIRAPGPMSGMGMNMGMEGQWHYM

SEQ ID NO: 8523 - protein, 390 aa, Homo Sapiens
MAQRYDDLPHYGGMDGVGIPSTMYGDPHAARSMQPVHHLNHGPPLHSHQYPHTAHTNAMAPSMGSSVNDALKRDKDAIYGHPLFPLLALIFEKCELATCTPREPGVAGGDVCSSESFNEDIAVFAKQIRAEKPLFSSNPELDNLMIQAIQVLRFHLLELEKVHELCDNFCHRYISCLKGKMPIDLVIDDREGGSKSDSEDITRSANLTDQPSWNRDHDDTASTRSGGTPGPSSGGHTSHSGDNSSEQGDGLDNSVASPSTGDDDDPDKDKKRHKKRGIFPKVATNIMRAWLFQHLTHPYPSEEQKKQLAQDTGLTILQVNNWFINARRRIVQPMIDQSNRAVSQGTPYNPDGQPMGGFVMDGQQHMGIRAPGPMSGMGMNMGMEGQWHYM

SEQ ID NO: 8524 - protein, 370 aa, Homo Sapiens
MAQRYDDLPHYGGMDGVGIPSTMYGDPHAARSMQPVHHLNHGPPLHSHQYPHTAHTNAMAPSMGSSVNDALKRDKDAIYGHPLFPLLALIFEKCELATCTPREPGVAGGDVCSSESFNEDIAVFAKQIRAEKPLFSSNPELDNLMIQAIQVLRFHLLELEKVHELCDNFCHRYISCLKGKMPIDLVIDDREGGSKSDSEDITRSANLTDQPSWNRDHDDTASTRSGGTPGPSSGGHTSHSGDNSSEQGDGLDNSVASPSTGDDDDPDKDKKRHKKRGIFPKVATNIMRAWLFQHLTHPYPSEEQKKQLAQDTGLTILQVNNWFINARRRIVQPMIDQSNRAGKSPIVTVFKSRKRKPSSSHSPGGPLPGK

SEQ ID NO: 8525 - protein, 378 aa, Homo Sapiens
MAQRYDDLPHYGGMDGVGIPSTMYGDPHAARSMQPVHHLNHGPPLHSHQYPHTAHTNAMAPSMGSSVNDALKRDKDAIYGHPLFPLLALIFEKCELATCTPREPGVAGGDVCSSESFNEDIAVFAKQIRAEKPLFSSNPELDNLMIQAIQVLRFHLLELEKVHELCDNFCHRYISCLKGKMPIDLVIDDREGGSKSDSEDITRSANLTDQPSWNRDHDDTASTRSGGTPGPSSGGHTSHSGDNSSEQGDGLDNSVASPSTGDDDDPDKDKKRHKKRGIFPKVATNIMRAWLFQHLTHPYPSEEQKKQLAQDTGLTILQVNNWFINARRRIVQPMIDQSNRAVSQGTPYNPDGQPMGGFVMDGQQHMGIRAPGKTLFLW

SEQ ID NO: 8526 - protein, 463 aa, Homo Sapiens
MQYDDLPHYGGMDGVGIPSTMYGDPHAARSMQPVHHLNHGPPLHSHQYPHTAHTNAMAPSMGSSVNDALKRDKDAIYGHPLFPLLALIFEKCELATCTPREPGVAGGDVCSSESFNEDIAVFAKQIRAEKPLFSSNPELDNLMIQAIQVLRFHLLELEKVHELCDNFCHRYISCLKGKMPIDLVIDDREGGSKSDSEDITRSANLTDQPSWNRDHDDTASTRSGGTPGPSSGGHTSHSGDNSSEQGDGLDNSVASPSTGDDDDPDKDKKRHKKRGIFPKVATNIMRAWLFQHLTHPYPSEEQKKQLAQDTGLTILQVNNWFINARRRIVQPMIDQSNRAVSQGTPYNPDGQPMGGFVMDGQQHMGIRAPGLQSMPGEYVARGGPMGVSMGQPSYTQPQMPPHPAQLRHGPPMHTYIPGHPHHPTVMMHGGPPHPGMPMSASSPTVLNTGDPTMSGQVMDIHAQ

SEQ ID NO: 8527 - protein, 121 aa, Homo Sapiens
  misc_feature (1)..(1): Xaa can be any naturally occurring amino acid
XLCFESPEISRPVFPCLQMIQAIQVLRFHLLELEKVHELCDNFCHRYISCLKGKMPIDLVIDDREGGSKSDSEDITRSANLTDQPSWNRDHDDTASTRSGGTPGPSSGGHTSHSGDNSSEQ

SEQ ID NO: 8528 - protein, 126 aa, Homo Sapiens
FPKVATNIMRAWLFQHLSAGAGRHVIAPSLRLPWSPSWGAQRRSEAPVLPDVCLGLGSPSPGPRWARPWGSDCGRPGRQSDSCWWLQHPYPSEEQKKQLAQDTGLTILQVNNWFINARRRIVQPMI

SEQ ID NO: 8529 - protein, 404 aa, Homo Sapiens
MARRYDELPHYPGIVDGPAALASFPETVPAVPGPYGPHRPPQPLPPGLDSDGLKREKDEIYGHPLFPLLALVFEKCELATCSPRDGAGAGLGTPPGGDVCSSDSFNEDIAAFAKQVRSERPLFSSNPELDNLMIQAIQVLRFHLLELEKGKMPIDLVIEDRDGGCREDFEDYPASCPSLPDQNNMWIRDHEDSGSVHLGTPGPSSGGLASQSGDNSSDQGDGLDTSVASPSSGGEDEDLDQERRRNKKRGIFPKVATNIMRAWLFQHLSRRSEAPVLPDVCLGLGSPSPGPRWARPWGSDCGRPGRQSDSCWWLQHPYPSEEQKKQLAQDTGLTILQVNNWFINARRRIVQPMIDQSNRTGQGAAFSPEGQPIGGYTETQPHVAVRPPGSVGMSLNLEGEWHYL

SEQ ID NO: 8530 - protein, 358 aa, Homo Sapiens
MARRYDELPHYPGIVDGPAALASFPETVPAVPGPYGPHRPPQPLPPGLDSDGLKREKDEIYGHPLFPLLALVFEKCELATCSPRDGAGAGLGTPPGGDVCSSDSFNEDIAAFAKQVRSERPLFSSNPELDNLMIQAIQVLRFHLLELEKGKMPIDLVIEDRDGGCREDFEDYPASCPSLPDQNNMWIRDHEDSGSVHLGTPGPSSGGLASQSGDNSSDQGDGLDTSVASPSSGGEDEDLDQERRRNKKRGIFPKVATNIMRAWLFQHLSHPYPSEEQKKQLAQDTGLTILQVNNWFINARRRIVQPMIDQSNRTGQGAAFSPEGQPIGGYTETQPHVAVRPPGSVGMSLNLEGEWHYL

SEQ ID NO: 8531 - protein, 375 aa, Homo Sapiens
MARRYDELPHYPGIVDGPAALASFPETVPAVPGPYGPHRPPQPLPPGLDSDGLKREKDEIYGHPLFPLLALVFEKCELATCSPRDGAGAGLGTPPGGDVCSSDSFNEDIAAFAKQVRSERPLFSSNPELDNLMIQAIQVLRFHLLELEKVHDLCDNFCHRYITCLKGKMPIDLVIEDRDGGCREDFEDYPASCPSLPDQNNMWIRDHEDSGSVHLGTPGPSSGGLASQSGDNSSDQGDGLDTSVASPSSGGEDEDLDQERRRNKKRGIFPKVATNIMRAWLFQHLSHPYPSEEQKKQLAQDTGLTILQVNNWFINARRRIVQPMIDQSNRTGQGAAFSPEGQPIGGYTETQPHVAVRPPGSVGMSLNLEGEWHYL

SEQ ID NO: 8532 - protein, 421 aa, Homo Sapiens
MARRYDELPHYPGIVDGPAALASFPETVPAVPGPYGPHRPPQPLPPGLDSDGLKREKDEIYGHPLFPLLALVFEKCELATCSPRDGAGAGLGTPPGGDVCSSDSFNEDIAAFAKQVRSERPLFSSNPELDNLMIQAIQVLRFHLLELEKVHDLCDNFCHRYITCLKGKMPIDLVIEDRDGGCREDFEDYPASCPSLPDQNNMWIRDHEDSGSVHLGTPGPSSGGLASQSGDNSSDQGDGLDTSVASPSSGGEDEDLDQERRRNKKRGIFPKVATNIMRAWLFQHLSRRSEAPVLPDVCLGLGSPSPGPRWARPWGSDCGRPGRQSDSCWWLQHPYPSEEQKKQLAQDTGLTILQVNNWFINARRRIVQPMIDQSNRTGQGAAFSPEGQPIGGYTETQPHVAVRPPGSVGMSLNLEGEWHYL

SEQ ID NO: 8533 - protein, 421 aa, Homo Sapiens; identical to SEQ ID NO: 8532

SEQ ID NO: 8534 - protein, 221 aa, Homo Sapiens [sequence omitted]

SEQ ID NO: 8535 - protein, 463 aa, Homo Sapiens
MCTLCTTMRGSYRRCPWISLSVCLSLCLCHCLLTPLSPSLFPPSQTLPSLPLGPPAHMSGISAWTGSSLPTEAAPGDLEGFKLGGSDTWGPQYDELPHYPGIVDGPAALASFPETVPAVPGPYGPHRPPQPLPPGLDSDGLKREKDEIYGHPLFPLLALVFEKCELATCSPRDGAGAGLGTPPGGDVCSSDSFNEDIAAFAKQVRSERPLFSSNPELDNLMIQAIQVLRFHLLELEKVHDLCDNFCHRYITCLKGKMPIDLVIEDRDGGCREDFEDYPASCPSLPDQNNMWIRDHEDSGSVHLGTPGPSSGGLASQSGDNSSDQGDGLDTSVASPSSGGEDEDLDQERRRNKKRGIFPKVATNIMRAWLFQHLSHPYPSEEQKKQLAQDTGLTILQVNNWFINARRRIVQPMIDQSNRTGQGAAFSPEGQPIGGYTETQPHVAVRPPGSVGMSLNLEGEWHYL

SEQ ID NO: 8536 - protein, 250 aa, Homo Sapiens
PPPSLSTPALPPWVAPPSTPVPPQVHDLCDNFCHRYITCLKGKMPIDLVIEDRDGGCREDFEDYPASCPSLPDQNNMWIRDHEDSGSVHLGTPGPSSGGLASQSGDNSSDQGDGLDTSVASPSSGGEDEDLDQERRRNKKRGIFPKVATNIMRAWLFQHLSHPYPSEEQKKQLAQDTGLTILQVNNWFINARRRIVQPMIDQSNRTGQGAAFSPEGQPIGGYTETQPHVAVRPPGSVGMSLNLEGEWHYL

SEQ ID NO: 8537 - protein, 178 aa, Homo Sapiens
  misc_feature (1)..(1): Xaa can be any naturally occurring amino acid
XGLSLPSQVRSERPLFSSNPELDNLGKMPIDLVIEDRDGGCREDFEDYPASCPSLPDQNNMWIRDHEDSGSVHLGTPGPSSGGLASQSGDNSSDQGDGLDTSVASPSSGGEDEDLDQERRRNKKRGIFPKVATNIMRAWLFQHLSRRSEAPVLPDVCLGLGSPSPGPRWARPWGSDCG

SEQ ID NO: 8538 - protein, 302 aa, Homo Sapiens
MRGPSGALWLLLALRTVLGGMEVRWCATSDPEQHKCGNMSEAFREAGIQPSLLCVRGTSADHCVQLIAAQEADAITLDGGAIYEAGKEHGLKPVVGEVYDQEVGTSYYAVAVVRRSSHVTIDTLKGVKSCHTGINRTVGWNVPVGYLVESGRLSVMGCDVLKAVSDYFGGSCVPGAGETSYSESLCRLCRGDSSGEGVCDKSPLERYYDYSGAFRCLAEGAGDVAFVKHSTVLENTDESPSRRQTWTRSEEEEGECPAHEEARRTMRSSAGQAWKWAPVHRPQDESDKGEFGKRAKSRDMLG

SEQ ID NO: 8539 - protein, 738 aa, Homo Sapiens
MRGPSGALWLLLALRTVLGGMEVRWCATSDPEQHKCGNMSEAFREAGIQPSLLCVRGTSADHCVQLIAAQEADAITLDGGAIYEAGKEHGLKPVVGEVYDQEVGTSYYAVAVVRRSSHVTIDTLKGVKSCHTGINRTVGWNVPVGYLVESGRLSVMGCDVLKAVSDYFGGSCVPGAGETSYSESLCRLCRGDSSGEGVCDKSPLERYYDYSGAFRCLAEGAGDVAFVKHSTVLENTDGKTLPSWGQALLSQDFELLCRDGSRADVTEWRQCHLARVPAHAVVVRADTDGGLIFRLLNEGQRLFSHEGSSFQMFSSEAYGQKDLLFKDSTSELVPIATQTYEAWLGHEYLHAMKGLLCDPNRLPPYLRWCVLSTPEIQKCGDMAVAFRRQRLKPEIQCVSAKSPQHCMERIQAEQVDAVTLSGEDIYTAGKTYGLVPAAGEHYAPEDSSNSYYVVAVVRRDSSHAFTLDELRGKRSCHAGFGSPAGWDVPVGALIQRGFIRPKDCDVLTAVSEFFNASCVPVNNPKNYPSSLCALCVGDEQGRNKCVGNSQERYYGYRGAFRCLVENAGDVAFVRHTTVFDNTNGHNSEPWAAELRSEDYELLCPNGARAEVSQFAACNLAQIPPHAVMVRPDTNIFTVYGLLDKAQDLFGDDHNKNGFKMFDSSNYHGQDLLFKDATVRAVPVGEKTTYRGWLGLDYVAALEGMSSQQCSGAAAPAPGAPLLPLLLPALAARLLPPAL

SEQ ID NO: 8540 - protein, 181 aa, Homo Sapiens
MRGPSGALWLLLALRTVLGGMEVRWCATSDPEQHKCGNMSEAFREAGIQPSLLCVRGTSADHCVQLIAAQEADAITLDGGAIYEAGKEHGLKPVVGEVYDQEVGTSYYAVAVVRRSSHVTIDTLKGVKSCHTGINRTVGWNVPVGYLVESGRLSVMGCDVLKGPKRGADLHPESSQVAHQP

SEQ ID NO: 8541 - protein, 96 aa, Homo Sapiens
MRVFCVGLLLFSVTWAAPTFQPQTEKTKQSCVEEQRAPQASLLQNSGSQNLPDPHPMPRPTSRSASGPVAAGVILMDLSRKKKTKTILVFTIWARE

SEQ ID NO: 8542 - protein, 556 aa, Homo Sapiens
MRVFCVGLLLFSVTWAAPTFQPQTEKTKQSCVEEQRITYKGHYEKHGHYVFKCVYMSPEKKNQTDVKQEEKNKDNIGFHHLGKRINQELSSKENIVQERKKDLSLSEASENKGSSKSQNYFTNRQRLNKEYSISNKENTHNGLRMSIYPKSTGNKGFEDGDDAISKLHDQEEYGAALIRNNMQHIMGPVTAIKLLGEENKENTPRNVLNIIPASMNYAKAHSKDKKKPQRDSQAQKSPVKSKSTHRIQHNIDYLKHLSKVKKIPSDFEGSGYTDLQERGDNDISPFSGDGQPFKDIPGKGEATGPDLEGKDIQTGFAGPSEAESTHLDTKKPGYNEIPEREENGGNTIGTRDETAKEADAVDVSLVEGSNDIMGSTNFKELPGREGNRVDAGSQNAHQGKVEFHYPPAPSKEKRKEGSSDAAESTNYNEIPKNGKGSTRKGVDHSNRNQATLNEKQRFPSKGKSQGLPIPSRGLDNEIKNEMDSFNGPSHENIITHGRKYHYVPHRQNNSTRNKGMPQGKGSWGRQPHSNRRFSSRRRDDSSESSDSGSSSESDGD

SEQ ID NO: 8543 - protein, 525 aa, Homo Sapiens
MRVFCVGLLLFSVTWAAPTFQPQTEKTKQSCVEEQRQEEKNKDNIGFHHLGKRINQELSSKENIVQERKKDLSLSEASENKGSSKSQNYFTNRQRLNKEYSISNKENTHNGLRMSIYPKSTGNKGFEDGDDAISKLHDQEEYGAALIRNNMQHIMGPVTAIKLLGEENKENTPRNVLNIIPASMNYAKAHSKDKKKPQRDSQAQKSPVKSKSTHRIQHNIDYLKHLSKVKKIPSDFEGSGYTDLQERGDNDISPFSGDGQPFKDIPGKGEATGPDLEGKDIQTGFAGPSEAESTHLDTKKPGYNEIPEREENGGNTIGTRDETAKEADAVDVSLVEGSNDIMGSTNFKELPGREGNRVDAGSQNAHQGKVEFHYPPAPSKEKRKEGSSDAAESTNYNEIPKNGKGSTRKGVDHSNRNQATLNEKQRFPSKGKSQGLPIPSRGLDNEIKNEMDSFNGPSHENIITHGRKYHYVPHRQNNSTRNKGMPQGKGSWGRQPHSNRRFSSRRRDDSSESSDSGSSSESDGD

SEQ ID NO: 8544 - protein, 525 aa, Homo Sapiens; identical to SEQ ID NO: 8543

SEQ ID NO: 8545 - protein, 412 aa, Homo Sapiens
MSIYPKSTGNKGFEDGDDAISKLHDQEEYGAALIRNNMQHIMGPVTAIKLLGEENKENTPRNVLNIIPASMNYAKAHSKDKKKPQRDSQAQKSPVKSKSTHRIQHNIDYLKHLSKVKKIPSDFEGSGYTDLQERGDNDISPFSGDGQPFKDIPGKGEATGPDLEGKDIQTGFAGPSEAESTHLDTKKPGYNEIPEREENGGNTIGTRDETAKEADAVDVSLVEGSNDIMGSTNFKELPGREGNRVDAGSQNAHQGKVEFHYPPAPSKEKRKEGSSDAAESTNYNEIPKNGKGSTRKGVDHSNRNQATLNEKQRFPSKGKSQGLPIPSRGLDNEIKNEMDSFNGPSHENIITHGRKYHYVPHRQNNSTRNKGMPQGKGSWGRQPHSNRRFSSRRRDDSSESSDSGSSSESDGD

SEQ ID NO: 8546 - protein, 412 aa, Homo Sapiens; identical to SEQ ID NO: 8545

SEQ ID NO: 8547 - protein, 501 aa, Homo Sapiens
MSPEKKNQTDVKQEEKNKDNIGFHHLGKRINQELSSKENIVQERKKDLSLSEASENKGSSKSQNYFTNRQRLNKEYSISNKENTHNGLRMSIYPKSTGNKGFEDGDDAISKLHDQEEYGAALIRNNMQHIMGPVTAIKLLGEENKENTPRNVLNIIPASMNYAKAHSKDKKKPQRDSQAQKSPVKSKSTHRIQHNIDYLKHLSKVKKIPSDFEGSGYTDLQERGDNDISPFSGDGQPFKDIPGKGEATGPDLEGKDIQTGFAGPSEAESTHLDTKKPGYNEIPEREENGGNTIGTRDETAKEADAVDVSLVEGSNDIMGSTNFKELPGREGNRVDAGSQNAHQGKVEFHYPPAPSKEKRKEGSSDAAESTNYNEIPKNGKGSTRKGVDHSNRNQATLNEKQRFPSKGKSQGLPIPSRGLDNEIKNEMDSFNGPSHENIITHGRKYHYVPHRQNNSTRNKGMPQGKGSWGRQPHSNRRFSSRRRDDSSESSDSGSSSESDGD

SEQ ID NO: 8548 - protein, 80 aa, Homo Sapiens
MAASRWARKAVVLLCASDLLLLLLLLPPPGSCAAEGSPGTPDESTPPPRKKKKDIRDYNDADMARLLEQWEANTCPTSTH

SEQ ID NO: 8549 - protein, 234 aa, Homo Sapiens
MAASRWARKAVVLLCASDLLLLLLLLPPPGSCAAEGSPGTPDESTPPPRKKKKDIRDYNDADMARLLEQWEKDDDIEEGDLPEHKRPSAPVDFSKIDPSKPESILKMTKKGKTLMMFVTVSGSPTEKETEEITSLWQGSLFNANYDVQRFIVGSDRAIFMLRDGSYAWEIKDFLVGQDRCADVTLEGQVYPGKGGGSKEKNKTKQDKGKKKKEGDLKSRSSKEENRAGNKREDL

SEQ ID NO: 8550 - protein, 234 aa, Homo Sapiens; identical to SEQ ID NO: 8549

SEQ ID NO: 8551 - protein, 234 aa, Homo Sapiens; identical to SEQ ID NO: 8549

SEQ ID NO: 8552 - protein, 138 aa, Homo Sapiens
MAASRWARKAVVLLCASDLLLLLLLLPPPGSCAAEGSPGTPDESTPPPRKKKKDIRDYNDADMARLLEQWETPEPLPVLPEVPSTCACLSSASLIWTCFSHLSPHALVKRVWPPAKQGLGGKESPASAWLPHRGGELK

SEQ ID NO: 8553 - protein, 173 aa, Homo Sapiens
LLSHDYGDIVAQELLYRYKQNRSGRLTIKSLCLSNGGIFPETHRPLLLQKLLKDGGVLSPILTRLMNFFLWDMWAGIRNNDGNLVIDSLLQYINQRKKFRRRWVGALASVTIPIHFIYGPLDPVNPYPEFLELYRKTLPRSTVSILDDHISHYPQLEDPMGFLNAYMGFINSF

SEQ ID NO: 8554 - protein, 118 aa, Homo Sapiens
MREWWVQVGLLAVPLLAAYLHIPPPQLSPALHSWKSSGKFFTYKGLRIFYQDSVGVVGSPEIVVLLHGFPTSSYDWYKIWEGLTLRFHRVIALDFLGFGFSDKPRPHHYSIFEQASIV

SEQ ID NO: 8555 - protein, 160 aa, Homo Sapiens
MREWWVQVGLLAVPLLAAYLHIPPPQLSPALHSWKSSGKFFTYKGLRIFYQDSVGVVGSPEIVVLLHGFPTSSYDWYKIWEGLTLRFHRVIALDFLGFGFSDKPRPHHYSIFEQASIVEALLRHLGLQNRRINLLSHDYGDIVAQELLYRYKQNRSGRLT

SEQ ID NO: 8556 - protein, 169 aa, Homo Sapiens
MREWWVQVGLLAVPLLAAYLHIPPPQLSPALHSWKSSGKFFTYKGLRIFYQDSVGVVGSPEIVVLLHGFPTSSYDWYKIWEGLTLRFHRVIALDFLGFGFSDKPRPHHYSIFEQASIVEALLRHLGLQNRRINLLSHDYGDIVAQELLYRYKQNRSGRLTIKSLCLSNG

SEQ ID NO: 8557 - protein, 188 aa, Homo Sapiens
MREWWVQVGLLAVPLLAAYLHIPPPQLSPALHSWKSSGKFFTYKGLRIFYQDSVGVVGSPEIVVLLHGFPTSSYDWYKIWEGLTLRFHRVIALDFLGFGFSDKPRPHHYSIFEQASIVEALLRHLGLQNRRINLLSHDYGDIVAQELLYRYKQNRSGRLTIKSLCLSNGGIFPETHRPLLLQKLLKDG

SEQ ID NO: 8558 - protein, 292 aa, Homo Sapiens
MREWWVQVGLLAVPLLAAYLHIPPPQLSPALHSWKSSGKFFTYKGLRIFYQDSVGVVGSPEIVVLLHGFPTSSYDWYKIWEGLTLRFHRVIALDFLGFGFSDKPRPHHYSIFEQASIVEALLRHLGLQNRRINLLSHDYGDIVAQELLYRYKQNRSGRLTIKSLCLSNGGIFPETHRPLLLQKLLKDGGVLSPILTRLMNFFVFSRGLLQYINQRKKFRRRWVGALASVTIPIHFIYGPLDPVNPYPEFLELYRKTLPRSTVSILDDHISHYPQLEDPMGFLNAYMGFINSF

SEQ ID NO: 8559 - protein, 292 aa, Homo Sapiens; identical to SEQ ID NO: 8558

SEQ ID NO: 8560 - protein, 292 aa, Homo Sapiens; identical to SEQ ID NO: 8558

SEQ ID NO: 8561 - protein, 213 aa, Homo Sapiens
MREWWVQVGLLAVPLLAAYLHIPPPQLSPALHSWKSSGKFFTYKGLRIFYQDSVGVVGSPEIVVLLHGFPTSSYDWYKIWEGLTLRFHRVIALDFLGFGFSDKPRPHHYSIFEQASIVEALLRHLGLQNRRINLLSHDYGDIVAQELLYRYKQNRSGRLTIKSLCLSNGGIFPETHRPLLLQKLLKDGGVLSPILTRLMNFFVFSRGLTPVFG

SEQ ID NO: 8562 - protein, 326 aa, Homo Sapiens
MREWWVQVGLLAVPLLAAYLHIPPPQLSPALHSWKSSGKFFTYKGLRIFYQDSVGVVGSPEIVVLLHGFPTSSYDWYKIWEGLTLRFHRVIALDFLGFGFSDKPRPHHYSIFEQASIVEALLRHLGLQNRRINLLSHDYGDIVAQELLYRYKQNRSGRLTIKSLCLSNGGIFPETHRPLLLQKLLKDGGVLSPILTRLMNFFVFSRGLTPVFGPYTRPSESELWDMWAGIRNNDGNLVIDSLLQYINQRKKFRRRWVGALASVTIPIHFIYGPLDPVNPYPEFLELYRKTLPRSTVSILDDHISHYPQLEDPMGFLNAYMGFINSF

SEQ ID NO: 8563 - protein, 326 aa, Homo Sapiens; identical to SEQ ID NO: 8562

SEQ ID NO: 8564 - protein, 326 aa, Homo Sapiens; identical to SEQ ID NO: 8562

SEQ ID NO: 8565 - protein, 325 aa, Homo Sapiens
MVRRDRLRRMREWWVQVGLLAVPLLAAYLHIPPPQLSPALHSWKSSGKFFTYKGLRIFYQDSVGVVGSPEIVVLLHGFPTSSYDWYKIWEGLTLRFHRVIALDFLGFGFSDKPASIVEALLRHLGLQNRRINLLSHDYGDIVAQELLYRYKQNRSGRLTIKSLCLSNGGIFPETHRPLLLQKLLKDGGVLSPILTRLMNFFVFSRGLTPVFGPYTRPSESELWDMWAGIRNNDGNLVIDSLLQYINQRKKFRRRWVGALASVTIPIHFIYGPLDPVNPYPEFLELYRKTLPRSTVSILDDHISHYPQLEDPMGFLNAYMGFINSF

SEQ ID NO: 8566 - protein, 335 aa, Homo Sapiens
MVRRDRLRRMREWWVQVGLLAVPLLAAYLHIPPPQLSPALHSWKSSGKFFTYKGLRIFYQDSVGVVGSPEIVVLLHGFPTSSYDWYKIWEGLTLRFHRVIALDFLGFGFSDKPRPHHYSIFEQASIVEALLRHLGLQNRRINLLSHDYGDIVAQELLYRYKQNRSGRLTIKSLCLSNGGIFPETHRPLLLQKLLKDGGVLSPILTRLMNFFVFSRGLTPVFGPYTRPSESELWDMWAGIRNNDGNLVIDSLLQYINQRKKFRRRWVGALASVTIPIHFIYGPLDPVNPYPEFLELYRKTLPRSTVSILDDHISHYPQLEDPMGFLNAYMGFINSF

SEQ ID NO: 8567 - protein, 158 aa, Homo Sapiens
AVKGEVLKVGNKSCENIHLHSEAVLCTVPNDLLKLNSELNIEWKQAISSTVLGKVIVQPDQNFTGLIAGVVSISTALLLLLGFFLWLKKRKQIKDQFPNSSQNGSCRQVQYPLTDMSPILTSGDSDISSPLLQNTVHIDLSALNPELVQAVQHVVIGP

SEQ ID NO: 8568 - protein, 214 aa, Homo Sapiens
AVKLKIDLANRETSIFSYREDPIVYEIHPTKSFISGGSTITGVGKNLNSVSVPRMVINVHEAGRNFTVACQHRSNSEIICCTTPSLQQLNLQLPLKTKAFFMLDGILSKYFDLIYVHNPVFKPFEKPVMISMGNENVLEIKGNDIDPEAVKGEVLKVGNKSCENIHLHSEAVLCTVPNDLLKLNSELNIEVGFLHSSHDVNKEASVIMLFSGLK

SEQ ID NO: 8569 - protein, 1408 aa, Homo Sapiens
MKAPAVLAPGILVLLFTLVQRSNGECKEALAKSEMNVNMKYQLPNFTAETPIQNVILHEHHIFLGATNYIYVLNEEDLQKVAEYKTGPVLEHPDCFPCQDCSSKANLSGGVWKDNINMALVVDTYYDDQLISCGSVNRGTCQRHVFPHNHTADIQSEVHCIFSPQIEEPSQCPDCVVSALGAKVLSSVKDRFINFFVGNTINSSYFPDHPLHSISVRRLKETKDGFMFLTDQSYIDVLPEFRDSYPIKYVHAFESNNFIYFLTVQRETLDAQTFHTRIIRFCSINSGLHSYMEMPLECILTEKRKKRSTKKEVFNILQAAYVSKPGAQLARQIGASLNDDILFGVFAQSKPDSAEPMDRSAMCAFPIKYVNDFFNKIVNKNNVRCLQHFYGPNHEHCFNRTLLRNSSGCEARRDEYRTEFTTALQRVDLFMGQFSEVLLTSISTFIKGDLTIANLGTSEGRFMQVVVSRSGPSTPHVNFLLDSHPVSPEVIVEHTLNQNGYTLVITGKKITKIPLNGLGCRHFQSCSQCLSAPPFVQCGWCHDKCVRSEECLSGTWTQQICLPAIYKVFPNSAPLEGGTRLTICGWDFGFRRNNKFDLKKTRVLLGNESCTLTLSESTMNTLKCTVGPAMNKHFNMSIIISNGHGTTQYSTFSYVDPVITSISPKYGPMAGGTLLTLTGNYLNSGNSRHISIGGKTCTLKSVSNSILECYTPAQTISTEFAVKLKIDLANRETSIFSYREDPIVYEIHPTKSFISTWWKEPLNIVSFLFCFASGGSTITGVGKNLNSVSVPRMVINVHEAGRNFTVACQHRSNSEIICCTTPSLQQLNLQLPLKTKAFFMLDGILSKYFDLIYVHNPVFKPFEKPVMISMGNENVLEIKGNDIDPEAVKGEVLKVGNKSCENIHLHSEAVLCTVPNDLLKLNSELNIEWKQAISSTVLGKVIVQPDQNFTGLIAGVVSISTALLLLLGFFLWLKKRKQIKDLGSELVRYDARVHTPHLDRLVSARSVSPTTEMVSNESVDYRATFPEDQFPNSSQNGSCRQVQYPLTDMSPILTSGDSDISSPLLQNTVHIDLSALNPELVQAVQHVVIGPSSLIVHFNEVIGRGHFGCVYHGTLLDNDGKKIHCAVKSLNRITDIGEVSQFLTEGIIMKDFSHPNVLSLLGICLRSEGSPLVVLPYMKHGDLRNFIRNETHNPTVKDLIGFGLQVAKGMKYLASKKFVHRDLAARNCMLDEKFTVKVADFGLARDMYDKEYYSVHNKTGAKLPVKWMALESLQTQKFTTKSDVWSFGVLLWELMTRGAPPYPDVNTFDITVYLLQGRRLLQPEYCPDPLYEVMLKCWHPKAEMRPSFSELVSRISAIFSTFIGEHYVHVNATYVNVKCVAPYPSLLSSEDNADDEVDTRPASFWETS

SEQ ID NO: 8570 - protein, 1390 aa, Homo Sapiens
MKAPAVLAPGILVLLFTLVQRSNGECKEALAKSEMNVNMKYQLPNFTAETPIQNVILHEHHIFLGATNYIYVLNEEDLQKVAEYKTGPVLEHPDCFPCQDCSSKANLSGGVWKDNINMALVVDTYYDDQLISCGSVNRGTCQRHVFPHNHTADIQSEVHCIFSPQIEEPSQCPDCVVSALGAKVLSSVKDRFINFFVGNTINSSYFPDHPLHSISVRRLKETKDGFMFLTDQSYIDVLPEFRDSYPIKYVHAFESNNFIYFLTVQRETLDAQTFHTRIIRFCSINSGLHSYMEMPLECILTEKRKKRSTKKEVFNILQAAYVSKPGAQLARQIGASLNDDILFGVFAQSKPDSAEPMDRSAMCAFPIKYVNDFFNKIVNKNNVRCLQHFYGPNHEHCFNRTLLRNSSGCEARRDEYRTEFTTALQRVDLFMGQFSEVLLTSISTFIKGDLTIANLGTSEGRFMQVVVSRSGPSTPHVNFLLDSHPVSPEVIVEHTLNQNGYTLVITGKKITKIPLNGLGCRHFQSCSQCLSAPPFVQCGWCHDKCVRSEECLSGTWTQQICLPAIYKVFPNSAPLEGGTRLTICGWDFGFRRNNKFDLKKTRVLLGNESCTLTLSESTMNTLKCTVGPAMNKHFNMSIIISNGHGTTQYSTFSYVDPVITSISPKYGPMAGGTLLTLTGNYLNSGNSRHISIGGKTCTLKSVSNSILECYTPAQTISTEFAVKLKIDLANRETSIFSYREDPIVYEIHPTKSFISGGSTITGVGKNLNSVSVPRMVINVHEAGRNFTVACQHRSNSEIICCTTPSLQQLNLQLPLKTKAFFMLDGILSKYFDLIYVHNPVFKPFEKPVMISMGNENVLEIKGNDIDPEAVKGEVLKVGNKSCENIHLHSEAVLCTVPNDLLKLNSELNIEWKQAISSTVLGKVIVQPDQNFTGLIAGVVSISTALLLLLGFFLWLKKRKQIKDLGSELVRYDARVHTPHLDRLVSARSVSPTTEMVSNESVDYRATFPEDQFPNSSQNGSCRQVQYPLTDMSPILTSGDSDISSPLLQNTVHIDLSALNPELVQAVQHVVIGPSSLIVHFNEVIGRGHFGCVYHGTLLDNDGKKIHCAVKSLNRITDIGEVSQFLTEGIIMKDFSHPNVLSLLGICLRSEGSPLVVLPYMKHGDLRNFIRNETHNPTVKDLIGFGLQVAKGMKYLASKKFVHRDLAARNCMLDEKFTVKVADFGLARDMYDKEYYSVHNKTGAKLPVKWMALESLQTQKFTTKSDVWSFGVLLWELMTRGAPPYPDVNTFDITVYLLQGRRLLQPEYCPDPLYEVMLKCWHPKAEMRPSFSELVSRISAIFSTFIGEHYVHVNATYVNVKCVAPYPSLLSSEDNADDEVDTRPASFWETS

SEQ ID NO: 8571 - protein, 764 aa, Homo Sapiens
MKAPAVLAPGILVLLFTLVQRSNGECKEALAKSEMNVNMKYQLPNFTAETPIQNVILHEHHIFLGATNYIYVLNEEDLQKVAEYKTGPVLEHPDCFPCQDCSSKANLSGGVWKDNINMALVVDTYYDDQLISCGSVNRGTCQRHVFPHNHTADIQSEVHCIFSPQIEEPSQCPDCVVSALGAKVLSSVKDRFINFFVGNTINSSYFPDHPLHSISVRRLKETKDGFMFLTDQSYIDVLPEFRDSYPIKYVHAFESNNFIYFLTVQRETLDAQTFHTRIIRFCSINSGLHSYMEMPLECILTEKRKKRSTKKEVFNILQAAYVSKPGAQLARQIGASLNDDILFGVFAQSKPDSAEPMDRSAMCAFPIKYVNDFFNKIVNKNNVRCLQHFYGPNHEHCFNRTLLRNSSGCEARRDEYRTEFTTALQRVDLFMGQFSEVLLTSISTFIKGDLTIANLGTSEGRFMQVVVSRSGPSTPHVNFLLDSHPVSPEVIVEHTLNQNGYTLVITGKKITKIPLNGLGCRHFQSCSQCLSAPPFVQCGWCHDKCVRSEECLSGTWTQQICLPAIYKVFPNSAPLEGGTRLTICGWDFGFRRNNKFDLKKTRVLLGNESCTLTLSESTMNTLKCTVGPAMNKHFNMSIIISNGHGTTQYSTFSYVDPVITSISPKYGPMAGGTLLTLTGNYLNSGNSRHISIGGKTCTLKSVSNSILECYTPAQTISTEFAVKLKIDLANRETSIFSYREDPIVYEIHPTKSFIRHVNIALIQR

SEQ ID NO: 8572 - protein, 190 aa, Homo Sapiens
MKSKSKSLAECFPYDKPLIMKAPAVLAPGILVLLFTLVQRSNGECKEALAKSEMNVNMKYQLPNFTAETPIQNVILHEHHIFLGATNYIYVLNEEDLQKVAEYKTGPVLEHPDCFPCQDCSSKANLSGGVWKDNINMALVVDTYYDDQLISCGSVNRGTCQRHVFPHNHTADIQSEVHCIFSPQIEEPSQ

SEQ ID NO: 8573 - protein, 187 aa, Homo Sapiens
LAPAARAGYSEERCSWRGSGLTQEPGSVGQLALACAEGAVEWLYPAGALRLTLGGPDPRARPGIACLRPVRPFAGAQVFAERAGGALELLLAEGPGPAGGRCVRWGPRERRALFLQATPHQDISRRVAAFRFELREDGRPELPPQAHGLGVDGACRPCSDAELLLAACTSDFGECPRHGGSLEPAFP

SEQ ID NO: 8574 - protein, 69 aa, Homo Sapiens
MGFPAAALLCALCCGLLAPAARAGYSEERCSWRGRPRRTRTSAAAWPPSALSCARTGAPSCPRRPTVSA

SEQ ID NO: 8575 - protein, 293 aa, Homo Sapiens
MGFPAAALLCALCCGLLAPAARAGYSEERCSWRGSGLTQEPGSVGQLALACAEGAVEWLYPAGALRLTLGGPDPRARPGIACLRPVRPFAGAQVFAERAGGALELLLAEGPGPAGGRCVRWGPRERRALFLQATPHQDISRRVAAFRFELREDGRPELPPQAHGLGVDGACRPCSDAELLLAACTSDFVIHGIIHGVTHDVELQESVITVVAARVLRQTPPLFQAGRSGDQGLTSIRTPLRCGVHPGPGTFLFMGWSRFGEARLGCAPRFQEFRRAYEAARAAHLHPCEVALH

SEQ ID NO: 8576 - protein, 160 aa, Homo Sapiens
MLGCICQMGVQEGGPGQLIARHGPQAHVCVHSCLGGACRPCSDAELLLAACTSDFVIHGIIHGVTHDVELQESVITVVAARVLRQTPPLFQAGRSGDQGLTSIRTPLRCGVHPGPGTFLFMGWSRFGEARLGCAPRFQEFRRAYEAARAAHLHPCEVALH

SEQ ID NO: 8577 - protein, 175 aa, Homo Sapiens
  misc_feature (1)..(1): Xaa can be any naturally occurring amino acid
XAVEWLYPAGALRLTLGGPDPRARPGIACLRPVRPFAGAQVFAERAGGALELLLAEGPGPAGGRCVRWGPRERRALFLQATPHQDISRRVAAFRFELREDGRPELPPQAHGLGVDGACRPCSDAELLLAACTSDFVIHGIIHGVTHDVELQESVITVGGPTALEVMGLSIRTLFT

SEQ ID NO: 8578 - protein, 311 aa, Homo Sapiens
MRGAARAAWGRAGQPWPRPPAPGPPPPPLPLLLLLLAGLLGGAGAQYSSDRCSWKGSGLTHEAHRKEVEQVYLRCAAGAVEWMYPTGALIVNLRPNTFSPARHLTVCIRSFTDSSGANIYLEKTGELRLLVPDGDGRPGRVQCFGLEQGGLFVEATPQQDIGRRTTGFQYELVRRHRASDLHELSAPCRPCSDTEVLLAVCTSDFAVRGSIQQVTHEPERQDSAIHLRVSRLYRQKSRVFEPVPEGDGHWQGRVRTLLECGVRPGHGDFLFTGHMHFGEARLGCAPRFKDFQRMYRDAQERGLNPCEVGTD

SEQ ID NO: 8579 - protein, 229 aa, Homo Sapiens
MYPTGALIVNLRPNTFSPARHLTVCIRSFTDSSGANIYLEKTGELRLLVPDGDGRPGRVQCFGLEQGGLFVEATPQQDIGRRTTGFQYELVRRHRASDLHELSAPCRPCSDTEVLLAVCTSDFAVRGSIQQVTHEPERQDSAIHLRVSRLYRQKSRVFEPVPEGDGHWQGRVRTLLECGVRPGHGDFLFTGHMHFGEARLGCAPRFKDFQRMYRDAQERGLNPCEVGTD

SEQ ID NO: 8580 - protein, 229 aa, Homo Sapiens; identical to SEQ ID NO: 8579

SEQ ID NO: 8581 - protein, 90 aa, Homo Sapiens
RTAVRGSIQQVTHEPERQDSAIHLRVSRLYRQKSRVFEPVPEGDGHWQGRVRTLLECGARLGCAPRFKDFQRMYRDAQERGLNPCEVGTD

SEQ ID NO: 8582 - protein, 456 aa, Homo Sapiens
MAAALKCLLTLGRWCPGLGVAPQARALAALVPGVTQVDNKSGFLQKRPHRQHPGILKLPHVRLPQALANGAQLLLLGSAGPTMENQVQTLTSYLWSRHLPVEPEELQRRARHLEKKFLENPDLSQTEEKLRGAVLHALRKTTYHWQELSYTEGLSLVYMAARLDGGFAAVSRAFHEIRARNPAFQPQTLMDFGSGTGSVTWAAHSIWGQSLREYMCVDRSAAMLVLAEKLLKGGSESGEPYIPGVFFRQFLPVSPKVQFDVVVSAFSLSELPSKADRTEVVQTLWRKTGHFLVLVENGTKAGHSLLMDARDLVLKGKEKSPLDPRPGFVFAPCPHELPCPQLTNLACSFSQAYHPIPFSWNKKPKEEKFSMVILARGSPEEAHRWPRITQPVLKRPRHVHCHLCCPDGHMQHAVLTARRHGRDLYRCARVSSWGDLLPVLTPSAFPPSTAQDPSES

SEQ ID NO: 8583 - protein, 478 aa, Homo Sapiens
MAAALKCLLTLGRWCPGLGVAPQARALAALVPGVTQVDNKSGFLQKRPHRQHPGILKLPHVRLPQALANGAQLLLLGSAGPTMENQVQTLTSYLWSRHLPVEPEELQRRARHLEKKFLENPDLSQTEEKLRGAVLHALRKTTYHWQELSYTEGLSLVYMAARLDGGFAAVSRAFHEIRARNPAFQPQTLMDFGSGTGSVTWAAHSIWGQSLREYMCVDRSAAMLVLAEKLLKGGSESGEPYIPGVFFRQFLPVSPKVQFDVVVSAFSLSELPSKADRTEVVQTLWRKTGHFLVLVENGTKAGHSLLMDARDLVLKGKEKSPLDPRPGFVFAPCPHELPCPQLTNLACSFSQAYHPIPFSWNKKPKEEKFSMVILARGSPEEAHRWPRITQPVLKRPRHVHCHLCCPDGHMQHAVLTARRHGRYGGCDQNQWDVAGSCSPRQHLFPQGFVSLCPCQLLGRSFTCAYSVCVSSIYGSGSL

SEQ ID NO: 8584 - protein, 447 aa, Homo Sapiens
MAAALKCLLTLGRWCPGLGVAPQARALAALVPGVTQVDNKSGFLQKRPHRQHPGILKLPHVRLPQALANGAQLLLLGSAGPTMENQVQTLTSYLWSRHLPVEPEELQRRARHLEKKFLENPDLSQTEEKLRGAVLHALRKTTYHWQELSYTEGLSLVYMAARLDGGFAAVSRAFHEIRARNPAFQPQTLMDFGSGTGSVTWAAHSIWGQSLREYMCVDRSAAMLVLAEKLLKGGSESGEPYIPGVFFRQFLPVSPKVQFDVVVSAFSLSELPSKADRTEVVQTLWRKTGHFLVLVENGTKAGHSLLMDARDLVLKGKEKSPLDPRPGFVFAPCPHELPCPQLTNLACSFSQAYHPIPFSWNKKPKEEKFSMVILARGSPEEAHRWPRITQPVLKRPRHVHCHLCCPDGHMQHAVLTARRHGSSWGDLLPVLTPSAFPPSTAQDPSES

SEQ ID NO: 8585 - protein, 158 aa, Homo Sapiens
MAAALKCLLTLGRWCPGLGVAPQARALAALVPGVTQVDNKSGFLQKRPHRQHPGILKLPHVRLPQALANGAQLLLLGSAGPTMENQVQTLTSYLWSRHLPVEPEELQRRARHLEKKFLENPGPDFQSLFSPQTYLRQRRNFVEQCYTHYVKLPTIGKN

SEQ ID NO: 8586 - protein, 158 aa, Homo Sapiens; identical to SEQ ID NO: 8585

SEQ ID NO: 8587 - protein, 158 aa, Homo Sapiens; identical to SEQ ID NO: 8585

SEQ ID NO: 8588 - protein, 102 aa, Homo Sapiens
MENQVQTLTSYLWSRHLPVEPEELQRRARHLEKKFLENPDLSQTEEKLRGAVLHALRKTTYHWQELSYTEGLSLVYMAARLDGGFAAVSRAFHEIRARNPAF

SEQ ID NO: 8589 - protein, 140 aa, Homo Sapiens
MENQVQTLTSYLWSRHLPVEPEELQRRARHLEKKFLENPDLSQTEEKLRGAVLHALRKTTYHWQELSYTEGLSLVYMAARLDGGFAAVSRAFHEIRARNPAFQPQTLMDFGSGTGSVTWAAHSIWGQSLREYMCVDRSAA

SEQ ID NO: 8590 - protein, 174 aa, Homo Sapiens
MENQVQTLTSYLWSRHLPVEPEELQRRARHLEKKFLENPDLSQTEEKLRGAVLHALRKTTYHWQELSYTEGLSLVYMAARLDGGFAAVSRAFHEIRARNPAFQPQTLMDFGSGTGSVTWAAHSIWGQSLREYMCVDRSAAMLVLAEKLLKGGSESGEPYIPGVFFRQFLPVSPK

SEQ ID NO: 8591 - protein, 186 aa, Homo Sapiens
MVPRPWSGSPGPGECLHSLLSERLWICRDISAQRRSAPGSPRPSDCQQLSFLPGNQPTFLCLQALAALVPGVTQVDNKSGFLQKRPHRQHPGILKLPHVRLPQALANGAQLLLLGSAGPTMENQVQTLTSYLWSRHLPVEPEELQRRARHLEKKFLENPDLSQTEEKLRGAVLHALRKTTYHWQEL

SEQ ID NO: 8592 - protein, 123 aa, Homo Sapiens
  misc_feature (1)..(1): Xaa can be any naturally occurring amino acid
XPGFVFAPCPHELPCPQLTNLACSFSQAYHPIPFSWNKKPKEEKFSMVILARGSPEEAHRWPRITQPVLKRPRHVHCHLCCPDGHMQHAVLTARRHGSSWGDLLPVLTPSAFPPSTAQDPSES

SEQ ID NO: 8593 - protein, 366 aa, Homo Sapiens
MARERPPGRGCGVLRRCLLGAVLLFGLRLCAELRRAGPGSPTRSAPPGPAWRPPGPHLPPAPGQPRGASRRQVTYVRSGRRAPPGGGGSGTPEPGCCAPRGRPRRKGPRWHIDLQPWAGSAQSLDEEAWRFLRYISTTQIACNHMNTDSLATDSSPTHKPWSVCLDDRFNLAHQIRNKQCRLYSLGLGSDDTHFEVSMANNGCEVHRFDPSVKSAHILESQHLWYHRLSIDWRDPHPAVAAQKPHSNTRKLGSILNEFGHHKIDVLKADLESAEWKVLENLILEDVLEQIGQLIFEIHLHWPGFEVSGSDSSVVRFWYSLLKELEQKDFRLFHSYKDLSKPQLFLKKDIFNASSCYTLSWVNTRWK

SEQ ID NO: 8594 - protein, 244 aa, Homo Sapiens
MDILVPLLQLLVLLLTLPLHLMALLGCWQPLCKSYFPYLMAVLTPKSNRKMESKKRELFSQIKGLTGASGKVALLELGCGTGANFQFYPPGCRVTCLDPNPHFEKFLTKSMAENRHLQYERFVVAPGEDMRQLADGSMDVVVCTLVLCSVQSPRKVLQEVRRVLRPGGVLFFWEHVAEPYGSWAFMWQQVFEPTWKHIGDGCCLTRETWKDLENAQFSEIQMERQPPPLKWLPVGPHIMGKAVK

SEQ ID NO: 8595 - protein, 276 aa, Homo Sapiens
MDILVPLLQLLVLLLTLPLHLMALLGCWQPLCKSYFPYLMAVLTPKSNRKMESKKRELFSQIKGLTGASGKVALLELGCGTGANFQFYPPGCRVTCLDPNPHFEKFLTKSMAENRHLQYERFVVAPGEDMRQLADGSMDVVVCTLVLCSVQSPRKVLQEVRRVLRPGGVLFFWEHVAEPYGSWAFMWQQVFEPTWKHIGDGCCLTRETWKDLENAQFSEIQMERQPPPLKWLPVGPHIMGKAVKSFPSSKALICSFPSLQLEQATHQPIYLPLRGT

SEQ ID NO: 8596 - protein, 243 aa, Homo Sapiens
MDRKTTSWDTKFYEKWYVCNREKLCESLQAVFVQSYLDQGTQIFLNNSIEKSGWLFIQLYHSFVSSVFSLFMSRTSINGLLGRGSMFVFSPDQFQRLLKINPDWKTHRLLDLGAGDGEVTKIMSPHFEEIYATELSETMIWQLQKKKYRVLGINEWQNTGFQYDVISCLNLLDRCDQPLTLLKDIRSVLEPTRGRVILALVLPFHPYVENVGGKWEKPSEILEIKGQNWEEQVNSLPEVFRKA

SEQ ID NO: 8597 - protein, 61 aa, Homo Sapiens
MRLLAGWLCLSLASVWLARRMWTLRSPLTRSLGMCATERNYANHSRLSLFRVTLIKEHRSS

SEQ ID NO: 8598 - protein, 74 aa, Homo Sapiens
MRLLAGWLCLSLASVWLARRMWTLRSPLTRSLYVNMTSGPGGPAAAAGGRKENHQVARKRLNVCVFTRSVSETA

SEQ ID NO: 8599 - protein, 317 aa, Homo Sapiens
MRLLAGWLCLSLASVWLARRMWTLRSPLTRSLYVNMTSGPGGPAAAAGGRKENHQWYVCNREKLCESLQAVFVQSYLDQGTQIFLNNSIEKSGWLFIQLYHSFVSSVFSLFMSRTSINGLLGRGSMFVFSPDQFQRLLKINPDWKTHRLLDLGAGDGEVTKIMSPHFEEIYATELSETMIWQLQKKKYRVLGINEWQNTGFQYDVISCLNLLDRCDQPLTLLKDIRSVLEPTRGRVILALVLPFHPYVENGGKWEKPSEILEIKGQNWEEQVNSLPEVFRKAGFVIEAFTRLPYLCEGDMYNDYYVLDDAVFVLKPV

SEQ ID NO: 8600 - protein, 318 aa, Homo Sapiens
MRLLAGWLCLSLASVWLARRMWTLRSPLTRSLYVNMTSGPGGPAAAAGGRKENHQWYVCNREKLCESLQAVFVQSYLDQGTQIFLNNSIEKSGWLFIQLYHSFVSSVFSLFMSRTSINGLLGRGSMFVFSPDQFQRLLKINPDWKTHRLLDLGAGDGEVTKIMSPHFEEIYATELSETMIWQLQKKKYRVLGINEWQNTGFQYDVISCLNLLDRCDQPLTLLKDIRSVLEPTRGRVILALVLPFHPYVENVGGKWEKPSEILEIKGQNWEEQVNSLPEVFRKAGFVIEAFTRLPYLCEGDMYNDYYVLDDAVFVLKPV

SEQ ID NO: 8601 - protein, 139 aa, Homo Sapiens
MSRTSINGLLGRGSMFVFSPDQFQRLLKINPDWKTHRLLDLGAGDGEVTKIMSPHFEEIYATELSETMIWQLQKKKYRVLGINEWQNTGFQYDVISCLNLLDRCDQPLTLLKDIRSVLEPTRGRVILALVLPFHPYVEN

SEQ ID NO: 8602 - protein, 282 aa, Homo Sapiens
MWTLRSPLTRSLYVKENHQWYVCNREKLCESLQAVFVQSYLDQGTQIFLNNSIEKSGWLFIQLYHSFVSSVFSLFMSRTSINGLLGRGSMFVFSPDQFQRLLKINPDWKTHRLLDLGAGDGEVTKIMSPHFEEIYATELSETMIWQLQKKKYRVLGINEWQNTGFQYDVISCLNLLDRCDQPLTLLKDIRSVLEPTRGRVILALVLPFHPYVENVGGKWEKPSEILEIKGQNWEEQVNSLPEVFRKAGFVIEAFTRLPYLCEGDMYNDYYVLDDAVFVLKPV

SEQ ID NO: 8603 - protein, 128 aa, Homo Sapiens
  misc_feature (1)..(1): Xaa can be any naturally occurring amino acid
XPDQFQRLLKINPDWKTHRLLDLGAGDGEVTKIMSPHFEEIYATELSETMIWQLQKKKYRVLGINEWQNTGFQYDVISCLNLLDRCDQPLTLLKDIRSVLEPTRGRVILALVLPFHPYVENGKCGQSG

SEQ ID NO: 8604 - protein, 125 aa, Homo Sapiens
  misc_feature (1)..(1): Xaa can be any naturally occurring amino acid
XSYLDQGTQIFLNNSIEKSGWLFIQLYHSFVSSVFSLFMSRTSINGVLGINEWQNTGFQYDVISCLNLLDRCDQPLTLLKDIRSVLEPTRGRVILALVLPFHPYVENVGGKWEKPSEILEIKGQN

SEQ ID NO: 8605 - protein, 489 aa, Homo Sapiens
MPSGSSAALALAAAGVLYGGDDAQGMMAAMLSHAYGPGGCGAAAAALNGEQAALLRRKSVNTTECVPVPSSEHVAEIVGRQGCKIKALRAKTNTYIKTPVRGEEPIFVVTGRKEDVAMAKREILSAAEHFSMIRASRNKNGPALGGLSCSPNLPGQTTVQVRVPYRVVGLVVGPKGATIKRIQQQTHTYIVTPSRDKEPVFEVTGMPENVDRAREEIEMHIAMRTGNYIELNEENDFHYNGTDVSFEGGTLGSAWLSSNPVPPSRARMISNYRNDSSSSLGSGSTDSYFGSNRLADFSPTSPFSTGNFWFGDTLPSVGSEDLAVDSPAFDSLPTSAQTIWTPFEPVNPLSGFGSDPSGNMKTQRRGSQPSTPRLSPTFPESIEHPLARRVRSDPPSTGNHVGLPIYIPAFSNGTNSYSSSNGGSTSSSPPESRRKHDCVICFENEVIAALVPCGHNLFCMECANKICEKRTPSCPVCQTAVTQAIQIHS

SEQ ID NO: 8606 - protein, 659 aa, Homo Sapiens
MPSGSSAALALAAAPAPLPQPPPPPPPPPPPLPPPSGGPELEGDGLLLRERLAALGLDDPSPAEPGAPALRAPAAAAQGQARRAAELSPEERAPPGRPGAPEAAELELEEDEEEGEEAELDGDLLEEEELEEAEEEDRSSLLLLSPPAATASQTQQIPGGSLGSVLLPAARFDAREAAAAAAAAGVLYGGDDAQGMMAAMLSHAYGPGGCGAAAAALNGEQAALLRRKSVNTTECVPVPSSEHVAEIVGRQGCKIKALRAKTNTYIKTPVRGEEPIFVVTGRKEDVAMAKREILSAAEHFSMIRASRNKNGPALGGLSCSPNLPGQTTVQVRVPYRVVGLVVGPKGATIKRIQQQTHTYIVTPSRDKEPVFEVTGMPENVDRAREEIEMHIAMRTGNYIELNEENDFHYNGTDVSFEGGTLGSAWLSSNPVPPSRARMISNYRNDSSSSLGSGSTDSYFGSNRLADFSPTSPFSTGNFWFGDTLPSVGSEDLAVDSPAFDSLPTSAQTIWTPFEPVNPLSGFGSDPSGNMKTQRRGSQPSTPRLSPTFPESIEHPLARRVRSDPPSTGNHVGLPIYIPAFSNGTNSYSSSNGGSTSSSPPESRRKHDCVICFENEVIAALVPCGHNLFCMECANKICEKRTPSCPVCQTAVTQAIQIHS

SEQ ID NO: 8607 - protein, 115 aa, Homo Sapiens
YGGDDAQGMMAAMLSHAYGPGGCGAAAAALNGEQAALLRRKSVNTTECVPVPSSEHVAEIVGRQGECRGGEVQLGMAPGVGGETRERSVGRKRRTRRGPQVHREGVWEEPRVDQM

SEQ ID NO: 8608 - protein, 183 aa, Homo Sapiens
MRAAYLFLLFLPAGLLAQGQYDLDPLPPFPDHVQYTHYSDQIDNPDYYDYQEVTPRPSEEQFQFQSQQQVQQEVIPAPTPEPGNAELEPTEPGPLDCREEQYPCTRLYSIHRPCKQCLNEVCFYSLRRVYVINKEICVRTVCAHEELLRADLCRDKFSKCGVMASSGLCQSVAASCARSCGSC

SEQ ID NO: 8609 - protein, 182 aa, Homo Sapiens
MRAAYLFLLFLPGLLAQGQYDLDPLPPFPDHVQYTHYSDQIDNPDYYDYQEVTPRPSEEQFQFQSQQQVQQEVIPAPTPEPGNAELEPTEPGPLDCREEQYPCTRLYSIHRPCKQCLNEVCFYSLRRVYVINKEICVRTVCAHEELLRADLCRDKFSKCGVMASSGLCQSVAASCARSCGSC

SEQ ID NO: 8610 - protein, 17 aa, Homo Sapiens
MKLHCCLFTLVASIIVP

SEQ ID NO: 8611 - protein, 109 aa, Homo Sapiens
MKLHCCLFTLVASIIVPAAFVLEDVDFDQMVSLEANRSSYNASFPSSFELSASSHSDDDVIIAKEGTSVSIECLLTASHYEDVHWHNSKGQQLDGRSRGGKWLVSDNFL

SEQ ID NO: 8612 - protein, 123 aa, Homo Sapiens
MKLHCCLFTLVASIIVPAAFVLEDVDFDQMVSLEANRSSYNASFPSSFELSASSHSDDDVIIAKEGTSVSIECLLTASHYEDVHWHNSKGQQLDGRSRGGKWLVSDNFLNITNVAFDDRGLYT

SEQ ID NO: 8613 - protein, 362 aa, Homo Sapiens
MKLHCCLFTLVASIIVPAAFVLEDVDFDQMVSLEANRSSYNASFPSSFELSASSHSDDDVIIAKEGTSVSIECLLTASHYEDVHWHNSKGQQLDGRSRGGKWLVSDNFLNITNVAFDDRGLYTCFVTSPIRASYSVTLRVIFTSGDMSVYYMIVCLIAFTITLILNVTRLCMMSSHLRKTEKAINEFFRTEGAEKLQKAFEIAKRIPIITSAKTLELAKVTQFKTMEFARYIEELARSVPLPPLILNCRAFVEEMFEAVRVDDPDDLGERIKERPALNAQGGIYVINPEMGRSNSPGGDSDDGSLNEQGQEIAVQVSVHLQSETKSIDTESQGSSHFSPPDDIGSAESNCNYKDGAYENCQL

SEQ ID NO: 8614 - protein, 216 aa, Homo Sapiens
MSVYYMIVCLIAFTITLILNVTRLCMMSSHLRKTEKAINEFFRTEGAEKLQKAFEIAKRIPIITSAKTLELAKVTQFKTMEFARYIEELARSVPLPPLILNCRAFVEEMFEAVRVDDPDDLGERIKERPALNAQGGIYVINPEMGRSNSPGGDSDDGSLNEQGQEIAVQVSVHLQSETKSIDTESQGSSHFSPPDDIGSAESNCNYKDGAYENCQL

SEQ ID NO: 8615 - protein, 73 aa, Homo Sapiens
MDRLKSHLTVCFLPSVPFLILVSTLATAKSVTNSTLNGTNVVLGSVPVIIARTDHIIVKEGNSALINCSVYGI

SEQ ID NO: 8616 - protein, 90 aa, Homo Sapiens
MDRLKSHLTVCFLPSVPFLILVSTLATAKSVTNSTLNGTNVVLGSVPVIIARTDHIIVKEGNSALINCSVYGIPDPQFKWYNSIGKLLKE

SEQ ID NO: 8617 - protein, 98 aa, Homo Sapiens
MDRLKSHLTVCFLPSVPFLILVSTLATAKSVTNSTLNGTNVVLGSVPVIIARTDHIIVKEGNSALINCSVYGIPDPQFKWYNSIGKLLKEEEDEKERG

SEQ ID NO: 8618 - protein, 409 aa, Homo Sapiens
MDRLKSHLTVCFLPSVPFLILVSTLATAKSVTNSTLNGTNVVLGSVPVIIARTDHIIVKEGNSALINCSVYGIPDPQFKWYNSIGKLLKEEEDEKERGGGKWQMHDSGLLNITKVSFSDRGKYTCVASNIYGTVNNTVTLRVIFTSGDMGVYYMVVCLVAFTIVMVLNITRLCMMSSHLKKTEKAINEFFRTEGAEKLQKAFEIAKRIPIITSAKTLELAKVTQFKTMEFARYIEELARSVPLPPLIMNCRTIMEEIMEVVGLEEQGQNFVRHTPEGQEAADRDEVYTIPNSLKRSDSPAADSDASSLHEQPQQIAIKVSVHPQSKKEHADDQEGGQFEVKDVEETELSAEHSPETAEPSTDVTSTELTSEEPTPVEVPDKVLPPAYLEATEPAVTHDKNTCIIYESHV

SEQ ID NO: 8619 - protein, 102 aa, Homo Sapiens
MDRLKSHLTVCFLPSVPFLILVSTLATAKSVTNSTLNGTNVVLGSVPVIIARTDHIIVKEGNSALINCSVYGIPDPQFKWYNSIGKLLKEEEDEKERGGGRL

SEQ ID NO: 8620 - protein, 102 aa, Homo Sapiens; identical to SEQ ID NO: 8619

SEQ ID NO: 8621 - protein, 44 aa, Homo Sapiens
MHDSGLLNITKVSFSDRGKYTCVASNIYGTVNNTVTLRVIFTSG

SEQ ID NO: 8622 - protein, 64 aa, Homo Sapiens
MHDSGLLNITKVSFSDRGKYTCVASNIYGTVNNTVTLRVIFTSGDMGVYYMVVCLVAFTIVMVL

SEQ ID NO: 8623 - protein, 157 aa, Homo Sapiens
MHDSGLLNITKVSFSDRGKYTCVASNIYGTVNNTVTLRVIFTSGDMGVYYMVVCLVAFTIVMVLNITRLCMMSSHLKKTEKAINEFFRTEGAEKLQKAFEIAKRIPIITSAKTLELAKVTQFKTMEFARYIEELARSVPLPPLIMNCRTIMEEIMEV

SEQ ID NO: 8624 - protein, 306 aa, Homo Sapiens
MHDSGLLNITKVSFSDRGKYTCVASNIYGTVNNTVTLRVIFTSGDMGVYYMVVCLVAFTIVMVLNITRLCMMSSHLKKTEKAINEFFRTEGAEKLQKAFEIAKRIPIITSAKTLELAKVTQFKTMEFARYIEELARSVPLPPLIMNCRTIMEEIMEVVGLEEQGQNFVRHTPEGQEAADRDEVYTIPNSLKRSDSPAADSDASSLHEQPQQIAIKVSVHPQSKKEHADDQEGGQFEVKDVEETELSAEHSPETAEPSTDVTSTELTSEEPTPVEVPDKVLPPAYLEATEPAVTHDKNTCIIYESHV

SEQ ID NO: 8625 - protein, 279 aa, Homo Sapiens
MGELSPLQRPLATEGTMKAQGVLLKLALLALPLLLLLSTPPCAPQVSGIRGDALERFCLQQPLDCDDIYAQGYQSDGVYLIYPSGPSVPVPVFCDMTTEGGKWTVFQKRFNGSVSFFRGWNDYKLGFGRADGEYWLGLQNMHLLTLKQKYELRVDLEDFENNTAYAKYADFSISPNAVSAEEDGYTLFVAGFEDGGAGDSLSYHSGQKFSTFDRDQDLFVQNCAALSSGAFWFRSCHFANLNGFYLGGSHLSYANGINWAQWKGFYYSLKRTEMKIRRA

SEQ ID NO: 8626 - protein, 255 aa, Homo Sapiens
MKALLALPLLLLLSTPPCAPQVSGIRGDALERFCLQQPLDCDDIYAQGYQSDGVYLIYPSGPSVPVPVFCDMTTEGGKWTVFQKRFNGSVSFFRGWNDYKLGFGRADGEYWLGLQNMHLLTLKQKYELRVDLEDFENNTAYAKYADFSISPNAVSAEEDGYTLFVAGFEDGGAGDSLSYHSGQKFSTFDRDQDLFVQNCAALSSGAFWFRSCHFANLNGFYLGGSHLSYANGINWAQWKGFYYSLKRTEMKIRRA

SEQ ID NO: 8627 - protein, 280 aa, Homo Sapiens
MVGANAKRTGDLWSWEGAVLTLSAHRQALLALPLLLLLSTPPCAPQVSGIRGDALERFCLQQPLDCDDIYAQGYQSDGVYLIYPSGPSVPVPVFCDMTTEGGKWTVFQKRFNGSVSFFRGWNDYKLGFGRADGEYWLGLQNMHLLTLKQKYELRVDLEDFENNTAYAKYADFSISPNAVSAEEDGYTLFVAGFEDGGAGDSLSYHSGQKFSTFDRDQDLFVQNCAALSSGAFWFRSCHFANLNGFYLGGSHLSYANGINWAQWKGFYYSLKRTEMKIRRA

SEQ ID NO: 8628 - protein, 151 aa, Homo Sapiens
MSLLGPKVLLFLAAFIITSDDVTQATPETFTEDPNLVNDPATDETVLAVLADIAPSTDDLECWDEKFTCTRLYSVHRPVKQCIHQLCFTSLRRMYIVNKEICSRLVCKEHEAMKDELCRQMAGLPPRRLRRSNYFRLPPCENVDLQRPNGL

SEQ ID NO: 8629 - protein, 148 aa, Homo Sapiens
MSLLGPKVLLFLAAFIITSDWIPLGVNSQRGDDVTQATPETFTEDPNLVNDPATDETECWDEKFTCTRLYSVHRPVKQCIHQLCFTSLRRMYIVNKEICSRLVCKEHEAMKDELCRQMAGLPPRRLRRSNYFRLPPCENVDLQRPNGL

SEQ ID NO: 8630 - protein, 91 aa, Homo Sapiens
MSLLGPKVLLFLAAFIITSDWIPLGVNSQRGDDVTQATPETFTEDPNLVNDPATDETVLAVLADIAPSTDDLASLSEKNTTAECWDEKFTC

SEQ ID NO: 8631 - protein, 173 aa, Homo Sapiens
MSLLGPKVLLFLAAFIITSDWIPLGVNSQRGDDVTQATPETFTEDPNLVNDPATDETVLAVLADIAPSTDDLASLSEKNTTAECWDEKFTCTRLYSVHRPVKQCIHQLCFTSLRRMYIVNKEICSRLVCKEHEAMKDELCRQMAGLPPRRLRRSNYFRLPPCENVDLQRPNGL

SEQ ID NO: 8632 - protein, 138 aa, Homo Sapiens
MSLLGPKVLLFLAAFIITSDWIPLGVNSQRGDDVTQATPETFTEDPNLVNDPATDETVLAVLADIAPSTDDLASLSEKNTTAECWDEKFTCTRLYSVHRPVKQCIHQLCFTSLRRMYIVNKEICSRLVCKEHEAMKDP

SEQ ID NO: 8633 - protein, 109 aa, Homo Sapiens
MSLLGPKVLLFLAAFIITSDWIPLGVNSQRGDDVTQATPETFTEDPNLVNDPATDETVLAVLADIAPSTDDLDELCRQMAGLPPRRLRRSNYFRLPPCENVDLQRPNGL

SEQ ID NO: 8634 - protein, 163 aa, Homo Sapiens
MSLLGPKVLLFLAAFIITSDWIPLGVNSQRGDDVTQATPETFTEDPNLVNDPATDETVLAVLADIAPSTDDLECWDEKFTCTRLYSVHRPVKQCIHQLCFTSLRRMYIVNKEICSRLVCKEHEAMKDELCRQMAGLPPRRLRRSNYFRLPPCENVDLQRPNGL

SEQ ID NO: 8635 - protein, 163 aa, Homo Sapiens; identical to SEQ ID NO: 8634

SEQ ID NO: 8636 - protein, 128 aa, Homo Sapiens
MSLLGPKVLLFLAAFIITSDWIPLGVNSQRGDDVTQATPETFTEDPNLVNDPATDETVLAVLADIAPSTDDLECWDEKFTCTRLYSVHRPVKQCIHQLCFTSLRRMYIVNKEICSRLVCKEHEAMKDP

SEQ ID NO: 8637 - protein, 163 aa, Homo Sapiens
  misc_feature (1)..(1): Xaa can be any naturally occurring amino acid
XLAAFIITSDWIPLGVNSQRGDDVTQATPETFTEDPNLVNDPATDETVLAVLADIAPSTDDLASLSEKNTTAECWDEKFTCTRLYSVHRPVKQCIHQLCFTSLRRMYIVNKEICSRLVCKEHEAMKDELCRQMAGLPPRRLRRSNYFRLPPCENVDLQRPNGL

SEQ ID NO: 8638 - protein, 79 aa, Homo Sapiens
YSVHRPVKQCIHQLCFTSLRRMYIVNKEICSRLVCKEHEAMKDELCRQMAGLPPRRLRRSNYFRLPPCENVDLQRPNGL

SEQ ID NO: 8639 - protein, 75 aa, Homo Sapiens
FDFIHDVNKKHKEFVGNWNKNAVHVNLFETPVEAQYVRLYPTSCHTACTLRFELLGCELNARKADLRRGADDREQ

SEQ ID NO: 8640 - protein, 268 aa, Homo Sapiens
MPRPRLLAALCGALLCAPSLLVALDICSKNPCHNGGLCEEISQEVRGDVFPSYTCTCLKGYAGNHCETKCVEPLGLENGNIANSQIAASSVRVTFLGLQHWVPELARLNRAGMVNAWTPSSNDDNPWIQVNLLRRMWVTGVVTQGASRLASHEYLKAFKVAYSLNGHEFDFIHDVNKKHKEFVGNWNKNAVHVNLFETPVEAQYVRLYPTSCHTACTLRFELLGCELNAATRPGACISSAGTPPMHGWTSRATSTPGLRGATVTISGC

SEQ ID NO: 8641 - protein, 335 aa, Homo Sapiens
MPRPRLLAALCGALLCAPSLLVALDICSKNPCHNGGLCEEISQEVRGDVFPSYTCTCLKGYAGNHCETKCVEPLGLENGNIANSQIAASSVRVTFLGLQHWVPELARLNRAGMVNAWTPSSNDDNPWIQVNLLRRMWVTGVVTQGASRLASHEYLKAFKVAYSLNGHEFDFIHDVNKKHKEFVGNWNKNAVHVNLFETPVEAQYVRLYPTSCHTACTLRFELLGCELNGCANPLGLKNNSIPDKQITASSSYKTWGLHLFSWNPSYARLDKQGNFNAWVAGSYGNDQWLQIFPGNWDNHSHKKNLFETPILARYVRILPVAWHNRIALRLELLGC

SEQ ID NO: 8642 - protein, 387 aa, Homo Sapiens
MPRPRLLAALCGALLCAPSLLVALDICSKNPCHNGGLCEEISQEVRGDVFPSYTCTCLKGYAGNHCETKCVEPLGLENGNIANSQIAASSVRVTFLGLQHWVPELARLNRAGMVNAWTPSSNDDNPWIQVNLLRRMWVTGVVTQGASRLASHEYLKAFKVAYSLNGHEFDFIHDVNKKHKEFVGNWNKNAVHVNLFETPVEAQYVRLYPTSCHTACTLRFELLGCELNGCANPLGLKNNSIPDKQITASSSYKTWGLHLFSWNPSYARLDKQGNFNAWVAGSYGNDQWLQVDLGSSKEVTGIITQGARNFGSVQFVASYKVAYSNDSANWTEYQDPRTGSSKIFPGNWDNHSHKKNLFETPILARYVRILPVAWHNRIALRLELLGC

SEQ ID NO: 8643 - protein, 387 aa, Homo Sapiens; identical to SEQ ID NO: 8642

SEQ ID NO: 8644 - protein, 343 aa, Homo Sapiens
MPRPRLLAALCGALLCAPSLLVALECVEPLGLENGNIANSQIAASSVRVTFLGLQHWVPELARLNRAGMVNAWTPSSNDDNPWIQVNLLRRMWVTGVVTQGASRLASHEYLKAFKVAYSLNGHEFDFIHDVNKKHKEFVGNWNKNAVHVNLFETPVEAQYVRLYPTSCHTACTLRFELLGCELNGCANPLGLKNNSIPDKQITASSSYKTWGLHLFSWNPSYARLDKQGNFNAWVAGSYGNDQWLQVDLGSSKEVTGIITQGARNFGSVQFVASYKVAYSNDSANWTEYQDPRTGSSKIFPGNWDNHSHKKNLFETPILARYVRILPVAWHNRIALRLELLGC

SEQ ID NO: 8645 - protein, 25 aa, Homo Sapiens
MPRPRLLAALCGALLCAPSLLVALG

SEQ ID NO: 8646 - protein, 43 aa, Homo Sapiens
MAAEFDTFLASGLRWFCHVDDDNYVNPRALLQLLRAFPLARDV

SEQ ID NO: 8647 - protein, 132 aa, Homo Sapiens
MAAEFDTFLASGLRWFCHVDDDNYVNPRALLQLLRAFPLARDVYVGRPSLNRPIHASEPQPHNRTRLVQFWFATGGAGFCINRKLALKMAPWASGSRFMDTSALIRLPDDCTMGYIIECKLGGRLQPSPLFH

SEQ ID NO: 8648 - protein, 130 aa, Homo Sapiens
MQCRLPRGLAGALLTLLCMGLLCLRYHLNLSPQRVQGTPELSQPNPGPPKLQLHDVFIAVKTTRAFHRLRLELLLDTWVSRTREQGPTLWSPTAPRNTATQLCPARWLLSSTPSWPVGLGGSAMWTMTTM

SEQ ID NO: 8649 - protein, 321 aa, Homo Sapiens
MQCRLPRGLAGALLTLLCMGLLCLRYHLNLSPQRVQGTPELSQPNPGPPKLQLHDVFIAVKTTRAFHRLRLELLLDTWVSRTREQTFVFTDSPDKGLQERLGSHLVVTNCSAEHSHPALSCKMAAEFDTFLASGLRWFCHVDDDNYVNPRALLQLLRAFPLARDVYVGRPSLNRPIHASEPQPHNRTRLVQFWFATGGAGFCINRKLALKMAPWASGSRFMDTSALIRLPDDCTMGYIIECKLGGRLQPSPLFHSHLETLQLLRTAQLPEQVTLSYGVFEGKLNVIKLQGPFSPEEDPSRFRSLHCLLYPDTPWCPQLGAR

SEQ ID NO: 8650 - protein, 118 aa, Homo Sapiens
MQCRLPRGLAGALLTLLCMGLLCLRYHLNLSPQRVQGTPELSQPNPGPPKLQLHDVFIAVKTTRAFHRLRLELLLDTWVSRTREQTFVFTDSPDKGLQERLGSPDSSSLLQGPTLWSP

SEQ ID NO: 8651 - protein, 127 aa, Homo Sapiens
MQCRLPRGLAGALLTLLCMGLLCLRYHLNLSPQRVQGTPELSQPNPGPPKLQLHDVFIAVKTTRAFHRLRLELLLDTWVSRTREQVTNICLHRQPRQRPPGETGVPPCGHQLLRGTQPPSSVLQDGC

SEQ ID NO: 8652 - protein, 307 aa, Homo Sapiens
MQCRLPRGLAGALLTLLCMGLLCLRYHLNLSPQRVQGTPELSQPNPGPPKLQLHDVFIAVKTTRAFHRLRLELLLDTWVSRTREQVTRSHLVVTNCSAEHSHPALSCKMAAEFDTFLASGLRWFCHVDDDNYVNPRALLQLLRAFPLARDVYVGRPSLNRPIHASEPQPHNRTRLVQFWFATGGAGFCINRKLALKMAPWASGSRFMDTSALIRLPDDCTMGYIIECKLGGRLQPSPLFHSHLETLQLLRTAQLPEQVTLSYGVFEGKLNVIKLQGPFSPEEDPSRFRSLHCLLYPDTPWCPQLGAR

SEQ ID NO: 8653 - protein, 87 aa, Homo Sapiens
  misc_feature (1)..(1): Xaa can be any naturally occurring amino acid
XSHLETLQLLRTAQLPEQISLPPLSALSRYTLVSPAGCPMNPELLGKGWAETSGCALAPKVALWVPGKCLVIGSPWQGLRVVGKPRI

SEQ ID NO: 8654 - protein, 3065 aa, Homo Sapiens
MEEKQQIILANQDGGTVAGAAPTFFVILKQPGNGKTDQGILVTNQDACALASSVSSPVKSKGKICLPADCTVGGITVTLDNNSMWNEFYHRSTEMILTKQGRRMFPYCRYWITGLDSNLKYILVMDISPVDNHRYKWNGRWWEPSGKAEPHVLGRVFIHPESPSTGHYWMHQPVSFYKLKLTNNTLDQEGHIILHSMHRYLPRLHLVPAEKAVEVIQLNGPGVHTFTFPQTEFFAVTAYQNIQITQLKIDYNPFAKGFRDDGLNNKPQRDGKQKNSSDQEGNNISSSSGHRVRLTEGQGSEIQPGDLDPLSRGHETSGKGLEKTSLNIKRDFLGFMDTDSALSEVPQLKQEISECLIASSFEDDSRVASPLDQNGSFNVVIKEEPLDDYDYELGECPEGVTVKQEETDEETDVYSNSDDDPILEKQLKRHNKVDNPEADHLSSKWLPSSPSGVAKAKMFKLDTGKMPVVYLEPCAVTRSTVKISELPDNMLSTSRKDKSSMLAELEYLPTYIENSNETAFCLGKESENGLRKHSPDLRVVQKYPLLKEPQWKYPDISDSISTERILDDSKDSVGDSLSGKEDLGRKRTTMLKIATAAKVVNANQNASPNVPGKRGRPRKLKLCKAGRPPKNTGKSLISTKNTPVSPGSTFPDVKPDLEDVDGVLFVSFESKEALDIHAVDGTTEESSSLQASTTNDSGYRARISQLEKELIEDLKTLRHKQVIHPGLQEVGLKLNSVDPTMSIDLKYLGVQLPLAPATSFPFWNLTGTNPASPDAGFPFVSRTGKTNDFTKIKGWRGKFHSASASRNEGGNSESSLKNRSAFCSDKLDEYLENEGKLMETSMGFSSNAPTSPVVYQLPTKSTSYVRTLDSVLKKQSTISPSTSYSLKPHSVPPVSRKAKSQNRQATFSGRTKSSYKSILPYPVSPKQKYSHVILGDKVTKNSSGIISENQANNFVVPTLDENIFPKQISLRQAQQQQQQQQGSRPPGLSKSQVKLMDLEDCALWEGKPRTYITEERADVSLTTLLTAQASLKTKPIHTIIRKRAPPCNNDFCRLGCVCSSLALEKRQPAHCRRPDCMFGCTCLKRKVVLVKGGSKTKHFQRKAAHRDPVFYDTLGEEAREEEEGIREEEEQLKEKKKRKKLEYTICETEPEQPVRHYPLWVKVEGEVDPEPVYIPTPSVIEPMKPLLLPQPEVLSPTVKGKLLTGIKSPRSYTPKPNPVIREEDKDPVYLYFESMMTCARVRVYERKKEDQRQPSSSSSPSPSFQQQTSCHSSPENHNNAKEPDSEQQPLKQLTCDLEDDSDKLQEKSWKSSCNEGESSSTSYMHQRSPGGPTKLIEIISDCNWEEDRNKILSILSQHINSNMPQSLKVGSFIIELASQRKSRGEKNPPVYSSRVKISMPSCQDQDDMAEKSGSETPDGPLSPGKMEDISPVQTDALDSVRERLHGGKGLPFYAGLSPAGKLVAYKRKPSSSTSGLIQVASNAKVAASRKPRTLLPSTSNSKMASSSGTATNRPGKNLKAFVPAKRPIAARPSPGGVFTQFVMSKVGALQQKIPGVSTPQTLAGTQKFSIRPSPVMVVTPVVSSEPVQVCSPVTAAVTTTTPQVFLENTTAVTPMTAISDVETKETTYSSGATTTGVVEVSETNTSTSVTSTQSTATVNLTKTTGITTPVASVAFPKSLVASPSTITLPVASTASTSLVVVTAAASSSMVTTPTSSLGSVPIILSGINGSPPVSQRPENAAQIPVATPQVSPNTVKRAGPRLLLIPVQQGSPTLRPVSNTQLQGHRMVLQPVRSPSGMNLFRHPNGQIVQLLPLHQLRGSNTQPNLQPVMFRNPGSVMGIRLPAPSKPSETPPSSTSSSAFSVMNPVIQAVGSSSAVNVITQAPSLLSSGASFVSQAGTLTLRISPPEPQSFASKTGSETKITYSSGGQPVGTASLIPLQSGSFALLQLPGQKPVPSSILQHVASLQMKRESQNPDQKDETNSIKREQETKKVLQSEGEAVDPEANVIKQNSGAATSEETLNDSLEDRGDHLDEECLPEEGCATVKPSEHSCITGSHTDQDYKDVNEEYGARNRKSSKEKVAVLEVRTISEKASNKTVQNLSKVQHQKLGDVKVEQQKGFDNPEENSSEFPVTFKEESKFELSGSKVMEQQSNLQPEAKEKECGDSLEKDRERWRKHLKGPLTRKCVGASQECKKEADEQLIKETKTCQENSDVFQQEQGISDLLGKSGITEDARVLKTECDSWSRISNPSAFSIVPRRAAKSSRGNGHFQGHLLLPGEQIQPKQEKKGGRSSADFTVLDLEEDDEDDNEKTDDSIDEIVDVVSDYQSEEVDDVEKNNCVEYIEDDEEHVDIETVEELSEEINVAHLKTTAAHTQSFKQPSCTHISADEKAAERSRKAPPIPLKLKPDYWSDKLQKEAEAFAYYRRTHTANERRRRGEMRDLFEKLKITLGLLHSSKVSKSLILTRAFSEIQGLTDQADKLIGQKNLLTRKRNILIRKVSSLSGKTEEVVLKKLEYIYAKQQALEAQKRKKKMGSDEFDISPRISKQQEGSSASSVDLGQMFINNRRGKPLILSRKKDQATENTSPLNTPHTSANLVMTPQGQLLTLKGPLFSGPVVAVSPDLLESDLKPQVAGSAVALPENDDLFMMPRIVNVTSLATEGGLVDMGGSKYPHEVPDSKPSDHLKDTVRNEDNSLEDKGRISSRGNRDGRVTLGPTQVFLANKDSGYPQIVDVSNMQKAQEFLPKKISGDMRGIQYKWKESESRGERVKSKDSSFHKLKMKDLKDSSIEMELRKVTSAIEEAALDSSELLTNMEDEDDTDETLTSLLNEIAFLNQQLNDDSVGLAELPSSMDTEFPGDARRAFISKVPPGSRATFQVEHLGTGLKELPDVQGESDSISPLLLHLEDDDFSENEKQLAEPASEPDVLKIVIDSEIKDSLLSNKKAIDGGKNTSGLPAEPESVSSPPTLHMKTGLENSNSTDTLWRPMPKLAPLGLKVANPSSDADGQSLKVMPCLAPIAAKVGSVGHKMNLTGNDQEGRESKVMPTLAPVVAKLGNSGASPSSAGK

SEQ ID NO: 8655 - protein, 1086 aa, Homo Sapiens
MEEKQQIILANQDGGTVAGAAPTFFVILKQPGNGKTDQGILVTNQDACALASSVSSPVKSKGKICLPADCTVGGITVTLDNNSMWNEFYHRSTEMILTKQGRRMFPYCRYWITGLDSNLKYILVMDISPVDNHRYKWNGRWWEPSGKAEPHVLGRVFIHPESPSTGHYWMHQPVSFYKLKLTNNTLDQEGHIILHSMHRYLPRLHLVPAEKAVEVIQLNGPGVHTFTFPQTEFFAVTAYQNIQITQLKIDYNPFAKGFRDDGLNNKPQRDGKQKNSSDQEGNNISSSSGHRVRLTEGQGSEIQPGDLDPLSRGHETSGKGLEKTSLNIKRDFLGFMDTDSALSEVPQLKQEISECLIASSFEDDSRVASPLDQNGSFNVVIKEEPLDDYDYELGECPEGVTVKQEETDEETDVYSNSDDDPILEKQLKRHNKVDNPEADHLSSKWLPSSPSGVAKAKMFKLDTGKMPVVYLEPCAVTRSTVKISELPDNMLSTSRKDKSSMLAELEYLPTYIENSNETAFCLGKESENGLRKHSPDLRVVQKYPLLKEPQWKYPDISDSISTERILDDSKDSVGDSLSGKEDLGRKRTTMLKIATAAKVVNANQNASPNVPGKRGRPRKLKLCKAGRPPKNTGKSLISTKNTPVSPGSTFPDVKPDLEDVDGVLFVSFESKEALDIHAVDGTTEESSSLQASTTNDSGYRARISQLEKELIEDLKTLRHKQVIHPGLQEVGLKLNSVDPTMSIDLKYLGVQLPLAPATSFPFWNLTGTNPASPDAGFPFVSRTGKTNDFTKIKGWRGKFHSASASRNEGGNSESSLKNRSAFCSDKLDEYLENEGKLMETSMGFSSNAPTSPVVYQLPTKSTSYVRTLDSVLKKQSTISPSTSYSLKPHSVPPVSRKAKSQNRQATFSGRTKSSYKSILPYPVSPKQKYSHVILGDKVTKNSSGIISENQANNFVVPTLDENIFPKQISLRQAQQQQQQQQGSRPPGLSKSQVKLMDLEDCALWEGKPRTYITEERADVSLTTLLTAQASLKTKPIHTIIRKRAPPCNNDFCRLGCVCSSLALEKRQPAHCRRPDCMFGCTCLKRK

SEQ ID NO: 8656 - protein, 1138 aa, Homo Sapiens
MEEKQQIILANQDGGTVAGAAPTFFVILKQPGNGKTDQGILVTNQDACALASSVSSPVKSKGKICLPADCTVGGITVTLDNNSMWNEFYHRSTEMILTKQGRRMFPYCRYWITGLDSNLKYILVMDISPVDNHRYKWNGRWWEPSGKAEPHVLGRVFIHPESPSTGHYWMHQPVSFYKLKLTNNTLDQEGHIILHSMHRYLPRLHLVPAEKAVEVIQLNGPGVHTFTFPQTEFFAVTAYQNIQITQLKIDYNPFAKGFRDDGLNNKPQRDGKQKNSSDQEGNNISSSSGHRVRLTEGQGSEIQPGDLDPLSRGHETSGKGLEKTSLNIKRDFLGFMDTDSALSEVPQLKQEISECLIASSFEDDSRVASPLDQNGSFNVVIKEEPLDDYDYELGECPEGVTVKQEETDEETDVYSNSDDDPILEKQLKRHNKVDNPEADHLSSKWLPSSPSGVAKAKMFKLDTGKMPVVYLEPCAVTRSTVKISELPDNMLSTSRKDKSSMLAELEYLPTYIENSNETAFCLGKESENGLRKHSPDLRVVQKYPLLKEPQWKYPDISDSISTERILDDSKDSVGDSLSGKEDLGRKRTTMLKIATAAKVVNANQNASPNVPGKRGRPRKLKLCKAGRPPKNTGKSLISTKNTPVSPGSTFPDVKPDLEDVDGVLFVSFESKEALDIHAVDGTTEESSSLQASTTNDSGYRARISQLEKELIEDLKTLRHKQVIHPGLQEVGLKLNSVDPTMSIDLKYLGVQLPLAPATSFPFWNLTGTNPASPDAGFPFVSRTGKTNDFTKIKGWRGKFHSASASRNEGGNSESSLKNRSAFCSDKLDEYLENEGKLMETSMGFSSNAPTSPVVYQLPTKSTSYVRTLDSVLKKQSTISPSTSYSLKPHSVPPVSRKAKSQNRQATFSGRTKSSYKSILPYPVSPKQKYSHVILGDKVTKNSSGIISENQANNFVVPTLDENIFPKQISLRQAQQQQQQQQGSRPPGLSKSQVKLMDLEDCALWEGKPRTYITEERADVSLTTLLTAQASLKTKPIHTIIRKRAPPCNNDFCRLGCVCSSLALEKRQPAHCRRPDCMFGCTCLKRKVVLVKGGSKTKHFQRKAAHRDPVFYDTLGEEAREEEEGIREEEEQLKEKKKR

SEQ ID NO: 8657 - protein, 2856 aa, Homo Sapiens
MEEKQQIILANQDGGTVAGAAPTFFVILKQPGNGKTDQGILVTNQDACALASSVSSPVKSKGKICLPADCTVGGITVTLDNNSMWNEFYHRSTEMILTKQGRRMFPYCRYWITGLDSNLKYILVMDISPVDNHRYKWNGRWWEPSGKAEPHVLGRVFIHPESPSTGHYWMHQPVSFYKLKLTNNTLDQEGHIILHSMHRYLPRLHLVPAEKAVEVIQLNGPGVHTFTFPQTEFFAVTAYQNIQITQLKIDYNPFAKGFRDDGLNNKPQRDGKQKNSSDQEGNNISSSSGHRVRLTEGQGSEIQPGDLDPLSRGHETSGKGLEKTSLNIKRDFLGFMDTDSALSEVPQLKQEISECLIASSFEDDSRVASPLDQNGSFNVVIKEEPLDDYDYELGECPEGVTVKQEETDEETDVYSNSDDDPILEKQLKRHNKVDNPEADHLSSKWLPSSPSGVAKAKMFKLDTGKMPVVYLEPCAVTRSTVKISELPDNMLSTSRKDKSSMLAELEYLPTYIENSNETAFCLGKESENGLRKHSPDLRVVQKYPLLKEPQWKYPDISDSISTERILDDSKDSVGDSLSGKEDLGRKRTTMLKIATAAKVVNANQNASPNVPGKRGRPRKLKLCKAGRPPKNTGKSLISTKNTPVSPGSTFPDVKPDLEDVDGVLFVSFESKEALDIHAVDGTTEESSSLQASTTNDSGYRARISQLEKELIEDLKTLRHKQVIHPGLQEVGLKLNSVDPTMSIDLKYLGVQLPLAPATSFPFWNLTGTNPASPDAGFPFVSRTGKTNDFTKIKGWRGKFHSASASRNEGGNSESSLKNRSAFCSDKLDEYLENEGKLMETSMGFSSNAPTSPVVYQLPTKSTSYVRTLDSVLKKQSTISPSTSYSLKPHSVPPVSRKAKSQNRQATFSGRTKSSYKSILPYPVSPKQKYSHVILGDKVTKNSSGIISENQANNFVVPTLDENIFPKQISLRQAQQQQQQQQGSRPPGLSKSQVKLMDLEDCALWEGKPRTYITEERADVSLTTLLTAQASLKTKPIHTIIRKRAPPCNNDFCRLGCVCSSLALEKRQPAHCRRPDCMFGCTCLKRKVVLVKGGSKTKHFQRKAAHRDPVFYDTLGEEAREEEEGIREEEEQLKEKKKRKKLEYTICETEPEQPVRHYPLWVKVEGEVDPEPVYIPTPSVIEPMKPLLLPQPEVLSPTVKGKLLTGIKSPRSYTPKPNPVIREEDKDPVYLYFESMMTCARVRVYERKKEDQRQPSSSSSPSPSFQQQTSCHSSPENHNNAKEPDSEQQPLKQLTCDLEDDSDKLQEKSWKSSCNEGESSSTSYMHQRSPGGPTKLIEIISDCNWEEDRNKILSILSQHINSNMPQSLKVGSFIIELASQRKSRGEKNPPVYSSRVKISMPSCQDQDDMAEKSGSETPDGPLSPGKMEDISPVQTDALDSVRERLHGGKGLPFYAGLSPAGKLVAYKRKPSSSTSGLIQVASNAKVAASRKPRTLLPSTSNSKMASSSGTATNRPGKNLKAFVPAKRPIENAAQIPVATPQVSPNTVKRAGPRLLLIPVQQGSPTLRPVSNTQLQGHRMVLQPVRSPSGMNLFRHPNGQIVQLLPLHQLRGSNTQPNLQPVMFRNPGSVMGIRLPAPSKPSETPPSSTSSSAFSVMNPVIQAVGSSSAVNVITQAPSLLSSGASFVSQAGTLTLRISPPEPQSFASKTGSETKITYSSGGQPVGTASLIPLQSGSFALLQLPGQKPVPSSILQHVASLQMKRESQNPDQKDETNSIKREQETKKVLQSEGEAVDPEANVIKQNSGAATSEETLNDSLEDRGDHLDEECLPEEGCATVKPSEHSCITGSHTDQDYKDVNEEYGARNRKSSKEKVAVLEVRTISEKASNKTVQNLSKVQHQKLGDVKVEQQKGFDNPEENSSEFPVTFKEESKFELSGSKVMEQQSNLQPEAKEKECGDSLEKDRERWRKHLKGPLTRKCVGASQECKKEADEQLIKETKTCQENSDVFQQEQGISDLLGKSGITEDARVLKTECDSWSRISNPSAFSIVPRRAAKSSRGNGHFQGHLLLPGEQIQPKQEKKGGRSSADFTVLDLEEDDEDDNEKTDDSIDEIVDVVSDYQSEEVDDVEKNNCVEYIEDDEEHVDIETVEELSEEINVAHLKTTAAHTQSFKQPSCTHISADEKAAERSRKAPPIPLKLKPDYWSDKLQKEAEAFAYYRRTHTANERRRRGEMRDLFEKLKITLGLLHSSKVSKSLILTRAFSEIQGLTDQADKLIGQKNLLTRKRNILIRKVSSLSGKTEEVVLKKLEYIYAKQQALEAQKRKKKMGSDEFDISPRISKQQEGSSASSVDLGQMFINNRRGKPLILSRKKDQATENTSPLNTPHTSANLVMTPQGQLLTLKGPLFSGPVVAVSPDLLESDLKPQVAGSAVALPENDDLFMMPRIVNVTSLATEGGLVDMGGSKYPHEVPDSKPSDHLKDTVRNEDNSLEDKGRISSRGNRDGRVTLGPTQVFLANKDSGYPQIVDVSNMQKAQEFLPKKISGDMRGIQYKWKESESRGERVKSKDSSFHKLKMKDLKDSSIEMELRKVTSAIEEAALDSSELLTNMEDEDDTDETLTSLLNEIAFLNQQLNDDSVGLAELPSSMDTEFPGDARRAFISKVPPGSRATFQVEHLGTGLKELPDVQGESDSISPLLLHLEDDDFSENEKQLAEPASEPDVLKIVIDSEIKDSLLSNKKAIDGGKNTSGLPAEPESVSSPPTLHMKTGLENSNSTDTLWRPMPKLAPLGLKVANPSSDADGQSLKVMPCLAPIAAKVGSVGHKMNLTGNDQEGRESKVMPTLAPVVAKLGNSGASPSSAGK

SEQ ID NO: 8658 - protein, 3065 aa, Homo Sapiens; identical to SEQ ID NO: 8654

SEQ ID NO: 8659 - protein, 2856 aa, Homo Sapiens; identical to SEQ ID NO: 8657

SEQ ID NO: 8660 - protein, 61 aa, Homo Sapiens [sequence omitted]

SEQ ID NO: 8661 - protein, 83 aa, Homo Sapiens
  misc_feature (1)..(1): Xaa can be any naturally occurring amino acid
XDQEGNNISSSSGHRVRLTEGQGSEIQPGDLDPLSRGHETSGKGLEKTSLNIKRDFLGFMDTDSALSEVPQLKQEISEWYSFA

SEQ ID NO: 8662 - protein, 1174 aa, Homo Sapiens
  misc_feature (1)..(1): Xaa can be any naturally occurring amino acid
XLTCDLEDDSDKLQEKSWKSSCNEGESSSTSYMHQRSPGGPTKLIEIISDCNWEEDRNKILSILSQHINSNMPQSLKVNGKSYPQAKLLLGQMGALHPANRLAAYITGRLRPSVLDLSTLSTVISKVASNAKVAASRKPRTLLPSTSNSKMASSSGTATNRPGKNLKAFVPAKRPIAARPSPGGVFTQFVMSKVGALQQKIPGVSTPQTLAGTQKFSIRPSPVMVVTPVVSSEPVQVCSPVTAAVTTTTPQVFLENTTAVTPMTAISDVETKETTYSSGATTTGVVEVSETNTSTSVTSTQSTATVNLTKTTGITTPVASVAFPKSLVASPSTITLPVASTASTSLVVVTAAASSSMVTTPTSSLGSVPIILSGINGSPPVSQRPENAAQIPVATPQVSPNTVKRAGPRLLLIPVQQGSPTLRPVSNTQLQGHRMVLQPVRSPSGMNLFRHPNGQIVQLLPLHQLRGSNTQPNLQPVMFRNPGSVMGIRLPAPSKPSETPPSSTSSSAFSVMNPVIQAVGSSSAVNVITQAPSLLSSGASFVSQAGTLTLRISPPEPQSFASKTGSETKITYSSGGQPVGTASLIPLQSGSFALLQLPGQKPVPSSILQHVASLQMKRESQNPDQKDETNSIKREQETKKVLQSEGEAVDPEANVIKQNSGAATSEETLNDSLEDRGDHLDEECLPEEGCATVKPSEHSCITGSHTDQDYKDVNEEYGARNRKSSKEKVAVLEVRTISEKASNKTVQNLSKVQHQKLGDVKVEQQKGFDNPEENSSEFPVTFKEESKFELSGSKVMEQQSNLQPEAKEKECGDSLEKDRERWRKHLKGPLTRKCVGASQECKKEADEQLIKETKTCQENSDVFQQEQGISDLLGKSGITEDARVLKTECDSWSRISNPSAFSIVPRRAAKSSRGNGHFQGHLLLPGEQIQPKQEKKGGRSSADFTVLDLEEDDEDDNEKTDDSIDEIVDVVSDYQSEEVDDVEKNNCVEYIEDDEEHVDIETVEELSEEINVAHLKTTAAHTQSFKQPSCTHISADEKAAERSRKAPPIPLKLKPDYWSDKLQKEAEAFAYYRRTHTANERRRRGEMRDLFEKLKITLGLLHSSKVSKSLILTRAFSEIQGLTDQADKLIGQKNLLTRKRNILIRKVSSLSGKTEEVVLKKLEYIYAKQQALEA

SEQ ID NO: 8663 - protein, 447 aa, Homo Sapiens
MRFRIYKRKVLILTLVVAACGFVLWSSNGRQRKNEALAPPLLDAEPARGAGGRGGDHPSVAVGIRRVSNVSAASLVPAVPQPEADNLTLRYRSLVYQLNFDQTLRNVDKAGTWAPRELVLVVQVHNRPEYLRLLLDSLRKAQGIDNVLVIFSHDFWSTEINQLIAGVNFCPVLQVFFPFSIQLYPNEFPGSDPRDCPRDLPKNAALKLGCINAEYPDSFGHYREAKFSQTKHHWWWKLHFVWERVKILRDYAGLILFLEEDHYLAPDFYHVFKKMWKLKQQECPECDVLSLGTYSASRSFYGMADKVDVKTWKSTEHNMGLALTRNAYQKLIECTDTFCTYDDYNWDWTLQYLTVSCLPKFWKVLVPQIPRIFHAGDCGMHHKKTCRPSTQSAQIESLLNNNKQYMFPETLTISEKFTVVAISPPRKNGGWGDIRDHELCKSYRRLQ

SEQ ID NO: 8664 - protein, 108 aa, Homo Sapiens
MESCSCHPGSGVQWRDHGSLQLPPPGFKMKMRRYKLFLMFCMAGLCLISFLHFFKTLSYVTFPRELASLSPNLVSSFFWNNAPVTPQASPEPGGPDLLRTPLYSHSPL

SEQ ID NO: 8665 - protein, 161 aa, Homo Sapiens
MKMRRYKLFLMFCMAGLCLISFLHFFKTLSYVTFPRELASLSPNLVSSFFWNNAPVTPQASPEPGGPDLLRTPLYSHSPLLQPLPPSKAAEELHRVDLVLPEDTTEYFVRTKAGGVCFKPGTKMLERPPPGRPEEKPEGANGSSARRPPRYLLSARERTGG

SEQ ID NO: 8666 - protein, 533 aa, Homo Sapiens
MKMRRYKLFLMFCMAGLCLISFLHFFKTLSYVTFPRELASLSPNLVSSFFWNNAPVTPQASPEPGGPDLLRTPLYSHSPLLQPLPPSKAAEELHRVDLVLPEDTTEYFVRTKAGGVCFKPGTKMLERPPPGRPEEKPEGANGSSARRPPRYLLSARERTGGRGARRKWVECVCLPGWHGPSCGVPTVVQYSNLPTKERLVPREVPRRVINAINVNHEFDLLDVRFHELGDVVDAFVVCESNFTAYGEPRPLKFREMLTNGTFEYIRHKVLYVFLDHFPPGGRQDGWIADDYLRTFLTQDGVSRLRNLRPDDVFIIDDADEIPARDGVLFLKLYDGWTEPFAFHMRKSLYGFFWKQPGTLEVVSGCTVDMLQAVYGLDGIRLRRRQYYTMPNFRQYENRTGHILVQWSLGSPLHFAGWHCSWCFTPEGIYFKLVSAQNGDFPRWGDYEDKRDLNYIRGLIRTGGWFDGTQQEYPPADPSEHMYAPKYLLKNYDRFHYLLDNPYQEPRSTAAGGWRHRGPEGRPPARGKLDEAEV

SEQ ID NO: 8667 - protein, 423 aa, Homo Sapiens
MNYSITVSIVMGIPTVKREVKSYLIETLHSLIDNLYPEEKLDCVIVVFIGETDIDYVHGVVANLEKEFSKEISSGLVEVISPPESYYPDLTNLKETFGDSKERVRWRTKQNLDYCFLMMYAQEKGIYYIQLEDDIIVKQNYFNTIKNFALQLSSEEWMILEFSQLGFIGKMFQAPDLTLIVEFIFMFYKEKPIDWLLDHILWVKVCNPEKDAKHCDRQKANLRIRFRPSLFQHVGLHSSLSGKIQKLTDKDYMKPLLLKIHVNPPAEVSTSLKVYQGHTLEKTYMGEDFFWAITPIAGDYILFKFDKPVNVESYLFHSGNQEHPGDILLNTTVEVLPFKSEGLEISKETKDKRLEDGYFRIGKFENGVAEGMVDPSLNPISAFRLSVIQNSAVWAILNEQRVFSGWWQKSRDKAEGPQAPLLF

SEQ ID NO: 8668 - protein, 535 aa, Homo Sapiens
MRLRNGTVATALAFITSFLTLSWYTTWQNGKEKLIAYQREFLALKERLRIAEHRISQRSSELNTIVQQFKRVGAETNGSKDALNKFSDNTLKLLKELTSKKSLQVPSIYYHLPHLLKNEGSLQPAVQIGNGRTGVSIVMGIPTVKREVKSYLIETLHSLIDNLYPEEKLDCVIVVFIGETDIDYVHGVVANLEKEFSKEISSGLVEVISPPESYYPDLTNLKETFGDSKERVRWRTKQNLDYCFLMMYAQEKGIYYIQLEDDIIVKQNYFNTIKNFALQLSSEEWMILEFSQLGFIGKMFQAPDLTLIVEFIFMFYKEKPIDWLLDHILWVKVCNPEKDAKHCDRQKANLRIRFRPSLFQHVGLHSSLSGKIQKLTDKDYMKPLLLKIHVNPPAEVSTSLKVYQGHTLEKTYMGEDFFWAITPIAGDYILFKFDKPVNVESYLFHSGNQEHPGDILLNTTVEVLPFKSEGLEISKETKDKRLEDGYFRIGKFENGVAEGMVDPSLNPISAFRLSVIQNSAVWAILNEIHIKKATN

SEQ ID NO: 8669 - protein, 535 aa, Homo Sapiens; identical to SEQ ID NO: 8668

SEQ ID NO: 8670 - protein, 535 aa, Homo Sapiens; identical to SEQ ID NO: 8668

SEQ ID NO: 8671 - protein, 44 aa, Homo Sapiens
MRLRNGTVATALAFITSFLTLSWYTTWQNGKGKENDSENVHEMY

SEQ ID NO: 8672 - protein, 200 aa, Homo Sapiens
MGIPSVRREVHSYLTDTLHSLISELSPQEKEDSVIVVLIAETDSQYTSAVTENIKALFPTEIHSGLLEVISPSPHFYPDFSRLRESFGDPKERVRWRTKQNLDYCFLMMYAQSKGIYYVQLEDDIVAKPNYLSTMKNFALQQPSEDWMILEFSQLGFIGKMFKSLDLSLIVEFILMFYRDKPIDWLLDHILWVKVCNPEK

SEQ ID NO: 8673 - protein, 548 aa, Homo Sapiens
MRLRNGTFLTLLLFCLCAFLSLSWYAALSGQKGDVVDVYQREFLALRDRLHAAEQESLKRSKELNLVLDEIKRAVSERQALRDGDGNRTWGRLTEDPRLKPWNGSHRHVLHLPTVFHHLPHLLAKESSLQPAVRVGQGRTGVSVVMGIPSVRREVHSYLTDTLHSLISELSPQEKEDSVIVVLIAETDSQYTSAVTENIKALFPTEIHSGLLEVISPSPHFYPDFSRLRESFGDPKERVRWRTKQNLDYCFLMMYAQSKGIYYVQLEDDIVAKPNYLSTMKNFALQQPSEDWMILEFSQLGFIGKMFKSLDLSLIVEFILMFYRDKPIDWLLDHILWVKVCNPEKDAKHCDRQKANLRIRFKPSLFQHVGTHSSLAGKIQKLKDKDFGKQALRKEHVNPPAEVSTSLKTYQHFTLEKAYLREDFFWAFTPAAGDFIRFRFFQPLRLERFFFRSGNIEHPEDKLFNTSVEVLPFDNPQSDKEALQEGRTATLRYPRSPDGYLQIGSFYKGVAEGEVDPAFGPLEALRLSIQTDSPVWVILSEIFLKKAD

SEQ ID NO: 8674 - protein, 157 aa, Homo Sapiens
MSRVAGTRTDVNELLQRWTPRCVRWHTGGARRVALDRPLVTACLPPAGDVVDVYQREFLALRDRLHAAEQESLKRSKELNLVLDEIKRAVSERQALRDGDGNRTWGRLTEDPRLKPWNGSHRHVLHLPTVFHHLPHLLAKESSLQPAVRVGQGRTGD

SEQ ID NO: 8675 - protein, 563 aa, Homo Sapiens
MSRVAGTRTDVNELLQRWTPRCVRWHTGGARRVALDRPLVTACLPPAGDVVDVYQREFLALRDRLHAAEQESLKRSKELNLVLDEIKRAVSERQALRDGDGNRTWGRLTEDPRLKPWNGSHRHVLHLPTVFHHLPHLLAKESSLQPAVRVGQGRTGVSVVMGIPSVRREVHSYLTDTLHSLISELSPQEKEDSVIVVLIAETDSQYTSAVTENIKALFPTEIHSGLLEVISPSPHFYPDFSRLRESFGDPKERVRWRTKQNLDYCFLMMYAQSKGIYYVQLEDDIVAKPNYLSTMKNFALQQPSEDWMILEFSQLGFIGKMFKSLDLSLIVEFILMFYRDKPIDWLLDHILWVKVCNPEKDAKHCDRQKANLRIRFKPSLFQHVGTHSSLAGKIQKLKDKDFGKQALRKEHVNPPAEVSTSLKTYQHFTLEKAYLREDFFWAFTPAAGDFIRFRFFQPLRLERFFFRSGNIEHPEDKLFNTSVEVLPFDNPQSDKEALQEGRTATLRYPRSPDGYLQIGSFYKGVAEGEVDPAFGPLEALRLSIQTDSPVWVILSEIFLKKAD

SEQ ID NO: 8676 - protein, 373 aa, Homo Sapiens
  misc_feature (1)..(1): Xaa can be any naturally occurring amino acid
XEDSVIVVLIAETDSQYTSAVTENIKALFPTEIHSGLLEVISPSPHFYPDFSRLRESFGDPKERVRWRTKQNLDYCFLMMYAQSKGIYYVQLEDDIVAKPNYLSTMKNFALQQPSEDWMILEFSQLGFIGKMFKSLDLSLIVEFILMFYRDKPIDWLLDHILWVKVCNPEKDAHCDRQKANLRIRFKPSLFQHVGTHSSLAGKIQKLKDKDFGKQALRKEHVNPPAEVSTSLKTYQHFTLEKAYLREDFFWAFTPAAGDFIRFRFFQPLRLERFFFRSGNIEHPEDKLFNTSVEVLPFDNPQSDKEALQEGRTATLRYPRSPDGYLQIGSFYKGVAEGEVDPAFGPLEALRLSIQTDSPVWVILSEIFLKKAD

SEQ ID NO: 8677 - protein, 429 aa, Homo Sapiens
  misc_feature (1)..(1): Xaa can be any naturally occurring amino acid
XEQESLKRSKELNLVLDEIKRAVSERQALRDGDGNRTWGRLTEDPRLKPWNGSHRHVLHLPTVFHHLPHLLAKESSLQPAVRVGQGRTGVSVVMGIPSVRREVHSYLTDTLHSLISELSPQEKEDSVIVVLIAETDSQYTSAVTENIKALFPTEIHSGLLEVISPSPHFYPDFSRLRESFGDPKERVRWRTKQNLDYCFLMMYAQSKGIYYVQLEDDIVAKPNYLSTMKNFALQQPSEDWMILEFSQLGFIGQRLWKAGAAEGACEPASRGEHEPEDIPALHPGESLPARGLLLGLHPCRGGLHPLPLLPTSKTGAVLLPQWEHRAPGGQALQHVCGGAALRQPSVRQGGPAGGPHRHPPVPSEPRRLPPDRLLLQGSGRGRGGPSLRPSGSTAPLDPDGLPCVGDSERDLPEKGRLSCGLLRVPCGQP

SEQ ID NO: 8678 - protein, 322 aa, Homo Sapiens
  misc_feature (1)..(1): Xaa can be any naturally occurring amino acid
XFPTEIHSGLLEVISPSPHFYPDFSRLRESFGDPKERVRWRTKQNLDYCFLMMYAQSKGIYYVQLEDDIVAKPNYLSTMKNFALQQPSEDWMILEFSQLGFIGKMFKSLDLSLIVEFILMFYRDKPIDWLLDHILWVKVCNPEKDAAGIKVGAHAITAVPPPLQDKDFGKQALRKEHVNPPAEVSTSLKTYQHFTLEKAYLREDFFWAFTPAAGDFIRFRFFQPLRLERFFFRSGNIEHPEDKLFNTSVEVLPFDNPQSDKEALQEGRTATLRYPRSPDGYLQIGSFYKGVAEGEVDPAFGPLEALRLSIQTDSPVWVILSE

SEQ ID NO: 8679 - protein, 240 aa, Homo Sapiens
  misc_feature (1)..(1): Xaa can be any naturally occurring amino acid
XKMFKSLDLSLIVEFILMFYRDKPIDWLLDHILWVKVCNPEKDAKHCDRQKANLRIRFKPSLFQHVGTHSSLAGKIQKLKDKDFGKQALRKEHVNPPAEVSTSLKTYQHFTLEKAYLREDFFWAFTPAAGDFIRFRFFQPLRLERGNIEHPEDKLFNTSVEVLPFDNPQSDKEALQEGRTATLRYPRSPDGYLQIGSFYKGVAEGEVDPAFGPLEALRLSIQTDSPVWVILSEIFLKKAD

SEQ ID NO: 8680 - protein, 150 aa, Homo Sapiens
  misc_feature (1)..(1): Xaa can be any naturally occurring amino acid
XLLLFCLCAFLSLSWYAALSGQKGDVVDVYQREFLALRDRLHAAEQESLKRSKELNLVLDEIKRAVSERQALRDGDGNRTWGRLTGPPIEAVERLTPARAAPAHRLPSPATPAGQGEQSAARGARGPGPHRSVGGDGHPERAARGALVPD

SEQ ID NO: 8681 - protein, 245 aa, Homo Sapiens
  misc_feature (1)..(1): Xaa can be any naturally occurring amino acid
XQYTSAVTENIKALFPTEIHSGLLEVISPSPHFYPDFSRLRESFGDPKERVRWRTKQNLDYCFLMMYAQSKGIYYVQLEDDIVAKPNYLSTMKNFALQQPSEDWMILEFSQLGFIGKMFKSLDLSLIVEFILMFYRDKPIDWLLDHILWVKVCNPEKDAKHCDRQKANLRIRFKPSLFQHVGTHSSLAGKIQKLKDKDFGKQALRKEHVNPPAEWEHRAPGGQALQHVCGGAALRQPSVRQGGPA

SEQ ID NO: 8682 - protein, 307 aa, Homo Sapiens
  misc_feature (1)..(1): Xaa can be any naturally occurring amino acid
XTSAVTENIKALFPTEIHSGLLEVISPSPHFYPDFSRLRESFGDPKERVRWRTKQNLDYCFLMMYAQSKGIYYVQLEDDIVAKPNYLSTMKNFALQQPSEDWMILEFSQLGFIARGHSLLAGWQDPETEGQRLWKAGAAEGACEPASRGEHEPEDIPALHPGESLPARGLLLGLHPCRGGLHPLPLLPTSKTGAVLLPQWEHRAPGGQALQHVCGGAALRQPSVRQGGPAGGPHRHPPVPSEPRRLPPDRLLLQGSGRGRGGPSLRPSGSTAPLDPDGLPCVGDSERDLPEKGRLSCGLLRVPCGQP

SEQ ID NO: 8683 - protein, 113 aa, Homo Sapiens
MRTKQVNLLITLVAVALFSFSCFSIYRITQTISFALGISTVNRGNYSYLKQTLTSVVSRMTLSQEKDSVVIVLVADSNEDYLHSVVKMITKKFKRQVRSGSLEVISIPAFLYS

SEQ ID NO: 8684 - protein, 166 aa, Homo Sapiens
MRTKQVNLLITLVAVALFSFSCFSIYRITQTNNQLINCRNHILEFKENMLHLRNKTEKNTQEMMKVLNRMKYEITKREILSGNLGKLFRSEDLTHFVRFFLMFYKEKPIDWLLNDIFQVKVCDAGEDLRNCMKRKKQIRIQYKPSLFQHVGIHSSFPRKEQYEKKI

SEQ ID NO: 8685 - protein, 375 aa, Homo Sapiens
MRTKQVNLLITLVAVALFSFSCFSIYRITQTNNQLINCRNHILEFKENMLHLRNKTEKNTQEMMKVLNRMKYEITKREILSGNLVAQKADILNKNETVSNTFEDLKFFFPHLRKEGRIYPDVIIGKGKTGVSFALGISTVNRGNYSYLKQTLTSVVSRMTLSQEKDSVVIVLVADSNEDYLHSVVKMITKKFKRQVRSGSLEVISIPAFLYSSMLNAKHLAEASQKLASWRIKQVLDFCILLLYAQPKAKYYLQLEDDIIAKEMYFTKITDFVGNISSNNWFFIEFSMLGFIGKLFRSEDLTHFVRFFLMFYKEKPIDWLLNDIFQVKVCDAGEDLRNCMKRKKQIRIQYKPSLFQHVGIHSSFPRKEQYEKDVY

SEQ ID NO: 8686 - protein, 374 aa, Homo Sapiens
MRTKQVNLLITLVAVALFSFSCFSIYRITQTNNQLINCRNHILEFKENMLHLRNKTEKNTQEMMKVLNRMKYEITKREILSGNLVAQKADILNKNETVSNTFEDLKFFFPHLRKEGRIYPDVIIGKGKTGVSFALGISTVNRGNYSYLKQTLTSVVSRMTLSQEKDSVVIVLVADSNEDYLHSVVKMITKKFKRQVRSGSLEVISIPAFLYSSMLNAKHLAEASQKLASWRIKQVLDFCILLLYAQPKAKYYLQLEDDIIAKEMYFTKITDFVGNISSNNWFFIEFSMLGFIGKLFRSEDLTHFVRFFLMFYKEKPIDWLLNDIFQVKVCDAGEDLRNCMKRKKQIRIQYKPSLFQHVGIHSSFPRKEQYEKKI

SEQ ID NO: 8687 - protein, 36 aa, Homo Sapiens
MRTKQVNLLITLVAVALFSFSCFSIYRITQTNSKGK

SEQ ID NO: 8688 - protein, 91 aa, Homo Sapiens
  misc_feature (1)..(1): Xaa can be any naturally occurring amino acid
XNISSNNWFFIEFSMLGFIGKLFRSEDLTHFVRFFLMFYKEKPIDWLLNDIFQRNCMKRKKQIRIQYKPSLFQHVGIHSSFPRKEQYEKKI

SEQ ID NO: 8689 - protein, 283 aa, Homo Sapiens
METGPEDPSSMPEESSPRRTPQSIPYQDLPHLVNADGQYLFCRYWKPTGTPKALIFVSHGAGEHSGRYEELARMLMGLDLLVFAHDHVGHGQSEGERMVVSDFHVFVRDVLQHVDSMQKDYPGLPVFLLGHSMGGAIAILTAAERPGHFAGMVLISPLVLANPESATTFKVDIYNSDPLICRAGLKVCFGIQLLNAVSRVERALPKLTVPFLLLQGSADRLCDSKGAYLLMELAKSQDKTLKIYEGAYHVLHKELPEVTNSVFHEINMWVSQRTATAGTASPP

SEQ ID NO: 8690 - protein, 313 aa, Homo Sapiens
METGPEDPSSMPEESSPRRTPQSIPYQDLPHLVNADGQYLFCRYWKPTGTPKALIFVSHGAGEHSGRYEELARMLMGLDLLVFAHDHVGHGQSEGERMVVSDFHVFVRDVLQHVDSMQKDYPGLPVFLLGHSMGGAIAILTAAERPGHFAGMVLISPLVLANPESATTFKVLAAKVLNLVLPNLSLGPIDSSVLSRNKTEVDIYNSDPLICRAGLKVCFGIQLLNAVSRVERALPKLTVPFLLLQGSADRLCDSKGAYLLMELAKSQDKTLKIYEGAYHVLHKELPEVTNSVFHEINMWVSQRTATAGTASPP

SEQ ID NO: 8691 - protein, 89 aa, Homo Sapiens
MLMGLDLLVFAHDHVGHGQSEGERMVVSDFHVFVRDVLQHVDSMQKDYPGLPVFLLGHSMGGAIAILTAAERPGHFAGMVLISPLVLAN

SEQ ID NO: 8692 - protein, 77 aa, Homo Sapiens
MPEESSPRRTPQSIPYQDLPHLVNADGQYLFCRYWKPTGTPKALIFVSHGAGEHSGRYEELARMLMGLDLLVFAHDH

SEQ ID NO: 8693 - protein, 303 aa, Homo Sapiens
MPEESSPRRTPQSIPYQDLPHLVNADGQYLFCRYWKPTGTPKALIFVSHGAGEHSGRYEELARMLMGLDLLVFAHDHVGHGQSEGERMVVSDFHVFVRDVLQHVDSMQKDYPGLPVFLLGHSMGGAIAILTAAERPGHFAGMVLISPLVLANPESATTFKVLAAKVLNLVLPNLSLGPIDSSVLSRNKTEVDIYNSDPLICRAGLKVCFGIQLLNAVSRVERALPKLTVPFLLLQGSADRLCDSKGAYLLMELAKSQDKTLKIYEGAYHVLHKELPEVTNSVFHEINMWVSQRTATAGTASPP

SEQ ID NO: 8694 - protein, 303 aa, Homo Sapiens; identical to SEQ ID NO: 8693

SEQ ID NO: 8695 - protein, 277 aa, Homo Sapiens
MQTRFRRIFPWKDASTKRMPEFIHFSPLKPYKGREWEKAGSEHVLETHLLPVGHGQSEGERMVVSDFHVFVRDVLQHVDSMQKDYPGLPVFLLGHSMGGAIAILTAAERPGHFAGMVLISPLVLANPESATTFKVLAAKVLNLVLPNLSLGPIDSSVLSRNKTEVDIYNSDPLICRAGLKVCFGIQLLNAVSRVERALPKLTVPFLLLQGSADRLCDSKGAYLLMELAKSQDKTLKIYEGAYHVLHKELPEVTNSVFHEINMWVSQRTATAGTASPP

SEQ ID NO: 8696 - protein, 197 aa, Homo Sapiens
PVGHGQSEGERMVVSDFHVFVRDVLQHVDSMQKDYPGLPVFLLGHSMGGAIAILTAAERPGHFAGMVLISPLVLANPESATTFKVDIYNSDPLICRAGLKVCFGIQLLNAVSRVERALPKLTVPFLLLQGSADRLCDSKGAYLLMELAKSQDKTLKIYEGAYHVLHKELPEVTNSVFHEINMWVSQRTATAGTASPP

SEQ ID NO: 8697 - protein, 155 aa, Homo Sapiens [sequence omitted]

SEQ ID NO: 8698 - protein, 209 aa, Homo Sapiens
  misc_feature (1)..(1): Xaa can be any naturally occurring amino acid
XLQGGAIAILTAAERPGHFAGMVLISPLVLANPESATTFKDYSRILKHLMEKASRMLKFWIPRPFWVLAAKVLNLVLPNLSLGPIDSSVLSRNKTEVDIYNSDPLICRAGLKVCFGIQLLNAVSRVERALPKLTVPFLLLQGSADRLCDSKGAYLLMELAKSQDKTLKIYEGAYHVLHKELPEVTNSVFHEINMWVSQRTATAGTASPP

SEQ ID NO: 8699 - protein, 103 aa, Homo Sapiens
MKSLILLAILAALAVVTLCYESHESMESYELNPFINRRNANTFISPQQRWRAKVQERIRERSKPVHELNREACDDYRLCERYAMVYGYNAAYNRYFRKRRGTK

SEQ ID NO: 8700 - protein, 128 aa, Homo Sapiens
MKSLILLAILAALAVVTLCYGEWQKEENFGFDIVSVLSLNWHRAQESHESMESYELNPFINRRNANTFISPQQRWRAKVQERIRERSKPVHELNREACDDYRLCERYAMVYGYNAAYNRYFRKRRGTK

SEQ ID NO: 8701 - protein, 74 aa, Homo Sapiens
  misc_feature (1)..(1): Xaa can be any naturally occurring amino acid
XSHESMESYELRSENALSLSTSSIGKPVMTTDFANATPWFMDTMLPIIATSGSAEGPNETEGRKKISFFLEAGT

SEQ ID NO: 8702 - protein, 77 aa, Homo Sapiens
MAGNSILLAAVSILSACQQSYFALQVGKARLKYKVTPPAVTGSPEFERVFRAHFCYLSGSGVHIWPSPILLGIFRSC

SEQ ID NO: 8703 - protein, 147 aa, Homo Sapiens
MAGNSILLAAVSILSACQQSYFALQVGKARLKYKVTPPAVTGSPEFERVFRAQQNCVEFYPIFIITLWMAGWYFNQVFATCLGLVYIYGRHLYFWGYSEAAKKRITGFRLSLGILALLTLLGALGIANSFLDEYLDLNIAKKLRRQF

SEQ ID NO: 8704 - protein, 147 aa, Homo Sapiens; identical to SEQ ID NO: 8703

SEQ ID NO: 8705 - protein, 147 aa, Homo Sapiens; identical to SEQ ID NO: 8703

SEQ ID NO: 8706 - protein, 46 aa, Homo Sapiens
MARSLVCLGVIILLSAFSGPGVRGGPMPKLADRKLCADQECSHPIS

SEQ ID NO: 8707 - protein, 131 aa, Homo Sapiens
MARSLVCLGVIILLSAFSGPGVRGGPMPKLADRKLCADQECSHPISMAVALQDYMAPDCRFLTIHRGQVVYVFSKLKGRGRLFWGGSVQGDYYGDLAARLGYFPSSIVREDQTLKPGKVDVKTDKWDFYCQ

SEQ ID NO: 8708 - protein, 131 aa, Homo Sapiens; identical to SEQ ID NO: 8707

SEQ ID NO: 8709 - protein, 131 aa, Homo Sapiens; identical to SEQ ID NO: 8707

SEQ ID NO: 8710 - protein, 95 aa, Homo Sapiens
  misc_feature (1)..(1): Xaa can be any naturally occurring amino acid
XRSLVCLGVIILLSAFSGPGVRGGPMPKLADRKLCADQECSHPISMAVALQDYMAPDCRFLTIHRGQVVFREITMEIWLLAWAISPVALSERTRP

SEQ ID NO: 8711 - protein, 58 aa, Homo Sapiens
  misc_feature (1)..(1): Xaa can be any naturally occurring amino acid
XSLVCLGVIILLSAFSGPGVRGGPMPKLADRKLCADQECSRSGRLLWRSGCSPGLFPQ

SEQ ID NO: 8712 - protein, 1412 aa, Homo Sapiens
MAKFGVHRILLLAISLTKCLESTKLLADLKKCGDLECEALINRVSAMRDYRGPDCRYLNFTKGEEISVYVKLAGEREDLWAGSKGKEFGYFPRDAVQIEEVFISEEIQMSTKESDFLCLLGVSYTFDNEDSELNGDYGENIYPYEEDKDEKSSIYESDFQIEPGFYATYESTLFEDQVPALEAPEDIGSTSESKDWEEVVVESMEQDRIPEVHVPPSSAVSGVKEWFGLGGEQAEEKAFESVIEPVQESSFRSRKIAVEDENDLEELNNGEPQTEHQQESESEIDSVPKTQSELASESEHIPKPQSTGWFGGGFTSYLGFGDEDTGLELIAEESNPPLQDFPNSISSDKEATVPCTEILTEKKDTITNDSLSLKPSWFDFGFAILGFAYAKEDKIMLDDRKNEEDGGADEHEHPLTSELDPEKEQEIETIKIIETEDQIDKKPVSEKTDESDTIPYLKKFLYNFDNPWNFQNIPKETELPFPKQILDQNNVIENEETGEFSIDNYPTDNTKVMIFKSSYSLSDMVSNIELPTRIHEEVYFEPSSSKDSDENSKPSVDTEGPALVEIDRSVENTLLNSQMVSTDNSLSSQNYISQKEDASEFQILKYLFQIDVYDFMNSAFSPIVILTERVVAALPEGMRPDSNLYGFPWELVICAAVVGFFAVLFFLWRSFRSVRSRLYVGREKKLALMLSGLIEEKSKLLEKFSLVQKEYEGYEVESSLKDASFEKEATEAQSLEATCEKLNRSNSELEDEILCLEKELKEEKSKHSEQDELMADISKRIQSLEDESKSLKSQVAEAKMTFKIFQMNEERLKIAIKDALNENSQLQESQKQLLQEAEVWKEQVSELNKQKVTFEDSKVHAEQVLNDKESHIKTLTERLLKMKDWAAMLGEDITDDDNLELEMNSESENGAYLDNPPKGALKKLIHAAKLNASLKTLEGERNQIYIQLSEVDKTKEELTEHIKNLQTEQASLQSENTHFENENQKLQQKLKVMTELYQENEMKLHRKLTVEENYRLEKEEKLSKVDEKISHATEELETYRKRAKDLEEELERTIHSYQGQIISHEKKAHDNWLAARNAERNLNDLRKENAHNRQKLTETELKFELLEKDPYALDVPNTAFGREHSPYGPSPLGWPSSETRAFLSPPTLLEGPLRLSPLLPGGGGRGSRGPGNPLDHQITNERGESSCDRLTDPHRAPSDTGSLSPPWDQDRRMMFPPPGQSYPDSALPPQRQDRFCSNSGRLSGPAELRSFNMPSLDKMDGSMPSEMESSRNDTKDDLGNLNVPDSSLPAENEATGPGFVPPPLAPIRGPLFPVDARGPFLRRGPPFPPPPPGAMFGASRDYFPPGDFPGPPPAPFAMRNVYPPRGFPPYLPPRPGFFPPPPHSEGRSEFPSGLIPPSNEPATEHPEPQQET

SEQ ID NO: 8713 - protein, 1907 aa, Homo Sapiens
MAAAPGLLVWLLVLRLPWRVPGQLDPSTGRRFSEHKLCADDECSMLMYRGEALEDFTGPDCRFVNFKKGDPVYVYYKLARGWPEVWAGSVGRTFGYFPKDLIQVVHEYTKEELQVPTDETDFVCFDGGRDDFHNYNVEELLGFLELYNSAATDSEKAVEKTLQDMEKNPELSKEREPEPEPVEANSEESDSVFSENTEDLQEQFTTQKHHSHANSQANHAQGEQASFESFEEMLQDKLKVPESENNKTSNSSQVSNEQDKIDAYKLLKKEMTLDLKTKFGSTADALVSDDETTRLVTSLEDDFDEELDTEYYAVGKEDEENQEDFDELPLLTFTDGEDMKTPAKSGVEKYPTDKEQNSNEEDKVQLTVPPGIKNDDKNILTTWGDTIFSIVTGGEETRDTMDLESSSSEEEKEDDDDALVPDSKQGKPQSATDYSDPDNVDDGLFIVDIPKTNNDKEVNAEHHIKGKGRGVQESKRGLVQDKTELEDENQEGMTVHSSVHSNNLNSMPAAEKGKDTLKSAYDDTENDLKGAAIHISKGMLHEEKPGEQILEGGSESESAQKAAGNQMNDRKIQQESLGSAPLMGDDHPNASRDSVEGDALVNGAKLHTLSVEHQREELKEELVLKTQNQPRFSSPDEIDLPRELEDEVPILGRNLPWQQERDVAATASKQMSEKIRLSEGEAKEDSLDEEFFHHKAMQGTEVGQTDQTDSTGGPAFLSKVEEDDYPSEELLEDENAINAKRSKEKNPGNQGRQFDVNLQVPDRAVLGTIHPDPEIEESKQETSMILDSEKTSETAAKGVNTGGREPNTMVEKERPLADKKAQRPFERSDFSDSIKIQTPELGEVFQNKDSDYLKNDNPEEHLKTSGLAGEPEGELSKEDHENTEKYMGTESQGSAAAEPEDDSFHWTPHTSVEPGHSDKREDLLIISSFFKEQQSLQRFQKYFNVHELEALLQEMSSKLKSAQQESLPYNMEKVLDKVFRASESQILSIAEKMLDTRVAENRDLGMNENNIFEEAAVLDDIQDLIYFVRYKHSTAEETATLVMAPPLEEGLGGAMEEMQPLHEDNFSREKTAELNVQVPEEPTHLDQRVIGDTHASEVSQKPNTEKDLDPGPVTTEDTPMDAIDANKQPETAAEEPASVTPLENAILLIYSFMFYLTKSLVATLPDDVQPGPDFYGLPWKPVFITAFLGIASFAIFLWRTVLVVKDRVYQVTEQQISEKLKTIMKENTELVQKLSNYEQKIKESKKHVQETRKQNMILSDEAIKYKDKIKTLEKNQEILDDTAKNLRVMLESEREQNVKNQDLISENKKSIEKLKDVISMNASEFSEVQIALNEAKLSEEKVKSECHRVQEENARLKKKKEQLQQEIEDWSKLHAELSEQIKSFEKSQKDLEVALTHKDDNINALTNCITQLNLLECESESEGQNKGGNDSDELANGEVGGDRNEKMKNQIKQMMDVSRTQTAISVVEEDLKLLQLKLRASVSTKCNLEDQVKKLEDDRNSLQAAKAGLEDECKTLRQKVEILNELYQQKEMALQKKLSQEEYERQEREHRLSAADEKAVSAAEEVKTYKRRIEEMEDELQKTERSFKNQIATHEKKAHENWLKARAAERAIAEEKREAANLRHKLLELTQKMAMLQEEPVIVKPMPGKPNTQNPPRRGPLSQNGSFGPSPVSGGECSPPLTVEPPVRPLSATLNRRDMPRSEFGSVDGPLPHPRWSAEASGKPSPSDPGSGTATMMNSSSRGSSPTRVLDEGKVNMAPKGPPPFPGVPLMSTPMGGPVPPPIRYGPPPQLCGPFGPRPLPPPFGPGMRPPLGLREFAPGVPPGRRDLPLHPRGFLPGHAPFRPLGSLGPREYFIPGTRLPPPTHGPQEYPPPPAVRDLLPSGSRDEPPPASQSTSQDCSQALKQSP

SEQ ID NO: 8714 - protein, 500 aa, Homo Sapiens
MAAAPGLLVWLLVLRLPWRVPGQLDPSTGRRFSEHKLCADDECSMLMYRGEALEDFTGPDCRFVNFKKGDPVYVYYKLARGWPEVWAGSVGRTFGYFPKDLIQVVHEYTKEELQVPTDETDFVCFDGGRDDFHNYNVEELLGFLELYNSAATDSEKAVEKTLQDMEKNPELSKEREPEPEPVEANSEESDSVFSENTEDLQEQFTTQKHHSHANSQANHAQGEQASFESFEEMLQDKLKVPESENNKTSNSSQVSNEQDKIDAYKLLKKEMTLDLKTKFGSTADALVSDDETTRLVTSLEDDFDEELDTEYYAVGKEDEENQEDFDELPLLTFTDGEDMKTPAKSGVEKYPTDKEQNSNEEDKVQLTVPPGIKNDDKNILTTWGDTIFSIVTGGEETRDTMDLESSSSEEEKEDDDDALVPDSKQGKPQSATDYSDPDNVDDGLFIVDIPKTNNDKEVNAEHHIKGKGRGVQESKRGLVQDKTELEDENQEGFKTEPIKL

SEQ ID NO: 8715 - protein, 785 aa, Homo Sapiens
MDSVPATVPSIAATPGDPELVGPLSVLYAAFIAKLLELVATLPDDVQPGPDFYGLPWKPVFITAFLGIASFAIFLWRTVLVVKDRVYQVTEQQISEKLKTIMKENTELVQKLSNYEQKIKESKKHVQETRKQNMILSDEAIKYKDKIKTLEKNQEILDDTAKNLRVMLESEREQNVKNQDLISENKKSIEKLKDVISMNASEFSEVQIALNEAKLSEEKVKSECHRVQEENARLKKKKEQLQQEIEDWSKLHAELSEQIKSFEKSQKDLEVALTHKDDNINALTNCITQLNLLECESESEGQNKGGNDSDELANGEVGGDRNEKMKNQIKQMMDVSRTQTAISVVEEDLKLLQLKLRASVSTKCNLEDQVKKLEDDRNSLQAAKAGLEDECKTLRQKVEILNELYQQKEMALQKKLSQEEYERQEREHRLSAADEKAVSAAEEVKTYKRRIEEMEDELQKTERSFKNQIATHEKKAHENWLKARAAERAIAEEKREAANLRHKLLELTQKMAMLQEEPVIVKPMPGKPNTQNPPRRGPLSQNGSFGPSPVSGGECSPPLTVEPPVRPLSATLNRRDMPRSEFGSVDGPLPHPRWSAEASGKPSPSDPGSGTATMMNSSSRGSSPTRVLDEGKVNMAPKGPPPFPGVPLMSTPMGGPVPPPIRYGPPPQLCGPFGPRPLPPPFGPGMRPPLGLREFAPGVPPGRRDLPLHPRGFLPGHAPFRPLGSLGPREYFIPGTRLPPPTHGPQEYPPPPAVRDLLPSGSRDEPPPASQSTSQDCSQALKQSP

SEQ ID NO: 8716 - protein, 1016 aa, Homo Sapiens
  misc_feature (1)..(1): Xaa can be any naturally occurring amino acid
XLVPDSKQGKPQSATDYSDPDNVDDGLFIVDIPKTNNDKEVNAEHHIKGKGRGVQESKRGLVQDKTELEDENQEGMTVHSSVHSNNLNSMPAAEKGKDTLKSAYDDTENDLKGAAIHISKGMLHEEKPGEQILEGGSESESAQKAAGNQMNDRKIQQESLGSAPLMGDDHPNASRDSVEGDALVNGAKLHTLSVEHQREELKEELVLKTQNQPRFSSPDEIDLPRELEDEVPILGRNLPWQQERDVAATASKQMSEKIRLSEGEAKEDSLDEEFFHHKAMQGTEVGQTDQTDSTGGPAFLSKVEEDDYPSEELLEDENAINAKRSKEKNPGNQGRQFDVNLQVPDRAVLGTIHPDPEIEESKQETSMILDSEKTSETAAKGVNTGGREPNTMVEKERPLADKKAQRPFERSDFSDSIKIQTPELGEVFQNKDSDYLKNDNPEEHLKTSGLAGEPEGELSKEDHENTEKYMGTESQGSAAAEPEDDSFHWTPHTSVEPGHSDKREDLLIISSFFKEQQSLQRFQKYFNVHELEALLQEMSSKLKSAQQESLPYNMEKVLDKVFRASESQILSIAEKMLDTRVAENRDLGMNENNIFEEAAVLDDIQDLIYFVRYKHSTAEETATLVMAPPLEEGLGGAMEEMQPLHEDNFSREKTAELNVQVPEEPTHLDQRVIGDTHASEVSQKPNTEKDLDPGPVTTEDTPMDAIDANKQPETAAEEPASVTPLENAILLIYSFMFYLTKSLVATLPDDVQPGPDFYGLPWKPVFITAFLGIASFAIFLWRTVLVVKDRVYQVTEQQISEKLKTIMKENTELVQKLSNYEQKIKESKKHVQETRKQNMILSDEAIKYKDKIKTLEKNQEILDDTAKNLRVMLESEREQNVKNQDLLQQEIEDWSKLHAELSEQIKSFEKSQKDLEVALTHKDDNINALTNCITQLNLLECESESEGQNKGGNDSDELANGEVGGDRNEKMKNQIKQMMDVSRTQTAISVVEEDLKLLQLKLRASVSTKCNLEDQV

SEQ ID NO: 8717 - protein, 107 aa, Homo Sapiens
  misc_feature (1)..(1): Xaa can be any naturally occurring amino acid
XSAEASGKPSPSDPGSGTATMMNSSSRGSSPTRVLDEGKVNMAPKGPPPFPGVPLMSTPMGGPVPPPIRYGPPPQLCGPFGPRPLPPPFDKDGRPGTVAHACNPSTL

SEQ ID NO: 8718 - protein, 388 aa, Homo Sapiens
MFRLNSLSALAELAVGSRWYHGGSQPIQIRRRLMMVAFLGASAVTASTGLLWKRAHAESPPCVDNLKSDIGDKGKNKDEGDVCNHEKKTADLAPHPEEKKKKRSGFRDRKVMEYENRIRAYSTPDKIFRYFATLKVISEPGEAEVFMTPEDFVRSITPNEKQPEHLGLDQYIIKRFDGKARFSKKKILHRVRKKSKGSILQRRKKALQKEERTRHGSTKHNEQEVRRTIMEWLEKAGVQWHHLSSLQPPTPWFKRFFCLSLLSSWDYRHTPPCPANFFIFSRDRVSPCWPGWSRYPDLMIRPPWLRKVLGLQKISQEREKFADEGSIFYTLGECGLISFSDYIFLTTVLSTPQRNFEIAFKMFDLNGDGEVDMEEFEQVQSIIRSQTS

SEQ ID NO: 8719 - protein, 480 aa, Homo Sapiens
MFRLNSLSALAELAVGSRWYHGGSQPIQIRRRLMMVAFLGASAVTASTGLLWKRAHAESPPCVDNLKSDIGDKGKNKDEGDVCNHEKKTADLAPHPEEKKKKRSGFRDRKVMEYENRIRAYSTPDKIFRYFATLKVISEPGEAEVFMTPEDFVRSITPNEKQPEHLGLDQYIIKRFDGKDFWQKISQEREKFADEGSIFYTLGECGLISFSDYIFLTTVLSTPQRNFEIAFKMFDLNGDGEVDMEEFEQVQSIIRSQTSMGMRHRDRPTTGNTLKSGLCSALTTYFFGADLKGKLTIKNFLEFQRKLQHDVLKLEFERHDPVDGRITERQFGGMLLAYSGVQSKKLTAMQRQLKKHFKEGKGLTFQEVENFFTFLKNINDVDTALSFYHMAGASLDKVTMQQVARTVAKVELSDHVCDVVFALFDCDGNGELSNKEFVSIMKQRLMRGLEKPKDMGFTRLMQAMWKCAQETAWDFALPKQ

SEQ ID NO: 8720 - protein, 482 aa, Homo Sapiens
MFRLNSLSALAELAVGSRWYHGGSQPIQIRRRLMMVAFLGASAVTASTGLLWKRAHAESPPCVDNLKSDIGDKGKNKDEGDVCNHEKKTADLAPHPEEKKKKRSGFRDRKVMEYENRIRAYSTPDKIFRYFATLKVISEPGEAEVFMTPEDFVRSITPNEKQPEHLGLDQYIIKRFDGKDFWQTEKISQEREKFADEGSIFYTLGECGLISFSDYIFLTTVLSTPQRNFEIAFKMFDLNGDGEVDMEEFEQVQSIIRSQTSMGMRHRDRPTTGNTLKSGLCSALTTYFFGADLKGKLTIKNFLEFQRKLQHDVLKLEFERHDPVDGRITERQFGGMLLAYSGVQSKKLTAMQRQLKKHFKEGKGLTFQEVENFFTFLKNINDVDTALSFYHMAGASLDKVTMQQVARTVAKVELSDHVCDVVFALFDCDGNGELSNKEFVSIMKQRLMRGLEKPKDMGFTRLMQAMWKCAQETAWDFALPKQ

SEQ ID NO: 8721 - protein, 476 aa, Homo Sapiens
MFRLNSLSALAELAVGSRWYHGGSQPIQIRRRLMMVAFLGASAVTASTGLLWKRAHAESPPCVDNLKSDIGDKGKNKDEGDVCNHEKKTADLAPHPEEKKKKRSGFRDRKVMEYENRIRAYSTPDKIFRYFATLKVISEPGEAEVFMTPEDFVRSITPNEKQPEHLGLDQYIIKRFDGKKISQEREKFADEGSIFYTLGECGLISFSDYIFLTTVLSTPQRNFEIAFKMFDLNGDGEVDMEEFEQVQSIIRSQTSMGMRHRDRPTTGNTLKSGLCSALTTYFFGADLKGKLTIKNFLEFQRKLQHDVLKLEFERHDPVDGRITERQFGGMLLAYSGVQSKKLTAMQRQLKKHFKEGKGLTFQEVENFFTFLKNINDVDTALSFYHMAGASLDKVTMQQVARTVAKVELSDHVCDVVFALFDCDGNGELSNKEFVSIMKQRLMRGLEKPKDMGFTRLMQAMWKCAQETAWDFALPKQ

SEQ ID NO: 8722 - protein, 478 aa, Homo Sapiens [sequence omitted]

SEQ ID NO: 8723 - protein, 154 aa, Homo Sapiens
MKRIYTYRRAKEIFKDTPKAPQRNFEIAFKMFDLNGDGEVDMEEFEQVQSIIRSQTSMGMRHRDRPTTGNTLKSGLCSALTTYFFGADLKGKLTIKNFLEFQRKLQHDVLKLEFERHDPVDGRITERQFGGMLLAYSGVQSKKLTAMQRQLKKH

SEQ ID NO: 8724 - protein, 278 aa, Homo Sapiens
MKRIYTYRRAKEIFKDTPKAPQRNFEIAFKMFDLNGDGEVDMEEFEQVQSIIRSQTSMGMRHRDRPTTGNTLKSGLCSALTTYFFGADLKGKLTIKNFLEFQRKLQHDVLKLEFERHDPVDGRITERQFGGMLLAYSGVQSKKLTAMQRQLKKHFKEGKGLTFQEVENFFTFLKNINDVDTALSFYHMAGASLDKVTMQQVARTVAKVELSDHVCDVVFALFDCDGNGELSNKEFVSIMKQRLMRGLEKPKDMGFTRLMQAMWKCAQETAWDFALPKQ

SEQ ID NO: 8725 - protein, 212 aa, Homo Sapiens
MVAFLGASAVTASTGLLWKRAHAESPPCVDNLKSDIGDKGKNKDEGDVCNHEKKTADLAPHPEEKKKKRSGFRDRKVMEYENRIRAYSTPDKIFRYFATLKVISEPGEAEVFMTPEDFVRSITPNEKQPEHLGLDQYIIKRFDGKKISQEREKFADEGSIFYTLGECGLISFSDYIFLTTVLSTPQRNFEIAFKMFDLNGDGEVDMEEFEQA

SEQ ID NO: 8726 - protein, 278 aa, Homo Sapiens
MVSLKAKLNHLRQSMLKQKAPQRNFEIAFKMFDLNGDGEVDMEEFEQVQSIIRSQTSMGMRHRDRPTTGNTLKSGLCSALTTYFFGADLKGKLTIKNFLEFQRKLQHDVLKLEFERHDPVDGRITERQFGGMLLAYSGVQSKKLTAMQRQLKKHFKEGKGLTFQEVENFFTFLKNINDVDTALSFYHMAGASLDKVTMQQVARTVAKVELSDHVCDVVFALFDCDGNGELSNKEFVSIMKQRLMRGLEKPKDMGFTRLMQAMWKCAQETAWDFALPKQ

SEQ ID NO: 8727 - protein, 246 aa, Homo Sapiens
  misc_feature (1)..(1): Xaa can be any naturally occurring amino acid
XNEKQPEHLGLDQYIIKRFDGKKISQEREKFADEGSIFYTLGECGLISFSDYIFLTTVLSTPQRNFEIAFKMFDLNGDGEVDMEEFEQVQSIIRSQTSMGMRHRDRPTTGNTLKSGLCSALTTYFFGADLKGKLTIKNFLEFQRKLQHDVLKLEFERHDPVDGRITERQFGGMLLAYSGVQSKKLTAMQRQLKKHFKEGKGLTFQEVENFFTFLKNINDVDTALSFYHMAGASLDKGKGTIFMGRR

SEQ ID NO: 8728 - protein, 512 aa, Homo Sapiens
MAEPSVESSSPGGSATSDDHEFDPSADMLVHDFDDERTLEEEEMMEGETNFSSEIEDLAREGDMPIHELLSLYGYGSTVRLPEEDEEEEEEEEEGEDDEDADNDDNSGCSGENKEENIKDSSGQEDETQSSNDDPSQSVASQDAQEIIRPRRCKYFDTNSEVEEESEEDEDYIPSEDWKKEIMVGSMFQAEIPVGICRYKENEKVYENDDQLLWDPEYLPEDKVIIFLKDASRRTGDEKGVEAIPEGSHIKDNEQALYELVKCNFDTEEALRRLRFNVKAAREELSVWTEEECRNFEQGLKAYGKDFHLIQANKVRTRSVGECVAFYYMWKKSERYDFFAQQTRFGKKKYNLHPGVTDYMDRLLDESESAASSRAPSPPPTASNSSNSQSEKEDGTVSTANQNGVSSNGPGEILNKEEVKVEGLHINGPTGGNKKPLHADMDTNGYETDNLTTDPKLAHMTARNENDFDEKSERPAKRRRVNSNGKESPGSSEFFQEAVSHGKFEELENTDD

SEQ ID NO: 8729 - protein, 433 aa, Homo Sapiens
MAEPSVESSSPGGSATSDDHEFDPSADMLVHDFDDERTLEEEEMMEGETNFSSEIEDLAREGDMPIHELLSLYGYGSTVRLPEEDEEEEEEEEEGEDDEDADNDDNSGCSGENKEENIKDSSGQEDETQSSNDDPSQSVASQDAQEIIRPRRCKYFDTNSEVEEESEEDEDYIPSEDWKKEIMVGSMFQAEIPVGICRYKENEKVYENDDQLLWDPEYLPEDKVIIFLKDASRRTGDEKGVEAIPEGSHIKDNEQALYELVKCNFDTEEALRRLRFNVKAAREELSVWTEEECRNFEQGLKAYGKDFHLIQANKVRTRSVGECVAFYYMWKKSERYDFFAQQTRFGKKKYNLHPGVTDYMDRLLDESESAASSRAPSPPPTASNSSNSQSEKEDGTVSTANQNGVSSNGPGILQMLLPVHFSAISSRANAFLK

SEQ ID NO: 8730 - protein, 486 aa, Homo Sapiens
MDGASSGGGGSSEGGGGSSGSGYGVVARFSQCLAEFRTWLRTNWLRFNADKTDVMLPSVESSSPGGSATSDDHEFDPSADMLVHDFDDERTLEEEEMMEGETNFSSEIEDLAREGDMPIHELLSLYGYGSTVRLPEEDEEEEEEEEEGEDDEDADNDDNSGCSGENKEENIKDSSGQEDETQSSNDDPSQSVASQDAQEIIRPRRCKYFDTNSEVEEESEEDEDYIPSEDWKKEIMVGSMFQAEIPVGICRYKENEKVYENDDQLLWDPEYLPEDKVIIFLKDASRRTGDEKGVEAIPEGSHIKDNEQALYELVKCNFDTEEALRRLRFNVKAAREELSVWTEEECRNFEQGLKAYGKDFHLIQANKVRTRSVGECVAFYYMWKKSERYDFFAQQTRFGKKKYNLHPGVTDYMDRLLDESESAASSRAPSPPPTASNSSNSQSEKEDGTVSTANQNGVSSNGPGILQMLLPVHFSAISSRANAFLK

SEQ ID NO: 8731 - protein, 565 aa, Homo Sapiens
MDGASSGGGGSSEGGGGSSGSGYGVVARFSQCLAEFRTWLRTNWLRFNADKTDVMLPSVESSSPGGSATSDDHEFDPSADMLVHDFDDERTLEEEEMMEGETNFSSEIEDLAREGDMPIHELLSLYGYGSTVRLPEEDEEEEEEEEEGEDDEDADNDDNSGCSGENKEENIKDSSGQEDETQSSNDDPSQSVASQDAQEIIRPRRCKYFDTNSEVEEESEEDEDYIPSEDWKKEIMVGSMFQAEIPVGICRYKENEKVYENDDQLLWDPEYLPEDKVIIFLKDASRRTGDEKGVEAIPEGSHIKDNEQALYELVKCNFDTEEALRRLRFNVKAAREELSVWTEEECRNFEQGLKAYGKDFHLIQANKVRTRSVGECVAFYYMWKKSERYDFFAQQTRFGKKKYNLHPGVTDYMDRLLDESESAASSRAPSPPPTASNSSNSQSEKEDGTVSTANQNGVSSNGPGEILNKEEVKVEGLHINGPTGGNKKPLHADMDTNGYETDNLTTDPKLAHMTARNENDFDEKSERPAKRRRVNSNGKESPGSSEFFQEAVSHGKFEELENTDD

SEQ ID NO: 8732 - protein, 450 aa, Homo Sapiens
MFMFNWFTDCLWTLFLSNYQPSVESSSPGGSATSDDHEFDPSADMLVHDFDDERTLEEEEMMEGETNFSSEIEDLAREGDMPIHELLSLYGYGSTVRLPEEDEEEEEEEEEGEDDEDADNDDNSGCSGENKEENIKDSSGQEDETQSSNDDPSQSVASQDAQEIIRPRRCKYFDTNSEVEEESEEDEDYIPSEDWKKEIMVGSMFQAEIPVGICRYKENEKVYENDDQLLWDPEYLPEDKVIIFLKDASRRTGDEKGVEAIPEGSHIKDNEQALYELVKCNFDTEEALRRLRFNVKAAREELSVWTEEECRNFEQGLKAYGKDFHLIQANKVRTRSVGECVAFYYMWKKSERYDFFAQQTRFGKKKYNLHPGVTDYMDRLLDESESAASSRAPSPPPTASNSSNSQSEKEDGTVSTANQNGVSSNGPGILQMLLPVHFSAISSRANAFLK

SEQ ID NO: 8733 - protein, 470 aa, Homo Sapiens
MFMFNWFTDCLWTLFLSNYQPSVESSSPGGSATSDDHEFDPSADMLVHDFDDERTLEEEEMMEGETNFSSEIEDLAREGDMPIHELLSLYGYGSTVRLPEEDEEEEEEEEEGEDDEDADNDDNSGCSGENKEENIKDSSGQEDETQSSNDDPSQSVASQDAQEIIRPRRCKYFDTNSEVEEESEEDEDYIPSEDWKKEIMVGSMFQAEIPVGICRYKENEKVYENDDQLLWDPEYLPEDKVIIFLKDASRRTGDEKGVEAIPEGSHIKDNEQALYELVKCNFDTEEALRRLRFNVKAAREELSVWTEEECRNFEQGLKAYGKDFHLIQANKVRTRSVGECVAFYYMWKKSERYDFFAQQTRFGKKKYNLHPGVTDYMDRLLDESESAASSRAPSPPPTASNSSNSQSEKEDGTVSTANQNGVSSNGPGEILNKEEVKVEGLHINGPTGILQMLLPVHFSAISSRANAFLK

SEQ ID NO: 8734 - protein, 529 aa, Homo Sapiens
MFMFNWFTDCLWTLFLSNYQPSVESSSPGGSATSDDHEFDPSADMLVHDFDDERTLEEEEMMEGETNFSSEIEDLAREGDMPIHELLSLYGYGSTVRLPEEDEEEEEEEEEGEDDEDADNDDNSGCSGENKEENIKDSSGQEDETQSSNDDPSQSVASQDAQEIIRPRRCKYFDTNSEVEEESEEDEDYIPSEDWKKEIMVGSMFQAEIPVGICRYKENEKVYENDDQLLWDPEYLPEDKVIIFLKDASRRTGDEKGVEAIPEGSHIKDNEQALYELVKCNFDTEEALRRLRFNVKAAREELSVWTEEECRNFEQGLKAYGKDFHLIQANKVRTRSVGECVAFYYMWKKSERYDFFAQQTRFGKKKYNLHPGVTDYMDRLLDESESAASSRAPSPPPTASNSSNSQSEKEDGTVSTANQNGVSSNGPGEILNKEEVKVEGLHINGPTGGNKKPLHADMDTNGYETDNLTTDPKLAHMTARNENDFDEKSERPAKRRRVNSNGKESPGSSEFFQEAVSHGKFEELENTDD

SEQ ID NO: 8735 - protein, 81 aa, Homo Sapiens
MFMFNWFTDCLWTLFLSNYQPSVESSSPGGSATSDDHEFDPSADMLVHDFDDERTLEEEEMMEGETNFSSEIEDLARVNNM

SEQ ID NO: 8736 - protein, 370 aa, Homo Sapiens
MPIHELLSLYGYGSTVRLPEEDEEEEEEEEEGEDDEDADNDDNSGCSGENKEENIKDSSGQEDETQSSNDDPSQSVASQDAQEIIRPRRCKYFDTNSEVEEESEEDEDYIPSEDWKKEIMVGSMFQAEIPVGICRYKENEKVYENDDQLLWDPEYLPEDKVIIFLKDASRRTGDEKGVEAIPEGSHIKDNEQALYELVKCNFDTEEALRRLRFNVKAAREELSVWTEEECRNFEQGLKAYGKDFHLIQANKVRTRSVGECVAFYYMWKKSERYDFFAQQTRFGKKKYNLHPGVTDYMDRLLDESESAASSRAPSPPPTASNSSNSQSEKEDGTVSTANQNGVSSNGPGILQMLLPVHFSAISSRANAFLK

SEQ ID NO: 8737 - protein, 70 aa, Homo Sapiens
MFQPLSSPDSHRKGTGFGLGIVFSLTFFKRRMWPLAFGSGMGLGMAYSNCQHDFQAPYLLHGKYVKEQEQ

SEQ ID NO: 8738 - protein, 71 aa, Homo Sapiens
RKWDRCLADAVVKIGTGFGLGIVFSLTFFKRRMWPLAFGSGMGLGMAYSNCQHDFQAPYLLHGKYVKEQEQ

SEQ ID NO: 8739 - protein, 46 aa, Homo Sapiens
  misc_feature (1)..(1): Xaa can be any naturally occurring amino acid
XKWDRCLADAVVKIEMGFHHVAQAGLELRVQTIHLPWPPNVPGLQA

SEQ ID NO: 8740 - protein, 286 aa, Homo Sapiens
MCLFQLCGLVRYMEFGPPTVNDKLMRFFDHCEKFLTEVEKNATALYHVEAFKTGPEMQNILKKVAATLQVPVNDLNADLIQVAFFTCSFDLAIKGVKSPWCDVFDIDDAKVLEYLNDLKQYWKRGYGYTINSRSSCTLFQDIFQHLDKAVEQKQRSQPISSPVILQFGHAETLLPLLSLMGYFKDKEPLTAYNYKKQMHRKFRSGLIVPYASNLIFVLYHCENAKTPKEQFRVQMLLNEKVLPLAYSQETVSFYEDLKNHYKDILQSCQTSEECELARANSTSDEL

SEQ ID NO: 8741 - protein, 312 aa, Homo Sapiens
MLRAPGCLLRTSVAPAAALAAALLSSLARCSLLEPRDPVASSLSPYFGTKTRYEDVNPVLLSGPEAPWRDPELLEGTCTPVQLVALIRHGTRYPTVKQIRKLRQLHGLLQARGSRDGGASSTGSRDLGAALADWPLWYADWMDGQLVEKGRQDMRQLALRLASLFPALFSRENYGRLRLITSSKHRCMDSSAAFLQGLWQHYHPGLPPPDVADMEFGPPTVNDKLMRFFDHCEKFLTEVEKNATALYHVEAFKTGPEMQNILKKVAATLQVPVNDLNAGLSQFLLQSSSSLVMQRLFFHCFLSWATSKTRNP

SEQ ID NO: 8742 - protein, 487 aa, Homo Sapiens
MLRAPGCLLRTSVAPAAALAAALLSSLARCSLLEPRDPVASSLSPYFGTKTRYEDVNPVLLSGPEAPWRDPELLEGTCTPVQLVALIRHGTRYPTVKQIRKLRQLHGLLQARGSRDGGASSTGSRDLGAALADWPLWYADWMDGQLVEKGRQDMRQLALRLASLFPALFSRENYGRLRLITSSKHRCMDSSAAFLQGLWQHYHPGLPPPDVADMEFGPPTVNDKLMRFFDHCEKFLTEVEKNATALYHVEAFKTGPEMQNILKKVAATLQVPVNDLNADLIQVAFFTCSFDLAIKGVKSPWCDVFDIDDAKVLEYLNDLKQYWKRGYGYTINSRSSCTLFQDIFQHLDKAVEQKQRSQPISSPVILQFGHAETLLPLLSLMGYFKDKEPLTAYNYKKQMHRKFRSGLIVPYASNLIFVLYHCENAKTPKEQFRVQMLLNEKVLPLAYSQETVSFYEDLKNHYKDILQSCQTSEECELARANSTSDEL

SEQ ID NO: 8743 - protein, 146 aa, Homo Sapiens
MKLPILRSNPEDQILYQTERYNEETFGYEVPIKEEGDYVLVLKFAEVYFAQSQQKVFDVRLNGHVVVKDLDIFDRVGHSTAHDEIIPMSIRKGKLSVQGEVSTFTGKLYIEFVKGYYDNPKVCALYIMAGTVDDVPKLQPHPGLEK

SEQ ID NO: 8744 - protein, 217 aa, Homo Sapiens
MLGAWAVEGTAVALLRLLLLLLPPAIRGPGLGVAGVAGAAGAGLPESVIWAVNAGGEAHVDVHGIHFRKDPLEGRVGRASDYGMKLPILRSNPEDQILYQTERYNEETFGYEVPIKEEGDYVLVLKFAEVYFAQSQQKMYQSFSLIRDWRRKKRKKKKKNMMKGLISKNRPIRTGCSQAPAHPTPMPRTTAASCFPSWWPSESSFQPSSASAGCENK

SEQ ID NO: 8745 - protein, 292 aa, Homo Sapiens
MLGAWAVEGTAVALLRLLLLLLPPAIRGPGLGVAGVAGAAGAGLPESVIWAVNAGGEAHVDVHGIHFRKDPLEGRVGRASDYGMKLPILRSNPEDQILYQTERYNEETFGYEVPIKEEGDYVLVLKFAEVYFAQSQQKVFDVRLNGHVVVKDLDIFDRVGHSTAHDEIIPMSIRKGKLSVQGEVSTFTGKLYIEFVKGYYDNPKVCALYIMAGTVDDVPKLQPHPGLEKKEEEEEEEEYDEGSNLKKQTNKNRVQSGPRTPNPYASDNSSLMFPILVAFGVFIPTLFCLCRL

SEQ ID NO: 8746 - protein, 173 aa, Homo Sapiens
  misc_feature (1)..(1): Xaa can be any naturally occurring amino acid
XNEETFGYEVPIKEEGDYVLVLKFAEVYFAQSQQKVFDVRLNGHVVVKDLDIFDRVGHSTAHDEIIPMSIRKGKLSVQGEVSTFTGKLYIEFVKMYQSFSLIRDWRRKKRKKKKKNMMKGLISKNRPIRTGCSQAPAHPTPMPRTTAASCFPSWWPSESSFQPSSASAGCENK

SEQ ID NO: 8747 - protein, 115 aa, Homo Sapiens
MVSRKAVAALLVVHVAAMLASQTEAFVPIFTYGELQRMQEKERNKGQKKSLSVWQRSGEEGPVDPAEPIREEENEMIKLTAPLEIGMRMNSRQLEKYPATLEGLLSEMLPQHAAK

SEQ ID NO: 8748 - protein, 114 aa, Homo Sapiens
MVSRKAVAALLVVHVAAMLASQTEAFVPIFTYGELQRMQEKERNKGQKKSLSVWQRSGEEGPVDPAEPIREEENEMIKLTAPLEIGMRMNSRQLEKYPATLEGLLSEMLPQHAK

SEQ ID NO: 8749 - protein, 108 aa, Homo Sapiens
MVSRKAVAALLVVHVAAMLASQTEAFVPIFTYGELQRMQEKERNKGQKKSLSVWQRSGEEGPVDPAEPIREEENEMIKLTAPLEIGMRMNSRQLEKYPATLEGLLTAK

SEQ ID NO: 8750 - protein, 919 aa, Homo Sapiens
MAADVFMCSPRRPRSRGRQVLLKPQVSEDDDDSDTDEPSPPPASGAATPARAHASAAPPPPRAGPGREEPPRRQQIIHSGHFMVSSPHREHPPKKGYDFDTVNKQTCQTYSFGKTSSCHLSIDASLTKLFECMTLAYSGKLVSPKWKNFKGLKLQWRDKIRLNNAIWRAWYMQYLEKRKNPVCHFVTPLDGSVDVDEHRRPEAITTEGKYWKSRIEIVIREYHKWRTYFKKRLQQHKDEDLSSLVQDDDMLYWHKHGDGWKTPVPMEEDPLLDTDMLMSEFSDTLFSTLSSHQPVAWPNPREIAHLGNADMIQPGLIPLQPNLDFMDTFEPFQDLFSSSRSIFGSMLPASASAPVPDPNNPPAQESILPTTALPTVSLPDSLIAPPTAPSLAHMDEQGCEHTSRTEDPFIQPTDFGPSEPPLSVPQPFLPVFTMPLLSPSPAPPPISPVLPLVPPPATALNPPAPPTFHQPQKFAGVNKAPSVITHTASATLTHDAPATTFSQSQGLVITTHHPAPSAAPCGLALSPVTRPPQPRLTFVHPKPVSLTGGRPKQPHKIVPAPKPEPVSLVLKNARIAPAAFSGQPQAVIMTSGPLKREGMLASTVSQSNVVIAPAAIARAPGVPEFHSSILVTDLGHGTSSPPAPVSRLFPSTAQDPLGKGEQVPLHGGSPQVTVTGPSRDCPNSGQASPCASEQSPSPQSPQNNCSGKSDPKNVAALKNRQMKHISAEQKRRFNIKMCFDMLNSLISNNSKLTSHAITLQKTVEYITKLQQERGQMQEEARRLREEIEELNATIISCQQLLPATGVPVTRRQFDHMKDMFDEYVKTRTLQNWKFWIFSIIIKPLFESFKGMVSTSSLEELHRTALSWLDQHCSLPILRPMVLSTLRQLSTSTSILTDPAQLPEQASKAVTRIGKRLGES

SEQ ID NO: 8751 - protein, 217 aa, Homo Sapiens
MDEQGCEHTSRTEDPFIQPTDFGPSEPPLSVPPPISPVLPLVPPPATALNPPAPPTFHQPQKFAGVNKAPSVITHTASATLTHDAPATTFSQSQGLVITTHHPAPSAAPCGLALSPVTRPPQPRLTFVHPKPVSLTGGRPKQPHKIVPAPKPEPVSLVLKNARIAPGEPGGETQCGAPPDPEGCFPIPKAFKLVTTTTTLVCTCMRTHIHLNETKVS

SEQ ID NO: 8752 - protein, 526 aa, Homo Sapiens
MDEQGCEHTSRTEDPFIQPTDFGPSEPPLSVPQPFLPVFTMPLLSPSPAPPPISPVLPLVPPPATALNPPAPPTFHQPQKFAGVNKAPSVITHTASATLTHDAPATTFSQSQGLVITTHHPAPSAAPCGLALSPVTRPPQPRLTFVHPKPVSLTGGRPKQPHKIVPAPKPEPVSLVLKNARIAPAAFSGQPQAVIMTSGPLKREGMLASTVSQSNVVIAPAAIARAPGVPEFHSSILVTDLGHGTSSPPAPVSRLFPSTAQDPLGKGEQVPLHGGSPQVTVTGPSRDCPNSGQASPCASEQSPSPQSPQNNCSGKSDPKNVAALKNRQMKHISAEQKRRFNIKMCFDMLNSLISNNSKLTSHAITLQKTVEYITKLQQERGQMQEEARRLREEIEELNATIISCQQLLPATGVPVTRRQFDHMKDMFDEYVKTRTLQNWKFWIFSIIIKPLFESFKGMVSTSSLEELHRTALSWLDQHCSLPILRPMVLSTLRQLSTSTSILTDPAQLPEQASKAVTRIGKRLGES

SEQ ID NO: 8753 - protein, 74 aa, Homo Sapiens
MLYWHKHGDGWKTPVPMEEDPLLDTDMLMSEFSDTLFSTLSSHQPVAWPNPREIAHLGNADMIQPGLIPLQPNL

SEQ ID NO: 8754 - protein, 308 aa, Homo Sapiens
MVLGALVALSSCPLGLRTSCLTGREAASAGWARPCGPGLHLNILLILAAAFSGQPQAVIMTSGPLKREGMLASTVSQSNVVIAPAAIARAPGVPEFHSSILVTDLGHGTSSPPAPVSRLFPSTAQDPLGKGEQVPLHGGSPQVTVTGPSRDCPNSGQASPCASEQSPSPQSPQNNCSGKSDPKNVAALKNRQMKHISAEQKRRFNIKMCFDMLNSLISNNSKLTSHAITLQKTVEYITKLQQERGQMQEEARRLREEIEELNATIISCQQLLPATGVPVTRRQFDHMKDMFDEYVKTRTLQNWKFWIV

SEQ ID NO: 8755 - protein, 171 aa, Homo Sapiens
  misc_feature (1)..(1): Xaa can be any naturally occurring amino acid
XHGGSPQVTVTGPSRDCPNSGQASPCASEQSPSPQSPQNNCSGKSDPKNVAALKNRQMKHISAEQKRRFNIKMCFDMLNSLISNNSKLTSHAITLQKTVEYITKLQQERGQMQEEARRLREEIEELNATIIDPFSVGRYFPAPGERSTPVQPPSGLQSPAPLRACLFFNHT

SEQ ID NO: 8756 - protein, 213 aa, Homo Sapiens
MAGALAGLAAGLQVPRVAPSPDSDSDTDSEDPSLRRSAGGLLRSQVIHSGHFMVSSPHSDSLPRRRDQEGSVGPSDFGPRSIDPTLTRLFECLSLAYSGKLVSPKWKNFKGLKLLCRDKIRLNNAIWRAWYIQYFFTNSRLPQPPMPSNFPEPPSFSPVVDSLFSSGTLGPEVPPASSAMTHLSGHSRLQARNSCPGPLDSSAFLSSDFLLPE

SEQ ID NO: 8757 - protein, 721 aa, Homo Sapiens
MAGALAGLAAGLQVPRVAPSPDSDSDTDSEDPSLRRSAGGLLRSQVIHSGHFMVSSPHSDSLPRRRDQEGSVGPSDFGPRSIDPTLTRLFECLSLAYSGKLVSPKWKNFKGLKLLCRDKIRLNNAIWRAWYIQYVKRRKSPVCGFVTPLQGPEADAHRKPEAVVLEGNYWKRRIELPPEDAYVGNADMIQPDLTPLQPSLDDFMDISDFFTNSRLPQPPMPSNFPEPPSFSPVVDSLFSSGTLGPEVPPASSAMTHLSGHSRLQARNSCPGPLDSSAFLSSDFLLPEDPKPRLPPPPVPPPLLHYPPPAKVPGLEPCPPPPFPPMAPPTALLQEEPLFSPRFPFPTVPPAPGVSPLPAPAAFPPTPQSVPSPAPTPFPIELLPLGYSEPAFGPCFSMPRGKPPAPSPRGQKASPPTLAPATASPPTTAGSNNPCLTQLLTAAKPEQALEPPLVSSTLLRSPGSPETVPEFPCTFLPPTPAPTPPRPPPGPATLAPSRPLLVPKAERLSPPAPSGSERRLSGDLSSMPGPGTLSVRVSPPQPILSRGRPDSNKTENRRITHISAEQKRRFNIKLGFDTLHGLVSTLSAQPSLKVSKATTLQKTAEYILMLQQERAGLQEEAQQLRDEIEELNAAINLCQQQLPATGVPITHQRFDQMRDMFDDYVRTRTLHNWKFWVFSILIRPLFESFNGMVSTASVHTLRQTSLAWLDQYCSLPALRPST

SEQ ID NO: 8758 - protein, 852 aa, Homo Sapiens
MAGALAGLAAGLQVPRVAPSPDSDSDTDSEDPSLRRSAGGLLRSQVIHSGHFMVSSPHSDSLPRRRDQEGSVGPSDFGPRSIDPTLTRLFECLSLAYSGKLVSPKWKNFKGLKLLCRDKIRLNNAIWRAWYIQYVKRRKSPVCGFVTPLQGPEADAHRKPEAVVLEGNYWKRRIEVVMREYHKWRIYYKKRLRKPSREDDLLAPKQAEGRWPPPEQWCKQLFSSVVPVLLGDPEEEPGGRQLLDLNCFLSDISDTLFTMTQSGPSPLQLPPEDAYVGNADMIQPDLTPLQPSLDDFMDISDFFTNSRLPQPPMPSNFPEPPSFSPVVDSLFSSGTLGPEVPPASSAMTHLSGHSRLQARNSCPGPLDSSAFLSSDFLLPEDPKPRLPPPPVPPPLLHYPPPAKVPGLEPCPPPPFPPMAPPTALLQEEPLFSPRFPFPTVPPAPGVSPLPAPAAFPPTPQSVPSPAPTPFPIELLPLGYSEPAFGPCFSMPRGKPPAPSPRGQKASPPTLAPATASPPTTAGSNNPCLTQLLTAAKPEQALEPPLVSSTLLRSPGSPQETVPEFPCTFLPPTPAPTPPRPPPGPATLAPSRPLLVPKAERLSPPAPSGSERRLSGDLSSMPGPGTLSVRVSPPQPILSRGRPDSNKTENRRITHISAEQKRRFNIKLGFDTLHGLVSTLSAQPSLKVSKATTLQKTAEYILMLQQERAGLQEEAQQLRDEIEELNAAINLCQQQLPATGVPITHQRFDQMRDMFDDYVRTRTLHNWKFWVFSILIRPLFESFNGMVSTASVHTLRQTSLAWLDQYCSLPALRPTVLNSLRQLGTSTSILTDPGRIPEQATRAVTEGTLGKPL

SEQ ID NO: 8759 - protein, 575 aa, Homo Sapiens
MAGALAGLAAGLQVPRVAPSPDSDSDTDSEDPSLRRSAGGLLRSQVIHSGHFMVSSPHSDSLPRRRDQEGSVGPSDFGPRSIDPTLTRLFECLSLAYSGKLVSPKWKNFKGLKLLCRDKIRLNNAIWRAWYIQYVKRRKSPVCGFVTPLQGPEADAHRKPEAVVLEGNYWKRRIEVVMREYHKWRIYYKKRLRKPSREDDLLAPKQAEGRWPPPEQWCKQLFSSVVPVLLGDPEEEPGGRQLLDLNCFLSDISDTLFTMTQSGPSPLQLPPEDAYVGNADMIQPDLTPLQPSLDDFMDISDFFTNSRLPQPPMPSNFPEPPSFSPVVDSLFSSGTLGPEVPPASSAMTHLSGHSRLQARNSCPGPLDSSAFLSSDFLLPEDPKPRLPPPPVPPPLLHYPPPAKVPGLEPCPPPPFPPMAPPTALLQEEPLFSPRFPFPTVPPAPGVSPLPAPAAFPPTPQSVPSPAPTPFPIELLPLGYSEPAFGPCFSMPRGKPPAPSPRGQKASPPTLAPATASPPTTAGSNNPCLTQLLTAAKPEQALEPPLVSSTLLRSPGSPAVNGGCQGTSAPCQALGL

SEQ ID NO: 8760 - protein, 831 aa, Homo Sapiens
MAGALAGLAAGLQVPRVAPSPDSDSDTDSEDPSLRRSAGGLLRSQVIHSGHFMVSSPHSDSLPRRRDQEGSVGPSDFGPRSIDPTLTRLFECLSLAYSGKLVSPKWKNFKGLKLLCRDKIRLNNAIWRAWYIQYVKRRKSPVCGFVTPLQGPEADAHRKPEAVVLEGNYWKRRIEVVMREYHKWRIYYKKRLRKPSREDDLLAPKQAEGRWPPPEQWCKQLFSSVVPVLLGDPEEEPGGRQLLDLNCFLSDISDTLFTMTQSGPSPLQLPPEDAYVGNADMIQPDLTPLQPSLDDFMDISDFFTNSRLPQPPMPSNFPEPPSFSPVVDSLFSSGTLGPEVPPASSAMTHLSGHSRLQARNSCPGPLDSSAFLSSDFLLPEDPKPRLPPPPVPPPLLHYPPPAKVPGLEPCPPPPFPPMAPPTALLQEEPLFSPRFPFPTVPPAPGVSPLPAPAAFPPTPQSVPSPAPTPFPIELLPLGYSEPAFGPCFSMPRGKPPAPSPRGQKASPPTLAPATASPPTTAGSNNPCLTQLLTAAKPEQALEPPLVSSTLLRSPGSPQETVPEFPCTFLPPTPAPTPPRPPPGPATLAPSRPLLVPKAERLSPPAPSGSERRLSGDLSSMPGPGTLSVRVSPPQPILSRGRPDSNKNRRITHISAEQKRRFNIKLGFDTLHGLVSTLSAQPSLKERAGLQEEAQQLRDEIEELNAAINLCQQQLPATGVPITHQRFDQMRDMFDDYVRTRTLHNWKFWVFSILIRPLFESFNGMVSTASVHTLRQTSLAWLDQYCSLPALRPTVLNSLRQLGTSTSILTDPGRIPEQATRAVTEGTLGKPL

SEQ ID NO: 8761 - protein, 833 aa, Homo Sapiens
MAGALAGLAAGLQVPRVAPSPDSDSDTDSEDPSLRRSAGGLLRSQVIHSGHFMVSSPHSDSLPRRRDQEGSVGPSDFGPRSIDPTLTRLFECLSLAYSGKLVSPKWKNFKGLKLLCRDKIRLNNAIWRAWYIQYVKRRKSPVCGFVTPLQGPEADAHRKPEAVVLEGNYWKRRIEVVMREYHKWRIYYKKRLRKPSREDDLLAPKQAEGRWPPPEQWCKQLFSSVVPVLLGDPEEEPGGRQLLDLNCFLSDISDTLFTMTQSGPSPLQLPPEDAYVGNADMIQPDLTPLQPSLDDFMDISDFFTNSRLPQPPMPSNFPEPPSFSPVVDSLFSSGTLGPEVPPASSAMTHLSGHSRLQARNSCPGPLDSSAFLSSDFLLPEDPKPRLPPPPVPPPLLHYPPPAKVPGLEPCPPPPFPPMAPPTALLQEEPLFSPRFPFPTVPPAPGVSPLPAPAAFPPTPQSVPSPAPTPFPIELLPLGYSEPAFGPCFSMPRGKPPAPSPRGQKASPPTLAPATASPPTTAGSNNPCLTQLLTAAKPEQALEPPLVSSTLLRSPGSPQETVPEFPCTFLPPTPAPTPPRPPPGPATLAPSRPLLVPKAERLSPPAPSGSERRLSGDLSSMPGPGTLSVRVSPPQPILSRGRPDSNKTENRRITHISAEQKRRFNIKLGFDTLHGLVSTLSAQPSLKERAGLQEEAQQLRDEIEELNAAINLCQQQLPATGVPITHQRFDQMRDMFDDYVRTRTLHNWKFWVFSILIRPLFESFNGMVSTASVHTLRQTSLAWLDQYCSLPALRPTVLNSLRQLGTSTSILTDPGRIPEQATRAVTEGTLGKPL

SEQ ID NO: 8762 - protein, 850 aa, Homo Sapiens
MAGALAGLAAGLQVPRVAPSPDSDSDTDSEDPSLRRSAGGLLRSQVIHSGHFMVSSPHSDSLPRRRDQEGSVGPSDFGPRSIDPTLTRLFECLSLAYSGKLVSPKWKNFKGLKLLCRDKIRLNNAIWRAWYIQYVKRRKSPVCGFVTPLQGPEADAHRKPEAVVLEGNYWKRRIEVVMREYHKWRIYYKKRLRKPSREDDLLAPKQAEGRWPPPEQWCKQLFSSVVPVLLGDPEEEPGGRQLLDLNCFLSDISDTLFTMTQSGPSPLQLPPEDAYVGNADMIQPDLTPLQPSLDDFMDISDFFTNSRLPQPPMPSNFPEPPSFSPVVDSLFSSGTLGPEVPPASSAMTHLSGHSRLQARNSCPGPLDSSAFLSSDFLLPEDPKPRLPPPPVPPPLLHYPPPAKVPGLEPCPPPPFPPMAPPTALLQEEPLFSPRFPFPTVPPAPGVSPLPAPAAFPPTPQSVPSPAPTPFPIELLPLGYSEPAFGPCFSMPRGKPPAPSPRGQKASPPTLAPATASPPTTAGSNNPCLTQLLTAAKPEQALEPPLVSSTLLRSPGSPQETVPEFPCTFLPPTPAPTPPRPPPGPATLAPSRPLLVPKAERLSPPAPSGSERRLSGDLSSMPGPGTLSVRVSPPQPILSRGRPDSNKNRRITHISAEQKRRFNIKLGFDTLHGLVSTLSAQPSLKVSKATTLQKTAEYILMLQQERAGLQEEAQQLRDEIEELNAAINLCQQQLPATGVPITHQRFDQMRDMFDDYVRTRTLHNWKFWVFSILIRPLFESFNGMVSTASVHTLRQTSLAWLDQYCSLPALRPTVLNSLRQLGTSTSILTDPGRIPEQATRAVTEGTLGKPL

SEQ ID NO: 8763 - protein, 235 aa, Homo Sapiens
PKWKNFKGLKLLCRDKIRLNNAIWRAWYIQYVKRRKSPVCGFVTPLQGPEADAHRKPEAVVLEGNYWKRRIEVVMREYHKWRIYYKKRVSGGGPGRPQSFPPAAAGYRPPRKIPGKGILTPELAPLGPSIQSRADSATVWPQRLLAASLPRGRLRKPSREDDLLAPKQAEGRWPPPEQWCKQLFSSVVPVLLGDPEEEPGGRQLLDLNCFLSDISDTLFTMTQSGPSPLQLPPED

SEQ ID NO: 8764 - protein, 469 aa, Homo Sapiens
MHSFPPLLLLLFWGVVSHSFPATLETQEQDVDLVQKYLEKYYNLKNDGRQVEKRRNSGPVVEKLKQMQEFFGLKVTGKPDAETLKVMKQPRCGVPDVAQFVLTEGNPRWEQTHLTYRIENYTPDLPRADVDHAIEKAFQLWSNVTPLTFTKVSEGQADIMISFVRGDHRDNSPFDGPGGNLAHAFQPGPGIGGDAHFDEDERWTNNFREYNLHRVAAHELGHSLGLSHSTDIGALMYPSYTFSGDVQLAQDDIDGIQAIYGRSQNPVQPIGPQTPKACDSKLTFDAITTIRGEVMFFKDRFYMRTNPFYPEVELNFISVFWPQLPNGLEAAYEFADRDEVRFFKGNKYWAVQGQNVLHGYPKDIYSSFGFPRTVKHIDAALSEENTGKTYFFVANKYWRYDEYKRSMDPGYPKMIAHDFPGIGHKVDAVFMKDGFFYFFHGTRQYKFDPKTKRILTLQKANSWFNCRKN

SEQ ID NO: 8765 - protein, 476 aa, Homo Sapiens
MMHLAFLVLLCLPVCSAYPLSGAAKEEDSNKDLAQQYLEKYYNLEKDVKQFRRKDSNLIVKKIQGMQKFLGLEVTGKLDTDTLEVMRKPRCGVPDVGHFSSFPGMPKWRKTHLTYRIVNYTPDLPRDAVDSAIEKALKVWEEVTPLTFSRLYEGEADIMISFAVKEHGDFYSFDGPGHSLAHAYPPGPGLYGDIHFDDDEKWTEDASGTNLFLVAAHELGHSLGLFHSANTEALMYPLYNSFTELAQFRLSQDDVNGIQSLYGPPPASTEEPLVPTKSVPSGSEMPAKCDPALSFDAISTLRGEYLFFKDRYFWRRSHWNPEPEFHLISAFWPSLPSYLDAAYEVNSRDTVFIFKGNEFWAIRGNEVQAGYPRGIHTLGFPPTIRKIDAAVSDKEKKKTYFFAADKYWRFDENSQSMEQGFPRLIADDFPGVEPKVDAVLQAFGFFYFFSGSSQFEFDPNARMVTHILKSNSWLHC

SEQ ID NO: 8766 - protein, 181 aa, Homo Sapiens
MMHLAFLVLLCLPVCSAYPLSGAAKEEDSNKDLAQQYLEKYYNLEKDVKQFRRKDSNLIVKKIQGMQKFLGLEVTGKLDTDTLEVMRKPRCGVPDVGHFSSFPGMPKWRKTHLTYRIVNYTPDLPRDAVDSAIEKALKVWEEVTPLTFSRLYEGEADIMISFAVKGHSLAHAYPPGPGLYG

SEQ ID NO: 8767 - protein, 113 aa, Homo Sapiens
MAPAAWLRSAAARALLPPMLLLLLQPPPLLARALPPDAHHLHAERRGPQPWHAALPSSPAPAPATQEAPRPASSLRPPRCGVPDPSDGLSARNRQKRFVLSGGRWEKTDLTYR

SEQ ID NO: 8768 - protein, 488 aa, Homo Sapiens
MAPAAWLRSAAARALLPPMLLLLLQPPPLLARALPPDAHHLHAERRGPQPWHAALPSSPAPAPATQEAPRPASSLRPPRCGVPDPSDGLSARNRQKRFVLSGGRWEKTDLTYRILRFPWQLVQEQVRQTMAEALKVWSDVTPLTFTEVHEGRADIMIDFARYWHGDDLPFDGPGGILAHAFFPKTHREGDVHFDYDETWTIGDDQGTDLLQVAAHEFGHVLGLQHTTAAKALMSAFYTFRYPLSLSPDDCRGVQHLYGQPWPTVTSRTPALGPQAGIDTNEIAPLEPDAPPDACEASFDAVSTIRGELFFFKAGFVWRLRGGQLQPGYPALASRHWQGLPSPVDAAFEDAQGHIWFFQGAQYWVYDGEKPVLGPAPLTELGLVRFPVHAALVWGPEKNKIYFFRGRDYWRFHPSTRRVDSPVPRRATDWRGVPSEIDAAFQDADGYAYFLRGRLYWKFDPVKVKALEGFPRLVGPDFFGCAEPANTFL

SEQ ID NO: 8769 - protein, 354 aa, Homo Sapiens
MAPAAWLRSAAARALLPPMLLLLLQPPPLLARALPPDAHHLHAERRGPQPWHAALPSSPAPAPATQEAPRPASSLRPPRCGVPDPSDGLSARNRQKRILRFPWQLVQEQVRQTMAEALKVWSDVTPLTFTEVHEGRADIMIDFARYWHGDDLPFDGPGGILAHAFFPKTHREGDVHFDYDETWTIGDDQGTDLLQVAAHEFGHVLGLQHTTAAKALMSAFYTFRYPLSLSPDDCRGVQHLYGQPWPTVTSRTPALGPQAGIDTNEIAPLEPDAPPDACEASFDAVSTIRGELFFFKAGFVWRLRGGQLQPGYPALASRHWQGLPSPVDAAFEDAQGHIWFFQGTTGVSTPAPGV

SEQ ID NO: 8770 - protein, 170 aa, Homo Sapiens
  misc_feature (1)..(1): Xaa can be any naturally occurring amino acid
XAHEFGHVLGLQHTTAAKALMSAFYTFRYPLSLSPDDCRGVQHLYGQPWPTVTSRTPALGPQAGIDTNEIAPLEPDAPPDACEASFDAVSTIRGELFFFKAGFVWRLRGGQLQPGYPALASRHWQGLPSPVDAAFEDAQGHIWFFQELGFPSSTGRDESLEHCRCQGLHK

SEQ ID NO: 8771 - protein, 470 aa, Homo Sapiens
MKFLLILLLQATASGALPLNSSTSLEKNNVLFGERYLEKFYGLEINKLPVTKMKYSGNLMKEKIQEMQHFLGLKVTGQLDTSTLEMMHAPRCGVPDVHHFREMPGGPVWRKHYITYRINNYTPDMNREDVDYAIRKAFQVWSNVTPLKFSKINTGMADILVVFARGAHGDFHAFDGKGGILAHAFGPGSGIGGDAHFDEDEFWTTHSGGTNLFLTAVHEIGHSLGLGHSSDPKAVMFPTYKYVDINTFRLSADDIRGIQSLYGDPKENQRLPNPDNSEPALCDPNLSFDAVTTVGNKIFFFKDRFFWLKVSERPKTSVNLISSLWPTLPSGIEAAYEIEARNQVFLFKDDKYWLISNLRPEPNYPKSIHSFGFPNFVKKIDAAVFNPRFYRTYFFVDNQYWRYDERRQMMDPGYPKLITKNFQGIGPKIDAVFYSKNKYYYFFQGSNQFEYDFLLQRITKTLKSNSWFGC

SEQ ID NO: 8772 - protein, 471 aa, Homo Sapiens
MHPGVLAAFLFLSWTHCRALPLPSGGDEDDLSEEDLQFAERYLRSYYHPTNLAGILKENAASSMTERLREMQSFFGLEVTGKLDDNTLDVMKKPRCGVPDVGEYNVFPRTLKWSKMNLTYRIVNYTPDMTHSEVEKAFKKAFKVWSDVTPLNFTRLHDGIADIMISFGIKEHGDFYPFDGPSGLLAHAFPPGPNYGGDAHFDDDETWTSSSKGYNLFLVAAHEFGHSLGLDHSKDPGALMFPIYTYTGKSHFMLPDDDVQGIQSLYGPGDEDPNPKHPKTPDKCDPSLSLDAITSLRGETMIFKDRFFWRLHPQQVDAELFLTKSFWPELPNRIDAAYEHPSHDLIFIFRGRKFWALNGYDILEGYPKKISELGLPKEVKKISAAVHFEDTGKTLLFSGNQVWRYDDTNHIMDKDYPRLIEEDFPGIGDKVDAVYEKNGYIYFFNGPIQFEYSIWSNRIVRVMPANSILWC

SEQ ID NO: 8773 - protein, 489 aa, Homo Sapiens
MHPGVLAAFLFLSWTHCRALPLPSGGDEDDLSEEDLQFAERYLRSYYHPTNLAGILKENAASSMTERLREMQSFFGLEVTGKLDDNTLDVMKKPRCGVPDVGEYNVFPRTLKWSKMNLTYRIVNYTPDMTHSEVEKAFKKAFKVWSDVTPLNFTRLHDGIADIMISFGIKEHGDFYPFDGPSGLLAHAFPPGPNYGGDAHFDDDETWTSSSKGYNLFLVAAHEFGHSLGLDHSKDPGALMFPIYTYTGKSHFMLPDDDVQGIQSLYGPGDEDPNPKHPKTPDKCDPSLSLDAITSLRGETMIFKDRFFWRLHPQQVDAELFLTKSFWPELPNRIDAAYEHPSHDLIFIFRGRKFWALNGYDILEGYPKKISELGLPKEVKKISAAVHFEDTGKTLLFSGNQVWRYDDTNHIMDKDYPRLIEEDFPGIGDKVDAVYEKNESHSVTQAGVHCRNLSSLQPPPPGFKRFSCLSLWSSWDYRLYLFFQRTHTV

SEQ ID NO: 8774 - protein, 383 aa, Homo Sapiens [sequence omitted]

SEQ ID NO: 8775 - protein, 194 aa, Homo Sapiens
MRESLLFLRLPSSPALSRRRALRWALRPPRVAQAFSGRVCGQAWLQQYGYLPPGDLRTHTQRSPQSLSAAIAAMQKFYGLQVTGKADADTMKAMRRPRCGVPDKFGAEIKANVRRKRYAIQGLKWQHNEITFCIQNYTPKVGEYATYEAIRKAFRVWESATPLRFREVPYAYIREGHEKQADIMIFFAEGFHGD

SEQ ID NO: 8776 - protein, 582 aa, Homo Sapiens
MSPAPRPPRCLLLPLLTLGTALASLGSAQSSSFSPEAWLQQYGYLPPGDLRTHTQRSPQSLSAAIAAMQKFYGLQVTGKADADTMKAMRRPRCGVPDKFGAEIKANVRRKRYAIQGLKWQHNEITFCIQNYTPKVGEYATYEAIRKAFRVWESATPLRFREVPYAYIREGHEKQADIMIFFAEGFHGDSTPFDGEGGFLAHAYFPGPNIGGDTHFDSAEPWTVRNEDLNGNDIFLVAVHELGHALGLEHSSDPSAIMAPFYQWMDTENFVLPDDDRRGIQQLYGGESGFPTKMPPQPRTTSRPSVPDKPKNPTYGPNICDGNFDTVAMLRGEMFVFKERWFWRVRNNQVMDGYPMPIGQFWRGLPASINTAYERKDGKFVFFKGDKHWVFDEASLEPGYPKHIKELGRGLPTDKIDAALFWMPNGKTYFFRGNKYYRFNEELRAVDSEYPKNIKVWEGIPESPRGSFMGSDEVFTYFYKGNKYWKFNNQKLKVEPGYPKSALRDWMGCPSGGRPDEGTEEETEVIIIEVDEEGGGAVSAAAVVLPVLLLLLVLAVGLAVFFFRRHGTPRRLLYCQRSLLDKV

SEQ ID NO: 8777 - protein, 71 aa, Homo Sapiens
MSPAPRPPRCLLLPLLTLGTALASLGSAQSSSFSPESLEELYNWGELPLPRFPWALLSALEPPDKHLDSAQ

SEQ ID NO: 8778 - protein, 143 aa, Homo Sapiens
MDPGYPAQSPLWRGVPSTLDDAMRWSDGASYFFRGQEYWKVLDGELEVAPGYPQSTARDWLVCGDSQADGSVAAGVDAAEGPRAPPGQHDQSRSEDGYEVCSCTSGASSPPGAPGPLVAATMLLLLPPLSPGALWTAAQALTL

SEQ ID NO: 8779 - protein, 118 aa, Homo Sapiens
MHRFWRGLPLHLDSVDAVYERTSDHKIVFFKGDRYWVFKDNNVEEGYPRPVSDFSLPPGGIDAAFSWAHNDRTYFFKDQLYWRYDDHTRHMDPGYPAQSPLWRGVPSTLDDAMRWSDG

SEQ ID NO: 8780 - protein, 39 aa, Homo Sapiens
MHRFWRGLPLHLDSVDAVYERTSDHKIVFFKGPAVLALR

SEQ ID NO: 8781 - protein, 169 aa, Homo Sapiens
MKTPRCSLPDLPVLTQARRRRQAPAPTKWNKRNLSWRVRTFPRDSPLGHDTVRALMYYALKVWSDIAPLNFHEVAGSAADIQIDFSKADHNDGYPFDGPGGTVAHAFFPGHHHTAGDTHFDDDEAWTFRSSDAHGMDLFAVAVHEFGHAIGLSHVAAAHSIMRPYYQGP

SEQ ID NO: 8782 - protein, 115 aa, Homo Sapiens
MQQFGGLEATGILDEATLALMKTPRCSLPDLPVLTQARRRRQAPAPTKWNKRNLSWRVRTFPRDSPLGHDTVRALMYYALKVWSDIAPLNFHEVAGSAADIQIDFSKADHNDGYP

SEQ ID NO: 8783 - protein, 519 aa, Homo Sapiens
MQQFGGLEATGILDEATLALMKTPRCSLPDLPVLTQARRRRQAPAPTKWNKRNLSWRVRTFPRDSPLGHDTVRALMYYALKVWSDIAPLNFHEVAGSAADIQIDFSKADHNDGYPFDGPGGTVAHAFFPGHHHTAGDTHFDDDEAWTFRSSDAHGMDLFAVAVHEFGHAIGLSHVAAAHSIMRPYYQGPVGDPLRYGLPYEDKVRVWQLYGVRESVSPTAQPEEPPLLPEPPDNRSSAPPRKDVPHRCSTHFDAVAQIRGEAFFFKGKYFWRLTRDRHLVSLQPAQMHRFWRGLPLHLDSVDAVYERTSDHKIVFFKGDRYWVFKDNNVEEGYPRPVSDFSLPPGGIDAAFSWAHNDRTYFFKDQLYWRYDDHTRHMDPGYPAQSPLWRGVPSTLDDAMRWSDGASYFFRGQEYWKVLDGELEVAPGYPQSTARDWLVCGDSQADGSVAAGVDAAEGPRAPPGQHDQSRSEDGYEVCSCTSGASSPPGAPGPLVAATMLLLLPPLSPGALWTAAQALTL

SEQ ID NO: 8784 - protein, 603 aa, Homo Sapiens
MRRRAARGPGPPPPGPGLSRLPLPLLLLLALGTRGGCAAPAPAPRAEDLSLGVEWLSRFGYLPPADPTTGQLQTQEELSKAITAMQQFGGLEATGILDEATLALMKTPRCSLPDLPVLTQARRRRQAPAPTKWNKRNLSWRVRTFPRDSPLGHDTVRALMYYALKVWSDIAPLNFHEVAGSAADIQIDFSKADHNDGYPFDGPGGTVAHAFFPGHHHTAGDTHFDDDEAWTFRSSDAHGMDLFAVAVHEFGHAIGLSHVAAAHSIMRPYYQGPVGDPLRYGLPYEDKVRVWQLYGVRESVSPTAQPEEPPLLPEPPDNRSSAPPRKDVPHRCSTHFDAVAQIRGEAFFFKGKYFWRLTRDRHLVSLQPAQMHRFWRGLPLHLDSVDAVYERTSDHKIVFFKGDRYWVFKDNNVEEGYPRPVSDFSLPPGGIDAAFSWAHNDRTYFFKDQLYWRYDDHTRHMDPGYPAQSPLWRGVPSTLDDAMRWSDGASYFFRGQEYWKVLDGELEVAPGYPQSTARDWLVCGDSQADGSVAAGVDAAEGPRAPPGQHDQSRSEDGYEVCSCTSGASSPPGAPGPLVAATMLLLLPPLSPGALWTAAQALTL

SEQ ID NO: 8785 - protein, 302 aa, Homo Sapiens
MYYALKVWSDIAPLNFHEVAGSAADIQIDFSKADHNDGYPFDGPGGTVAHAFFPGHHHTAGDTHFDDDEAWTFRSSDAHGMDLFAVAVHEFGHAIGLSHVAAAHSIMRPYYQGPVGDPLRYGLPYEDKVRVWQLYGVRESVSPTAQPEEPPLLPEPPDNRSSAPPRKDVPHRCSTHFDAVAQIRGEAFFFKGKYFWRLTRDRHLVSLQPAQMHRFWRGLPLHLDSVDAVYERTSDHKIVFFKGDRYWVFKDNNVEEGYPRPVSDFSLPPGGIDAAFSWAHNDRTYFFKDQLYWRYDDHTRHM

SEQ ID NO: 8786 - protein, 485 aa, Homo Sapiens
MNCQQLWLGFLLPMTVSGRVLGLAEVAPVDYLSQYGYLQKPLEGSNNFKPEDITEALRAFQEASELPVSGQLDDATRARMRQPRCGLEDPFNQKTLKYLLLARAALRQAFQDWSNVAPLTFQEVQAGAADIRLSFHGRQSSYCSNTFDGPGRVLAHADIPELGSVHFDEDEFWTEGTYRGVNLRIIAAHEVGHALGLGHSRYSQALMAPVYEGYRPHFKLHPDDVAGIQALYGKKSPVIRDEEEEETELPTVPPVPTEPSPMPDPCSSELDAMMLGPRGKTYAFKGDYVWTVSDSGPGPLFRVSALWEGLPGNLDAAVYSPRTQWIHFFKGDKVWRYINFKMSPGFPKKLNRVEPNLDAALYWPLNQKVFLFKGSGYWQWDELARTDFSSYPKPIKGLFTGVPNQPSAAMSWQDGRVYFFKGKVYWRLNQQLRVEKGYPRNISHNWMHCRPRTIDTTPSGGNTTPSGTGITLDTTLSATETTFEY

SEQ ID NO: 8787 - protein, 305 aa, Homo Sapiens
MNCQQLWLGFLLPMTVSGRVLGLAEVAPVDYLSQYGYLQKPLEGSNNFKPEDITEALRAFQEASELPVSGQLDDATRARMRQPRCGLEDPFNQKTLKYLLLGRWRKKHLTFRILNLPSTLPPHTARAALRQAFQDWSNVAPLTFQEVQAGAADIRLSFHGRQSSYCSNTFDGPGKKSPVIRDEEEEETELPTVPPVPTEPSPMPDPCSSELDAMMLGEAPPLQAVGRRWGQPADPEAWTNGSDMGLQHEQWRAPWEDLCFQGGLCVDCIRFRTGPLVPSVCPLGGAPRKPGCCCLLASNTMDSLL

SEQ ID NO: 8788 - protein, 508 aa, Homo Sapiens
MNCQQLWLGFLLPMTVSGRVLGLAEVAPVDYLSQYGYLQKPLEGSNNFKPEDITEALRAFQEASELPVSGQLDDATRARMRQPRCGLEDPFNQKTLKYLLLGRWRKKHLTFRILNLPSTLPPHTARAALRQAFQDWSNVAPLTFQEVQAGAADIRLSFHGRQSSYCSNTFDGPGRVLAHADIPELGSVHFDEDEFWTEGTYRGVNLRIIAAHEVGHALGLGHSRYSQALMAPVYEGYRPHFKLHPDDVAGIQALYGKKSPVIRDEEEEETELPTVPPVPTEPSPMPDPCSSELDAMMLGPRGKTYAFKGDYVWTVSDSGPGPLFRVSALWEGLPGNLDAAVYSPRTQWIHFFKGDKVWRYINFKMSPGFPKKLNRVEPNLDAALYWPLNQKVFLFKGSGYWQWDELARTDFSSYPKPIKGLFTGVPNQPSAAMSWQDGRVYFFKGKVYWRLNQQLRVEKGYPRNISHNWMHCRPRTIDTTPSGGNTTPSGTGITLDTTLSATETTFEY

SEQ ID NO: 8789 - protein, 81 aa, Homo Sapiens
MNCQQLWLGFLLPMTVSGRVLGLAEVAPVDYLSQYGYLQKPLEGSNNFKPEDITEALRESPGPCRHPRAGQCALRRRRVLD

SEQ ID NO: 8790 - protein, 108 aa, Homo Sapiens
MNCQQLWLGFLLPMTVSGRVLGLAEVAPVDYLSQYGYLQKPLEGSNNFKPEDITEALRPLEKEAPDFPHLEPALHPSTPHSPGSPASSLPGLEQCGSLDLPRGAGWCG

SEQ ID NO: 8791 - protein, 63 aa, Homo Sapiens
MNCQQLWLGFLLPMTVSGRVLGLAEVAPVDYLSQYGYLQKPLEGSNNFKPEDITEALSLRSAG

SEQ ID NO: 8792 - protein, 252 aa, Homo Sapiens
GTTEDYDRDKKYGFCPETGYSLFLVAAHEFGHAMGLEHSQDPGALMAPIYTYTKNFRLSQDDIKGIQELYGASPDIDLGTGPTPTLGPVTPEICKQDIVFDGIAQIRGEIFFFKDRFIWRTVTPRDKPMGPLLVATFWPELPEKIDAVYEAPQEEKAVFFAGNEYWIYSASTLERGYPKPLTSLGLPPDVQRVDAAFNWSKNKKTYIFAGDKFWRYNEVKKKMDPGFPKLIADAWNAIPDNLDAVVDLQGGG

SEQ ID NO: 8793 - protein, 660 aa, Homo Sapiens
MEALMARGALTGPLRALCLLGCLLSHAAAAPSPIIKFPGDVAPKTDKELAVQYLNTFYGCPKESCNLFVLKDTLKKMQKFFGLPQTGDLDQNTIETMRKPRCGNPDVANYNFFPRKPKWDKNQITYRIIGYTPDLDPETVDDAFARAFQVWSDVTPLRFSRIHDGEADIMINFGRWEHGDGYPFDGKDGLLAHAFAPGTGVGGDSHFDDDELWTLGEGQVVRVKYGNADGEYCKFPFLFNGKEYNSCTDTGRSDGFLWCSTTYNFEKDGKYGFCPHEALFTMGGNAEGQPCKFPFRFQGTSYDSCTTEGRTDGYRWCGTTEDYDRDKKYGFCPETAMSTVGGNSEGAPCVFPFTFLGNKYESCTSAGRSDGKMWCATTANYDDDRKWGFCPDQGYSLFLVAAHEFGHAMGLEHSQDPGALMAPIYTYTKNFRLSQDDIKGIQELYGASPDIDLGTGPTPTLGPVTPEICKQDIVFDGIAQIRGEIFFFKDRFIWRTVTPRDKPMGPLLVATFWPELPEKIDAVYEAPQEEKAVFFAGNEYWIYSASTLERGYPKPLTSLGLPPDVQRVDAAFNWSKNKKTYIFAGDKFWRYNEVKKKMDPGFPKLIADAWNAIPDNLDAVVDLQGGGHSYFFKGAYYLKLENQSLKSVKFGSIKSDWLGC

SEQ ID NO: 8794 - protein, 118 aa, Homo Sapiens
MQKFFGLPQTGDLDQNTIETMRKPRCGNPDVANYNFFPRKPKWDKNQITYRIIGYTPDLDPETVDDAFARAFQVWSDVTPLRFSRIHDGEADIMINFGRWEHGDGYPFDGKDGLLAHA

SEQ ID NO: 8795 - protein, 201 aa, Homo Sapiens
MQKFFGLPQTGDLDQNTIETMRKPRCGNPDVANYNFFPRKPKWDKNQITYRIIGYTPDLDPETVDDAFARAFQVWSDVTPLRFSRIHDGEADIMINFGRWEHGDGYPFDGKDGLLAHAFAPGTGVGGDSHFDDDELWTLGEGQVVRVKYGNADGEYCKFPFLFNGKEYNSCTDTGRSDGFLWCSTTYNFEKDGKYGFCPHE

SEQ ID NO: 8796 - protein, 584 aa, Homo Sapiens
MQKFFGLPQTGDLDQNTIETMRKPRCGNPDVANYNFFPRKPKWDKNQITYRIIGYTPDLDPETVDDAFARAFQVWSDVTPLRFSRIHDGEADIMINFGRWEHGDGYPFDGKDGLLAHAFAPGTGVGGDSHFDDDELWTLGEGQVVRVKYGNADGEYCKFPFLFNGKEYNSCTDTGRSDGFLWCSTTYNFEKDGKYGFCPHEALFTMGGNAEGQPCKFPFRFQGTSYDSCTTEGRTDGYRWCGTTEDYDRDKKYGFCPETAMSTVGGNSEGAPCVFPFTFLGNKYESCTSAGRSDGKMWCATTANYDDDRKWGFCPDQGYSLFLVAAHEFGHAMGLEHSQDPGALMAPIYTYTKNFRLSQDDIKGIQELYGASPDIDLGTGPTPTLGPVTPEICKQDIVFDGIAQIRGEIFFFKDRFIWRTVTPRDKPMGPLLVATFWPELPEKIDAVYEAPQEEKAVFFAGNEYWIYSASTLERGYPKPLTSLGLPPDVQRVDAAFNWSKNKKTYIFAGDKFWRYNEVKKKMDPGFPKLIADAWNAIPDNLDAVVDLQGGGHSYFFKGAYYLKLENQSLKSVKFGSIKSDWLGC

SEQ ID NO: 8797 - protein, 584 aa, Homo Sapiens; identical to SEQ ID NO: 8796

SEQ ID NO: 8798 - protein, 610 aa, Homo Sapiens
MQYLNTFYGCPKESCNLFVLKDTLKKMQKFFGLPQTGDLDQNTIETMRKPRCGNPDVANYNFFPRKPKWDKNQITYRIIGYTPDLDPETVDDAFARAFQVWSDVTPLRFSRIHDGEADIMINFGRWEHGDGYPFDGKDGLLAHAFAPGTGVGGDSHFDDDELWTLGEGQVVRVKYGNADGEYCKFPFLFNGKEYNSCTDTGRSDGFLWCSTTYNFEKDGKYGFCPHEALFTMGGNAEGQPCKFPFRFQGTSYDSCTTEGRTDGYRWCGTTEDYDRDKKYGFCPETAMSTVGGNSEGAPCVFPFTFLGNKYESCTSAGRSDGKMWCATTANYDDDRKWGFCPDQGYSLFLVAAHEFGHAMGLEHSQDPGALMAPIYTYTKNFRLSQDDIKGIQELYGASPDIDLGTGPTPTLGPVTPEICKQDIVFDGIAQIRGEIFFFKDRFIWRTVTPRDKPMGPLLVATFWPELPEKIDAVYEAPQEEKAVFFAGNEYWIYSASTLERGYPKPLTSLGLPPDVQRVDAAFNWSKNKKTYIFAGDKFWRYNEVKKKMDPGFPKLIADAWNAIPDNLDAVVDLQGGGHSYFFKGAYYLKLENQSLKSVKFGSIKSDWLGC

SEQ ID NO: 8799 - protein, 22 aa, Homo Sapiens
  misc_feature (1)..(1): Xaa can be any naturally occurring amino acid
XLENQSLKSVKFGSIKSDWLGC

SEQ ID NO: 8800 - protein, 483 aa, Homo Sapiens
MKVLPASGLAVFLIMALKFSTAAPSLVAASPRTWRNNYRLAQAYLDKYYTNKEGHQIGEMVARGSNSMIRKIKELQAFFGLQVTGKLDQTTMNVIKKPRCGVPDVANYRLFPGEPKWKKNTLTYRISKYTPSMSSVEVDKAVEMALQAWSSAVPLSFVRINSGEADIMISFENGDHGDSYPFDGPRGTLAHAFAPGEGLGGDTHFDNAEKWTMGTNGFNLFTVAAHEFGHALGLAHSTDPSALMYPTYKYKNPYGFHLPKDDVKGIQALYGPRKVFLGKPTLPHAPHHKPSIPDLCDSSSSFDAVTMLGKELLLFKDRIFWRRQVHLRTGIRPSTITSSFPQLMSNVDAAYEVAERGTAYFFKGPHYWITRGFQMQGPPRTIYDFGFPRHVQQIDAAVYLREPQKTLFFVGDEYYSYDERKRKMEKDYPKNTEEEFSGVNGQIDAAVELNGYIYFFSGPKTYKYDTEKEDVVSVVKSSSWIGC

SEQ ID NO: 8801 - protein, 569 aa, Homo Sapiens
MLAASIFRPTLLLCWLAAPWPTQPESLFHSRDRSDLEPSPLRQAKPIADLHAAQRFLSRYGWSGVWAAWGPSPEGPPETPKGAALAEAVRRFQRANALPASGELDAATLAAMNRPRCGVPDMRPPPPSAPPSPPGPPPRARSRRSPRAPLSLSRRGWQPRGYPDGGAAQAFSKRTLSWRLLGEALSSQLSVADQRRIVALAFRMWSEVTPLDFREDLAAPGAAVDIKLGFGRGRHLGCPRAFDGSGQEFAHAWRLGDIHFDDDEHFTPPTSDTGISLLKVAVHEIGHVLGLPHTYRTGSIMQPNYIPQEPAFELDWSDRKAIQKLYGSCEGSFDTAFDWIRKERNQYGEVMVRFSTYFFRNSWYWLYENRNNRTRYGDPIQILTGWPGIPTHNIDAFVHIWTWKRDERYFFQGNQYWRYDSDKDQALTEDEQGKSYPKLISEGFPGIPSPLDTAFYDRRQKLIYFFKESLVFAFDVNRNRVLNSYPKRITEVFPAVIPQNHPFRNIDSAYYSYAYNSIFFFKGNAYWKVVNDKDKQQNSWLPANGLFPKKFISEKWFDVCDVHISTLNM

SEQ ID NO: 8802 - protein, 183 aa, Homo Sapiens
MDPGTVATMRKPRCSLPDVLGVAGLVRRRRRYALSGSVWKKRTLTWRVRSFPQSSQLSQETVRVLMSYALMAWGMESGLTFHEVDSPQGQEPDILIDFARAFHQDSYPFDGLGGTLAHAFFPGEHPISGDTHFDDEETWTFGSKASQQLEQELAGGSPVDEELGFSRGWRVNPLGPGSPERLS

SEQ ID NO: 8803 - protein, 562 aa, Homo Sapiens
MRLRLRLLALLLLLLAPPARAPKPSAQDVSLGVDWLTRYGYLPPPHPAQAQLQSPEKLRDAIKVMQRFAGLPETGRMDPGTVATMRKPRCSLPDVLGVAGLVRRRRRYALSGSVWKKRTLTWRVRSFPQSSQLSQETVRVLMSYALMAWGMESGLTFHEVDSPQGQEPDILIDFARAFHQDSYPFDGLGGTLAHAFFPGEHPISGDTHFDDEETWTFGSKDGEGTDLFAVAVHEFGHALGLGHSSAPNSIMRPFYQGPVGDPDKYRLSQDDRDGLQQLYGKAPQTPYDKPTRKPLAPPPQPPASPTHSPSFPIPDRCEGNFDAIANIRGETFFFKGPWFWRLQPSGQLVSPRPARLHRFWEGLPAQVRVVQAAYARHRDGRILLFSGPQFWVFQDRQLEGGARPLTELGLPPGEEVDAVFSWPQNGKTYLVRGRQYWRYDEAAARPDPGYPRDLSLWEGAPPSPDDVTVSNAGDTYFFKGAHYWRFPKNSIKTEPDAPQPMGPNWLDCPAPSSGPRAPRPPKATPVSETCDCQCELNQAAGRWPAPIPLLLLPLLVGGVASR

SEQ ID NO: 8804 - protein, 261 aa, Homo Sapiens
MQLVILRVTIFLPWCFAVPVPPAADHKGWDFVEGYFHQFFLTKKESPLLTQETQTQLLQQFHRNGTDLLDMQMHALLHQPHCGVPDGSDTSISPGRCKWNKHTLTYRIINYPHDMKPSAVKDSIYNAVSIWSNVTPLIFQQVQNGDADIKVSFWQWAHEDGWPFDGPGGILGHAFLPNSGNPGVVHFDKNEHWSASDTGYNLFLVATHEIGHSLGLQHSGNQSSIMYPTYWYHDPRTFQLSADDIQRIQHLYGEKCSSDIP

SEQ ID NO: 8805 - protein, 261 aa, Homo Sapiens; identical to SEQ ID NO: 8804

SEQ ID NO: 8806 - protein, 513 aa, Homo Sapiens
MKRLLLLFLFFITFSSAFPLVRMTENEENMQLAQAYLNQFYSLEIEGNHLVQSKNRSLIDDKIREMQAFFGLTVTGKLDSNTLEIMKTPRCGVPDVGQYGYTLPGWRKYNLTYRIINYTPDMARAAVDEAIQEGLEVWSKVTPLKFTKISKGIADIMIAFRTRVHGRCPRYFDGPLGVLGHAFPPGPGLGGDTHFDEDENWTKDGAGFNLFLVAAHEFGHALGLSHSNDQTALMFPNYVSLDPRKYPLSQDDINGIQSIYGGLPKEPAKPKEPTIPHACDPDLTFDAITTFRREVMFFKGRHLWRIYYDITDVEFELIASFWPSLPADLQAAYENPRDKILVFKDENFWMIRGYAVLPDYPKSIHTLGFPGRVKKIDAAVCDKTTRKTYFFVGIWCWRFDEMTQTMDKGFPQRVVKHFPGISIRVDAAFQYKGFFFFSRGSKQFEYDIKTKNITRIMRTNTWFQCKEPKNSSFGFDINKEKAHSGGIKILYHKSLSLFIFGIVHLLKNTSIYQ

SEQ ID NO: 8807 - protein, 89 aa, Homo Sapiens
DFETWDSYSPQGRRPETQGPKYCHSSFDAITVDRQQQLYIFKGSHFWEVAADGNVSEPRPLQERWVGLPPNIEAAAVSLNDGDFYFFKA

SEQ ID NO: 8808 - protein, 189 aa, Homo Sapiens
KYGYLNEQVPKAPTSTRFSDAIRAFQWVSQLPVSGVLDRATLRQMTRPRCGVTDTNSYAAWAERISDLFARHRTKMRRKKRFAKQGGALAHAFLPRRGEAHFDQDERWSLSRRRGRNLFVVLAHEIGHTLGLTHSPAPRALMAPYYKRLGRDALLSWDDVLAVQSLYGKPLGGSVAVQLPGKLFTDFET

SEQ ID NO: 8809 - protein, 130 aa, Homo Sapiens
MVARVGLLLRALQLLLWGHLDAQPAERGGQELRKEAEAFLEKYGYLNEQVPKAPTSTRFSDAIRAFQWVSQLPVSGVLDRATLRQMTRPRCGVTDTNSYAAWAERISDLFARHRTKMRRKKRFAKQGEHC

SEQ ID NO: 8810 - protein, 510 aa, Homo Sapiens
MVARVGLLLRALQLLLWGHLDAQPAERGGQELRKEAEAFLEKYGYLNEQVPKAPTSTRFSDAIRAFQWVSQLPVSGVLDRATLRQMTRPRCGVTDTNSYAAWAERISDLFARHRTKMRRKKRFAKQGNKWYKQHLSYRLVNWPEHLPEPAVRGAVRAAFQLWSNVSALEFWEAPATGPADIRLTFFQGDHNDGLGNAFDGPGGALAHAFLPRRGEAHFDQDERWSLSRRRGRNLFVVLAHEIGHTLGLTHSPAPRALMAPYYKRLGRDALLSWDDVLAVQSLYGKPLGGSVAVQLPGKLFTDFETWDSYSPQGRRPETQGPKYCHSSFDAITVGSHFWEVAADGNVSEPRPLQERWVGLPPNIEAAAVSLNDGDFYFFKGGRCWRFRGPKPVWGLPQLCRAGGLPRHPDAALFFPPLRRLILFKGARYYVLARGGLQVEPYYPRSLQDWGGIPEEVSGALPRPDGSIIFFRDDRYWRLDQAKLQATTSGRWATELPWMGCWHANSGSALF

SEQ ID NO: 8811 - protein, 393 aa, Homo Sapiens
MVARVGLLLRALQLLLWGHLDAQPAERGGQELRKEAEAFLEKYGYLNEQVPKAPTSTRFSDAIRAFQWVSQLPVSGVLDRATLRQMTRPRCGVTDTNSYAAWAERISDLFARHRTKMRRKKRFAKQGNKWYKQHLSYRLVNWPEHLPEPAVRGAVRAAFQLWSNVSALEFWEAPATGPADIRLTFFQGDHNDGLGNAFDGPGGALAHAFLPRRGEAHFDQDERWSLSRRRGRNLFVVLAHEIGHTLGLTHSPAPRALMAPYYKRLGRDALLSWDDVLAVQSLYGKPLGGSVAVQLPGKLFTDFETWDSYSPQGRRPETQGPKYCHSSFDAITVDRQQQLYIFKGSHFWEVAADGNVSEPRPLQERWVGLPPNIEAAAVSLNDGDFYFFKVQSV

SEQ ID NO: 8812 - protein, 520 aa, Homo Sapiens
MVARVGLLLRALQLLLWGHLDAQPAERGGQELRKEAEAFLEKYGYLNEQVPKAPTSTRFSDAIRAFQWVSQLPVSGVLDRATLRQMTRPRCGVTDTNSYAAWAERISDLFARHRTKMRRKKRFAKQGNKWYKQHLSYRLVNWPEHLPEPAVRGAVRAAFQLWSNVSALEFWEAPATGPADIRLTFFQGDHNDGLGNAFDGPGGALAHAFLPRRGEAHFDQDERWSLSRRRGRNLFVVLAHEIGHTLGLTHSPAPRALMAPYYKRLGRDALLSWDDVLAVQSLYGKPLGGSVAVQLPGKLFTDFETWDSYSPQGRRPETQGPKYCHSSFDAITVDRQQQLYIFKGSHFWEVAADGNVSEPRPLQERWVGLPPNIEAAAVSLNDGDFYFFKGGRCWRFRGPKPVWGLPQLCRAGGLPRHPDAALFFPPLRRLILFKGARYYVLARGGLQVEPYYPRSLQDWGGIPEEVSGALPRPDGSIIFFRDDRYWRLDQAKLQATTSGRWATELPWMGCWHANSGSALF

SEQ ID NO: 8813 - protein, 42 aa, Homo Sapiens
MKSLPILLLLCVAVCSAYPLDGAAREISRKLLRPQKRCETVC

SEQ ID NO: 8814 - protein, 477 aa, Homo Sapiens
MKSLPILLLLCVAVCSAYPLDGAARGEDTSMNLVQKYLENYYDLKKDVKQFVRRKDSGPVVKKIREMQKFLGLEVTGKLDSDTLEVMRKPRCGVPDVGHFRTFPGIPKWRKTHLTYRIVNYTPDLPKDAVDSAVEKALKVWEEVTPLTFSRLYEGEADIMISFAVREHGDFYPFDGPGNVLAHAYAPGPGINGDAHFDDDEQWTKDTTGTNLFLVAAHEIGHSLGLFHSANTEALMYPLYHSLTDLTRFRLSQDDINGIQSLYGPPPDSPETPLVPTEPVPPEPGTPANCDPALSFDAVSTLRGEILIFKDRHFWRKSLRKLEPELHLISSFWPSLPSGVDAAYEVTSKDLVFIFKGNQFWAIRGNEVRAGYPRGIHTLGFPPTVRKIDAAISDKEKNKTYFFVEDKYWRFDEKRNSMEPGFPKQIAEDFPGIDSKIDAVFEEFGFFYFFTGSSQLEFDPNAKKVTHTLKSNSWLNC

SEQ ID NO: 8815 - protein, 99 aa, Homo Sapiens
  misc_feature (1)..(1): Xaa can be any naturally occurring amino acid
XNQFWAIRGNEVRAGYPRGIHTLGFPPTVRKIDAAISDKEKNKTYFFVEDKYWRFDEKRNSMEPGFPKQIAEDFPGIDSKIDAVFEEFDRAGTECCLHS

SEQ ID NO: 8816 - protein, 267 aa, Homo Sapiens
MRLTVLCAVCLLPGSLALPLPQEAGGMSELQWEQAQDYLKRFYLYDSETKNANSLEAKLKEMQKFFGLPITGMLNSRVIEIMQKPRCGVPDVAEYSLFPNSPKWTSKVVTYRIVSYTRDLPHITVDRLVSKALNMWGKEIPLHFRKVVWGTADIMIGFARGAHGDSYPFDGPGNTLAHAFAPGTGLGGDAHFDEDERWTDGSSLGINFLYAATHELGHSLGMGHSSDPNAVMYPTYGNGDPQNFKLSQDDIKGIQKLYGKRSNSRKK

SEQ ID NO: 8817 - protein, 467 aa, Homo Sapiens [sequence omitted]

SEQ ID NO: 8818 - protein, 56 aa, Homo Sapiens
MFSLKTLPFLLLLHVQISKAFPVSSKEKNTKTVQHKAISEANQMQPPDLGLPSLQN

SEQ ID NO: 8819 - protein, 56 aa, Homo Sapiens; identical to SEQ ID NO: 8818

SEQ ID NO: 8820 - protein, 36 aa, Homo Sapiens
MFSLKTLPFLLLLHVQISKAFPVSSKEKNTKTVQNK

SEQ ID NO: 8821 - protein, 43 aa, Homo Sapiens
MFSLKTLPFLLLLHVQISKAFPVSSKEKNTKTVQRQKYLKSDK

SEQ ID NO: 8822 - protein, 344 aa, Homo Sapiens
  misc_feature (1)..(1): Xaa can be any naturally occurring amino acid
XKEKNTKTVQDYLEKFYQLPSNQYQSTRKNGTNVIVEKLKEMQRFFGLNVTGKPNEETLDMMKKPRCGVPDSGGFMLTPGNPKWERTNLTYRIRNYTPQLSEAEVERAIKDAFELWSVASPLIFTRISQGEADINIAFYQRDHGDNSPFDGPNGILAHAFQPGQGIGGDAHFDAEETWTNTSANYNLFLVAAHEFGHSLGLAHSSDPGALMYPNYAFRETSNYSLPQDDIDGIQAIYGLSSNPIQPTGPSTPKPCDPSLTFDAITTLRGEILFFKDRYFWRRHPQLQRVEMNFISLFWPSLPTGIQAAYEDFDRDLIFLFKDMITKDNSWSQVIPKAYQVPFQE

SEQ ID NO: 8823 - protein, 707 aa, Homo Sapiens
MSLWQPLVLVLLVLGCCFAAPRQRQSTLVLFPGDLRTNLTDRQLAEEYLYRYGYTRVAEMRGESKSLGPALLLLQKQLSLPETGELDSATLKAMRTPRCGVPDLGRFQTFEGDLKWHHHNITYWIQNYSEDLPRAVIDDAFARAFALWSAVTPLTFTRVYSRDADIVIQFGVAEHGDGYPFDGKDGLLAHAFPPGPGIQGDAHFDDDELWSLGKGVVVPTRFGNADGAACHFPFIFEGRSYSACTTDGRSDGLPWCSTTANYDTDDRFGFCPSERLYTQDGNADGKPCQFPFIFQGQSYSACTTDGRSDGYRWCATTANYDRDKLFGFCPTRADSTVMGGNSAGELCVFPFTFLGKEYSTCTSEGRGDGRLWCATTSNFDSDKKWGFCPDQGYSLFLVAAHEFGHALGLDHSSVPEALMYPMYRFTEGPPLHKDDVNGIRHLYGPRPEPEPRPPTTTTPQPTAPPTVCPTGPPTVHPSERPTAGPTGPPSAGPTGPPTAGPSTATTVPLSPVDDACNVNIFDAIAEIGNQLYLFKDGKYWRFSEGRGSRPQGPFLIADKWPALPRKLDSVFEERLSKKLFFFSGRQVWVYTGASVLGPRRLDKLGLGADVAQVTGALRSGRGKMLLFSGRRLWRFDVKAQMVDPRSASEVDRMFPGVPLDTHDVFQYREKAYFCQDRFYWRVSSRSELNQVDQVGYVTYDILQCPED

SEQ ID NO: 8824 - protein, 1228 aa, Homo Sapiens
MKGARLFVLLSSLWSGGIGLNNSKHSWTIPEDGNSQKTMPSASVPPNKIQSLQILPTTRVMSAEIATTPEARTSEDSLLKSTLPPSETSAPAEGVRNQTLTSTEKAEGVVKLQNLTLPTNASIKFNPGAESVVLSNSTLKFLQSFARKSNEQATSLNTVGGTGGIGGVGGTGGVGNRAPRETYLSRGDSSSSQRTDYQKSNFETTRGKNWCAYVHTRLSPTVILDNQVTYVPGGKGPCGWTGGSCPQRSQKISNPVYRMQHKIVTSLDWRCCPGYSGPKCQLRAQEQQSLIHTNQAESHTAVGRGVAEQQQQQGCGDPEVMQKMTDQVNYQAMKLTLLQKKIDNISLTVNDVRNTYSSLEGKVSEDKSREFQSLLKGLKSKSINVLIRDIVREQFKIFQNDMQETVAQLFKTVSSLSEDLESTRQIIQKVNESVVSIAAQQKFVLVQENRPTLTDIVELRNHIVNVRQEMTLTCEKPIKELEVKQTHLEGALEQEHSRSILYYESLNKTLSKLKEVHEQLLSTEQVSDQKNAPAAESVSNNVTEYMSTLHENIKKQSLMMLQMFEDLHIQESKINNLTVSLEMEKESLRGECEDMLSKCRNDFKFQLKDTEENLHVLNQTLAEVLFPMDNKMDKMSEQLNDLTYDMEILQPLLEQGASLRQTMTYEQPKEAIVIRKKIENLTSAVNSLNFIIKELTKRHNLLRNEVQGRDDALERRINEYALEMEDGLNKTMTIINNAIDFIQDNYALKETLSTIKDNSEIHHKCTSDMETILTFIPQFHRLNDSIQTLVNDNQRYNFVLQVAKTLAGIPRDEKLNQSNFQKMYQMFNETTSQVRKYQQNMSHLEEKLLLTTKISKNFETRLQDIESKVTQTLIPYYISVKKGSVVTNERDQALQLQVLNSRFKALEAKSIHLSINFFSLNKTLHEVLTMCHNASTSVSELNATIPKWIKHSLPDIQLLQKGLTEFVEPIIQIKTQAALSNLTCCIDRSLPGSLANVVKSQKQVKSLPKKINALKKPTVNLTTVLIGRTQRNTDNIIYPEEYSSCSRHPCQNGGTCINGRTSFTCACRHPFTGDNCTIKLVEENALAPDFSKGSYRYAPMVAFFASHTYGMTIPGPILFNNLDVNYGASYTPRTGKFRIPYLGVYVFKYTIESFSAHISGFLVVDGIDKLAFESENINSEIHCDRVLTGDALLELNYGQEVWLRLAKGTIPAKFPPVTTFSGYLLYRT

SEQ ID NO: 8825 - protein, 1228 aa, Homo Sapiens; identical to SEQ ID NO: 8824

SEQ ID NO: 8826 - protein, 970 aa, Homo Sapiens
MQHKIVTSLDWRCCPGYSGPKCQLRAQEQQSLIHTNQAESHTAVGRGVAEQQQQQGCGDPEVMQKMTDQVNYQAMKLTLLQKKIDNISLTVNDVRNTYSSLEGKVSEDKSREFQSLLKGLKSKSINVLIRDIVREQFKIFQNDMQETVAQLFKTVSSLSEDLESTRQIIQKVNESVVSIAAQQKFVLVQENRPTLTDIVELRNHIVNVRQEMTLTCEKPIKELEVKQTHLEGALEQEHSRSILYYESLNKTLSKLKEVHEQLLSTEQVSDQKNAPAAESVSNNVTEYMSTLHENIKKQSLMMLQMFEDLHIQESKINNLTVSLEMEKESLRGECEDMLSKCRNDFKFQLKDTEENLHVLNQTLAEVLFPMDNKMDKMSEQLNDLTYDMEILQPLLEQGASLRQTMTYEQPKEAIVIRKKIENLTSAVNSLNFIIKELTKRHNLLRNEVQGRDDALERRINEYALEMEDGLNKTMTIINNAIDFIQDNYALKETLSTIKDNSEIHHKCTSDMETILTFIPQFHRLNDSIQTLVNDNQRYNFVLQVAKTLAGIPRDEKLNQSNFQKMYQMFNETTSQVRKYQQNMSHLEEKLLLTTKISKNFETRLQDIESKVTQTLIPYYISVKKGSVVTNERDQALQLQVLNSRFKALEAKSIHLSINFFSLNKTLHEVLTMCHNASTSVSELNATIPKWIKHSLPDIQLLQKGLTEFVEPIIQIKTQAALSNLTCCIDRSLPGSLANVVKSQKQVKSLPKKINALKKPTVNLTTVLIGRTQRNTDNIIYPEEYSSCSRHPCQNGGTCINGRTSFTCACRHPFTGDNCTIKLVEENALAPDFSKGSYRYAPMVAFFASHTYGMTIPGPILFNNLDVNYGASYTPRTGKFRIPYLGVYVFKYTIESFSAHISGFLVVDGIDKLAFESENINSEIHCDRVLTGDALLELNYGQEVWLRLAKGTIPAKFPPVTTFSGYLLYRT

SEQ ID NO: 8827 - protein, 204 aa, Homo Sapiens
MAHKPVYQVKQKVLTSLAWRCCPGYTGPNCEHHDSMAIPEPADPGDSHQEPQDGPVSFKPGHLAAVINEVEVQQEQQEHLLGDLQNDVHRVADSLPGLWKALPGNLTAAVMEANQTGHEFPDRSLEQVLLPHVDTFLQVHFSPIWRSFNQSLHSLTQAIRNLSLDVEANRQAISRVQDSAVARADFQELGAKFEAKVQENTQRV

SEQ ID NO: 8828 - protein, 295 aa, Homo Sapiens
MGTSASWAGGMGIKGQPEAAKSWRKPKQSNWCPYPMSKLVTLLALCKTEKFLIHSQQPCPQGAPDCQKVKVMYRMAHKPVYQVKQKVLTSLAWRCCPGYTGPNCEHHDSMAIPEPADPGDSHQEPQDGPVSFKPGHLAAVINEVEVQQEQQEHLLGDLQNDVHRVADSLPGLWKALPGNLTAAVMEANQTGHEFPDRSLEQVLLPHVDTFLQVHFSPIWRSFNQSLHSLTQAIRNLSLDVEANRQAISRVQDSAVARADFQELGAKFEAKVQENTQRVGQLRQDVEDRLHAQHFT

SEQ ID NO: 8829 - protein, 109 aa, Homo Sapiens
MILSLLFSLGGPLGWGLLGAWAQASSTSLSDLQSSRTPGVWKAEAEDTGKDPVGRIMDSRIPALLRQEARTGGSALAPPVDLGVAQQPSPLACFPVTGAPTQCPSWSPY

SEQ ID NO: 8830 - protein, 949 aa, Homo Sapiens
MILSLLFSLGGPLGWGLLGAWAQASSTSLSDLQSSRTPGVWKAEAEDTGKDPVGRNWCPYPMSKLVTLLALCKTEKFLIHSQQPCPQGAPDCQKVKVMYRMAHKPVYQVKQKVLTSLAWRCCPGYTGPNCEHHDSMAIPEPADPGDSHQEPQDGPVSFKPGHLAAVINEVEVQQEQQEHLLGDLQNDVHRVADSLPGLWKALPGNLTAAVMEANQTGHEFPDRSLEQVLLPHVDTFLQVHFSPIWRSFNQSLHSLTQAIRNLSLDVEANRQAISRVQDSAVARADFQELGAKFEAKVQENTQRVGQLRQDVEDRLHAQHFTLHRSISELQADVDTKLKRLHKAQEAPGTNGSLVLATPGAGARPEPDSLQARLGQLQRNLSELHMTTARREEELQYTLEDMRATLTRHVDEIKELYSESDETFDQISKVERQVEELQVNHTALRELRVILMEKSLIMEENKEEVERQLLELNLTLQHLQGGHADLIKYVKDCNCQKLYLDLDVIREGQRDATRALEETQVSLDERRQLDGSSLQALQNAVDAVSLAVDAHKAEGERARAATSRLRSQVQALDDEVGALKAAAAEARHEVRQLHSAFAALLEDALRHEAVLAALFGEEVLEEMSEQTPGPLPLSYEQIRVALQDAASGLQEQALGWDELAARVTALEQASEPPRPAEHLEPSHDAGREEAATTALAGLARELQSLSNDVKNVGRCCEAEAGAGAASLNASLHGLHNALFATQRSLEQHQRLFHSLFGNFQGLMEANVSLDLGKLQTMLSRKGKKQQKDLEAPRKRDKKEAEPLVDIRVTGPVPGALGAALWEAGSPVAFYASFSEGTAALQTVKFNTTYINIGSSYFPEHGYFRAPERGVYLFAVSVEFGPGPGTGQLVFGGHHRTPVCTTGQGSGSTATVFAMAELQKGERVWFELTQGSITKRSLSGTAFGGFLMFKT

SEQ ID NO: 8831 - protein, 123 aa, Homo Sapiens
MSKLVTLLALCKTEKFLIHSQQPCPQGAPDCQKVKVMYRMAHKPVYQVKQKVLTSLAWRCCPGYTGPNCEHHDSMAIPEPADPGDSHQEPQDGPVSFKPGHLAAVINEVEVQQEQQEHLLGDL

SEQ ID NO: 8832 - protein, 613 aa, Homo Sapiens
MCCWPLLLLWGLLPGTAAGGSGRTYPHRTLLDSEGKYWLGWSQRGSQIAFRLQVRTAGYVGFGFSPTGAMASADIVVGGVAHGRPYLQDYFTNANRELKKDAQQDYHLEYAMENSTHTIIEFTRELHTCDINDKSITDSTVRVIWAYHHEDAGEAGPKYHDSNRGTKSLRLLNPEKTSVLSTALPYFDLVNQDVPIPNKDTTYWCQMFKIPVFQEKHHVIKVEPVIQRGHESLVHHILLYQCSNNFNDSVLESGHECYHPNMPDAFLTCETVIFAWAIGGEGFSYPPHVGLSLGTPLDPHYVLLEVHYDNPTYEEGLIDNSGLRLFYTMDIRKYDAGVIEAGLWVSLFHTIPPGMPEFQSEGHCTLECLEEALEAEKPSGIHVFAVLLHAHLAGRGIRLRHFRKGKEMKLLAYDDDFDFNFQEFQYLKEEQTILPGDNLITECRYNTKDRAEMTWGGLSTRSEMCLSYLLYYPRINLTRCASIPDIMEQLQFIGVKEIYRPVTTWPFIIKSPKQYKNLSFMDAMNKFKWTKKEGLSFNKLVLSLPVNVRCSKTDNAEWSIQGMTALPPDIERPYKAEPLVCGTSSSSSLHRDFSINLLVCLLLLSCTLSTKSL

SEQ ID NO: 8833 - protein, 115 aa, Homo Sapiens
MCCWPLLLLWGLLPGTAAGGSGRTYPHRTLLDSEGKYWLGWSQRGSQIAFRLQVRTAGYVGFGFSPTGAMASADIVVGGVAHGRPYLQPCLLVSKTEACDAKCLQQQGNCCRATC

SEQ ID NO: 8834 - protein, 545 aa, Homo Sapiens
MNSFLSVFRYPDFSFPYFPQDYFTNANRELKKDAQQDYHLEYAMENSTHTIIEFTRELHTCDINDKSITDSTVRVIWAYHHEDAGEAGPKYHDSNRGTKSLRLLNPEKTSVLSTALPYFDLVNQDVPIPNKDTTYWCQMFKIPVFQEKHHVIKVEPVIQRGHESLVHHILLYQCSNNFNDSVLESGHECYHPNMPDAFLTCETVIFAWAIGGEGFSYPPHVGLSLGTPLDPHYVLLEVHYDNPTYEEGLIDNSGLRLFYTMDIRKYDAGVIEAGLWVSLFHTIPPGMPEFQSEGHCTLECLEEALEAEKPSGIHVFAVLLHAHLAGRGIRLRHFRKGKEMKLLAYDDDFDFNFQEFQYLKEEQTILPGDNLITECRYNTKDRAEMTWGGLSTRSEMCLSYLLYYPRINLTRCASIPDIMEQLQFIGVKEIYRPVTTWPFIIKSPKQYKNLSFMDAMNKFKWTKKEGLSFNKLVLSLPVNVRCSKTDNAEWSIQGMTALPPDIERPYKAEPLVCGTSSSSSLHRDFSINLLVCLLLLSCTLSTKSL

SEQ ID NO: 8835 - protein, 125 aa, Homo Sapiens
MAVFLQLLPLLLSRAQGNPGASLDGRPGDRVNLSCGGVSHPIRWVWAPSFPACKGLSKGRRPILWASSSGTPTVPPLQPFVGRLRSLDSAPDPAAGRWVGARTGSFGPGLVAAQAPAPATDSTTP

SEQ ID NO: 8836 - protein, 193 aa, Homo Sapiens
MAVFLQLLPLLLSRAQGNPGASLDGRPGDRVNLSCGGVSHPIRWVWAPSFPACKGLSKGRRPILWASSSGTPTVPPLQPFVGRLRSLDSGIRRLELLLSAGDSGTFFCKGRHEDESRTVLHVLGDRTYCKAPGPTHALSPPHSSTCENRAPEASKGGRAQDSRGPGPGTEPALCGSGPSSPQQAPPAVHSGPC

SEQ ID NO: 8837 - protein, 197 aa, Homo Sapiens
MAVFLQLLPLLLSRAQGNPGASLDGRPGDRVNLSCGGVSHPIRWVWAPSFPACKGLSKGRRPILWASSSGTPTVPPLQPFVGRLRSLDSGIRRLELLLSAGDSGTFFCKGRHEDESRTVLHVLGDRTYCKAPGPTHAPLVKTEPQRPVKEEEPKIPGDLDQEPSLLYADLDHLALSRPRRLSTADPADASTIYAVVV

SEQ ID NO: 8838 - protein, 217 aa, Homo Sapiens
MAVFLQLLPLLLSRAQGNPGASLDGRPGDRVNLSCGGVSHPIRWVWAPSFPACKGLSKGRRPILWASSSGTPTVPPLQPFVGRLRSLDSGIRRLELLLSAGDSGTFFCKGRHEDESRTVLHVLGDRTYCKAPGPTHGACPRNRFDHSLDLLCPPHIAPLVKTEPQRPVKEEEPKIPGDLDQEPSLLYADLDHLALSRPRRLSTADPADASTIYAVVV

SEQ ID NO: 8839 - protein, 237 aa, Homo Sapiens
MAVFLQLLPLLLSRAQGNPGASLDGRPGDRVNLSCGGVSHPIRWVWAPSFPACKGLSKGRRPILWASSSGTPTVPPLQPFVGRLRSLDSGIRRLELLLSAGDSGTFFCKGRHEDESRTVLHVLGDRTYCKAPGPTHGSVYPQLLIPLLGAGLVLGLGALGLVWWLHRRLPPQPIRPLPRFALSPPHSSTCENRAPEASKGGRAQDSRGPGPGTEPALCGSGPSSPQQAPPAVHSGPC

SEQ ID NO: 8840 - protein, 222 aa, Homo Sapiens
MAVFLQLLPLLLSRAQGNPGASLDGRPGDRVNLSCGGVSHPIRWVWAPSFPACKGLSKGRRPILWASSSGTPTVPPLQPFVGRLRSLDSGIRRLELLLSAGDSGTFFCKGRHEDESRTVLHVLGDRTYCKAPGPTHGSVYPQLLIPLLGAGLVLGLGALGLVWWLHRRLPPQPIRPLPRFALSPPHSSTCENRAPEASKGGRAQDSRGPGPGTGKGMGMGRG

SEQ ID NO: 8841 - protein, 241 aa, Homo Sapiens
MAVFLQLLPLLLSRAQGNPGASLDGRPGDRVNLSCGGVSHPIRWVWAPSFPACKGLSKGRRPILWASSSGTPTVPPLQPFVGRLRSLDSGIRRLELLLSAGDSGTFFCKGRHEDESRTVLHVLGDRTYCKAPGPTHGSVYPQLLIPLLGAGLVLGLGALGLVWWLHRRLPPQPIRPLPRFAPLVKTEPQRPVKEEEPKIPGDLDQEPSLLYADLDHLALSRPRRLSTADPADASTIYAVVV

SEQ ID NO: 8842 - protein, 220 aa, Homo Sapiens
MAVFLQLLPLLLSRAQGNPGASLDGRPGDRVNLSCGGVSHPIRWVWAPSFPACKGLSKGRRPILWASSSGTPTVPPLQPFVGRLRSLDSGIRRLELLLSAGDSGTFFCKGRHEDESRTVLHVLGDRTYCKAPGPTHGSVYPQLLIPLLGAGLVLGLGALGLVWWLHRRLPPQPIRPLPRFAPLVKTEPQRPVKEEEPKIPGDLDQEPVRAWGWEGDSQNL

SEQ ID NO: 8843 - protein, 745 aa, Homo Sapiens
MGVPFFSSLRCMVDLGPCWAGGLTAEMKLLLALAGLLAILATPQPSEGAAPAVLGEVDTSLVLSSMEEAKQLVDKAYKERRESIKQRLRSGSASPMELLSYFKQPVAATRTAVRAADYLHVALDLLERKLRSLWRRPFNVTDVLTPAQLNVLSKSSGCAYQDVGVTCPEQDKYRTITGMCNNRRSPTLGASNRAFVRWLPAEYEDGFSLPYGWTPGVKRNGFPVALARAVSNEIVRFPTDQLTPDQERSLMFMQWGQLLDHDLDFTPEPAARASFVTGVNCETSCVQQPPCFPLKIPPNDPRIKNQADCIPFFRSCPACPGSNITIRNQINALTSFVDASMVYGSEEPLARNLRNMSNQLGLLAVNQRFQDNGRALLPFDNLHDDPCLLTNRSARIPCFLAGDTRSSEMPELTSMHTLLLREHNRLATELKSLNPRWDGERLYQEARKIVGAMVQIITYRDYLPLVLGPTAMRKYLPTYRSYNDSVDPRIANVFTNAFRYGHTLIQPFMFRLDNRYQPMEPNPRVPLSRVFFASWRVVLEGGIDPILRGLMATPAKLNRQNQIAVDEIRERLFEQVMRIGLDLPALNMQRSRDHGLPGYNAWRRFCGLPQPETVGQLGTVLRNLKLARKLMEQYGTPNNIDIWMGGVSEPLKRKGRVGPLLACIIGTQFRKLRDGDRFWWENEGVFSMQQRQALAQISLPRIICDNTGITTVSKNNIFMSNSYPRDFVNCSTLPALNLASWREAS

SEQ ID NO: 8844 - protein, 87 aa, Homo Sapiens [sequence omitted]

SEQ ID NO: 8845 - protein, 74 aa, Homo Sapiens
MWRSRWDASVLKAEALALLPCGLGMAFSQSHVMAARRHQHSRLIIEVDEYSSNPTQAFTFYNINQGRFQPPHVQ

SEQ ID NO: 8846 - protein, 119 aa, Homo Sapiens
MWRSRWDASVLKAEALALLPCGLGMAFSQSHVMAARRHQHSRLIIEVDEYSSNPTQAFTFYNINQGRFQPPHVQMVDPVPHDAPKPPGYTRFVCVSDTHSRTDPIQMPYGDVLIHAGDF

SEQ ID NO: 8847 - protein, 326 aa, Homo Sapiens
MWRSRWDASVLKAEALALLPCGLGMAFSQSHVMAARRHQHSRLIIEVDEYSSNPTQAFTFYNINQGRFQPPHVQMVDPVPHDAPKPPGYTRFVCVSDTHSRTDPIQMPYGDVLIHAGDFTELGLPSEVKKFNEWLGSLPYEYKIVIAGNHELTFDQEFMADLIKQDFYYFPSVSKLKPENYENVQSLLTNCIYLQDSEVTVRGFRIYGSPWQPWFYGWGFNLPRGQALLEKWNLIPEGVDILITHGPPLGFLDWVPKKMQRVGCVELLNTVQRRVQPRLHVFGHIHEGYGVMADGTTTYVNASVCTVNYQPVNPPIVIDLPTPRNS

SEQ ID NO: 8848 - protein, 326 aa, Homo Sapiens; identical to SEQ ID NO: 8847

SEQ ID NO: 8849 - protein, 209 aa, Homo Sapiens
MAASAGAGAVIAAPDSRRWLWSVLAAALGLLTAGVSALEVYTPKEIFVANGTQGKLTCKFKSTSTTGGLTSVSWSFQPEGADTTVSFFHYSQGQVYLGNYPPFKDRISWAGDLDKKDASINIENMQFIHNGTYICDVKNPPDIVVQPGHIRLYVVEKENLPVFPVWVVVGIVTAVVLGLTLLISMILAVLYRRKNSKRDYTGAQSYMHS

SEQ ID NO: 8850 - protein, 269 aa, Homo Sapiens
MAASAGAGAVIAAPDSRRWLWSVLAAALGLLTAGVSALEVYTPKEIFVANGTQGKLTCKFKSTSTTGGLTSVSWSFQPEGADTTVSFFHYSQGQVYLGNYPPFKDRISWAGDLDKKDASINIENMQFIHNGTYICDVKNPPDIVVQPGHIRLYVVEKENLPVFPVWVVVGIVTAVVLGLTLLISMILAVLYRRKNSKRDYTGCSTSESLSPVKQAPRKSPSDTEGLVKSLPSGSHQGPVIYAQLDHSGGHHSDKINKSESVVYADIRKN

SEQ ID NO: 8851 - protein, 119 aa, Homo Sapiens
MAASAGAGAVIAAPDSRRWLWSVLAAALGLLTAGVSALEVYTPKEIFVANGTQGKLTCKFKSTSTTGGLTSVSWSFQPEGADTTVSGPVIYAQLDHSGGHHSDKINKSESVVYADIRKN

SEQ ID NO: 8852 - protein, 95 aa, Homo Sapiens
MAASAGAGAVIAAPDSRRWLWSVLAAALGLLTAGVSALEVYTPKEIFVANGTQGKLTCKFKSTSTTGGLTSVSWSFQPEGADTTVSRICLCFQFG

SEQ ID NO: 8853 - protein, 183 aa, Homo Sapiens
PFSSVTAGVSALEVYTPKEIFVANGTQGKLTCKFKSTSTTGGLTSVSWSFQPEGADTTVSFFHYSQGQVYLGNYPPFKDRISWAGDLDKKDASINIENMQFIHNGTYICDVKNPPDIVVQPGHIRLYVVEKENLPVFPVWVVVGIVTAVVLGLTLLISMILAVLYRRKNSKRDYTGAQSYMHS

SEQ ID NO: 8854 - protein, 296 aa, Homo Sapiens
MGELMAFLLPLIIVLMVKHSDSRTHSLRYFRLGVSDPIHGVPEFISVGYVDSHPITTYDSVTRQKEPRAPWMAENLAPDHWERYTQLLRGWQQMFKVELKRLQRHYNHSDNVAHTIKQAWEANQHELLYQKNWLEEECIAWLKRFLEYGKDTLQRTEPPLVRVNRKETFPGVTALFCKAHGFYPPEIYMTWMKNGEEIVQEIDYGDILPSGDGTYQAWASIELDPQSSNLYSCHVEHCGVHMVLQVPQESETIPLVMKAVSGSIVLVIVLAGVGVLVWRRRPREQNGAIYLPTPDR

SEQ ID NO: 8855 - protein, 341 aa, Homo Sapiens
MGELMAFLLPLIIVLMVKHSDSRTHSLRYFRLGVSDPIHGVPEFISVGYVDSHPITTYDSVTRQKEPRAPWMAENLAPDHWERYTQLLRGWQQMFKVELKRLQRHYNHSGSHTYQRMIGCELLEDGSTTGFLQYAYDGQDFLIFNKDTLSWLAVDNVAHTIKQAWEANQHELLYQKNWLEEECIAWLKRFLEYGKDTLQRTEPPLVRVNRKETFPGVTALFCKAHGFYPPEIYMTWMKNGEEIVQEIDYGDILPSGDGTYQAWASIELDPQSSNLYSCHVEHCGVHMVLQVPQESETIPLVMKAVSGSIVLVIVLAGVGVLVWRRRPREQNGAIYLPTPDR

SEQ ID NO: 8856 - protein, 341 aa, Homo Sapiens; identical to SEQ ID NO: 8855

SEQ ID NO: 8857 - protein, 214 aa, Homo Sapiens
MGELMAFLLPLIIVLMVKHSDSRTHSLRYFRLGVSDPIHGVPEFISVGYVDSHPITTYDSVTRQKEPRAPWMAENLAPDHWERYTQLLRGWQQMFKVELKRLQRHYNHSGSHTYQRMIGCELLEDGSTTGFLQYAYDGQDFLIFNKDTLSWLAVDNVAHTIKQAWEANQHELLYQKNWLEEECIAWLKRFLEYGKDTLQRTEQNGAIYLPTPDR

SEQ ID NO: 8858 - protein, 249 aa, Homo Sapiens
MGELMAFLLPLIIVLMVKHSDSRTHSLRYFRLGVSDPIHGVPEFISVGYVDSHPITTYDSVTRQKEPRAPWMAENLAPDHWERYTQLLRGWQQMFKVELKRLQRHYNHSGSHTYQRMIGCELLEDGSTTGFLQYAYDGQDFLIFNKDTLSWLAVDNVAHTIKQAWEANQHELLYQKNWLEEECIAWLKRFLEYGKDTLQRTESETIPLVMKAVSGSIVLVIVLAGVGVLVWRRRPREQNGAIYLPTPDR

SEQ ID NO: 8859 - protein, 249 aa, Homo Sapiens; identical to SEQ ID NO: 8858

SEQ ID NO: 8860 - protein, 103 aa, Homo Sapiens
MALCALTRALRSLNLAPPTVAAPAPSLFPAAQMMNNGLLQQPSALMLLPCRPVLTSVALNANFVSWKSRTKYTITPVKMRKSGGRDHTGAGNVRSNSRPSIQR

SEQ ID NO: 8861 - protein, 96 aa, Homo Sapiens
MALCALTRALRSLNLAPPTVAAPAPSLFPAAQMMNNGLLQQPSALMLLPCRPVLTSVALNANFVSWKSRTKYTITPVKMRKSGGRDHTGGNKDRGI

SEQ ID NO: 8862 - protein, 225 aa, Homo Sapiens
MALCALTRALRSLNLAPPTVAAPAPSLFPAAQMMNNGLLQQPSALMLLPCRPVLTSVALNANFVSWKSRTKYTITPVKMRKSGGRDHTGRIRVHGIGGGHKQRYRMIDFLRFRPEETKSGPFEEKVIQVRYDPCRSADIALVAGGSRKRWIIATENMQAGDTILNSNHIGRMAVAAREGDAHPLGALPVGTLINNVESEPGRGAQYIRAAGAGNVRSNSRPSIQR

SEQ ID NO: 8863 - protein, 305 aa, Homo Sapiens [sequence omitted]

SEQ ID NO: 8864 - protein, 94 aa, Homo Sapiens
MALCALTRALRSLNLAPPTVAAPAPSLFPAAQVIHLTREEGCFHSGCRRWGLRACEAGVASLVRSHADDEQWPPPTALCLDVAPLPPSSYFCGP

SEQ ID NO: 8865 - protein, 49 aa, Homo Sapiens
MAASSLTVTLGRLASACSHSILRPSGPGAASLWSASRRFNSQSTSYLPG

SEQ ID NO: 8866 - protein, 49 aa, Homo Sapiens; identical to SEQ ID NO: 8865

SEQ ID NO: 8867 - protein, 150 aa, Homo Sapiens
MAASSLTVTLGRLASACSHSILRPSGPGAASLWSASRRFNSQSTSYLPGYVPKTSLSSPPWPEVVLPDPVEETRHHAEVVKKVNEMIVTGQYGRLFAVVHFASRQWKVTSEDLILIGNELDLACGERIRLEKVLLVGADNFTLLGKPLLG

SEQ ID NO: 8868 - protein, 205 aa, Homo Sapiens
MAASSLTVTLGRLASACSHSILRPSGPGAASLWSASRRFNSQSTSYLPGYVPKTSLSSPPWPEVVLPDPVEETRHHAEVVKKVNEMIVTGQYGRLFAVVHFASRQWKVTSEDLILIGNELDLACGERIRLEKVLLVGADNFTLLGKPLLGKDLVRVEATVIEKTESWPRIIMRFRKRKNFKKKRIVTTPQTVLRINSIEIAPCLL

SEQ ID NO: 8869 - protein, 36 aa, Homo Sapiens
MAASSLTVTLGRLASACSHSILRPSGPGADMFLKHP

SEQ ID NO: 8870 - protein, 120 aa, Homo Sapiens
MIVTGQYGRLFAVVHFASRQWKVTSEDLILIGNELDLACGERIRLEKVLLVGADNFTLLGKPLLGKDLVRVEATVIEKTESWPRIIMRFRKRKNFKKKRIVTTPQTVLRINSIEIAPCLL

SEQ ID NO: 8871 - protein, 195 aa, Homo Sapiens
MIVTGQYGRLFAVVHFASRQWKVTSEDLILIGNELDLACGERIRLEKVLLVGADNFTLLGKPLLGKDLVRVEATVIEKTESWPRIIMRFRKRKNFKKKRSKLEKVPLGPVARCWLPRRMRTEGVGHVGLGTGSPGRSQPGCHCPLATLILEGAPRGSSLAPLLLHAPRVTPPRSPSPPRSARDPTSLPFSSTLRA

SEQ ID NO: 8872 - protein, 38 aa, Homo Sapiens
EMESELTACVDVAGALWIHNLRSRGKLALGKSTTVEDK

SEQ ID NO: 8873 - protein, 212 aa, Homo Sapiens
MAAAVLGQLGALWIHNLRSRGKLALGLLSFHSVLPQSYIHTSASLDISRKWEKKNKIVYPPQLPGEPRRPAEIYHCRRQIKYSKDKMWYLAKLIRGMSIDQALAQLEFNDKKGAKIIKEVLLEAQDMAVRDHNVEFRSNLYIAESTSGRGQCLKRIRYHGRGRFGIMEKVYCHYFVKLVEGPPPPPEPPKTAVAHAKEYIQQLRSRTIVHTL

SEQ ID NO: 8874 - protein, 206 aa, Homo Sapiens
MAAAVLGQLGALWIHNLRSRGKLALGVLPQSYIHTSASLDISRKWEKKNKIVYPPQLPGEPRRPAEIYHCRRQIKYSKDKMWYLAKLIRGMSIDQALAQLEFNDKKGAKIIKEVLLEAQDMAVRDHNVEFRSNLYIAESTSGRGQCLKRIRYHGRGRFGIMEKVYCHYFVKLVEGPPPPPEPPKTAVAHAKEYIQQLRSRTIVHTL

SEQ ID NO: 8875 - protein, 232 aa, Homo Sapiens
MAAAVLGQLGKDFLVVKRQKGVEMESELTACVDVAGALWIHNLRSRGKLALGVLPQSYIHTSASLDISRKWEKKNKIVYPPQLPGEPRRPAEIYHCRRQIKYSKDKMWYLAKLIRGMSIDQALAQLEFNDKKGAKIIKEVLLEAQDMAVRDHNVEFRSNLYIAESTSGRGQCLKRIRYHGRGRFGIMEKVYCHYFVKLVEGPPPPPEPPKTAVAHAKEYIQQLRSRTIVHTL

SEQ ID NO: 8876 - protein, 126 aa, Homo Sapiens
MWYLAKLIRGMSIDQALAQLEFNDKKGAKIIKEVLLEAQDMAVRDHNVEFRSNLYIAESTSGRGQCLKRIRYHGRGRFGIMEKVYCHYFVKLVEGPPPPPEPPKTAVAHAKEYIQQLRSRTIVHTL

SEQ ID NO: 8877 - protein, 68 aa, Homo Sapiens
MRLSALLALASKVTLPPHYRYGMSPPGSVADKRKNPPWIRRRPVVVEPISDEDWYLFCGDTVEILEGK

SEQ ID NO: 8878 - protein, 99 aa, Homo Sapiens
MRLSALLALASKVTLPPHYRYGMSPPGSVADKRKNPPWIRRRPVVVEPISDEDWYLFCGDTVEILEGKDAGKQGKVVQVIRQRNWVVVGGLNTHYRYIG

SEQ ID NO: 8879 - protein, 173 aa, Homo Sapiens
MRLSALLALASKVTLPPHYRYGMSPPGSVADKRKNPPWIRRRPVVVEPISDEDWYLFCGDTVEILEGKDAGKQGKVVQVIRQRNWVVVGGLNTHYRYIGKTMDYRGTMIPSEAPLLHRQVKLVDPMDRKPTEIEWRFTEAGERVRVSTRSGRIIPKPEFPRADGIVPETWIDG

SEQ ID NO: 8880 - protein, 216 aa, Homo Sapiens
MRLSALLALASKVTLPPHYRYGMSPPGSVADKRKNPPWIRRRPVVVEPISDEDWYLFCGDTVEILEGKDAGKQGKVVQVIRQRNWVVVGGLNTHYRYIGKTMDYRGTMIPSEAPLLHRQVKLVDPMDRKPTEIEWRFTEAGERVRVSTRSGRIIPKPEFPRADGIVPETWIDGPKDTSVEDALERTYVPCLKTLQEEVMEAMGIKETRKYKKVYWY

SEQ ID NO: 8881 - protein, 216 aa, Homo Sapiens; identical to SEQ ID NO: 8880

SEQ ID NO: 8882 - protein, 148 aa, Homo Sapiens
MASVVLALRTRTAVTSLLSPTPATALAVRYASKKSGGSSKNLGGKSSGRRQGIKKMEGHYVHAGNIIATQRHFRWHPGAHVGVGKNKCLYALEEGIVRYTKEVYVPHPRNTEAVDLITRLPKGAVLYKTFVHVVPAKPEGTFKLVAML

SEQ ID NO: 8883 - protein, 94 aa, Homo Sapiens
MASVVLALRTRTAVTSLLSPTPATALAVRYASKKSGGSSKNLGGKSSGRRQGIKKMEGHYVHAGNIIATQRHFRWHPGAHVSCSVAAPLFPFLG

SEQ ID NO: 8884 - protein, 84 aa, Homo Sapiens
MASVVLALRTRTAVTSLLSPTPATALAVRYASKKSGGSSKNLGGKSSGRRQGIKKMEGHYVHAGNIIATQRHFRWHPGAHWRWK

SEQ ID NO: 8885 - protein, 93 aa, Homo Sapiens
MEGHYVHAGNIIATQRHFRWHPGAHVGVGKNKCLYALEEGIVRYTKEVYVPHPRNTEAVDLITRLPKGAVLYKTFVHVVPAKPEGTFKLVAML

SEQ ID NO: 8886 - protein, 93 aa, Homo Sapiens; identical to SEQ ID NO: 8885

SEQ ID NO: 8887 - protein, 136 aa, Homo Sapiens
  misc_feature (1)..(1): Xaa can be any naturally occurring amino acid
XSPTPATALAVRYASKKSGGSSKNLGGKSSGRRQGIKKMEGHYVHAGNIIATQRHFRWHPGAHVCVLQVGVGKNKCLYALEEGIVRYTKEVYVPHPRNTEAVDLITRLPKGAVLYKTFVHVVPAKPEGTFKLVAML

SEQ ID NO: 8888 - protein, 188 aa, Homo Sapiens [sequence omitted]

SEQ ID NO: 8889 - protein, 107 aa, Homo Sapiens
MALAMLVLVVSPWSAARGVLRNYWERLLRKLPQSRPGFPSPPWGPALAVQGPAMFTEPANDTSGSKENSSLLDSIFWMAAPKNRRTIEVNRCRRRNPQKLIKVKVMH

SEQ ID NO: 8890 - protein, 42 aa, Homo Sapiens
  misc_feature (1)..(1): Xaa can be any naturally occurring amino acid
XENSSLLDSIFWMAAPKNRRTIEVNRCRRRNPQKLIKVKSSC

SEQ ID NO: 8891 - protein, 36 aa, Homo Sapiens
MAVLAGSLLGPTSRLAGMSISRATSNARTSTAGSGA

SEQ ID NO: 8892 - protein, 92 aa, Homo Sapiens [sequence omitted]

SEQ ID NO: 8893 - protein, 92 aa, Homo Sapiens [sequence omitted]

SEQ ID NO: 8894 - protein, 92 aa, Homo Sapiens [sequence omitted]

SEQ ID NO: 8895 - protein, 184 aa, Homo Sapiens
MPRRPSGYFLSSGGAGSGSGRALGEGSGSQSRNSWSSVLTVSGHSSITMWLPSSMSFRNARSRICRRRRAQGLERLWAPESPAAGTAGPTADMAVLAGSLLGPTSRSAALLGGRWLQPRAWLGFPDAWGLPTPQQARGKARGNEYQPSNIKRKNKHGWVRRLSTPAGVQVILRRMLKGRKSLSH

SEQ ID NO: 8896 - protein, 95 aa, Homo Sapiens
MAASAFAGAVRAASGILRPLNILASSTYRNCVKNASLISALSTGRFSHIQTPVVSSTPRLTTSERNLTCGHTSVILNRLAIRKNYGKRHLQGRSD

SEQ ID NO: 8897 - protein, 170 aa, Homo Sapiens
MAASAFAGAVRAASGILRPLNILASSTYRNCVKNASLISALSTGRFSHIQTPVVSSTPRLTTSERNLTCGHTSVILNRMAPVLPSVLKLPVRSLTYFSARKGKRKTVKAVIDRFLRLHCGLWVRRKAGYKKKLWKKTPARKKRLREFVFCNKTQSKLLDKMTTSFWKRRN

SEQ ID NO: 8898 - protein, 177 aa, Homo Sapiens
MAASAFAGAVRAASGILRPLNILASSTYRNCVKNASLISALSTGRFSHIQTPVVSSTPRLTTSERNLTCGHTSVILNRMAPVLPSVLKLPVRSLTYFSARKGKRKTVKAVIDRFLRLHCGLWVRRKAGYKKKLWKKTPARKKRLREFVFCNKTQSKLLDKMTTSFWKRRNWHSPICR

SEQ ID NO: 8899 - protein, 188 aa, Homo Sapiens [sequence omitted]

SEQ ID NO: 8900 - protein, 122 aa, Homo Sapiens
MAALGTVLFSVRRLHCSVAAWAGGQWRLQQGLAANPSGYGPLTELPDWSYADGRPAPPMKGQLRRKAERETFARRVVLLSQEMDAGLQAWQLRQQKLQEEQRKQENALKPKGASLKSPLPSQ

SEQ ID NO: 8901 - protein, 110 aa, Homo Sapiens
MAALGTVLFSVRRLHCSVAAWAGGQWRLQQGLAANPSGYGPLTELPDWSYADGRPAPPMKGQLRRKAERETFAVSETSCTAVTGNGRWITSMAAQAAEVAGRTKEAGKCS

SEQ ID NO: 8902 - protein, 72 aa, Homo Sapiens
MAALGTVLFSVRRLHCSVAAWAGGQWRLQQGLAANPSGYGPLTELPDWSYAETSCTAVTGNGRWITSMAAQA

SEQ ID NO: 8903 - protein, 123 aa, Homo Sapiens
MAALGTVLFTGVRRLHCSVAAWAGGQWRLQQGLAANPSGYGPLTELPDWSYADGRPAPPMKGQLRRKAERETFARRVVLLSQEMDAGLQAWQLRQQKLQEEQRKQENALKPKGASLKSPLPSQ

SEQ ID NO: 8904 - protein, 87 aa, Homo Sapiens
MAALGTVLFTGVRRLHCSVAAWAGGQWRLQQGLAANPSGYGPLTELPDWSYAETSCTAVTGNGRWITSMAAQAAEVAGRTKEAGKCS

SEQ ID NO: 8905 - protein, 64 aa, Homo Sapiens
MKGQLRRKAERETFARRVVLLSQEMDAGLQAWQLRQQKLQEEQRKQENALKPKGASLKSPLPSQ

SEQ ID NO: 8906 - protein, 64 aa, Homo Sapiens; identical to SEQ ID NO: 8905

SEQ ID NO: 8907 - protein, 64 aa, Homo Sapiens; identical to SEQ ID NO: 8905

SEQ ID NO: 8908 - protein, 52 aa, Homo Sapiens
MKGQLRRKAERETFAVSETSCTAVTGNGRWITSMAAQAAEVAGRTKEAGKCS

SEQ ID NO: 8909 - protein, 51 aa, Homo Sapiens
MRRRVVLLSQEMDAGLQAWQLRQQKLQEEQRKQENALKPKGASLKSPLPSQ

SEQ ID NO: 8910 - protein, 52 aa, Homo Sapiens
MVKIFSTCYLLDELYCCHRKWTLDYKHGSSGSRSCRKNKGSRKMLLNPKGLH

SEQ ID NO: 8911 - protein, 5 aa, Homo Sapiens
MAAVG

SEQ ID NO: 8912 - protein, 9 aa, Homo Sapiens
MAAVGSLLG

SEQ ID NO: 8913 - protein, 164 aa, Homo Sapiens
MAAVGSLLGLAASSWLGGQNASDHSLWLLRKPRGSSCPGTGHQLCRLRQSTVKATGPALRRLHTSSWRADSSRASLTRVHRQAYARLYPVLLVKQDGSTIHIRYREPRRMLAMPIDLDTLSPEERRARLRKREAQLQSRKEYEQELSDDLHVERYRQFWTRTKK

SEQ ID NO: 8914 - protein, 164 aa, Homo Sapiens; identical to SEQ ID NO: 8913

SEQ ID NO: 8915 - protein, 24 aa, Homo Sapiens
MAAVGSLLGRLRQSTVKATGPALR

SEQ ID NO: 8916 - protein, 43 aa, Homo Sapiens
MAAVGSLLGRLRQSTVKATGPALRRLHTSSWRADSSRASLTRV

SEQ ID NO: 8917 - protein, 76 aa, Homo Sapiens
MAAVGSLLGRLRQSTVKATGPALRRLHTSSWRADSSRASLTRVHRQAYARLYPVLLVKQDGSTIHIRYREPRRMLA

SEQ ID NO: 8918 - protein, 128 aa, Homo Sapiens
MAAVGSLLGRLRQSTVKATGPALRRLHTSSWRADSSRASLTRVHRQAYARLYPVLLVKQDGSTIHIRYREPRRMLAMPIDLDTLSPEERRARLRKREAQLQSRKEYEQELSDDLHVERYRQFWTRTKK

SEQ ID NO: 8919 - protein, 128 aa, Homo Sapiens; identical to SEQ ID NO: 8918

SEQ ID NO: 8920 - protein, 128 aa, Homo Sapiens; identical to SEQ ID NO: 8918

SEQ ID NO: 8921 - protein, 128 aa, Homo Sapiens; identical to SEQ ID NO: 8918

SEQ ID NO: 8922 - protein, 128 aa, Homo Sapiens; identical to SEQ ID NO: 8918

SEQ ID NO: 8923 - protein, 128 aa, Homo Sapiens; identical to SEQ ID NO: 8918

SEQ ID NO: 8924 - protein, 128 aa, Homo Sapiens; identical to SEQ ID NO: 8918

SEQ ID NO: 8925 - protein, 128 aa, Homo Sapiens; identical to SEQ ID NO: 8918

SEQ ID NO: 8926 - protein, 128 aa, Homo Sapiens; identical to SEQ ID NO: 8918

SEQ ID NO: 8927 - protein, 128 aa, Homo Sapiens; identical to SEQ ID NO: 8918

SEQ ID NO: 8928 - protein, 128 aa, Homo Sapiens; identical to SEQ ID NO: 8918

SEQ ID NO: 8929 - protein, 128 aa, Homo Sapiens; identical to SEQ ID NO: 8918

SEQ ID NO: 8930 - protein, 128 aa, Homo Sapiens; identical to SEQ ID NO: 8918

SEQ ID NO: 8931 - protein, 128 aa, Homo Sapiens; identical to SEQ ID NO: 8918

SEQ ID NO: 8932 - protein, 128 aa, Homo Sapiens; identical to SEQ ID NO: 8918

SEQ ID NO: 8933 - protein, 128 aa, Homo Sapiens; identical to SEQ ID NO: 8918

SEQ ID NO: 8934 - protein, 55 aa, Homo Sapiens
MLAMPIDLDTLSPEERRARLRKREAQLQSRKEYEQELSDDLHVERYRQFWTRTKK

SEQ ID NO: 8935 - protein, 55 aa, Homo Sapiens; identical to SEQ ID NO: 8934

SEQ ID NO: 8936 - protein, 55 aa, Homo Sapiens; identical to SEQ ID NO: 8934

SEQ ID NO: 8937 - protein, 128 aa, Homo Sapiens
MAAFMLGSLLRTFKQMVPSSASGQVRSHYVDWRMWRDVKRRKMAYEYADERLRINSLRKNTILPKILQDVADEEIAALPRDSCPVRIRNRCVMTSRPRGVKRRWRLSRIVFRHLADHGQLSGIQRATW

SEQ ID NO: 8938 - protein, 60 aa, Homo Sapiens
MAAFMLGSLLRTFKQVRPLLLSTPLPLTAESHNPRVPHGSATCSARWFLHQLQAKFEVTM

SEQ ID NO: 8939 - protein, 200 aa, Homo Sapiens
GTTVLLWSLLRSSPGVERVCFRARIQPWHGGLLQPLPCSFEMGLPRRRFSSEAASYLLKSILAESGSPETKKPTFMDEEVQSILTKMTGLNLQKTFKPAIQELKPPTYKLMTQAQLEEATRQAVEAAKVRLKMPPVLEERVPINDVLAEDKILEGTETTKYVFTDISYSIPHRERFIVVREPSGTLRKASWEERDRMIQV

SEQ ID NO: 8940 - protein, 360 aa, Homo Sapiens
MAPLGTTVLLWSLLRSSPGVERVCFRARIQPWHGGLLQPLPCSFEMGLPRRRFSSEAAESGSPETKKPTFMDEEVQSILTKMTGLNLQKTFKPAIQELKPPTYKLMTQAQLEEATRQAVEAAKVRLKMPPVLEERVPINDVLAEDKILEGTETTKYVFTDISYSIPHRERFIVVREPSGTLRKASWEERDRMIQVYFPKEGRKILTPIIFKEENLRTMYSQDRHVDVLNLCFAQFEPDSTEYIKVHHKTYEDIDKRGKYDLLRSTRYFGGMVWYFVNNKKIDGLLIDQIQRDLIDDATNLVQLYHVLHPDGQSAQGAKDQAAEGINLIKVFAKTEAQKGAYIELTLQTYQEALSRHSAAS

SEQ ID NO: 8941 - protein, 360 aa, Homo Sapiens; identical to SEQ ID NO: 8940

SEQ ID NO: 8942 - protein, 168 aa, Homo Sapiens
MAPLGTTVLLWSLLRSSPGVERVCFRARIQPWHGGLLQPLPCSFEMGLPRRRFSSEAESGSPETKKPTFMDEEVQSILTKMTGLNLQKTFKPAIQELKPPTYKLMTQAQLEEATRQAVEAAKVRLKMPPVLEERVPINDVLAEDKILEGTETTKYVFTDISYSIPHRC

SEQ ID NO: 8943 - protein, 359 aa, Homo Sapiens
MAPLGTTVLLWSLLRSSPGVERVCFRARIQPWHGGLLQPLPCSFEMGLPRRRFSSEAESGSPETKKPTFMDEEVQSILTKMTGLNLQKTFKPAIQELKPPTYKLMTQAQLEEATRQAVEAAKVRLKMPPVLEERVPINDVLAEDKILEGTETTKYVFTDISYSIPHRERFIVVREPSGTLRKASWEERDRMIQVYFPKEGRKILTPIIFKEENLRTMYSQDRHVDVLNLCFAQFEPDSTEYIKVHHKTYEDIDKRGKYDLLRSTRYFGGMVWYFVNNKKIDGLLIDQIQRDLIDDATNLVQLYHVLHPDGQSAQGAKDQAAEGINLIKVFAKTEAQKGAYIELTLQTYQEALSRHSAAS

SEQ ID NO: 8944 - protein, 319 aa, Homo Sapiens
MSRNETEHRYLGTHFGAESGSPETKKPTFMDEEVQSILTKMTGLNLQKTFKPAIQELKPPTYKLMTQAQLEEATRQAVEAAKVRLKMPPVLEERVPINDVLAEDKILEGTETTKYVFTDISYSIPHRERFIVVREPSGTLRKASWEERDRMIQVYFPKEGRKILTPIIFKEENLRTMYSQDRHVDVLNLCFAQFEPDSTEYIKVHHKTYEDIDKRGKYDLLRSTRYFGGMVWYFVNNKKIDGLLIDQIQRDLIDDATNLVQLYHVLHPDGQSAQGAKDQAAEGINLIKVFAKTEAQKGAYIELTLQTYQEALSRHSAAS

SEQ ID NO: 8945 - protein, 51 aa, Homo Sapiens
MVQTGRSEGIPGWEQSMSKGREIPGSDSESGSPETKKPTFMDEEVQSILTK

SEQ ID NO: 8946 - protein, 121 aa, Homo Sapiens
  misc_feature (1)..(1): Xaa can be any naturally occurring amino acid
XKYVFTDISYSIPHRERFIVVREPSGTLRKASWEERDRMIQVYFPKEGRKILTPIIFKEENLRFEPDSTEYIKVHHKTYEDIDKRGKYDLLRSTRYFGGMVWYFVNNKKIDGLLIDQIQRD

SEQ ID NO: 8947 - protein, 165 aa, Homo Sapiens
  misc_feature (1)..(1): Xaa can be any naturally occurring amino acid
XTTVLLWSLLRSSPGVERVCFRARIQPWHGGLLQPLPCSFEMGLPRRRFSSEAAESGSPETKKPTFMDEEVQSILTKMTGLNLQKTFKPAIQELKPPTYKLMTQAQLEEATRQAVEAAKVRLKMPPVLEERVPINDVLAEDKILEGTETTKYVFTDISYSIPHRC

SEQ ID NO: 8948 - protein, 86 aa, Homo Sapiens
MAALCRTRAVAAESHFLRVFLFFRPFRGVGTESGSESGSSNAKEPKTRAGGFASALERHSELLQKVEPLQKEIPERNQGPVAAIRS

SEQ ID NO: 8949 - protein, 187 aa, Homo Sapiens
MAALCRTRAVAAESHFLRVFLFFRPFRGVGTESGSESGSSNAKEPKTRAGGFASALERHSELLQKVEPLQKGSPKNVESFASMLRHSPLTQMGPAKDKLVIGRIFHIVENDLYIDFGGKFHCVCRRPEVDGEKYQKGTRVRLRLLDLELTSRFLGATTDTTVLEANAVLLGIQESKDSRSKEEHHEK

SEQ ID NO: 8950 - protein, 109 aa, Homo Sapiens
MLPRLVLNSWVQVILLRWPPKVLGLQMTDMGPAKDKLVIGRIFHIVENDLYIDFGGKFHCVCRRPEVDGEKYQKGTRVRLRLLDLELTSRFLGATTDTTVLEANAVLLG

SEQ ID NO: 8951 - protein, 125 aa, Homo Sapiens
MLPRLVLNSWVQVILLRWPPKVLGLQMTDMGPAKDKLVIGRIFHIVENDLYIDFGGKFHCVCRRPEVDGEKYQKGTRVRLRLLDLELTSRFLGATTDTTVLEANAVLLGIQESKDSRSKEEHHEK

SEQ ID NO: 8952 - protein, 103 aa, Homo Sapiens
MLRHSPLTQMGPAKDKLVIGRIFHIVENDLYIDFGGKFHCVCRRPEVDGEKYQKGTRVRLRLLDLELTSRFLGATTDTTVLEANAVLLGIQESKDSRSKEEHH

SEQ ID NO: 8953 - protein, 143 aa, Homo Sapiens
  misc_feature (1)..(1): Xaa can be any naturally occurring amino acid
XFCVAFAYWAGSVHTALVFLGLNAGGKGSPKNVESFASMLRHSPLTQMGPAKDKLVIGRIFHIVENDLYIDFGGKFHCVCRRPEVDGEKYQKGTRVRLRLLDLELTSRFLGATTDTTVLEANAVLLGIQESKDSRSKEEHHEK

SEQ ID NO: 8954 - protein, 83 aa, Homo Sapiens
  misc_feature (1)..(1): Xaa can be any naturally occurring amino acid
XMLRHSPLTQMGPAKDKLVIGRIFHIVENDLYIDFGGKFHCVCRRPEVDGESPISWYAVWRRFSQVMITCFSSNSDFGKHRKR

SEQ ID NO: 8955 - protein, 163 aa, Homo Sapiens
  misc_feature (1)..(1): Xaa can be any naturally occurring amino acid
XTRAVAAESHFLRVFLFFRPFRGVGTESGSESGSSNAKEPKTRAGGFASALERHSELLQKRWGFAMLPRLVLNSWVQVILLRWPPKVLGLQMTDGSPKNVESFASMLRHSPLTQMGPAKDKLVIGRIFHIVENDLYIDFGGKFHCVCRRPEVDGEKYQKGTRV

SEQ ID NO: 8956 - protein, 170 aa, Homo Sapiens
MESTSQDRRATHVITIKPNETVLTAFPYRPHSSLLDFLKGEPRVLGATQILLALIIVGFGTIFALNYIGFSQRLPLVVLTGYPFWGALIFILTGYLTVTDKKSKLLGQGVTGMNVISSLVAITGITFTILSYRHQDKYCQMPSFEEICVFSRTLFIDFILLTPPHSSHFL

SEQ ID NO: 8957 - protein, 712 aa, Homo Sapiens
MESTSQDRRATHVITIKPNETVLTAFPYRPHSSLLDFLKGEPRVLGATQILLALIIVGFGTIFALNYIGFSQRLPLVVLTGYPFWGALIFILTGYLTVTDKKSKLLGQGVTGMNVISSLVAITGITFTILSYRHQDKYCQMPSFEEICVFSRTLFIGILLILLIISIAELSISVTIASFRSKCWTQSDEVLFFLPSDVTQNSEQPAPEENDQLQFVLQEEFSSDDSTTNAQSVIFGGYAFFKLTLSRSPLVSQPGNKGREFVPDEQKQSILPSPKFSEEEIEPLPPTLEKKPSENMSIQLDSTFKQMKDEDLQSAIVQPSQMQTKLLQDQAASLQVFPSHSALKLEDISPEDLPSQALPVEGLSEQTMPSKSTSSHVKQSSNLTANDLPPQGILSQDTSSQDMLFHDMTSQDMQSLDMLSQDTPSHAMPPQDIPSQDMLSQALSAHAILPEASTSHIVQFPEIQHLLQQPPDLQPENTEPQNQQILQMSYQDIRSEVMEETKEWKSEEELHRRKSSRRHSLNQQTKALQYLRRHSLDVQAKGQKSSKRHSLDQQSKGWQSPKQKSLDQQIKDWLSPKRHSVDKQAQLNQTKEQLPDQQAEDQQAKGEQYPEGQSKDGQVKDQQTDKEQNSKKQTQDQQTEDQPAQEKKSPKGQFQNVQAEGQQAQVEKVPKLLCQDSESQIQQYQFWQFHKGNLQAGQPRTVNLLAKNPLTG

SEQ ID NO: 8958 - protein, 679 aa, Homo Sapiens
MESTSQDRRATHVITIKPNETVLTAFPYRPHSSLLDFLKGEPRVLGATQILLALIIVGFGTIFALNYIGFSQRLPLVVLTGYPFWGALIFILTGYLTVTDKKSKLLGQGVTGMNVISSLVAITGITFTILSYRHQDKYCQMPSFEEICVFSRTLFIVLFFLPSDVTQNSEQPAPEENDQLQFVLQEEFSSDDSTTNAQSVIFGGYAFFKLTLSRSPLVSQPGNKGREFVPDEQKQSILPSPKFSEEEIEPLPPTLEKKPSENMSIQLDSTFKQMKDEDLQSAIVQPSQMQTKLLQDQAASLQVFPSHSALKLEDISPEDLPSQALPVEGLSEQTMPSKSTSSHVKQSSNLTANDLPPQGILSQDTSSQDMLFHDMTSQDMQSLDMLSQDTPSHAMPPQDIPSQDMLSQALSAHAILPEASTSHIVQFPEIQHLLQQPPDLQPENTEPQNQQILQMSYQDIRSEVMEETKEWKSEEELHRRKSSRRHSLNQQTKALQYLRRHSLDVQAKGQKSSKRHSLDQQSKGWQSPKQKSLDQQIKDWLSPKRHSVDKQAQLNQTKEQLPDQQAEDQQAKGEQYPEGQSKDGQVKDQQTDKEQNSKKQTQDQQTEDQPAQEKKSPKGQFQNVQAEGQQAQVEKVPKLLCQDSESQIQQYQFWQFHKGNLQAGQPRTVNLLAKNPLTG

SEQ ID NO: 8959 - protein, 153 aa, Homo Sapiens
MESTSQDRRATHVITIKPNETVLTAFPYRPHSSLLDFLKGEPRVLGATQILLALIIVGFGTIFALNYIGFSQRLPLVVLTGYPFWGALIGQGVTGMNVISSLVAITGITFTILSYRHQDKYCQMPSFEEICVFSRTLFIDFILLTPPHSSHFL

SEQ ID NO: 8960 - protein, 153 aa, Homo Sapiens; identical to SEQ ID NO: 8959

SEQ ID NO: 8961 - protein, 148 aa, Homo Sapiens
MESTSQDRRATHVITIKPNETVLTAFPYRPHSSLLDFLKGEPRVLGATQILLALIIVGFGTIFALNYIGFSQRLPLVVLTGYPFWGALIGQGVTGMNVISSLVAITGITFTILSYRHQDKYCQMPSFEEICVFSRTLFIGILLILLII

SEQ ID NO: 8962 - protein, 695 aa, Homo Sapiens
MESTSQDRRATHVITIKPNETVLTAFPYRPHSSLLDFLKGEPRVLGATQILLALIIVGFGTIFALNYIGFSQRLPLVVLTGYPFWGALIGQGVTGMNVISSLVAITGITFTILSYRHQDKYCQMPSFEEICVFSRTLFIGILLILLIISIAELSISVTIASFRSKCWTQSDEVLFFLPSDVTQNSEQPAPEENDQLQFVLQEEFSSDDSTTNAQSVIFGGYAFFKLTLSRSPLVSQPGNKGREFVPDEQKQSILPSPKFSEEEIEPLPPTLEKKPSENMSIQLDSTFKQMKDEDLQSAIVQPSQMQTKLLQDQAASLQVFPSHSALKLEDISPEDLPSQALPVEGLSEQTMPSKSTSSHVKQSSNLTANDLPPQGILSQDTSSQDMLFHDMTSQDMQSLDMLSQDTPSHAMPPQDIPSQDMLSQALSAHAILPEASTSHIVQFPEIQHLLQQPPDLQPENTEPQNQQILQMSYQDIRSEVMEETKEWKSEEELHRRKSSRRHSLNQQTKALQYLRRHSLDVQAKGQKSSKRHSLDQQSKGWQSPKQKSLDQQIKDWLSPKRHSVDKQAQLNQTKEQLPDQQAEDQQAKGEQYPEGQSKDGQVKDQQTDKEQNSKKQTQDQQTEDQPAQEKKSPKGQFQNVQAEGQQAQVEKVPKLLCQDSESQIQQYQFWQFHKGNLQAGQPRTVNLLAKNPLTG

SEQ ID NO: 8963 - protein, 662 aa, Homo Sapiens
MESTSQDRRATHVITIKPNETVLTAFPYRPHSSLLDFLKGEPRVLGATQILLALIIVGFGTIFALNYIGFSQRLPLVVLTGYPFWGALIGQGVTGMNVISSLVAITGITFTILSYRHQDKYCQMPSFEEICVFSRTLFIVLFFLPSDVTQNSEQPAPEENDQLQFVLQEEFSSDDSTTNAQSVIFGGYAFFKLTLSRSPLVSQPGNKGREFVPDEQKQSILPSPKFSEEEIEPLPPTLEKKPSENMSIQLDSTFKQMKDEDLQSAIVQPSQMQTKLLQDQAASLQVFPSHSALKLEDISPEDLPSQALPVEGLSEQTMPSKSTSSHVKQSSNLTANDLPPQGILSQDTSSQDMLFHDMTSQDMQSLDMLSQDTPSHAMPPQDIPSQDMLSQALSAHAILPEASTSHIVQFPEIQHLLQQPPDLQPENTEPQNQQILQMSYQDIRSEVMEETKEWKSEEELHRRKSSRRHSLNQQTKALQYLRRHSLDVQAKGQKSSKRHSLDQQSKGWQSPKQKSLDQQIKDWLSPKRHSVDKQAQLNQTKEQLPDQQAEDQQAKGEQYPEGQSKDGQVKDQQTDKEQNSKKQTQDQQTEDQPAQEKKSPKGQFQNVQAEGQQAQVEKVPKLLCQDSESQIQQYQFWQFHKGNLQAGQPRTVNLLAKNPLTG

SEQ ID NO: 8964 - protein, 94 aa, Homo Sapiens
MESTSQDRRATHVITIKPNETVLTAFPYRPHSSLLDFLKGEPRVLGATQILLALIIVGFGTIFALNYIGFSQRLPLVVLTGYPFWGALIVSTVD

SEQ ID NO: 8965 - protein, 567 aa, Homo Sapiens
MNVISSLVAITGITFTILSYRHQDKYCQMPSFEEICVFSRTLFIVLFFLPSDVTQNSEQPAPEENDQLQFVLQEEFSSDDSTTNAQSVIFGGYAFFKLTLSRSPLVSQPGNKGREFVPDEQKQSILPSPKFSEEEIEPLPPTLEKKPSENMSIQLDSTFKQMKDEDLQSAIVQPSQMQTKLLQDQAASLQVFPSHSALKLEDISPEDLPSQALPVEGLSEQTMPSKSTSSHVKQSSNLTANDLPPQGILSQDTSSQDMLFHDMTSQDMQSLDMLSQDTPSHAMPPQDIPSQDMLSQALSAHAILPEASTSHIVQFPEIQHLLQQPPDLQPENTEPQNQQILQMSYQDIRSEVMEETKEWKSEEELHRRKSSRRHSLNQQTKALQYLRRHSLDVQAKGQKSSKRHSLDQQSKGWQSPKQKSLDQQIKDWLSPKRHSVDKQAQLNQTKEQLPDQQAEDQQAKGEQYPEGQSKDGQVKDQQTDKEQNSKKQTQDQQTEDQPAQEKKSPKGQFQNVQAEGQQAQVEKVPKLLCQDSESQIQQYQFWQFHKGNLQAGQPRTVNLLAKNPLTG

SEQ ID NO: 8966 - protein, 139 aa, Homo Sapiens
  misc_feature (1)..(1): Xaa can be any naturally occurring amino acid
XRVLGATQILLALIIVGFGTIFALNYIGFSQRLPLVVLTGYPFWGALIFILTGYLTVTDKKSKLLGQGVTGMNVISSLVAITGITFTILSYRHQDKYCQMPSFEEICVFSRTLFIVSGLILHEESLKSSLNCVHDVMIH

SEQ ID NO: 8967 - protein, 214 aa, Homo Sapiens
MASHEVDNAELGSASAHGTPGSEAGPEELNTSVYQPIDGSPDYQKAKLQVLGAIQILNAAMILALGVFLGSLQYPYHFQKHFFFFTFYTGYPIWGAVFFCSSGTLSVVAGIKPTRTWIQNSFGMNIASATIALVGTAFLSLNIAVNIQSLRSCHSSSESPDLCNYMGSISNGMVSLLLILTLLELCVTISTIAMWCNANCCNSREEISSPPNSV

SEQ ID NO: 8968 - protein, 168 aa, Homo Sapiens
MASHEVDNAELGSASAHGTPGSEAGPEELNTSVYQPIDGSPDYQKAKLQVLGFCSSGTLSVVAGIKPTRTWIQNSFGMNIASATIALVGTAFLSLNIAVNIQSLRSCHSSSESPDLCNYMGSISNGMVSLLLILTLLELCVTISTIAMWCNANCCNSREEISSPPNSV

SEQ ID NO: 8969 - protein, 168 aa, Homo Sapiens; identical to SEQ ID NO: 8968

SEQ ID NO: 8970 - protein, 83 aa, Homo Sapiens
MASHEVDNAELGSASAHGTPGSEAGPEELNTSVYQPIDGSPDYQKAKLQVLGSIQREEDEDEDLYDNLLPLNEYSVVQEPCLL

SEQ ID NO: 8971 - protein, 91 aa, Homo Sapiens
MNIASATIALVGTAFLSLNIAVNIQSLRSCHSSSESPDLCNYMGSISNGMVSLLLILTLLELCVTISTIAMWCNANCCNSREEISSPPNSV

SEQ ID NO: 8972 - protein, 1137 aa, Homo Sapiens
MSRRKPASGGLAASSSAPARQAVLSRFFQSTGSLKSTSSSTGAADQVDPGAAAAAAAAAAAAPPAPPAPAFPPQLPPHIATEIDRRKKRPLENDGPVKKKVKKVQQKEGGSDLGMSGNSEPKKCLRTRNVSKSLEKLKEFCCDSALPQSRVQTESLQERFAVLPKCTDFDDISLLHAKNAVSSEDSKRQINQKDTTLFDLSQFGSSNTSHENLQKTASKSANKRSKSIYTPLELQYIEMKQQHKDAVLCVECGYKYRFFGEDAEIAARELNIYCHLDHNFMTASIPTHRLFVHVRRLVAKGYKVGVVKQTETAALKAIGDNRSSLFSRKLTALYTKSTLIGEDVNPLIKLDDAVNVDEIMTDTSTSYLLCISENKENVRDKKKGNIFIGIVGVQPATGEVVFDSFQDSASRSELETRMSSLQPVELLLPSALSEQTEALIHRATSVSVQDDRIRVERMDNIYFEYSHAFQAVTEFYAKDTVDIKGSQIISGIVNLEKPVICSLAAIIKYLKEFNLEKMLSKPENFKQLSSKMEFMTINGTTLRNLEILQNQTDMKTKGSLLWVLDHTKTSFGRRKLKKWVTQPLLKLREINARLDAVSEVLHSESSVFGQIENHLRKLPDIERGLCSIYHKKCSTQEFFLIVKTLYHLKSEFQAIIPAVNSHIQSDLLRTVILEIPELLSPVEHYLKILNEQAAKVGDKTELFKDLSDFPLIKKRKDEIQGVIDEIRMHLQEIRKILKNPSAQYVTVSGQEFMIEIKNSAVSCIPTDWVKVGSTKAVSRFHSPFIVENYRHLNQLREQLVLDCSAEWLDFLEKFSEHYHSLCKAVHHLATVDCIFSLAKVAKQGDYCRPTVQEERKIVIKNGRHPVIDVLLGEQDQYVPNNTDLSEDSERVMIITGPNMGGKSSYIKQVALITIMAQIGSYVPAEEATIGIVDGIFTRMGAADNIYKGQSTFMEELTDTAEIIRKATSQSLVILDELGRGTSTHDGIAIAYATLEYFIRDVKSLTLFVTHYPPVCELEKNYSHQVGNYHMGFLVSEDESKLDPGAAEQVPDFVTFLYQITRGIAARSYGLNVAKLADVPGEILKKAAHKSKELEGLINTKRKRLKYFAKLWTMHNAQDLQKWTEEFNMEETQTSLLH

SEQ ID NO: 8973 - protein, 166 aa, Homo Sapiens
GYSRPRYSPQVLGVRIQNGRHPLMELCARTFVPNSTECGGDKGRVKVITGPNSSGKSIYLKQVAKAVNNATAQSLVLIDEFGKGTNTVDGLALLAAVLRHWLARGPTCPHIFVATNFLSLVQLQLLPQGPLVQYLDWPRVSGQEGGLRRCCEGQPCLPHSCPGWAS

SEQ ID NO: 8974 - protein, 333 aa, Homo Sapiens
KILFLSSIIPFDCLLTVRALGGLLKFLGRRRIGVELEDYNVSVPILGFKKFMLTHLVNIDQDTYSVLQIFKSESHPSVYKVASGLKEGLSLFGILNRCHCKWGEKLLRLWFTRPTHDLGELSSRLDVIQFFLLPQNLDMAQMLHRLLGHIKNVPLILKRMKLSHTKVSDWQVLYKTVYSALGLRDACRSLPQSIQLFRDIAQEFSDDLHHIASLIGKVYLSPQVDFEGSLAENRFTVLPNIDPEIDEKKRRLMGLPSFLTEVARKELENLDSRIPSCSVIYIPLIGFLLSIPRLPSMVEASDFEINGLDFMFLSEEKLHYRSARTKELDALLG

SEQ ID NO: 8975 - protein, 822 aa, Homo Sapiens
MASLGANPRRTPQGPRPGAASSGFPSPAPVPGPREAEEEEVEEEEELAEIHLCVLWNSGYLGIAYYDTSDSTIHFMPDAPDHESLKLLQRVLDEINPQSVVTSAKQDENMTRFLGKLASQEHREPKRPEIIFLPSVDFGLEISKQRLLSGNYSFIPDAMTATEKILFLSSIIPFDCLLTPPGDLRFTPIPLLIPSQVRALGGLLKFLGRRRIGVELEDYNVSVPILGFKKFMLTHLVNIDQDTYSVLQIFKSESHPSVYKVASGLKEGLSLFGILNRCHCKWGEKLLRLWFTRPTHDLGELSSRLDVIQFFLLPQNLDMAQMLHRLLGHIKNVPLILKRMKLSHTKVSDWQVLYKTVYSALGLRDACRSLPQSIQLFRDIAQEFSDDLHHIASLIGKVVDFEGSLAENRFTVLPNIDPEIDEKKRRLMGLPSFLTEVARKELENLDSRIPSCSVIYIPLIGFLLSIPRLPSMVEASDFEINGLDFMFLSEEKLHYRSARTKELDALLGDLHCEIRDQETLLMYQLQCQVLARAAVLTRVLDLASRLDVLLALASAARDYGYSRPRYSPQVLGVRIQNGRHPLMELCARTFVPNSTECGGDKGRVKVITGPNSSGKSIYLKQVGLITFMALVGSFVPAEEAEIGAVDAIFTRIHSCESISLGLSTFMIDLNQQVAKAVNNATAQSLVLIDEFGKGTNTVDGLALLAAVLRHWLARGPTCPHIFVATNFLSLVQLQLLPQGPLVQYLTMETCEDGNDLVFFYQVSDLIRSGKPIKPVKDLLKKNQMENCQTLVDKFMKLDLEDPNLDLNVFMSQEVLPAATSIL

SEQ ID NO: 8976 - protein, 194 aa, Homo Sapiens
MASLGANPRRTPQGPRPGAASSGFPSPAPVPGPREAEEEEVEEEEELAEIHLCVLWNSGYLGIAYYDTSDSTIHFMPDAPDHESLKLLQRVLDEINPQSVVTSAKQDENMTRFLGKLASQEHREPKRPEIIFLPSVDFGLEISKQRLLSGNYSFIPDAMTATEKILFLSSIIPFDCLLTVRALGGLLKFLGRRR

SEQ ID NO: 8977 - protein, 834 aa, Homo Sapiens
MASLGANPRRTPQGPRPGAASSGFPSPAPVPGPREAEEEEVEEEEELAEIHLCVLWNSGYLGIAYYDTSDSTIHFMPDAPDHESLKLLQRVLDEINPQSVVTSAKQDENMTRFLGKLASQEHREPKRPEIIFLPSVDFGLEISKQRLLSGNYSFIPDAMTATEKILFLSSIIPFDCLLTVRALGGLLKFLGRRRIGVELEDYNVSVPILGFKKFMLTHLVNIDQDTYSVLQIFKSESHPSVYKVASGLKEGLSLFGILNRCHCKWGEKLLRLWFTRPTHDLGELSSRLDVIQFFLLPQNLDMAQMLHRLLGHIKNVPLILKRMKLSHTKVSDWQVLYKTVYSALGLRDACRSLPQSIQLFRDIAQEFSDDLHHIASLIGKVVDFEGSLAENRFTVLPNIDPEIDEKKRRLMGLPSFLTEVARKELENLDSRIPSCSVIYIPLIGFLLSIPRLPSMVEASDFEINGLDFMFLSEEKLHYRSARTKELDALLGDLHCEIRDQETLLMYQLQCQVLARAAVLTRVLDLASRLDVLLALASAARDYGYSRPRYSPQVLGVRIQNGRHPLMELCARTFVPNSTECGGDKGRVKVITGPNSSGKSIYLKQVGLITFMALVGSFVPAEEAEIGAVDAIFTRIHSCESISLGLSTFMIDLNQVAKAVNNATAQSLVLIDEFGKGTNTVDGLALLAAVLRHWLARGPTCPHIFVATNFLSLVQLQLLPQGPLVQYLTMETCEDGNDLVFFYQVCEGVAKASHASHTAAQAGLPDKLVARGKEVSDLIRSGKPIKPVKDLLKKNQMENCQTLVDKFMKLDLEDPNLDLNVFMSQEVLPAATSIL

SEQ ID NO: 8978 - protein, 835 aa, Homo Sapiens
MASLGANPRRTPQGPRPGAASSGFPSPAPVPGPREAEEEEVEEEEELAEIHLCVLWNSGYLGIAYYDTSDSTIHFMPDAPDHESLKLLQRVLDEINPQSVVTSAKQDENMTRFLGKLASQEHREPKRPEIIFLPSVDFGLEISKQRLLSGNYSFIPDAMTATEKILFLSSIIPFDCLLTVRALGGLLKFLGRRRIGVELEDYNVSVPILGFKKFMLTHLVNIDQDTYSVLQIFKSESHPSVYKVASGLKEGLSLFGILNRCHCKWGEKLLRLWFTRPTHDLGELSSRLDVIQFFLLPQNLDMAQMLHRLLGHIKNVPLILKRMKLSHTKVSDWQVLYKTVYSALGLRDACRSLPQSIQLFRDIAQEFSDDLHHIASLIGKVVDFEGSLAENRFTVLPNIDPEIDEKKRRLMGLPSFLTEVARKELENLDSRIPSCSVIYIPLIGFLLSIPRLPSMVEASDFEINGLDFMFLSEEKLHYRSARTKELDALLGDLHCEIRDQETLLMYQLQCQVLARAAVLTRVLDLASRLDVLLALASAARDYGYSRPRYSPQVLGVRIQNGRHPLMELCARTFVPNSTECGGDKGRVKVITGPNSSGKSIYLKQVGLITFMALVGSFVPAEEAEIGAVDAIFTRIHSCESISLGLSTFMIDLNQQVAKAVNNATAQSLVLIDEFGKGTNTVDGLALLAAVLRHWLARGPTCPHIFVATNFLSLVQLQLLPQGPLVQYLTMETCEDGNDLVFFYQVCEGVAKASHASHTAAQAGLPDKLVARGKEVSDLIRSGKPIKPVKDLLKKNQMENCQTLVDKFMKLDLEDPNLDLNVFMSQEVLPAATSIL

SEQ ID NO: 8979 - protein, 834 aa, Homo Sapiens; identical to SEQ ID NO: 8977

SEQ ID NO: 8980 - protein, 637 aa, Homo Sapiens
MASLGANPRRTPQGPRPGAASSGFPSPAPVPGPREAEEEEVEEEEELAEIHLCVLWNSGYLGIAYYDTSDSTIHFMPDAPDHESLKLLQRVLDEINPQSVVTSAKQDENMTRFLGKLASQEHREPKRPEIIFLPSVDFGLEISKQRLLSGNYSFIPDAMTATEKILFLSSIIPFDCLLTVRALGGLLKFLGRRRIGVELEDYNVSVPILGFKKFMLTHLVNIDQDTYSVLQIFKSESHPSVYKVASGLKEGLSLFGILNRCHCKWGEKLLRLWFTRPTHDLGELSSRLDVIQFFLLPQNLDMAQMLHRLLGHIKNVPLILKRMKLSHTKVSDWQVLYKTVYSALGLRDACRSLPQSIQLFRDIAQEFSDDLHHIASLIGKVVDFEGSLAENRFTVLPNIDPEIDEKKRRLMGLPSFLTEVARKELENLDSRIPSCSVIYIPLIGFLLSIPRLPSMVEASDFEINGLDFMFLSEEKLHYRSARTKELDALLGDLHCEIRDQETLLMYQLQCQVLARAAVLTRVLDLASRLDVLLALASAARDYGYSRPRYSPQVLGVRIQNGRHPLMELCARTFVPNSTECGGDKGRVKVITGPNSSGKSIYLKQLRIHLPWPLHLHDRPQPGGESSEQCHCTVAGPY

SEQ ID NO: 8981 - protein, 508 aa, Homo Sapiens
MWPVLLFVFLSQTVYSALGLRDACRSLPQSIQLFRDIAQEFSDDLHHIASLIGKVVDFEGSLAENRFTVLPNIDPEIDEKKRRLMGLPSFLTEVARKELENLDSRIPSCSVIYIPLIGFLLSIPRLPSMVEASDFEINGLDFMFLSEEKLHYRSARTKELDALLGDLHCEIRDQETLLMYQLQCQVLARAAVLTRVLDLASRLDVLLALASAARDYGYSRPRYSPQVLGVRIQNGRHPLMELCARTFVPNSTECGGDKGRVKVITGPNSSGKSIYLKQVGLITFMALVGSFVPAEEAEIGAVDAIFTRIHSCESISLGLSTFMIDLNQVAKAVNNATAQSLVLIDEFGKGTNTVDGLALLAAVLRHWLARGPTCPHIFVATNFLSLVQLQLLPQGPLVQYLTMETCEDGNDLVFFYQVCEGVAKASHASHTAAQAGLPDKLVARGKEVSDLIRSGKPIKPVKDLLKKNQMENCQTLVDKFMKLDLEDPNLDLNVFMSQEVLPAATSIL

SEQ ID NO: 8982 - protein, 156 aa, Homo Sapiens
TAQSLVLIDEFGKGTNTVDGLALLAAVLRHWLARGPTCPHIFVATNFLSLVQLQLLPQGPLVQYLVCEGVAKASHASHTAAQAGLPDKLVARGKEVSDLIRSGKPIKPVKDLLKKNQMENCQTLVDKFMKLDLEDPNLDLNVFMSQEVLPAATSIL

SEQ ID NO: 8983 - protein, 159 aa, Homo Sapiens
  misc_feature (1)..(1): Xaa can be any naturally occurring amino acid
XDAPDHESLKLLQRVLDEINPQSVVTSAKQDENMTRFLGKLASQEHREPKRPEIIFLPSVDFGLEISKQRLLSGNYSFIPDAMTATEKILFLSSIIPFDCLLTVRALGGLLKFLGRRRIGVELEDYNVSVPILGFKKFMLTHLVNIDQDTYRNPQQMPL

SEQ ID NO: 8984 - protein, 43 aa, Homo Sapiens
  misc_feature (1)..(1): Xaa can be any naturally occurring amino acid
XRIGVELEDYNVSVPILGFKKFMLTHLVNIDQDTYRNPQQMPL

SEQ ID NO: 8985 - protein, 170 aa, Homo Sapiens
MALPTARPLLGSCGTPALGSLLFLLFSLGWVQPSRTLAGETGQEAAPLDGVLANPPNISSLSPRQLLGFPCAEVSGLSTERVRELAVALAQKNVKLSTEQLRCLAHRLSEPPEDLDALPLDLLLFLNPDAFSGPQACTRFFSRITKANVDLLPRGAPERQRLLPAALACW

SEQ ID NO: 8986 - protein, 333 aa, Homo Sapiens [sequence omitted]

SEQ ID NO: 8987 - protein, 630 aa, Homo Sapiens
MALPTARPLLGSCGTPALGSLLFLLFSLGWVQPSRTLAGETGQEAAPLDGVLANPPNISSLSPRQLLGFPCAEVSGLSTERVRELAVALAQKNVKLSTEQLRCLAHRLSEPPEDLDALPLDLLLFLNPDAFSGPQACTRFFSRITKANVDLLPRGAPERQRLLPAALACWGVRGSLLSEADVRALGGLACDLPGRFVAESAEVLLPRLVSCPGPLDQDQQEAARAALQGGGPPYGPPSTWSVSTMDALRGLLPVLGQPIIRSIPQGIVAAWRQRSSRDPSWRQPERTILRPRFRREVEKTACPSGKKAREIDESLIFYKKWELEACVDAALLATQMDRVNAIPFTYEQLDVLKHKLDELYPQGYPESVIQHLGYLFLKMSPEDIRKWNVTSLETLKALLEVNKGHEMSPQAPRRPLPQVATLIDRFVKGRGQLDKDTLDTLTAFYPGYLCSLSPEELSSVPPSSIWAVRPQDLDTCDPRQLDVLYPKARLAFQNMNGSEYFVKIQSFLGGAPTEDLKALSQQNVSMDLATFMKLRTDAVLPLTVAEVQKLLGPHVEGLKAEERHRPVRDWILRQRQDDLDTLGLGLQGGIPNGYLVLDLSMQEALSGTPCLLGPGPVLTVLALLLASTLA

SEQ ID NO: 8988 - protein, 622 aa, Homo Sapiens
MALPTARPLLGSCGTPALGSLLFLLFSLGWVQPSRTLAGETGQEAAPLDGVLANPPNISSLSPRQLLGFPCAEVSGLSTERVRELAVALAQKNVKLSTEQLRCLAHRLSEPPEDLDALPLDLLLFLNPDAFSGPQACTRFFSRITKANVDLLPRGAPERQRLLPAALACWGVRGSLLSEADVRALGGLACDLPGRFVAESAEVLLPRLVSCPGPLDQDQQEAARAALQGGGPPYGPPSTWSVSTMDALRGLLPVLGQPIIRSIPQGIVAAWRQRSSRDPSWRQPERTILRPRFRREVEKTACPSGKKAREIDESLIFYKKWELEACVDAALLATQMDRVNAIPFTYEQLDVLKHKLDELYPQGYPESVIQHLGYLFLKMSPEDIRKWNVTSLETLKALLEVNKGHEMSPQVATLIDRFVKGRGQLDKDTLDTLTAFYPGYLCSLSPEELSSVPPSSIWAVRPQDLDTCDPRQLDVLYPKARLAFQNMNGSEYFVKIQSFLGGAPTEDLKALSQQNVSMDLATFMKLRTDAVLPLTVAEVQKLLGPHVEGLKAEERHRPVRDWILRQRQDDLDTLGLGLQGGIPNGYLVLDLSMQEALSGTPCLLGPGPVLTVLALLLASTLA

SEQ ID NO: 8989 - protein, 622 aa, Homo Sapiens; identical to SEQ ID NO: 8988

SEQ ID NO: 8990 - protein, 622 aa, Homo Sapiens; identical to SEQ ID NO: 8988

SEQ ID NO: 8991 - protein, 398 aa, Homo Sapiens
VEKTACPSGKKAREIDESLIFYKKWELEACVDAALLATQMDRVNAIPFTYEQLDVLKHKLDELYPQGYPESVIQHLGYLFLKMSPEDIRKWNVTSLETLKALLEVNKGHEMSPQVATLIDRFVKGRGQLDKDTLDTLTAFYPGYLCSLSPEELSSVPPSSIWAVRPQDLDTCDPRQLDVLYPKARLAFQNMNGSEYFVKIQSFLGGAPTEDLKALSQQNVSMDLATFMKLRTDAVLPLTVAEVQKLLGPHVEGLKAEERHRPVRDWILRQRQDDLDTLGLGLQGGIPNGYLVLDLSMQGGRGGQARAGGRAGGVEVGALSHPSLCRGPLGDALPPRTWTCSHRPGTAPSLHPGLRAPLPCWPQPCWGSPPGQEQARVVPVPPQENSRSVNGNMPPADT

SEQ ID NO: 8992 - protein, 334 aa, Homo Sapiens
  misc_feature (1)..(1): Xaa can be any naturally occurring amino acid
XSWRQPERTILRPRFRREVEKTACPSGKKAREIDESLIFYKKWELEACVDAALLATQMDRVNAIPFTYEQLDVLKHKLDELYPQGYPESVIQHLGYLFLKMSPEDIRKWNVTSLETLKALLEVNKGHEMSPQVATLIDRFVKGRGQLDKDTLDTLTAFYPGYLCSLSPEELSSVPPSSIWAVRPQDLDTCDPRQLDVLYPKARLAFQNMNGSEYFVKIQSFLGGAPTEDLKALSQQNVSMDLATFMKLRTDAVLPLTVAEVQKLLGPHVEGLKAEERHRPVRDWILRQRQDDLDTLGLGLQGGIPNGYLVLDLSMQGPGPVLTVLALLLASTLA

SEQ ID NO: 8993 - protein, 114 aa, Homo Sapiens
MNVLLGSVVIFATFVTLCNASCYFIPNEGVPGDSTRKCMDLKGNKHPINSEWQTDNCETCTCYETEISCCTLVSTPVGYDKDNCQRIFKKEDCKYIVVEKKDPKKTCSVSEWII

SEQ ID NO: 8994 - protein, 77 aa, Homo Sapiens
MNVLLGSVVIFATFVTLCNASCYFIPNEGVPGDSTRMFLHLWVMTKTTAKESSRRRTASISWWRRRTQKRPVLSVNG

SEQ ID NO: 8995 - protein, 59 aa, Homo Sapiens
MAVFGMGCFWGAERKFWVLKGVYSTQVGFAGGYTSNPTYKEVCSDVQNNSMFISLFKSF

SEQ ID NO: 8996 - protein, 82 aa, Homo Sapiens
MAVFGMGCFWGAERKFWVLKGVYSTQVGFAGGYTSNPTYKEVCSEKTGHAEVVRVVYQPEHMSFEELLKVFWENHDPTQGMR

SEQ ID NO: 8997 - protein, 169 aa, Homo Sapiens
MAVFGMGCFWGAERKFWVLKGVYSTQVGFAGGYTSNPTYKEVCSEKTGHAEVVRVVYQPEHMSFEELLKVFWENHDPTQGMRQGNDHGTQYRSAIYPTSAKQMEAALSSKENYQKVLSEHGFGPITTDIREGQTFYYAEDYHQQYLSKNPNGYCGLGGTGVSCPVGIKK

SEQ ID NO: 8998 - protein, 192 aa, Homo Sapiens
MCSEPKHHVNGNRTVEPFPEGTQMAVFGMGCFWGAERKFWVLKGVYSTQVGFAGGYTSNPTYKEVCSEKTGHAEVVRVVYQPEHMSFEELLKVFWENHDPTQGMRQGNDHGTQYRSAIYPTSAKQMEAALSSKENYQKVLSEHGFGPITTDIREGQTFYYAEDYHQQYLSKNPNGYCGLGGTGVSCPVGIKK

SEQ ID NO: 8999 - protein, 195 aa, Homo Sapiens
MLSATRRACQLLLLHSLFPVPRMGNSASNIVSPQEALPGRKEQTPVAAKHHVNGNRTVEPFPEGTQMAVFEKTGHAEVVRVVYQPEHMSFEELLKVFWENHDPTQGMRQGNDHGTQYRSAIYPTSAKQMEAALSSKENYQKVLSEHGFGPITTDIREGQTFYYAEDYHQQYLSKNPNGYCGLGGTGVSCPVGIKK

SEQ ID NO: 9000 - protein, 213 aa, Homo Sapiens
MLSATRRACQLLLLHSLFPVPRMGNSASNIVSPQEALPGRKEQTPVAAKHHVNGNRTVEPFPEGTQMAVFGMGCFWGAERKFWVLKGVYSTQVGFAGGYTSNPTYKEVCSEKTGHAEVVRVVYQPEHMSFEELLKVFWENHDPTQGMRQGNDHGTQYRSAIYPTSAKQMEAALSSKENYQKLVLPCSSSAMLGLTAASSAQLAWVQPSSRKHY

SEQ ID NO: 9001 - protein, 235 aa, Homo Sapiens
MLSATRRACQLLLLHSLFPVPRMGNSASNIVSPQEALPGRKEQTPVAAKHHVNGNRTVEPFPEGTQMAVFGMGCFWGAERKFWVLKGVYSTQVGFAGGYTSNPTYKEVCSEKTGHAEVVRVVYQPEHMSFEELLKVFWENHDPTQGMRQGNDHGTQYRSAIYPTSAKQMEAALSSKENYQKVLSEHGFGPITTDIREGQTFYYAEDYHQQYLSKNPNGYCGLGGTGVSCPVGIKK

SEQ ID NO: 9002 - protein, 91 aa, Homo Sapiens
  misc_feature (1)..(1): Xaa can be any naturally occurring amino acid
XKTGHAEVVRVVYQPEHMSFEELLKVFWENHDPTQGMRQGNDHGTQYRSAIYPTSAKQMEAALSSKENYQKVPKHVHWKKRTQTGLQTEGR

SEQ ID NO: 9003 - protein, 182 aa, Homo Sapiens
MARLLWLLRGLTLGTAPRRAVRGQAGGGGPGTGPGLGEAGSLATCELPLAKSEWQKKLTPEQFYVTREKGTEPPFSGIYLNNKEAGMYHCVCCDSPLFSSEKKYCSGTGWPSFSEAHGTSGSDESHTGILRRLDTSLGSARTEVVCKQCEAHLGHVFPDGPGPNGQRFCINSVALKFKPRKH

SEQ ID NO: 9004 - protein, 120 aa, Homo Sapiens
  misc_feature (1)..(1): Xaa can be any naturally occurring amino acid
XSLATCELPLAKSEWQKKLTPEQFYVTREKGTEPPFSGIYLNNKEAGMYHCVCCDSPLFRSLLDIQKEVFSIKGSRSPSTSRGNGFDSEVLRKSTALALGGLRFPRLMVRLALMKATQGS

SEQ ID NO: 9005 - protein, 84 aa, Homo Sapiens
GEYTHHKDPGIYKCVVCGTPLFKSETKFDSGSGWPSFHDVINSEAITFTDDFSYGMHRVETSCSQQEGPHQMLPLNLGFPGLQN

SEQ ID NO: 9006 - protein, 117 aa, Homo Sapiens
MSAFNLLHLVTKSQPVALRACGLPSGSCRDKKNCKVVFSQQELRKRLTPLQYHVTQEKGTESAFEGEYTHHKDPGIYKCVVCGTPLFKSETKFDSGSGWPSFHDVINSEAITFTDDF

SEQ ID NO: 9007 - protein, 164 aa, Homo Sapiens
MSAFNLLHLVTKSQPVALRACGLPSGSCRDKKNCKVVFSQQELRKRLTPLQYHVTQEKGTESAFEGEYTHHKDPGIYKCVVCGTPLFKSETKFDSGSGWPSFHDVINSEAITFTDDFSYGMHRVETSCSQCGAHLGHIFDDGPRPTGKRYCINSAALSFTPADS

SEQ ID NO: 9008 - protein, 185 aa, Homo Sapiens
MSAFNLLHLVTKSQPVALRACGLPSGSCRDKKNCKVVFSQQELRKRLTPLQYHVTQEKGTESAFEGEYTHHKDPGIYKCVVCGTPLFKSETKFDSGSGWPSFHDVINSEAITFTDDFSYGMHRVETSCSQCGAHLGHIFDDGPRPTGKRYCINSAALSFTPADSSGTAEGGSGVASPAQADKAEL

SEQ ID NO: 9009 - protein, 185 aa, Homo Sapiens; identical to SEQ ID NO: 9008

SEQ ID NO: 9010 - protein, 185 aa, Homo Sapiens; identical to SEQ ID NO: 9008

SEQ ID NO: 9011 - protein, 185 aa, Homo Sapiens; identical to SEQ ID NO: 9008

SEQ ID NO: 9012 - protein, 185 aa, Homo Sapiens; identical to SEQ ID NO: 9008

SEQ ID NO: 9013 - protein, 185 aa, Homo Sapiens; identical to SEQ ID NO: 9008

SEQ ID NO: 9014 - protein, 44 aa, Homo Sapiens
MSPRRTLPRPLSLCLSLCLCLCLAAALGSAQSALAPVLCFSFCW

SEQ ID NO: 9015 - protein, 192 aa, Homo Sapiens
MSPRRTLPRPLSLCLSLCLCLCLAAALGSAQSGSCRDKKNCKVVFSQQELRKRLTPLQYHVTQEKGTESAFEGEYTHHKDPGIYKCVVCGTPLFKSETKFDSGSGWPSFHDVINSEAITFTDDFSYGMHRVETSCSQCGAHLGHIFDDGPRPTGKRYCINSAALSFTPADSSGTAEGGSGVASPAQADKAEL

SEQ ID NO: 9016 - protein, 160 aa, Homo Sapiens
MSPRRTLPRPLSLCLSLCLCLCLAAALGSAQSGSCRDKKNCKVVFSQQELRKRLTPLQYHVTQEKGTESAFEGEYTHHKDPGIYKCVVCGTPLFKSETKFDSGSGWPSFHDVINSEAITFTDDFSYGMHRVETSCSQVSSSFLKTQYIAFRTPGCAKYSN

SEQ ID NO: 9017 - protein, 117 aa, Homo Sapiens
  misc_feature (1)..(1): Xaa can be any naturally occurring amino acid
XLRKRLTPLQYHVTQEKGTESAFEGEYTHHKDPGIYKCVVCGTPLFKSETKFDSGSGWPSFHDVINSEAITFTDDFSYGMHRVETSCSQQEGPHQMLPLNLGFPGLQNCEPINFYSF

SEQ ID NO: 9018 - protein, 174 aa, Homo Sapiens
  misc_feature (1)..(1): Xaa can be any naturally occurring amino acid
XRRRLPGLSMSPRRTLPRPLSLCLSLCLCLCLAAALGSAQSGSCRDKKNCKVVFSQQELRKRLTPLQYHVTQEKGTESAFEGEYTHHKDPGIYKCVVCGTPLFKSETKFDSGSGWPSFHDVINSEAITFTDDFSYGMHRVETSCSQQEGPHQMLPLNLGFPGLQNCEPINFYSF

SEQ ID NO: 9019 - protein, 725 aa, Homo Sapiens
MGLWWVTVQPPARRMGWLPLLLLLTQCLGVPGQRSPLNDFQVLRGTELQHLLHAVVPGPWQEDVADAEECAGRCGPLMDCRAFHYNVSSHGCQLLPWTQHSPHTRLRRSGRCDLFQKKDYVRTCIMNNGVGYRGTMATTVGGLPCQAWSHKFPNDHKYTPTLRNGLEENFCRNPDGDPGGPWCYTTDPAVRFQSCGIKSCREAACVWCNGEEYRGAVDRTESGRECQRWDLQHPHQHPFEPGKFLDQGLDDNYCRNPDGSERPWCYTTDPQIEREFCDLPRCGSEAQPRQEATTVSCFRGKGEGYRGTANTTTAGVPCQRWDAQIPHQHRFTPEKYACKDLRENFCRNPDGSEAPWCFTLRPGMRAAFCYQIRRCTDDVRPQDCYHGAGEQYRGTVSKTRKGVQCQRWSAETPHKPQFTFTSEPHAQLEENFCRNPDGDSHGPWCYTMDPRTPFDYCALRRCADDQPPSILDPPDQVQFEKCGKRVDRLDQRRSKLRVVGGHPGNSPWTVSLRNRQGQHFCGGSLVKEQWILTARQCFSSCHMPLTGYEVWLGTLFQNPQHGEPSLQRVPVAKMVCGPSGSQLVLLKLERSVTLNQRVALICLPPEWYVVPPGTKCEIAGWGETKGTGNDTVLNVALLNVISNQECNIKHRGRVRESEMCTEGLLAPVGACEGDYGGPLACFTHNCWVLEGIIIPNRVCARSRWPAVFTRVSVFVDWIHKVMRLG

SEQ ID NO: 9020 - protein, 195 aa, Homo Sapiens
  misc_feature (1)..(1): Xaa can be any naturally occurring amino acid
XAGPAFLRGVSSEGAVDTDCPAVLLLLNPQHGEPSLQRVPVAKMVCGPSGSQLVLLKLERSVTLNQRVALICLPPEWYVVPPGTKCEIAGWGETKGTGNDTVLNVALLNVISNQECNIKHRGRVRESEMCTEGLLAPVGACEGDYGGPLACFTHNCWVLEGIIIPNRVCARSRWPAVFTRVSVFVDWIHKVMRLG

SEQ ID NO: 9021 - protein, 375 aa, Homo Sapiens
MQKLQLCVYIYLFMLIVAGPVDLNENSEQKENVEKEGLCNACTWRQNTKSSRIEAIKIQILSKLRLETAPNISKDVIRQLLPKAPPLRELIDQYDVQRDDSSDGSLEDDDYHATTETIITMPTESDFLMQVDGKPKCCFFKFSSKIQYNKVVKAQLWIYLRPVETPTTVFVQILRLIKPMKDGTRYTGIRSLKLDMNPGTGIWQSIDVKTVLQNWLKQPESNLGIEIKALDENGHDLAVTFPGPGEDGLNPFLEVKVTDTPKRSRRDFGLDCDEHSTESRCCRYPLTVDFEAFGWDWIIAPKRYKANYCSGECEFVFLQKYPHTHLVHQANPRGSAGPCCTPTKMSPINMLYFNGKEQIIYGKIPAMVVDRCGCS

SEQ ID NO: 9022 - protein, 62 aa, Homo Sapiens
MDPNCSCAAAGVSCTCASSCKCKECKCTSCKKSCCSCCPVGCAKCAQGCICKGASEKCSCCA

SEQ ID NO: 9023 - protein, 39 aa, Homo Sapiens
MDPNCSCAAGCCSCCPVGCAKCAQGCICKGASEKCSCCA

SEQ ID NO: 9024 - protein, 61 aa, Homo Sapiens
MDPNCSCAAGVSCTCASSCKCKECKCTSCKKSCCSCCPVGCAKCAQGCICKGASEKCSCCA

SEQ ID NO: 9025 - protein, 68 aa, Homo Sapiens
MDPNCSCAAGVSCTCASSCKCKECKCTSCKKSECGAISRNLGLWLRLGGNPRLSLSACFWGTGLPLSL

SEQ ID NO: 9026 - protein, 36 aa, Homo Sapiens
MAATSLMSALAARLLQPAHSCSLRLRPFHLAAVRAY

SEQ ID NO: 9027 - protein, 267 aa, Homo Sapiens
MAATSLMSALAARLLQPAHSCSLRLRPFHLAAVRNEAVVISGRKLAQQIKQEVRQEVEEWVASGNKRPHLSVILVGENPASHSYVLNKTRAAAVVEHIDERRICNAVSPDKDVDGFHVINVGRMCLDQYSMLPATPWGVWEIIKRTGIPTLGKNVVVAGRSKNVGMPIAMLLHTDGAHERPGGDATVTISHRYTPKEQLKKHTILADIVISAAGVRQKAGYITPVPGGVGPMTVAMLMKNTIIAAKKVLRLEEREVLKSKELGVATN

SEQ ID NO: 9028 - protein, 222 aa, Homo Sapiens
MAATSLMSALAARLLQPAHSCSLRLRPFHLAAVRNEAVVISGRKLAQQIKQEVRQEVEEWVASGNKRPHLSVILVGENPASHSYVLNKTRAAAVVGDATVTISHRYTPKEQLKKHTILADIVISAAGIPNLITADMIKEGAAVIDVGINRVHDPVTAKPKLVGDVDFEGVRQKAGYITPVPGGVGPMTVAMLMKNTIIAAKKVLRLEEREVLKSKELGVATN

SEQ ID NO: 9029 - protein, 350 aa, Homo Sapiens
MAATSLMSALAARLLQPAHSCSLRLRPFHLAAVRNEAVVISGRKLAQQIKQEVRQEVEEWVASGNKRPHLSVILVGENPASHSYVLNKTRAAAVVGINSETIMKPASISEEELLNLINKLNNDDNVDGLLVQLPLPEHIDERRICNAVSPDKDVDGFHVINVGRMCLDQYSMLPATPWGVWEIIKRTGIPTLGKNVVVAGRSKNVGMPIAMLLHTDGAHERPGGDATVTISHRYTPKEQLKKHTILADIVISAAGIPNLITADMIKEGAAVIDVGINRVHDPVTAKPKLVGDVDFEGVRQKAGYITPVPGGVGPMTVAMLMKNTIIAAKKVLRLEEREVLKSKELGVATN

SEQ ID NO: 9030 - protein, 37 aa, Homo Sapiens
MAATSLMSALAARLLQPAHSCSLRLRPFHLAAVRNQQ

SEQ ID NO: 9031 - protein, 292 aa, Homo Sapiens
MAGARAAAAAASAGSSASSGNQPPQELGLGELLEEFSRTQYRAKDGSGTGGSKCWDLVQQTQNYLKLLLSLVNSDDDSGLLVHCISGWDRTPLFISLLRLSLWADGLIHTSLKPTEILYLTVAYDWFLFGHMLVDRLSKGEEIFFFCFNFLKHITSEEFSALKTQRRKSLPARDGGFTLEDICMLRRKDRGSTTSLGSDFSLVMESSPGATGSFTYEAVELVPAGAPTQAAWLAALSDRETRLQEVRSAFLAAYSSTVGLRAVAPSPSGAIGGLLEQFARGVGLRSISSNAL

SEQ ID NO: 9032 - protein, 71 aa, Homo Sapiens
MAGARAAAAAASAGSSASSGNQPPQELGLGELLEEFSRTQYRAKDGSGTGGSKSSYRQTWRASCQLRPSPP

SEQ ID NO: 9033 - protein, 158 aa, Homo Sapiens
MAGARAAAAAASAGSSASSGNQPPQELGLGELLEEFSRTQYRAKDGSGTGGSKVERIEKRCLELFGRDYCFSVIPNTNGDICGHYPRHIVFLEYESSEKEKDTFESTVQGVQMMPGQMWRTSRRRTVLFEVVTRIFLIRSEAMTSSCFDTCQSNTSVT

SEQ ID NO: 9034 - protein, 188 aa, Homo Sapiens
MAGARAAAAAASAGSSASSGNQPPQELGLGELLEEFSRTQYRAKDGSGTGGSKVERIEKRCLELFGRDYCFSVIPNTNGDICGHYPRHIVFLEYESSEKEKDTFESTVQVSKLQDLIHRSKMARCRGRFVCPVILFKGKGVQMMPGQMWRTSRRRTVLFEVVTRIFLIRSEAMTSSCFDTCQSNTSVT

SEQ ID NO: 9035 - protein, 650 aa, Homo Sapiens
MAGARAAAAAASAGSSASSGNQPPQELGLGELLEEFSRTQYRAKDGSGTGGSKVERIEKRCLELFGRDYCFSVIPNTNGDICGHYPRHIVFLEYESSEKEKDTFESTVQVSKLQDLIHRSKMARCRGRFVCPVILFKGKHICRSATLAGWGELYGRSGYNYFFSGGADDAWADVEDVTEEDCALRSGDTHLFDKVRGYDIKLLRYLSVKYICDLMVENKKVKFGMNVTSSEKVDKAQRYADFTLLSIPYPGCEFFKEYKDRDYMAEGLIFNWKQDYVDAPLSIPDFLTHSLNIDWSQYQCWDLVQQTQNYLKLLLSLVNSDDDSGLLVHCISGWDRTPLFISLLRLSLWADGLIHTSLKPTEILYLTVAYDWFLFGHMLVDRLSKGEEIFFFCFNFLKHITSEEFSALKTQRRKSLPARDGGFTLEDICMLRRKDRGSTTSLGSDFSLVMESSPGATGSFTYEAVELVPAGAPTQAAWRKSHSSSPQSVLWNRPQPSEDRLPSQQGLAEARSSSSSSSNHSDNFFRMGSSPLEVPKPRSVDHPLPGSSLSTDYGSWQMVTGCGSIQERAVLHTDSSLPFSFPDELPNSCLLAALSDRETRLQEVRSAFLAAYSSTVGLRAVAPSPSGAIGGLLEQFARGVGLRSISSNAL

SEQ ID NO: 9036 - protein, 598 aa, Homo Sapiens
MAGARAAAAAASAGSSASSGNQPPQELGLGELLEEFSRTQYRAKDGSGTGGSKVERIEKRCLELFGRDYCFSVIPNTNGDICGHYPRHIVFLEYESSEKEKDTFESTVQVSKLQDLIHRSKMARCRGRFVCPVILFKGKHICRSATLAGWGELYGRSGYNYFFSGGADDAWADVEDVTEEDCALRSGDTHLFDKVRGYDIKLLRYLSVKYICDLMVENKKVKFGMNVTSSEKVDKAQRYADFTLLSIPYPGCEFFKEYKDRDYMAEGLIFNWKQDYVDAPLSIPDFLTHSLNIDWSQYQCWDLVQQTQNYLKLLLSLVNSDDDSGLLVHCISGWDRTPLFISLLRLSLWADGLIHTSLKPTEILYLTVAYDWFLFGHMLVDRLSKGEEIFFFCFNFLKHITSEEFSALKTQRRKSLPARDGGFTLEDICMLRRKDRGSTTSLGSDFSLVMESSPGATGSFTYEAVELVPAGAPTQAAWRKSHSSSPQSVLWNRPQPSEDRLPSQQGLAEARSSSSSSSNHSDNFFRMGSSPLEVPKPRLAALSDRETRLQEVRSAFLAAYSSTVGLRAVAPSPSGAIGGLLEQFARGVGLRSISSNAL

SEQ ID NO: 9037 - protein, 538 aa, Homo Sapiens
MAGARAAAAAASAGSSASSGNQPPQELGLGELLEEFSRTQYRAKDGSGTGGSKVERIEKRCLELFGRDYCFSVIPNTNGDICGHYPRHIVFLEYESSEKEKDTFESTVQVSKLQDLIHRSKMARCRGRFVCPVILFKGKHICRSATLAGWGELYGRSGYNYFFSGGADDAWADVEDVTEEDCALRSGDTHLFDKVRGYDIKLLRYLSVKYICDLMVENKKVKFGMNVTSSEKVDKAQRYADFTLLSIPYPGCEFFKEYKDRDYMAEGLIFNWKQDYVDAPLSIPDFLTHSLNIDWSQYQCWDLVQQTQNYLKLLLSLVNSDDDSGLLVHCISGWDRTPLFISLLRLSLWADGLIHTSLKPTEILYLTVAYDWFLFGHMLVDRLSKGEEIFFFCFNFLKHITSEEFSALKTQRRKSLPARDGGFTLEDICMLRRKDRGSTTSLGSDFSLVMESSPGATGSFTYEAVELVPAGAPTQAAWLAALSDRETRLQEVRSAFLAAYSSTVGLRAVAPSPSGAIGGLLEQFARGVGLRSISSNAL

SEQ ID NO: 9038 - protein, 187 aa, Homo Sapiens
MAGARAAAAAASAGSSASSGNQPPQELGLGELLEEFSRTQYRAKDGSGTGGSKVERIEKRCLELFGRDYCFSVIPNTNGDICGHYPRHIVFLEYESSEKEKDTSGDTHLFDKVRGYDIKLLRYLSVKYICDLMVENKKVKFGMNVTSSEKVDKAQRYADFTLLSIPYPVLGSGATNTKLPEAAAFLS

SEQ ID NO: 9039 - protein, 154 aa, Homo Sapiens
MALLILLLVPLLLPDSGSEAYSGCEFFKEYKDRDYMAEGLIFNWKQDYVDAPLSIPDFLTHSLNIDWSQYQCWDLVQQTQNYLKLLLSLVNSDDDSGLLVHCISGWDRTPLFISLLRLSLWADGLIHTSLKPTEILYLTVAYDWFLFGHMLVDR

SEQ ID NO: 9040 - protein, 60 aa, Homo Sapiens
MDAQATTIFSQGVQMMPGQMWRTSRRRTVLFEVVTRIFLIRSEAMTSSCFDTCQSNTSVT

SEQ ID NO: 9041 - protein, 36 aa, Homo Sapiens
MSHCAWPETELELDVGEPVKEPLADLTRKGLRVPYR

SEQ ID NO: 9042 - protein, 24 aa, Homo Sapiens
MATRGFSCLLLVISEIDLSVKRWV

SEQ ID NO: 9043 - protein, 725 aa, Homo Sapiens
MGAASVRAGARLVEVALCSFTVTCLEVMRRFLLLYATQQGQAKAIAEEICEQAVVHGFSADLHCISESDKYDLKTETAPLVVVVSTTGTGDPPDTARKFVKEIQNQTLPVDFFAHLRYGLLGLGDSEYTYFCNGGKIIDKRLQELGARHFYDTGHADDCVGLELVVEPWIAGLWPALRKHFRSSRGQEEISGALPVASPASSRTDLVKSELLHIESQVELLRFDDSGRKDSEVLKQNAVNSNQSNVVIEDFESSLTRSVPPLSQASLNIPGLPPEYLQVHLQESLGQEESQVSVTSADPVFQVPISKAVQLTTNDAIKTTLLVELDISNTDFSYQPGDAFSVICPNSDSEVQSLLQRLQLEDKREHCVLLKIKADTKKKGATLPQHIPAGCSLQFIFTWCLEIRAIPKKAFLRALVDYTSDSAEKRRLQELCSKQGAADYSRFVRDACACLLDLLLAFPSCQPPLSLLLEHLPKLQPRPYSCASSSLFHPGKLHFVFNIVEFLSTATTEVLRKGVCTGWLALLVASVLQPNIHASHEDSGKALAPKISISPRTTNSFHLPDDPSIPIIMVGPGTGIAPFIGFLQHREKLQEQHPDGNFGAMWLFFGCRHKDRDYLFRKELRHFLKHGILTHLKVSFSRDAPVGEEEAPAKYVQDNIQLHGQQVARILLQENGHIYVCGDAKNMAKDVHDALVQIISKEVGVEKLEAMKTLATLKEEKRYLQDIWS

SEQ ID NO: 9044 - protein, 41 aa, Homo Sapiens
MRRFLLLYATQQGQAKAIAEEICEQAVVHGFSADLHCISES

SEQ ID NO: 9045 - protein, 46 aa, Homo Sapiens
MRRFLLLYATQQGQAKAIAEEICEQAVVHGFSADLHCISESDKCEK

SEQ ID NO: 9046 - protein, 58 aa, Homo Sapiens
MRRFLLLYATQQGQAKAIAEEICEQAVVHGFSADLHCISESDKVSVIQNTPTFAMGGR

SEQ ID NO: 9047 - protein, 58 aa, Homo Sapiens; identical to SEQ ID NO: 9046

SEQ ID NO: 9048 - protein, 92 aa, Homo Sapiens
MRRFLLLYATQQGQAKAIAEEICEQAVVHGFSADLHCISESDKYDLKTETAPLVVVVSTTGTGDPPDTARKFVKEIQNQTLPVDFFAHLRSR

SEQ ID NO: 9049 - protein, 112 aa, Homo Sapiens
MRRFLLLYATQQGQAKAIAEEICEQAVVHGFSADLHCISESDKYDLKTETAPLVVVVSTTGTGDPPDTARKFVKEIQNQTLPVDFFAHLRYGLLGLGDSEYTYFCNGGKIID

SEQ ID NO: 9050 - protein, 156 aa, Homo Sapiens
MRRFLLLYATQQGQAKAIAEEICEQAVVHGFSADLHCISESDKYDLKTETAPLVVVVSTTGTGDPPDTARKFVKEIQNQTLPVDFFAHLRYGLLGLGDSEYTYFCNGGKIIDKRLQELGARHFYDTGHADDCVGLELVVEPWIAGLWPALRKHFRS

SEQ ID NO: 9051 - protein, 698 aa, Homo Sapiens
MRRFLLLYATQQGQAKAIAEEICEQAVVHGFSADLHCISESDKYDLKTETAPLVVVVSTTGTGDPPDTARKFVKEIQNQTLPVDFFAHLRYGLLGLGDSEYTYFCNGGKIIDKRLQELGARHFYDTGHADDCVGLELVVEPWIAGLWPALRKHFRSSRGQEEISGALPVASPASSRTDLVKSELLHIESQVELLRFDDSGRKDSEVLKQNAVNSNQSNVVIEDFESSLTRSVPPLSQASLNIPGLPPEYLQVHLQESLGQEESQVSVTSADPVFQVPISKAVQLTTNDAIKTTLLVELDISNTDFSYQPGDAFSVICPNSDSEVQSLLQRLQLEDKREHCVLLKIKADTKKKGATLPQHIPAGCSLQFIFTWCLEIRAIPKKAFLRALVDYTSDSAEKRRLQELCSKQGAADYSRFVRDACACLLDLLLAFPSCQPPLSLLLEHLPKLQPRPYSCASSSLFHPGKLHFVFNIVEFLSTATTEVLRKGVCTGWLALLVASVLQPNIHASHEDSGKALAPKISISPRTTNSFHLPDDPSIPIIMVGPGTGIAPFIGFLQHREKLQEQHPDGNFGAMWLFFGCRHKDRDYLFRKELRHFLKHGILTHLKVSFSRDAPVGEEEAPAKYVQDNIQLHGQQVARILLQENGHIYVCGDAKNMAKDVHDALVQIISKEVGVEKLEAMKTLATLKEEKRYLQDIWS

SEQ ID NO: 9052 - protein, 372 aa, Homo Sapiens
  misc_feature (1)..(1): Xaa can be any naturally occurring amino acid
XFTVTCLEVMRRFLLLYATQQGQAKAIAEEICEQAVVHGFSADLHCISESDKYDLKTETAPLVVVVSTTGTGDPPDTARKFVKEIQNQTLPVDFFAHLRYGLLGLGDSEYTYFCNGGKIIDKRLQELGARHFYDTGHADDCVGLELVVEPWIAGLWPALRKHFRSSRGQEEISGALPVASPASSRTDLVKSELLHIESQVELLRFDDSGRKDSEVLKQNAVNSNQSNVVIEDFESSLTRSVPPLSQASLNIPGLPPEYLQVHLQESLGQEESQVSVTSADPVFQVPISKAVQLTTNDAIKTTLLVELDISNTDFSYQPGDAFSVICPNSDSEVQSLLQRLQLEDKREHCVLLKIKADTKKKGIFASPCGLYQ

SEQ ID NO: 9053 - protein, 160 aa, Homo Sapiens
  misc_feature (1)..(1): Xaa can be any naturally occurring amino acid
XVRAGARLVEVALCRFVPGWRGVGLGDSEYTYFCNGGKIIDKRLQELGARHFYDTGHADDCVGLELVVEPWIAGLWPALRKHFRSSRGQEEISGALPVASPASSRTDLVKSELLHIESQVELLRFDDSGRKDSEVLKQNAVNSNQSNVVIEDFESSLTRS

SEQ ID NO: 9054 - protein, 81 aa, Homo Sapiens
  misc_feature (1)..(1): Xaa can be any naturally occurring amino acid
XVRAGARLVEVALCSFTVTCLEVMRRFLLLYATQQGQAKAIAEEICEQAVVHGFSADLHCISESDKVSVIQNTPTFAMGGR

SEQ ID NO: 9055 - protein, 115 aa, Homo Sapiens
  misc_feature (1)..(1): Xaa can be any naturally occurring amino acid
XVRAGARLVEVALCSFTVTCLEVMRRFLLLYATQQGQAKAIAEEICEQAVVHGFSADLHCISESDKYDLKTETAPLVVVVSTTGTGDPPDTARKFVKEIQNQTLPVDFFAHLRSR

SEQ ID NO: 9056 - protein, 178 aa, Homo Sapiens
MARAPLRPENTIVRGSANQCQDTYRAEELTGHTTGLSLNNDRLYKLTYSTEVLLDRGKGKLQDSVGYRISSNVDVALLWRNPDGDDDQLIQITMKDVNVENVNQQRGEKSIFKGKSPSKIMGKENLEALQRPTLLHLIHGKVKEFYSYQNEAVAIENIKRGLASLFQTQLSSGTTNEV

SEQ ID NO: 9057 - protein, 55 aa, Homo Sapiens
MARAPLRPENTIVRGSANQCQDTYRAEELTGRPSIITRIHKTEEGDRRDGQSDMK

SEQ ID NO: 9058 - protein, 42 aa, Homo Sapiens
MARAPLRPENTIVRGSANQCQDTYRAEELTGSEEGHSLTGCH

SEQ ID NO: 9059 - protein, 56 aa, Homo Sapiens
MEERGGVYAGRGLELVFWEWEVVTVMSVFSRSRIKCVPADVYSFIYSCEYWMKELR

SEQ ID NO: 9060 - protein, 921 aa, Homo Sapiens
MEERGGVYAGRGLELVFWEWEVVTVMSVFSRSRIKCVPADVYSFIYSCHTTGLSLNNDRLYKLTYSTEVLLDRGKGKLQDSVGYRISSNVDVALLWRNPDGDDDQLIQITMKDVNVENVNQQRGEKSIFKGKSPSKIMGKENLEALQRPTLLHLIHGKVKEFYSYQNEAVAIENIKRGLASLFQTQLSSGTTNEVDISGNCKVTYQAHQDKVIKIKALDSCKIARSGFTTPNQVLGVSSKATSVTTYKIEDSFVIAVLAEETHNFGLNFLQTIKGKIVSKQKLELKTTEAGPRLMSGKQAAAIIKAVDSKYTAIPIVGQVFQSHCKGCPSLSELWRSTRKYLQPDNLSKAEAVRNFLAFIQHLRTAKKEEILQILKMENKEVLPQLVDAVTSAQTSDSLEAILDFLDFKSDSSIILQERFLYACGFASHPNEELLRALISKFKGSIGSSDIRETVMIITGTLVRKLCQNEGCKLKAVVEAKKLILGGLEKAEKKEDTRMYLLALKNALLPEGIPSLLKYAEAGEGPISHLATTALQRYDLPFITDEVKKTLNRIYHQNRKVHEKTVRTAAAAIILNNNPSYMDVKNILLSIGELPQEMNKYMLAIVQDILRFEMPASKIVRRVLKEMVAHNYDRFSRSGSSSAYTGYIERSPRSASTYSLDILYSGSGILRRSNLNIFQYIGKAGLHGSQVVIEAQGLEALIAATPDEGEENLDSYAGMSAILFDVQLRPVTFFNGYSDLMSKMLSASGDPISVVKGLILLIDHSQELQLQSGLKANIEVQGGLAIDISGAMEFSLWYRESKTRVKNRVTVVITTDITVDSSFVKAGLETSTETEAGLEFISTVQFSQYPFLVCMQMDKDEAPFRQFEKKYERLSTGRGYVSQKRKESVLAGCEFPLHQENSEMCKVVFAPQPDSTSSGWF

SEQ ID NO: 9061 - protein, 50 aa, Homo Sapiens
MEERGGVYAGRGLELVFWEWEVVTVMSVFSRSRIKCVPADVYSFIYSCPV

SEQ ID NO: 9062 - protein, 72 aa, Homo Sapiens
MEERGGVYAGRGLELVFWEWEVVTVMSVFSRSRIKCVPADVYSFIYSCRPSIITRIHKTEEGDRRDGQSDMK

SEQ ID NO: 9063 - protein, 59 aa, Homo Sapiens
MEERGGVYAGRGLELVFWEWEVVTVMSVFSRSRIKCVPADVYSFIYSCSEEGHSLTGCH

SEQ ID NO: 9064 - protein, 894 aa, Homo Sapiens
MILLAVLFLCFISSYSASVKGHTTGLSLNNDRLYKLTYSTEVLLDRGKGKLQDSVGYRISSNVDVALLWRNPDGDDDQLIQITMKDVNVENVNQQRGEKSIFKGKSPSKIMGKENLEALQRPTLLHLIHGKVKEFYSYQNEAVAIENIKRGLASLFQTQLSSGTTNEVDISGNCKVTYQAHQDKVIKIKALDSCKIARSGFTTPNQVLGVSSKATSVTTYKIEDSFVIAVLAEETHNFGLNFLQTIKGKIVSKQKLELKTTEAGPRLMSGKQAAAIIKAVDSKYTAIPIVGQVFQSHCKGCPSLSELWRSTRKYLQPDNLSKAEAVRNFLAFIQHLRTAKKEEILQILKMENKEVLPQLVDAVTSAQTSDSLEAILDFLDFKSDSSIILQERFLYACGFASHPNEELLRALISKFKGSIGSSDIRETVMIITGTLVRKLCQNEGCKLKAVVEAKKLILGGLEKAEKKEDTRMYLLALKNALLPEGIPSLLKYAEAGEGPISHLATTALQRYDLPFITDEVKKTLNRIYHQNRKVHEKTVRTAAAAIILNNNPSYMDVKNILLSIGELPQEMNKYMLAIVQDILRFEMPASKIVRRVLKEMVAHNYDRFSRSGSSSAYTGYIERSPRSASTYSLDILYSGSGILRRSNLNIFQYIGKAGLHGSQVVIEAQGLEALIAATPDEGEENLDSYAGMSAILFDVQLRPVTFFNGYSDLMSKMLSASGDPISVVKGLILLIDHSQELQLQSGLKANIEVQGGLAIDISGAMEFSLWYRESKTRVKNRVTVVITTDITVDSSFVKAGLETSTETEAGLEFISTVQFSQYPFLVCMQMDKDEAPFRQFEKKYERLSTGRGYVSQKRKESVLAGCEFPLHQENSEMCKVVFAPQPDSTSSGWF

SEQ ID NO: 9065 - protein, 894 aa, Homo Sapiens; identical to SEQ ID NO: 9064

SEQ ID NO: 9066 - protein, 151 aa, Homo Sapiens
MILLAVLFLCFISSYSASVKGHTTGLSLNNDRLYKLTYSTEVLLDRGKGKLQDSVGYRISSNVDVALLWRNPDGDDDQLIQITMKDVNVENVNQQRGEKSIFKGKSPSKIMGKENLEALQRPTLLHLIHGKVKGRLDSTTFSPTSYFSSLQ

SEQ ID NO: 9067 - protein, 45 aa, Homo Sapiens
MSLVAEAFVSQIAAAEPWPENATLYQQLKGEQILLSDNAASLAVQ

SEQ ID NO: 9068 - protein, 263 aa, Homo Sapiens
MSLVAEAFVSQIAAAEPWPENATLYQQLKGEQILLSDNAASLAVQAFLQMCNLPIKVVCRANAEYMSPSGKVPFIHVGNQVVSELGPIVQFVKAKGHSLSDGLEEVQKAEMKAYMELVNNMLLTAELYLQWCDEATVGEITHARYGSPYPWPLNHILAYQKQWEVKRKMKAIGWGKKTLDQVLEDVDQCCQALSQRLGTQPYFFNKQPTELDALVFGHLYTILTTQLTNDELSEKVKNYSNLLAFCRRIEQHYFEDRGKGRLS

SEQ ID NO: 9069 - protein, 229 aa, Homo Sapiens
MSLVAEAFVSQIAAAEPWPENATLYQQLKGEQILLSDNAASLAVQAFLQMCNLPIKVVCRANAEYMSPSGKVPFIHVGNQVVSELGPIVQFVKAKGHSLSDGLEEVQKAEMKAYMELVNNMLLTAELYLQWCDEATVGEWEVKRKMKAIGWGKKTLDQVLEDVDQCCQALSQRLGTQPYFFNKQPTELDALVFGHLYTILTTQLTNDELSEKVKNYSNLLAFCRRIEQH

SEQ ID NO: 9070 - protein, 207 aa, Homo Sapiens
MSLVAEAFVSQIAGKVPFIHVGNQVVSELGPIVQFVKAKGHSLSDGLEEVQKAEMKAYMELVNNMLLTAELYLQWCDEATVGEITHARYGSPYPWPLNHILAYQKQWEVKRKMKAIGWGKKTLDQVLEDVDQCCQALSQRLGTQPYFFNKQPTELDALVFGHLYTILTTQLTNDELSEKVKNYSNLLAFCRRIEQHYFEDRGKGRLS

SEQ ID NO: 9071 - protein, 37 aa, Homo Sapiens
MSLVAEAFVSQIAGWSAVAQPGLTATSASRVQAILLP

SEQ ID NO: 9072 - protein, 228 aa, Homo Sapiens
ASSTHHSTVPPLTSSNHSTSPQLSTGVSFFFLSFHISNLQFNSSLEDPSTDYYQELQRDISEMFLQIYKQGGFLGLSNIKFRPGSVVVQLTLAFREGTINVHDVETQFNQYKTEAASRYNLTISDVSVSDVPFPFSAQSGAGVPGWGIALLVLVCVLVALAIVYLIALAVCQCRRKNYGQLDIFPARDTYHPMSEYPTYHTHGRYVPPSSTDRSPYEKEWRVDRERLA

SEQ ID NO: 9073 - protein, 135 aa, Homo Sapiens
MTPGTQSPFFLLLLLTVLTATTAPKPATVVTGSGHASSTPGGEKETSATQRSSVPSSTEKNAALHQAQLLLWCTTAPLPGLPQPQPARALHSQFPATTLILLPPLPAIAPRLMPVALTIARSQHRLLPRAAERHF

SEQ ID NO: 9074 - protein, 241 aa, Homo Sapiens
MTPGTQSPFFLLLLLTVLTATTAPKPATVVTGSGHASSTPGGEKETSATQRSSVPSSTEKNAFLQIYKQGGFLGLSNIKFRPGSVVVQLTLAFREGTINVHDVETQFNQYKTEAASRYNLTISDVSVSDVPFPFSAQSGAGVPGWGIALLVLVCVLVALAIVYLIALAVCQCRRKNYGQLDIFPARDTYHPMSEYPTYHTHGRYVPPSSTDRSPYEKVSAGNGGSSLSYTNPAVAATSANL

SEQ ID NO: 9075 - protein, 159 aa, Homo Sapiens
MTPGTQSPFFLLLLLTVLTATTAPKPATVVTGSGHASSTPGGEKETSATQRSSVPSSTEKNAFNSSLEDPSTDYYQELQRDISEMAVCQCRRKNYGQLDIFPARDTYHPMSEYPTYHTHGRYVPPSSTDRSPYEKVSAGNGGSSLSYTNPAVAATSANL

SEQ ID NO: 9076 - protein, 264 aa, Homo Sapiens
MTPGTQSPFFLLLLLTVLTATTAPKPATVVTGSGHASSTPGGEKETSATQRSSVPSSTEKNAFNSSLEDPSTDYYQELQRDISEMFLQIYKQGGFLGLSNIKFRPGSVVVQLTLAFREGTINVHDVETQFNQYKTEAASRYNLTISDVSVSDVPFPFSAQSGAGVPGWGIALLVLVCVLVALAIVYLIALAVCQCRRKNYGQLDIFPARDTYHPMSEYPTYHTHGRYVPPSSTDRSPYEKVSAGNGGSSLSYTNPAVAATSANL

SEQ ID NO: 9077 - protein, 189 aa, Homo Sapiens
MTPGTQSPFFLLLLLTVLTATTAPKPATVVTGSGHASSTPGGEKETSATQRSSVPSSTEKNAFNSSLEDPSTDYYQELQRDISEMSGAGVPGWGIALLVLVCVLVALAIVYLIALAVCQCRRKNYGQLDIFPARDTYHPMSEYPTYHTHGRYVPPSSTDRSPYEKVSAGNGGSSLSYTNPAVAATSANL

SEQ ID NO: 9078 - protein, 80 aa, Homo Sapiens
MTPGTQSPFFLLLLLTVLTATTAPKPATVVTGSGHASSTPGGEKETSATQRSSVPSSTEKNAIPAPTTTKSCRETFLKCE

SEQ ID NO: 9079 - protein, 239 aa, Homo Sapiens
MTPGTQSPFFLLLLLTVLTATTAPKPATVVTGSGHASSTPGGEKETSATQRSSVPSSTEKNAIPAPTTTKSCRETFLKWPGSVVVQLTLAFREGTINVHDVETQFNQYKTEAASRYNLTISDVSVSDVPFPFSAQSGAGVPGWGIALLVLVCVLVALAIVYLIALAVCQCRRKNYGQLDIFPARDTYHPMSEYPTYHTHGRYVPPSSTDRSPYEKVSAGNGGSSLSYTNPAVAATSANL

SEQ ID NO: 9080 - protein, 268 aa, Homo Sapiens
MTPGTQSPFFLLLLLTVLTATTAPKPATVVTGSGHASSTPGGEKETSATQRSSVPSSTEKNALSTGVSFFFLSFHISNLQFNSSLEDPSTDYYQELQRDISEMFLQIYKQGGFLGLSNIKFRPGSVVVQLTLAFREGTINVHDVETQFNQYKTEAASRYNLTISDVSVSDVPFPFSAQSGAGVPGWGIALLVLVCVLVALAIVYLIALAVCQCRRKNYGQLDIFPARDTYHPMSEYPTYHTHGRYVPPSSTDRSPYEKEWRVDRERLA

SEQ ID NO: 9081 - protein, 123 aa, Homo Sapiens
MTPGTQSPFFLLLLLTVLTATTAPKPATVVTGSGHASSTPGGEKETSATQRSSVPSSTEKNALSTGVSFFFLSFHISNLQFNSSLEDPSTDYYQELQRDISEMFLQIYKQGGFLGLSNIKFSE

SEQ ID NO: 9082 - protein, 166 aa, Homo Sapiens
MTPGTQSPFFLLLLLTVLTATTAPKPATVVTGSGHASSTPGGEKETSATQRSSVPSSTEKNASGAGVPGWGIALLVLVCVLVALAIVYLIALAVCQCRRKNYGQLDIFPARDTYHPMSEYPTYHTHGRYVPPSSTDRSPYEKVSAGNGGSSLSYTNPAVAATSANL

SEQ ID NO: 9083 - protein, 484 aa, Homo Sapiens
MTPGTQSPFFLLLLLTVLTATTAPKPATVVTGSGHASSTPGGEKETSATQRSSVPSSTEKNAVSMTSSVLSSHSPGSGSSTTQGQDVTLAPATEPASGSAATWGQDVTSVPVTRPALGSTTPPAHDVTSAPDNKPAPGSTAPPAHGVTSAPDTRPAPGSTAPPAHGVTSAPDNRPALGSTAPPVHNVTSASGSASGSASTLVHNGTSARATTTPASKSTPFSIPSHHSDTPTTLASHSTKTDASSTHHSTVPPLTSSNHSTSPQLSTGVSFFFLSFHISNLQFNSSLEDPSTDYYQELQRDISEMFLQIYKQGGFLGLSNIKFRPGSVVVQLTLAFREGTINVHDVETQFNQYKTEAASRYNLTISDVSVSDVPFPFSAQSGAGVPGWGIALLVLVCVLVALAIVYLIALAVCQCRRKNYGQLDIFPARDTYHPMSEYPTYHTHGRYVPPSSTDRSPYEKVSAGNGGSSLSYTNPAVAATSANL

SEQ ID NO: 9084 - protein, 213 aa, Homo Sapiens
MTPGTQSPFFLLLLLTVLTGSGHASSTPGGEKETSATQRSSVPSSTEKNAVSMTSSVLSSHSPGSGSSTTQGQDVTLAPATEPASGSAATWGQDVTSVPVTRPALGSTTPPAGVPGWGIALLVLVCVLVALAIVYLIALAVCQCRRKNYGQLDIFPARDTYHPMSEYPTYHTHGRYVPPSSTDRSPYEKVSAGNGGSSLSYTNPAVAATSANL

SEQ ID NO: 9085 - protein, 126 aa, Homo Sapiens
MTPGTQSPFFLLLLLTVLTVVTGSGHASSTPGGEKETSATQRSSVPSSTEKNAALHQAQLLLWCTTAPLPGLPQPQPARALHSQFPATTLILLPPLPAIAPRLMPVALTIARSQHRLLPRAAERHF

SEQ ID NO: 9086 - protein, 255 aa, Homo Sapiens
MTPGTQSPFFLLLLLTVLTVVTGSGHASSTPGGEKETSATQRSSVPSSTEKNAFNSSLEDPSTDYYQELQRDISEMFLQIYKQGGFLGLSNIKFRPGSVVVQLTLAFREGTINVHDVETQFNQYKTEAASRYNLTISDVSVSDVPFPFSAQSGAGVPGWGIALLVLVCVLVALAIVYLIALAVCQCRRKNYGQLDIFPARDTYHPMSEYPTYHTHGRYVPPSSTDRSPYEKVSAGNGGSSLSYTNPAVAATSANL

SEQ ID NO: 9087 - protein, 96 aa, Homo Sapiens
MTPGTQSPFFLLLLLTVLTVVTGSGHASSTPGGEKETSATQRSSVPSSTEKNAFNSSLEDPSTDYYQELQRDISEMFLQIYKQGGFLGLSNIKFSE

SEQ ID NO: 9088 - protein, 149 aa, Homo Sapiens
MTPGTQSPFFLLLLLTVLTVVTGSGHASSTPGGEKETSATQRSSVPSSTEKNAFNSSLEDPSTDYYQELQRDISEMFLQIYKQGGFLGLSNIKFSLGLGCQAGASRCWCWSVFWLRWPLSISLPWLSVSAAERTTGSWTSFQPGIPTIL

SEQ ID NO: 9089 - protein, 203 aa, Homo Sapiens
MTPGTQSPFFLLLLLTVLTVVTGSGHASSTPGGEKETSATQRSSVPSSTEKNAIPAPTTTKSCRETFLKCFCRFINKGVFWASPILSSVSDVPFPFSAQSGAGVPGWGIALLVLVCVLVALAIVYLIALAVCQCRRKNYGQLDIFPARDTYHPMSEYPTYHTHGRYVPPSSTDRSPYEKVSAGNGGSSLSYTNPAVAATSANL

SEQ ID NO: 9090 - protein, 230 aa, Homo Sapiens
MTPGTQSPFFLLLLLTVLTVVTGSGHASSTPGGEKETSATQRSSVPSSTEKNAIPAPTTTKSCRETFLKWPGSVVVQLTLAFREGTINVHDVETQFNQYKTEAASRYNLTISDVSVSDVPFPFSAQSGAGVPGWGIALLVLVCVLVALAIVYLIALAVCQCRRKNYGQLDIFPARDTYHPMSEYPTYHTHGRYVPPSSTDRSPYEKVSAGNGGSSLSYTNPAVAATSANL

SEQ ID NO: 9091 - protein, 229 aa, Homo Sapiens
MTPGTQSPFFLLLLLTVLTVVTGSGHASSTPGGEKETSATQRSSVPSSTEKNAIYKQGGFLGLSNIKFRPGSVVVQLTLAFREGTINVHDVETQFNQYKTEAASRYNLTISDVSVSDVPFPFSAQSGAGVPGWGIALLVLVCVLVALAIVYLIALAVCQCRRKNYGQLDIFPARDTYHPMSEYPTYHTHGRYVPPSSTDRSPYEKVSAGNGGSSLSYTNPAVAATSANL

SEQ ID NO: 9092 - protein, 168 aa, Homo Sapiens
MTPGTQSPFFLLLLLTVLTVVTGSGHASSTPGGEKETSATQRSSVPSSTEKNALSTGVSFFFLSFHISNLQFNSSLEDPSTDYYQELQRDISEMAVCQCRRKNYGQLDIFPARDTYHPMSEYPTYHTHGRYVPPSSTDRSPYEKVSAGNGGSSLSYTNPAVAATSANL

SEQ ID NO: 9093 - protein, 198 aa, Homo Sapiens
MTPGTQSPFFLLLLLTVLTVVTGSGHASSTPGGEKETSATQRSSVPSSTEKNALSTGVSFFFLSFHISNLQFNSSLEDPSTDYYQELQRDISEMFLQIYKQGGFLGLSNIKFRPGSVVVQLTLAFREGTINVHDVETQFNQYKTEAASRYNLTISDVSGCLSVPPKELRAAGHLSSPGYLPSYERVPHLPHPWALCAP

SEQ ID NO: 9094 - protein, 273 aa, Homo Sapiens
MTPGTQSPFFLLLLLTVLTVVTGSGHASSTPGGEKETSATQRSSVPSSTEKNALSTGVSFFFLSFHISNLQFNSSLEDPSTDYYQELQRDISEMFLQIYKQGGFLGLSNIKFRPGSVVVQLTLAFREGTINVHDVETQFNQYKTEAASRYNLTISDVSVSDVPFPFSAQSGAGVPGWGIALLVLVCVLVALAIVYLIALAVCQCRRKNYGQLDIFPARDTYHPMSEYPTYHTHGRYVPPSSTDRSPYEKVSAGNGGSSLSYTNPAVAATSANL

SEQ ID NO: 9095 - protein, 475 aa, Homo Sapiens
MTPGTQSPFFLLLLLTVLTVVTGSGHASSTPGGEKETSATQRSSVPSSTEKNAVSMTSSVLSSHSPGSGSSTTQGQDVTLAPATEPASGSAATWGQDVTSVPVTRPALGSTTPPAHDVTSAPDNKPAPGSTAPPAHGVTSAPDTRPAPGSTAPPAHGVTSAPDNRPALGSTAPPVHNVTSASGSASGSASTLVHNGTSARATTTPASKSTPFSIPSHHSDTPTTLASHSTKTDASSTHHSTVPPLTSSNHSTSPQLSTGVSFFFLSFHISNLQFNSSLEDPSTDYYQELQRDISEMFLQIYKQGGFLGLSNIKFRPGSVVVQLTLAFREGTINVHDVETQFNQYKTEAASRYNLTISDVSVSDVPFPFSAQSGAGVPGWGIALLVLVCVLVALAIVYLIALAVCQCRRKNYGQLDIFPARDTYHPMSEYPTYHTHGRYVPPSSTDRSPYEKVSAGNGGSSLSYTNPAVAATSANL

SEQ ID NO: 9096 - protein, 1262 aa, Homo Sapiens
MTPGTQSPFFLLLLLTVLTVVTGSGHASSTPGGEKETSATQRSSVPSSTEKNAVSMTSSVLSSHSPGSGSSTTQGQDVTLAPATEPASGSAATWGQDVTSVPVTRPALGSTTPPAHDVTSAPDNKPAPGSTAPPAHGVTSAPDTRPAPGSTAPQAHGVTSAPDTRPAPGSTAPPAHGVTSAPDTRPAPGSTAPPAHGVTSAPDTRSAPGSTAPAAHGVTSAPDTRSVPGSTAPQAHGVTSAPDTRPAPGSTAPPAHGVTSAPDTRPVPGSTAPPAHGVTSAPDTRPAPGSTAPPAHGVTSAPDTRPAPGSTAPQAHGVTSAPDTRPAPGSTAPPAHGVTSAPDTRPAPGSTAPPAHGVTSAPDTRPAPGSTAPAAHGVTSAPDTRPAPGSTAPQAHGVTSAPDTRPAPGSTAPPAHGVTSAPDTRPAPGSTAPPAHGVTSAPDTRPAPGSTAPPAHGVTSAPDTRPAPGSTAPAAHGVTSAPDTRPAPGSTAPQAHGVTSAPDTRPAPGSTAPPAHGVTSAPDTRPAPGSTAPPAHGVTSAPDTRPAPGSTAPPTHGVTSAPDTSPAPGSTAPPAHGVTSAPDTRPAPGYTAPAAHGVTSAPDTRPAPGSTAPQAHGVTSAPDTRPAPGSTAPPAHGVTSAPDTRPAPGSTAPPAHGVTSAPDTRPAPGSTAPPAHGVTSAPESRPAPGSTARAAHGVTSAPESRPAPGSTAPPAHGVTSAPDTRPAPGSTAPPAHGVTSAPDTRPAPGSTAPPAHGVTSAPDTRPAPGSTAPPAHGVTSAPDTRPAPGSTAPPAHGVTSAPDTRPSPPGSTAPPAHGVTSAPDTRPAPGSTAPPVHGVTSAPDTRPAPGSTAPPAHGVTSAPDTRPAPGSTAPPAHGVTSAPDTRPAPGSTAPPAHGVTSAPDTRRAPGSTPAPGSTAPPAHGVTSAPDTRPAPGSTAPPAHGVTSAPDNRPALGSTAPPVHNVTSASGSASGSASTLVHNGTSARATTTPASKSTPFSIPSHHSDTPTTLASHSTKTDASSTHHSTVPPLTSSNHSTSPQLSTGVSFFFLSFHISNLQFNSSLEDPSTDYYQELQRDISEMFLQIYKQGGFLGLSNIKFRPGSVVVQLTLAFREGTINVHDVETQFNQYKTEAASRYNLTISDVSVSDVPFPFSAQSGAGVPGWGIALLVLVCVLVALAIVYLIALAVCQCRRKNYGQLDIFPARDTYHPMSEYPTYHTHGRYVPPSSTDRSPYEKVSAGNGGSSLSYTNPAVAATSANL

SEQ ID NO: 9097 - protein, 85 aa, Homo Sapiens
TEAASRYNLTISDVSVWGWGARLGHRAAGAGLCSGCAGHCLSHCLGCLSVPPKELRAAGHLSSPGYLPSYERVPHLPHPWALCAP

SEQ ID NO: 9098 - protein, 512 aa, Homo Sapiens
MKAIIHLTLLALLSVNTATNQGNSADAVTTTETATSGPTVAAADTTETNFPETASTTANTPSFPTATSPAPPIISTHSSSTIPTPAPPIISTHSSSTIPIPTAADSESTTNVNSLATSDIITASSPNDGLITMVPSETQSNNEMSPTTEDNQSSGPPTGTALLETSTLNSTGPSNPCQDDPCADNSLCVKLHNTSFCLCLEGYYYNSSTCKKGKVFPGKISVTVSETFDPEEKHSMAYQDLHSEITSLFKDVFGTSVYGQTVILTVSTSLSPRSEMRADDKFVNVTIVTILAETTSDNEKTVTEKINKAIRSSSSNFLNYDLTLRCDYYGCNQTADDCLNGLACDCKSDLQRPNPQSPFCVASSLKCPDACNAQHKQCLIKKSGGAPECACVPGYQEDANGNCQKCAFGYSGLDCKDKFQLILTIVGTIAGIVILSMIIALIVTARSNNKTKHIEEENLIDEDFQNLKLRSTGFTNLGAEGSVFPKVRITASRDSQMQNPYSRHSSMPRPDY

SEQ ID NO: 9099 - protein, 184 aa, Homo Sapiens
MKAIIHLTLLALLSVNTEDNQSSGPPTGTALLETSTLNSTGPSNPCQDDPCADNSLCVKLHNTSFCLCLEGYYYNSSTCKKGKVFPGKISVTVSETFDPEEKHSMAYQDLHSEITSLFKDVFGTSVYGQTVILTVSTSLSPRSEMRADDKFVNVTIVTILAETTSDNEKTVTEKINKAIRSSSS

SEQ ID NO: 9100 - protein, 709 aa, Homo Sapiens
MGCLWGLALPLFFFCWEVGVSGSSAGPSTRRADTAMTTDDTEVPAMTLAPGHAALETQTLSAETSSRASTPAGPIPEAETRGAKRISPARETRSFTKTSPNFMVLIATSVETSAASGSPEGAGMTTVQTITGSDPREAIFDTLCTDDSSEEAKTLTMDILTLAHTSTEAKGLSSESSASSDSPHPVITPSRASESSASSDGPHPVITPSRASESSASSDGPHPVITPSRASESSASSDGPHPVITPSRASESSASSDGPHPVITPSRASESSASSDGPHPVITPSRASESSASSDGPHPVITPSRASESSASSDGPHPVITPSRASESSASSDGPHPVITPSRASESSASSDGLHPVITPSRASESSASSDGPHPVITPSRASESSASSDGPHPVITPSWSPGSDVTLLAEALVTVTNIEVINCSITEIETTTSSIPGASDTDLIPTEGVKASSTSDPPALPDSTEAKPHITEVTASAETLSTAGTTESAAPDATVGTPLPTNSATEREVTAPGATTLSGALVTVSRNPLEETSALSVETPSYVKVSGAAPVSIEAGSAVGKTTSFAGSSASSYSPSEAALKNFTPSETPTMDIATKGPFPTSRDPLPSVPPTTTNSSRGTNSTLAKITTSAKTTMKPPTATPTTARTRPTTDVSAGENGGFLLLRLSVASPEDLTDPRVAERLMQQLHRELHAHAPHFQVSLLRVRRG

SEQ ID NO: 9101 - protein, 723 aa, Homo Sapiens
MGCLWGLALPLFFFCWEVGVSGSSAGPSTRRADTAMTTDDTEVPAMTLAPGHAALETQTLSAETSSRASTPAGPIPEAETRGAKRISPARETRSFTKTSPNFMVLIATSVETSAASGSPEGAGMTTVQTITGSDPREAIFDTLCTDDSSEEAKTLTMDILTLAHTSTEAKGLSSESSASSDSPHPVITPSRASESSASSDGPHPVITPSRASESSASSDGPHPVITPSRASESSASSDGPHPVITPSRASESSASSDGPHPVITPSRASESSASSDGPHPVITPSRASESSASSDGPHPVITPSRASESSASSDGPHPVITPSRASESSASSDGPHPVITPSRASESSASSDGLHPVITPSRASESSASSDGPHPVITPSRASESSASSDGPHPVITPSWSPGSDVTLLAEALVTVTNIEVINCSITEIETTTSSIPGASDTDLIPTEGVKASSTSDPPALPDSTEAKPHITEVTASAETLSTAGTTESAAPDATVGTPLPTNSATEREVTAPGATTLSGALVTVSRNPLEETSALSVETPSYVKVSGAAPVSIEAGSAVGKTTSFAGSSASSYSPSEAALKNFTPSETPTMDIATKGPFPTSRDPLPSVPPTTTNSSRGTNSTLAKITTSAKTTMKPPTATPTTARTRPTTDVSAGENGGFLLLRLSVASPEDLTDPRVAERLMQQMERSLALSPRLECSGVISAHCKLHLLGSRDSPASAS

SEQ ID NO: 9102 - protein, 538 aa, Homo Sapiens
MGCLWGLALPLFFFCWEVGVSGSSAGPSTRRADTAMTTDDTEVPAMTLAPGHAALETQTLSAETSSRASTPAGPIPEAETRGAKRISPARETRSFTKTSPNFMVLIATSVETSAASGSPEGAGMTTVQTITGSDPREAIFDTLCTDDSSEEAKTLTMDILTLAHTSTEAKGLSSESSASSDSPHPVITPSRASESSASSDGPHPVITPSRASESSASSDGPHPVITPSWSPGSDVTLLAEALVTVTNIEVINCSITEIETTTSSIPGASDTDLIPTEGVKASSTSDPPALPDSTEAKPHITEVTASAETLSTAGTTESAAPDATVGTPLPTNSATEREVTAPGATTLSGALVTVSRNPLEETSALSVETPSYVKVSGAAPVSIEAGSAVGKTTSFAGSSASSYSPSEAALKNFTPSETPTMDIATKGPFPTSRDPLPSVPPTTTNSSRGTNSTLAKITTSAKTTMKPPTATPTTARTRPTTDVSAGENGGFLLLRLSVASPEDLTDPRVAERLMQQLHRELHAHAPHFQVSLLRVRRG

SEQ ID NO: 9103 - protein, 674 aa, Homo Sapiens
MTTDDTEVPAMTLAPGHAALETQTLSAETSSRASTPAGPIPEAETRGAKRISPARETRSFTKTSPNFMVLIATSVETSAASGSPEGAGMTTVQTITGSDPREAIFDTLCTDDSSEEAKTLTMDILTLAHTSTEAKGLSSESSASSDSPHPVITPSRASESSASSDGPHPVITPSRASESSASSDGPHPVITPSRASESSASSDGPHPVITPSRASESSASSDGPHPVITPSRASESSASSDGPHPVITPSRASESSASSDGPHPVITPSRASESSASSDGPHPVITPSRASESSASSDGPHPVITPSRASESSASSDGLHPVITPSRASESSASSDGPHPVITPSRASESSASSDGPHPVITPSWSPGSDVTLLAEALVTVTNIEVINCSITEIETTTSSIPGASDTDLIPTEGVKASSTSDPPALPDSTEAKPHITEVTASAETLSTAGTTESAAPDATVGTPLPTNSATEREVTAPGATTLSGALVTVSRNPLEETSALSVETPSYVKVSGAAPVSIEAGSAVGKTTSFAGSSASSYSPSEAALKNFTPSETPTMDIATKGPFPTSRDPLPSVPPTTTNSSRGTNSTLAKITTSAKTTMKPPTATPTTARTRPTTDVSAGENGGFLLLRLSVASPEDLTDPRVAERLMQQLHRELHAHAPHFQVSLLRVRRG

SEQ ID NO: 9104 - protein, 128 aa, Homo Sapiens
  misc_feature (1)..(1): Xaa can be any naturally occurring amino acid
XPTMDIATKGPFPTSRDPLPSVPPTTTNSSRGTNSTLAKITTSAKTTMKPPTATPTTARTRPTTDVSAGENGGFLLLRLSVASPEDLTDPRVAERLMQQLMTQGTHSAHVPSMVGVNPLPIVPGGFQH

SEQ ID NO: 9105 - protein, 3323 aa, Homo Sapiens
MQLLGLLGLLWMLKASPWATGTLSTATSISQVPFPRAEAASAVLSNSPHSRDLAGWPLGVPQLASPAPGHRENAPMTLTTSPHDTLISETLLNSPVSSNTSTTPTSKFAFKVETTPPTVLVYSATTECVYPTSFIITISHPTSICVTTTQVAFTSSYTSTPVTQKPVTTVTSTYSMTTTEKGTSAMTSSPSTTTARETPIVTVTPSSVSATDTTFHTTISSTTRTTERTPLPTGSIHTTTSPTPVFTTLKTAVTSTSPITSSITSTNTVTSMTTTASQPTATNTLSSPTRTILSSTPVLSTETITSGITNTTPLSTLVTTLPTTISRSTPTSETTYTTSPTSTVTDSTTKIAYSTSMTGTLSTETSLPPTSSSLPTTETATTPMTNLVTTTTEISSHSTPSFSSSTIYSTVSTSTTAISSLPPTSGTMVTSTTMTPSSLSTDIPFTTPTTITHHSVGSTGFLTTATDLTSTFTVSSSSAMSTSVIPSSPSIQNTETSSLVSMTSATTPNVRPTFVSTLSTPTSSLLTTFPATYSFSSSMSASSAGTTHTESISSPPASTSTLHTTAESTLAPTTTTSFTTSTTMEPPSTTAATTGTGQTTFTSSTATFPETTTPTPTTDMSTESLTTAMTSPPITSSVTSTNTVTSMTTTTSPPTTTNSFTSLTSMPLSSTPVPSTEVVTSGTINTIPPSILVTTLPTPNASSMTTSETTYPNSPTGPGTNSTTEITYPTTMTETSSTATSLPPTSPLVSTAKTAKTPTTNLVTTTTKTTSHSTTSFTSSTVYSTASTYTTAITSVPTTLGTMVTSTSMISSTVSTGIPTSQPTTITPSSVGISGSLPMMTDLTSVYTVSNMSARPTTVIPSSPTVQNTEISISVSMTSATTPSGGPTFTSTENTPTRSLLTSFPMTHSFSSSMSESSAGTTHTESISSPRGTTSTLHTTVESTPSPTTTTSFTTSTMMEPPSSTVSTTGRGQTTFPSSTATFPETTTLTPTTDISTVSLTTAMTSPPPVSSSITPTNTMTSMRTTTYWPTATNTLSPLTSSILSSTPVPSTEMITSHTTNTTPLSTLVTTLLTTITRSTPTSETTYPTSPTSIVSDSTTEITYSTSITGTLSTATTLPPTSSSLPTTETATMTPTTTLITTTPNTTSLSTPSFTSSTIYSTVSTSTTAISSASPTSGTMVTSTTMTPSSLSTDTPSTTPTTITYPSVGSTGFLTTATDLTSTFTVSSSSAMSTSVIPSSPSIQNTETSSLVSMTSATTPSLRPTITSTDSTLTSSLLTTFPSTYSFSSSMSASSAGTTHTETISSLPASTNTIHTTAESALAPTTTTSFTTSPTMEPPSTTVATTGTGQTTFPSSTATFLETTTLTPTTDFSTESLTTAMTSTPPITSSITPTDTMTSMRTTTSWPTATNTLSPLTSSILSSTPVPSTEVTTSHTTNTNPVSTLVTTLPITITRSTLTSETAYPSSPTSTVTESTTEITYPTTMTETSSTATSLPPTSSLVSTAETAKTPTTNLVTTTTKTTSHSTTSFTSSTIYSTASTPTTAITSVPTTLGTMVTSTSMIPSTVSTGIPTSQPTTITPSSVGISGSLPMMTDLTSVYTVSSMSARPTSVIPSSPTVQNTETSIFVSMMSATTPSGGPTFTSTENTPTRSLLTSFPVTHSFSSSMSASSVGTTHTQSISSPPAITSTLHTTAESTPSPTTTMSFTTFTKMETPSSTVATTGTGQTTFTSSTATSPKTTTLTPTSDISTGSFKTAVSSTPPITSSITSTYTVTSMTTTTPLGPTATNTLPSFTSSVSSSTPVPSTEAITSGTTNTTPLSTLVTTFSNSDTSSTPTSETTYPTSLTSALTDSTTRTTYSTNMTGTLSTVTSLRPTSSSLLTTVTATVPTTNLVTTTTKITSHSTPSFTSSIATTETPSHSTPRFTSSITTTETPSHSTPRFTSSITNTKTTSHSSPSFTSSITTTETTSHNTPSLTSSITTTKTTSHSTPSYTSLITTTTTTSHSTPSFTSSITTTETTSHNTPSLTSSITTTETTSHSTPSFTSSITTETTSHSTPSFTSLITITEITSHSTLSYTTSITTTETPSHSTLSFTSSITTTETTSHSTPSFTSSITTSEMPSHSTPSFTSSITTTENATHSTPNFTSSITTTETTSHSTPSFTSLITTTETTSHRWGTTETTSYSTPSFTSSNTITETTSHSTPSYITSITTTETPSSSTPSFSSSITTTETTSHSTPGFTSSITTTETTSHSTPSFTSSITTTETTSHDTPSFTSSITTSETPSHSTPSSTSLITTTKTTSHSTPSFTSSITTTETTSHSAHSFTSSITTTETTSHNTRSFTSSITTTETNSHSTTSFTSSITTTETTSHSTPSFSSSITTTETPLHSTPGLTSWVTTTKTTSHITPGLTSSITTTETTSHSTPGFTSSITTTETTSESTPSLSSSTIYSTVSTSTTAITSHFTTSETAVTPTPVTPSSLSTDIPTTSLRTLTPSSVGTSTSLTTTTDFPSIPTDISTLPTRTHIISSSPSIQSTETSSLVGTTSPTMSTVRMTLRITENTPISSFSTSIVVIPETPTQTPPVLTSATGTQTSPAPTTVTFGSTDSSTSTLHTLTPSTALSTIVSTSQVPIPSTHSSTLQTTPSTPSLQTSLTSTSEFTTESFTRGSTSTNAILTSFSTIIWSSTPTIIMSSSPSSASITPVFSTTIHSVPSSPYIFSTENVGSASITGFPSLSSSATTSTSSTSSSLTTALTEITPFSYISLPSTTPCPGTITITIVPASPTDPCVEMDPSTEATSPPTTPLTVFPFTTEMVTCPTSISIQTTLTTYMDTSSMMPESESSISPNASSSTGTGTVPTNTVFTSTRLPTSETWLSNSSVIPLPLPGVSTIPLTMKPSSSLPTILRTSSKSTHPSPPTTRTSETPVATTQTPTTLTSRRTTRITSQMTTQSTLTTTAGTCDNGGTWEQGQCACLPGFSGDRCQLQTRCQNGGQWDGLKCQCPSTFYGSSCEFAVEQVDLDVVETEVGMEVSVDQQFSPDLNDNTSQAYRDFNKTFWNQMQKIFADMQGFTFKGVEILSLRNGSIVVDYLVLLEMPFSPQLESEYEQVKTTLKEGLQNASQDVNSCQDSQTLCFKPDSIKVNNNSKTELTPAAICRRAAPTGYEEFYFPLVEATRLRCVTKCTSGVDNAIDCHQGQCVLETSGPTCRCYSTDTHWFSGPRCEVAVHWRALVGGLTAGAALLVLLLLALGVRAVRSGWWGGQRRGRSWDQDRKWFETWDEEVVGTFSNWGFEDDGTDKDTNFYVALENVDTTMKVHIKRPEMTSSSV

SEQ ID NO: 9106 - protein, 3265 aa, Homo Sapiens
MQLLGLLGLLWMLKASPWATGTLSTATSISQVPFPRAEAASAVLSNSPHSRDLAGWPLGVPQLASPAPGHRENAPMTLTTSPHDTLISETLLNSPVSSNTSTTPTSKFAFKVETTPPTVLVYSATTECVYPTSFIITISHPTSICVTTTQVAFTSSYTSTPVTQKPVTTVTSTYSMTTTEKGTSAMTSSPSTTTARETPIVTVTPSSVSATDTTFHTTISSTTRTTERTPLPTGSIHTTTSPTPVFTTLKTAVTSTSPITSSITSTNTVTSMTTTASQPTATNTLSSPTRTILSSTPVLSTETITSGITNTTPLSTLVTTLPTTISRSTPTSETTYTTSPTSTVTDSTTKIAYSTSMTGTLSTETSLPPTSSSLPTTETATTPMTNLVTTTTEISSHSTPSFSSSTIYSTVSTSTTAISSLPPTSGTMVTSTTMTPSSLSTDIPFTTPTTITHHSVGSTGFLTTATDLTSTFTVSSSSAMSTSVIPSSPSIQNTETSSLVSMTSATTPNVRPTFVSTLSTPTSSLLTTFPATYSFSSSMSASSAGTTHTESISSPPASTSTLHTTAESTLAPTTTTSFTTSTTMEPPSTTAATTGTGQTTFTSSTATFPETTTPTPTTDMSTESLTTAMTSPPITSSVTSTNTVTSMTTTTSPPTTTNSFTSLTSMPLSSTPVPSTEVVTSGTINTIPPSILVTTLPTPNASSMTTSETTYPNSPTGPGTNSTTEITYPTTMTETSSTATSLPPTSPLVSTAKTAKTPTTNLVTTTTKTTSHSTTSFTSSTVYSTASTYTTAITSVPTTLGTMVTSTSMISSTVSTGIPTSQPTTITPSSVGISGSLPMMTDLTSVYTVSNMSARPTTVIPSSPTVQNTEISISVSMTSATTPSGGPTFTSTENTPTRSLLTSFPMTHSFSSSMSESSAGTTHTESISSPRGTTSTLHTTVESTPSPTTTTSFTTSTMMEPPSSTVSTTGRGQTTFPSSTATFPETTTLTPTTDISTVSLTTAMTSPPPVSSSITPTNTMTSMRTTTYWPTATNTLSPLTSSILSSTPVPSTEMITSHTTNTTPLSTLVTTLLTTITRSTPTSETTYPTSPTSIVSDSTTEITYSTSITGTLSTATTLPPTSSSLPTTETATMTPTTTLITTTPNTTSLSTPSFTSSTIYSTVSTSTTAISSASPTSGTMVTSTTMTPSSLSTDTPSTTPTTITYPSVGSTGFLTTATDLTSTFTVSSSSAMSTSVIPSSPSIQNTETSSLVSMTSATTPSLRPTITSTDSTLTSSLLTTFPSTYSFSSSMSASSAGTTHTETISSLPASTNTIHTTAESALAPTTTTSFTTSPTMEPPSTTVATTGTGQTTFPSSTATFLETTTLTPTTDFSTESLTTAMTSTPPITSSITPTDTMTSMRTTTSWPTATNTLSPLTSSILSSTPVPSTEVTTSHTTNTNPVSTLVTTLPITITRSTLTSETAYPSSPTSTVTESTTEITYPTTMTETSSTATSLPPTSSLVSTAETAKTPTTNLVTTTTKTTSHSTTSFTSSTIYSTASTPTTAITSVPTTLGTMVTSTSMIPSTVSTGIPTSQPTTITPSSVGISGSLPMMTDLTSVYTVSSMSARPTSVIPSSPTVQNTETSIFVSMMSATTPSGGPTFTSTENTPTRSLLTSFPVTHSFSSSMSASSVGTTHTQSISSPPAITSTLHTTAESTPSPTTTMSFTTFTKMETPSSTVATTGTGQTTFTSSTATSPKTTTLTPTSDISTGSFKTAVSSTPPITSSITSTYTVTSMTTTTPLGPTATNTLPSFTSSVSSSTPVPSTEAITSGTTNTTPLSTLVTTFSNSDTSSTPTSETTYPTSLTSALTDSTTRTTYSTNMTGTLSTVTSLRPTSSSLLTTVTATVPTTNLVTTTTKITSHSTPSFTSSIATTETPSHSTPRFTSSITTTETPSHSTPRFTSSITNTKTTSHSSPSFTSSITTTETTSHNTPSLTSSITTTKTTSHSTPSYTSLITTTTTTSHSTPSFTSSITTTETTSHNTPSLTSSITTTETTSHSTPSFTSSITTETTSHSTPSFTSLITITEITSHSTLSYTTSITTTETPSHSTLSFTSSITTTETTSHSTPSFTSSITTSEMPSHSTPSFTSSITTTENATHSTPNFTSSITTTETTSHSTPSFTSLITTTETTSHRWGTTETTSYSTPSFTSSNTITETTSHSTPSYITSITTTETPSSSTPSFSSSITTTETTSHSTPGFTSSITTTETTSHSTPSFTSSITTTETTSHDTPSFTSSITTSETPSHSTPSSTSLITTTKTTSHSTPSFTSSITTTETTSHSAHSFTSSITTTETTSHNTRSFTSSITTTETNSHSTTSFTSSITTTETTSHSTPSFSSSITTTETPLHSTPGLTSWVTTTKTTSHITPGLTSSITTTETTSHSTPGFTSSITTTETTSESTPSLSSSTIYSTVSTSTTAITSHFTTSETAVTPTPVTPSSLSTDIPTTSLRTLTPSSVGTSTSLTTTTDFPSIPTDISTLPTRTHIISSSPSIQSTETSSLVGTTSPTMSTVRMTLRITENTPISSFSTSIVVIPETPTQTPPVLTSATGTQTSPAPTTVTFGSTDSSTSTLHTLTPSTALSTIVSTSQVPIPSTHSSTLQTTPSTPSLQTSLTSTSEFTTESFTRGSTSTNAILTSFSTIIWSSTPTIIMSSSPSSASITPVFSTTIHSVPSSPYIFSTENVGSASITGFPSLSSSATTSTSSTSSSLTTALTEITPFSYISLPSTTPCPGTITITIVPASPTDPCVEMDPSTEATSPPTTPLTVFPFTTEMVTCPTSISIQTTLTTYMDTSSMMPESESSISPNASSSTGTGTVPTNTVFTSTRLPTSETWLSNSSVIPLPLPGVSTIPLTMKPSSSLPTILRTSSKSTHPSPPTTRTSETPVATTQTPTTLTSRRTTRITSQMTTQSTLTTTAGTCDNGGTWEQGQCACLPGFSGDRCQLQTRCQNGGQWDGLKCQCPSTFYGSSCEFAVEQVDLDVVETEVGMEVSVDQQFSPDLNDNTSQAYRDFNKTFWNQMQKIFADMQGFTFKGVEILSLRNGSIVVDYLVLLEMPFSPQLESEYEQVKTTLKEGLQNASQDVNSCQDSQTLCFKPDSIKVNNNSKTELTPAAICRRAAPTGYEEFYFPLVEATRLRCVTKCTSGVDNAIDCHQGQCVLETSGPTCRSWDQDRKWFETWDEEVVGTFSNWGFEDDGTDKDTNFYVALENVDTTMKVHIKRPEMTSSSV

SEQ ID NO: 9107 - protein, 1002 aa, Homo Sapiens
  misc_feature (1)..(1): Xaa can be any naturally occurring amino acid
XITITEITSHSTLSYTTSITTTETPSHSTLSFTSSITTTETTSHSTPSFTSSITTSEMPSHSTPSFTSSITTTENATHSTPNFTSSITTTETTSHSTPSFTSLITTTETTSHRWGTTETTSYSTPSFTSSNTITETTSHSTPSYITSITTTETPSSSTPSFSSSITTTETTSHSTPGFTSSITTTETTSHSTPSFTSSITTTETTSHDTPSFTSSITTSETPSHSTPSSTSLITTTKTTSHSTPSFTSSITTTETTSHSAHSFTSSITTTETTSHNTRSFTSSITTTETNSHSTTSFTSSITTTETTSHSTPSFSSSITTTETPLHSTPGLTSWVTTTKTTSHITPGLTSSITTTETTSHSTPGFTSSITTTETTSESTPSLSSSTIYSTVSTSTTAITSHFTTSETAVTPTPVTPSSLSTDIPTTSLRTLTPSSVGTSTSLTTTTDFPSIPTDISTLPTRTHIISSSPSIQSTETSSLVGTTSPTMSTVRMTLRITENTPISSFSTSIVVIPETPTQTPPVLTSATGTQTSPAPTTVTFGSTDSSTSTLHTLTPSTALSTIVSTSQVPIPSTHSSTLQTTPSTPSLQTSLTSTSEFTTESFTRGSTSTNAILTSFSTIIWSSTPTIIMSSSPSSASITPVFSTTIHSVPSSPYIFSTENVGSASITGFPSLSSSATTSTSSTSSSLTTALTEITPFSYISLPSTTPCPGTITITIVPASPTDPCVEMDPSTEATSPPTTPLTVFPFTTEMVTCPTSISIQTTLTTYMDTSSMMPESESSISPNASSSTGTGTVPTNTVFTSTRLPTSETWLSNSSVIPLPLPGVSTIPLTMKPSSSLPTILRTSSKSTHPSPPTTRTSETPVATTQTPTTLTSRRTTRITSQMTTQSTLTTTAGTCDNGGTWEQGQCACLPGFSGDRCQLQTRCQNGGQWDGLKCQCPSTFYGSSCEFAVEQVDLDAEDFCRHAGLHLQGCGDPVPEEWQHRGGLPGPAGDALQPPAGERV

SEQ ID NO: 9108 - protein, 5654 aa, Homo Sapiens
MSVGRRKLALLWALALALACTRHTGHAQDGSSESSYKHHPALSPIARGPSGVPLRGATVFPSLRTIPVVRASNPAHNGRVCSTWGSFHYKTFDGDVFRFPGLCNYVFSEHCGAAYEDFNIQLRRSQESAAPTLSRVLMKVDGVVIQLTKGSVLVNGHPVLLPFSQSGVLIQQSSSYTKVEARLGLVLMWNHDDSLLLELDTKYANKTCGLCGDFNGMPVVSELLSHNTKLTPMEFGNLQKMDDPTDQCQDPVPEPPRNCSTGFGICEELLHGQLFSGCVALVDVGSYLEACRQDLCFCEDTDLLSCVCHTLAEYSRQCTHAGGLPQDWRGPDFCPQKCPNNMQYHECRSPCADTCSNQEHSRACEDHCVAGCFCPEGTVLDDIGQTGCVPVSKCACVYNGAAYAPGATYSTDCTNCTCSGGRWSCQEVPCPGTCSVLGGAHFSTFDGKQYTVHGDCSYVLTKPCDSSAFTVLAELRRCGLTDSETCLKSVTLSLDGAQTVVVIKASGEVFLNQIYTQLPISAANVTIFRPSTFFIIAQTSLGLQLNLQLVPTMQLFMQLAPKLRGQTCGLCGNFNSIQADDFRTLSGVVEATAAAFFNTFKTQAACPNIRNSFEDPCSLSVENEKYAQHWCSQLTDADGPFGRCHAAVKPGTYYSNCMFDTCNCERSEDCLCAALSSYVHACAAKGVQLGGWRDGVCTKPMTTCPKSMTYHYHVSTCQPTCRSLSEGDITCSVGFIPVDGCICPKGTFLDDTGKCVQASNCPCYHRGSMIPNGESVHDSGAICTCTHGKLSCIGGQAPAPVCAAPMVFFDCRNATPGDTGAGCQKSCHTLDMTCYSPQCVPGCVCPDGLVADGEGGCITAEDCPCVHNEASYRAGQTIRVGCNTCTCDSRMWRCTDDPCLATCAVYGDGHYLTFDGQSYSFNGDCEYTLVQNHCGGKDSTQDSFRVVTENVPCGTTGTTCSKAIKIFLGGFELKLSHGKVEVIGTDESQEVPYTIRQMGIYLVVDTDIGLVLLWDKKTSIFINLSPEFKGRVCGLCGNFDDIAVNDFATRSRSVVGDVLEFGNSWKLSPSCPDALAPKDPCTANPFRKSWAQKQCSILHGPTFAACHAHVEPARYYEACVNDACACDSGGDCECFCTAVAAYAQACHEVGLCVSWRTPSICPLFCDYYNPEGQCEWHYQPCGVPCLRTCRNPRGDCLRDVRGLEGCYPKCPPEAPIFDEDKMQCVATCPTPPLPPRCHVHGKSYRPGAVVPSDKNCQSCLCTERGVECTYKAEACVCTYNGQRFHPGDVIYHTTDGTGGCISARCGANGTIERRVYPCSPTTPVPPTTFSFSTPPLVVSSTHTPSNGPSSAHTGPPSSAWPTTAGTSPRTRLPTASASLPPVCGEKCLWSPWMDVSRPGRGTDSGDFDTLENLRAHGYRVCESPRSVECRAEDAPGVPLRALGQRVQCSPDVGLTCRNREQASGLCYNYQIRVQCCTPLPCSTSSSPAQTTPPTTSKTTETRASGSSAPSSTPGTVSLSTARTTPAPGTATSVKKTFSTPSPPPVPATSTSSMSTTAPGTSVVSSKPTPTEPSTSSCLQELCTWTEWIDGSYPAPGINGGDFDTFQNLRDEGYTFCESPRSVQCRAESFPNTPLADLGQDVICSHTEGLICLNKNQLPPICYNYEIRIQCCETVNVCRDITRLPKTVATTRPTPHPTGAQTQTTFTTHMPSASTEQPTATSRGGPTATSVTQGTHTTLVTRNCHPRCTWTKWFDVDFPSPGPHGGDKETYNNIIRSGEKICRRPEEITRLQCRAKSHPEVSIEHLGQVVQCSREEGLVCRNQDQQGPFKMCLNYEVRVLCCETPRGCHMTSTPGSTSSSPAQTTPSTTSKTTETQASGSSAPSSTPGTVSLSTARTTPAPGTATSVKKTFSTPSPPPVPATSTSSMSTTAPGTSVVSSKPTPTEPSTSSCLQELCTWTEWIDGSYPAPGINGGDFDTFQNLRDEGYTFCESPRSVQCRAESFPNTPLADLGQDVICSHTEGLICLNKNQLPPICYNYEIRIQCCETVNVCRDITRPPKTVATTRPTPHPTGAQTQTTFTTHMPSASTEQPTATSRGGPTATSVTQGTHTTPVTRNCHPRCTWTTWFDVDFPSPGPHGGDKETYNNIIRSGEKICRRPEEITRLQCRAKSHPEVSIEHLGQVVQCSREEGLVCRNQDQQGPFKMCLNYEVRVLCCETPKGCPVTSTPVTAPSTPSGRATSPTQSTSSWQKSRTTTLVTTSTTSTPQTSTTYAHTTSTTSAPTARTTSAPTTRTTSASPASTTSGPGNTPSPVPTTSTISAPTTSITSAPTTSTTSAPTSSTTSGPGTTPSPVPTTSITSAPTTSTTSAPTTSTTSARTSSTTSATTTSRISGPETTPSPVPTTSTTSATTTSTTSAPTTSTTSAPTSSTTSSPQTSTTSAPTTSTTSGPGTTPSPVPTTSTTSAPTTRTTSAPKSSTTSAATTSTTSGPETTPRPVPTTSTTSSPTTSTTSAPTTSTTSASTTSTTSGAGTTPSPVPTTSTTSAPTTSTTSAPISSTTSATTTSTTSGPGTTPSPVPTTSTTSAPTTSTTSGPGTTPSAVPTTSITSAPTTSTNSAPISSTTSATTTSRISGPETTPSPVPTASTTSASTTSTTSGPGTTPSPVPTTSTISVPTTSTTSASTTSTTSASTTSTTSGPGTTPSPVPTTSTTSAPTTSTTSAPTTSTISAPTTSTTSATTTSTTSAPTPRRTSAPTTSTISASTTSTTSATTTSTTSATTTSTISAPTTSTTLSPTTSTTSTTITSTTSAPISSTTSTPQTSTTSAPTTSTTSGPGTTSSPVPTTSTTSAPTTSTTSAPTTRTTSVPTSSTTSTATTSTTSGPGTTPSPVPTTSTTSAPTTRTTSAPTTSTTSAPTTSTTSAPTSSTTSATTTSTISVPTTSTTSVPGTTPSPVPTTSTISVPTTSTTSASTTSTTSGPGTTPSPVPTTSTTSAPTTSTTSAPTTSTISAPTTSTPSAPTTSTTLAPTTSTTSAPTTSTTSTPTSSTTSSPQTSTTSASTTSITSGPGTTPSPVPTTSTTSAPTTSTTSAATTSTISAPTTSTTSAPTTSTTSASTASKTSGLGTTPSPIPTTSTTSPPTTSTTSASTASKTSGPGTTPSPVPTTSTIFAPRTSTTSASTTSTTPGPGTTPSPVPTTSTASVSKTSTSHVSISKTTHSQPVTRDCHLRCTWTKWFDIDFPSPGPHGGDKETYNNIIRSGEKICRRPEEITRLQCRAESHPEVSIEHLGQVVQCSREEGLVCRNQDQQGPFKMCLNYEVRVLCCETPKGCPVTSTPVTAPSTPSGRATSPTQSTSSWQKSRTTTLVTTSTTSTPQTSTTSAPTTSTTSAPTTSTTSAPTTSTTSTPQTSISSAPTSSTTSAPTSSTISARTTSIISAPTTSTTSSPTTSTTSATTTSTTSAPTSSTTSTPQTSKTSAATSSTTSGSGTTPSPVTTTSTASVSKTSTSHVSVSKTTHSQPVTRDCHPRCTWTKWFDVDFPSPGPHGGDKETYNNIIRSGEKICRRPEEITRLQCRAKSHPEVSIEHLGQVVQCSREEGLVCRNQDQQGPFKMCLNYEVRVLCCETPKGCPVTSTSVTAPSTPSGRATSPTQSTSSWQKSRTTTLVTSSITSTTQTSTTSAPTTSTTPASIPSTTSAPTTSTTSAPTTSTTSAPTTSTTSTPQTTTSSAPTSSTTSAPTTSTISAPTTSTISAPTTSTTSAPTASTTSAPTSTSSAPTTNTTSAPTTSTTSAPITSTISAPTTSTTSTPQTSTISSPTTSTTSTPQTSTTSSPTTSTTSAPTTSTTSAPTTSTTSTPQTSISSAPTSSTTSAPTASTISAPTTSTTSFHTTSTTSPPTSSTSSTPQTSKTSAATSSTTSGSGTTPSPVPTTSTASVSKTSTSHVSVSKTTHSQPVTRDCHPRCTWTKWFDVDFPSPGPHGGDKETYNNIIRSGEKICRRPEEITRLQCRAESHPEVSIEHLGQVVQCSREEGLVCRNQDQQGPFKMCLNYEVRVLCCETPKGCPVTSTPVTAPSTPSGRATSPTQSTSSWQKSRTTTLVTTSTTSTPQTSTTSAPTTSTIPASTPSTTSAPTTSTTSAPTTSTTSAPTHRTTSGPTTSTTLAPTTSTTSAPTTSTNSAPTTSTISASTTSTISAPTTSTISSPTSSTTSTPQTSKTSAATSSTTSGSGTTPSPVPTTSTTSASTTSTTSAPTTSTTSGPGTTPSPVPSTSTTSAATTSTTSAPTTRTTSAPTSSMTSGPGTTPSPVPTTSTTSAPTTSTTSGPGTTPSPVPTTSTTSAPITSTTSGPGSTPSPVPTTSTTSAPTTSTTSASTASTTSGPGTTPSPVPTTSTTSAPTTRTTSASTASTTSGPGSTPSPVPTTSTTSAPTTRTTPASTASTTSGPGTTPSPVPTTSTTSASTTSTISLPTTSTTSAPITSMTSGPGTTPSPVPTTSTTSAPTTSTTSASTASTTSGPGTTPSPVPTTSTTSAPTTSTTSASTASTTSGPGTSLSPVPTTSTTSAPTTSTTSGPGTTPSPVPTTSTTSAPTTSTTSGPGTTPSPVPTTSTTPVSKTSTSHLSVSKTTHSQPVTSDCHPLCAWTKWFDVDFPSPGPHGGDKETYNNIIRSGEKICRRPEEITRLQCRAESHPEVNIEHLGQVVQCSREEGLVCRNQDQQGPFKMCLNYEVRVLCCETPRGCPVTSVTPYGTSPTNALYPSLSTSMVSASVASTSVASSSVASSSVAYSTQTCFCNVADRLYPAGSTIYRHRDLAGHCYYALCSQDCQVVRGVDSDCPSTTLPPAPATSPSISTSEPVTELGCPNAVPPRKKGETWATPNCSEATCEGNNVISLRPRTCPRVEKPTCANGYPAVKVADQDGCCHHYQCQCVCSGWGDPHYITFDGTYYTFLDNCTYVLVQQIVPVYGHFRVLVDNYFCGAEDGLSCPRSIILEYHQDRVVLTRKPVHGVMTNEIIFNNKVVSPGFRKNGIVVSRIGVKMYATIPELGVQVMFSGLIFSVEVPFSKFANNTEGQCGTCTNDRKDECRTPRGTVVASCSEMSGLWNVSIPDQPACHRPHPTPTTVGPTTVGSTTVGPTTVGSTTVGPTTPPAPCLPSPICQLILSKVFEPCHTVIPPLLFYEGCVFDRCHMTDLDVVCSSLELYAALCASHDICIDWRGRTGHMCPFTCPADKVYQPCGPSNPSYCYGNDSASLGALPEAGPITEGCFCPEGMTLFSTSAQVCVPTGCPRCLGPHGEPVKVGHTVGMDCQECTCEAATWTLTCRPKLCPLPPACPLPGFVPVPAAPQAGQCCPQYSCACNTSRCPAPVGCPEGARAIPTYQEGACCPVQNCSWTVCSINGTLYQPGAVVSSSLCETCRCELPGGPPSDAFVVSCETQICNTHCPVGFEYQEQSGQCCGTCVQVACVTNTSKSPAHLFYPGETWSDAGNHCVTHQCEKHQDGLVVVTTKKACPPLSCSLDEARMSKDGCCRFCPPPPPPYQNQSTCAVYHRSLIIQQQGCSSSEPVRLAYCRGNCGDSSSMYSLEGNTVEHRCQCCQELRTSLRNVTLHCTDGSSRAFSYTEVEECGCMGRRCPAPGDTQHSEEAEPEPSQEAESGSWERGVPVSPMH

SEQ ID NO: 9109 - protein, 5762 aa, Homo Sapiens
MGAPSACRTLVLALAAMLVVPQAETQGPVEPSWENAGHTMDGGAPTSSPTRRVSFVPPVTVFPSLSPLNPAHNGRVCSTWGDFHYKTFDGDVFRFPGLCNYVFSEHCRAAYEDFNVQLRRGLVGSRPVVTRVVIKAQGLVLEASNGSVLINGQREELPYSRTGLLVEQSGDYIKVSIRLVLTFLWNGEDSALLELDPKYANQTCGLCGDFNGLPAFNEFYAHNARLTPLQFGNLQKLDGPTEQCPDPLPLPAGNCTDEEGICHRTLLGPAFAECHALVDSTAYLAACAQDLCRCPTCPCATFVEYSRQCAHAGGQPRNWRCPELCPRTCPLNMQHQECGSPCTDTCSNPQRAQLCEDHCVDGCFCPPGTVLDDITHSGCLPLGQCPCTHGGRTYSPGTSFNTTCSSCTCSGGLWQCQDLPCPGTCSVQGGAHISTYDEKLYDLHGDCSYVLSKKCADSSFTVLAELRKCGLTDNENCLKAVTLSLDGGDTAIRVQADGGVFLNSIYTQLPLSAANITLFTPSSFFIVVQTGLGLQLLVQLVPLMQVFVRLDPAHQGQMCGLCGNFNQNQADDFTALSGVVEATGAAFANTWKAQAACANARNSFEDPCSLSVENENYARHWCSRLTDPNSAFSRCHSIINPKPFHSNCMFDTCNCERSEDCLCAALSSYVHACAAKGVQLSDWRDGVCTKYMQNCPKSQRYAYVVDACQPTCRGLSEADVTCSVSFVPVDGCTCPAGTFLNDAGACVPAQECPCYAHGTVLAPGEVVHDEGAVCSCTGGKLSCLGASLQKSTGCAAPMVYLDCSNSSAGTPGAECLRSCHTLDVGCFSTHCVSGCVCPPGLVSDGSGGCIAEEDCPCVHNEATYKPGETIRVDCNTCTCRNRRWECSHRLCLGTCVAYGDGHFITFDGDRYSFEGSCEYILAQDYCGDNTTHGTFRIVTENIPCGTTGTTCSKAIKLFVESYELILQEGTFKAVARGPGGDPPYKIRYMGIFLVIETHGMAVSWDRKTSVFIRLHQDYKGRVCGLCGNFDDNAINDFATRSRSVVGDALEFGNSWKLSPSCPDALAPKDPCTANPFRKSWAQKQCSILHGPTFAACRSQVDSTKYYEACVNDACACDSGGDCECFCTAVAAYAQACHDAGLCVSWRTPDTCPLFCDFYNPHGGCEWHYQPCGAPCLKTCRNPSGHCLVDLPGLEGCYPKCPPSQPFFNEDQMKCVAQCGCYDKDGNYYDVGARVPTAENCQSCNCTPSGIQCAHSLEACTCTYEDRTYSYQDVIYNTTDGLGACLIAICGSNGTIIRKAVACPGTPATTPFTFTTAWVPHSTTSPALPVSTVCVREVCRWSSWYNGHRPEPGLGGGDFETFENLRQRGYQVCPVLADIECRAAQLPDMPLEELGQQVDCDRMRGLMCANSQQSPPLCHDYELRVLCCEYVPCGPSPAPGTSPQPSLSASTEPAVPTPTQTTATEKTTLWVTPSIRSTAALTSQTGSSSGPVTVTPSAPGTTTCQPRCQWTEWFDEDYPKSEQLGGDVESYDKIRAAGGHLCQQPKDIECQAESFPNWTLAQVGQKVHCDVHFGLVCRNWEQEGVFKMCYNYRIRVLCCSDDHCRGRATTPPPTTELETATTTTTQALFSTPQPTSSPGLTRAPPASTTAVPTLSEGLTSPRYTSTLGTATTGGPTTPAGSTEPTVPGVATSTLPTRSALPGTTGSLGTWRPSQPPTLAPTTMATSRARPTGTASTASKEPLTTSLAPTLTSELSTSQAETSTPRTETTMSPLTNTTTSQGTTRCQPKCEWTEWFDVDFPTSGVAGGDMETFENIRAAGGKMCWAPKSIECRAENYPEVSIDQVGQVLTCSLETGLTCKNEDQTGRFNMCFNYNVRVLCCDDYSHCPSTPATSSTATPSSTPGTTWILTKPTTTATTTASTGSTATPTSTLRTAPPPKVLTTTATTPTVTSSKATPSSSPGTATALPALRSTATTPTATSVTPIPSSSLGTTWTRLSQTTTPTATMSTATPSSTPETAHTSTVLTATATTTGATGSVATPSSTPGTAHTTKVPTTTTTGFTATPSSSPGTALTPPVWISTTTTPTTRGSTVTPSSIPGTTHTATVLTTTTTTVATGSMATPSSSTQTSGTPPSLTTTATTITATGSTTNPSSTPGTTPIPPVLTTTATTPAATSNTVTPSSALGTTHTPPVPNTMATTHGRSLPPSSPHTVRTAWTSATSGILGTTHITEPSTVTSHTLAATTGTTQHSTPALSSPHPSSRTTESPPSPGTTTPGHTTATSRTTATATPSKTRTSTLLPSSPTSAPITTVVTMGCEPQCAWSEWLDYSYPMPGPSGGDFDTYSNIRAAGGAVCEQPLGLECRAQAQPGVPLRELGQVVECSLDFGLVCRNREQVGKFKMCFNYEIRVFCCNYGHCPSTPATSSTAMPSSTPGTTWILTELTTTATTTESTGSTATPSSTPGTTWILTEPSTTATVTVPTGSTATASSTQATAGTPHVSTTATTPTVTSSKATPFSSPGTATALPALRSTATTPTATSFTAIPSSSLGTTWTRLSQTTTPTATMSTATPSSTPETVHTSTVLTTTATTTGATGSVATPSSTPGTAHTTKVLTTTTTGFTATPSSSPGTARTLPVWISTTTTPTTRGSTVTPSSIPGTTHTPTVLTTTTTTVATGSMATPSSSTQTSGTPPSLTTTATTITATGSTTNPSSTPGTTPIPPVLTTTATTPAATSSTVTPSSALGTTHTPPVPNTTATTHGRSLSPSSPHTVRTAWTSATSGTLGTTHITEPSTGTSHTPAATTGTTQHSTPALSSPHPSSRTTESPPSPGTTTPGHTRATSRTTATATPSKTRTSTLLPSSPTSAPITTVVTMGCEPQCAWSEWLDYSYPMPGPSGGDFDTYSNIRAAGGAVCEQPLGLECRAQAQPGVPLRELGQVVECSLDFGLVCRNREQVGKFKMCFNYEIRVFCCNYGHCPSTPATSSTATPSSTPGTTWILTEQTTAATTTATTGSTAIPSSTPGTAPPPKVLTSTATTPTATSSKATSSSSPRTATTLPVLTSTATKSTATSFTPIPSFTLGTTGTLPEQTTTPMATMSTIHPSSTPETTHTSTVLTTKATTTRATSSMSTPSSTPGTTWILTELTTAATTTAATGPTATPSSTPGTTWILTEPSTTATVTVPTGSTATASSTRATAGTLKVLTSTATTPTVISSRATPSSSPGTATALPALRSTATTPTATSVTAIPSSSLGTAWTRLSQTTTPTATMSTATPSSTPETVHTSTVLTTTTTTTRATGSVATPSSTPGTAHTTKVPTTTTTGFTATPSSSPGTALTPPVWISTTTTPTTRGSTVTPSSIPGTTHTATVLTTTTTTVATGSMATPSSSTQTSGTPPSLTTTATTITATGSTTNPSSTPGTTPIPPVLTTTATTPAATSSTVTPSSALGTTHTPPVPNTTATTHGRSLPPSSPHTVRTAWTSATSGILGTTHITEPSTVTSHTPAATTSTTQHSTPALSSPHPSSRTTESPPSPGTTTPGHTRGTSRTTATATPSKTRTSTLLPSSPTSAPITTVVTTGCEPQCAWSEWLDYSYPMPGPSGGDFDTYSNIRAAGGAVCEQPLGLECRAQAQPGVPLRELGQVVECSLDFGLVCRNREQVGKFKMCFNYEIRVFCCNYGHCPSTPATSSTATPSSTPGTTWILTKLTTTATTTESTGSTATPSSTPGTTWILTEPSTTATVTVPTGSTATASSTQATAGTPHVSTTATTPTVTSSKATPFSSPGTATALPALRSTATTPTATSFTAIPSSSLGTTWTRLSQTTTPTATMSTATPSSTPETAHTSTVLTTTATTTRATGSVATPSSTPGTAHTTKVPTTTTTGFTVTPSSSPGTARTPPVWISTTTTPTTSGSTVTPSSVPGTTHTPTVLTTTTTTVATGSMATPSSSTQTSGTPPSLITTATTITATGSTTNPSSTPGTTPIPPVLTTTATTPAATSSTVTPSSALGTTHTPPVPNTTATTHGRSLSPSSPHTVRTAWTSATSGTLGTTHITEPSTGTSHTPAATTGTTQHSTPALSSPHPSSRTTESPPSPGTTTPGHTTATSRTTATATPSKTRTSTLLPSSPTSAPITTVVTTGCEPQCAWSEWLDYSYPMPGPSGGDFDTYSNIRAAGGAVCEQPLGLECRAQAQPGVPLGELGQVVECSLDFGLVCRNREQVGKFKMCFNYEIRVFCCNYGHCPSTPATSSTAMPSSTPGTTWILTELTTTATTTASTGSTATPSSTPGTAPPPKVLTSPATTPTATSSKATSSSSPRTATTLPVLTSTATKSTATSVTPIPSSTLGTTGTLPEQTTTPVATMSTIHPSSTPETTHTSTVLTTKATTTRATSSTSTPSSTPGTTWILTELTTAATTTAATGPTATPSSTPGTTWILTELTTTATTTASTGSTATPSSTPGTTWILTEPSTTATVTVPTGSTATASSTQATAGTPHVSTTATTPTVTSSKATPSSSPGTATALPALRSTATTPTATSFTAIPSSSLGTTWTRLSQTTTPTATMSTATPSSTPETVHTSTVLTATATTTGATGSVATPSSTPGTAHTTKVPTTTTTGFTATPSSSPGTALTPPVWISTTTTPTTTTPTTSGSTVTPSSIPGTTHTARVLTTTTTTVATGSMATPSSSTQTSGTPPSLTTTATTITATGSTTNPSSTPGTTPITPVLTSTATTPAATSSKATSSSSPRTATTLPVLTSTATKSTATSFTPIPSSTLWTTWTVPAQTTTPMSTMSTIHTSSTPETTHTSTVLTTTATMTRATNSTATPSSTLGTTRILTELTTTATTTAATGSTATLSSTPGTTWILTEPSTIATVMVPTGSTATASSTLGTAHTPKVVTTMATMPTATASTVPSSSTVGTTRTPAVLPSSLPTFSVSTVSSSVLTTLRPTGFPSSHFSTPCFCRAFGQFFSPGEVIYNKTDRAGCHFYAVCNQHCDIDRFQGACPTSPPPVSSAPLSSPSPAPGCDNAIPLRQVNETWTLENCTVARCVGDNRVVLLDPKPVANVTCVNKHLPIKVSDPSQPCDFHYECECICSMWGGSHYSTFDGTSYTFRGNCTYVLMREIHARFGNLSLYLDNHYCTASATAAAARCPRALSIHYKSMDIVLTVTMVHGKEEGLILFDQIPVSSGFSKNGVLVSVLGTTTMRVDIPALGVSVTFNGQVFQARLPYSLFHNNTEGQCGTCTNNQRDDCLQRDGTTAASCKDMAKTWLVPDSRKDGCWAPTGTPPTASPAAPVSSTPTPTPCPPQPLCDLMLSQVFAECHNLVPPGPFFNACISDHCRGRLEVPCQSLEAYAELCRARGVCSDWRGATGGLCDLTCPPTKVYKPCGPIQPATCNSRNQSPQLEGMAEGCFCPEDQILFNAHMGICVQACPCVGPDGFPKFPGERWVSNCQSCVCDEGSVSVQCKPLPCDAQGQPPPCNRPGFVTVTRPRAENPCCPETVCVCNTTTCPQSLPVCPPGQESICTQEEGDCCPTFRCRPQLCSYNGTFYGVGATFPGALPCHMCTCLSGDTQDPTVQCQEDACNNTTCPQGFEYKRVAGQCCGECVQTACLTPDGQPVQLNETWVNSHVDNCTVYLCEAEGGVHLLTPQPASCPDVSSCRGSLRKTGCCYSCEEDSCQVRINTTILWHQGCETEVNITFCEGSCPGASKYSAEAQAMQHQCTCCQERRVHEETVPLHCPNGSAILHTYTHVDECGCTPFCVPAPMAPPHTRGFPAQEATAV

SEQ ID NO: 9110 - protein, 154 aa, Homo Sapiens [sequence omitted]

SEQ ID NO: 9111 - protein, 181 aa, Homo Sapiens
MDTSRTPSVCRETGGAALSRGERRPQGRRGSPTPTAGPVHTGLANTSYTSPGLQRLKDSPQTAPDKGQCSTWGAGHFSTFDHHVYDFSGTCNYIFAATCKDAFPTFSVQLRRGPDGSISRIIVELGASVVTVSEAIISVKDIGVISLPYTSNGLQITPFGQSVRLVAKQLELELEVVWGPD

SEQ ID NO: 9112 - protein, 2439 aa, Homo Sapiens
MVQRWLLLSCCGALLSAGLANTSYTSPGLQRLKDSPQTAPDKGQCSTWGAGHFSTFDHHVYDFSGTCNYIFAATCKDAFPTFSVQLRRGPDGSISRIIVELGASVVTVSEAIISVKDIGVISLPYTSNGLQITPFGQSVRLVAKQLELELEVVWGPDSHLMVLVERKYMGQMCGLCGNFDGKVTNEFVSEEGKFLEPHKFAALQKLDDPGEICTFQDIPSTHVRQAQHARICTQLLTLVAPECSVSKEPFVLSCQADVAAAPQPGPQNSSCATLSEYSRQCSMVGQPVRRWRSPGLCSVGQCPANQVYQECGSACVKTCSNPQHSCSSSCTFGCFCPEGTVLNDLSNNHTCVPVTQCPCVLHGAMYAPGEVTIAACQTCRCTLGRWVCTERPCPGHCSLEGGSFVTTFDARPYRFHGTCTYILLQSPQLPEDGALMAVYDKSGVSHSETSLVAVVYLSRQDKIVISQDEVVTNNGEAKWLPYKTRNITVFRQTSTHLQMATSFGLELVVQLRPIFQAYVTVGPQFRGQTRGLCGNFNGDTTDDFTTSMGIAEGTASLFVDSWRAGNCPAALERETDPCSMSQLNKVCAETHCSMLLRTGTVFERCHATVNPAPFYKRCVYQACNYEETFPHICAALGDYVHACSLRGVLLWGWRSSVDNCTIPCTGNTTFSYNSQACERTCLSLSDRATECHHSAVPVDGCNCPDGTYLNQKGECVRKAQCPCILEGYKFILAEQSTVINGITCHCINGRLSCPQRPQMFLASCQAPKTFKSCSQSSENKFGAACAPTCQMLATGVACVPTKCEPGCVCAEGLYENADGQCVPPEECPCEFSGVSYPGGAELHTDCRTCSCSRGRWACQQGTHCPSTCTLYGEGHVITFDGQRFVFDGNCEYILATDVCGVNDSQPTFKILTENVICGNSGVTCSRAIKIFLGGLSVVLADRNYTVTGEEPHVQLGVTPGALSLVVDISIPGRYNLTLIWNRHMTILIRIARASQDPLCGLCGNFNGNMKDDFETRSRYVASSELELVNSWKESPLCGDVSFVTDPCSLNAFRRSWAERKCSVINSQTFATCHSKVYHLPYYEACVRDACGCDSGGDCECLCDAVAAYAQACLDKGVCVDWRTPAFCPIYCGFYNTHTQDGHGEYQYTQEANCTWHYQPCLCPSQPQSVPGSNIEGCYNCSQDEYFDHEEGVCVPCMPPTTPQPPTTPQLPTTGSRPTQVWPMTGTSTTIGLLSSTGPSPSSNHTPASPTQTPLLPATLTSSKPTASSGEPPRPTTAVTPQATSGLPPTATLRSTATKPTVTQATTRATASTASPATTSTAQSTTRTTMTLPTPATSGTSPTLPKSTNQELPGTTATQTTGPRPTPASTTGPTTPQPGQPTRPTATETTQTRTTTEYTTPQTPHTTHSPPTAGSPVPSTGPVTATSFHATTTYPTPSHPETTLPTHVPPFSTSLVTPSTHTVITPTHAQMATSASNHSAPTGTIPPPTTLKATGSTHTAPPITPTTSGTSQAHSSFSTNKTPTSLHSHTSSTHHPEVTPTSTTTITPNPTSTRTRTPVAHTNSATSSRPPPPFTTHSPPTGSSPFSSTGPMTATSFKTTTTYPTPSHPQTTLPTHVPPFSTSLVTPSTHTVITPTHAQMATSASIHSMPTGTIPPPTTLKATGSTHTAPTMTLTTSGTSQALSSLNTAKTSTSLHSHTSSTHHAEATSTSTTNITPNPTSTGTPPMTVTTSGTSQSRSSFSTAKTSTSLHSHTSSTHHPEVTSTSTTSITPNHTSTGTRTPVAHTTSATSSRLPTPFTTHSPPTGTTPISSTGPVTATSFQTTTTYPTPSHPHTTLPTHVPSFSTSLVTPSTHTVIIPTHTQMATSASIHSMPTGTIPPPTTIKATGSTHTAPPMTPTTSGTSQSPSSFSTAKTSTSLPYHTSSTHHPEVTPTSTTNITPKHTSTGTRTPVAHTTSASSSRLPTPFTTHSPPTGSSPFSSTGPMTATSFQTTTTYPTPSHPQTTLPTHVPPFSTSLVTPSTHTVIITTHTQMATSASIHSTPTGTVPPPTTLKATGSTHTAPPMTVTTSGTSQTHSSFSTATASSSFISSSSWLPQNSSSRPPSSPITTQLPHLSSATTPVSTTNQLSSSFSPSPSAPSTVSSYVPSSHSSPQTSSPSVGTSSSFVSAPVHSTTLSSGSHSSLSTHPTTASVSASPLFPSSPAASTTIRATLPHTISSPFTLSALLPISTVTVSPTPSSHLASSTIAFPSTPRTTASTHTAPAFSSQSTTSRSTSLTTRVPTSGFVSLTSGVTGIPTSPVTNLTTRHPGPTLSPTTRFLTSSLTAHGSTPASAPVSSLGTPTPTSPGVCSVREQQEEITFKGCMANVTVTRCEGACISAASFNIITQQVDARCSCCRPLHSYEQQLELPCPDPSTPGRRLVLTLQVFSHCVCSSVACGD

SEQ ID NO: 9113 - protein, 115 aa, Homo Sapiens
  misc_feature (1)..(1): Xaa can be any naturally occurring amino acid
XPPTTPQPPTTPQLPTTGSRPTQVWPMTGTSTTIGLLSSTGPSPSSNHTPASPTQTPLLPATLTSSKPTASSGGKEPPAEPMERAAAGGPRYTSGVGLGMALLPGSHLPLSRFPA

SEQ ID NO: 9114 - protein, 219 aa, Homo Sapiens
  misc_feature (1)..(1): Xaa can be any naturally occurring amino acid
XSSPFTLSALLPISTVTVSPTPSSHLASSTIAFPSTPRTTASTHTAPAFSSQSTTSRSTSLTTRVPTSGFVSLTSGVTGIPTSPVTNLTTRHPGPTLSPTTRFLTSSLTAHGSTPASAPVSSLGTPTPTSPGESTGGRPAPRPPRCSQPHPREVRAPHPGACCPISFNIITQQVDARCSCCRPLHSYEQQLELPCPDPSTPGRRLVLTLQVFSHCVCSS

SEQ ID NO: 9115 - protein, 136 aa, Homo Sapiens
MKTLPLFVCICALSACFSFSEGRERDHELRHRRHHHQSPKSHFELPHYPGLLAHQKPFIRKSYKCLHKRCRPKLPPSPNNPPKFPNPHQPPKHPDKNSSVVNPTLVATTQIPSVTFPSASTKITTLPNVTFLPQNA

SEQ ID NO: 9116 - protein, 377 aa, Homo Sapiens
MKTLPLFVCICALSACFSFSEGRERDHELRHRRHHHQSPKSHFELPHYPGLLAHQKPFIRKSYKCLHKRCRPKLPPSPNNPPKFPNPHQPPKHPDKNSSVVNPTLVATTQIPSVTFPSASTKITTLPNVTFLPQNATTISSRENVNTSSSVATLAPVNSPAPQDTTAAPPTPSATTPAPPSSSAPPETTAAPPTPSATTQAPPSSSAPPETTAAPPTPPATTPAPPSSSAPPETTAAPPTPSATTPAPLSSSAPPETTAVPPTPSATTLDPSSASAPPETTAAPPTPSATTPAPPSSPAPQETTAAPITTPNSSPTTLAPDTSETSAAPTHQTTTSVTTQTTTTKQPTSAPGQNKISRFLLYMKNLLNRIIDDMVEQ

SEQ ID NO: 9117 - protein, 377 aa, Homo Sapiens; identical to SEQ ID NO: 9116

SEQ ID NO: 9118 - protein, 377 aa, Homo Sapiens; identical to SEQ ID NO: 9116

SEQ ID NO: 9119 - protein, 85 aa, Homo Sapiens
MGGDHGYQLAVTKAENPTTAAPADTYPATGPADDEAPDAETTAAATTATTAAPTTATTAASTTARKDIPVLPKWVGDLPNGRVCP

SEQ ID NO: 9120 - protein, 90 aa, Homo Sapiens
MKFLAVLVLLGVSIFLVSAQNPTTAAPADTYPATGPADDEAPDAETTAAATTATTAAPTTATTAASTTARKDIPVLPKWVGDLPNGRVCP

SEQ ID NO: 9121 - protein, 80 aa, Homo Sapiens
MKFLAVLVLLGVSIFLVSAQNPTTAAPADTYPATGPADDEAPDAETTPTTATTAASTTARKDIPVLPKWVGDLPNGRVCP

SEQ ID NO: 9122 - protein, 2828 aa, Homo Sapiens
MPKRAHWGALSVVLILLWGHPRVALACPHPCACYVPSEVHCTFRSLASVPAGIAKHVERINLGFNSIQALSETSFAGLTKLELLMIHGNEIPSIPDGALRDLSSLQVFKFSYNKLRVITGQTLQGLSNLMRLHIDHNKIEFIHPQAFNGLTSLRLLHLEGNLLHQLHPSTFSTFTFLDYFRLSTIRHLYLAENMVRTLPASMLRNMPLLENLYLQGNPWTCDCEMRWFLEWDAKSRGILKCKKDKAYEGGQLCAMCFSPKKLYKHEIHKLKDMTCLKPSIESPLRQNRSRSIEEEQEQEEDGGSQLILEKFQLPQWSISLNMTDEHGNMVNLVCDIKKPMDVYKIHLNQTDPPDIDINATVALDFECPMTRENYEKLWKLIAYYSEVPVKLHRELMLSKDPRVSYQYRQDADEEALYYTGVRAQILAEPEWVMQPSIDIQLNRRQSTAKKVLLSYYTQYSQTISTKDTRQARGRSWVMIEPSGAVQRDQTVLEGGPCQLSCNVKASESPSIFWVLPDGSILKAPMDDPDSKFSILSSGWLRIKSMEPSDSGLYQCIAQVRDEMDRMVYRVLVQSPSTQPAEKDTVTIGKNPGESVTLPCNALAIPEAHLSWILPNRRIINDLANTSHVYMLPNGTLSIPKVQVSDSGYYRCVAVNQQGADHFTVGITVTKKGSGLPSKRGRRPGAKALSRVREDIVEDEGGSGMGDEENTSRRLLHPKDQEVFLKTKDDAINGDKKAKKGRRKLKLWKHSEKEPETNVAEGRRVFESRRRINMANKQINPERWADILAKVRGKNLPKGTEVPPLIKTTSPPSLSLEVTPPFPAISPPSASPVQTVTSAEESSADVPLLGEEEHVLGTISSASMGLEHNHNGVILVEPEVTSTPLEEVVDDLSEKTEEITSTEGDLKGTAAPTLISEPYEPSPTLHTLDTVYEKPTHEETATEGWSAADVGSSPEPTSSEYEPPLDAVSLAESEPMQYFDPDLETKSQPDEDKMKEDTFAHLTPTPTIWVNDSSTSQLFEDSTIGEPGVPGQSHLQGLTDNIHLVKSSLSTQDTLLIKKGMKEMSQTLQGGNMLEGDPTHSRSSESEGQESKSITLPDSTLGIMSSMSPVKKPAETTVGTLLDKDTTTATTTPRQKVAPSSTMSTHPSRRRPNGRRRLRPNKFRHRHKQTPPTTFAPSETFSTQPTQAPDIKISSQVESSLVPTAWVDNTVNTPKQLEMEKNAEPTSKGTPRRKHGKRPNKHRYTPSTVSSRASGSKPSPSPENKHRNIVTPSSETILLPRTVSLKTEGPYDSLDYMTTTRKIYSSYPKVQETLPVTYKPTSDGKEIKDDVATNVDKHKSDILVTGESITNAIPTSRSLVSTMGEFKEESSPVGFPGTPTWNPSRTAQPGRLQTGIPVTTSGENLTDPPLLKELEDVDFTSEFLSSLTVSTPFHQEEAGSSTTLSSIKVEVASSQAETTTLDQDHLETTVAILLSETRPQNHTPTAARMKEPASSSPSTILMSLGQTTTTKPALPSPRISQASRDSKENVFLNYVGNPETEATPVNNEGTQHMSGPNELSTPSSDQDAFNLSTKLELEKQVFGSRSLPRGPDSQRQDGRVHASHQLTRVPAKPILPTATVRLPEMSTQSASRYFVTSQSPRHWTNKPEITTYPSGALPENKQFTTPRLSSTTIPLPLHMSKPSIPSKFTDRRTDQFNGYSKVFGNNNIPEARNPVGKPPSPRIPHYSNGRLPFFTNKTLSFPQLGVTRRPQIPTSPAPVMRERKVIPGSYNRIHSHSTFHLDFGPPAPPLLHTPQTTGSPSTNLQNIPMVSSTQSSISFITSSVQSSGSFHQSSSKFFAGGPPASKFWSLGEKPQILTKSPQTVSVTAETDTVFPCEATGKPKPFVTWTKVSTGALMTPNTRIQRFEVLKNGTLVIRKVQVQDRGQYMCTASNLHGLDRMVVLLSVTVQQPQILASHYQDVTVYLGDTIAMECLAKGTPAPQISWIFPDRRVWQTVSPVEGRITLHENRTLSIKEASFSDRGVYKCVASNAAGADSLAIRLHVAALPPVIHQEKLENISLPPGLSIHIHCTAKAAPLPSVRWVLGDGTQIRPSQFLHGNLFVFPNGTLYIRNLAPKDSGRYECVAANLVGSARRTVQLNVQRAAANARITGTSPRRTDVRYGGTLKLDCSASGDPWPRILWRLPSKRMIDALFSFDSRIKVFANGTLVVKSVTDKDAGDYLCVARNKVGDDYVVLKVDVVMKPAKIEHKEENDHKVFYGGDLKVDCVATGLPNPEISWSLPDGSLVNSFMQSDDSGGRTKRYVVFNNGTLYFNEVGMREEGDYTCFAENQVGKDEMRVRVKVVTAPATIRNKTYLAVQVPYGDVVTVACEAKGEPMPKVTWLSPTNKVIPTSSEKYQIYQDGTLLIQKAQRSDSGNYTCLVRNSAGEDRKTVWIHVNVQPPKINGNPNPITTVREIAAGGSRKLIDCKAEGIPTPRVLWAFPEGVVLPAPYYGNRITVHGNGSLDIRSLRKSDSVQLVCMARNEGGEARLILQLTVLEPMEKPIFHDPISEKITAMAGHTISLNCSAAGTPTPSLVWVLPNGTDLQSGQQLQRFYHKADGMLHISGLSSVDAGAYRCVARNAAGHTERLVSLKVGLKPEANKQYHNLVSIINGETLKLPCTPPGAGQGRFSWTLPNGMHLEGPQTLGRVSLLDNGTLTVREASVFDRGTYVCRMETEYGPSVTSIPVIVIAYPPRITSEPTPVIYTRPGNTVKLNCMAMGIPKADITWELPDKSHLKAGVQARLYGNRFLHPQGSLTIQHATQRDAGFYKCMAKNILGSDSKTTYIHVF

SEQ ID NO: 9123 - protein, 213 aa, Homo Sapiens
MDTERVGDGKQHRRKQSQRLRWPCCLALVPDRHPSQLSSCTLCLLAAASQWESWAHFSKWHTEASTGTHLGKAKAEGLGCTVKNTPQLSICEPSHFGPSFVHSPHLLVDHDHRAGAATGRGQAGPSRASSVSPTFCPPTTSHHPVCAKGTDPVLVLQEEEQDLDGEKGPSSEGPEEEDGEGFSFKYSPGKLRGNQYKKMMTKEELEEEQRTEE

SEQ ID NO: 9124 - protein, 177 aa, Homo Sapiens
MEAPAELLAALPALATALALLLAWLLVRRGAAASPEPARAPPEPAPPAEATGAPAPSRPCAPEPAASPAGPEEPGEPAGLGELGEPAGPGEPEGPGDPAAAPAEAEEQAVEARQEEEQDLDGEKGPSSEGPEEEDGEGFSFKYSPGKLRGNQYKKMMTKEELEEEQRIELTSDLTSL

SEQ ID NO: 9125 - protein, 170 aa, Homo Sapiens
MEAPAELLAALPALATALALLLAWLLVRRGAAASPEPARAPPEPAPPAEATGAPAPSRPCAPEPAASPAGPEEPGEPAGLGELGEPAGPGEPEGPGDPAAAPAEAEEQAVEARQEEEQDLDGEKGPSSEGPEEEDGEGFSFKYSPGKLRGNQYKKMMTKEELEEEQRTEE

SEQ ID NO: 9126 - protein, 204 aa, Homo Sapiens
MEAPAELLAALPALATALALLLAWLLVRRGAAASPEPARAPPEPAPPAEATGAPAPSRPCAPEPAASPAGPEEPGEPAGLGELGEPAGPGEPEGPGDPAAAPAEAEEQAVEARQEEEQDLDGEKGPSSEGPEEEDGEGFSFKYSPGKLRGNQYKKMMTKEELEEEQRVQKEQLAAIFKLMKDNKETFGEMSDGDVQEQLRLYDM

SEQ ID NO: 9127 - protein, 22 aa, Homo Sapiens
MMTKEELEEEQRIELTSDLTSL

SEQ ID NO: 9128 - protein, 15 aa, Homo Sapiens
MMTKEELEEEQRTEE

SEQ ID NO: 9129 - protein, 15 aa, Homo Sapiens
MMTKEELEEEQRTEE

SEQ ID NO: 9130 - protein, 189 aa, Homo Sapiens
MAAPSGGWNGVGASLWAALLLGAVALRPAEAVSEPTTVAFDVRPGGVVHSFSHNVGPGDKYTCMFTYASQGGTNEQWQMSLGTSEDHQHFTCTIWRPQGKSYLYFTQFKAEVRGAEIEYAMAYSKAAFERESDVPLKTEEFEVTKTAGTERWGWGRGDATPIQGWAIGAVWRGGSAIGVLETVDQASTN

SEQ ID NO: 9131 - protein, 173 aa, Homo Sapiens
MAAPSGGWNGVGASLWAALLLGAVALRPAEAVSEPTTVAFDVRPGGVVHSFSHNVGPGDKYTCMFTYASQGGTNEQWQMSLGTSEDHQHFTCTIWRPQGKSYLYFTQFKAEVRGAEIEYAMAYSKAAFERESDVPLKTEEFEVTKTAVAHRPGAFKAELSKLVIVAKASRTEL

SEQ ID NO: 9132 - protein, 84 aa, Homo Sapiens
  misc_feature (1)..(1): Xaa can be any naturally occurring amino acid
XHQHFTCTIWRPQGKSYLYFTQFKAEVRGAEIEYAMAYSKAAFERESDVPLKTEEFEVTKTAVISAPQEKGDDQPHWTDGETEA

SEQ ID NO: 9133 - protein, 194 aa, Homo Sapiens
MAPKKDVKKPVAAAAAAPAPAPAPAPAPAPAKPKEEKIDLSAIKIEFSKEQQDEFKEAFLLFDRTGDSKITLSQVGDVLRALGTNPTNAEVRKVLGNPSNEELNAKKIEFEQFLPMMQAISNNKDQATYEDFVEGLRVFDKEGNGTVMGAELRHVLATLGEKMKEEEVEALMAGQEDSNGCINYEAFVKHIMSI

SEQ ID NO: 9134 - protein, 150 aa, Homo Sapiens
MSFSADQIAEFKEAFLLFDRTGDSKITLSQVGDVLRALGTNPTNAEVRKVLGNPSNEELNAKKIEFEQFLPMMQAISNNKDQATYEDFVEGLRVFDKEGNGTVMGAELRHVLATLGEKMKEEEVEALMAGQEDSNGCINYEAFVKHIMSI

SEQ ID NO: 9135 - protein, 63 aa, Homo Sapiens
MRFFCARCCSFGPEMPAVQLLLLACLVWDVGARTAQLRKANDQRSFYVEFGHFGLPGTEVRAN

SEQ ID NO: 9136 - protein, 504 aa, Homo Sapiens
MRFFCARCCSFGPEMPAVQLLLLACLVWDVGARTAQLRKANDQSGRCQYTFSVASPNESSCPEQSQAMSVIHNLQRDSSTQRLDLEATKARLSSLESLLHQLTLDQAARPQETQEGLQRELGTLRRERDQLETQTRELETAYSNLLRDKSVLEEEKKRLRQENENLARRLESSSQEVARLRRGQCPQTRDTARAVPPGSREVSTWNLDTLAFQELKSELTEVPASRILKESPSGYLRSGEGDTGCGELVWVGEPLTLRTAETITGKYGVWMRDPKPTYPYTQETTWRIDTVGTDVRQVFEYDLISQFMQGYPSKVHILPRPLESTGAVVYSGSLYFQGAESRTVIRYELNTETVKAEKEIPGAGYHGQFPYSWGGYTDIDLAVDEAGLWVIYSTDEAKGAIVLSKLNPENLELEQTWETNIRKQSVANAFIICGTLYTVSSYTSADATVNFAYDTGTGISKTLTIPFKNRYKYSSMIDYNPLEKKLFAWDNLNMVTYDIKLSKM

SEQ ID NO: 9137 - protein, 250 aa, Homo Sapiens
MAFCALTIVALYILSLKDQDRRVPNLPPSNITSSQEPALLPTASSSAPNTSLVTTPASLQVPEITFCEILPCQETYCCPIRGMKEVSSSPVQRQSEEKEFHQRRWSEDKSKSVLARNALSGPDWESDWIDTTISSIQIMEIQQIIDHQYCIQSLQCGTTEPLIVFQCKFTLGNICFHSKRGTKGLESHREISQEMTQGYQHIWSLPVAPFSDSMFHFRVAAPDLADCSTDPYFAGIFFTDYFFYFYRRCA

SEQ ID NO: 9138 - protein, 898 aa, Homo Sapiens
MDVVGENEALQQFFEAQGANGTLENPALDTSLLEEFLGNDFDLGALQRQLPDTPPYSASDSCSPPQVKGACYPTLRPTAGRTPAPFLHPTAAPAMPPMHPLQSTSGMGDSCQIHGGFHSCHSNASHLATPLDQSVSSHLGIGCSYPQQPLCHSPGASLPPTKKRKCTQALEDSGECRVWACHCRPMTSRSRSSEVQDPDSEGQNRMPTDQCSPALKWQPCHSVPWHSLLNSHYEKLPDVGYRVVTDKGFNFSPADEAFVCQKKNHFQITIHIQVWGSPKFVETEMGLKPIEMFYLKVFGTKVEATNQIIAIEQSQADRSKKIFNPVKIDLLADQVTKVTLGRLHFSETTANNMRKKGKPNPDQRYFMLVVGLYAANQDQFYLLSAHISERIIVRASNPGQFENDSDALWQRGQVPESIVCHGRVGINTDAPDEALVVCGNMKVMGTIMHPSDSRAKQNIQEVDTNEQLKRIAQMRIVEYDYKPEFASAMGINTAHQTGMIAQEVQEILPRAVREVGDVTCGNGETLENFLMVDKDQIFMENVGAVKQLCKLTNNLEERIEELEIWNRKLARLKRLSSWKSSASEASTISKSSRAVSASSPRRAVHKKNNKVYFSGKRQACPNWVFQTLVITLIAVMAFCLKDQDRRVPNLPPSNITSSQEPALLPTASSSAPNTSLVTTPASLQVPEITFCEILPCQETYCCPIRGMKEVSSSPVQRQSEEKEFHQRRWSDKSKSVLARNALSGPDWESDWIDTTISSIQIMEIQQIIDHQYCIQSLQCGSGNYNYNIPVNKHTPTNVKFSLEINTTEPLIVFQCKFTLGNICFHSKRGTKGLESHREISQEMTQGYQHIWSLPVAPFSDSMFHFRVAAPDLADCSTDPYFAGIFFTDYFFYFYRRCA

SEQ ID NO: 9139 - protein, 910 aa, Homo Sapiens
MDVVGENEALQQFFEAQGANGTLENPALDTSLLEEFLGNDFDLGALQRQLPDTPPYSASDSCSPPQVKGACYPTLRPTAGRTPAPFLHPTAAPAMPPMHPLQSTSGMGDSCQIHGGFHSCHSNASHLATPLDQSVSSHLGIGCSYPQQPLCHSPGASLPPTKKRKCTQALEDSGECRVWACHCRPMTSRSRSSEVQDPDSEGQNRMPTDQCSPALKWQPCHSVPWHSLLNSHYEKLPDVGYRVVTDKGFNFSPADEAFVCQKKNHFQITIHIQVWGSPKFVETEMGLKPIEMFYLKVFGTKVEATNQIIAIEQSQADRSKKIFNPVKIDLLADQVTKVTLGRLHFSETTANNMRKKGKPNPDQRYFMLVVGLYAANQDQFYLLSAHISERIIVRASNPGQFENDSDALWQRGQVPESIVCHGRVGINTDAPDEALVVCGNMKVMGTIMHPSDSRAKQNIQEVDTNEQLKRIAQMRIVEYDYKPEFASAMGINTAHQTGMIAQEVQEILPRAVREVGDVTCGNGETLENFLMVDKDQIFMENVGAVKQLCKLTNNLEERIEELEIWNRKLARLKRLSSWKSSASEASTISKSSRAVSASSPRRAVHKKNNKVYFSGKRQACPNWVFQTLVITLIAVMAFCALTIVALYILSLKDQDRRVPNLPPSNITSSQEPALLPTASSSAPNTSLVTTPASLQVPEITFCEILPCQETYCCPIRGMKEVSSSPVQRQSEEKEFHQRRWSEDKSKSVLARNALSGPDWESDWIDTTISSIQIMEIQQIIDHQYCIQSLQCGSGNYNYNIPVNKHTPTNVKFSLEINTTEPLIVFQCKFTLGNICFHSKRGTKGLESHREISQEMTQGYQHIWSLPVAPFSDSMFHFRVAAPDLADCSTDPYFAGIFFTDYFFYFYRRCA

SEQ ID NO: 9140 - protein, 250 aa, Homo Sapiens
MVFLALTIVALYILSLKDQDRRVPNLPPSNITSSQEPALLPTASSSAPNTSLVTTPASLQVPEITFCEILPCQETYCCPIRGMKEVSSSPVQRQSEEKEFHQRRWSEDKSKSVLARNALSGPDWESDWIDTTISSIQIMEIQQIIDHQYCIQSLQCGTTEPLIVFQCKFTLGNICFHSKRGTKGLESHREISQEMTQGYQHIWSLPVAPFSDSMFHFRVAAPDLADCSTDPYFAGIFFTDYFFYFYRRCA

SEQ ID NO: 9141 - protein, 375 aa, Homo Sapiens
  misc_feature (1)..(1): Xaa can be any naturally occurring amino acid
XIFMENVGAVKQLCKLTNNLEERIEELEIWNRKLARLKRLSSWKSSASEASTISKSSRAVSASSPRRAVHKKNNKVYFSGKRQACPNWVFQTLVITLIAVMAFCALTIVALYILSLKDQDRRVPNLPPSNITSSQEPALLPTASSSAPNTSLVTTPASLQVPEITFCEILPCQETYCCPIRGMKEVSSSPVQRQSEEKEFHQRRWSEDKSKSVLARNALSGPDWESDWIDTTISSIQIMEIQQIIDHQYCIQSLQCGSGNYNYNIPVNKHTPTNVKFSLEINTTEPLIVFQCKFTLGNICFHSKRGTKGLESHREISQEMTQGYQHIWSLPVAPFSDSMFHFRVAAPDLADCSTDPYFAGIFFTDYFFYFYRRCA

SEQ ID NO: 9142 - protein, 76 aa, Homo Sapiens
MRLSLPLLLLLLGAWAIPGGLGDRAPLTATAPQLDDEEMYSAHMPAHLRCDACRAVAYQLRSSRSGPSETSHRPRT

SEQ ID NO: 9143 - protein, 189 aa, Homo Sapiens
MRLSLPLLLLLLGAWAIPGGLGDRAPLTATAPQLDDEEMYSAHMPAHLRCDACRAVAYQMWQNLAKAETKLHTSNSGGRRELSELVYTDVLDRSCSRNWQDYGVREVDQVKRLTGPGLSEGPEPSISVMVTGGPWPTRLSRTCLHYLGEFGEDQIYEAHQQGRGALEALLCGGPQGACSEKVSATREEL

SEQ ID NO: 9144 - protein, 75 aa, Homo Sapiens
MRLSLPLLLLLLGAWAIPGGLGDRAPLTATAPQLDDEEMYSAHMPAHLRCDACRAVAYQRLCSYPPHLPLTEQQS

SEQ ID NO: 9145 - protein, 123 aa, Homo Sapiens
MRLSLPLLLLLLGAWAIPGGLGDRAPLTATAPQLDDEEMYSAHMPAHLRCDACRAVAYQSLLVPDVAKSGKGRDQTSYLKLWGAAGAERVGLHGCPGPELLPELAGLRSSRSGPSETSHRPRT

SEQ ID NO: 9146 - protein, 60 aa, Homo Sapiens
  misc_feature (1)..(1): Xaa can be any naturally occurring amino acid
XSLPLLLLLLGAWAIPGGLGDRAPLTATAPQLDDEEMYSAHMPAHLRCDACRAVAYQAHP

SEQ ID NO: 9147 - protein, 737 aa, Homo Sapiens
MALCSALMTIFTIKMGTAKQAIDQGRSPVIIDNTNIQAWEMKPYVEVAIGKGYRVEFHEPETWWKFDPEELEKRNKHGVSRKKIAQMLDRYEYQMSISIVMNSVEPSHKSTQRPPPPQGRQRERVLKKTGHRLSKTKQKRNRKRNKKQNSQNRIMEENSLEFLSDLTPGDQDPSQSEEEDIEKTRRESEYPFIDGLQNEVGDFVTGYKEKRWKNKDPKDSFQNVMSIVELDNTPKNYLSKEGDNLFVSLLLRPNEISVTCPILTQNLSCVTTDDCSGMKVEKHIRNRHTIALDTQDLSAETSCLFMKKREIVDKNLSHEPILCHQHGIRMSDKVLREEQVYTTKINHWAFFTTNLSDEDLQLGSDRQPYFGSWPAGPHKFICEQRPKKDRACKLAGPDSRGQWIQMIFTSVAASEPGNNPEILTDKLLIGNEDFSPPPETMDSFIETNLFRSCLPQPDIPKNALESTKNKKRRKKRIFNLVPNFDLLGQSRIGVKEREKCDLLTKNHGLKITLGEEKDRISERNSEEENKQKLMTFDHHPLWFYLDIIKATPLNIDGQRYSHCLSFNRLRCSASLYKNYIPSFVLHNLSSIWKPSFTNKKLFLTFESQTRVGNKLNDAGFISPEILHSHPDTSCSLGVTSDFHFLNERFDRKLKRWEEPKELPAEDSQDLTSTDYRSLELPLSQGFAFQLVKLFGSPGVPMESLLPDDYVVPLDWKTLKMIYLQWKMSVEKRQKKIG

SEQ ID NO: 9148 - protein, 737 aa, Homo Sapiens; identical to SEQ ID NO: 9147

SEQ ID NO: 9149 - protein, 752 aa, Homo Sapiens
MSYGEIEEFCLVRIVMALCSALMTIFTIKMGTAKQAIDQGRSPVIIDNTNIQAWEMKPYVEVAIGKGYRVEFHEPETWWKFDPEELEKRNKHGVSRKKIAQMLDRYEYQMSISIVMNSVEPSHKSTQRPPPPQGRQRERVLKKTGHRLSKTKQKRNRKRNKKQNSQNRIMEENSLEFLSDLTPGDQDPSQSEEEDIEKTRRESEYPFIDGLQNEVGDFVTGYKEKRWKNKDPKDSFQNVMSIVELDNTPKNYLSKEGDNLFVSLLLRPNEISVTCPILTQNLSCVTTDDCSGMKVEKHIRNRHTIALDTQDLSAETSCLFMKKREIVDKNLSHEPILCHQHGIRMSDKVLREEQVYTTKINHWAFFTTNLSDEDLQLGSDRQPYFGSWPAGPHKFICEQRPKKDRACKLAGPDSRGQWIQMIFTSVAASEPGNNPEILTDKLLIGNEDFSPPPETMDSFIETNLFRSCLPQPDIPKNALESTKNKKRRKKRIFNLVPNFDLLGQSRIGVKEREKCDLLTKNHGLKITLGEEKDRISERNSEEENKQKLMTFDHHPLWFYLDIIKATPLNIDGQRYSHCLSFNRLRCSASLYKNYIPSFVLHNLSSIWKPSFTNKKLFLTFESQTRVGNKLNDAGFISPEILHSHPDTSCSLGVTSDFHFLNERFDRKLKRWEEPKELPAEDSQDLTSTDYRSLELPLSQGFAFQLVKLFGSPGVPMESLLPDDYVVPLDWKTLKMIYLQWKMSVEKRQKKIG

SEQ ID NO: 9150 - protein, 583 aa, Homo Sapiens
MSYGEIEGKFLGPREEVTSEPRCKKLKSTTESYVFHNHSNADFHRIQEKTGNDWVPVTIIDVRGHSYLQENKIKTTDLHRPLHDEMPGNRPDVIESIDSQVLQEARPPLVSADDEIYSTSKAFIGPIYKPPEKKKRNEGRNEAHVLNGINDRGGQKEKQKFNSEKSEIDNELFQFYKEIEELEKEKDGFENSCKESEPSQEQFVPFYEGHNNGLLKPDEEKKDLSNKAMPSHCDYQQNLGNEPDKYPCNGQVIPTFCDTSFTSFRPEWQSVYPFIVPYGPPLPSLNYHLNIQRFSGPPNPPSNIFQAQDDSQIQNGYYVNNCHVNWNCMTFDQNNEYTDCSENRSSVHPSGNGCSMQDRYVSNGFCEVRERCWKDHCMDKHNGTDRFVNQQFQEEKLNKLQKLLILLRGLPGSGKTTLSRILLGQNRDGIVFSTDDYFHHQDGYRYNVNQLGDAHDWNQNRAKQAIDQGRSPVIIDNTNIQAWEMKPYVEVAIGKGYRVEFHEPETWWKFDPEELEKRNKHGVSRKKIAQMLDRYEYQMSISIVMNSVEPSHKSTQRPPPPQGRQRWGGSLGSHNRVCVTNNH

SEQ ID NO: 9151 - protein, 655 aa, Homo Sapiens
MSYGEIEGKFLGPREEVTSEPRCKKLKSTTESYVFHNHSNADFHRIQEKTGNDWVPVTIIDVRGHSYLQENKIKTTDLHRPLHDEMPGNRPDVIESIDSQVLQEARPPLVSADDEIYSTSKAFIGPIYKPPEKKKRNEGRNEAHVLNGINDRGGQKEKQKFNSEKSEIDNELFQFYKEIEELEKEKDGFENSCKESEPSQEQFVPFYEGHNNGLLKPDEEKKDLSNKAMPSHCDYQQNLGNEPDKYPCNGQVIPTFCDTSFTSFRPEWQSVYPFIVPYGPPLPSLNYHLNIQRFSGPPNPPSNIFQAQDDSQIQNGYYVNNCHVNWNCMTFDQNNEYTDCSENRSSVHPSGNGCSMQDRYVSNGFCEVRERCWKDHCMDKHNGTDRFVNQQFQEEKLNKLQKLLILLRGLPGSGKTTLSRILLGQNRDGIVFSTDDYFHHQDGYRYNVNQLGDAHDWNQNRAKQAIDQGRSPVIIDNTNIQAWEMKPYVEVAIGKGYRVEFHEPETWWKFDPEELEKRNKHGVSRKKIAQMLDRYEYQMSISIVMNSVEPSHKSTQRPPPPQGRQRFDRKLKRWEEPKELPAEDSQDLTSTDYRSLELPLSQGFAFQLVKLFGSPGVPMESLLPDDYVVPLDWKTLKMIYLQWKMSVEKRQKKIG

SEQ ID NO: 9152 - protein, 709 aa, Homo Sapiens
MSYGEIEGKFLGPREEVTSEPRCKKLKSTTESYVFHNHSNADFHRIQEKTGNDWVPVTIIDVRGHSYLQENKIKTTDLHRPLHDEMPGNRPDVIESIDSQVLQEARPPLVSADDEIYSTSKAFIGPIYKPPEKKKRNEGRNEAHVLNGINDRGGQKEKQKFNSEKSEIDNELFQFYKEIEELEKEKDGFENSCKESEPSQEQFVPFYEGHNNGLLKPDEEKKDLSNKAMPSHCDYQQNLGNEPDKYPCNGQVIPTFCDTSFTSFRPEWQSVYPFIVPYGPPLPSLNYHLNIQRFSGPPNPPSNIFQAQDDSQIQNGYYVNNCHVNWNCMTFDQNNEYTDCSENRSSVHPSGNGCSMQDRYVSNGFCEVRERCWKDHCMDKHNGTDRFVNQQFQEEKLNKLQKLLILLRGLPGSGKTTLSRILLGQNRDGIVFSTDDYFHHQDGYRYNVNQLGDAHDWNQNRAKQAIDQGRSPVIIDNTNIQAWEMKPYVEVAIGKGYRVEFHEPETWWKFDPEELEKRNKHGVSRKKIAQMLDRYEYQMSISIVMNSVEPSHKSTQRPPPPQGRQRERVLKKTGHRLSKTKQKRNRKRNKKQNSQNRIMEENSLEFLSDLTPGDQDPSQSEEEDIEKTRRESEYPFIDGLQNEVGDFVTGYKEKRWKNKDPKDSFQNVMSIVELDNTPKNYLSKEGDNLFVSLLLRPNEISVTCPILTQ

SEQ ID NO: 9153 - protein, 125 aa, Homo Sapiens
MAGAGPTMLLREENGCCSRRQSSSSAGDSDGEREDSAAERARQQLEALLNKTMRIRMTDGRTLVGCFLCTDRDCNVILGSAQEFLKPSDSFSAGEPRVLGLAMVPGHHIVSIEVQRESLTGPPYL

SEQ ID NO: 9154 - protein, 135 aa, Homo Sapiens
MAGAGPTMLLREENGCCSRRQSSSSAGDSDGEREDSAAERARQQLEALLNKTMRIRMTDGRTLVGCFLCTDRDCNVILGSAQEFLKPSGQCPGNAHPPDSFSAGEPRVLGLAMVPGHHIVSIEVQRESLTGPPYL

SEQ ID NO: 9155 - protein, 173 aa, Homo Sapiens
MAVAVGVRAAPVLGLARALVLGLRGSQAARWRGWGTAAPGSLWALCECPAGCRELWFRGRAAWAARSERLLHPAQDSDGEREDSAAERARQQLEALLNKTMRIRMTDGRTLVGCFLCTDRDCNVILGSAQEFLKPSDSFSAGEPRVLGLAMVPGHHIVSIEVQRESLTGPPYL

SEQ ID NO: 9156 - protein, 99 aa, Homo Sapiens
MDSDGEREDSAAERARQQLEALLNKTMRIRMTDGRTLVGCFLCTDRDCNVILGSAQEFLKPSDSFSAGEPRVLGLAMVPGHHIVSIEVQRESLTGPPYL

SEQ ID NO: 9157 - protein, 73 aa, Homo Sapiens
MRIRMTDGRTLVGCFLCTDRDCNVILGSAQEFLKPSDSFSAGEPRVLGLAMVPGHHIVSIEVQRESLTGPPYL

SEQ ID NO: 9158 - protein, 83 aa, Homo Sapiens
MRIRMTDGRTLVGCFLCTDRDCNVILGSAQEFLKPSGQCPGNAHPPDSFSAGEPRVLGLAMVPGHHIVSIEVQRESLTGPPYL

SEQ ID NO: 9159 - protein, 252 aa, Homo Sapiens
MCDFMNLSLADCLLVNLAYESSVFCTSIVAQDSRGHIYHGRNLDYPFGNVLRKLTVDVQFLKNGQIAFTGTTFIGYVGLWTGQSPHKFTVSGDERDKGWWWENAIAALFRRHIPVSWLIRATLSESENFEAAVGKLAKTPLIADVYYIVGGTSPREGVVITRNRDGPADIWPLDPLNGAWFRVETNYDHWKPAPKEDDRRTSAIKALNATGQANLSLEALFQVTCVTVSCIPRMFGVLLIVNMKNSVKSSGR

SEQ ID NO: 9160 - protein, 359 aa, Homo Sapiens
MRTADREARPGLPSLLLLLLAGAGLSAASPPAAPRFNVSLDSVPELRWLPVLRHYDLDLVRAAMAQVIGDRVPKWVHVLIGKVVLELERFLPQPFTGEIRGMCDFMNLSLADCLLVNLAYESSVFCTSIVAQDSRGHIYHGRNLDYPFGNVLRKLTVDVQFLKNGQIAFTGTTFIGYVGLWTGQSPHKFTVSGDERDKGWWWENAIAALFRRHIPVSWLIRATLSESENFEAAVGKLAKTPLIADVYYIVGGTSPREGVVITRNRDGPADIWPLDPLNGAWFRVETNYDHWKPAPKEDDRRTSAIKALNATGQANLSLEALFQILSVVPVYNNFTIYTTVMSAGSPDKYMTRIRNPSRK

SEQ ID NO: 9161 - protein, 323 aa, Homo Sapiens
MRTADREARPGLPSLLLLLLAGAGLSAASPPAAPRFNVSLDSVPELRWLPVLRHYDLDLVRAAMAQVIGDRVPKWVHVLIGKVVLELERFLPQPFTGEIRGMCDFMNLSLADCLLVNLAYESSVFCTSIVAQDSRGHIYHGRNLDYPFGNVLRKLTVDVQFLKNGQIAFTGTTFIGYVGLWTGQSPHKFTVSGDERDKGWWWENAIAALFRRHIPVSWLIRATLSESENFEAAVGKLAKTPLIADVYYIVGGTSPREGVVITRNRDGPADIWPLDPLNGAWFRVETNYDHWKPAPKEDDRRTSAIKALNATGQANLSLEALFQ

SEQ ID NO: 9162 - protein, 167 aa, Homo Sapiens
MRTADREARPGLPSLLLLLLAGAGLSAASPPAAPRFNVSLDSVPELRWLPVLRHYDLDLVRAAMAQVIGDRVPKWVHVLIGKVVLELERFLPQPFTGEIRGMCDFMNLSLADCLLVNLAYESSVFCTSIVAQDSRGHIYHGRNLDYPFGNVLRKLTVDVQFLKNGQV

SEQ ID NO: 9163 - protein, 139 aa, Homo Sapiens
  misc_feature (1)..(1): Xaa can be any naturally occurring amino acid
XDKGWWWENAIAALFRRHIPVSWLIRATLSESENFEAAVGKLAKTPLIADVYYIVGGTSPREGVVITRNRDGPADIWPLDPLNGAWFRVETNYDHWKPAPKEDDRRTSAIKALNATGQANLSLEALFQLHNLYYGNERR

SEQ ID NO: 9164 - protein, 222 aa, Homo Sapiens
  misc_feature (1)..(1): Xaa can be any naturally occurring amino acid
XTSIVAQDSRGHIYHGRNLDYPFGNVLRKLTVDVQFLKNGQIAFTGTTFIGYVGLWTGQSPHKFTVSGDERDKGWWWENAIAALFRRHIPVSWLIRATLSESENFEAAVGKLAKTPLIADVYYIVGGTSPREGVVITRNRDGPADIWPLDPLNGAWFRVETNYDHWKPAPKEDDRRTSAIKALNATGQANLSLEALFQILSVVPVYNKLFPLAEFPEVGLLS

SEQ ID NO: 9165 - protein, 411 aa, Homo Sapiens
MLLKTVLLLGHVAQVLMLDNGLLQTPPMGWLAWERFRCNINCDEDPKNCISEQLFMEMADRMAQDGWRDMGYTYLNIDDCWIGGRDASGRLMPDPKRFPHGIPFLADYVHSLGLKLGIYADMGNFTCMGYPGTTLDKVVQDAQTFAEWKVDMLKLDGCFSTPEERAQGYPKMAAALNATGRPIAFSCSWPAYEGGLPPRVNYSLLADICNLWRNYDDIQDSWWSVLSILNWFVEHQDILQPVAGPGHWNDPDMLLIGNFGLSLEQSRAQMALWTVLAAPLLMSTDLRTISAQNMDILQNPLMIKINQDPLGIQGRRIHKEKSLIEVYMRPLSNKASALVFFSCRTDMPYRYHSSLGQLNFTGSVIYEAQDVYSGDIISGLRDETNFTVIINPSGVVMWYLYPIKNLEMSQQ

SEQ ID NO: 9166 - protein, 411 aa, Homo Sapiens; identical to SEQ ID NO: 9165

SEQ ID NO: 9167 - protein, 411 aa, Homo Sapiens; identical to SEQ ID NO: 9165

SEQ ID NO: 9168 - protein, 743 aa, Homo Sapiens
MEAVAVAAAVGVLLLAGAGGAAGDEAREAAAVRALVARLLGPGPAADFSVSVERALAAKPGLDTYSLGGGGAARVRVRGSTGVAAAAGLHRYLRDFCGCHVAWSGSQLRLPRPLPAVPGELTEATPNRYRYYQNVCTQSYSFVWWDWARWEREIDWMALNGINLALAWSGQEAIWQRVYLALGLTQAEINEFFTGPAFLAWGRMGNLHTWDGPLPPSWHIKQLYLQHRVLDQMRSFGMTPVLPAFAGHVPEAVTRVFPQVNVTKMGSWGHFNCSYSCSFLLAPEDPIFPIIGSLFLRELIKEFGTDHIYGADTFNEMQPPSSEPSYLAAATTAVYEAMTAVDTEAVWLLQGWLFQHQPQFWGPAQIRAVLGAVPRGRLLVLDLFAESQPVYTRTASFQGQPFIWCMLHNFGGNHGLFGALEAVNGGPEAARLFPNSTMVGTGMAPEGISQNEVVYSLMAELGWRKDPVPDLAAWVTSFAARRYGVSHPDAGAAWRLLLRSVYNCSGEACRGHNRSPLVRRPSLQMNTSIWYNRSDVFEAWRLLLTSAPSLATSPAFRYDLLDLTRQAVQELVSLYYEEARSAYLSKELASLLRAGGVLAYELLPALDEVLASDSRFLLGSWLEQARAAAVSEAEADFYEQNSRYQLTLWGPEGNILDYANKQLAGLVANYYTPRWRLFLEALVDSVAQGIPFQQHQFDKNVFQLEQAFVLSKQRYPSQPRGDTVDLAKKIFLKYYPRWVAGSW

SEQ ID NO: 9169 - protein, 81 aa, Homo Sapiens
MGDLFQGRGPSRVGCAPAHDTARRYRYYQNVCTQSYSFVWWDWARWEREIDWMALNGINLALAWSGQEAIWQRVYLALGLT

SEQ ID NO: 9170 - protein, 122 aa, Homo Sapiens
RGAAPLPARLLWLPRGLVRLSAAPAAATASRAGGADRGHAQQVYLALGLTQAEINEFFTGPAFLAWGRMGNLHTWDGPLPPSWHIKQLYLQHRVLDQMRSFGMTPVLPAFAGHVPEAVTSGY

SEQ ID NO: 9171 - protein, 65 aa, Homo Sapiens
  misc_feature (1)..(1): Xaa can be any naturally occurring amino acid
XFGTDHIYGADTFNEMQPPSSEPSYLAAATTAVYEAMTAVLGARPDQGCAGSCAPWPPPGSGPVC

SEQ ID NO: 9172 - protein, 170 aa, Homo Sapiens
  misc_feature (1)..(1): Xaa can be any naturally occurring amino acid
XGRRGAAPLPARLLWLPRGLVRLSAAPAAATASRAGGADRGHAQQVYLALGLTQAEINEFFTGPAFLAWGRMGNLHTWDGPLPPSWHIKQLYLQHRVLDQMRSFGMTPVLPAFAGHVPEAVTRVFPQVNVTKMGSWGHFNCSYSCSFLLAPEDPIFPIIGSLFLRELIKE

SEQ ID NO: 9173 - protein, 534 aa, Homo Sapiens
MATALMAVVLRAAAVAPRLRGRGGTGGARRLSCGARRRAARGTSPGRRLSTAWSQPQPPPEEYAGADDVSQSPVAEEPSWVPSPRPPVPHESPEPPSGRSLVQRDIQAFLNQCGASPGEARHWLTQFQTCHHSADKPFAVIEVDEEVLKCQQGVSSLAFALAFLQRMDMKPLVVLGLPAPTAPSGCLSFWEAKAQLAKSCKVLVDALRHNAAAAVPFFGGGSVLRAAEPAPHASYGGIVSVETDLLQWCLESGSIPILCPIGETAARRSVLLDSLEVTASLAKALRPTKIIFLNNTGGLRDSSHKVLSNVNLPADLDLVCNAEWVSTKERQQMRLIVDVLSRLPHHSSAVITAASTLLTELFSNKGSGTLFKNAERMLRVRSLDKLDQGRLVDLVNASFGKKLRDDYLASLRPRLHSIYVSEGYNAAAILTMEPVLGGTPYLDKFVVSSSRQGQGSGQMLWECLRRDLQTLFWRSRVTNPINPWYFKHSDGSFSNKQWIFFWFGLADIRDSYELVNHAKGLPDSFHKPASDPGS

SEQ ID NO: 9174 - protein, 511 aa, Homo Sapiens
SCGARRRAARGTSPGRRLSTAWSQPQPPPEEYAGADDVSQSPVAEEPSWVPSPRPPVPHESPEPPSGRSLVQRDIQAFLNQCGASPGEARHWLTQFQTCHHSADKPFAVIEVDEEVLKCQQGVSSLAFALAFLQRMDMKPLVVLGLPAPTAPSGCLSFWEAKAQLAKSCKVLVDALRHNAAAAVPFFGGGSVLRAAEPAPHASYGGIVSVETDLLQWCLESGSIPILCPIGETAARRSVLLDSLEVTASLAKALRPTKIIFLNNTGGLRDSSHKVLSNVNLPADLDLVCNAEWVSTKERQQMRLIVDVLSRLPHHSSAVITAASTLLTELFSNKGSGTLFKNAERMLRVRSLDKLDQGRLVDLVNASFGKKLRDDYLASLRPRLHSIYVSEGLPLSRCARYNAAAILTMEPVLGGTPYLDKFVVSSSRQGQGSGQMLWECLRRDLQTLFWRSRVTNPINPWYFKHSDGSFSNKQWIFFWFGLADIRDSYELVNHAKGLPDSFHKPASDPGS

SEQ ID NO: 9175 - protein, 104 aa, Homo Sapiens
MSPPPLLQPLLLLLPLLNVEPSGATLIRIPLHRVQPGRRILNLLRGWREPAELPKLGAPSPGDKPIFVPLSNYRDGYTTDLIPKPLAPSRPMGPSLPFNMELGG

SEQ ID NO: 9176 - protein, 268 aa, Homo Sapiens
MSPPPLLQPLLLLLPLLNVEPSGATLIRIPLHRVQPGRRILNLLRGWREPAELPKLGAPSPGDKPIFVPLSNYRDVQYFGEIGLGTPPQNFTVAFDTGSSNLWVPSRRCHFFSVPCSSSSFQANGTKFAIQYGTGRVDGILSEDKLTIGGIKGASVIFGEALWEPSLVFAFAHFDGILGLGFPILSVEGVRPPMDVLVEQGLLDKPVFSFYLNRDPEEPDGGELVLGGSDPAHYIPPLTFVPVTVPAYWQIHMERVKVGPGLTLCAKG

SEQ ID NO: 9177 - protein, 420 aa, Homo Sapiens
MSPPPLLQPLLLLLPLLNVEPSGATLIRIPLHRVQPGRRILNLLRGWREPAELPKLGAPSPGDKPIFVPLSNYRDVQYFGEIGLGTPPQNFTVAFDTGSSNLWVPSRRCHFFSVPCWLHHRFDPKASSSFQANGTKFAIQYGTGRVDGILSEDKLTIGGIKGASVIFGEALWEPSLVFAFAHFDGILGLGFPILSVEGVRPPMDVLVEQGLLDKPVFSFYLNRDPEEPDGGELVLGGSDPAHYIPPLTFVPVTVPAYWQIHMERVKVGPGLTLCAKGCAAILDTGTSLITGPTEEIRALHAAIGGIPLLAGEYIILCSEIPKLPAVSFLLGGVWFNLTAHDYVIQTTRNGVRLCLSGFQALDVPPPAGPFWILGDVFLGTYVAVFDRGDMKSSARVGLARARTRGADLGWGETAQAQFPG

SEQ ID NO: 9178 - protein, 237 aa, Homo Sapiens
MLPDGPGSSLWGNPGLQTSDSPNAVHEVEKWLPRLHALVVGPGLGRDDALLRNVQGILEVSKARDIPVVIDADGLWLVAQQPALIHGYRKAVLTPNHVEFSRLYDAVLRGPMDSDDSHGSVLRLSQALGNVTVVQKGERDILSNGQQVLVCSQEGSSRRCGGQGDLLSGSLGVLVHWALLAGPQKTNGSSPLLVAAFGACSLTRQCNHQAFQKHGRSTTTSDMIAEVGAAFSKLFET

SEQ ID NO: 9179 - protein, 390 aa, Homo Sapiens
MVTRAGAGTAVAGAVVVALLSAALALYGPPLDAVLERAFSLRKAHSIKDMENTLQLVRNIIPPLSSTKHKGQDGRIGVVGGCQEYTGAPYFAAISALKVGADLSHVFCASAAAPVIKAYSPELIVHPVLDSPNAVHEVEKWLPRLHALVVGPGLGRDDALLRNVQGILEVSKARDIPVVIDADGLWLVAQQPALIHGYRKAVLTPNHVEFSRLYDAVLRGPMDSDDSHGSVLRLSQALGNVTVVQKGERDILSNGQQVLVCSQEGSSRRCGGQGDLLSGSLGVLVHWALLAGPQKTNGGISDLKLTIWGPEIETGVKTRAQGSCGPRTTTPTSPHLLLSPSPQVQPSPGGRVWRLLSHQAVQPPSLPEARSLHHHLRHDRRGGGRLQQAL

SEQ ID NO: 9180 - protein, 260 aa, Homo Sapiens
MSRLRALLGLGLLVAGSRVPRIKSQTIACRSGPTWWGPQRLNSGGRWDSEVMASTVVKYLSQEEAQAVDQELFNEYQFSVDQLMELAGLSCATAIAKAYPPTSMSRSPPTVLVICGPGNNGGDGLVCARHLKLFGYEPTIYYPKRPNKPLFTALVTQCQKMDIPFLGEMPAELQGRCSGTVPQHPECPEGTHCAHCQHRHSLRMGRGEGKCWRDPARLAHIPHSPQKICNPVYRSLPLPGGSFCATCSGEEVPAEPATLP

SEQ ID NO: 9181 - protein, 245 aa, Homo Sapiens
MSRLRALLGLGLLVAGSRVPRIKSQTIACRSGPTWWGPQRLNSGGRWDSEVMASTVVKYLSQEEAQAVDQELFNEYQFSVDQLMELAGLSCATAIAKAYPPTSMSRSPPTVLVICGPGNNGGDGLVCARHLKLFGYEPTIYYPKRPNKPLFTALVTQCQKMDIPFLGEMPAEPMTIDELYELVVDAIFGFSFKGDVREPFHSILSVLKGLTVPIASIDIPSGAGIQKVGWGRLGPYPPDSCPHQV

SEQ ID NO: 9182 - protein, 288 aa, Homo Sapiens
MSRLRALLGLGLLVAGSRVPRIKSQTIACRSGPTWWGPQRLNSGGRWDSEVMASTVVKYLSQEEAQAVDQELFNEYQFSVDQLMELAGLSCATAIAKAYPPTSMSRSPPTVLVICGPGNNGGDGLVCARHLKLFGYEPTIYYPKRPNKPLFTALVTQCQKMDIPFLGEMPAEPMTIDELYELVVDAIFGFSFKGDVREPFHSILSVLKGLTVPIASIDIPSGWDVEKGNAGGIQPDLLISLTAPKKSATQFTGRYHYLGGRFVPPALEKKYQLNLPPYPDTECVYRLQ

SEQ ID NO: 9183 - protein, 128 aa, Homo Sapiens
MCSLALQQLISMDLFWRLFFVCGQEGLRALEATGMMLRVLVGAVLPAMLLAAPPPINKLALFPDKSAWCEAKNITQIVGHSGCEAKSIQNRACLGQCFSYSVPNTFPQSTESLVHCDSCMPAQSMWEI

SEQ ID NO: 9184 - protein, 215 aa, Homo Sapiens
MCSLALQQLISMDLFWRLFFVCGQEGLRALEATGMMLRVLVGAVLPAMLLAAPPPINKLALFPDKSAWCEAKNITQIVGHSGCEAKSIQNRACLGQCFSYSVPNTFPQSTESLVHCDSCMPAQSMWEIVTLECPGHEEVPRVDKLVEKILHCSCQACGKEPSHEGLSVYVQGEDGPGSQPGTHPHPHPHPHPGGQTPEPEDPPGAPHTEEEGAED

SEQ ID NO: 9185 - protein, 163 aa, Homo Sapiens
MLRVLVGAVLPAMLLAAPPPINKLALFPDKSAWCEAKNITQIVGHSGCEAKSIQNRACLGQCFSYSVPNTFPQSTESLVHCDSCMPAQSMWEIVTLECPGHEEVPRVDKLVEKILHCSCQACGKEPSHEGLSVYVQGEDGPGSQPGTHPHPHPHPHPGGQTPE

SEQ ID NO: 9186 - protein, 109 aa, Homo Sapiens
MMLRVLVGAVLPAMLLAAPPPINKLALFPDKSAWCEAKNITQIVGHSGCEAKSIQNRACLGQCFSYSVPNTFPQSTESLVHCDSCMPAQSMWEIVTLECPGHEEVPRVD

SEQ ID NO: 9187 - protein, 116 aa, Homo Sapiens
MMLRVLVGAVLPAMLLAAPPPINKLALFPDKSAWCEAKNITQIVGHSGCEAKSIQNRACLGQCFSYSVPNTFPQSTESLVHCDSCMPAQSMWEIVTLECPGHEEVPRVDKLVEKIL

SEQ ID NO: 9188 - protein, 117 aa, Homo Sapiens
MMLRVLVGAVLPAMLLAAPPPINKLALFPDKSAWCEAKNITQIVGHSGCEAKSIQNRACLGQCFSYSVPNTFPQSTESLVHCDSCMPAQSMWEIVTLECPGHEEVPRVDKLVEKILH

SEQ ID NO: 9189 - protein, 128 aa, Homo Sapiens
MMLRVLVGAVLPAMLLAAPPPINKLALFPDKSAWCEAKNITQIVGHSGCEAKSIQNRACLGQCFSYSVPNTFPQSTESLVHCDSCMPAQSMWEIVTLECPGHEEVPRVDKLVEKILHCSCQACGKEPS

SEQ ID NO: 9190 - protein, 181 aa, Homo Sapiens
MMLRVLVGAVLPAMLLAAPPPINKLALFPDKSAWCEAKNITQIVGHSGCEAKSIQNRACLGQCFSYSVPNTFPQSTESLVHCDSCMPAQSMWEIVTLECPGHEEVPRVDKLVEKILHCSCQACGKEPSHEGLSVYVQGEDGPGSQPGTHPHPHPHPHPGGQTPEPEDPPGAPHTEEEGAED

SEQ ID NO: 9191 - protein, 181 aa, Homo Sapiens; identical to SEQ ID NO: 9190

SEQ ID NO: 9192 - protein, 181 aa, Homo Sapiens; identical to SEQ ID NO: 9190

SEQ ID NO: 9193 - protein, 181 aa, Homo Sapiens; identical to SEQ ID NO: 9190

SEQ ID NO: 9194 - protein, 181 aa, Homo Sapiens; identical to SEQ ID NO: 9190

SEQ ID NO: 9195 - protein, 181 aa, Homo Sapiens; identical to SEQ ID NO: 9190

SEQ ID NO: 9196 - protein, 216 aa, Homo Sapiens
MPGNLMSQTSRAVSIWKFPAKLGKTHGHRALEATGMMLRVLVGAVLPAMLLAAPPPINKLALFPDKSAWCEAKNITQIVGHSGCEAKSIQNRACLGQCFSYSVPNTFPQSTESLVHCDSCMPAQSMWEIVTLECPGHEEVPRVDKLVEKILHCSCQACGKEPSHEGLSVYVQGEDGPGSQPGTHPHPHPHPHPGGQTPEPEDPPGAPHTEEEGAED

SEQ ID NO: 9197 - protein, 165 aa, Homo Sapiens
EFILVQADTPSSPSIDQVEPYSSTAQVQFDEPEATGGVPILKYKAEWRAVGEEVWHSKWYDAKEASMEGIVTIVGLKPETTYAVRLAALNGKGLGEISAASEFKTQPVHSPPPPASASSSTPVPLSPPDTTWPLPALATTEPAKNIAQNHCCNMFQAGLHNALMK

SEQ ID NO: 9198 - protein, 133 aa, Homo Sapiens
MLQTKDLIWTLFFLGTAAKPKITYVENQTAMELEEQVTLTCEASGDPIPSITWRTSTRNISSEEKTLDGHMVVRSHARVSSLTLKSIQYTDAGEYICTASNTIGQDSQSMYLEVQYAPKLQGPVAVYTWEGNQ

SEQ ID NO: 9199 - protein, 136 aa, Homo Sapiens [sequence omitted]

SEQ ID NO: 9200 - protein, 858 aa, Homo Sapiens
MLQTKDLIWTLFFLGTAVSLQVDIVPSQGEISVGESKFFLCQVAGDAKDKDISWFSPNGEKLTPNQQRISVVWNDDSSSTLTIYNANIDDAGIYKCVVTGEDGSESEATVNVKIFQKLMFKNAPTPQEFREGEDAVIVCDVVSSLPPTIIWKHKGRDVILKKDVRFIVLSNNYLQIRGIKKTDEGTYRCEGRILARGEINFKDIQVIVNVPPTIQARQNIVNATANLGQSVTLVCDAEGFPEPTMSWTKDGEQIEQEEDDEKYIFSDDSSQLTIKKVDKNDEAEYICIAENKAGEQDATIHLKVFAKPKITYVENQTAMELEEQVTLTCEASGDPIPSITWRTSTRNISSEEKASWTRPEKQETLDGHMVVRSHARVSSLTLKSIQYTDAGEYICTASNTIGQDSQSMYLEVQYAPKLQGPVAVYTWEGNQVNITCEVFAYPSATISWFRDGQLLPSSNYSNIKIYNTPSASYLEVTPDSENDFGNYNCTAVNRIGQESLEFILVQADTPSSPSIDQVEPYSSTAQVQFDEPEATGGVPILKYKAEWRAVGEEVWHSKWYDAKEASMEGIVTIVGLKPETTYAVRLAALNGKGLGEISAASEFKTQPVQGEPSAPKLEGQMGEDGNSIKVNLIKQDDGGSPIRHYLVRYRALSSEWKPEIRLPSGSDHVMLKSLDWNAEYEVYVVAENQQGKSKAAHFVFRTSAQPTAIPANGSPTSGLSTGAIVGILIVIFVLLLVVVDITCYFLNKCGLFMCIAVNLCGKAGPGAKGKDMEEGKAAFSKDESKEPIVEVRTEEERTPNHDGGKHTEPNETTPLTEPEKGPVEAKPECQETETKPAPAEVKTVPNDATQTKENESKA

SEQ ID NO: 9201 - protein, 725 aa, Homo Sapiens
MLQTKDLIWTLFFLGTAVSLQVDIVPSQGEISVGESKFFLCQVAGDAKDKDISWFSPNGEKLTPNQQRISVVWNDDSSSTLTIYNANIDDAGIYKCVVTGEDGSESEATVNVKIFQKLMFKNAPTPQEFREGEDAVIVCDVVSSLPPTIIWKHKGRDVILKKDVRFIVLSNNYLQIRGIKKTDEGTYRCEGRILARGEINFKDIQVIVNVPPTIQARQNIVNATANLGQSVTLVCDAEGFPEPTMSWTKDGEQIEQEEDDEKYIFSDDSSQLTIKKVDKNDEAEYICIAENKAGEQDATIHLKVFAKPKITYVENQTAMELEEQVTLTCEASGDPIPSITWRTSTRNISSEEKTLDGHMVVRSHARVSSLTLKSIQYTDAGEYICTASNTIGQDSQSMYLEVQYAPKLQGPVAVYTWEGNQVNITCEVFAYPSATISWFRDGQLLPSSNYSNIKIYNTPSASYLEVTPDSENDFGNYNCTAVNRIGQESLEFILVQADTPSSPSIDQVEPYSSTAQVQFDEPEATGGVPILKYKAEWRAVGEEVWHSKWYDAKEASMEGIVTIVGLKPETTYAVRLAALNGKGLGEISAASEFKTQPVREPSAPKLEGQMGEDGNSIKVNLIKQDDGGSPIRHYLVRYRALSSEWKPEIRLPSGSDHVMLKSLDWNAEYEVYVVAENQQGKSKAAHFVFRTSAQPTAIPATLGGNSASYTFVSLLFSAVTLLLLC

SEQ ID NO: 9202 - protein, 364 aa, Homo Sapiens
MLQTKDLIWTLFFLGTAVSLQVDIVPSQGEISVGESKFFLCQVAGDAKDKDISWFSPNGEKLTPNQQRISVVWNDDSSSTLTIYNANIDDAGIYKCVVTGEDGSESEATVNVKIFQKLMFKNAPTPQEFREGEDAVIVCDVVSSLPPTIIWKHKGRDVILKKDVRFIVLSNNYLQIRGIKKTDEGTYRCEGRILARGEINFKDIQVIVNVPPTIQARQNIVNATANLGQSVTLVCDAEGFPEPTMSWTKDGEQIEQEEDDEKYIFSDDSSQLTIKKVDKNDEAEYICIAENKAGEQDATIHLKVFAKPKITYVENQTAMELEEQVTLTCEASGDPIPSITWRTSTRNISSEEKASWTRPEKQEV

SEQ ID NO: 9203 - protein, 761 aa, Homo Sapiens
MLQTKDLIWTLFFLGTAVSLQVDIVPSQGEISVGESKFFLCQVAGDAKDKDISWFSPNGEKLTPNQQRISVVWNDDSSSTLTIYNANIDDAGIYKCVVTGEDGSESEATVNVKIFQKLMFKNAPTPQEFREGEDAVIVCDVVSSLPPTIIWKHKGRDVILKKDVRFIVLSNNYLQIRGIKKTDEGTYRCEGRILARGEINFKDIQVIVNVPPTIQARQNIVNATANLGQSVTLVCDAEGFPEPTMSWTKDGEQIEQEEDDEKYIFSDDSSQLTIKKVDKNDEAEYICIAENKAGEQDATIHLKVFAKPKITYVENQTAMELEEQVTLTCEASGDPIPSITWRTSTRNISSEEKTLDGHMVVRSHARVSSLTLKSIQYTDAGEYICTASNTIGQDSQSMYLEVQYAPKLQGPVAVYTWEGNQVNITCEVFAYPSATISWFRDGQLLPSSNYSNIKIYNTPSASYLEVTPDSENDFGNYNCTAVNRIGQESLEFILVQADTPSSPSIDQVEPYSSTAQVQFDEPEATGGVPILKYKAEWRAVGEEVWHSKWYDAKEASMEGIVTIVGLKPETTYAVRLAALNGKGLGEISAASEFKTQPVHSPPPPASASSSTPVPLSPPDTTWPLPALATTEPAKGEPSAPKLEGQMGEDGNSIKVNLIKQDDGGSPIRHYLVRYRALSSEWKPEIRLPSGSDHVMLKSLDWNAEYEVYVVAENQQGKSKAAHFVFRTSAQPTAIPATLGGNSASYTFVSLLFSAVTLLLLC

SEQ ID NO: 9204 - protein, 848 aa, Homo Sapiens [sequence omitted]

SEQ ID NO: 9205 - protein, 761 aa, Homo Sapiens [sequence omitted]

SEQ ID NO: 9206 - protein, 726 aa, Homo Sapiens
MLQTKDLIWTLFFLGTAVSLQVDIVPSQGEISVGESKFFLCQVAGDAKDKDISWFSPNGEKLTPNQQRISVVWNDDSSSTLTIYNANIDDAGIYKCVVTGEDGSESEATVNVKIFQKLMFKNAPTPQEFREGEDAVIVCDVVSSLPPTIIWKHKGRDVILKKDVRFIVLSNNYLQIRGIKKTDEGTYRCEGRILARGEINFKDIQVIVNVPPTIQARQNIVNATANLGQSVTLVCDAEGFPEPTMSWTKDGEQIEQEEDDEKYIFSDDSSQLTIKKVDKNDEAEYICIAENKAGEQDATIHLKVFAKPKITYVENQTAMELEEQVTLTCEASGDPIPSITWRTSTRNISSEEKTLDGHMVVRSHARVSSLTLKSIQYTDAGEYICTASNTIGQDSQSMYLEVQYAPKLQGPVAVYTWEGNQVNITCEVFAYPSATISWFRDGQLLPSSNYSNIKIYNTPSASYLEVTPDSENDFGNYNCTAVNRIGQESLEFILVQADTPSSPSIDQVEPYSSTAQVQFDEPEATGGVPILKYKAEWRAVGEEVWHSKWYDAKEASMEGIVTIVGLKPETTYAVRLAALNGKGLGEISAASEFKTQPVQGEPSAPKLEGQMGEDGNSIKVNLIKQDDGGSPIRHYLVRYRALSSEWKPEIRLPSGSDHVMLKSLDWNAEYEVYVVAENQQGKSKAAHFVFRTSAQPTAIPATLGGNSASYTFVSLLFSAVTLLLLC

SEQ ID NO: 9207 - protein, 884 aa, Homo Sapiens [sequence omitted]

SEQ ID NO: 9208 - protein, 884 aa, Homo Sapiens
MLQTKDLIWTLFFLGTAVSLQVDIVPSQGEISVGESKFFLCQVAGDAKDKDISWFSPNGEKLTPNQQRISVVWNDDSSSTLTIYNANIDDAGIYKCVVTGEDGSESEATVNVKIFQKLMFKNAPTPQEFREGEDAVIVCDVVSSLPPTIIWKHKGRDVILKKDVRFIVLSNNYLQIRGIKKTDEGTYRCEGRILARGEINFKDIQVIVNVPPTIQARQNIVNATANLGQSVTLVCDAEGFPEPTMSWTKDGEQIEQEEDDEKYIFSDDSSQLTIKKVDKNDEAEYICIAENKAGEQDATIHLKVFAKPKITYVENQTAMELEEQVTLTCEASGDPIPSITWRTSTRNISSEEKASWTRPEKQEVHAPWNWQVGRQKGQAGSAGFPGSHETLDGHMVVRSHARVSSLTLKSIQYTDAGEYICTASNTIGQDSQSMYLEVQYAPKLQGPVAVYTWEGNQVNITCEVFAYPSATISWFRDGQLLPSSNYSNIKIYNTPSASYLEVTPDSENDFGNYNCTAVNRIGQESLEFILVQADTPSSPSIDQVEPYSSTAQVQFDEPEATGGVPILKYKAEWRAVGEEVWHSKWYDAKEASMEGIVTIVGLKPETTYAVRLAALNGKGLGEISAASEFKTQPVQGEPSAPKLEGQMGEDGNSIKVNLIKQDDGGSPIRHYLVRYRALSSEWKPEIRLPSGSDHVMLKSLDWNAEYEVYVVAENQQGKSKAAHFVFRTSAQPTAIPANGSPTSGLSTGAIVGILIVIFVLLLVVVDITCYFLNKCGLFMCIAVNLCGKAGPGAKGKDMEEGKAAFSKDESKEPIVEVRTEEERTPNHDGGKHTEPNETTPLTEPEKGPVEAKPECQETETKPAPAEVKTVPNDATQTKENESKA

SEQ ID NO: 9209 - protein, 858 aa, Homo Sapiens [sequence omitted]

SEQ ID NO: 9210 - protein, 848 aa, Homo Sapiens
MLQTKDLIWTLFFLGTAVSLQVDIVPSQGEISVGESKFFLCQVAGDAKDKDISWFSPNGEKLTPNQQRISVVWNDDSSSTLTIYNANIDDAGIYKCVVTGEDGSESEATVNVKIFQKLMFKNAPTPQEFREGEDAVIVCDVVSSLPPTIIWKHKGRDVILKKDVRFIVLSNNYLQIRGIKKTDEGTYRCEGRILARGEINFKDIQVIVNVPPTIQARQNIVNATANLGQSVTLVCDAEGFPEPTMSWTKDGEQIEQEEDDEKYIFSDDSSQLTIKKVDKNDEAEYICIAENKAGEQDATIHLKVFAKPKITYVENQTAMELEEQVTLTCEASGDPIPSITWRTSTRNISSEEKTLDGHMVVRSHARVSSLTLKSIQYTDAGEYICTASNTIGQDSQSMYLEVQYAPKLQGPVAVYTWEGNQVNITCEVFAYPSATISWFRDGQLLPSSNYSNIKIYNTPSASYLEVTPDSENDFGNYNCTAVNRIGQESLEFILVQADTPSSPSIDQVEPYSSTAQVQFDEPEATGGVPILKYKAEWRAVGEEVWHSKWYDAKEASMEGIVTIVGLKPETTYAVRLAALNGKGLGEISAASEFKTQPVQGEPSAPKLEGQMGEDGNSIKVNLIKQDDGGSPIRHYLVRYRALSSEWKPEIRLPSGSDHVMLKSLDWNAEYEVYVVAENQQGKSKAAHFVFRTSAQPTAIPANGSPTSGLSTGAIVGILIVIFVLLLVVVDITCYFLNKCGLFMCIAVNLCGKAGPGAKGKDMEEGKAAFSKDESKEPIVEVRTEEERTPNHDGGKHTEPNETTPLTEPEKGPVEAKPECQETETKPAPAEVKTVPNDATQTKENESKA

SEQ ID NO: 9211 - protein, 229 aa, Homo Sapiens
TISWFRDGQLLPSSNYSNIKIYNTPSASYLEVTPDSENDFGNYNCTAVNRIGQESLEFILVQADTPSSPSIDQVEPYSSTAQVQFDEPEATGGVPILKYKAEWRAVGEEVWHSKWYDAKEASMEGIVTIVGLKPETTYAVRLAALNGKGLGEISAASEFKTQPVHSPPPREPSAPKLEGQMGEDGNSIKVNLIKQDDGGSPIRHYLVRYRALSSEWKPEIRLPSGSDHV

SEQ ID NO: 9212 - protein, 357 aa, Homo Sapiens
  misc_feature (1)..(1): Xaa can be any naturally occurring amino acid
XFILVQADTPSSPSIDQVEPYSSTAQVQFDEPEATGGVPILKYKAEWRAVGEEVWHSKWYDAKEASMEGIVTIVGLKPETTYAVRLAALNGKGLGEISAASEFKTQPVREPSAPKLEGQMGEDGNSIKVNLIKQDDGGSPIRHYLVRYRALSSEWKPEIRLPSGSDHVMLKSLDWNAEYEVYVVAENQQGKSKAAHFVFRTSAQPTAIPANGSPTSGLSTGAIVGILIVIFVLLLVVVDITCYFLNKCGLFMCIAVNLCGKAGPGAKGKDMEEGKAAFSKDESKEPIVEVRTEEERTPNHDGGKHTEPNETTPLTEPEKGPVEAKPECQETETKPAPAEVKTVPNDATQTKENESKA

SEQ ID NO: 9213 - protein, 84 aa, Homo Sapiens
  misc_feature (1)..(1): Xaa can be any naturally occurring amino acid
XQDDGGSPIRHYLVRYRALSSEWKPEIRLPSGSDHVMLKSLDWNAEYEVYVVAENQQGKSKAAHFVFRTSAQPTAIPVTLLLLC

SEQ ID NO: 9214 - protein, 468 aa, Homo Sapiens
  misc_feature (1)..(1): Xaa can be any naturally occurring amino acid
XSGSDHVMLKSLDWNAEYEVYVVAENQQGKSKAAHFVFRTSAQPTAIPANGSPTSGLSTGAIVGILIVIFVLLLVVVDITCYFLNKCGLFMCIAVNLCGKAGPGAKGKDMEEGKAAFSKDESKEPIVEVRTEEERTPNHDGGKHTEPNETTPLTEPELPADTTATVEDMLPSVTTVTTNSDTITETFATAQNSPTSETTTLTSSIAPPATATPDSNSVPAGQATPSKGPSASAPSPAPASAPKVAPLVDLSDTPTSTPAASNLSSSVLANQGAVLSPSAPAGVGEASKAPPASKPTPAPVPTPTGAASPLAAAAAPATEAPQAKQEAPSTKGPDPEPTQPGAAKSPAEAATALASPKSEAASVSTTNPSQGEDFKMDEGNFKTPDIDLAKDVFAALGSPAPAAGASGQAPELAPSTADSSVSPAPAKTEKGPVEAKPECQETETKPAPAEVKTVPNDATQTKENESKA

SEQ ID NO: 9215 - protein, 372 aa, Homo Sapiens
  misc_feature (1)..(1): Xaa can be any naturally occurring amino acid
XTPSSPSIDQVEPYSSTAQVQFDEPEATGGVPILKYKAEWRAVGEEVWHSKWYDAKEASMEGIVTIVGLKPETTYAVRLAALNGKGLGEISAASEFKTQPVHSPPPPASASSSTPVPLSPPDKGEPSAPKLEGQMGEDGNSIKVNLIKQDDGGSPIRHYLVRYRALSSEWKPEIRLPSGSDHVMLKSLDWNAEYEVYVVAENQQGKSKAAHFVFRTSAQPTAIPANGSPTSGLSTGAIVGILIVIFVLLLVVVDITCYFLNKCGLFMCIAVNLCGKAGPGAKGKDMEEGKAAFSKDESKEPIVEVRTEEERTPNHDGGKHTEPNETTPLTEPEKGPVEAKPECQETETKPAPAEVKTVPNDATQTKENESKA

SEQ ID NO: 9216 - protein, 305 aa, Homo Sapiens
YNTPSASYLEVTPDSENDFGNYNCTAVNRIGQESLEFILVQADTPSSPSIDQVEPYSSTAQVQFDEPEATGGVPILKYKAEWRAVGEEVWHSKWYDAKEASMEGIVTIVGLKPETTYAVRLAALNGKGLGEISAASEFKTQPVHSPPPPASASSSTPVPLSPPDTTWPLPALATTEPAREPSAPKLEGQMGEDGNSIKVNLIKQDDGGSPIRHYLVRYRALSSEWKPEIRLPSGSDHVMLKSLDWNAEYEVYVVAENQQGKSKAAHFVFRTSAQPTAIPATLGGNSASYTFVSLLFSAVTLLLLC

SEQ ID NO: 9217 - protein, 1321 aa, Homo Sapiens
MGAPFVWALGLLMLQMLLFVAGEQGTQDITDASERGLHMQKLGSGSVQAALAELVALPCLFTLQPRPSAARDAPRIKWTKVRTASGQRQDLPILVAKDNVVRVAKSWQGRVSLPSYPRRRANATLLLGPLRASDSGLYRCQVVRGIEDEQDLVPLEVTGVVFHYRSARDRYALTFAEAQEACRLSSAIIAAPRHLQAAFEDGFDNCDAGWLSDRTVRYPITQSRPGCYGDRSSLPGVRSYGRRNPQELYDVYCFARELGGEVFYVGPARRLTLAGARAQCRRQGAALASVGQLHLAWHEGLDQCDPGWLADGSVRYPIQTPRRRCGGPAPGVRTVYRFANRTGFPSPAERFDAYCFRAHHPTSQHGDLETPSSGDEGEILSAEGPPVRELEPTLEEEEVVTPDFQEPLVSSGEEETLILEEKQESQQTLSPTPGDPMLASWPTGEVWLSTVAPSPSDMGAGTAASSHTEVAPTDPMPRRRGRFKGLNGRYFQQQEPEPGLQGGMEASAQPPTSEAAVNQMEPPLAMAVTEMLGSGQSRSPWADLTNEVDMPGAGSAGGKSSPEPWLWPPTMVPPSISGHSRAPVLELEKAEGPSARPATPDLFWSPLEATVSAPSPAPWEAFPVATSPDLPMMAMLRGPKEWMLPHPTPISTEANRVEAHGEATATAPPSPAAETKVYSLPLSLTPTGQGGEAMPTTPESPRADFRETGETSPAQVNKAEHSSSSPWPSVNRNVAVGFVPTETATEPTGLRGIPGSESGVFDTAESPTSGLQATVDEVQDPWPSVYSKGLDASSPSAPLGSPGVFLVPKVTPNLEPWVATDEGPTVNPMDSTVTPAPSDASGIWEPGSQVFEEAESTTLSPQVALDTSIVTPLTTLEQGDKVGVPAMSTLGSSSSQPHPEPEDQVETQGTSGASVPPHQSSPLGKPAVPPGTPTAASVGESASVSSGEPTVPWDPSSTLLPVTLGIEDFELEVLAGSPGVESFWEEVASGEEPALPGTPMNAGAEEVHSDPCENNPCLHGGTCNANGTMYGCSCDQGFAGENCEIDIDDCLCSPCENGGTCIDEVNGFVCLCLPSYGGSFCEKDTEGCDRGWHKFQGHCYRYFAHRRAWEDAEKDCRRRSGHLTSVHSPEEHSFINSFGHENTWIGLNDRIVERDFQWTDNTGLQFENWRENQPDNFFAGGEDCVVMVAHESGRWNDVPCNYNLPYVCKKGTVLCGPPPAVENASLIGARKAKYNVHATVRYQCNEGFAQHHVATIRCRSNGKWDRPQIVCTKPRRSHRMRRHHHHHQHHHQHHHHKSRKERRKHKKHPTEDWEKDEGNFC

SEQ ID NO: 9218 - protein, 175 aa, Homo Sapiens
  misc_feature (1)..(1): Xaa can be any naturally occurring amino acid
XGCDRGWHKFQGHCYRYFAHRRAWEDAEKDCRRRSGHLTSVHSPEEHSFINSFGHENTWIGLNDRIVERDFQWTDNTGLQFENWRENQPDNFFAGGEDCVVMVAHESGRWNDVPCNYNLPYVCKKGTARRSHRMRRHHHHHQHHHQHHHHKSRKERRKHKKHPTEDWEKDEGNFC

SEQ ID NO: 9219 - protein, 99 aa, Homo Sapiens
MVLRRLLAALLHSPQLVERLSESRPIRRAAQLTAFALLQAQLRGQDAARRLQDLAAGPVGSLCRRAERFRDAFTQELRRGLRGRSGPPPGSQRGPGANI

SEQ ID NO: 9220 - protein, 709 aa, Homo Sapiens
MATAGGGSGADPGSRGLLRLLSFCVLLAGLCRGNSVERKIYIPLNKTAPCVRLLNATHQIGCQSSISGDTGVIHVVEKEEDLQWVLTDGPNPPYMVLLESKHFTRDLMEKLKGRTSRIAGLAVSLTKPSPASGFSPSVQCPNDGFGVYSNSYGPEFAHCREIQWNSLGNGLAYEDFSFPIFLLEDENETKVIKQCYQDHNLSQNGSAPTFPLCAMQLFSHMHAVISTATCMRRSSIQSTFSINPEIVCDPLSDYNVWSMLKPINTTGTLKPDDRVVVAATRLDSRSFFWNVAPGAESAVASFVTQLAAAEALQKAPDVTTLPRNVMFVFFQGETFDYIGSSRMVYDMEKGKFPVQLENVDSFVELGQVALRTSLELWMHTDPVSQKNESVRNQVEDLLATLEKSGAGVPAVILRRPNQSQPLPPSSLQRFLRARNISGVVLADHSGAFHNKYYQSIYDTAENINVSYPEWLSPEEDLNFVTDTAKALADVATVLGRALYELAGGTNFSDTVQADPQTVTRLLYGFLIKANNSWFQSILRQDLRSYLGDGPLQHYIAVSSPTNTTYVVQYALANLTGTVVNLTREQCQDPSKVPSENKDLYEYSWVQGPLHSNETDRLPRCVRSTARLARALSPAFELSQWSSTEYSTWTESRWKDIRARIFLIASKELELITLTVGFGILIFSLIVTYCINAKADVLFIAPREPGAVSY

SEQ ID NO: 9221 - protein, 255 aa, Homo Sapiens
MATAGGGSGADPGSRGLLRLLSFCVLLAGLCRGNSVERKIYIPLNKTAPCVRLLNATHQIGCQSSISGDTGVIHVVEKEEDLQWVLTDGPNPPYMVLLESKHFTRDLMEKLKGRTSRIAGLAVSLTKPSPASGFSPSVQCPNDGFGVYSNSYGPEFAHCREIQWNSLGNGLAYEDFSFPIFLLEDENETKVIKQETFDYIGSSRMVYDMEKGKFPVQLENVDSFVELGQVALRTSLELWMHTDPVSQKNESVRNQ

SEQ ID NO: 9222 - protein, 134 aa, Homo Sapiens
MATAGGGSGADPGSRGLLRLLSFCVLLAGLCRGNSVERKIYIPLNKTAPCVRLLNATHQIGCQSSISGDTGVIHVVEKEEDLQWVLTDGPNPPYMVLLESKHFTRQNVRLSDTFLCSFMEFLSYSRDLMEKLKG

SEQ ID NO: 9223 - protein, 232 aa, Homo Sapiens
MATAGGGSGADPGSRGLLRLLSFCVLLAGLFLDFEPDPLPLCPDVSFFPQPQPPTPQSKGTGLCRGNSVERKIYIPLNKTAPCVRLLNATHQIGCQSSISGDTGVIHVVEKEEDLQWVLTDGPNPPYMVLLESKHFTRDLMEKLKGRTSRIAGLAVSLTKPSPASGFSPSVQCPNDGFGVYSNSYGPEFAHCREIQWNSLGNGLAYEDFSFPIFLLEDENETKVIKQCYQDH

SEQ ID NO: 9224 - protein, 71 aa, Homo Sapiens
MATAGGGSGADPGSRGLLRLLSFCVLLAGLFLDFEPDPLPLCPDVSFFPQPQPPTPQSKGTGVKVSFLPRV

SEQ ID NO: 9225 - protein, 69 aa, Homo Sapiens
MATAGGGSGADPGSRGLLRLLSFCVLLAVSLSMALHGLCNNPLRHIAGCHVEHVSVTISVCPRNQKNGL

SEQ ID NO: 9226 - protein, 219 aa, Homo Sapiens
RSSIQSTFSINPEIVCDPLSDYNVWSMLKPINTTGTLKPDDRVVVAATRLAAAEALQKAPDVTTLPRNVMFVFFQGETFDYIGSSRMVYDMEKGKFPVQLENVDSFVELGQVALRTSLELWMHTDPVSQKNESVRNQVEDLLATLEKSGAGVPAVILRRPNQSQPLPPSSLQRFLRARNISGVVLADHSGAFHNKYYQSIYDTAENINVSYPEWLSPEE

SEQ ID NO: 9227 - protein, 69 aa, Homo Sapiens
  misc_feature (1)..(1): Xaa can be any naturally occurring amino acid
XNDGFGVYSNSYGPEFAHCREIQWNSLGNGLAYEDFSFPIFLLEDENETKVIKQKSSVTPCLITMCGAC

SEQ ID NO: 9228 - protein, 275 aa, Homo Sapiens
  misc_feature (1)..(1): Xaa can be any naturally occurring amino acid
XNVAPGAESAVASFVTQLAAAEALQKAPDVTTLPRNVMFVFFQGVALRTSLELWMHTDPVSQKNESVRNQVEDLLATLEKSGAGVPAVILRRPNQSQPLPPSSLQRFLRARNISGVVLADHSGAFHNKYYQSIYDTAENINVSYPEWLSPEEDLNFVTDTAKALADVATVLGRALYELAGGTNFSDTVQADPQTVTRLLYGFLIKANNSWFQSILRQDLRSYLGDGPLQHYIAVSSPTNTTYVVQYALANLTGTVVNLTREQCQDPSKVPSENKD

SEQ ID NO: 9229 - protein, 317 aa, Homo Sapiens
  misc_feature (1)..(1): Xaa can be any naturally occurring amino acid
XVYSNSYGPEFAHCREIQWNSLGNGLAYEDFSFPIFLLEDENETKVIKQLFSHMHAVISTATCMRRSSIQSTFSINPEIVCDPLSDYNVWSMLKPINTTGTLKPDDRVVVAATRLDSRSFFWNVAPGAESAVASFVTQLAAAEALQKAPDVTTLPRNVMFVFFQGETFDYIGSSRMVYDMEKGKFPVQLENVDSFVELGQVALRTSLELWMHTDPVSQKNESVRNQVEDLLATLEKSGAGVPAVILRRPNQSQPLPPSSLQRFLRARNISGVVLADHSGAFHNKYYQSIYDTAENINVSYPEWLSPEEDLNFVTDTA

SEQ ID NO: 9230 - protein, 116 aa, Homo Sapiens
MVLLHWCLLWLLFPLSSRTQKLPTRDEELFQMQIRDKAFFHDSSVIPDGAEISSYLFRDTPKRYFFVVEEDNTPLSVTVTPCDAPLEWKLSLQELPEDRSGEGSGDLEPLEQQKQQ

SEQ ID NO: 9231 - protein, 145 aa, Homo Sapiens
MVLLHWCLLWLLFPLSSRTQKLPTRDEELFQMQIRDKAFFHDSSVIPDGAEISSYLFRDTPKRYFFVVEEDNTPLSVTVTPCDAPLEWKLSLQELPEDRSGEGSGDLEPLEQQKQQIINEEGTELFSYKGNDVEYFISSSSPSGL

SEQ ID NO: 9232 - protein, 568 aa, Homo Sapiens
MVLLHWCLLWLLFPLSSRTQKLPTRDEELFQMQIRDKAFFHDSSVIPDGAEISSYLFRDTPKRYFFVVEEDNTPLSVTVTPCDAPLEWKLSLQELPEDRSGEGSGDLEPLEQQKQQIINEEGTELFSYKGNDVEYFISSSSPSGLYQLDLLSTEKDTHFKVYATTTPESDQPYPELPYDPRVDVTSLGRTTVTLAWKPSPTASLLKQPIQYCVVINKEHNFKSLCAVEAKLSADDAFMMAPKPGLDFSPFDFAHFGFPSDNSGKERSFQAKPSPKLGRHVYSRPKVDIQKICIGNKNIFTVSDLKPDTQYYFDVFVVNINSNMSTAYVGTFARTKEEAKQKTVELKDGKITDVFVKRKGAKFLRFAPVSSHQKVTFFIHSCLDAVQIQVRRDGKLLLSQNVEGIQQFQLRGKPKAKYLVRLKGNKKGASMLKILATTRPTKQSFPSLPEDTRIKAFDKLRTCSSATVAWLGTQERNKFCIYKKEVDDNYNEDQKKREQNQCLGPDIRKKSEKVLCKYFHSQNLQKAVTTETIKGLQPGKSYLLDVYVIGHGGHSVKYQSKVVKTRKFC

SEQ ID NO: 9233 - protein, 133 aa, Homo Sapiens
MRKHVLAASFSMLSLLVIMGDTDSKTDSSFIMDSDPRRCMRHHYVDSISHPLYKCSSKMVLLARCEGHCSQASRSEPLVSFSTVLKQPFRSSCHCCRPQTSKLKALRLRCSGGMRLTATYRYILSCHCEECNS

SEQ ID NO: 9234 - protein, 133 aa, Homo Sapiens; identical to SEQ ID NO: 9233

SEQ ID NO: 9235 - protein, 133 aa, Homo Sapiens; identical to SEQ ID NO: 9233

SEQ ID NO: 9236 - protein, 129 aa, Homo Sapiens
DIENAYKKTFLPEMSEKCEVLQYSAREAQDSKKVVEDIEYLKFDKGPWLKQDNRTLYHLRLLVQDKFEVLNYTSIPIFLPEVTIGAHQTDRVLHQFREVPADQEHRWVSLLSSPLGSLFSEWSVCGEDS

SEQ ID NO: 9237 - protein, 138 aa, Homo Sapiens
ENAYKKTFLPEMSEKCEVLQYSAREAQDSKKVVEDIEYLKFDKGPWLKQDNRTLYHLRLLVQDKFEVLNYTSIPIFLPEVTIGAHQTDRVLHQFREFSLFNGRKPDAVKILCSLLEADRSLLEADRSLLEADRVQDSC

SEQ ID NO: 9238 - protein, 94 aa, Homo Sapiens
MALRLLKLAATSASARVVAAGAQRVASSTFLKRGFIIQTVPQEMGSPSPPTIMATVVWRNFTMIREAMMATVTACSPGCTAVACCSTQMPWSTC

SEQ ID NO: 9239 - protein, 429 aa, Homo Sapiens
MALRLLKLAATSASARVVAAGAQRVRGIHSSVQCKLRYGMWHFLLGDKASKRLTERSRVITVDGNICTGKGKLAKEIAEKLGFKHFPEAGIHYPDSTTGDGKPLATDYNGNCSLEKFYDDPRSNDGNSYRLQSWLYSSRLLQYSDALEHLLTTGQGVVLERSIFSDFVFLEAMYNQGFIRKQCESALQTHFWTGVAGASGKLESGSSEEVLLINERGGRSKPGVDHYNEVKSVTICDYLPPHLVIYIDVPVPEPHEMKITSAYLQDIENAYKKTFLPEMSEKCEVLQYSAREAQDSKKVVEDIEYLKFDKGPWLKQDNRTLYHLRLLVQDKFEVLNYTSIPIFLPEVTIGAHQTDRVLHQFRERLDWTVCFGEESTEVKHQGHLLSVQPGTVALTVGSWLRSCLLGLHWKLLFLFPESPMHTTAFMFLC

SEQ ID NO: 9240 - protein, 201 aa, Homo Sapiens
MALRLLKLAATSASARVVAAGAQRVRGIHSSVQCKLRYGMWHFLLGDKASKRLTERSRVITVDGNICTGKGKLAKEIAEKLGFKHFPEAGIHYPDSTTGDGKPLATDYNGNCSLEKFYDDPRSNDGNSYRLQSWLYSSRLLQYSDALEHLLTTGQGVVLERSIFSDFVFLEAMYNQGFIRKQCESALQTHFWVCGATLQGL

SEQ ID NO: 9241 - protein, 355 aa, Homo Sapiens
MALRLLKLAATSASARVVAAGAQRVRGIHSSVQCKLRYGMWHFLLGDKASKRLTERSRVITVDGNICTGKGKLAKEIAEKLGFKHFPEAGIHYPDSTTGDGKPLATDYNGNCSLEKFYDDPRSNDGNSYRLQSWLYSSRLLQYSDALEHLLTTGQGVVLERSIFSDFVFLEAMYNQGFIRKQCVDHYNEVKSVTICDYLPPHLVIYIDVPVPEVQRRIQKKGDPHEMKITSAYLQDIENAYKKTFLPEMSEKCEVLQYSAREAQDSKKVVEDIEYLKFDKGPWLKQDNRTLYHLRLLVQDKFEVLNYTSIPIFLPEVTIGAHQTDRVLHQFRELPGRKYSPGYNTEVGDKWIWLK

SEQ ID NO: 9242 - protein, 390 aa, Homo Sapiens
MALRLLKLAATSASARVVAAGAQRVRGIHSSVQCKLRYGMWHFLLGDKASKRLTERSRVITVDGNICTGKGKLAKEIAEKLGFKHFPEAGIHYPDSTTGDGKPLATDYNGNCSLEKFYDDPRSNDGNSYRLQSWLYSSRLLQYSDALEHLLTTGQGVVLERSIFSDFVFLEAMYNQGFIRKQCVDHYNEVKSVTICDYLPPHLVIYIDVPVPEVQRRIQKKGDPHEMKITSAYLQDIENAYKKTFLPEMSEKCEVLQYSAREAQDSKKVVEDIEYLKFDKGPWLKQDNRTLYHLRLLVQDKFEVLNYTSIPIFLPEVTIGAHQTDRVLHQFRELGIPYPQRAVQSTREGPEVLLTGLWRWEDLLIGLQLPGRKYSPGYNTEVGDKWIWLK

SEQ ID NO: 9243 - protein, 245 aa, Homo Sapiens [sequence omitted]

SEQ ID NO: 9244 - protein, 355 aa, Homo Sapiens
MALRLLKLAATSASARVVARAPSAWRGIHSSVQCKLRYGMWHFLLGDKASKRLTERSRVITVDGNICTGKGKLAKEIAEKLGFKHFPEAGIHYPDSTTGDGKPLATDYNGNCSLEKFYDDPRSNDGNSYRLQSWLYSSRLLQYSDALEHLLTTGQGVVLERSIFSDFVFLEAMYNQGFIRKQCVDHYNEVKSVTICDYLPPHLVIYIDVPVPEVQRRIQKKGDPHEMKITSAYLQDIENAYKKTFLPEMSEKCEVLQYSAREAQDSKKVVEDIEYLKFDKGPWLKQDNRTLYHLRLLVQDKFEVLNYTSIPIFLPEVTIGAHQTDRVLHQFRELPGRKYSPGYNTEVGDKWIWLK

SEQ ID NO: 9245 - protein, 133 aa, Homo Sapiens
  misc_feature (1)..(1): Xaa can be any naturally occurring amino acid
XSAYLQDIENAYKKTFLPEMSEKCEVLQYSAREAQDSKKVVEDIEYLKFDKGPWLKQDNRTLYHLRLLVQDKFEVLNYTSIPIFLPEVTIGAHQTDRVLHQFREVFQESEAKRLDVEEVCWKKTPLKDRGEEV

SEQ ID NO: 9246 - protein, 100 aa, Homo Sapiens
GFRLLRWQLCLAGPLALASDLGASSLVAFRRLLGNSIFPAPVRHSGDHGKRLFVIRPSRFYDRRFLKLLRFYIALTGIPVAIFITLVNVFIASHIKMDCP

SEQ ID NO: 9247 - protein, 56 aa, Homo Sapiens
IPVAIFITLVNVFIGQAELAEIPEGYVPEHWEYYKGKGAGSAKIDACERRWTLVLL

SEQ ID NO: 9248 - protein, 177 aa, Homo Sapiens
MAAMSLLRRVSVTAVAALSGRPLGTRLGFGGFLTRGFPKAAAPGNHHSAVFMILTTLFLIFYIALTGIPVAIFITLVNVFIGQAELAEIPEGYVPEHWEYYKHPISRWIARNFYDSPEKIYERTMAVLQIEAEKAELRVKELEVRKLMHVRGDGPWYYYETIDKELIDHSPKATPDN

SEQ ID NO: 9249 - protein, 135 aa, Homo Sapiens
MAAMSLLRRVSVTAVAALSGRPLGTRLGFGGFLTRGFPKAAAPVRHSGDHGKRLFVIRPSRFYDRRFLKLLRFYIALTGIPVAIFITLVNVFIGQAELAEIPEGYVPEHWEYYKGKGAGSAKIDACERRWTLVLL

SEQ ID NO: 9250 - protein, 189 aa, Homo Sapiens
MAAMSLLRRVSVTAVAALSGRPLGTRLGFGGFLTRGFPKAAAPVRHSGDHGKRLFVIRPSRFYDRRFLKLLRFYIALTGIPVAIFITLVNVFIGQAELAEIPEGYVPEHWEYYKHPISRWIARNFYDSPEKIYERTMAVLQIEAEKAELRVKELEVRKLMHVRGDGPWYYYETIDKELIDHSPKATPDN

SEQ ID NO: 9251 - protein, 66 aa, Homo Sapiens
MAAMSLLRRVSVTAVAALSGRPLGTRLGFGGFLTRGFPKAAEILHCIDWDSSSNFHNSGECIHWSS

SEQ ID NO: 9252 - protein, 42 aa, Homo Sapiens
MAAMSLLRRVSVTAVAALSGRPLGTRLGFGGFLTRGFPKAAG

SEQ ID NO: 9253 - protein, 137 aa, Homo Sapiens
MAAMSLLRRVSVTAVAALSGRPLGTRLGFGGFLTRGFPKAAGQAELAEIPEGYVPEHWEYYKHPISRWIARNFYDSPEKIYERTMAVLQIEAEKAELRVKELEVRKLMHVRGDGPWYYYETIDKELIDHSPKATPDN

SEQ ID NO: 9254 - protein, 206 aa, Homo Sapiens
  misc_feature (1)..(1): Xaa can be any naturally occurring amino acid
XSLLRRVSVTAVAALSGRPLGTRLGFGGFLTRGFPKAAAPVRHSGDHGKRLFVIRPSRFYDRRFLKLLALYEQSRGLENGRLSGPSATRFYIALTGIPVAIFITLVNVFIGQAELAEIPEGYVPEHWEYYKHPISRWIARNFYDSPEKIYERTMAVLQIEAEKAELRVKELEVRKLMHVRGDGPWYYYETIDKELIDHSPKATPDN

SEQ ID NO: 9255 - protein, 40 aa, Homo Sapiens
LTTPMLLRALAQAARAGPPGGRSLHSSAVAATYSEYLGGL

SEQ ID NO: 9256 - protein, 110 aa, Homo Sapiens
MRCLTTPMLLRALAQAARAGPPGGRSLHSSAVAATYKYVNMQDPEMDMKSVTDRAARTLLWTELFRGLGMTLSYLFREPATINYPFEKGPLSPRFRGEHALRRYPSGEER

SEQ ID NO: 9257 - protein, 124 aa, Homo Sapiens
MRCLTTPMLLRALAQAARAGPPGGRSLHSSAVAATYKYVNMQDPEMDMKSVTDRAARTLLWTELFRGLGMTLSYLFREPATINYPFEKGPLSPRFRGEHALRRYPSGEERCIACKLCEAICPAQ

SEQ ID NO: 9258 - protein, 184 aa, Homo Sapiens
MRCLTTPMLLRALAQAARAGPPGGRSLHSSAVAATYKYVNMQDPEMDMKSVTDRAARTLLWTELFRGLGMTLSYLFREPATINYPFEKGPLSPRFRGEHALRRYPSGEERCIACKLCEAICPAQAITIEAEPRADGSRRTTRYDIDMTKCIYCGFCQEACPVDAIVEGPNFEFSTETHEELLYN

SEQ ID NO: 9259 - protein, 210 aa, Homo Sapiens
MRCLTTPMLLRALAQAARAGPPGGRSLHSSAVAATYKYVNMQDPEMDMKSVTDRAARTLLWTELFRGLGMTLSYLFREPATINYPFEKGPLSPRFRGEHALRRYPSGEERCIACKLCEAICPAQAITIEAEPRADGSRRTTRYDIDMTKCIYCGFCQEACPVDAIVEGPNFEFSTETHEELLYNKEKLLNNGDKWEAEIAANIQADYLYR

SEQ ID NO: 9260 - protein, 43 aa, Homo Sapiens
MRCLTTPMLLRALAQAARAGPPGGRSLHSSAVAATYSEYLGGL

SEQ ID NO: 9261 - protein, 70 aa, Homo Sapiens
MRRPLCATGLVRVGDHWEDALPDHAYAAAGPGPGCTCRTSWWPEPPQQCSGSHLQVCEHAGSRDGHEVSD

SEQ ID NO: 9262 - protein, 138 aa, Homo Sapiens
MRRPLCATGLVRVGDHWEEYVNMQDPEMDMKSVTDRAARTLLWTELFRGLGMTLSYLFREPATINYPFEKGPLSPRFRGEHALRRYPSGEERCIACKLCEAICPAQAITIEAEPRADGSRRTTRYDIDMTKCIYCGFC

SEQ ID NO: 9263 - protein, 64 aa, Homo Sapiens
MTKCIYCGFCQEACPVDAIVEGPNFEFSTETHEELLYNKEKLLNNGDKWEAEIAANIQADYLYR

SEQ ID NO: 9264 - protein, 93 aa, Homo Sapiens
  misc_feature (1)..(1): Xaa can be any naturally occurring amino acid
XEPATINYPFEKGPLSPRFRGEHALRRYPSGEERCIACKLCEAICPAQGETLRAAGATLNKAVNSPLVRGGSWQMTPAADKQARQAGHGGSRL

SEQ ID NO: 9265 - protein, 127 aa, Homo Sapiens
CPTTVANVETVAVSPTICRRGGTWFAGFGRERNSGTKLFNISGHVNHPCTVEEEMSVPLKELIEKHAGGVTGGWDNLLAVIPGGSSTPLIPKSVCETVLMDFDALVQAQTGLGTAAVIVMDRSVWTG

SEQ ID NO: 9266 - protein, 133 aa, Homo Sapiens
EAYEAGLIGKNACGSGYDFDVFVVRGAGAYICGEETALIESIEGKQGKPRLKPPFPADVGVFGCPTTVANVETVAVSPTICRRGGTWFAGFGRERNSGTKLFNISGHVNHPCTVEEEMSVPLKELIEKHAVCV

SEQ ID NO: 9267 - protein, 75 aa, Homo Sapiens
MGIPSPSAAPKKTSFGSLKDEDRIFTNLYGRHDWRLKGSLSRGDWYKTKEILLKGPDWILGEIKTSGLRGRGGAG

SEQ ID NO: 9268 - protein, 144 aa, Homo Sapiens
MKTGFSPTCTAAMTGGSLSRGDWYKTKEILLKGPDWILGEIKTSGLRGRGGAGFPTGLKWSFMNKPSDGRPKYLVVNADEGEPGTCKDREILRHDPHKLLEGCLVGGRAMGARAAYIYIRGEFYNEASNLQVAIREAYEAGLIG

SEQ ID NO: 9269 - protein, 455 aa, Homo Sapiens
MLATRRLLGWSLPARTAPKKTSFGSLKDEDRIFTNLYGRHDWRLKGSLSRGDWYKTKEILLKGPDWILGEIKTSGLRGRGGAGFPTGLKWSFMNKPSDGRPKYLVVNADEGEPGTCKDREILRHDPHKLLEGCLVGGRAMGARAAYIYIRGEFYNEASNLQVAIREAYEAGLIGKNACGSGYDFDVFVVRGAGAYICGEETALIESIEGKQGKPRLKPPFPADVGVFGCPTTVANVETVAVSPTICRRGGTWFAGFGRERNSGTKLFNISGHVNHPCTVEEEMSVPLKELIEKHAGGVTGGWDNLLAVIPGGSSTPLIPKSVCETVLMDFDALVQAQTGLGTAAVIVMDRSTDIVKAIARLIEFYKHESCGQCTPCREGVDWMNKVMARFVRGDARPAEIDSLWEISKQIEGHTICALGDGAAWPVQGLIRHFRPELEERMQRFAQQHQARQAAS

SEQ ID NO: 9270 - protein, 457 aa, Homo Sapiens
MLATRRLLGWSLPARVSTAPKKTSFGSLKDEDRIFTNLYGRHDWRLKGSLSRGDWYKTKEILLKGPDWILGEIKTSGLRGRGGAGFPTGLKWSFMNKPSDGRPKYLVVNADEGEPGTCKDREILRHDPHKLLEGCLVGGRAMGARAAYIYIRGEFYNEASNLQVAIREAYEAGLIGKNACGSGYDFDVFVVRGAGAYICGEETALIESIEGKQGKPRLKPPFPADVGVFGCPTTVANVETVAVSPTICRRGGTWFAGFGRERNSGTKLFNISGHVNHPCTVEEEMSVPLKELIEKHAGGVTGGWDNLLAVIPGGSSTPLIPKSVCETVLMDFDALVQAQTGLGTAAVIVMDRSTDIVKAIARLIEFYKHESCGQCTPCREGVDWMNKVMARFVRGDARPAEIDSLWEISKQIEGHTICALGDGAAWPVQGLIRHFRPELEERMQRFAQQHQARQAAS

SEQ ID NO: 9271 - protein, 178 aa, Homo Sapiens
MLATRRLLGWSLPARVSVRFSGDTDEDRIFTNLYGRHDWRLKGSLSRGDWYKTKEILLKGPDWILGEIKTSGLRGRGGAGFPTGLKWSFMNKPSDGRPKYLVVNADEGEPGTCKDREILRHDPHKLLEGCLVGGRAMGARAAYIYIRGEFYNEASNLQVAIREAYEAGLIGKNACGSG

SEQ ID NO: 9272 - protein, 43 aa, Homo Sapiens
MLATRRLLGWSLPARVSVRFSGDTSSAWRKFCRQHPRKPHLAR

SEQ ID NO: 9273 - protein, 178 aa, Homo Sapiens
MLATRRLLGWSLPARVSVRFSGDTTAPKKTSFGSLKDEDRIFTNLLKGSLSRGDWYKTKEILLKGPDWILGEIKTSGLRGRGGAGFPTGLKWSFMNKPSDGRPKYLVVNADEGEPGTCKDREILRHDPHKLLEGCLVGGRAMGARAAYIYIRGEFYNEASNLQVAIREAYEAGLIGKN

SEQ ID NO: 9274 - protein, 464 aa, Homo Sapiens
MLATRRLLGWSLPARVSVRFSGDTTAPKKTSFGSLKDEDRIFTNLYGRHDWRLKGSLSRGDWYKTKEILLKGPDWILGEIKTSGLRGRGGAGFPTGLKWSFMNKPSDGRPKYLVVNADEGEPGTCKDREILRHDPHKLLEGCLVGGRAMGARAAYIYIRGEFYNEASNLQVAIREAYEAGLIGKNACGSGYDFDVFVVRGAGAYICGEETALIESIEGKQGKPRLKPPFPADVGVFGCPTTVANVETVAVSPTICRRGGTWFAGFGRERNSGTKLFNISGHVNHPCTVEEEMSVPLKELIEKHAGGVTGGWDNLLAVIPGGSSTPLIPKSVCETVLMDFDALVQAQTGLGTAAVIVMDRSTDIVKAIARLIEFYKHESCGQCTPCREGVDWMNKVMARFVRGDARPAEIDSLWEISKQIEGHTICALGDGAAWPVQGLIRHFRPELEERMQRFAQQHQARQAAS

SEQ ID NO: 9275 - protein, 53 aa, Homo Sapiens
MNKPSDGRPKYLVVNADEGEPGTCKDREILRHDPHKLLEGCLVGGRAMGARAA

SEQ ID NO: 9276 - protein, 96 aa, Homo Sapiens
MNKPSDGRPKYLVVNADEGEPGTCKDREILRHDPHKLLEGCLVGGRAMGARAAYIYIRGEFYNEASNLQVAIREAYEAGLIGKNACGSGYDFDVFV

SEQ ID NO: 9277 - protein, 136 aa, Homo Sapiens
MNKPSDGRPKYLVVNADEGEPGTCKDREILRHDPHKLLEGCLVGGRAMGARAAYIYIRGEFYNEASNLQVAIREAYEAGLIGKNACGSGYDFDVFVVRGAGAYICGEETALIESIEGKQGKPRLKPPFPADVGKAW

SEQ ID NO: 9278 - protein, 363 aa, Homo Sapiens
MNKPSDGRPKYLVVNADEGEPGTCKDREILRHDPHKLLEGCLVGGRAMGARAAYIYIRGEFYNEASNLQVAIREAYEAGLIGKNACGSGYDFDVFVVRGAGAYICGEETALIESIEGKQGKPRLKPPFPADVGVFGCPTTVANVETVAVSPTICRRGGTWFAGFGRERNSGTKLFNISGHVNHPCTVEEEMSVPLKELIEKHAGGVTGGWDNLLAVIPGGSSTPLIPKSVCETVLMDFDALVQAQTGLGTAAVIVMDRSTDIVKAIARLIEFYKHESCGQCTPCREGVDWMNKVMARFVRGDARPAEIDSLWEISKQIEGHTICALGDGAAWPVQGLIRHFRPELEERMQRFAQQHQARQAAS

SEQ ID NO: 9279 - protein, 54 aa, Homo Sapiens
MACAGLLTVCLLRPPAPQPQPQTPRHPQLAPDPGPAGHTLFQDVFRRADKNALI

SEQ ID NO: 9280 - protein, 210 aa, Homo Sapiens
MACAGLLTVCLLRPPAPQPQPQTPRHPQLAPDPGPAGHTLFQDVFRRADKNDDGKLSFEEFQNYFADGVLSLGELQELFSGIDGHLTDNLETEKLCDYFSEHLGVYRPVLAALESLNRAVLAAMDATKLEYERASKVDQFVTRFLLRETVSQLQALQSSLEGASDTLEAQAHGWRCRERGGAEQALRQPAGRTPSPEECQPVIHLVPRLF

SEQ ID NO: 9281 - protein, 192 aa, Homo Sapiens
MACAGLLTVCLLRPPAPQPQPQTPRHPQLAPDPGPAGHTLFQDVFRRADKNDDGKLSFEEFQNYFADGVLSLGELQELFSGIDGHLTDNLETEKLCDYFSEHLGVYRPVLAALESLNRAVLAAMDATKLEYERASKVDQFVTRFLLRETVSQLQALQSSLEGASDTLEAQAHGWRLIPSWGPSPRPCEPHFL

SEQ ID NO: 9282 - protein, 362 aa, Homo Sapiens
MACAGLLTVCLLRPPAPQPQPQTPRHPQLAPDPGPAGHTLFQDVFRRADKNDDGKLSFEEFQNYFADGVLSLGELQELFSGIDGHLTDNLETEKLCDYFSEHLGVYRPVLAALESLNRAVLAAMDATKLEYERASKVDQFVTRFLLRETVSQLQALQSSLEGASDTLEAQAHGWRSDAESVEAQSRLCGSRRAGRRALRSVSRSSTWSPGSSDTGRSSEAEMQWRLQVNRLQELIDQLECKAPRLEPLREEDLAKGPDLHILMAQRQVQVAEEGLQDFHRALRCYVDFTGAQSHCLHVSAQKMLDGASFTLYEFWQDEASWRRHQQSPGSKAFQRILIDHLRAPDTLTTVFFPASWWIMNNN

SEQ ID NO: 9283 - protein, 289 aa, Homo Sapiens
MACAGLLTVCLLRPPAPQPQPQTPRHPQLAPDPGPAGHTLFQDVFRRADKNDDGKLSFEEFQNYFADGVLSLGELQELFSGIDGHLTDNLETEKLCDYFSEHLGVYRPVLAALESLNRAVLAAMDATKLEYERASKVDQFVTRFLLRETVSQLQALQSSLEGASDTLEAQAHGWRSDAESVEAQSRLCGSRRAGRRALRSVSRSSTWSPGSSDTGRSSEAEMQWRLQVNRLQELIDQLECKHILMAQRQVQVAEEGLQDFHRALRCYVDFTGAQSHCLHVSAQKMLDGA

SEQ ID NO: 9284 - protein, 297 aa, Homo Sapiens
MACAGLLTVCLLRPPAPQPQPQTPRHPQLAPDPGPAGHTLFQDVFRRADKNDDGKLSFEEFQNYFADGVLSLGELQELFSGIDGHLTDNLETEKLCDYFSEHLGVYRPVLAALESLNRAVLAAMDATKLEYERASKVDQFVTRFLLRETVSQLQALQSSLEGASDTLEAQAHGWRSDAESVEAQSRLCGSRRAGRRALRSVSRSSTWSPGSSDTGRSSEAEMQWRLQVNRLQELIDQLECKRQVQVAEEGLQDFHRALRCYVDFTGAQSHCLHVSAQKMLDGASFTLYEFWQDEASW

SEQ ID NO: 9285 - protein, 396 aa, Homo Sapiens
MACAGLLTVCLLRPPAPQPQPQTPRHPQLAPDPGPAGHTLFQDVFRRADKNDDGKLSFEEFQNYFADGVLSLGELQELFSGIDGHLTDNLETEKLCDYFSEHLGVYRPVLAALESLNRAVLAAMDATKLEYERASKVDQFVTRFLLRETVSQLQALQSSLEGASDTLEAQAHGWRSDAESVEAQSRLCGSRRAGRRALRSVSRSSTWSPGSSDTGRSSEAEMQWRLQVNRLQELIDQLECKVRAVGPGPHKGGPSWYPPEPGPCWRPGPHSVPSQAPRLEPLREEDLAKGPDLHILMAQRQVQVAEEGLQDFHRALRCYVDFTGAQSHCLHVSAQKMLDGASFTLYEFWQDEASWRRHQQSPGSKAFQRILIDHLRAPDTLTTVFFPASWWIMNNN

SEQ ID NO: 9286 - protein, 71 aa, Homo Sapiens
MACAGLLTVCLLRPPAPQPQPQTPRHPQLAPDPGPAGHTLFQDVFRRADKNELLCRWGSQPGGAAGTVQRH

SEQ ID NO: 9287 - protein, 126 aa, Homo Sapiens
MQWRLQVNRLQELIDQLECKAPRLEPLREEDLAKGPDLHILMAQRQVQVAEEGLQDFHRALRCYVDFTGAQSHCLHVSAQKMLDGASFTLYEFWQDEASWRRHQQSPGSKAFQRILIDHLRAPDTL

SEQ ID NO: 9288 - protein, 95 aa, Homo Sapiens
  misc_feature (1)..(1): Xaa can be any naturally occurring amino acid
XQNYFADGVLSLGELQELFSGIDGHLTDNLETEKLCDYFSEHLGVYRPVLAALESLNRAVLAAMDATKLVSGVADGGGSTVRQWASAVLWDPPQS

SEQ ID NO: 9289 - protein, 517 aa, Homo Sapiens
MARMGLAGAAGRWWGLALGLTAFFLPGVHSQVVQVNDSMYGFIGTDVVLHCSFANPLPSVKITQVTWQKSTNGSKQNVAIYNPSMGVSVLAPYRERVEFLRPSFTDGTIRLSRLELEDEGVYICEFATFPTGNRESQLNLTVMAKPTNWIEGTQAVLRAKKGQDDKVLVATCTSANGKPPSVVSWETRLKGEAEYQEIRNPNGTVTVISRYRLVPSREAHQQSLACIVNYHMDRFKESLTLNVQYEPEVTIEGFDGNWYLQRMDVKLTCKADANPPATEYHWTTLNGSLPKGVEAQNRTLFFKGPINYSLAGTYICEATNPIGTRSGQVEVNITEFPYTPSPPEHGRRAGPVPTAIIGGVAGSILLVLIVVGGIVVALRRRRHTFKGDYSTKKHVYGNGYSKAGIPQHHPPMAQNLQYPDDSDDEKKAGPLGGSSYEEEEEEEEGGGGGERKVGGPHPKYDEDAKRPYFTVDEAEARQDGYGDRTLGYQYDPEQLDLAENMVSQNDGSFISKKEWYV

SEQ ID NO: 9290 - protein, 458 aa, Homo Sapiens
MARMGLAGAAGRWWGLALGLTAFFLPGVHSQVVQVNDSMYGFIGTDVVLHCSFANPLPSVKITQVTWQKSTNGSKQNVAIYNPSMGVSVLAPYRERVEFLRPSFTDGTIRLSRLELEDEGVYICEFATFPTGNRESQLNLTVMAKPTNWIEGTQAVLRAKKGQDDKVLVATCTSANGKPPSVVSWETRLKGEAEYQEIRNPNGTVTVISRYRLVPSREAHQQSLACIVNYHMDRFKESLTLNVQYEPEVTIEGFDGNWYLQRMDVKLTCKADANPPATEYHWTTLNGSLPKGVEAQNRTLFFKGPINYSLAGTYICEATNPIGTRSGQVEVNITEKPRPQRGLGSAARLLAGTVAVFLILVAVLTVFFLYNRQQKSPPETDGAGTDQPLSQKPEPSPSRQSSLVPEDIQVVHLDPGRQQQQEEEDLQKLSLQPPYYDLGVSPSYHPSVRTTEPRGECP

SEQ ID NO: 9291 - protein, 352 aa, Homo Sapiens
MARMGLAGAAGRWWGLALGLTAFFLPGVHSQVVQVNDSMYGFIGTDVVLHCSFANPLPSVKITQVTWQKSTNGSKQNVAIYNPSMGVSVLAPYRERVEFLRPSFTDGTIRLSRLELEDEGVYICEFATFPTGNRESQLNLTVMAKPTNWIEGTQAVLRAKKGQDDKVLVATCTSANGKPPSVVSWETRLKGEAEYQEIRNPNGTVTVISRYRLVPSREAHQQSLACIVNYHMDRFKESLTLNVQYEPEVTIEGFDGNWYLQRMDVKLTCKADANPPATEYHWTTLNGSLPKGVEAQNRTLFFKGPINYSLAGTYICEATNPIGTRSGQVEVNITAFCQLIYPGKGRTRARMF

SEQ ID NO: 9292 - protein, 838 aa, Homo Sapiens
MPMDLILVVWFCVCTARTAEDMKPPVLSLIWRTRVLKSLLQQSLQGVVGFGMDPDLQMDIVTELDLVNTTLGVAQVSGMHNASKAFLFQDIEREIHAAPHVSEKLIQLFRNKSEFTILATVQQKPSTSGVILSIRELEHSYFELESSGLRDEIRYHYIHNGKPRTEALPYRMADGQWHKVALSVSASHLLLHVDCNRIYERVIDPPDTNLPPGINLWLGQRNQKHGLFKGIIQDGKIIFMPNGYITQCPNLNHTCPTCSDFLSLVQGIMDLQELLAKMTAKLNYAETRLSQLENCHCEKTCQVSGLLYRDQDSWVDGDHCRNCTCKSGAVECRRMSCPPLNCSPDSLPVHIAGQCCKVCRPKCIYGGKVLAEGQRILTKSCRECRGGVLVKITEMCPPLNCSEKDHILPENQCCRVCRGHNFCAEGPKCGENSECKNWNTKATCECKSGYISVQGDSAYCEDIDECAAKMHYCHANTVCVNLPGLYRCDCVPGYIRVDDFSCTEHDECGSGQHNCDENAICTNTVQGHSCTCKPGYVGNGTICRAFCEEGCRYGGTCVAPNKCVCPSGFTGSHCEKDIDECSEGIIECHNHSRCVNLPGWYHCECRSGFHDDGTYSLSGESCIDIDECALRTHTCWNDSACINLAGGFDCLCPSGPSCSGDCPHEGGLKHNGQVWTLKEDRCSVCSCKDGKIFCRRTACDCQNPSADLFCCPECDTRVTSQCLDQNGHKLYRSGDNWTHSCQQCRCLEGEVDCWPLTCPNLSCEYTAILEGECCPRCVSDPCLADNITYDIRKTCLDSYGVSRLSGSVWTMAGSPCTTCKCKNGRVCCSVDFECLQNN

SEQ ID NO: 9293 - protein, 753 aa, Homo Sapiens
MPMDLILVVWFCVCTARTVVGFGMDPDLQMDIVTELDLVNTTLGVAQVSGMHNASKAFLFQDIEREIHAAPHVSEKLIQLFRNKSEFTILATVQQKPSTSGVILSIRELEHRIYERVIDPPDTNLPPGINLWLGQRNQKHGLFKGIIQDGKIIFMPNGYITQCPNLNHTCPTCSDFLSLVQGIMDLQELLAKMTAKLNYAETRLSQLENCHCEKTCQVSGLLYRDQDSWVDGDHCRNCTCKSGAVECRRMSCPPLNCSPDSLPVHIAGQCCKVCRPKCIYGGKVLAEGQRILTKSCRECRGGVLVKITEMCPPLNCSEKDHILPENQCCRVCRGHNFCAEGPKCGENSECKNWNTKATCECKSGYISVQGDSAYCEDIDECAAKMHYCHANTVCVNLPGLYRCDCVPGYIRVDDFSCTEHDECGSGQHNCDENAICTNTVQGHSCTCKPGYVGNGTICRAFCEEGCRYGGTCVAPNKCVCPSGFTGSHCEKDIDECSEGIIECHNHSRCVNLPGWYHCECRSGFHDDGTYSLSGESCIDIDECALRTHTCWNDSACINLAGGFDCLCPSGPSCSGDCPHEGGLKHNGQVWTLKEDRCSVCSCKDGKIFCRRTACDCQNPSADLFCCPECDTRVTSQCLDQNGHKLYRSGDNWTHSCQQCRCLEGEVDCWPLTCPNLSCEYTAILEGECCPRCVSDPCLADNITYDIRKTCLDSYGVSRLSGSVWTMAGSPCTTCKCKNGRVCCSVDFECLQNN

SEQ ID NO: 9294 - protein, 810 aa, Homo Sapiens
MPMDLILVVWFCVCTARTVVGFGMDPDLQMDIVTELDLVNTTLGVAQVSGMHNASKAFLFQDIEREIHAAPHVSEKLIQLFRNKSEFTILATVQQKPSTSGVILSIRELEHSYFELESSGLRDEIRYHYIHNGKPRTEALPYRMADGQWHKVALSVSASHLLLHVDCNRIYERVIDPPDTNLPPGINLWLGQRNQKHGLFKGIIQDGKIIFMPNGYITQCPNLNHTCPTCSDFLSLVQGIMDLQELLAKMTAKLNYAETRLSQLENCHCEKTCQVSGLLYRDQDSWVDGDHCRNCTCKSGAVECRRMSCPPLNCSPDSLPVHIAGQCCKVCRPKCIYGGKVLAEGQRILTKSCRECRGGVLVKITEMCPPLNCSEKDHILPENQCCRVCRGHNFCAEGPKCGENSECKNWNTKATCECKSGYISVQGDSAYCEDIDECAAKMHYCHANTVCVNLPGLYRCDCVPGYIRVDDFSCTEHDECGSGQHNCDENAICTNTVQGHSCTCKPGYVGNGTICRAFCEEGCRYGGTCVAPNKCVCPSGFTGSHCEKDIDECSEGIIECHNHSRCVNLPGWYHCECRSGFHDDGTYSLSGESCIDIDECALRTHTCWNDSACINLAGGFDCLCPSGPSCSGDCPHEGGLKHNGQVWTLKEDRCSVCSCKDGKIFCRRTACDCQNPSADLFCCPECDTRVTSQCLDQNGHKLYRSGDNWTHSCQQCRCLEGEVDCWPLTCPNLSCEYTAILEGECCPRCVSDPCLADNITYDIRKTCLDSYGVSRLSGSVWTMAGSPCTTCKCKNGRVCCSVDFECLQNN

SEQ ID NO: 9295 - protein, 763 aa, Homo Sapiens
MPMDLILVVWFCVCTARTVVGFGMDPDLQMDIVTELDLVNTTLGVAQVSGMHNASKAFLFQDIEREIHAAPHVSEKLIQLFRNKSEFTILATVQQKPSTSGVILSIRELEHSYFELESSGLRDEIRYHYIHNGKPRTEALPYRMADGQWHKVALSVSASHLLLHVDCNRIYERVIDPPDTNLPPGINLWLGQRNQKHGLFKGIIQDGKIIFMPNGYITQCPNLNHTCPTCSDFLSLVQGIMDLQELLAKMTAKLNYAETRLSQLENCHCEKTCQVSGLLYRDQDSWVDGDHCRNCTCKSGAVECRRMSCPPLNCSPDSLPVHIAGQCCKVCRPKCIYGGKVLAEGQRILTKSCRECRGGVLVKITEMCPPLNCSEKDHILPENQCCRVCRGHNFCAEGPKCGENSECKNWNTKATCECKSGYISVQGDSAYCEDIDECAAKMHYCHANTVCVNLPGLYRCDCVPGYIRVDDFSCTEHDECGSGQHNCDENAICTNTVQGHSCTCKPGYVGNGTICRAFCEEGCRYGGTCVAPNKCVCPSGFTGSHCEKDIDECALRTHTCWNDSACINLAGGFDCLCPSGPSCSGDCPHEGGLKHNGQVWTLKEDRCSVCSCKDGKIFCRRTACDCQNPSADLFCCPECDTRVTSQCLDQNGHKLYRSGDNWTHSCQQCRCLEGEVDCWPLTCPNLSCEYTAILEGECCPRCVSDPCLADNITYDIRKTCLDSYGVSRLSGSVWTMAGSPCTTCKCKNGRVCCSVDFECLQNN

SEQ ID NO: 9296 - protein, 122 aa, Homo Sapiens
CPTCNDFHGLVQKIMELQDILAKTSAKLSRAEQRMNRLDQCYCERTCTMKGTTYREFESWIDGCKNCTCLNGTIQCETLICPNPDCPLKSALAYVDGKCCKECKCEHNFYDEYFLWKNKALY

SEQ ID NO: 9297 - protein, 166 aa, Homo Sapiens
MELFLFLSPTSYPSPVWGLGVDPSLQIDVLTELELGESTTGVRQVPGLHNGTKAFLFQDTPRSIKASTATAEQFFQKLRNKHEFTILVTLKQTHLNSGVILSIHHLDHRYLELESSGHRNEVRLHYRSGSHRPHTEVFPYILADDKWHKLSLAISASHLILHIDCN

SEQ ID NO: 9298 - protein, 22 aa, Homo Sapiens
MESRVLLRTFCLIFGLGAVWGL

SEQ ID NO: 9299 - protein, 112 aa, Homo Sapiens
MESRVLLRTFCLIFGLGAVWGLGVDPSLQIDVLTELELGESTTGVRQVPGLHNGTKAFLFQDTPRSIKASTATAEQFFQKLRNKHEFTILVTLKQTHLNSGVILSIHHLDHR

SEQ ID NO: 9300 - protein, 816 aa, Homo Sapiens
MESRVLLRTFCLIFGLGAVWGLGVDPSLQIDVLTELELGESTTGVRQVPGLHNGTKAFLFQDTPRSIKASTATAEQFFQKLRNKHEFTILVTLKQTHLNSGVILSIHHLDHRYLELESSGHRNEVRLHYRSGSHRPHTEVFPYILADDKWHKLSLAISASHLILHIDCNKIYERVVEKPSTDLPLGTTFWLGQRNNAHGYFKGIMQDVQLLVMPQGFIAQCPDLNRTCPTCNDFHGLVQKIMELQDILAKTSAKLSRAEQRMNRLDQCYCERTCTMKGTTYREFESWIDGCKNCTCLNGTIQCETLICPNPDCPLKSALAYVDGKCCKECKSICQFQGRTYFEGERNTVYSSSGVCVLYECKDQTMKLVESSGCPALDCPESHQITLSHSCCKVCKGYDFCSERHNCMENSICRNLNDRAVCSCRDGFRALREDNAYCEDIDECAEGRHYCRENTMCVNTPGSFMCICKTGYIRIDDYSCTEHDECITNQHNCDENALCFNTVGGHNCVCKPGYTGNGTTCKAFCKDGCRNGGACIAANVCACPQGFTGPSCETDIDECSDGFVQCDSRANCINLPGWYHCECRDGYHDNGMFSPSGESCEDIDECGTGRHSCANDTICFNLDGGYDCRCPHGKNCTGDCIHDGKVKHNGQIWVLENDRCSVCSCQNGFVMCRRMVCDCENPTVDLFCCPECDPRLSSQCLHQNGETLYNSGDTWVQNCQQCRCLQGEVDCWPLPCPDVECEFSILPENECCPRCVTDPCQADTIRNDITKTCLDEMNVVRFTGSSWIKHGTECTLCQCKNGHICCSVDPQCLQEL

SEQ ID NO: 9301 - protein, 816 aa, Homo Sapiens; identical to SEQ ID NO: 9300

SEQ ID NO: 9302 - protein, 321 aa, Homo Sapiens
MESRVLLRTFCLIFGLGAVWGLGVDPSLQIDVLTELELGESTTGVRQVPGLHNGTKAFLFQDTPRSIKASTATAEQFFQKLRNKHEFTILVTLKQTHLNSGVILSIHHLDHRYLELESSGHRNEVRLHYRSGSHRPHTEVFPYILADDKWHKLSLAISASHLILHIDCNKIYERVVEKPSTDLPLGTTFWLGQRNNAHGYFKGIMQDVQLLVMPQGFIAQCPDLNRTCPTCNDFHGLVQKIMELQDILAKTSAKLSRAEQRMNRLDQCYCERTCTMKGTTYREFESWIDGCKNCTCLNGTIQCETLICPNPDCPLKSALAY

SEQ ID NO: 9303 - protein, 110 aa, Homo Sapiens
METGLGAPLFKAWLLISVWGLGVDPSLQIDVLTELELGESTTGVRQVPGLHNGTKAFLFQDTPRSIKASTATAEQFFQKLRNKHEFTILVTLKQTHLNSGVILSIHHLDH

SEQ ID NO: 9304 - protein, 815 aa, Homo Sapiens
METGLGAPLFKAWLLISVWGLGVDPSLQIDVLTELELGESTTGVRQVPGLHNGTKAFLFQDTPRSIKASTATAEQFFQKLRNKHEFTILVTLKQTHLNSGVILSIHHLDHRYLELESSGHRNEVRLHYRSGSHRPHTEVFPYILADDKWHKLSLAISASHLILHIDCNKIYERVVEKPSTDLPLGTTFWLGQRNNAHGYFKGIMQDVQLLVMPQGFIAQCPDLNRTCPTCNDFHGLVQKIMELQDILAKTSAKLSRAEQRMNRLDQCYCERTCTMKGTTYREFESWIDGCKNCTCLNGTIQCETLICPNPDCPLKSALAYVDGKCCKECKSICQFQGRTYFEGERNTVYSSSGVCVLYECKDQTMKLVESSGCPALDCPESHQITLSHSCCKVCKGYDFCSERHNCMENSICRNLNDRAVCSCRDGFRALREDNAYCEDIDECAEGRHYCRENTMCVNTPGSFMCICKTGYIRIDDYSCTEHDECITNQHNCDENALCFNTVGGHNCVCKPGYTGNGTTCKAFCKDGCRNGGACIAANVCACPQGFTGPSCETDIDECSDGFVQCDSRANCINLPGWYHCECRDGYHDNGMFSPSGESCEDIDECGTGRHSCANDTICFNLDGGYDCRCPHGKNCTGDCIHDGKVKHNGQIWVLENDRCSVCSCQNGFVMCRRMVCDCENPTVDLFCCPECDPRLSSQCLHQNGETLYNSGDTWVQNCQQCRCLQGEVDCWPLPCPDVECEFSILPENECCPRCVTDPCQADTIRNDITKTCLDEMNVVRFTGSSWIKHGTECTLCQCKNGHICCSVDPQCLQEL

SEQ ID NO: 9305 - protein, 768 aa, Homo Sapiens
METGLGAPLFKAWLLISVWGLGVDPSLQIDVLTELELGESTTGVRQVPGLHNGTKAFLFQDTPRSIKASTATAEQFFQKLRNKHEFTILVTLKQTHLNSGVILSIHHLDHRYLELESSGHRNEVRLHYRSGSHRPHTEVFPYILADDKWHKLSLAISASHLILHIDCNKIYERVVEKPSTDLPLGTTFWLGQRNNAHGYFKGIMQDVQLLVMPQGFIAQCPDLNRTCPTCNDFHGLVQKIMELQDILAKTSAKLSRAEQRMNRLDQCYCERTCTMKGTTYREFESWIDGCKNCTCLNGTIQCETLICPNPDCPLKSALAYVDGKCCKECKSICQFQGRTYFEGERNTVYSSSGVCVLYECKDQTMKLVESSGCPALDCPESHQITLSHSCCKVCKGYDFCSERHNCMENSICRNLNDRAVCSCRDGFRALREDNAYCEDIDECAEGRHYCRENTMCVNTPGSFMCICKTGYIRIDDYSCTEHDECITNQHNCDENALCFNTVGGHNCVCKPGYTGNGTTCKAFCKDGCRNGGACIAANVCACPQGFTGPSCETDIDECGTGRHSCANDTICFNLDGGYDCRCPHGKNCTGDCIHDGKVKHNGQIWVLENDRCSVCSCQNGFVMCRRMVCDCENPTVDLFCCPECDPRLSSQCLHQNGETLYNSGDTWVQNCQQCRCLQGEVDCWPLPCPDVECEFSILPENECCPRCVTDPCQADTIRNDITKTCLDEMNVVRFTGSSWIKHGTECTLCQCKNGHICCSVDPQCLQEL

SEQ ID NO: 9306 - protein, 815 aa, Homo Sapiens; identical to SEQ ID NO: 9304

SEQ ID NO: 9307 - protein, 866 aa, Homo Sapiens
MGFPPLLKGQASATRSSLASCSWVVFFLSCLSRHAPEIEGGRRWTELIRTMESRVLLRTFCLIFGLGAVWGLGVDPSLQIDVLTELELGESTTGVRQVPGLHNGTKAFLFQDTPRSIKASTATAEQFFQKLRNKHEFTILVTLKQTHLNSGVILSIHHLDHRYLELESSGHRNEVRLHYRSGSHRPHTEVFPYILADDKWHKLSLAISASHLILHIDCNKIYERVVEKPSTDLPLGTTFWLGQRNNAHGYFKGIMQDVQLLVMPQGFIAQCPDLNRTCPTCNDFHGLVQKIMELQDILAKTSAKLSRAEQRMNRLDQCYCERTCTMKGTTYREFESWIDGCKNCTCLNGTIQCETLICPNPDCPLKSALAYVDGKCCKECKSICQFQGRTYFEGERNTVYSSSGVCVLYECKDQTMKLVESSGCPALDCPESHQITLSHSCCKVCKGYDFCSERHNCMENSICRNLNDRAVCSCRDGFRALREDNAYCEDIDECAEGRHYCRENTMCVNTPGSFMCICKTGYIRIDDYSCTEHDECITNQHNCDENALCFNTVGGHNCVCKPGYTGNGTTCKAFCKDGCRNGGACIAANVCACPQGFTGPSCETDIDECSDGFVQCDSRANCINLPGWYHCECRDGYHDNGMFSPSGESCEDIDECGTGRHSCANDTICFNLDGGYDCRCPHGKNCTGDCIHDGKVKHNGQIWVLENDRCSVCSCQNGFVMCRRMVCDCENPTVDLFCCPECDPRLSSQCLHQNGETLYNSGDTWVQNCQQCRCLQGEVDCWPLPCPDVECEFSILPENECCPRCVTDPCQADTIRNDITKTCLDEMNVVRFTGSSWIKHGTECTLCQCKNGHICCSVDPQCLQEL

SEQ ID NO: 9308 - protein, 839 aa, Homo Sapiens
MSIRRLLILILKIGRRWTELIRTMESRVLLRTFCLIFGLGAVWGLGVDPSLQIDVLTELELGESTTGVRQVPGLHNGTKAFLFQDTPRSIKASTATAEQFFQKLRNKHEFTILVTLKQTHLNSGVILSIHHLDHRYLELESSGHRNEVRLHYRSGSHRPHTEVFPYILADDKWHKLSLAISASHLILHIDCNKIYERVVEKPSTDLPLGTTFWLGQRNNAHGYFKGIMQDVQLLVMPQGFIAQCPDLNRTCPTCNDFHGLVQKIMELQDILAKTSAKLSRAEQRMNRLDQCYCERTCTMKGTTYREFESWIDGCKNCTCLNGTIQCETLICPNPDCPLKSALAYVDGKCCKECKSICQFQGRTYFEGERNTVYSSSGVCVLYECKDQTMKLVESSGCPALDCPESHQITLSHSCCKVCKGYDFCSERHNCMENSICRNLNDRAVCSCRDGFRALREDNAYCEDIDECAEGRHYCRENTMCVNTPGSFMCICKTGYIRIDDYSCTEHDECITNQHNCDENALCFNTVGGHNCVCKPGYTGNGTTCKAFCKDGCRNGGACIAANVCACPQGFTGPSCETDIDECSDGFVQCDSRANCINLPGWYHCECRDGYHDNGMFSPSGESCEDIDECGTGRHSCANDTICFNLDGGYDCRCPHGKNCTGDCIHDGKVKHNGQIWVLENDRCSVCSCQNGFVMCRRMVCDCENPTVDLFCCPECDPRLSSQCLHQNGETLYNSGDTWVQNCQQCRCLQGEVDCWPLPCPDVECEFSILPENECCPRCVTDPCQADTIRNDITKTCLDEMNVVRFTGSSWIKHGTECTLCQCKNGHICCSVDPQCLQEL

SEQ ID NO: 9309 - protein, 246 aa, Homo Sapiens
  misc_feature (1)..(1): Xaa can be any naturally occurring amino acid
XAKLSRAEQRMNRLDQCYCERTCTMKGTTYREFESWIDGCKNCTCLNGTIQCETLICPNPDCPLKSALAYVDGKCSICQFQGRTYFEGERNTVYSSSGVCVLYECKDQTMKLVESSGCPALDCPESHQITLSHSCCKVCKGYDFCSERHNCMENSICRNLNDRAVCSCRDGFRALREDNAYCEDIDECAEGRHYCRENTMCVNTPGSFMCICKTGYIRIDDYSCTEHDECITNQHNCDENALCFNT

SEQ ID NO: 9310 - protein, 86 aa, Homo Sapiens
  misc_feature (1)..(1): Xaa can be any naturally occurring amino acid
XDNGMFSPSGESCEDIDECGTGRHSCANDTICFNLDGGYDCRCPHGKNCTGDCIHDGKVKHNGQIWVLENDRCSVCSCQVGINEKL

SEQ ID NO: 9311 - protein, 172 aa, Homo Sapiens
MVGPAPRRRLRPLAALALVLALAPGLPTARAGQTPRPAERGPPVRLFTEEELARYGGEEEDQPIYLAVKGVVFDVTSGKEFYGRGAPYNALTGKDSTRGVAKMSLDPADLTHDTTGLTAKELEALDEVFTKVYKAKYPIVGYTARRILNEDGSPNLDFKPEDQPHFDIKDEF

SEQ ID NO: 9312 - protein, 533 aa, Homo Sapiens
MIHGRSVLHIVASLIILHLSGATKKGTEKQTTSETQKSVQCGTWTKHAEGGIFTSPNYPSKYPPDRECIYIIEAAPRQCIELYFDEKYSIEPSWECKFDHIEVRDGPFGFSPIIGRFCGQQNPPVIKSSGRFLWIKFFADGELESMGFSARYNFTPDPDFKDLGALKPLPACEFEMGGSEGIVESIQIMKEGKATASEAVDCKWYIRAPPRSKIYLRFLDYEMQNSNECKRNFVAVYDGSSSVEDLKAKFCSTVANDVMLRTGLGVIRMWADEGSRNSRFQMLFTSFQEPPCEGNTFFCHSNMCINNTLVCNGLQNCVYPWDENHCKEKRKTSLLDQLTNTSGTVIGVTSCIVIILIIISVIVQIKQPRKKYVQRKSDFDQTVFQEVFEPPHYELCTLRGTGATADFADVADDFENYHKLRRSSSKCIHDHHCGSQLSSTKGSRSNLSTRDASILTEMPTQPGKPLIPPMNRRNILVMKHSYSQDAADACDIDEIEEVPTTSHRLSRHDKAVQRFCLIGSLSKHESEYNTTRV

SEQ ID NO: 9313 - protein, 533 aa, Homo Sapiens; identical to SEQ ID NO: 9312

SEQ ID NO: 9314 - protein, 156 aa, Homo Sapiens
MLAEPFPKVVASLIILHLSGATKKGTEKQTTSETQKSVQCGTWTKHAEGGIFTSPNYPSKYPPDRECIYIIEAAPRQCIELYFDEKYSIEPSWECKFDHIEVRDGPFGFSPIIGRFCGQQNPPVIKSSGRFLWIKFFADGELESMGFSARYNFTPE

SEQ ID NO: 9315 - protein, 101 aa, Homo Sapiens
MSLYGFVASLIILHLSGATKKGTEKQTTSETQKSVQCGTWTKHAEGGIFTSPNYPSKYPPDRECIYIIEAAPRQCIELYFDEKYSIEPSWECKFDHIEVRD

SEQ ID NO: 9316 - skipped

SEQ ID NO: 9317 - protein, 1165 aa, Homo Sapiens
IEIPMDLTQPPTITKQSAKDHIVDPRDNILIECEAKGNPAPSFHWTRNSRFFNIAKDPRVSMRRRSGTLVIDFRSGGRPEEYEGEYQCFARNKFGTALSNRIRLQVSKSPLWPKENLDPVVVQEGAPLTLQCNPPPGLPSPVIFWMSSSMEPITQDKRVSQGHNGDLYFSNVMLQDMQTDYSCNARFHFTHTIQQKNPFTLKVLTNHPYNDSSLRNHPDMYSARGVAERTPSFMYPQGTASSQMVLRGMDLLLECIASGVPTPDIAWYKKGGDLPSDKAKFENFNKALRITNVSEEDSGEYFCLASNKMGSIRHTISVRVKAAPYWLDEPKNLILAPGEDGRLVCRANGNPKPTVQWMVNGEPLQSAPPNPNREVAGDTIIFRDTQISSRAVYQCNTSNEHGYLLANAFVSVLDVPPRMLSPRNQLIRVILYNRTRLDCPFFGSPIPTLRWFKNGQGSNLDGGNYHVYENGSLEIKMIRKEDQGIYTCVATNILGKAENQVRLEVKDPTRIYRMPEDQVARRGTTVQLECRVKHDPSLKLTVSWLKDDEPLYIGNRMKKEDDSLTIFGVAERDQGSYTCVASTELDQDLAKAYLTVLADQATPTNRLAALPKGRPDRPRDLELTDLAERSVRLTWIPGDANNSPITDYVVQFEEDQFQPGVWHDHSKYPGSVNSAVLRLSPYVNYQFRVIAINEVGSSHPSLPSERYRTSGAPPESNPGDVKGEGTRKNNMEITWTPMNATSAFGPNLRYIVKWRRRETREAWNNVTVWGSRYVVGQTPVYVPYEIRVQAENDFGKGPEPESVIGYSGEDYPRAAPTEVKVRVMNSTAISLQWNRVYSDTVQGQLREYRAYYWRESSLLKNLWVSQKRQQASFPGDRLRGVVSRLFPYSNYKLEMVVVNGRGDGPRSETKEFTTPEGVPSAPRRFRVRQPNLETINLEWDHPEHPNGIMIGYTLKYVAFNGTKVGKQIVENFSPNQTKFTVQRTDPVSRYRFTLSARTQVGSGEAVTEESPAPPNEATPTAAYTNNQADIATQGWFIGLMCAIALLVLILLIVCFIKRSRGGKYPVREKKDVPLGPEDPKEEDGSFDYSDEDNKPLQGSQTSLDGTIKQQESDDSLVDYGEGGEGQFNEDGSFIGQYTVKKDKEETEGNESSEATSPVNAIYSLA

SEQ ID NO: 9318 - protein, 1169 aa, Homo Sapiens
MARQPPPPWVHAAFLLCLLSLGGAIEIPMDLTQPPTITKQSAKDHIVDPRDNILIECEAKGNPAPSFHWTRNSRFFNIAKDPRVSMRRRSGTLVIDFRSGGRPEEYEGEYQCFARNKFGTALSNRIRLQVSKSPLWPKENLDPVVVQEGAPLTLQCNPPPGLPSPVIFWMSSSMEPITQDKRVSQGHNGDLYFSNVMLQDMQTDYSCNARFHFTHTIQQKNPFTLKVLTNHPYNDSSLRNHPDMYSARGVAERTPSFMYPQGTASSQMVLRGMDLLLECIASGVPTPDIAWYKKGGDLPSDKAKFENFNKALRITNVSEEDSGEYFCLASNKMGSIRHTISVRVKAAPYWLDEPKNLILAPGEDGRLVCRANGNPKPTVQWMVNGEPLQSAPPNPNREVAGDTIIFRDTQISSRAVYQCNTSNEHGYLLANAFVSVLDVPPRMLSPRNQLIRVILYNRTRLDCPFFGSPIPTLRWFKNGQGSNLDGGNYHVYENGSLEIKMIRKEDQGIYTCVATNILGKAENQVRLEVKDPTRIYRMPEDQVARRGTTVQLECRVKHDPSLKLTVSWLKDDEPLYIGNRMKKEDDSLTIFGVAERDQGSYTCVASTELDQDLAKAYLTVLGRPDRPRDLELTDLAERSVRLTWIPGDANNSPITDYVVQFEEDQFQPGVWHDHSKYPGSVNSAVLRLSPYVNYQFRVIAINEVGSSHPSLPSERYRTSGAPPESNPGDVKGEGTRKNNMEITWTPMNATSAFGPNLRYIVKWRRRETREAWNNVTVWGSRYVVGQTPVYVPYEIRVQAENDFGKGPEPESVIGYSGEDYPRAAPTEVKVRVMNSTAISLQWNRVYSDTVQGQLREYRAYYWRESSLLKNLWVSQKRQQASFPGDRLRGVVSRLFPYSNYKLEMVVVNGRGDGPRSETKEFTTPEGVPSAPRRFRVRQPNLETINLEWDHPEHPNGIMIGYTLKYVAFNGTKVGKQIVENFSPNQTKFTVQRTDPVSRYRFTLSARTQVGSGEAVTEESPAPPNEAYTNNQADIATQGWFIGLMCAIALLVLILLIVCFIKRSRGGKYPVREKKDVPLGPEDPKEEDGSFDYSDEDNKPLQGSQTSLDGTIKQQESDDSLVDYGEGGEGQFNEDGSFIGQYTVKKDKEETEGNESSEATSPVNAIYSLA

SEQ ID NO: 9319 - protein, 1174 aa, Homo Sapiens
MARQPPPPWVHAAFLLCLLSLGGAIEIPMDLTQPPTITKQSAKDHIVDPRDNILIECEAKGNPAPSFHWTRNSRFFNIAKDPRVSMRRRSGTLVIDFRSGGRPEEYEGEYQCFARNKFGTALSNRIRLQVSKSPLWPKENLDPVVVQEGAPLTLQCNPPPGLPSPVIFWMSSSMEPITQDKRVSQGHNGDLYFSNVMLQDMQTDYSCNARFHFTHTIQQKNPFTLKVLTNHPYNDSSLRNHPDMYSARGVAERTPSFMYPQGTASSQMVLRGMDLLLECIASGVPTPDIAWYKKGGDLPSDKAKFENFNKALRITNVSEEDSGEYFCLASNKMGSIRHTISVRVKAAPYWLDEPKNLILAPGEDGRLVCRANGNPKPTVQWMVNGEPLQSAPPNPNREVAGDTIIFRDTQISSRAVYQCNTSNEHGYLLANAFVSVLDVPPRMLSPRNQLIRVILYNRTRLDCPFFGSPIPTLRWFKNGQGSNLDGGNYHVYENGSLEIKMIRKEDQGIYTCVATNILGKAENQVRLEVKDPTRIYRMPEDQVARRGTTVQLECRVKHDPSLKLTVSWLKDDEPLYIGNRMKKEDDSLTIFGVAERDQGSYTCVASTELDQDLAKAYLTVLGRPDRPRDLELTDLAERSVRLTWIPGDANNSPITDYVVQFEEDQFQPGVWHDHSKYPGSVNSAVLRLSPYVNYQFRVIAINEVGSSHPSLPSERYRTSGAPPESNPGDVKGEGTRKNNMEITWTPMNATSAFGPNLRYIVKWRRRETREAWNNVTVWGSRYVVGQTPVYVPYEIRVQAENDFGKGPEPESVIGYSGEDYPRAAPTEVKVRVMNSTAISLQWNRVYSDTVQGQLREYRAYYWRESSLLKNLWVSQKRQQASFPGDRLRGVVSRLFPYSNYKLEMVVVNGRGDGPRSETKEFTTPEGVPSAPRRFRVRQPNLETINLEWDHPEHPNGIMIGYTLKYVAFNGTKVGKQIVENFSPNQTKFTVQRTDPVSRYRFTLSARTQVGSGEAVTEESPAPPNEATPTAAYTNNQADIATQGWFIGLMCAIALLVLILLIVCFIKRSRGGKYPVREKKDVPLGPEDPKEEDGSFDYSDEDNKPLQGSQTSLDGTIKQQESDDSLVDYGEGGEGQFNEDGSFIGQYTVKKDKEETEGNESSEATSPVNAIYSLA

SEQ ID NO: 9320 - protein, 1174 aa, Homo Sapiens; identical to SEQ ID NO: 9319

SEQ ID NO: 9321 - protein, 1169 aa, Homo Sapiens; identical to SEQ ID NO: 9318

SEQ ID NO: 9322 - protein, 1157 aa, Homo Sapiens
MARQPPPPWVHAAFLLCLLSLGGAIEIPMDLTQPPTITKQSAKDHIVDPRDNILIECEAKGNPAPSFHWTRNSRFFNIAKDPRVSMRRRSGTLVIDFRSGGRPEEYEGEYQCFARNKFGTALSNRIRLQVSKSPLWPKENLDPVVVQEGAPLTLQCNPPPGLPSPVIFWMSSSMEPITQDKRVSQGHNGDLYFSNVMLQDMQTDYSCNARFHFTHTIQQKNPFTLKVLTTRGVAERTPSFMYPQGTASSQMVLRGMDLLLECIASGVPTPDIAWYKKGGDLPSDKAKFENFNKALRITNVSEEDSGEYFCLASNKMGSIRHTISVRVKAAPYWLDEPKNLILAPGEDGRLVCRANGNPKPTVQWMVNGEPLQSAPPNPNREVAGDTIIFRDTQISSRAVYQCNTSNEHGYLLANAFVSVLDVPPRMLSPRNQLIRVILYNRTRLDCPFFGSPIPTLRWFKNGQGSNLDGGNYHVYENGSLEIKMIRKEDQGIYTCVATNILGKAENQVRLEVKDPTRIYRMPEDQVARRGTTVQLECRVKHDPSLKLTVSWLKDDEPLYIGNRMKKEDDSLTIFGVAERDQGSYTCVASTELDQDLAKAYLTVLGRPDRPRDLELTDLAERSVRLTWIPGDANNSPITDYVVQFEEDQFQPGVWHDHSKYPGSVNSAVLRLSPYVNYQFRVIAINEVGSSHPSLPSERYRTSGAPPESNPGDVKGEGTRKNNMEITWTPMNATSAFGPNLRYIVKWRRRETREAWNNVTVWGSRYVVGQTPVYVPYEIRVQAENDFGKGPEPESVIGYSGEDYPRAAPTEVKVRVMNSTAISLQWNRVYSDTVQGQLREYRAYYWRESSLLKNLWVSQKRQQASFPGDRLRGVVSRLFPYSNYKLEMVVVNGRGDGPRSETKEFTTPEGVPSAPRRFRVRQPNLETINLEWDHPEHPNGIMIGYTLKYVAFNGTKVGKQIVENFSPNQTKFTVQRTDPVSRYRFTLSARTQVGSGEAVTEESPAPPNEATPTAAYTNNQADIATQGWFIGLMCAIALLVLILLIVCFIKRSRGGKYPVREKKDVPLGPEDPKEEDGSFDYSDEDNKPLQGSQTSLDGTIKQQESDDSLVDYGEGGEGQFNEDGSFIGQYTVKKDKEETEGNESSEATSPVNAIYSLA

SEQ ID NO: 9323 - protein, 129 aa, Homo Sapiens
MARQPPPPWVHAAFLLCLLSLGGAIEIPMDPSIQNELTQPPTITKQSAKDHIVDPRDNILIECEAKGNPAPSFHWTRNSRFFNIAKDPRVSMRRRSGTLVIDFRSGGRPEEYEGEYQCFARNKFGTALS

SEQ ID NO: 9324 - protein, 486 aa, Homo Sapiens
MARQPPPPWVHAAFLLCLLSLGGAIEIPMDPSIQNELTQPPTITKQSAKDHIVDPRDNILIECEAKGNPAPSFHWTRNSRFFNIAKDPRVSMRRRSGTLVIDFRSGGRPEEYEGEYQCFARNKFGTALSNRIRLQVSKSPLWPKENLDPVVVQEGAPLTLQCNPPPGLPSPVIFWMSSSMEPITQDKRVSQGHNGDLYFSNVMLQDMQTDYSCNARFHFTHTIQQKNPFTLKVLTNHPYNDSSLRNHPDMYSARGVAERTPSFMYPQGTASSQMVLRGMDLLLECIASGVPTPDIAWYKKGGDLPSDKAKFENFNKALRITNVSEEDSGEYFCLASNKMGSIRHTISVRVKAAPYWLDEPKNLILAPGEDGRLVCRANGNPKPTVQWMVNGEPLQSAPPNPNREVAGDTIIFRDTQISSRAVYQCNTSNEHGYLLANAFVSVLDVPPRMLSPRNQLIRVILYNRTRLDCPFFGSPIPTLRCPHGLS

SEQ ID NO: 9325 - protein, 1240 aa, Homo Sapiens
MARQPPPPWVHAAFLLCLLSLGGAIEIPMDPSIQNELTQPPTITKQSAKDHIVDPRDNILIECEAKGNPAPSFHWTRNSRFFNIAKDPRVSMRRRSGTLVIDFRSGGRPEEYEGEYQCFARNKFGTALSNRIRLQVSKSPLWPKENLDPVVVQEGAPLTLQCNPPPGLPSPVIFWMSSSMEPITQDKRVSQGHNGDLYFSNVMLQDMQTDYSCNARFHFTHTIQQKNPFTLKVLTTRGVAERTPSFMYPQGTASSQMVLRGMDLLLECIASGVPTPDIAWYKKGGDLPSDKAKFENFNKALRITNVSEEDSGEYFCLASNKMGSIRHTISVRVKAAPYWLDEPKNLILAPGEDGRLVCRANGNPKPTVQWMVNGEPLQSAPPNPNREVAGDTIIFRDTQISSRAVYQCNTSNEHGYLLANAFVSVLDVPPRMLSPRNQLIRVILYNRTRLDCPFFGSPIPTLRWFKNGQGSNLDGGNYHVYENGSLEIKMIRKEDQGIYTCVATNILGKAENQVRLEVKDPTRIYRMPEDQVARRGTTVQLECRVKHDPSLKLTVSWLKDDEPLYIGNRMKKEDDSLTIFGVAERDQGSYTCVASTELDQDLAKAYLTVLADQATPTNRLAALPKGRPDRPRDLELTDLAERSVRLTWIPGDANNSPITDYVVQFEEDQFQPGVWHDHSKYPGSVNSAVLRLSPYVNYQFRVIAINEVGSSHPSLPSERYRTSGAPPESNPGDVKGEGTRKNNMEITWTPMNATSAFGPNLRYIVKWRRRETREAWNNVTVWGSRYVVGQTPVYVPYEIRVQAENDFGKGPEPESVIGYSGEDLPSAPRRFRVRQPNLETINLEWDHPEHPNGIMIGYTLKYVAFNGTKVGKQIVENFSPNQTKFTVQRTDPVSRYRFTLSARTQVGSGEAVTEESPAPPNEATPTAAPPTLPPTTVGATGAVSSTDATAIAATTEATTVPIIPTVAPTTIATTTTVATTTTTTAAATTTTESPPTTTSGTKIHESAPDEQSIWNVTVLPNSKWANITWKHNFGPGTDFVVEYIDSNHTKKTVPVKAQAQPIQLTDLYPGMTYTLRVYSRDNEGISSTVITFMTSTAYTNNQADIATQGWFIGLMCAIALLVLILLIVCFIKRSRGGKYPVREKKDVPLGPEDPKEEDGSFDYSDEDNKPLQGSQTSLDGTIKQQESDDSLVDYGEGGEGQFNEDGSFIGQYTVKKDKEETEGNESSEATSPVNAIYSLA

SEQ ID NO: 9326 - protein, 1240 aa, Homo Sapiens; identical to SEQ ID NO: 9325

SEQ ID NO: 9327 - protein, 619 aa, Homo Sapiens
MARQPPPPWVHAAFLLCLLSLGGAIEIPMDPSIQNELTQPPTITKQSAKDHIVDPRDNILIECEAKGNPAPSFHWTRNSRFFNIAKDPRVSMRRRSGTLVIDFRSGGRPEEYEGEYQCFARNKFGTALSNRIRLQVSKSPLWPKENLDPVVVQEGAPLTLQCNPPPGLPSPVIFWMSSSMEPITQDKRVSQGHNGDLYFSNVMLQDMQTDYSCNARFHFTHTIQQKNPFTLKVLTTRGVAERTPSFMYPQGTASSQMVLRGMDLLLECIASGVPTPDIAWYKKGGDLPSDKAKFENFNKALRITNVSEEDSGEYFCLASNKMGSIRHTISVRVKAAPYWLDEPKNLILAPGEDGRLVCRANGNPKPTVQWMVNGEPLQSAPPNPNREVAGDTIIFRDTQISSRAVYQCNTSNEHGYLLANAFVSVLDVPPRMLSPRNQLIRVILYNRTRLDCPFFGSPIPTLRWFKNGQGSNLDGGNYHVYENGSLEIKMIRKEDQGIYTCVATNILGKAENQVRLEVKDPTRIYRMPEDQVARRGTTVQLECRVKHDPSLKLTVSWLKDDEPLYIGNRMKKEDDSLTIFGVAERDQGSYTCVASTELDQDLAKAYLTVLGNCPCSPWH

SEQ ID NO: 9328 - protein, 218 aa, Homo Sapiens
PPTTVGATGAVSSTDATAIAATTEATTVPIIPTVAPTTIATTTTVATTTTTTAAATTTTESPPTTTSGTKIHESAYTNNQADIATQGWFIGLMCAIALLVLILLIVCFIKRSRGGKYPVREKKDVPLGPEDPKEEDGSFDYSDEDNKPLQGSQTSLDGTIKQQESDDSLVDYGEGGEGQFNEDGSFIGQYTVKKDKEETEGNESSEATSPVNAIYSLA

SEQ ID NO: 9329 - protein, 237 aa, Homo Sapiens
  misc_feature (1)..(1): Xaa can be any naturally occurring amino acid
XENFSPNQTKFTVQRTDPVSRYRFTLSARTQVGSGEAVTEESPAPPNEATPTAAPDEQSIWNVTVLPNSKWANITWKHNFGPGTDFVVEYIDSNHTKKTVPVKAQAQPIQLTDLYPGMTYTLRVYSRDNEGISSTVITFMTSTAYTNNQADIATQGWFIGLMCAIALLVLILLIVCFIKRSRGGKYPVREKKDVPLGPEDPKEEDGSFDYSDEDNKPLQGSQTSLDGTIKQQESDDS

SEQ ID NO: 9330 - protein, 298 aa, Homo Sapiens
  misc_feature (1)..(1): Xaa can be any naturally occurring amino acid
XRETREAWNNVTVWGSRYVVGQTPVYVPYEIRVQAENDFGKGPEPESVIGYSGEDLPSAPRRFRVRQPNLETINLEWDHPEHPNGIMIGYTLKYVAFNGTKVGKQIVENFSPNQTKFTVQRTDPVSRYRFTLSARTQVGSGEAVTEESPAPPNEAYTNNQADIATQGWFIGLMCAIALLVLILLIVCFIKRSRGGKYPVREKKDVPLGPEDPKEEDGSFDYSDEDNKPLQGSQTSLDGTIKQQESDDSLVDYGEGGEGQFNEDGSFIGQYTVKKDKEETEGNESSEATSPVNAIYSLA

SEQ ID NO: 9331 - protein, 1041 aa, Homo Sapiens
  misc_feature (1)..(1): Xaa can be any naturally occurring amino acid
XSIQNELTQPPTITKQSAKDHIVDPRDNILIECEAKGNPAPSFHWTRNSRFFNIAKDPRVSMRRRSGTLVIDFRSGGRPEEYEGEYQCFARNKFGTALSNRIRLQVSKSPLWPKENLDPVVVQEGAPLTLQCNPPPGLPSPVIFWMSSSMEPITQDKRVSQGHNGDLYFSNVMLQDMQTDYSCNARFHFTHTIQQKNPFTLKVLTTRGVAERTPSFMYPQGTASSQMVLRGMDLLLECIASGVPTPDIAWYKKGGDLPSDKAKFENFNKALRITNVSEEDSGEYFCLASNKMGSIRHTISVRVKAAPYWLDEPKNLILAPGEDGRLVCRANGNPKPTVQWMVNGEPLQSAPPNPNREVAGDTIIFRDTQISSRAVYQCNTSNEHGYLLANAFVSVLDVPPRMLSPRNQLIRVILYNRTRLDCPFFGSPIPTLRWFKNGQGSNLDGGNYHVYENGSLEIKMIRKEDQGIYTCVATNILGKAENQVRLEVKDPTRIYRMPEDQVARRGTTVQLECRVKHDPSLKLTVSWLKDDEPLYIGNRMKKEDDSLTIFGVAERDQGSYTCVASTELDQDLAKAYLTVLADQATPTNRLAALPKGRPDRPRDLELTDLAERSVRLTWIPGDANNSPITDYVVQFEEDQFQPGVWHDHSKYPGSVNSAVLRLSPYVNYQFRVIAINEVGSSHPSLPSERYRTSGAPPESNPGDVKGEGTRKNNMEITWTPMNATSAFGPNLRYIVKWRRRETREAWNNVTVWGSRYVVGQTPVYVPYEIRVQAENDFGKGPEPESVIGYSGEDLPSAPRRFRVRQPNLETINLEWDHPEHPNGIMIGYTLKYVAFNGTKVGKQIVENFSPNQTKFTVQRTDPVSRYRFTLSARTQVGSGEAVTEESPAPPNEATPTAAYTNNQADIATQGWFIGLMCAIALLVLILLIVCFIKRSRGGKYPVREKKDVPLGPEDPKEEDGSFDYSDEDNKPLQGSQTSLDGTIKQQESDDSLVDYGEGGEGQFNEDGSFIGQYTVKKDKEETEGNESSEATSPVNAIYSLA

SEQ ID NO: 9332 - protein, 573 aa, Homo Sapiens
MGWESHLTAASADIDLGAGREVFDYSHRQKEQDVEKELRDGGEQDTWAGEGAEALARNLLVDGETGESFPAQFPADISSITEAVPSESEPPALQNNLLSPLLTGTESPFDLEQQWQDLMSIMEMQAMEVNTSASEILYSAPPGDPLSTNYSLAPNTPINQNVSLHQASLGGCSQDFLLFSPEVESLPVASSSTLLPLAPSNSTSLNSTFGSTNLTGLFFPPQLNGTANDTAGPELPDPLGGLLDEAMLDEISLMDLAIEEGFNPVQASQLEEEFDSDSGLSLDSSHSPSSLSSSEGSSSSSSSSSSSSSSASSSASSSFSEEGAVGYSSDSETLDLEEAEGAVGYQPEYSKFCRMSYQDPAQLSCLPYLEHVGHNHTYNMAPSALDSADLPPPSALKKGSKEKQADFLDKQMSRDEHRARAMKIPFTNDKIINLPVEEFNELLSKYQLSEAQLSLIRDIRRRGKNKMAAQNCRKRKLDTILNLERDVEDLQRDKARLLREKVEFLRSLRQMKQKVQSLYQEVFGRLRDENGRPYSPSQYALQYAGDGSVLLIPRTMADQQARRQERKPKDRRK

SEQ ID NO: 9333 - protein, 584 aa, Homo Sapiens
MGWESHLTAASADIDLIDILWRQDIDLGAGREVFDYSHRQKEQDVEKELRDGGEQDTWAGEGAEALARNLLVDGETGESFPAQFPADISSITEAVPSESEPPALQNNLLSPLLTGTESPFDLEQQWQDLMSIMEMQAMEVNTSASEILYSAPPGDPLSTNYSLAPNTPINQNVSLHQASLGGCSQDFLLFSPEVESLPVASSSTLLPLAPSNSTSLNSTFGSTNLTGLFFPPQLNGTANDTAGPELPDPLGGLLDEAMLDEISLMDLAIEEGFNPVQASQLEEEFDSDSGLSLDSSHSPSSLSSSEGSSSSSSSSSSSSSSASSSASSSFSEEGAVGYSSDSETLDLEEAEGAVGYQPEYSKFCRMSYQDPAQLSCLPYLEHVGHNHTYNMAPSALDSADLPPPSALKKGSKEKQADFLDKQMSRDEHRARAMKIPFTNDKIINLPVEEFNELLSKYQLSEAQLSLIRDIRRRGKNKMAAQNCRKRKLDTILNLERDVEDLQRDKARLLREKVEFLRSLRQMKQKVQSLYQEVFGRLRDENGRPYSPSQYALQYAGDGSVLLIPRTMADQQARRQERKPKDRRK

SEQ ID NO: 9334 - protein, 4 aa, Homo Sapiens
MLSL

SEQ ID NO: 9335 - protein, 9 aa, Homo Sapiens
MLSLKKYLT

SEQ ID NO: 9336 - protein, 83 aa, Homo Sapiens
MLSLKKYLTEGLLQFTILLSLIGVRVDVDTYLTSQLPPLREIILGPSSAYTQTQFHNLRNTLDGYGIHPKSIDLDNYFTARRL

SEQ ID NO: 9337 - protein, 99 aa, Homo Sapiens
MLSLKKYLTEGLLQFTILLSLIGVRVDVDTYLTSQLPPLREIILGPSSAYTQTQFHNLRNTLDGYGIHPKSIDLDNYFTARRLLSQVRALDRFQVPTTE

SEQ ID NO: 9338 - protein, 761 aa, Homo Sapiens
MLSLKKYLTEGLLQFTILLSLIGVRVDVDTYLTSQLPPLREIILGPSSAYTQTQFHNLRNTLDGYGIHPKSIDLDNYFTARRLLSQVRALDRFQVPTTEVNAWLVHRDPEGSVSGSQPNSGLALESSSGLQDVTGPDNGVRESETEQGFGEDLEDLGAVAPPVSGDLTKEDIDLGAGREVFDYSHRQKEQDVEKELRDGGEQDTWAGEGAEALARNLLVDGETGESFPAQVPSGEDQTALSLEECLRLLEATCPFGENAEFPADISSITEAVPSESEPPALQNNLLSPLLTGTESPFDLEQQWQDLMSIMEMQAMEVNTSASEILYSAPPGDPLSTNYSLAPNTPINQNVSLHQASLGGCSQDFLLFSPEVESLPVASSSTLLPLAPSNSTSLNSTFGSTNLTGLFFPPQLNGTANDTAGPELPDPLGGLLDEAMLDEISLMDLAIEEGFNPVQASQLEEEFDSDSGLSLDSSHSPSSLSSSEGSSSSSSSSSSSSSSASSSASSSFSEEGAVGYSSDSETLDLEEAEGAVGYQPEYSKFCRMSYQDPAQLSCLPYLEHVGHNHTYNMAPSALDSADLPPPSALKKGSKEKQADFLDKQMSRDEHRARAMKIPFTNDKIINLPVEEFNELLSKYQLSEAQLSLIRDIRRRGKNKMAAQNCRKRKLDTILNLERDVEDLQRDKARLLREKVEFLRSLRQMKQKVQSLYQEVFGRLRDENGRPYSPSQYALQYAGDGSVLLIPRTMADQQARRQERKPKDRRK

SEQ ID NO: 9339 - protein, 742 aa, Homo Sapiens
MLSLKKYLTEGLLQFTILLSLIGVRVDVDTYLTSQLPPLREIILGPSSAYTQTQFHNLRNTLDGYGIHPKSIDLDNYFTARRLLSQVRALDRFQVPTTEVNAWLVHRDPEGSVSGSQPNSGLALESSSGLQDVTGPDNGVRESETEQGFGEDLEDLGAVAPPVSGDLTKEDIDLIDILWRQDIDLGAGREVFDYSHRQKEQDVEKELRDGGEQDTWAGEGAEALARNLLVDGETGESFPAQFPADISSITEAVPSESEPPALQNNLLSPLLTGTESPFDLEQQWQDLMSIMEMQAMEVNTSASEILYSAPPGDPLSTNYSLAPNTPINQNVSLHQASLGGCSQDFLLFSPEVESLPVASSSTLLPLAPSNSTSLNSTFGSTNLTGLFFPPQLNGTANDTAGPELPDPLGGLLDEAMLDEISLMDLAIEEGFNPVQASQLEEEFDSDSGLSLDSSHSPSSLSSSEGSSSSSSSSSSSSSSASSSASSSFSEEGAVGYSSDSETLDLEEAEGAVGYQPEYSKFCRMSYQDPAQLSCLPYLEHVGHNHTYNMAPSALDSADLPPPSALKKGSKEKQADFLDKQMSRDEHRARAMKIPFTNDKIINLPVEEFNELLSKYQLSEAQLSLIRDIRRRGKNKMAAQNCRKRKLDTILNLERDVEDLQRDKARLLREKVEFLRSLRQMKQKVQSLYQEVFGRLRDENGRPYSPSQYALQYAGDGSVLLIPRTMADQQARRQERKPKDRRK

SEQ ID NO: 9340 - protein, 742 aa, Homo Sapiens; identical to SEQ ID NO: 9339

SEQ ID NO: 9341 - protein, 772 aa, Homo Sapiens
MLSLKKYLTEGLLQFTILLSLIGVRVDVDTYLTSQLPPLREIILGPSSAYTQTQFHNLRNTLDGYGIHPKSIDLDNYFTARRLLSQVRALDRFQVPTTEVNAWLVHRDPEGSVSGSQPNSGLALESSSGLQDVTGPDNGVRESETEQGFGEDLEDLGAVAPPVSGDLTKEDIDLIDILWRQDIDLGAGREVFDYSHRQKEQDVEKELRDGGEQDTWAGEGAEALARNLLVDGETGESFPAQVPSGEDQTALSLEECLRLLEATCPFGENAEFPADISSITEAVPSESEPPALQNNLLSPLLTGTESPFDLEQQWQDLMSIMEMQAMEVNTSASEILYSAPPGDPLSTNYSLAPNTPINQNVSLHQASLGGCSQDFLLFSPEVESLPVASSSTLLPLAPSNSTSLNSTFGSTNLTGLFFPPQLNGTANDTAGPELPDPLGGLLDEAMLDEISLMDLAIEEGFNPVQASQLEEEFDSDSGLSLDSSHSPSSLSSSEGSSSSSSSSSSSSSSASSSASSSFSEEGAVGYSSDSETLDLEEAEGAVGYQPEYSKFCRMSYQDPAQLSCLPYLEHVGHNHTYNMAPSALDSADLPPPSALKKGSKEKQADFLDKQMSRDEHRARAMKIPFTNDKIINLPVEEFNELLSKYQLSEAQLSLIRDIRRRGKNKMAAQNCRKRKLDTILNLERDVEDLQRDKARLLREKVEFLRSLRQMKQKVQSLYQEVFGRLRDENGRPYSPSQYALQYAGDGSVLLIPRTMADQQARRQERKPKDRRK

SEQ ID NO: 9342 - protein, 19 aa, Homo Sapiens
MSIMEMQAMEVNTSASEIL

SEQ ID NO: 9343 - protein, 23 aa, Homo Sapiens
MSIMEMQAMEVNTSASEILYSAP

SEQ ID NO: 9344 - protein, 47 aa, Homo Sapiens
MSIMEMQAMEVNTSASEILYSAPPGDPLSTNYSLAPNTPINQNVSLH

SEQ ID NO: 9345 - protein, 63 aa, Homo Sapiens
MSIMEMQAMEVNTSASEILYSAPPGDPLSTNYSLAPNTPINQNVSLHQASLGGCSQDFLLFSP

SEQ ID NO: 9346 - protein, 161 aa, Homo Sapiens
MTRLDRSSHSGGGHAKGSRPLNSLLAGHRVAQPASAPGSRASVQDIDLGAGREVFDYSHRQKEQDVEKELRDGGEQDTWAGEGAEALARNLLVDGETGESFPAQFPADISSITEAVPSESEPPALQNNLLSPLLTGTESPFDLEQQWQDLMSIMEMQAMEV

SEQ ID NO: 9347 - protein, 63 aa, Homo Sapiens
MTRLDRSSHSGGGHAKGSRPLNSLLAGHRVAQPASAPGSRASVQDIDLIDILWRQDIDLGAGR

SEQ ID NO: 9348 - protein, 111 aa, Homo Sapiens
MTRLDRSSHSGGGHAKGSRPLNSLLAGHRVAQPASAPGSRASVQDIDLIDILWRQDIDLGAGREVFDYSHRQKEQDVEKELRDGGEQDTWAGEGAEALARNLLVDGETGES

SEQ ID NO: 9349 - protein, 616 aa, Homo Sapiens
MTRLDRSSHSGGGHAKGSRPLNSLLAGHRVAQPASAPGSRASVQDIDLIDILWRQDIDLGAGREVFDYSHRQKEQDVEKELRDGGEQDTWAGEGAEALARNLLVDGETGESFPAQFPADISSITEAVPSESEPPALQNNLLSPLLTGTESPFDLEQQWQDLMSIMEMQAMEVNTSASEILYSAPPGDPLSTNYSLAPNTPINQNVSLHQASLGGCSQDFLLFSPEVESLPVASSSTLLPLAPSNSTSLNSTFGSTNLTGLFFPPQLNGTANDTAGPELPDPLGGLLDEAMLDEISLMDLAIEEGFNPVQASQLEEEFDSDSGLSLDSSHSPSSLSSSEGSSSSSSSSSSSSSSASSSASSSFSEEGAVGYSSDSETLDLEEAEGAVGYQPEYSKFCRMSYQDPAQLSCLPYLEHVGHNHTYNMAPSALDSADLPPPSALKKGSKEKQADFLDKQMSRDEHRARAMKIPFTNDKIINLPVEEFNELLSKYQLSEAQLSLIRDIRRRGKNKMAAQNCRKRKLDTILNLERDVEDLQRDKARLLREKVEFLRSLRQMKQKVQSLYQEVFGRLRDENGRPYSPSQYALQYAGDGSVLLIPRTMADQQARRQERKPKDRRK

SEQ ID NO: 9350 - protein, 133 aa, Homo Sapiens
SEEGAVGYSSDSETLDLEEAEGAVGYQPEYSKFCRMSYQDPAQLSCLPYLEHVGHNHTYNMAPSALDSADLPPPSALKKGSKEKQADFLDKQMSRDEHRARAMKIPFTNDKIINLPVEELCGAKADRGEGMDL

SEQ ID NO: 9351 - protein, 694 aa, Homo Sapiens
MKHLKRWWSAGGGLLHLTLLLSLAGLRVDLDLYLLLPPPTLLQDELLFLGGPASSAYALSPFSASGGWGRAGHLHPKGRELDPAAPPEGQLLREVRALGVPFVPRTSVDAWLVHSVAAGSADEAHGLLGAAAASSTGGAGASVDGGSQAVQGGGGDPRAARSGPLDAGEEEKAPAEPTAQVPDAGGCASEENGVLREKHEAVDHSSQHEENEERVSAQKENSLQQNDDDENKIAEKPDWEAEKTTESRNERHLNGTDTSFSLEDLFQLLSSQPENSLEGISLGDIPLPGSISDGMNSSAHYHVNFSQAISQDVNLHEAILLCPNNTFRRDPTARTSQSQEPFLQLNSHTTNPEQTLPGTNLTGFLSPVDNHMRNLTSQDLLYDLDINIFDEINLMSLATEDNFDPIDVSQLFDEPDSDSGLSLDSSHNNTSVIKSNSSHSVCDEGAIGYCTDHESSSHHDLEGAVGGYYPEPSKLCHLDQSDSDFHGDLTFQHVFHNHTYHLQPTAPESTSEPFPWPGKSQKIRSRYLEDTDRNLSRDEQRAKALHIPFSVDEIVGMPVDSFNSMLSRYYLTDLQVSLIRDIRRRGKNKVAAQNCRKRKLDIILNLEDDVCNLQAKKETLKREQAQCNKAINIMKQKLHDLYHDIFSRLRDDQGRPVNPNHYALQCTHDGSILIVPKELVASGHKKETQKGKRK

SEQ ID NO: 9352 - protein, 83 aa, Homo Sapiens
NEERVSAQKENSLQQNDDDENKIAEKPDWEAEKTTESRNERHLNGTDTSFSLEDLFQLLSSQPENSLEVIGTLAFILAGTYLH

SEQ ID NO: 9353 - protein, 238 aa, Homo Sapiens
MELLAAAFSAACAVDHDSSTSESDARDSAAGHLPGSESSSTPGNGATPEEWPALADSPTTLTEALRMIHPIPADSWRNLIEQIGLLYQEYRDKSTLQEIETRRQQDAEIEDNTNGSPASEDTPEEEEEEEEEEEPASPPERKTLPQICLLSNPHSRFNLWQDLPEIRSSGVLEILQPEEIKLQEAMFELVTSEASYYKSLNLLVSHFMENERIRKILHPSEAHILFSNVLDVLAVSER

SEQ ID NO: 9354 - protein, 618 aa, Homo Sapiens
MELLAAAFSAACAVDHDSSTSESDARDSAAGHLPGSESSSTPGNGATPEEWPALADSPTTLTEALRMIHPIPADSWRNLIEQIGLLYQEYRDKSTLQEIETRRQQDAEIEDNTNGSPASEDTPEEEEEEEEEEEPASPPERKTLPQICLLSNPHSRFNLWQDLPEIRSSGVLEILQPEEIKLQEAMFELVTSEASYYKSLNLLVSHFMENERIRKILHPSEAHILFSNVLDVLAVSERFLLELEHRMEENIVISDVCDIVYRYAADHFSVYITYVSNQTYQERTYKQLLQEKAAFRELIAQLELDPKCRGLPFSSFLILPFQRITRLKLLVQNILKRVEERSERECTALDAHKELEMVVKACNEGVRKMSRTEQMISIQKKMEFKIKSVPIISHSRWLLKQGELQQMSGPKTSRTLRTKKLFHEIYLFLFNDLLVICRQIPGDKYQVFDSAPRGLLRVEELEDQGQTLANVFILRLLENADDREATYMLKASSQSEMKRWMTSLAPNRRTKFVSFTSRLLDCPQVQCVHPYVAQQPDELTLELADILNILDKTDDGWIFGERLHDQERGWFPSSMTEEILNPKIRSQNLKECFRVHKMDDPQRSQNKDRRKLGSRNRQ

SEQ ID NO: 9355 - protein, 710 aa, Homo Sapiens
METRESEDLEKTRRKSASDQWNTDNEPAKVKPELLPEKEETSQADQDIQDKEPHCHIPIKRNSIFNRSIRRKSKAKARDNPERNASCLADSQDNGKSVNEPLTLNIPWSRMPPCRTAMQTDPGAQEMSESSSTPGNGATPEEWPALADSPTTLTEALRMIHPIPADSWRNLIEQIGLLYQEYRDKSTLQEIETRRQQDAEIEDNTNGSPASEDTPEEEEEEEEEEEPASPPERKTLPQICLLSNPHSRFNLWQDLPEIRSSGVLEILQPEEIKLQEAMFELVTSEASYYKSLNLLVSHFMENERIRKILHPSEAHILFSNVLDVLAVSERFLLELEHRMEENIVISDVCDIVYRYAADHFSVYITYVSNQTYQERTYKQLLQEKAAFRELIAQLELDPKCRGLPFSSFLILPFQRITRLKLLVQNILKRVEERSERECTALDAHKELEMVVKACNEGVRKMSRTEQMISIQKKMEFKIKSVPIISHSRWLLKQGELQQMSGPKTSRTLRTKKLFHEIYLFLFNDLLVICRQIPGDKYQVFDSAPRGLLRVEELEDQGQTLANVFILRLLENADDREATYMLKASSQSEMKRWMTSLAPNRRTKFVSFTSRLLDCPQVQCVHPYVAQQPDELTLELADILNILDKTDDGWIFGERLHDQERGWFPSSMTEEILNPKIRSQNLKECFRVHKMDDPQRSQNKDRRKLGSRNRQ

SEQ ID NO: 9356 - protein, 187 aa, Homo Sapiens
MFELVTSEASYYKSLNLLVSHFMENERIRKILHPSEAHILFSNVLDVLAVSERFLLELEHRMEENIVISDVCDIVYRYAADHFSVYITYVSNQTYQERTYKQLLQEKAAFRELIAQLELDPKCRGLPFSSFLILPFQRITRLKLLVQNILKRVEERSERECTALDAHKELEMVVKACNEGVRKMSRT

SEQ ID NO: 9357 - protein, 150 aa, Homo Sapiens
MVVKACNEGVRKMSRTEQMISIQKKMEFKIKSVPIISHSRWLLKQGELQQMSGPKTSRTLRTKKLFHEIYLFLFNDLLVICRQIPGDKYQVFDSAPRGLLRVEELEDQGQTLANVFILRLLENADDREATYMLKASSQSEMKRWMTSLAP

SEQ ID NO: 9358 - protein, 97 aa, Homo Sapiens
  misc_feature (1)..(1): Xaa can be any naturally occurring amino acid
XELLPEKEETSQADQDIQDKEPHCHIPIKRNSIFNRSIRRKSKAKARDNPERNASCLADSQDNGKSVNEPLTLNIPWSRMPPCRTAMQTDPGAQEMR

SEQ ID NO: 9359 - protein, 241 aa, Homo Sapiens
MSMLFYTLITAFLIGIQAEPHSESNVPAGHTIPQAHWTKLQHSLDTALRRARSAPAAAIAARVAGQTRNITVDPRLFKKRRLRSPRVLFSTQPPREAADTQDLDFEVGGAAPFNRTHRSKRSSSHPIFHRGEFSVCDSVSVWVGDKTTATDIKGKEVMVLGEVNINNSVFKQYFFETKCRDPNPVDSGCRGIDSKHWNSYCTTTHTFVKALTMDGKQAAWRFIRIDTACVCVLSRKAVRRA

SEQ ID NO: 9360 - protein, 633 aa, Homo Sapiens
AALGSSSGSASPAVAELCQNTPETFLEASKLLLTYADNILRNPNDEKYRSIRIGNTAFSTRLLPVRGAVECLFEMGFEEGETHLIFPKKASVEQLQKIRDLIAIERSSRLDGSNKSHKVKSSQQPAASTQLPTTPSSNPSGLNQHTRNRQGQSSDPPSASTVAADSAILEVLQSNIQHVLVYENPALQEKALACIPVQELKRKSQEKLSRARKLDKGINISDEDFLLLELLHWFKEEFFHWVNNVLCSKCGGQTRSRDRSLLPSDDELKWGAKEVEDHYCDACQFSNRFPRYNNPEKLLETRCGRCGEWANCFTLCCRAVGFEARYVWDYTELQRTLSLKLTTLKEIGKTFLRISKRQKLIQVVDVTWRYSCKHEEVIARRTKVKEALLRDTINGLNKQRQLFLSENRRKELLQRIIVELVEFISPKTPKPGELGGRISGSVAWRVARGEMGLQRKETLFIPCENEKISKQLHLCYNIVKDRYVRVSNNNQTISGWENGVWKMESIFRKVETDWHMVYLARKEGSSFAYISWKFECGSVGLKVDSISIRTSSQTFQTGTVEWKLRSDTAQVELTGDNSLHSYADFSGATEVILEAELSRGDGDVAWQHTQLFRQSLNDHEENCLEIIIKFSDL

SEQ ID NO: 9361 - protein, 654 aa, Homo Sapiens [sequence omitted]

SEQ ID NO: 9362 - protein, 558 aa, Homo Sapiens
MAAAALGSSSGSASPAVAELCQNTPETFLEASKLLLTYADNILRNPNDEKYRSIRIGNTAFSTRLLPVRGAVECLFEMGFEEGETHLIFPKKASVEQLQKIRDLIAIERSSRLDGSNKSHKVKSSQQPAASTQLPTTPSSNPSGLNQHTRNRQGQSSDPPSASTVAADSAILEVLQSNIQHVLVYENPALQEKALACIPVQELKRKSQEKLSRARKLDKGINISDEDFLLLELLHWFKEEFFHWVNNVLCSKCGGQTRSRDRSLLPSDDELKWGAKEVEDHYCDACQFSNRFPRYNNPEKLLETRCGRCGEWANCFTLCCRAVGFEARYVWDYTDHVWTEVYSPSQQRWLHCDACEDVCDKPLLYEIGWGKKLSYVIAFSKDEVVDVTWRYSCKHEEVIARRTKVKEALLRDTINGLNKQRQLFLSENRRKELLQRIIVELVEFISPKTPKPGELGGRISGSVAWRVARGEMGLQRKETLFIPCENEKISKQLHLCYNIVKDRYVRVSNNNQTISGWENGVWKMESIFRKVETDWHMITVFTPMLIFLVPLKLFWKQN

SEQ ID NO: 9363 - protein, 636 aa, Homo Sapiens
MAAAALGSSSGSASPAVAELCQNTPETFLEASKLLLTYADNILRNPNDEKYRSIRIGNTAFSTRLLPVRGAVECLFEMGFEEGETHLIFPKKASVEQLQKIRDLIAIERSSRLDGSNKSHKVKSSQQPAASTQLPTTPSSNPSGLNQHTRNRQGQSSDPPSASTVAADSAILEVLQSNIQHVLVYENPALQEKALACIPVQELKRKSQEKLSRARKLDKGINISDEDFLLLELLHWFKEEFFHWVNNVLCSKCGGQTRSRDRSLLPSDDELKWGAKEVEDHYCDACQFSNRFPRYNNPEKLLETRCGRCGEWANCFTLCCRAVGFEARYVWDYTELQRTLSLKLTTLKEIGKTFLRISKRQKLIQVVDVTWRYSCKHEEVIARRTKVKEALLRDTINGLNKQRQLFLSENRRKELLQRIIVELVEFISPKTPKPGELGGRISGSVAWRVARGEMGLQRKETLFIPCENEKISKQLHLCYNIVKDRYVRVSNNNQTISGWENGVWKMESIFRKVETDWHMVYLARKEGSSFAYISWKFECGSVGLKVDSISIRTSSQTFQTGTVEWKLRSDTAQVELTGDNSLHSYADFSGATEVILEAELSRGDGDVAWQHTQLFRQSLNDHEENCLEIIIKFSDL

SEQ ID NO: 9364 - protein, 114 aa, Homo Sapiens
MGFEEGETHLIFPKKASVEQLQKIRDLIAIERSSRLDGSNKSHKVKSSQQPAASTQLPTTPSSNPSGLNQHTRNRQGQSSDPPSASTVAADSAILEVLQSNIQHVLVYENPALQ

SEQ ID NO: 9365 - protein, 612 aa, Homo Sapiens
MRNPNDEKYRSIRIGNTAFSTRLLPVRGAVECLFEMGFEEGETHLIFPKKASVEQLQKIRDLIAIERSSRLDGSNKSHKVKSSQQPAASTQLPTTPSSNPSGLNQHTRNRQGQSSDPPSASTVAADSAILEVLQSNIQHVLVYENPALQEKALACIPVQELKRKSQEKLSRARKLDKGINISDEDFLLLELLHWFKEEFFHWVNNVLCSKCGGQTRSRDRSLLPSDDELKWGAKEVEDHYCDACQFSNRFPRYNNPEKLLETRCGRCGEWANCFTLCCRAVGFEARYVWDYTDHVWTEVYSPSQQRWLHCDACEDVCDKPLLYEIGWGKKLSYVIAFSKDEVVDVTWRYSCKHEEVIARRTKVKEALLRDTINGLNKQRQLFLSENRRKELLQRIIVELVEFISPKTPKPGELGGRISGSVAWRVARGEMGLQRKETLFIPCENEKISKQLHLCYNIVKDRYVRVSNNNQTISGWENGVWKMESIFRKVETDWHMVYLARKEGSSFAYISWKFECGSVGLKVDSISIRTSSQTFQTGTVEWKLRSDTAQVELTGDNSLHSYADFSGATEVILEAELSRGDGDVAWQHTQLFRQSLNDHEENCLEIIIKFSDL

SEQ ID NO: 9366 - protein, 240 aa, Homo Sapiens
  misc_feature (1)..(1): Xaa can be any naturally occurring amino acid
XSGSASPAVAELCQNTPETFLEASKLLLTYADNILRNPNDEKYRSIRIGNTAFSTRLLPVRGAVECLFEMGFEEGETHLIFPKKASVEQLQKIRDLIAIERSSRLDGSNKSHKVKSSQQPAASTQLPTTPSSNPSGLNQHTRNRQGQSSDPPSASTVAADSAILEVLQSNIQHVLVYENPALQEKALACIPVQELKRKSQEKLSRARKLDKDIITLRNFWKQDVDGVASGPIVLHCAAEL

SEQ ID NO: 9367 - protein, 23 aa, Homo Sapiens
EAPGAPPRTLTWEAMEQIRYLSS

SEQ ID NO: 9368 - protein, 291 aa, Homo Sapiens
MAVTLSLLLGGRVCAAVTRCGFATRGVAGPGPIGREPDPDSDWEPEERELQEVESTLKRQKQAIRFQKIRRQMEAPGAPPRTLTWEAMEQIRYLHEEFPESWSVPRLAEGFDVSTDVIRRVLKSKFLPTLEQKLKQDQKVLKKAGLAHSLQHLRGSGNTSKLLPAGHSVSGSLLMPGHEASSKDPNHSTALKVIESDTHRTNTPRRRKGRNKEIQDLEESFVPVAAPLGHPRELQKYSSDSESPRGTGSGALPSGQKLEELKAEEPDNFSSKVVQRGREFFDSNGNFLYRI

SEQ ID NO: 9369 - protein, 280 aa, Homo Sapiens
MARFWVCVAGAGFFLAFLVLHSRFCGSPVLRNFTFAVSWRTEKILYRLDVGWPKHPEYFTGTTFCVAVDSLNGLVYIGQRGDNIPKILVFTEDGYFLRAWNYTVDTPHGIFAASTLYEQSVWITDVGSDFMILWLHGENGTGPAKFNIPHSVTLDSAGRVWVADRGNKRIQVFDKDTGEWLGAWNNCFTEEGPSSVRFTPDGKYLIVAQLNLSRLSVVAAPPVGSIGECSVISTIQLADQVLPHLLEVDRKTGAVYVAEIGAKQVQKYVPLNSYVPSFGS

SEQ ID NO: 9370 - protein, 347 aa, Homo Sapiens
MARFWVCVAGAGFFLAFLVLHSRFCGSPVLRNFTFAVSWRTEKILYRLDVGWPKHPEYFTGTTFCVAVDSLNGLVYIGQRGDNIPKILVFTEDGYFLRAWNYTVDTPHGIFAASTLYEQSVWITDVGSGFFGHTVKKYSSFGDLVQVLGTPGKKGTSLNPLQFDNPAELYVEDTGDIYIVDGDGGLNNRLIKLSQDFMILWLHGENGTGPAKFNIPHSVTLDSAGRVWVADRGNKRIQVFDKDTGEWLGAWNNCFTEEGPSSVRFTPDGKYLIVAQLNLSRLSVVAAPPVGSIGECSVISTIQLADQVLPHLLEVDRKTGAVYVAEIGAKQVQKYVPLNSYVPSFGS

SEQ ID NO: 9371 - protein, 150 aa, Homo Sapiens
MILWLHGENGTGPAKFNIPHSVTLDSAGRVWVADRGNKRIQVFDKDTGEWLGAWNNCFTEEGPSSVRFTPDGKYLIVAQLNLSRLSVVAAPPVGSIGECSVISTIQLADQVLPHLLEVDRKTGAVYVAEIGAKQVQKYVPLNSYVPSFGS

SEQ ID NO: 9372 - protein, 1247 aa, Homo Sapiens
MLASSSRIRAAWTRALLLPLLLAGPVGCLSRQELFPFGPGQGDLELEDGDDFVSPALELSGALRFYDRSDIDAVYVTTNGIIATSEPPAKESHPGLFPPTFGAVAPFLADLDTTDGLGKVYYREDLSPSITQRAAECVHRGFPEISFQPSSAVVVTWESVAPYQGPSRDPDQKGKRNTFQAVLASSDSSSYAIFLYPEDGLQFHTTFSKKENNQVPAVVAFSQGSVGFLWKSNGAYNIFANDRESVENLAKSSNSGQQGVWVFEIGSPATTNGVVPADVILGTEDGAEYDDEDEDYDLATTRLGLEDVGTTPFSYKALRRGGADTYSVPSVLSPRRAATERPLGPPTERTRSFQLAVETFHQQHPQVIDVDEVEETGVVFSYNTDSRQTCANNRHQCSVHAECRDYATGFCCSCVAGYTGNGRQCVAEGSPQRVNGKVKGRIFVGSSQVPIVFENTDLHSYVVMNHGRSYTAISTIPETVGYSLLPLAPVGGIIGWMFAVEQDGFKNGFSITGGEFTRQAEVTFVGHPGNLVIKQRFSGIDEHGHLTIDTELEGRVPQIPFGSSVHIEPYTELYHYSTSVITSSSTREYTVTEPERDGASPSRIYTYQWRQTITFQECVHDDSRPALPSTQQLSVDSVFVLYNQEEKILRYALSNSIGPVREGSPDALQNPCYIGTHGCDTNAACRPGPRTQFTCECSIGFRGDGRTCYDIDECSEQPSVCGSHTICNNHPGTFRCECVEGYQFSDEGTCVAVVDQRPINYCETGLHNCDIPQRAQCIYTGGSSYTCSCLPGFSGDGQACQDVDECQPSRCHPDAFCYNTPGSFTCQCKPGYQGDGFRCVPGEVEKTRCQHEREHILGAAGATDPQRPIPPGLFVPECDAHGHYAPTQCHGSTGYCWCVDRDGREVEGTRTRPGMTPPCLSTVAPPIHQGPAVPTAVIPLPPGTHLLFAQTGKIERLPLEGNTMRKTEAKAFLHVPAKVIIGLAFDCVDKMVYWTDITEPSIGRASLHGGEPTTIIRQDLGSPEGIAVDHLGRNIFWTDSNLDRIEVAKLDGTQRRVLFETDLVNPRGIVTDSVRGNLYWTDWNRDNPKIETSYMDGTNRRILVQDDLGLPNGLTFDAFSSQLCWVDAGTNRAECLNPSQPSRRKALEGLQYPFAVTSYGKNLYFTDWKMNSVVALDLAISKETDAFQPHKQTRLYGITTALSQCPQGHNYCSVNNGGCTHLCLATPGSRTCRCPDNTLGVDCIEQK

SEQ ID NO: 9373 - protein, 1114 aa, Homo Sapiens
MLASSSRIRAAWTRALLLPLLLAGPVGCLSRQELFPFGPGQGDLELEDGDDFVSPALELSGALRFYDRSDIDAVYVTTNGIIATSEPPAKESHPGLFPPTFGAVAPFLADLDTTDGLGKVYYREDLSPSITQRAAECVHRGFPEISFQPSSAVVVTWESVAPYQGPSRDPDQKGKRNTFQAVLASSDSSSYAIFLYPEDGLQFHTTFSKKENNQVPAVVAFSQGSVGFLWKSNGAYNIFANDRESVENLAKSSNSGQQGVWVFEIGSPATTNGVVPADVILGTEDGAEYDDEDEDYDLATTRLGLEDVGTTPFSYKALRRGGADTYSVPSVLSPRRAATERPLGPPTERTRSFQLAVETFHQQHPQVIDVDEVEETGVVFSYNTDSRQTCANNRHQCSVHAECRDYATGFCCSCVAGYTGNGRQCVAEGSPQRVNGKVKGRIFVGSSQVPIVFENTDLHSYVVMNHGRSYTAISTIPETVGYSLLPLAPVGGIIGWMFAVEQDGFKNGFSITGGEFTRQAEVTFVGHPGNLVIKQRFSGIDEHGHLTIDTELEGRVPQIPFGSSVHIEPYTELYHYSTSVITSSSTREYTVTEPERDGASPSRIYTYQWRQTITFQECVHDDSRPALPSTQQLSVDSVFVLYNQEEKILRYALSNSIGPVREGSPDALQNPCYIGTHGCDTNAACRPGPRTQFTCECSIGFRGDGRTCYEVEKTRCQHEREHILGAAGATDPQRPIPPGLFVPECDAHGHYAPTQCHGSTGYCWCVDRDGREVEGTRTRPGMTPPCLSTVAPPIHQGPAVPTAVIPLPPGTHLLFAQTGKIERLPLEGNTMRKTEAKAFLHVPAKVIIGLAFDCVDKMVYWTDITEPSIGRASLHGGEPTTIIRQDLGSPEGIAVDHLGRNIFWTDSNLDRIEVAKLDGTQRRVLFETDLVNPRGIVTDSVRGNLYWTDWNRDNPKIETSYMDGTNRRILVQDDLGLPNGLTFDAFSSQLCWVDAGTNRAECLNPSQPSRRKALEGLQYPFAVTSYGKNLYFTDWKMNSVVALDLAISKETDAFQPHKQTRLYGITTALSQCPQGHNYCSVNNGGCTHLCLATPGSRTCRCPDNTLGVDCIEQK

SEQ ID NO: 9374 - protein, 1375 aa, Homo Sapiens
MEGDRVAGRPVLSSLPVLLLLPLLMLRAAALHPDELFPHGESWGDQLLQEGDDESSAVVKLANPLHFYEARFSNLYVGTNGIISTQDFPRETQYVDYDFPTDFPAIAPFLADIDTSHGRGRVLYREDTSPAVLGLAARYVRAGFPRSARFTPTHAFLATWEQVGAYEEVKRGALPSGELNTFQAVLASDGSDSYALFLYPANGLQFLGTRPKESYNVQLQLPARVGFCRGEADDLKSEGPYFSLTSTEQSVKNLYQLSNLGIPGVWAFHIGSTSPLDNVRPAAVGDLSAAHSSVPLGRSFSHATALESDYNEDNLDYYDVNEEEAEYLPGEPEEALNGHSSIDVSFQSKVDTKPLEESSTLDPHTKEGTSLGEVGGPDLKGQVEPWDERETRSPAPPEVDRDSLAPSWETPPPYPENGSIQPYPDGGPVPSEMDVPPAHPEEEIVLRSYPASGHTTPLSRGTYEVGLEDNIGSNTEVFTYNAANKETCEHNHRQCSRHAFCTDYATGFCCHCQSKFYGNGKHCLPEGAPHRVNGKVSGHLHVGHTPVHFTDVDLHAYIVGNDGRAYTAISHIPQPAAQALLPLTPIGGLFGWLFALEKPGSENGFSLAGAAFTHDMEVTFYPGEETVRITQTAEGLDPENYLSIKTNIQGQVPYVSANFTAHISPYKELYHYSDSTVTSTSSRDYSLTFGAINQTWSYRIHQNITYQVCRHAPRHPSFPTTQQLNVDRVFALYNDEERVLRFAVTNQIGPVKEDSDPTPGNPCYDGSHMCDTTARCHPGTGVDYTCECASGYQGDGRNCVDENECATGFHRCGPNSVCINLPGSYRCECRSGYEFADDRHTCILITPPANPCEDGSHTCAPAGQARCVHHGGSTFSCACLPGYAGDGHQCTDVDECSENRCHPAATCYNTPGSFSCRCQPGYYGDGFQCIPDSTSSLTPCEQQQRHAQAQYAYPGARFHIPQCDEQGNFLPLQCHGSTGFCWCVDPDGHEVPGTQTPPGSTPPHCGPSPEPTQRPPTICERWRENLLEHYGGTPRDDQYVPQCDDLGHFIPLQCHGKSDFCWCVDKDGREVQGTRSQPGTTPACIPTVAPPMVRPTPRPDVTPPSVGTFLLYTQGQQIGYLPLNGTRLQKDAAKTLLSLHGSIIVGIDYDCRERMVYWTDVAGRTISRAGLELGAEPETIVNSGLISPEGLAIDHIRRTMYWTDSVLDKIESALLDGSERKVLFYTDLVNPRAIAVDPIRGNLYWTDWNREAPKIETSSLDGENRRILINTDIGLPNGLTFDPFSKLLCWADAGTKKLECTLPDGTGRRVIQNNLKYPFSIVSYADHFYHTDWRRDGVVSVNKHSGQFTDEYLPEQRSHLYGITAVYPYCPTGRK

SEQ ID NO: 9375 - protein, 969 aa, Homo Sapiens
MEGDRVAGRPVLSSLPVLLLLPLLMLRAAALHPDELFPHGESWGDQLLQEGDDESSAVVKLANPLHFYEARFSNLYVGTNGIISTQDFPRETQYVDYDFPTDFPAIAPFLADIDTSHGRGRVLYRVNGKVSGHLHVGHTPVHFTDVDLHAYIVGNDGRAYTAISHIPQPAAQALLPLTPIGGLFGWLFALEKPGSENGFSLAGAAFTHDMEVTFYPGEETVRITQTAEGLDPENYLSIKTNIQGQVPYVSANFTAHISPYKELYHYSDSTVTSTSSRDYSLTFGAINQTWSYRIHQNITYQVCRHAPRHPSFPTTQQLNVDRVFALYNDEERVLRFAVTNQIGPVKEDSDPTPGNPCYDGSHMCDTTARCHPGTGVDYTCECASGYQGDGRNCVDENECATGFHRCGPNSVCINLPGSYRCECRSGYEFADDRHTCILITPPANPCEDGSHTCAPAGQARCVHHGGSTFSCACLPGYAGDGHQCTDVDECSENRCHPAATCYNTPGSFSCRCQPGYYGDGFQCIPDSTSSLTPCEQQQRHAQAQYAYPGARFHIPQCDEQGNFLPLQCHGSTGFCWCVDPDGHEVPGTQTPPGSTPPHCGPSPEPTQRPPTICERWRENLLEHYGGTPRDDQYVPQCDDLGHFIPLQCHGKSDFCWCVDKDGREVQGTRSQPGTTPACIPTVAPPMVRPTPRPDVTPPSVGTFLLYTQGQQIGYLPLNGTRLQKDAAKTLLSLHGSIIVGIDYDCRERMVYWTDVAGRTISRAGLELGAEPETIVNSGLISPEGLAIDHIRRTMYWTDSVLDKIESALLDGSERKVLFYTDLVNPRAIAVDPIRGNLYWTDWNREAPKIETSSLDGENRRILINTDIGLPNGLTFDPFSKLLCWADAGTKKLECTLPDGTGRRVIQNNLKYPFSIVSYADHFYHTDWRRDGVVSVNKHSGQFTDEYLPEQRSHLYGITAVYPYCPTGRK

SEQ ID NO: 9376 - protein, 644 aa, Homo Sapiens
  misc_feature (1)..(1): Xaa can be any naturally occurring amino acid
XYSLTFGAINQTWSYRIHQNITYQVCRHAPRHPSFPTTQQLNVDRVFALYNDEERVLRFAVTNQIGPVKEDSDPTPGNPCYDGSHMCDTTARCHPGTGVDYTCECASGYQGDGRNCVDENECATGFHRCGPNSVCINLPGSYRCECRSGYEFADDRHTCIYVDECSENRCHPAATCYNTPGSFSCRCQPGYYGDGFQCIPDSTSSLTPCEQQQRHAQAQYAYPGARFHIPQCDEQGNFLPLQCHGSTGFCWCVDPDGHEVPGTQTPPGSTPPHCGPSPEPTQRPPTICERWRENLLEHYGGTPRDDQYVPQCDDLGHFIPLQCHGKSDFCWCVDKDGREVQGTRSQPGTTPACIPTVAPPMVRPTPRPDVTPPSVGTFLLYTQGQQIGYLPLNGTRLQKDAAKTLLSLHGSIIVGIDYDCRERMVYWTDVAGRTISRAGLELGAEPETIVNSGLISPEGLAIDHIRRTMYWTDSVLDKIESALLDGSERKVLFYTDLVNPRAIAVDPIRGNLYWTDWNREAPKIETSSLDGENRRILINTDIGLPNGLTFDPFSKLLCWADAGTKKLECTLPDGTGRRVIQNNLKYPFSIVSYADHFYHTDWRRDGVVSVNKHSGQFTDEYLPEQRSHLYGITAVYPYCPTGRK

SEQ ID NO: 9377 - protein, 85 aa, Homo Sapiens
MELCRSLALLGGSLGLMFCLIALSTDFWFEAVGPTHSAHSGLWPTGHGDIISGHGPLVSTTAAFAAGALSLGAHCGGPRPGYETL

SEQ ID NO: 9378 - protein, 142 aa, Homo Sapiens
MELCRSLALLGGSLGLMFCLIALSTDFWFEAVGPTHSAHSGLWPTGHGDIISGHGPLVSTTAAFAAGKDSGLDWGIASQRIPAEELSHLSCPCPQPSPWWWPWRCTPASGGTSLHTPRSRPSSPGPSTWAGSQLSSCSVQVP

SEQ ID NO: 9379 - protein, 165 aa, Homo Sapiens
MELCRSLALLGGSLGLMFCLIALSTDFWFEAVGPTHSAHSGLWPTGHGDIISGYIHVTQTFSIMAVLWALVSVSFLVLSCFPSLFPPGHGPLVSTTAAFAAAISMVVAMAVYTSERWDQPPHPQIQTFFSWSFYLGWVSAILLLCTGALSLGAHCGGPRPGYETL

SEQ ID NO: 9380 - protein, 72 aa, Homo Sapiens
TGHGDIISAISMVVAMAVYTSERWDQPPHPQIQTFFSWSFYLGWVSAILLLCTGALSLGAHCGGPRPGYETL

SEQ ID NO: 9381 - protein, 89 aa, Homo Sapiens
  misc_feature (1)..(1): Xaa can be any naturally occurring amino acid
XWPTGHGDIISGHGPLVSTTAAFAAAISMVVAMAVYTSERWDQPPHPQIQTFFSWSFYLGWVSAILLLCTGALSLGAHCGGPRPGYETL

SEQ ID NO: 9382 - protein, 351 aa, Homo Sapiens
MLPVWFTANLDIVATYIQEPNEDCLYLNVYVPTEDGSGAKKQGEDLADNDGDEDEDIRDSGAKPVMVYIHGGSYMEGTGNMIDGSILASYGNVIVITLNYRVGVLGFLSTGDQAAKGNYGLLDQIQALRWVSENIAFFGGDPRRITVFGSGIGASCVSLLTLSHHSEGLFQRAIIQSGSALSSWAVNYQPVKYTSLLADKVGCNVLDTVDMVDCLRQKSAKELVEQDIQPARYHVAFGPVIDGDVIPDDPEILMEQGEFLNYDIMLGVNQGEGLKFVEGVVDPEDGVSGTDFDYSVSILWTICMAILRVRTPCERPSSSCIQTGQTVTTLRPAVKHWWHSSLTTSGWSPQW

SEQ ID NO: 9383 - protein, 513 aa, Homo Sapiens
MWLRLGPPSLSLSPKPTVGRSLCLTLWFLSLALRASTQAPAPTVNTHFGKLRGARVPLPSEILGPVDQYLGVPYAAPPIGEKRFLPPEPPPSWSGIRNATHFPPVCPQNIHTAVPEVMLPVWFTANLDIVATYIQEPNEDCLYLNVYVPTEDDIRDSGAKPVMVYIHGGSYMEGTGNMIDGSILASYGNVIVITLNYRVGVLGFLSTGDQAAKGNYGLLDQIQALRWVSENIAFFGGDPRRITVFGSGIGASCVSLLTLSHHSEGLFQRAIIQSGSALSSWAVNYQPVKYTSLLADKVGCNVLDTVDMVDCLRQKSAKELVEQDIQPARYHVAFGPVIDGDVIPDDPEILMEQGEFLNYDIMLGVNQGEGLKFVEGVVDPEDGVSGTDFDYSVSNFVDNLYGYPEGKDTLRETIKFMYTDWADRDNPETRRKTLVALFTDHQWVEPSVVTADLHARYGSPTYFYAFYHHCQSLMKPAWSDAAHGDEVPYVFGVPMVGPTDLFPCNFSKNDVML

SEQ ID NO: 9384 - protein, 808 aa, Homo Sapiens
MWLRLGPPSLSLSPKPTVGRSLCLTLWFLSLALRASTQAPAPTVNTHFGKLRGARVPLPSEILGPVDQYLGVPYAAPPIGEKRFLPPEPPPSWSGIRNATHFPPVCPQNIHTAVPEVMLPVWFTANLDIVATYIQEPNEDCLYLNVYVPTEDDIRDSGAKPVMVYIHGGSYMEGTGNMIDGSILASYGNVIVITLNYRVGVLGFLSTGDQAAKGNYGLLDQIQALRWVSENIAFFGGDPRRITVFGSGIGASCVSLLTLSHHSEGLFQRAIIQSGSALSSWAVNYQPVKYTSLLADKVGCNVLDTVDMVDCLRQKSAKELVEQDIQPARYHVAFGPVIDGDVIPDDPEILMEQGEFLNYDIMLGVNQGEGLKFVEGVVDPEDGVSGTDFDYSVSNFVDNLYGYPEGKDTLRETIKFMYTDWADRDNPETRRKTLVALFTDHQWVEPSVVTADLHARYGSPTYFYAFYHHCQSLMKPAWSDAAHGDEVPYVFGVPMVGPTDLFPCNFSKNDVMLSAVVMTYWTNFAKTGDPNKPVPQDTKFIHTKANRFEEVAWSKYNPRDQLYLHIGLKPRVRDHYRATKVAFWKHLVPHLYNLHDMFHYTSTTTKVPPPDTTHSSHITRRPNGKTWSTKRPAISPAYSNENAQGSWNGDQDAGPLLVENPRDYSTELSVTIAVGASLLFLNVLAFAALYYRKDKRRQEPLRQPSPQRGAGAPELGAAPEEELAALQLGPTHHECEAGPPHDTLRLTALPDYTLTLRRSPDDIPLMTPNTITMIPNSLVGLQTLHPYNTFAAGFNSTGLPHSHSTTRV

SEQ ID NO: 9385 - protein, 828 aa, Homo Sapiens
MWLRLGPPSLSLSPKPTVGRSLCLTLWFLSLALRASTQAPAPTVNTHFGKLRGARVPLPSEILGPVDQYLGVPYAAPPIGEKRFLPPEPPPSWSGIRNATHFPPVCPQNIHTAVPEVMLPVWFTANLDIVATYIQEPNEDCLYLNVYVPTEDGSGAKKQGEDLADNDGDEDEDIRDSGAKPVMVYIHGGSYMEGTGNMIDGSILASYGNVIVITLNYRVGVLGFLSTGDQAAKGNYGLLDQIQALRWVSENIAFFGGDPRRITVFGSGIGASCVSLLTLSHHSEGLFQRAIIQSGSALSSWAVNYQPVKYTSLLADKVGCNVLDTVDMVDCLRQKSAKELVEQDIQPARYHVAFGPVIDGDVIPDDPEILMEQGEFLNYDIMLGVNQGEGLKFVEGVVDPEDGVSGTDFDYSVSNFVDNLYGYPEGKDTLRETIKFMYTDWADRDNPETRRKTLVALFTDHQWVEPSVVTADLHARYGSPTYFYAFYHHCQSLMKPAWSDAAHGDEVPYVFGVPMVGPTDLFPCNFSKNDVMLSAVVMTYWTNFAKTGDPNKPVPQDTKFIHTKANRFEEVAWSKYNPRDQLYLHIGLKPRVRDHYRATKVAFWKHLVPHLYNLHDMFHYTSTTTKVPPPDTTHSSHITRRPNGKTWSTKRPAISPAYSNENAQGSWNGDQDAGPLLVENPRDYSTELSVTIAVGASLLFLNVLAFAALYYRKDKRRQEPLRQPSPQRGAGAPELGAAPEEELAALQLGPTHHECEAGPPHDTLRLTALPDYTLTLRRSPDDIPLMTPNTITMIPNSLVGLQTLHPYNTFAAGFNSTGLPHSHSTTRV

SEQ ID NO: 9386 - protein, 848 aa, Homo Sapiens
MWLRLGPPSLSLSPKPTVGRSLCLTLWFLSLALRASTQAPAPTVNTHFGKLRGARVPLPSEILGPVDQYLGVPYAAPPIGEKRFLPPEPPPSWSGIRNATHFPPVCPQNIHTAVPEVMLPVWFTANLDIVATYIQEPNEDCLYLNVYVPTEDVKRISKECARKPNKKICRKGGSGAKKQGEDLADNDGDEDEDIRDSGAKPVMVYIHGGSYMEGTGNMIDGSILASYGNVIVITLNYRVGVLGFLSTGDQAAKGNYGLLDQIQALRWVSENIAFFGGDPRRITVFGSGIGASCVSLLTLSHHSEGLFQRAIIQSGSALSSWAVNYQPVKYTSLLADKVGCNVLDTVDMVDCLRQKSAKELVEQDIQPARYHVAFGPVIDGDVIPDDPEILMEQGEFLNYDIMLGVNQGEGLKFVEGVVDPEDGVSGTDFDYSVSNFVDNLYGYPEGKDTLRETIKFMYTDWADRDNPETRRKTLVALFTDHQWVEPSVVTADLHARYGSPTYFYAFYHHCQSLMKPAWSDAAHGDEVPYVFGVPMVGPTDLFPCNFSKNDVMLSAVVMTYWTNFAKTGDPNKPVPQDTKFIHTKANRFEEVAWSKYNPRDQLYLHIGLKPRVRDHYRATKVAFWKHLVPHLYNLHDMFHYTSTTTKVPPPDTTHSSHITRRPNGKTWSTKRPAISPAYSNENAQGSWNGDQDAGPLLVENPRDYSTELSVTIAVGASLLFLNVLAFAALYYRKDKRRQEPLRQPSPQRGAGAPELGAAPEEELAALQLGPTHHECEAGPPHDTLRLTALPDYTLTLRRSPDDIPLMTPNTITMIPNSLVGLQTLHPYNTFAAGFNSTGLPHSHSTTRV

SEQ ID NO: 9387 - protein, 33 aa, Homo Sapiens
MLRPQGLLWLPLLFTSVCVMLNSNVLLWITALA

SEQ ID NO: 9388 - protein, 816 aa, Homo Sapiens
MLRPQGLLWLPLLFTSVCVMLNSNVLLWITALAIKFTLIDSQAQYPVVNTNYGKIQGLRTPLPSEILGPVEQYLGVPYASPPTGERRFQPPESPSSWTGIRNATQFSAVCPQHLDERFLLHDMLPIWFTTSLDTLMTYVQDQNEDCLYLNIYVPMEDDIHEQNSKKPVMVYIHGGSYMEGTGNMIDGSILASYGNVIVITINYRLGILGFLSTGDQAAKGNYGLLDQIQALRWIEENVGAFGGDPKRVTIFGSGAGASCVSLLTLSHYSEGLFQKAIIQSGTALSSWAVNYQPAKYTRILADKVGCNMLDTTDMVECLKNKNYKELIQQTITPATYHIAFGPVIDGDVIPDDPQILMEQGEFLNYDIMLGVNQGEGLKFVDGIVDNEDGVTPNDFDFSVSNFVDNLYGYPEGKDTLRETIKFMYTDWADKENPETRRKTLVALFTDHQWVAPAVATADLHAQYGSPTYFYAFYHHCQSEMKPSWADSAHGDEVPYVFGIPMIGPTELFSCNFSKNDVMLSAVVMTYWTNFAKTGDPNQPVPQDTKFIHTKPNRFEEVAWSKYNPKDQLYLHIGLKPRVRDHYRATKVAFWLELVPHLHNLNEIFQYVSTTTKVPPPDMTSFPYGTRRSPAKIWPTTKRPAITPANNPKHSKDPHKTGPEDTTVLIETKRDYSTELSVTIAVGASLLFLNILAFAALYYKKDKRRHETHRHPSPQRNTTNDITHIQNEEIMSLQMKQLEHDHECESLQAHDTLRLTCPPDYTLTLRRSPDDIPFMTPNTITMIPNTLMGMQPLHTFKTFSGGQNSTNLPHGHSTTRV

SEQ ID NO: 9389 - protein, 816 aa, Homo Sapiens; identical to SEQ ID NO: 9388

SEQ ID NO: 9390 - protein, 873 aa, Homo Sapiens
MLRPQGLLWLPLLFTSVCVMLNSNVLLWITALAIKFTLIDSQAQYPVVNTNYGKIQGLRTPLPSEILGPVEQYLGVPYASPPTGERRFQPPESPSSWTGIRNATQFSAVCPQHLDERFLLHDMLPIWFTTSLDTLMTYVQDQNEDCLYLNIYVPMEDGTNIKRNADDITSNDHGEDKDIHEQNSKKPVMVYIHGGSYMEGTGNMIDGSILASYGNVIVITINYRLGILAQNTLAHGNCKHRCQLHLQAPRDCKSAYPFRNEDEIRGFLSTGDQAAKGNYGLLDQIQALRWIEENVGAFGGDPKRVTIFGSGAGASCVSLLTLSHYSEGLFQKAIIQSGTALSSWAVNYQPAKYTRILADKVGCNMLDTTDMVECLKNKNYKELIQQTITPATYHIAFGPVIDGDVIPDDPQILMEQGEFLNYDIMLGVNQGEGLKFVDGIVDNEDGVTPNDFDFSVSNFVDNLYGYPEGKDTLRETIKFMYTDWADKENPETRRKTLVALFTDHQWVAPAVATADLHAQYGSPTYFYAFYHHCQSEMKPSWADSAHGDEVPYVFGIPMIGPTELFSCNFSKNDVMLSAVVMTYWTNFAKTGDPNQPVPQDTKFIHTKPNRFEEVAWSKYNPKDQLYLHIGLKPRVRDHYRATKVAFWLELVPHLHNLNEIFQYVSTTTKVPPPDMTSFPYGTRRSPAKIWPTTKRPAITPANNPKHSKDPHKTGPEDTTVLIETKRDYSTELSVTIAVGASLLFLNILAFAALYYKKDKRRHETHRHPSPQRNTTNDITHIQNEEIMSLQMKQLEHDHECESLQAHDTLRLTCPPDYTLTLRRSPDDIPFMTPNTITMIPNTLMGMQPLHTFKTFSGGQNSTNLPHGHSTTRV

SEQ ID NO: 9391 - protein, 836 aa, Homo Sapiens
MLRPQGLLWLPLLFTSVCVMLNSNVLLWITALAIKFTLIDSQAQYPVVNTNYGKIQGLRTPLPSEILGPVEQYLGVPYASPPTGERRFQPPESPSSWTGIRNATQFSAVCPQHLDERFLLHDMLPIWFTTSLDTLMTYVQDQNEDCLYLNIYVPMEDGTNIKRNADDITSNDHGEDKDIHEQNSKKPVMVYIHGGSYMEGTGNMIDGSILASYGNVIVITINYRLGILGFLSTGDQAAKGNYGLLDQIQALRWIEENVGAFGGDPKRVTIFGSGAGASCVSLLTLSHYSEGLFQKAIIQSGTALSSWAVNYQPAKYTRILADKVGCNMLDTTDMVECLKNKNYKELIQQTITPATYHIAFGPVIDGDVIPDDPQILMEQGEFLNYDIMLGVNQGEGLKFVDGIVDNEDGVTPNDFDFSVSNFVDNLYGYPEGKDTLRETIKFMYTDWADKENPETRRKTLVALFTDHQWVAPAVATADLHAQYGSPTYFYAFYHHCQSEMKPSWADSAHGDEVPYVFGIPMIGPTELFSCNFSKNDVMLSAVVMTYWTNFAKTGDPNQPVPQDTKFIHTKPNRFEEVAWSKYNPKDQLYLHIGLKPRVRDHYRATKVAFWLELVPHLHNLNEIFQYVSTTTKVPPPDMTSFPYGTRRSPAKIWPTTKRPAITPANNPKHSKDPHKTGPEDTTVLIETKRDYSTELSVTIAVGASLLFLNILAFAALYYKKDKRRHETHRHPSPQRNTTNDITHIQNEEIMSLQMKQLEHDHECESLQAHDTLRLTCPPDYTLTLRRSPDDIPFMTPNTITMIPNTLMGMQPLHTFKTFSGGQNSTNLPHGHSTTRV

SEQ ID NO: 9392 - protein, 648 aa, Homo Sapiens
MVYIHGGSYMEGTGNMIDGSILASYGNVIVITINYRLGILGFLSTGDQAAKGNYGLLDQIQALRWIEENVGAFGGDPKRVTIFGSGAGASCVSLLTLSHYSEGLFQKAIIQSGTALSSWAVNYQPAKYTRILADKVGCNMLDTTDMVECLKNKNYKELIQQTITPATYHIAFGPVIDGDVIPDDPQILMEQGEFLNYDIMLGVNQGEGLKFVDGIVDNEDGVTPNDFDFSVSNFVDNLYGYPEGKDTLRETIKFMYTDWADKENPETRRKTLVALFTDHQWVAPAVATADLHAQYGSPTYFYAFYHHCQSEMKPSWADSAHGDEVPYVFGIPMIGPTELFSCNFSKNDVMLSAVVMTYWTNFAKTGDPNQPVPQDTKFIHTKPNRFEEVAWSKYNPKDQLYLHIGLKPRVRDHYRATKVAFWLELVPHLHNLNEIFQYVSTTTKVPPPDMTSFPYGTRRSPAKIWPTTKRPAITPANNPKHSKDPHKTGPEDTTVLIETKRDYSTELSVTIAVGASLLFLNILAFAALYYKKDKRRHETHRHPSPQRNTTNDITHIQNEEIMSLQMKQLEHDHECESLQAHDTLRLTCPPDYTLTLRRSPDDIPFMTPNTITMIPNTLMGMQPLHTFKTFSGGQNSTNLPHGHSTTRV

SEQ ID NO: 9393 - protein, 236 aa, Homo Sapiens
  misc_feature (1)..(1): Xaa can be any naturally occurring amino acid
XNSNVLLWITALAIKFTLIDSQAQYPVVNTNYGKIQGLRTPLPSEILGPVEQYLGVPYASPPTGERRFQPPESPSSWTGIRNATQFSAVCPQHLDERFLLHDMLPIWFTTSLDTLMTYVQDQNEDCLYLNIYVPMEDGTNIKRNADDITSNDHGEDKDIHEQNSKKPVMVYIHGGSYMEGTGNMIDGSILASYGNVIVITINYRLGILGMQEARLCGSSKMFNYFKSPFTNLINFF

SEQ ID NO: 9394 - protein, 178 aa, Homo Sapiens
GPTCSILPKNPLFPQNLSSQPCIKMEGDKSLTFSSYGLQWCLYELDKEEFQTFKELLKKKSSESTTCSIPQFEIENANVECLALLLHEYYGASLAWATSISIFENMNLRTLSEKARDDMKRHSPEDPEATMTDQGPSKEKVPGISQAVQQDSATAAETKEQESFAVLLRLQCSGYPQA

SEQ ID NO: 9395 - protein, 1200 aa, Homo Sapiens
MKVAGGLELGAAALLSASPRALVTLSTGPTCSILPKNPLFPQNLSSQPCIKMEGDKSLTFSSYGLQWCLYELDKEEFQTFKELLKKKSSESTTCSIPQFEIENANVECLALLLHEYYGASLAWATSISIFENMNLRTLSEKARDDMKRHSPEDPEATMTDQGPSKEKVPDISDSNNKHKYVGIHSSFAEISQAMEQEGATAAETEEQEISQAMEQEGATAAETEEQGHGGDTWDYKSHVMTKFAEEEDVRRSFENTAADWPEMQTLAGAFDSDRWGFRPRTVVLHGKSGIGKSALARRIVLCWAQGGLYQGMFSYVFFLPVREMQRKKESSVTEFISREWPDSQAPVTEIMSRPERLLFIIDGFDDLGSVLNNDTKLCKDWAEKQPPFTLIRSLLRKVLLPESFLIVTVRDVGTEKLKSEVVSPRYLLVRGISGEQRIHLLLERGIGEHQKTQGLRAIMNNRELLDQCQVPAVGSLICVALQLQDVVGESVAPFNQTLTGLHAAFVFHQLTPRGVVRRCLNLEERVVLKRFCRMAVEGVWNRKSVFDGDDLMVQGLGESELRALFHMNILLPDSHCEEYYTFFHLSLQDFCAALYYVLEGLEIEPALCPLYVEKTKRSMELKQAGFHIHSLWMKRFLFGLVSEDVRRPLEVLLGCPVPLGVKQKLLHWVSLLGQQPNATTPGDTLDAFHCLFETQDKEFVRLALNSFQEVWLPINQNLDLIASSFCLQHCPYLRKIRVDVKGIFPRDESAEACPVVPLWMRDKTLIEEQWEDFCSMLGTHPHLRQLDLGSSILTERAMKTLCAKLRHPTCKIQTLMFRNAQITPGVQHLWRIVMANRNLRSLNLGGTHLKEEDVRMACEALKHPKCLLESLRLDCCGLTHACYLKISQILTTSPSLKSLSLAGNKVTDQGVMPLSDALRVSQCALQKLILEDCGITATGCQSLASALVSNRSLTHLCLSNNSLGNEGVNLLCRSMRLPHCSLQRLMLNQCHLDTAGCGFLALALMGNSWLTHLSLSMNPVEDNGVKLLCEVMREPSCHLQDLELVKCHLTAACCESLSCVISRSRHLKSLDLTDNALGDGGVAALCEGLKQKNSVLARLGLKACGLTSDCCEALSLALSCNRHLTSLNLVQNNFSPKGMMKLCSAFACPTSNLQIIGLWKWQYPVQIRKLLEEVQLLKPRVVIDGSWHSFDEDDRYWWKN

SEQ ID NO: 9396 - protein, 1200 aa, Homo Sapiens
MKVAGGLELGAAALLSASPRALVTLSTGPTCSILPKNPLFPQNLSSQPCIKMEGDKSLTFSSYGLQWCLYELDKEEFQTFKELLKKKSSESTTCSIPQFEIENANVECLALLLHEYYGASLAWATSISIFENMNLRTLSEKARDDMKRHSPEDPEATMTDQGPSKEKVPGISQAVQQDSATAAETKEQEISQAMEQEGATAAETEEQEISQAMEQEGATAAETEEQGHGGDTWDYKSHVMTKFAEEEDVRRSFENTAADWPEMQTLAGAFDSDRWGFRPRTVVLHGKSGIGKSALARRIVLCWAQGGLYQGMFSYVFFLPVREMQRKKESSVTEFISREWPDSQAPVTEIMSRPERLLFIIDGFDDLGSVLNNDTKLCKDWAEKQPPFTLIRSLLRKVLLPESFLIVTVRDVGTEKLKSEVVSPRYLLVRGISGEQRIHLLLERGIGEHQKTQGLRAIMNNRELLDQCQVPAVGSLICVALQLQDVVGESVAPFNQTLTGLHAAFVFHQLTPRGVVRRCLNLEERVVLKRFCRMAVEGVWNRKSVFDGDDLMVQGLGESELRALFHMNILLPDSHCEEYYTFFHLSLQDFCAALYYVLEGLEIEPALCPLYVEKTKRSMELKQAGFHIHSLWMKRFLFGLVSEDVRRPLEVLLGCPVPLGVKQKLLHWVSLLGQQPNATTPGDTLDAFHCLFETQDKEFVRLALNSFQEVWLPINQNLDLIASSFCLQHCPYLRKIRVDVKGIFPRDESAEACPVVPLWMRDKTLIEEQWEDFCSMLGTHPHLRQLDLGSSILTERAMKTLCAKLRHPTCKIQTLMFRNAQITPGVQHLWRIVMANRNLRSLNLGGTHLKEEDVRMACEALKHPKCLLESLRLDCCGLTHACYLKISQILTTSPSLKSLSLAGNKVTDQGVMPLSDALRVSQCALQKLILEDCGITATGCQSLASALVSNRSLTHLCLSNNSLGNEGVNLLCRSMRLPHCSLQRLMLNQCHLDTAGCGFLALALMGNSWLTHLSLSMNPVEDNGVKLLCEVMREPSCHLQDLELVKCHLTAACCESLSCVISRSRHLKSLDLTDNALGDGGVAALCEGLKQKNSVLARLGLKACGLTSDCCEALSLALSCNRHLTSLNLVQNNFSPKGMMKLCSAFACPTSNLQIIGLWKWQYPVQIRKLLEEVQLLKPRVVIDGSWHSFDEDDRYWWKN

SEQ ID NO: 9397 - protein, 154 aa, Homo Sapiens
MARRAGGARMFGSLLLFALLAAGVAPLSWDLPEPRSRASKIRVHSRGNLWATGHFMGKKSLEPSSPSPLGTAPHTSLRDQRLQLSHDLLGILLLKKALGVSLSRPAPQIQEAAGTNTAEMTPIMGQTQQRGLDCAHPGKVLNGTLLMAPSGCKS

SEQ ID NO: 9398 - protein, 121 aa, Homo Sapiens
MARRAGGARMFGSLLLFALLAAGVAPLSWDLPEPRSRASKIRVHSRGNLWATGHFMGKKSLEPSSPSPLGTAPHTSLRDQRLQLSHDLLGILLLKKALGVSLSRPAPQIQYRRLLVQILQK

SEQ ID NO: 9399 - protein, 82 aa, Homo Sapiens
MANCERTFIAIKPDGVQRGLVGEIIKRFEQKGFRLVGLKFMQASEDLLKEHYVDLKDRPFFAGLVKYMHSGPVVAMLPDFLL

SEQ ID NO: 9400 - protein, 82 aa, Homo Sapiens; identical to SEQ ID NO: 9399

SEQ ID NO: 9401 - protein, 152 aa, Homo Sapiens
MANCERTFIAIKPDGVQRGLVGEIIKRFEQKGFRLVGLKFMQASEDLLKEHYVDLKDRPFFAGLVKYMHSGPVVAMVWEGLNVVKTGRVMLGETNPADSKPGTIRGDFCIQVGRNIIHGSDSVESAEKEIGLWFHPEELVDYTSCAQNWIYE

SEQ ID NO: 9402 - protein, 60 aa, Homo Sapiens
MVLLSTLGIVFQGEGPPISSCDTGTMANCERTFIAIKPDGVQRGLVGEIIKRFEQKGFRL

SEQ ID NO: 9403 - protein, 139 aa, Homo Sapiens
MVLLSTLGIVFQGEGPPISSCDTGTMANCERTFIAIKPDGVQRGLVGEIIKRFEQKGFRLVGLKFMQASEDLLKEHYVDLKDRPFFAGLVKYMHSGPVVAMVWEGLNVVKTGRVMLGETNPADSKPGTIRGDFCIQVGR

SEQ ID NO: 9404 - protein, 177 aa, Homo Sapiens
MVLLSTLGIVFQGEGPPISSCDTGTMANCERTFIAIKPDGVQRGLVGEIIKRFEQKGFRLVGLKFMQASEDLLKEHYVDLKDRPFFAGLVKYMHSGPVVAMVWEGLNVVKTGRVMLGETNPADSKPGTIRGDFCIQVGRNIIHGSDSVESAEKEIGLWFHPEELVDYTSCAQNWIYE

SEQ ID NO: 9405 - protein, 177 aa, Homo Sapiens; identical to SEQ ID NO: 9404

SEQ ID NO: 9406 - protein, 197 aa, Homo Sapiens
MANCERTFIAIKPDGVQRGLVGEIIKRFEQKGFRLVGLKFMQASEDLLKEHYVDLKDRPFFAGLVKYMHSGPVVAMVWEGLNVVKTGRVMLGETNPADSKPGTIRGDFCIQVGRTMANLERTFIAIKPDGVQRGLVGEIIKRFEQKGFRLVAMKFLRASEEHLKQHYIDLKDRPFFPGLVKYMNSGPVVAMEHHSWQ

SEQ ID NO: 9407 - protein, 267 aa, Homo Sapiens
MANCERTFIAIKPDGVQRGLVGEIIKRFEQKGFRLVGLKFMQASEDLLKEHYVDLKDRPFFAGLVKYMHSGPVVAMVWEGLNVVKTGRVMLGETNPADSKPGTIRGDFCIQVGRTMANLERTFIAIKPDGVQRGLVGEIIKRFEQKGFRLVAMKFLRASEEHLKQHYIDLKDRPFFPGLVKYMNSGPVVAMVWEGLNVVKTGRVMLGETNPADSKPGTIRGDFCIQVGRNIIHGSDSVKSAEKEISLWFKPEELVDYKSCAHDWVYE

SEQ ID NO: 9408 - protein, 292 aa, Homo Sapiens
MVLLSTLGIVFQGEGPPISSCDTGTMANCERTFIAIKPDGVQRGLVGEIIKRFEQKGFRLVGLKFMQASEDLLKEHYVDLKDRPFFAGLVKYMHSGPVVAMVWEGLNVVKTGRVMLGETNPADSKPGTIRGDFCIQVGRTMANLERTFIAIKPDGVQRGLVGEIIKRFEQKGFRLVAMKFLRASEEHLKQHYIDLKDRPFFPGLVKYMNSGPVVAMVWEGLNVVKTGRVMLGETNPADSKPGTIRGDFCIQVGRNIIHGSDSVKSAEKEISLWFKPEELVDYKSCAHDWVYE

SEQ ID NO: 9409 - protein, 53 aa, Homo Sapiens
FANLFPAACTGAHERTFLAVKPDGVQRRLVGEIVRRFERKGFKLVALKLVQAA

SEQ ID NO: 9410 - protein, 57 aa, Homo Sapiens
IFANLFPAACTGAHERTFLAVKPDGVQRRLVGEIVRRFERKGFKRPDPSAGLRGAAA

SEQ ID NO: 9411 - protein, 85 aa, Homo Sapiens
MASGPVVAMVWQGLDVVRTSRALIGATNPADAPPGTIRGDFCIEVGKNLIHGSDSVESARREIALWFRADELLCWEDSAGHWLYE

SEQ ID NO: 9412 - protein, 169 aa, Homo Sapiens
MICLVLTIFANLFPAACTGAHERTFLAVKPDGVQRRLVGEIVRRFERKGFKLVALKLVQASEELLREHYAELRERPFYGRLVKYMASGPVVAMVWQGLDVVRTSRALIGATNPADAPPGTIRGDFCIEVGKNLIHGSDSVESARREIALWFRADELLCWEDSAGHWLYE

SEQ ID NO: 9413 - protein, 123 aa, Homo Sapiens
PAACTGAHERTFLAVKPDGVQRRLVGEIVRRFERKGFKLVALKLVQVGARPPRSCCVSTTPSCVNARSTAALSSIWPPGRWWPWYGRGWTWCAPRGRSSEPRTRPTPRPAPSAGISASRLART

SEQ ID NO: 9414 - protein, 153 aa, Homo Sapiens
MKHLRPQFPLILAIYCFCMLQIPSSGFPQPLADPSDGLDIVQLEQLAYCLSQWAPLSRQPKDNQDIYKRFLFHYSRTQEATHPVKTGFPPVHPLMHLAAKLANRRMKRILQRGSGTAAVDFTKKDHTATWGRPFFLFRPRNGRNIEDEAQIQW

SEQ ID NO: 9415 - protein, 158 aa, Homo Sapiens
MLRTESCRPRSPAGQVAAASPLLLLLLLLAWCAGACRGAPILPQGLQPEQQLQLWNEASNALEELCFMIMGMLPKPQEQDEKDNTKRFLFHYSKTQKLGKSNVVSSVVHPLLQLVPHLHERRMKRFRVDEEFQSPFASQSRGYFLFRPRNGRRSAGFI

SEQ ID NO: 9416 - protein, 149 aa, Homo Sapiens
MLRTESCRPRSPAGQVAAASPLLLLLLLLAWCAGACRGAPILPQGLQPEQQLQLWNEIDDTCSSFLSIDSQPQASNALEELCFMIMGMLPKPQEQDEKDNTKRFLFHYSKTQKLGKSNVVEEFQSPFASQSRGYFLFRPRNGRRSAGFI

SEQ ID NO: 9417 - protein, 174 aa, Homo Sapiens
MLRTESCRPRSPAGQVAAASPLLLLLLLLAWCAGACRGAPILPQGLQPEQQLQLWNEIDDTCSSFLSIDSQPQASNALEELCFMIMGMLPKPQEQDEKDNTKRFLFHYSKTQKLGKSNVVSSVVHPLLQLVPHLHERRMKRFRVDEEFQSPFASQSRGYFLFRPRNGRRSAGFI

SEQ ID NO: 9418 - protein, 147 aa, Homo Sapiens
MLRTESCRPRSPAGQVAAASPLLLLLLLLAWCAGACRGAPILPQGLQPEQQLQLWNEIDDTCSSFLSIDSQPQASNALEELCFMIMGMLPKPQSSVVHPLLQLVPHLHERRMKRFRVDEEFQSPFASQSRGYFLFRPRNGRRSAGFI

SEQ ID NO: 9419 - protein, 698 aa, Homo Sapiens
MLPARLPFRLLSLFLRGSAPTAARHGLREPLLERRCAAASSFQHSSSLGRELPYDPVDTEGFGEGGDMQERFLFPEYILDPEPQPTREKQLQELQQQQEEEERQRQQRREERRQQNLRARSREHPVVGHPDPALPPSGVNCSGCGAELHCQDAGVPGYLPREKFLRTAEADGGLARTVCQRCWLLSHHRRALRLQVSREQYLELVSAALRRPGPSLVLYMVDLLDLPDALLPDLPALVGPKQLIVLGNKVDLLPQDAPGYRQRLRERLWEDCARAGLLLAPGHQGPQRPVKDEPQDGENPNPPNWSRTVVRDVRLISAKTGYGVEELISALQRSWRYRGDVYLVGATNAGKSTLFNTLLESDYCTAKGSEAIDRATISPWPGTTLNLLKFPICNPTPYRMFKRHQRLKKDSTQAEEDLSEQEQNQLNVLKKHGYVVGRVGRTFLYSEEQKDNIPFEFDADSLAFDMENDPVMGTHKSTKQVELTAQDVKDAHWFYDTPGITKENCILNLLTEKEVNIVLPTQSIVPRTFVLKPGMVLFLGAIGRIDFLQGNQSAWFTVVASNILPVHITSLDRADALYQKHAGHTLLQIPMGGKERMAGFPPLVAEDIMLKEGLGASEAVADIKFSSAGWVSVTPNFKDRLHLRGYTPEGTVLTVRPPLLPYIVNIKGQRIKKSVAYKTKKPPSLMYNVRKKKGKINV

SEQ ID NO: 9420 - protein, 292 aa, Homo Sapiens
DQQLGIQTKDVAVDGQNWTFAFDFSFLSQQEDLAWAELRLQLSSPVDLPTEGSLAIEIFHQPKPDTEQASDSCLERFQMDLFTVTLSQVTFSLGSMVLEVTRPLSKWLKHPGALEKQMSRVAGECWPRPPTPPATNVLLMLYSNLSQEQRQLGGSTLLWEAESSWRAQEGQLSWEWGKRHRRHHLPDRSQLCRKVKFQVDFNLIGWGSWIIYPKQYNAYRCEGECPNPVGEEFHPTNHAYIQSLLKRYQPHRVPSTCCAPVKTKPLSMLYVDNGRVLLDHHKDMIVEECGCL

SEQ ID NO: 9421 - protein, 347 aa, Homo Sapiens
MHAHCLPFLLHAWWALLQAGAATVATALLRTRGQPSSPSPLAYMLSLYRDPLPRADIIRSLQAEDVAVDGQNWTFAFDFSFLSQQEDLAWAELRLQLSSPVDLPTEGSLAIEIFHQPKPDTEQASDSCLERFQMDLFTVTLSQVTFSLGSMVLEVTRPLSKWLKHPGALEKQMSRVAGECWPRPPTPPATNVLLMLYSNLSQEQRQLGGSTLLWEAESSWRAQEGQLSWEWGKRHRRHHLPDRSQLCRKVKFQVDFNLIGWGSWIIYPKQYNAYRCEGECPNPVGEEFHPTNHAYIQSLLKRYQPHRVPSTCCAPVKTKPLSMLYVDNGRVLLDHHKDMIVEECGCL

SEQ ID NO: 9422 - protein, 232 aa, Homo Sapiens
MERCPSLGVTLYALVVVLGLRATPAGGQHYLHIRPAPSDNLPLVDLIEHPDPIFDPKEKDLNETLLRSLLGGHYDPGFMATSPPEDRPGGGGGAAGGAEDLAELDQLLRQRPSGAMPSEIKGLEFSEGLAQGKKQRLSKKLRRKLQMWLWSQTFCPVLYAWNDLGSRFWPRYVKVGSCFSKRSCSVPEGMVCKPSKSVHLTVLRWRCQRRGGQRCGWIPIQYPIISECKCSC

SEQ ID NO: 9423 - protein, 138 aa, Homo Sapiens
MLVGQGAGPLGPAVVTAAVVLLLSGVGPAHGSEDIVVGCGGFVKSDVEINYSLIEIKLYTKHGTLKYQTDCAPNNGYFMIPLYDKGDFILKIEPPLGWSFEPTTVELHVDGVSDICTKGGDINFVFTGFSVNGKVCIF

SEQ ID NO: 9424 - protein, 1267 aa, Homo Sapiens
MLVGQGAGPLGPAVVTAAVVLLLSGVGPAHGSEDIVVGCGGFVKSDVEINYSLIEIKLYTKHGTLKYQTDCAPNNGYFMIPLYDKGDFILKIEPPLGWSFEPTTVELHVDGVSDICTKGGDINFVFTGFSVNGKVLSKGQPLGPAGVQVSLRNTGTEAKIQSTVTQPGGKFAFFKVLPGDYEILATHPTWALKEASTTVRVTNSNANAASPLIVAGYNVSGSVRSDGEPMKGVKFLLFSSLVTKEDVLGCNVSPVPGFQPQDESLVYLCYTVSREDGSFSFYSLPSGGYTVIPFYRGERITFDVAPSRLDFTVEHDSLKIEPVFHVMGFSVTGRVLNGPEGDGVPEAVVTLNNQIKVKTKADGSFRLENITTGTYTIHAQKEHLYFETVTIKIAPNTPQLADIVATGFSVCGQISIIRFPDTVKQMNKYKVVLSSQDKDKSLVTVETDAHGSFCFKANPGTYKVQVMVPEAETRAGLTLKPQTFPLTVTDRPVMDVAFVQFLASVSGKVSCLDTCGDLLVTLQSLSRQGEKRSLQLSGKVNAMTFTFDNVLPGKYKISIMHEDWCWKNKSLEVEVLEDDVSAVEFRQTGYMLRCSLSHAITLEFYQDGNGRENVGIYNLSKGVNRFCLSKPGVYKVTPRSCHRFEQAFYTYDTSSPSILTLTAIRHHVLGTITTDKMMDVTVTIKSSIDSEPALVLGPLKSVQELRREQQLAEIEARRQEREKNGNEEGEERMTKPPVQEMVDELQGPFSYDFSYWARSGEKITVTPSSKELLFYPPSMEAVVSGESCPGKLIEIHGKAGLFLEGQIHPELEGVEIVISEKGASSPLITVFTDDKGAYSVGPLHSDLEYTVTSQKEGYVLTAVEGTIGDFKAYALAGVSFEIKAEDDQPLPGVLLSLSGGLFRSNLLTQDNGILTFSNLSPGQYYFKPMMKEFRFEPSSQMIEVQEGQNLKITITGYRTAYSCYGTVSSLNGEPEQGVAMEAVGQNDCSIYGEDTVTDEEGKFRLRGLLPGCVYHVQLKAEGNDHIERALPHHRVIEVGNNDIDDVNIIVFRQINQFDLSGNVITSSEYLPTLWVKLYKSENLDNPIQTVSLGQSLFFHFPPLLRDGENYVVLLDSTLPRSQYDYILPQVSFTAVGYHKHITLIFNPTRKLPEQDIAQGSYIALPLTLLVLLAGYNHDKLIPLLLQLTSRLQGVGALGQAASDNSGPEDAKRQAKKQKTRRTLRLQEEFQLMWCLVPWRGTLGIHLFSSLPFASEILLETTATCIHY

SEQ ID NO: 9425 - protein, 1222 aa, Homo Sapiens
MLVGQGAGPLGPAVVTAAVVLLLSGVGPAHGSEDIVVGCGGFVKSDVEINYSLIEIKLYTKHGTLKYQTDCAPNNGYFMIPLYDKGDFILKIEPPLGWSFEPTTVELHVDGVSDICTKGGDINFVFTGFSVNGKVLSKGQPLGPAGVQVSLRNTGTEAKIQSTVTQPGGKFAFFKVLPGDYEILATHPTWALKEASTTVRVTNSNANAASPLIVAGYNVSGSVRSDGEPMKGVKFLLFSSLVTKEDVLGCNVSPVPGFQPQDESLVYLCYTVSREDGSFSFYSLPSGGYTVIPFYRGERITFDVAPSRLDFTVEHDSLKIEPVFHVMGFSVTGRVLNGPEGDGVPEAVVTLNNQIKVKTKADGSFRLENITTGTYTIHAQKEHLYFETVTIKIAPNTPQLADIVATGFSVCGQISIIRFPDTVKQMNKYKVVLSSQDKDKSLVTVETDAHGSFCFKANPGTYKVQVMVPEAETRAGLTLKPQTFPLTVTDRPVMDVAFVQFLASVSGKVSCLDTCGDLLVTLQSLSRQGEKRSLQLSGKVNAMTFTFDNVLPGKYKISIMHEDWCWKNKSLEVEVLEDDVSAVEFRQTGYMLRCSLSHAITLEFYQDGNGRENVGIYNLSKGVNRFCLSKPGVYKVTPRSCHRFEQAFYTYDTSSPSILTLTAIRHHVLGTITTDKMMDVTVTIKSSIDSEPALVLGPLKSVQELRREQQLAEIEARRQEREKNGNEEGEERMTKPPVQEMVDELQGPFSYDFSYWARSGEKITVTPSSKELLFYPPSMEAVVSGESCPGKLIEIHGKAGLFLEGQIHPELEGVEIVISEKGASSPLITVFTDDKGAYSVGPLHSDLEYTVTSQKEGYVLTAVEGTIGDFKAYALAGVSFEIKAEDDQPLPGVLLSLSGGLFRSNLLTQDNGILTFSNLSPGQYYFKPMMKEFRFEPSSQMIEVQEGQNLKITITGYRTAYSCYGTVSSLNGEPEQGVAMEAVGQNDCSIYGEDTVTDEEGKFRLRGLLPGCVYHVQLKAEGNDHIERALPHHRVIEVGNNDIDDVNIIVFRQINQFDLSGNVITSSEYLPTLWVKLYKSENLDNPIQTVSLGQSLFFHFPPLLRDGENYVVLLDSTLPRSQYDYILPQVSFTAVGYHKHITLIFNPTRKLPEQDIAQGSYIALPLTLLVLLAGYNHDKLIPLLLQLTSRLQGVGALGQAASDNSGPEDAKRQAKKQKTRRT

SEQ ID NO: 9426 - protein, 61 aa, Homo Sapiens
MLVGQGAGPLGPAVVTAAVVLLLSGVGPAHGSEDIVVGCGGFVKSDVEINYSLIEQVLNMH

SEQ ID NO: 9427 - protein, 95 aa, Homo Sapiens
  misc_feature (1)..(1): Xaa can be any naturally occurring amino acid
XEDWCWKNKSLEVEVLEDDVSAVEFRQTGYMLRCSLSHAITLVQPYCSGEMCPGTSELKTPRNFIRMEMGVRMWGFITSPKESTDSACPSLVCTK

SEQ ID NO: 9428 - protein, 50 aa, Homo Sapiens
  misc_feature (1)..(1): Xaa can be any naturally occurring amino acid
XSYIALPLTLLVLLAGYNHDKGHIRPGERPAHPWGLISKRPASFELKPTH

SEQ ID NO: 9429 - protein, 80 aa, Homo Sapiens
  misc_feature (1)..(1): Xaa can be any naturally occurring amino acid
XTGYMLRCSLSHAITLVCTAYGVSYLEKRLPCGCQERLTSQEYCKRRNFIRMEMGVRMWGFITSPKESTDSACPSLVCTK

SEQ ID NO: 9430 - protein, 81 aa, Homo Sapiens
MLQHISLLVKQVQELELKLSGQNAMGSQDSLLEITFRSGALPVLCDPTTPKPEDLHSPPLGAGLADFAHPAGSPLGRRDCL

SEQ ID NO: 9431 - protein, 349 aa, Homo Sapiens
MPSKTKYNLVDDGHDLRIPLHNEDAFQHGICFEAKYVGSLDVPRPNSRVEIVAAMRRIRYEFKAKNIKKKKVSIMVSVDGVKVILKKKKKKKEWTWDESKMLVMQDPIYRIFYVSHDSQDLKIFSYIARDGASNIFRCNVFKSKKKSQAMRIVRTVGQAFEVCHKLSLQHTQQNADGQEDGESERNSNSSGDPGRQLTGAERASTATAEETDIDAVEVPLPGNDVLEFSRGVTDLDAVGKEGGSHTGSKVSHPQEPMLTASPRMLLPSSSSKPPGLGTETPLSTHHQMQLLQQLLQQQQQQTQVAVAQCVVGQIALVLSTAISMCLLLPNFSLALPSLLMEELESRYTC

SEQ ID NO: 9432 - protein, 501 aa, Homo Sapiens
MPSKTKYNLVDDGHDLRIPLHNEDAFQHGICFEAKYVGSLDVPRPNSRVEIVAAMRRIRYEFKAKNIKKKKVSIMVSVDGVKVILKKKKKKKEWTWDESKMLVMQDPIYRIFYVSHDSQDLKIFSYIARDGASNIFRCNVFKSKKKSQAMRIVRTVGQAFEVCHKLSLQHTQQNADGQEDGESERNSNSSGDPGRQLTGAERASTATAEETDIDAVEVPLPGNDVLEFSRGVTDLDAVGKEGGSHTGSKVSHPQEPMLTASPRMLLPSSSSKPPGLGTETPLSTHHQMQLLQQLLQQQQQQTQVAVAQVHLLKDQLAAEAAARLEAQARVHQLLLQNKDMLQHISLLVKQVQELELKLSGQNAMGSQDSLLEITFRSGALPVLCDPTTPKPEDLHSPPLGAGLADFAHPAGSPLGRRDCLVKLECFRFLPPEDTPPPAQGEALLGGLELIKFRESGIASEYESNTDESEERDSWSQEELPRLLNVLQRQELGDGLDDEIAV

SEQ ID NO: 9433 - protein, 506 aa, Homo Sapiens
MPSKTKYNLVDDGHDLRIPLHNEDAFQHGICFEAKYVGSLDVPRPNSRVEIVAAMRRIRYEFKAKNIKKKKVSIMVSVDGVKVILKKKKKLLLLQKKEWTWDESKMLVMQDPIYRIFYVSHDSQDLKIFSYIARDGASNIFRCNVFKSKKKSQAMRIVRTVGQAFEVCHKLSLQHTQQNADGQEDGESERNSNSSGDPGRQLTGAERASTATAEETDIDAVEVPLPGNDVLEFSRGVTDLDAVGKEGGSHTGSKVSHPQEPMLTASPRMLLPSSSSKPPGLGTETPLSTHHQMQLLQQLLQQQQQQTQVAVAQVHLLKDQLAAEAAARLEAQARVHQLLLQNKDMLQHISLLVKQVQELELKLSGQNAMGSQDSLLEITFRSGALPVLCDPTTPKPEDLHSPPLGAGLADFAHPAGSPLGRRDCLVKLECFRFLPPEDTPPPAQGEALLGGLELIKFRESGIASEYESNTDESEERDSWSQEELPRLLNVLQRQELGDGLDDEIAV

SEQ ID NO: 9434 - protein, 211 aa, Homo Sapiens
MSLSSLCPVFSAAASSLQVHLLKDQLAAEAAARLEAQARVHQLLLQNKDMLQHISLLVKQVQELELKLSGQNAMGSQDSLLEITFRSGALPVLCDPTTPKPEDLHSPPLGAGLADFAHPAGSPLGRRDCLVKLECFRFLPPEDTPPPAQGEALLGGLELIKFRESGIASEYESNTDESEERDSWSQEELPRLLNVLQRQELGDGLDDEIAV

SEQ ID NO: 9435 - protein, 1286 aa, Homo Sapiens
GPGARGRRRRRRPMSPPPPPPPVRALPLLLLLAGPGAAAPPCLDGSPCANGGRCTQLPSREAACLCPPGWVGERCQLEDPCHSGPCAGRGVCQSSVVAGTARFSCRCPRGFRGPDCSLPDPCLSSPCAHGARCSVGPDGRFLCSCPPGYQGRSCRSDVDECRVGEPCRHGGTCLNTPGSFRCQCPAGYTGPLCENPAVPCAPSPCRNGGTCRQSGDLTYDCACLPGFEGQNCEVNVDDCPGHRCLNGGTCVDGVNTYNCQCPPEWTGQFCTEDVDECQLQPNACHNGGTCFNTLGGHSCVCVNGWTGESCSQNIDDCATAVCFHGATCHDRVASFYCACPMGKTGLLCHLDDACVSNPCHEDAICDTNPVNGRAICTCPPGFTGGACDQDVDECSIGANPCEHLGRCVNTQGSFLCQCGRGYTGPRCETDVNECLSGPCRNQATCLDRIGQFTCICMAGFTGTYCEVDIDECQSSPCVNGGVCKDRVNGFSCTCPSGFSGSTCQLDVDECASTPCRNGAKCVDQPDGYECRCAEGFEGTLCDRNVDDCSPDPCHHGRCVDGIASFSCACAPGYTGTRCESQVDECRSQPCRHGGKCLDLVDKYLCRCPSGTTGVNCEVNIDDCASNPCTFGVCRDGINRYDCVCQPGFTGPLCNVEINECASSPCGEGGSCVDGENGFRCLCPPGSLPPLCLPPSHPCAHEPCSHGICYDAPGGFRCVCEPGWSGPRCSQSLARDACESQPCRAGGTCSSDGMGFHCTCPPGVQGRQCELLSPCTPNPCEHGGRCESAPGQLPVCSCPQGWQDPCLNGGSCQDGVGSFSCSCLPGFAGPRCARDVDECLSNPCGPGTCTDHVASFTCTCPPGYGGFHCEQDLPDCSPSSCFNGGTCVDGVNSFSCLCRPGYTGAHCQHEADPCLSRPCLHGGVCSAAHPGFRCTCLESFTGPQCQTLVDWCSRQPCQNGGRCVQTGAYCLCPPGWSGRLCDIRSLPCREAAAQIGVRLEQLCQAGGQCVDEDSSHYCVCPEGRTGSHCEQEVDPCLAQPCQHGGTCRGYMGGYMCECLPGYNGDNCEDDVDECASQPCQHGGSCIDLVARYLCSCPPGTLGVLCEINEDDCGPGPPLDSGPRCLHNGTCVDLVGGFRCTCPPGYTGLRCEADINECRSGACHAAHTRDCLQDPGGGFRCLCHAGFSGPRCQTVLSPCESQPCQHGGQCRPSPGPGGGLTFTCHCAQPFWGPRCERVARSCRELQCPVGVPCQQTPRGPRCACPPGLSGPSCRSFPGSPPGASNASC

SEQ ID NO: 9436 - protein, 2321 aa, Homo Sapiens
MGPGARGRRRRRRPMSPPPPPPPVRALPLLLLLAGPGAAAPPCLDGSPCANGGRCTQLPSREAACLCPPGWVGERCQLEDPCHSGPCAGRGVCQSSVVAGTARFSCRCPRGFRGPDCSLPDPCLSSPCAHGARCSVGPDGRFLCSCPPGYQGRSCRSDVDECRVGEPCRHGGTCLNTPGSFRCQCPAGYTGPLCENPAVPCAPSPCRNGGTCRQSGDLTYDCACLPGFEGQNCEVNVDDCPGHRCLNGGTCVDGVNTYNCQCPPEWTGQFCTEDVDECQLQPNACHNGGTCFNTLGGHSCVCVNGWTGESCSQNIDDCATAVCFHGATCHDRVASFYCACPMGKTGLLCHLDDACVSNPCHEDAICDTNPVNGRAICTCPPGFTGGACDQDVDECSIGANPCEHLGRCVNTQGSFLCQCGRGYTGPRCETDVNECLSGPCRNQATCLDRIGQFTCICMAGFTGTYCEVDIDECQSSPCVNGGVCKDRVNGFSCTCPSGFSGSTCQLDVDECASTPCRNGAKCVDQPDGYECRCAEGFEGTLCDRNVDDCSPDPCHHGRCVDGIASFSCACAPGYTGTRCESQVDECRSQPCRHGGKCLDLVDKYLCRCPSGTTGVNCEVNIDDCASNPCTFGVCRDGINRYDCVCQPGFTGPLCNVEINECASSPCGEGGSCVDGENGFRCLCPPGSLPPLCLPPSHPCAHEPCSHGICYDAPGGFRCVCEPGWSGPRCSQSLARDACESQPCRAGGTCSSDGMGFHCTCPPGVQGRQCELLSPCTPNPCEHGGRCESAPGQLPVCSCPQGWQGPRCQQDVDECAGPAPCGPHGICTNLAGSFSCTCHGGYTGPSCDQDINDCDPNPCLNGGSCQDGVGSFSCSCLPGFAGPRCARDVDECLSNPCGPGTCTDHVASFTCTCPPGYGGFHCEQDLPDCSPSSCFNGGTCVDGVNSFSCLCRPGYTGAHCQHEADPCLSRPCLHGGVCSAAHPGFRCTCLESFTGPQCQTLVDWCSRQPCQNGGRCVQTGAYCLCPPGWSGRLCDIRSLPCREAAAQIGVRLEQLCQAGGQCVDEDSSHYCVCPEGRTGSHCEQEVDPCLAQPCQHGGTCRGYMGGYMCECLPGYNGDNCEDDVDECASQPCQHGGSCIDLVARYLCSCPPGTLGVLCEINEDDCGPGPPLDSGPRCLHNGTCVDLVGGFRCTCPPGYTGLRCEADINECRSGACHAAHTRDCLQDPGGGFRCLCHAGFSGPRCQTVLSPCESQPCQHGGQCRPSPGPGGGLTFTCHCAQPFWGPRCERVARSCRELQCPVGVPCQQTPRGPRCACPPGLSGPSCRSFPGSPPGASNASCAAAPCLHGGSCRPAPLAPFFRCACAQGWTGPRCEAPAAAPEVSEEPRCPRAACQAKRGDQRCDRECNSPGCGWDGGDCSLSVGDPWRQCEALQCWRLFNNSRCDPACSSPACLYDNFDCHAGGRERTCNPVYEKYCADHFADGRCDQGCNTEECGWDGLDCASEVPALLARGVLVLTVLLPPEELLRSSADFLQRLSAILRTSLRFRLDAHGQAMVFPYHRPSPGSEPRARRELAPEVIGSVVMLEIDNRLCLQSPENDHCFPDAQSAADYLGALSAVERLDFPYPLRDVRGEPLEPPEPSVPLLPLLVAGAVLLLVILVLGVMVARRKREHSTLWFPEGFSLHKDVASGHKGRREPVGQDALGMKNMAKGESLMGEVATDWMDTECPEAKRLKVEEPGMGAEEAVDCRQWTQHHLVAADIRVAPAMALTPPQGDADADGMDVNVRGPDGFTPLMLASFCGGALEPMPTEEDEADDTSASIISDLICQGAQLGARTDRTGETALHLAARYARADAAKRLLDAGADTNAQDHSGRTPLHTAVTADAQGVFQILIRNRSTDLDARMADGSTALILAARLAVEGMVEELIASHADVNAVDELGKSALHWAAAVNNVEATLALLKNGANKDMQDSKEETPLFLAAREGSYEAAKLLLDHFANREITDHLDRLPRDVAQERLHQDIVRLLDQPSGPRSPPGPHGLGPLLCPPGAFLPGLKAAQSGSKKSRRPPGKAGLGPQGPRGRGKKLTLACPGPLADSSVTLSPVDSLDSPRPFGGPPASPGGFPLEGPYAAATATAVSLAQLGGPGRAGLGRQPPGGCVLSLGLLNPVAVPLDWARLPPPAPPGPSFLLPLAPGPQLLNPGTPVSPQERPPPYLAVPGHGEEYPAAGAHSSPPKARFLRVPSEHPYLTPSPESPEHWASPSPPSLSDWSESTPSPATATGAMATTTGALPAQPLPLSVPSSLAQAQTQLGPQPEVTPKRQVLA

SEQ ID NO: 9437 - protein, 117 aa, Homo Sapiens
  misc_feature (1)..(1): Xaa can be any naturally occurring amino acid
XLMGEVATDWMDTECPEAKRLKVEEPGMGAEEAVDCRQWTQHHLVAADIRVAPAMALTPPQGDADADGMDVNVRGPDSHPKPLYRLGCPHGRWLNGTDPGGPPGSRGHGGRAHRQPC

SEQ ID NO: 9438 - protein, 177 aa, Homo Sapiens
  misc_feature (1)..(1): Xaa can be any naturally occurring amino acid
XQLGARTDRTGETALHLAARYARADAAKRLLDAGADTNAQDHSGRTPLHTAVTADAQGVFQILIRNRSTDLDARMADGSTALILAARLAVEGMVEELIASHADVNAVDELGKSALHWAAAVNNVEATLALLKNGANKDMQDSKVSPSPWSTGCQQWHSAIAIQPGQQSETLSKNKTK

SEQ ID NO: 9439 - protein, 295 aa, Homo Sapiens
MGRGVRVLLLLSLLHCAGGSEGRKTWRRRGQQPPPPPRTEAAPAAGQPVESFPLDFTAVEGNMDSFMAQVKSLAQSLYPCSAQQLNEDLRLHLLLNTSVTCNDGSPAGYYLKESRGSRRWLLFLEGGWYCFNRENCDSRYDTMRRLMSSRDWPRTRTGTGILSSQPEENPYWWNANMVFIPYCSSDVWSGASSKSEKNEYAFMGALIIQEVVRELLGRGLSGAKVLLLAGSSAGGTGVLLNVDRVAEQLEKLGYPAIQVRGLADSGWFLDNKQYRHTDCVDTITCAPTEAIRRGI

SEQ ID NO: 9440 - protein, 496 aa, Homo Sapiens
MGRGVRVLLLLSLLHCAGGSEGRKTWRRRGQQPPPPPRTEAAPAAGQPVESFPLDFTAVEGNMDSFMAQVKSLAQSLYPCSAQQLNEDLRLHLLLNTSVTCNDGSPAGYYLKESRGSRRWLLFLEGGWYCFNRENCDSRYDTMRRLMSSRDWPRTRTGTGILSSQPEENPYWWNANMVFIPYCSSDVWSGASSKSEKNEYAFMGALIIQEVVRELLGRGLSGAKVLLLAGSSAGGTGVLLNVDRVAEQLEKLGYPAIQVRGLADSGWFLDNKQYRHTDCVDTITCAPTEAIRRGIRYWNGVVPERCRRQFQEGEEWNCFFGYKVYPTLRCPVFVVQWLFDEAQLTVDNVHLTGQPVQEGLRLYIQNLGRELRHTLKDVPASFAPACLSHEIIIRSHWTDVQVKGTSLPRALHCWDRSLHDSHKASKTPLKGCPVHLVDSCPWPHCNPSCPTVRDQFTGQEMNVAQFLMHMGFDMQTVAQPQGLEPSELLGMLSNGS

SEQ ID NO: 9441 - protein, 197 aa, Homo Sapiens
MRRLMSSRDWPRTRTGTGILSSQPEENPYWWNANMVFIPYCSSDVWSGASSKSEKNEYAFMGALIIQEVVRELLGRGLSGAKVLLLAGSSAGGTGVLLNVDRVAEQLEKLGYPAIQVRGLADSGWFLDNKQYRHTDCVDTITCAPTEAIRRGIRYWNGVVPERCRRQFQEGEEWNCFFGYKVYPTLRCPVFVVQWLF

SEQ ID NO: 9442 - protein, 357 aa, Homo Sapiens
MQSVQSTSFCLRKQCLCLTFLLLHLLGQVAATQRCPPQCPGRCPATPPTCAPGVRAVLDGCSCCLVCARQRGESCSDLEPCDESSGLYCDRSADPSNQTGICTAVEGDNCVFDGVIYRSGEKFQPSCKFQCTCRDGQIGCVPRCQLDVLLPEPNCPAPRKVEVPGECCEKWICGPDEEDSLGGLTLAAYRPEATLGVEVSDSSVNCIEQTTEWTACSKSCGMGFSTRVTNRNRQCEMLKQTRLCMVRPCEQEPEQPTDKKGKKCLRTKKSLKAIHLQFKNCTSLHTYKPRFCGVCSDGRCCTPHNTKTIQAEFQCSPGQIVKKPVMVIGTCTCHTNCPKNNEAFLQELELKTTRGKM

SEQ ID NO: 9443 - protein, 125 aa, Homo Sapiens
MARSATLAAAALALCLLLAPPGLAWYKPAAGHSSYSVGRAAGLLSGLRRSPYARRSQPYRGAEPPGGAGASPELQLHPRLRSLAVCVQDVAPNLQRCERLPDGRGTYQCKANVFLSLRAADCLAA

SEQ ID NO: 9444 - protein, 156 aa, Homo Sapiens
MARSATLAAAALALCLLLAPPGLAWYKPAAGHSSYSVGRAAGLLSGLRRSPYARRSQPYRGAEPPGGAGASPELQLHPRLRSLVSPACRGLMGGGGRTWVGVRRPLSLCLPAPQAVCVQDVAPNLQRCERLPDGRGTYQCKANVFLSLRAADCLAA

SEQ ID NO: 9445 - protein, 53 aa, Homo Sapiens
GAQHRCPGRTGAVQGLRFCGWSYKGSECEPMPHPTLPAEQRTVLQRQCHLHQQ

SEQ ID NO: 9446 - protein, 201 aa, Homo Sapiens
MRFLAATFLLLALSTAAQAEPVQFKDCGSVDGVIKEVNVSPCPTQPCQLSKGQSYSVNVTFTSNIQSKSSKAVVHGILMGVPVPFPIPEPDGCKSGINCPIQKDKTYSYLNKLPVKSEYPSIKLVVEWQLQDDKNQSLFCWEIPVQIMFPCLFSAHCPMLATEHRCLQLQMETKSLRFWSRRGMSVWLPSPAGAWRRTAPF

SEQ ID NO: 9447 - protein, 151 aa, Homo Sapiens
MRFLAATFLLLALSTAAQAEPVQFKDCGSVDGVIKEVNVSPCPTQPCQLSKGQSYSVNVTFTSNIQSKSSKAVVHGILMGVPVPFPIPEPDGCKSGINCPIQKDKTYSYLNKLPVKSEYPSIKLVVEWQLQDDKNQSLFCWEIPVQIVSHL

SEQ ID NO: 9448 - protein, 174 aa, Homo Sapiens
MRFLAATFLLLALSTAAQAEPVQFKDCGSVDGVIKEVNVSPCPTQPCQLSKGQSYSVNVTFTSNIQSKSSKAVVHGILMGVPVPFPIPEPDGCKSGINCPIQKDKTYSYLNKLPVKSEYPSIKLVVEWQLQDDKNQSLFCWEIPVQIVSLSGGERAWVEGRKWRRNQTETKSVP

SEQ ID NO: 9449 - protein, 221 aa, Homo Sapiens
MRFLAATFLLLALSTAAQAEPVQFKDCGSVDGVIKEVNVSPCPTQPCQLSKGQSYSVNVTFTSNIQSKSSKAVVHGILMGVPVPFPIPEPDGCKSGINCPIQKDKTYSYLNKLPVKSEYPSIKLVVEWQLQDDKNQSLFCWEIPVQIVSLSGGFSSLSASLSSVHLANESAETLDSTSSSAASTTVTCSPMVSSDSLKRRCSVAETELRVAGSQWLSHVSF

SEQ ID NO: 9450 - protein, 148 aa, Homo Sapiens
MRFLAATFLLLALSTAAQAEPVQFKDCGSVDGVIKEVNVSPCPTQPCQLSKGQSYSVNVTFTSNIQSKSSKAVVHGILMGVPVPFPIPEPDGCKSGINCPIQKDKTYSYLNKLPVKSEYPSIKLVVEWQLQDDKNQSLFCWEIPVSHL

SEQ ID NO: 9451 - protein, 122 aa, Homo Sapiens
MRFLAATFLLLALSTAAQAEPVQFKDCGSVDGVIKEVNVSPCPTQPCQLSKGQSYSVNVTFTSNIQSKSSKAVVHGILMGVPVPFPIPEPDGCKSGINCPIQKDKTYSYLNKLPVKSEYPSV

SEQ ID NO: 9452 - protein, 125 aa, Homo Sapiens
MRFLAATFLLLALSTAAQAEPVQFKDCGSVDGVIKEVNVSPCPTQPCQLSKGQSYSVNVTFTSNIQSKSSKAVVHGILMGVPVPFPIPEPDGCKSGINCPIQKDKTYSYLNKLPVKSEYPSVSHL

SEQ ID NO: 9453 - protein, 173 aa, Homo Sapiens
  misc_feature (1)..(1): Xaa can be any naturally occurring amino acid
XPLRVRPPTWTQLSVRRICPSPASGLEDDASRRAWGPREAVRSLRAREEGSVDGVIKEVNVSPCPTQPCQLSKGQSYSVNVTFTSNIQSKSSKAVVHGILMGVPVPFPIPEPDGCKSGINCPIQKDKTYSYLNKLPVKSEYPSIKLVVEWQLQDDKNQSLFCWEIPVQIVSHL

SEQ ID NO: 9454 - protein, 113 aa, Homo Sapiens
MDSRQAAALLVLLLLIDGGCAEGPGGQQEDQLSAEEDSEPLPPQDAQTSGSLLHYLLQAMERPGRSQAFLFQPQRFGRNTQGSWRNEWLSPRAGEGLNSQFWSLAAPQRFGKK

SEQ ID NO: 9455 - protein, 423 aa, Homo Sapiens
MFIMNEKWDTNSSENWHPIWNVNDTKHHLYSDINITYVNYYLHQPQVAAIFIISYFLIFFLCMMGNTVVCFIVMRNKHMHTVTNLFILNLAISDLLVGIFCMPITLLDNIIAGWPFGNTMCKISGLVQGISVAASVFTLVAIAVDRFQCVVYPFKPKLTIKTAFVIIMIIWVLAITIMSPSAVMLHVQEEKYYRVRLNSQNKTSPVYWCREDWPNQEMRKIYTTVLFANIYLAPLSLIVIMYGRIGISLFRAAVPHTGRKNQEQWHVVSRKKQKIIKMLLIVALLFILSWLPLWTLMMLSDYADLSPNELQIINIYIYPFAHWLAFGNSSVNPIIYGFFNENFRRGFQEAFQLQLCQKRAKPMEAYALKAKSHVLINTSNQLVQESTFQNPHGETLLYRKSAEKPQQELVMEELKETTNSSEI

SEQ ID NO: 9456 - protein, 420 aa, Homo Sapiens
MNEKWDTNSSENWHPIWNVNDTKHHLYSDINITYVNYYLHQPQVAAIFIISYFLIFFLCMMGNTVVCFIVMRNKHMHTVTNLFILNLAISDLLVGIFCMPITLLDNIIAGWPFGNTMCKISGLVQGISVAASVFTLVAIAVDRFQCVVYPFKPKLTIKTAFVIIMIIWVLAITIMSPSAVMLHVQEEKYYRVRLNSQNKTSPVYWCREDWPNQEMRKIYTTVLFANIYLAPLSLIVIMYGRIGISLFRAAVPHTGRKNQEQWHVVSRKKQKIIKMLLIVALLFILSWLPLWTLMMLSDYADLSPNELQIINIYIYPFAHWLAFGNSSVNPIIYGFFNENFRRGFQEAFQLQLCQKRAKPMEAYALKAKSHVLINTSNQLVQESTFQNPHGETLLYRKSAEKPQQELVMEELKETTNSSEI

SEQ ID NO: 9457 - protein, 522 aa, Homo Sapiens
MNSFFGTPAASWCLLESDVSSAPDKEAGRERRALSVQQRGGPAWSGSLEWSRQSAGDRRRLGLSRQTAKSSWSRSRDRTCCCRRAWWILVPAADRARRERFIMNEKWDTNSSENWHPIWNVNDTKHHLYSDINITYVNYYLHQPQVAAIFIISYFLIFFLCMMGNTVVCFIVMRNKHMHTVTNLFILNLAISDLLVGIFCMPITLLDNIIAGWPFGNTMCKISGLVQGISVAASVFTLVAIAVDRFQCVVYPFKPKLTIKTAFVIIMIIWVLAITIMSPSAVMLHVQEEKYYRVRLNSQNKTSPVYWCREDWPNQEMRKIYTTVLFANIYLAPLSLIVIMYGRIGISLFRAAVPHTGRKNQEQWHVVSRKKQKIIKMLLIVALLFILSWLPLWTLMMLSDYADLSPNELQIINIYIYPFAHWLAFGNSSVNPIIYGFFNENFRRGFQEAFQLQLCQKRAKPMEAYALKAKSHVLINTSNQLVQESTFQNPHGETLLYRKSAEKPQQELVMEELKETTNSSEI

SEQ ID NO: 9458 - protein, 132 aa, Homo Sapiens
MNSFFGTPAASWCLLESDVSSAPDKEAGRERRALSVQQRGGPAWSGSLEWSRQSAGDRRRLGLSRQTAKSSWSRSRDRTCCCRRAWWILVPAADRARRERMAIWKHDVQDQWIGPGNICRSFSLYVSCNCCR

SEQ ID NO: 9459 - protein, 1201 aa, Homo Sapiens
MALGTTLRASLLLLGLLTEGLAQLAIPASVPRGFWALPENLTVVEGASVELRCGVSTPGSAVQWAKDGLLLGPDPRIPGFPRYRLEGDPARGEFHLHIEACDLSDDAEYECQVGRSEMGPELVSPRVILSILVPPKLLLLTPEAGTMVTWVAGQEYVVNCVSGDAKPAPDITILLSGQTISDISANVNEGSQQKLFTVEATARVTPRSSDNRQLLVCEASSPALEAPIKASFTVNVLFPPGPPVIEWPGLDEGHVRAGQSLELPCVARGGNPLATLQWLKNGQPVSTAWGTEHTQAVARSVLVMTVRPEDHGAQLSCEAHNSVSAGTQEHGITLQVTFPPSAIIILGSASQTENKNVTLSCVSKSSRPRVLLRWWLGWRQLLPMEETVMDGLHGGHISMSNLTFLARREDNGLTLTCEAFSEAFTKETFKKSLILNVKYPAQKLWIEGPPEGQKLRAGTRVRLVCLAIGGNPEPSLMWYKDSRTVTESRLPQESRRVHLGSVEKSGSTFSRELVLVTGPSDNQAKFTCKAGQLSASTQLAVQFPPTNVTILANASALRPGDALNLTCVSVSSNPPVNLSWDKEGERLEGVAAPPRRAPFKGSAAARSVLLQVSSRDHGQRVTCRAHSAELRETVSSFYRLNVLYRPEFLGEQVLVVTAVEQGEALLPVSVSANPAPEAFNWTFRGYRLSPAGGPRHRILSSGALHLWNVTRADDGLYQLHCQNSEGTAEARLRLDVHYAPTIRALQDPTEVNVGGSVDIVCTVDANPILPGMFNWERLGEDEEDQSLDDMEKISRGPTGRLRIHHAKLAQAGAYQCIVDNGVAPPARRLLRLVVRFAPQVEHPTPLTKVAAAGDSTSSATLHCRARGVPNIVFTWTKNGVPLDLQDPRYTEHTYHQGGVHSSLLTIANVSAAQDYALFTCTATNALGSDQTNIQLVSISRPDPPSGLKVVSLTPHSVGLEWKPGFDGGLPQRFCIRYEALGTPGFHYVDVVPPQATTFTLTGLQPSTRYRVWLLASNALGDSGLADKGTQLPITTPGLHQPSGEPEDQLPTEPPSGISEKTEAGSEEDRVRNEYEESQWTGERDTQSSTVSTTEAEPYYRSLRDFSPQLPPTQEEVSYSRGFTGEDEDMAFPGHLYDEVERTYPPSGAWGPLYDEVQMGPWDLHWPEDTYQDPRGIYDQVAGDLDTLEPDSLPFELRGHLV

SEQ ID NO: 9460 - protein, 1241 aa, Homo Sapiens
MALGTTLRASLLLLGLLTEGLAQLAIPASVPRGFWALPENLTVVEGASVELRCGVSTPGSAVQWAKDGLLLGPDPRIPGFPRYRLEGDPARGEFHLHIEACDLSDDAEYECQVGRSEMGPELVSPRVILSILVPPKLLLLTPEAGTMVTWVAGQEYVVNCVSGDAKPAPDITILLSGQTISDISANVNEGSQQKLFTVEATARVTPRSSDNRQLLVCEASSPALEAPIKASFTVNVLFPPGPPVIEWPGLDEGHVRAGQSLELPCVARGGNPLATLQWLKNGQPVSTAWGTEHTQAVARSVLVMTVRPEDHGAQLSCEAHNSVSAGTQEHGITLQVTFPPSAIIILGSASQTENKNVTLSCVSKSSRPRVLLRWWLGWRQLLPMEETVMDGLHGGHISMSNLTFLARREDNGLTLTCEAFSEAFTKETFKKSLILNVKYPAQKLWIEGPPEGQKLRAGTRVRLVCLAIGGNPEPSLMWYKDSRTVTESRLPQESRRVHLGSVEKSGSTFSRELVLVTGPSDNQAKFTCKAGQLSASTQLAVQFPPTNVTILANASALRPGDALNLTCVSVSSNPPVNLSWDKEGERLEGVAAPPRRAPFKGSAAARSVLLQVSSRDHGQRVTCRAHSAELRETVSSFYRLNVLYRPEFLGEQVLVVTAVEQGEALLPVSVSANPAPEAFNWTFRGYRLSPAGGPRHRILSSGALHLWNVTRADDGLYQLHCQNSEGTAEARLRLDVHYAPTIRALQDPTEVNVGGSVDIVCTVDANPILPGMFNWERLGEDEEDQSLDDMEKISRGPTGRLRIHHAKLAQAGAYQCIVDNGVAPPARRLLRLVVRFAPQVEHPTPLTKVAAAGDSTSSATLHCRARGVPNIVFTWTKNGVPLDLQDPRYTEHTYHQGGVHSSLLTIANVSAAQDYALFTCTATNALGSDQTNIQLVSISRPDPPSGLKVVSLTPHSVGLEWKPGFDGGLPQRFCIRYEALGTPGFHYVDVVPPQATTFTLTGLQPSTRYRVWLLASNALGDSGLADKGTQLPITTPGLHQPSGEPEDQLPTEPPSGPSGLPLLPVLFALGGLLLLSNASCVGGVLWQRRLRRLAEGISEKTEAGSEEDRVRNEYEESQWTGERDTQSSTVSTTEAEPYYRSLRDFSPQLPPTQEEVSYSRGFTGEDEDMAFPGHLYDEVERTYPPSGAWGPLYDEVQMGPWDLHWPEDTYQDPRGIYDQVAGDLDTLEPDSLPFELRGHLV

SEQ ID NO: 9461 - protein, 609 aa, Homo Sapiens
MDFLLALVLVSSLYLQAAAEFDGRWPRQIVSSIGLCRYGGRIDCCWGWARQSWGQCQPFYVLRQRIARIRCQLKAVCQPRCKHGECIGPNKCKCHPGYAGKTCNQDEHIPAPLDQGSEQPLFQPLDHQATSLPSRDLNECGLKPRPCKHRCMNTYGSYKCYCLNGYMLMPDGSCSSALTCSMANCQYGCDVVKGQIRCQCPSPGLQLAPDGRTCVDVDECATGRASCPRFRQCVNTFGSYICKCHKGFDLMYIGGKYQCHDIDECSLGQYQCSSFARCYNIRGSYKCKCKEGYQGDGLTCVYIPKVMIEPSGPIHVPKGNGTILKGDTGNNNWIPDVGSTWWPPKTPYIPPIITNRPTSKPTTRPTPKPTPIPTPPPPPPLPTELRTPLPPTTPERPTTGLTTIAPAASTPPGGITVDNRVQTDPQKPRGDVFIPRQPSNDLFEIFEIERGVSADDEAKDDPGVLVHSCNFDHGLCGWIREKDNDLHWEPIRDPAGGQYLTVSAAKAPGGKAARLVLPLGRLMHSGDLCLSFRHKVTGLHSGTLQVFVRKHGAHGAALWGRNGGHGWRQTQITLRGADIKSVVFKGEKRRGHTGEIGLDDVSLKKGHCS

SEQ ID NO: 9462 - protein, 582 aa, Homo Sapiens
MDFLLALVLVSSLYLQAAAEFDGRWPRQIVSSIGLCRYGGRIDCCWGWARQSWGQCQPFYVLRQRIARIRCQLKAVCQPRCKHGECIGPNKCKCHPGYAGKTCNQDLNECGLKPRPCKHRCMNTYGSYKCYCLNGYMLMPDGSCSSALTCSMANCQYGCDVVKGQIRCQCPSPGLQLAPDGRTCVDVDECATGRASCPRFRQCVNTFGSYICKCHKGFDLMYIGGKYQCHDIDECSLGQYQCSSFARCYNIRGSYKCKCKEGYQGDGLTCVYIPKVMIEPSGPIHVPKGNGTILKGDTGNNNWIPDVGSTWWPPKTPYIPPIITNRPTSKPTTRPTPKPTPIPTPPPPPPLPTELRTPLPPTTPERPTTGLTTIAPAASTPPGGITVDNRVQTDPQKPRGDVFIPRQPSNDLFEIFEIERGVSADDEAKDDPGVLVHSCNFDHGLCGWIREKDNDLHWEPIRDPAGGQYLTVSAAKAPGGKAARLVLPLGRLMHSGDLCLSFRHKVTGLHSGTLQVFVRKHGAHGAALWGRNGGHGWRQTQITLRGADIKSVVFKGEKRRGHTGEIGLDDVSLKKGHCSEER

SEQ ID NO: 9463 - protein, 595 aa, Homo Sapiens
MDFLLALVLVSSLYLQAAAEFDGRWPRQIVSSIGLCRYGGRIDCCWGWARQSWGQCQPVCQPRCKHGECIGPNKCKCHPGYAGKTCNQDEHIPAPLDQGSEQPLFQPLDHQATSLPSRDLNECGLKPRPCKHRCMNTYGSYKCYCLNGYMLMPDGSCSSALTCSMANCQYGCDVVKGQIRCQCPSPGLQLAPDGRTCVDVDECATGRASCPRFRQCVNTFGSYICKCHKGFDLMYIGGKYQCHDIDECSLGQYQCSSFARCYNIRGSYKCKCKEGYQGDGLTCVYIPKVMIEPSGPIHVPKGNGTILKGDTGNNNWIPDVGSTWWPPKTPYIPPIITNRPTSKPTTRPTPKPTPIPTPPPPPPLPTELRTPLPPTTPERPTTGLTTIAPAASTPPGGITVDNRVQTDPQKPRGDVFIPRQPSNDLFEIFEIERGVSADDEAKDDPGVLVHSCNFDHGLCGWIREKDNDLHWEPIRDPAGGQYLTVSAAKAPGGKAARLVLPLGRLMHSGDLCLSFRHKVTGLHSGTLQVFVRKHGAHGAALWGRNGGHGWRQTQITLRGADIKSVVFKGEKRRGHTGEIGLDDVSLKKGHCSEER

SEQ ID NO: 9464 - protein, 566 aa, Homo Sapiens
MDFLLALVLVSSLYLQAAAEFDGRWPRQIVSSIGLCRYGGRIDCCWGWARQSWGQCQPVCQPRCKHGECIGPNKCKCHPGYAGKTCNQDEHIPAPLDQGSEQPLFQPLDHQATSLPSRDLNECGLKPRPCKHRCMNTYGSYKCYCLNGYMLMPDGSCSSALTCSMANCQYGCDVVKGQIRCQCPSPGLQLAPDGRTCVDVDECATGRASCPRFRQCVNTFGSYICKCHKGFDLMYIGGKYQCHDIDECSLGQYQCSSFARCYNIRGSYKCKCKEGYQGDGLTCVYIPKVMIEPSGPIHVPKGNGTILKGDTGNNNWIPDVGSTWWPPKTPYIPPIITNRPTSKPTTRPTPKPTPIPTPPPPPPLPTELRTPLPPTTPERPTTGLTTIAPAASTPPGGITVDNRVQTDPQKPRGDVFSVLVHSCNFDHGLCGWIREKDNDLHWEPIRDPAGGQYLTVSAAKAPGGKAARLVLPLGRLMHSGDLCLSFRHKVTGLHSGTLQVFVRKHGAHGAALWGRNGGHGWRQTQITLRGADIKSVVFKGEKRRGHTGEIGLDDVSLKKGHCSEER

SEQ ID NO: 9465 - protein, 509 aa, Homo Sapiens
MDFLLALVLVSSLYLQAAAEFDGRWPRQIVSSIGLCRYGGRIDCCWGWARQSWGQCQPVCQPRCKHGECIGPNKCKCHPGYAGKTCNQDLNECGLKPRPCKHRCMNTYGSYKCYCLNGYMLMPDGSCSSALTCSMANCQYGCDVVKGQIRCQCPSPGLQLAPDGRTCVDVDECATGRASCPRFRQCVNTFGSYICKCHKGFDLMYIGGKYQCHDIDECSLGQYQCSSFARCYNIRGSYKCKCKEGYQGDGLTCVYIPKVMIEPSGPIHVPKGNGTILKGDTGNNNWIPDVGSTWWPPKTPYIPPIITNRPTSKPTTRPTPKPTPIPTPPPPPPLPTELRTPLPPTTPERPTTGLTTIAPAASTPPGGITVDNRVQTDPQKPRGDVFSVLVHSCNFDHGLCGWIREKDNDLHWEPIRDPAGGQYLTVSAAKAPGGKAARLVLPLGRLMHSGDLCLSFRHKVTGLHSGTLQVFVRKHGAHGAALWGRNGGHGWRQTQITLRGADIKSESQR

SEQ ID NO: 9466 - protein, 565 aa, Homo Sapiens
MDFLLALVLVSSLYLQAAAEFDGRWPRQIVSSIGLCRYGGRIDCCWGWARQSWGQCQPVCQPRCKHGECIGPNKCKCHPGYAGKTCNQDLNECGLKPRPCKHRCMNTYGSYKCYCLNGYMLMPDGSCSSALTCSMANCQYGCDVVKGQIRCQCPSPGLQLAPDGRTCVDVDECATGRASCPRFRQCVNTFGSYICKCHKGFDLMYIGGKYQCHDIDECSLGQYQCSSFARCYNIRGSYKCKCKEGYQGDGLTCVYIPKVMIEPSGPIHVPKGNGTILKGDTGNNNWIPDVGSTWWPPKTPYIPPIITNRPTSKPTTRPTPKPTPIPTPPPPPPLPTELRTPLPPTTPERPTTGLTTIAPAASTPPGGITVDNRVQTDPQKPRGDVFIPRQPSNDLFEIFEIERGVSADDEAKDDPGVLVHSCNFDHGLCGWIREKDNDLHWEPIRDPAGGQYLTVSAAKAPGGKAARLVLPLGRLMHSGDLCLSFRHKVTGLHSGTLQVFVRKHGAHGAALWGRNGGHGWRQTQITLRGADIKSVVFKGEKRRGHTGEIGLDDVSLKKGHCSEER

SEQ ID NO: 9467 - protein, 536 aa, Homo Sapiens
MDFLLALVLVSSLYLQAAAEFDGRWPRQIVSSIGLCRYGGRIDCCWGWARQSWGQCQPVCQPRCKHGECIGPNKCKCHPGYAGKTCNQDLNECGLKPRPCKHRCMNTYGSYKCYCLNGYMLMPDGSCSSALTCSMANCQYGCDVVKGQIRCQCPSPGLQLAPDGRTCVDVDECATGRASCPRFRQCVNTFGSYICKCHKGFDLMYIGGKYQCHDIDECSLGQYQCSSFARCYNIRGSYKCKCKEGYQGDGLTCVYIPKVMIEPSGPIHVPKGNGTILKGDTGNNNWIPDVGSTWWPPKTPYIPPIITNRPTSKPTTRPTPKPTPIPTPPPPPPLPTELRTPLPPTTPERPTTGLTTIAPAASTPPGGITVDNRVQTDPQKPRGDVFSVLVHSCNFDHGLCGWIREKDNDLHWEPIRDPAGGQYLTVSAAKAPGGKAARLVLPLGRLMHSGDLCLSFRHKVTGLHSGTLQVFVRKHGAHGAALWGRNGGHGWRQTQITLRGADIKSVVFKGEKRRGHTGEIGLDDVSLKKGHCSEER

SEQ ID NO: 9468 - protein, 61 aa, Homo Sapiens
MNTYGSYKCYCLNGYMLMPDGSCSSALTCSMANCQYGCDVVKGQIRCQCPSPGLQLAPDGR

SEQ ID NO: 9469 - protein, 104 aa, Homo Sapiens
  misc_feature (1)..(1): Xaa can be any naturally occurring amino acid
XGLCGWIREKDNDLHWEPIRDPAGITKMIKGLEKKIYDGKLKELGLLSLEKRRLRGKPLMVFKYMKGWHREGGDQLFSICTKNRTRGNWLRLEYKGAFLGRGHC

SEQ ID NO: 9470 - protein, 26 aa, Homo Sapiens
  misc_feature (1)..(1): Xaa can be any naturally occurring amino acid
XNDLHWEPIRDPADNCSCLHAGGLDL

SEQ ID NO: 9471 - protein, 453 aa, Homo Sapiens
  misc_feature (1)..(1): Xaa can be any naturally occurring amino acid
XWPRQIVSSIGLCRYGGRIDCCWGWARQSWGQCQPVCQPRCKHGECIGPNKCKCHPGYAGKTCNQDLNECGLKPRPCKHRCMNTYGSYKCYCLNGYMLMPDGSCSSALTCSMANCQYGCDVVKGQIRCQCPSPGLQLAPDGRTCVDVDECATGRASCPRFRQCVNTFGSYICKCHKGFDLMYIGGKYQCHDIDECSLGQYQCSSFARCYNIRGSYKCKCKEGYQGDGLTCVYIPKVMIEPSGPIHVPKGNGTILKGDTGNNNWIPDVGSTWWPPKTPYIPPIITNRPTSKPTTRPTPKPTPIPTPPPPPPLPTELRTPLPPTTPERPTTGLTTIAPAASTPPGGITVDNRVQTDPQKPRGDVFIPRQPSNDLFEIFEIERGVSADDEAKDDPGVLVHSCNFDHGLCGWIREKDNDLHWEPIRDPAEILQGTQFREIFIGCILSASCVTSYLGC

SEQ ID NO: 9472 - protein, 101 aa, Homo Sapiens
MPLEDEVVPPQVLSEPNEEAGAALSPLPEVPPWTGEVSPAQRDGGALGRGPWDSSDRSALLKSKLRALLTAPRSLRRSSCFGGRMDRIGAQSGLGCNSFRY

SEQ ID NO: 9473 - protein, 151 aa, Homo Sapiens
MSSFSTTTVSFLLLLAFQLLGQTRANPMYNAVSNADLMDFKNLLDHLEEKMPLEDEVVPPQVLSEPNEEAGAALSPLPEVPPWTGEVSPAQRDGGALGRGPWDSSDRSALLKSKLRALLTAPRSLRRSSCFGGRMDRIGAQSGLGCNSFRY

SEQ ID NO: 9474 - protein, 152 aa, Homo Sapiens [sequence omitted]

SEQ ID NO: 9475 - protein, 134 aa, Homo Sapiens
MDPQTAPSRALLLLLFLHLAFLGGRSHPLGSPGSASDLETSGLQEQRNHLQGKLSELQVEQTSLEPLQESPRPTGVWKSREVATEGIRGHRKMVLYTLRAPRSPKMVQGSGCFGRKMDRISSSSGLGCKVLRRH

SEQ ID NO: 9476 - protein, 126 aa, Homo Sapiens
MHLSQLLACALLLTLLSLRPSEAKPGAPPKVPRTPPAEELAEPQAAGGGQKKGDKAPGGGGANLKGDRSRLLRDLRVDTKSRAAWARLLQEHPNARKYKGANKKGLSKGCFGLKLDRIGSMSGLGC

SEQ ID NO: 9477 - protein, 126 aa, Homo Sapiens; identical to SEQ ID NO: 9476

SEQ ID NO: 9478 - protein, 89 aa, Homo Sapiens
MISSVKLNLILVLSLSTMHVFWCYPVPSSKVSGKSDYFLILLNSCPTRLDRSKELAFLKPILEKMFVKRSFRNGVGTGMKKTSFQRAKS

SEQ ID NO: 9479 - protein, 432 aa, Homo Sapiens
MPAGRAARTCALLALCLLGAGAQDFGPTRFICTSVPVDADMCAASVAAGGAEELRSSVLQLRETVLQQKETILSQKETIRELTAKLGRCESQSTLDPGAGEARAGGGRKQPGSGKNTMGDLSRTPAAETLSQLGQTLQSLKTRLENLEQYSRLNSSSQTNSLKDLLQSKIDELERQVLSRVNTLEEGKGGPRNDTEERVKIETALTSLHQRISELEKGQKDNRPGDKFQLTFPLRTNYMYAKVKKSLPEMYAFTVCMWLKSSATPGVGTPFSYAVPGQANELVLIEWGNNPMEILINDKVAKLPFVINDGKWHHICVTWTTRDGVWEAYQDGTQGGSGENLAPYHPIKPQGVLVLGQEQDTLGGGFDATQAFVGELAHFNIWDRKLTPGEVYNLATCSTKALSGNVIAWAESHIEIYGGATKWTFEACRQIN

SEQ ID NO: 9480 - protein, 431 aa, Homo Sapiens
MLALLAASVALAVAAGAQDSPAPGSRFVCTALPPEAVHAGCPLPAMPMQGGAQSPEEELRAAVLQLRETVVQQKETLGAQREAIRELTGKLARCEGLAGGKARGAGATGKDTMGDLPRDPGHVVEQLSRSLQTLKDRLESLEHQLRANVSNAGLPGDFREVLQQRLGELERQLLRKVAELEDEKSLLHNETSAHRQKTESTLNALLQRVTELERGNSAFKSPDAFKVSLPLRTNYLYGKIKKTLPELYAFTICLWLRSSASPGIGTPFSYAVPGQANEIVLIEWGNNPIELLINDKVAQLPLFVSDGKWHHICVTWTTRDGMWEAFQDGEKLGTGENLAPWHPIKPGGVLILGQEQDTVGGRFDATQAFVGELSQFNIWDRVLRAQEIVNIANCSTNMPGNIIPWVDNNVDVFGGASKWPVETCEERLLDL

SEQ ID NO: 9481 - protein, 500 aa, Homo Sapiens
LKFLAVLLAAGMLAFLGAVICIIASVPLAASPARALPGGADNASVASGAAASPGPQRSLSALHGAGGSAGPPALPGAPAASAHPLPPGPLFSRFLCTPLAAACPSGAQQGDAAGAAPGEREELLLLQSTAEQLRQTALQQEARIRADQDTIRELTGKLGRCESGLPRGLQGAGPRRDTMADGPWDSPALILELEDAVRALRDRIDRLEQELPARVNLSAAPAPVSAVPTGLHSKMDQLEGQLLAQVLALEKERVALSHSSRRQRQEVEKELDVLQGRVAELEHGSSAYSPPDAFKISIPIRNNYMYARVRKALPELYAFTACMWLRSRSSGTGQGTPFSYSVPGQANEIVLLEAGHEPMELLINDKVAQLPLSLKDNGWHHICIAWTTRDGLWSAYQDGELQGSGENLAAWHPIKPHGILILGQEQDTLGGRFDATQAFVGDIAQFNLWDHALTPAQVLGIANCTAPLLGNVLPWEDKLVEAFGGATKAAFDVCKGRAKA

SEQ ID NO: 9482 - protein, 500 aa, Homo Sapiens; identical to SEQ ID NO: 9481

SEQ ID NO: 9483 - protein, 196 aa, Homo Sapiens
MEIISSKLFILLTLATSSLLTSNIFCADELVMSNLHSKENYDKYSEPRGYPKGERSLNFEELKDWGPKNVIKMSTPAVNKMPHSFANLPLRFGRNVQEERSAGATANLPLRSGRNMEVSLVRRVPNLPQRFGRTTTAKSVCRMLSDLCQGSMHSPCANDLFYSMTCQHQEIQNPDQKQSRRLLFKKIDDAELKQEK

SEQ ID NO: 9484 - protein, 165 aa, Homo Sapiens
LAWRPGERGAPASRPRLALLLLLLLLPLPSGAWYKHVASPRYHTVGRAAGLLMGLRRSPYLWRRALRAAAGPLARDTLSPEPAAREAPLLLPSWVQELWETRRRSSQAGIPVRAPRSPRAPEPALEPESLDFSGAGQRLRRDVSRPAVDPAANRLGLPCLAPGPF

SEQ ID NO: 9485 - protein, 113 aa, Homo Sapiens
MGLRRSPYLWRRALRAAAGPLARDTLSPEPAAREAPLLLPSWVQELWETRRRSSQAGIPVRAPRSPRAPEPALEPESLDFSGAGQRLRRDVSRPAVDPAANRLGLPCLAPGPF

SEQ ID NO: 9486 - protein, 128 aa, Homo Sapiens
MSRPLEGPRGHAASPGLLWATRVTSTLAGLHELALSDETRHNWFASQMNKGSCLSPARLLSCCPRGFRSCGRRDAGAPRQGSPSVRPGARAPQSLRWNRSPWTSAELARDFGETSPAQRWTPQQTALA

SEQ ID NO: 9487 - protein, 97 aa, Homo Sapiens
MLGNKRLGLSGLTLALSLLVCLGALAEAYPSKPDNPGEDAPAEDMARYYSALRHYINLITRQRYGKRSSPETLISDLLMRESTENVPRTRLEDPAMW

SEQ ID NO: 9488 - protein, 97 aa, Homo Sapiens; identical to SEQ ID NO: 9487

SEQ ID NO: 9489 - protein, 97 aa, Homo Sapiens; identical to SEQ ID NO: 9487

SEQ ID NO: 9490 - protein, 35 aa, Homo Sapiens
MAEFRFLKSGALPILSLLCLQALKFSLGCSRGSSE

SEQ ID NO: 9491 - protein, 63 aa, Homo Sapiens
MAGKKVLIVYAHQEPKSFNGSLKNVAVDELSRQGCTVTVSDLYAMNLEPRATDKDITGTLSNP

SEQ ID NO: 9492 - protein, 139 aa, Homo Sapiens
MAGKKVLIVYAHQEPKSFNGSLKNVAVDELSRQGCTVTVSDLYAMNLEPRATDKDITGTLSNPEVFNYGVETHEAYKQRSLASDITDEQKKVREADLVIFQFPLYWFSVPAILKGWMDRVLCQGFAFDIPGFYDSGLLQ

SEQ ID NO: 9493 - protein, 139 aa, Homo Sapiens; identical to SEQ ID NO: 9492

SEQ ID NO: 9494 - protein, 231 aa, Homo Sapiens
MAGKKVLIVYAHQEPKSFNGSLKNVAVDELSRQGCTVTVSDLYAMNLEPRATDKDITGTLSNPEVFNYGVETHEAYKQRSLASDITDEQKKVREADLVIFQFPLYWFSVPAILKGWMDRVLCQGFAFDIPGFYDSGLLQGKLALLSVTTGGTAEMYTKTGVNGDSRYFLWPLQHGTLHFCGFKVLAPQISFAPEIASEEERKGMVAAWSQRLQTIWKEEPIPCTAHWHFGQ

SEQ ID NO: 9495 - protein, 231 aa, Homo Sapiens; identical to SEQ ID NO: 9494

SEQ ID NO: 9496 - protein, 231 aa, Homo Sapiens; identical to SEQ ID NO: 9494

SEQ ID NO: 9497 - protein, 193 aa, Homo Sapiens
MAGKKVLIVYAHQEPKSFNGSLKNVAVDELSRQGCTVTVSDLYAMNLEPRATDKDITGTLSNPEVFNYGVETHEAYKQRSLASDITDEQKKVREADLVIFQGKLALLSVTTGGTAEMYTKTGVNGDSRYFLWPLQHGTLHFCGFKVLAPQISFAPEIASEEERKGMVAAWSQRLQTIWKEEPIPCTAHWHFGQ

SEQ ID NO: 9498 - protein, 193 aa, Homo Sapiens; identical to SEQ ID NO: 9497

SEQ ID NO: 9499 - protein, 1299 aa, Homo Sapiens
MPKKKRLSAGRVPLILFLCQMISALEVPLDPKLLEDLVQPPTITQQSPKDYIIDPRENIVIQCEAKGKPPPSFSWTRNGTHFDIDKDPLVTMKPGTGTLIINIMSEGKAETYEGVYQCTARNERGAAVSNNIVVRPSRSPLWTKEKLEPITLQSGQSLVLPCRPPIGLPPPIIFWMDNSFQRLPQSERVSQGLNGDLYFSNVLPEDTREDYICYARFNHTQTIQQKQPISVKVISVDELNDTIAANLSDTEFYGAKSSRERPPTFLTPEGNASNKEELRGNVLSLECIAEGLPTPIIYWAKEDGMLPKNRTVYKNFEKTLQIIHVSEADSGNYQCIAKNALGAIHHTISVRVKAAPYWITAPQNLVLSPGEDGTLICRANGNPKPRISWLTNGVPIEIAPDDPSRKIDGDTIIFSNVQERSSAVYQCNASNEYGYLLANAFVNVLAEPPRILTPANTLYQVIANRPALLDCAFFGSPLPTIEWFKGAKGSALHEDIYVLHENGTLEIPVAQKDSTGTYTCVARNKLGMAKNEVHLEIKDPTWIVKQPEYAVVQRGSMVSFECKVKHDHTLSLTVLWLKDNRELPSDERFTVDKDHLVVADVSDDDSGTYTCVANTTLDSVSASAVLSVVAPTPTPAPVYDVPNPPFDLELTDQLDKSVQLSWTPGDDNNSPITRIHHEYEDAMHKPGLWHHQTEVSGTQTTAQLKLSPYVNYSFRVMAVNSIGKSLPSEASEQYLTKASEPDKNPTAVEGLGSEPDNLVITWKPLNGFESNGPGLQYKVSWRQKDGDDEWTSVVVANVSKYIVSGTPTFVPYLIKVQALNDMGFAPEPAVVMGHSGEDLPMVAPGNVRVNVVNSTLAEVHWDPVPLKSIRGHLQGYRIYYWKTQSSSKRNRRHIEKKILTFQGSKTHGMLPGLEPFSHYTLNVRVVNGKGEGPASPDRVFNTPEGVPSAPSSLKIVNPTLDSLTLEWDPPSHPNGILTEYTLKYQPINSTHELGPLVDLKIPANKTRWTLKNLNFSTRYKFYFYAQTSAGSGSQITEEAVTTVDEAGILPPDVGAGKVQAVNPRISNLTAAAAETYANISWEYEGPEHVNFYVEYGVAGSKEEWRKEIVNGSRSFFGLKGLMPGTAYKVRVGAVGDSGFVSSEDVFETGPAMASRQVDIATQGWFIGLMCAVALLILILLIVCFIRRNKGGKYPVKEKEDAHADPEIQPMKEDDGTFGEYSDAEDHKPLKKGSRTPSDRTVKKEDSDDSLVDYGEGVNGQFNEDGSFIGQYSGKKEKEPAEGNESSEAPSPVNAMNSFV

SEQ ID NO: 9500 - protein, 106 aa, Homo Sapiens
MQLKIMPKKKRLSAGRVPLILFLCQMISALEVPLDLVQPPTITQQSPKDYIIDPRENIVIQCEAKGKPPPSFSWTRNGTHFDIDKDPLVTMKPGTGTLIINIMSEG

SEQ ID NO: 9501 - protein, 106 aa, Homo Sapiens; identical to SEQ ID NO: 9500

SEQ ID NO: 9502 - protein, 1183 aa, Homo Sapiens
MQLKIMPKKKRLSAGRVPLILFLCQMISALEVPLDLVQPPTITQQSPKDYIIDPRENIVIQCEAKGKPPPSFSWTRNGTHFDIDKDPLVTMKPGTGTLIINIMSEGKAETYEGVYQCTARNERGAAVSNNIVVRPSRSPLWTKEKLEPITLQSGQSLVLPCRPPIGLPPPIIFWMDNSFQRLPQSERVSQGLNGDLYFSNVLPEDTREDYICYARFNHTQTIQQKQPISVKVISVDELNDTIAANLSDTEFYGAKSSRERPPTFLTPEGNASNKEELRGNVLSLECIAEGLPTPIIYWAKEDGMLPKNRTVYKNFEKTLQIIHVSEADSGNYQCIAKNALGAIHHTISVRVKAAPYWITAPQNLVLSPGEDGTLICRANGNPKPRISWLTNGVPIEIAPDDPSRKIDGDTIIFSNVQERSSAVYQCNASNEYGYLLANAFVNVLAEPPRILTPANTLYQVIANRPALLDCAFFGSPLPTIEWFKGAKGSALHEDIYVLHENGTLEIPVAQKDSTGTYTCVARNKLGMAKNEVHLEIKDPTWIVKQPEYAVVQRGSMVSFECKVKHDHTLSLTVLWLKDNRELPSDERFTVDKDHLVVADVSDDDSGTYTCVANTTLDSVSASAVLSVVDVPNPPFDLELTDQLDKSVQLSWTPGDDNNSPITKFIIEYEDAMHKPGLWHHQTEVSGTQTTAQLKLSPYVNYSFRVMAVNSIGKSLPSEASEQYLTKASEPDKNPTAVEGLGSEPDNLVITWKPLNGFESNGPGLQYKVSWRQKDGDDEWTSVVVANVSKYIVSGTPTFVPYLIKVQALNDMGFAPEPAVVMGHSGEDLPMVAPGNVRVNVVNSTLAEVHWDPVPLKSIRGHLQGYRIYYWKTQSSSKRNRRHIEKKILTFQGSKTHGMLPGLEPFSHYTLNVRVVNGKGEGPASPDRVFNTPEGVPSAPSSLKIVNPTLDSLTLEWDPPSHPNGILTEYTLKYQPINSTHELGPLVDLKIPANKTRWTLKNLNFSTRYKFYFYAQTSAGSGSQITEEAVTTVDEAMASRQVDIATQGWFIGLMCAVALLILILLIVCFIRRNKGGKYPVKEKEDAHADPEIQPMKEDDGTFGEYSDAEDHKPLKKGSRTPSDRTVKKEDSDDSLVDYGEGVNGQFNEDGSFIGQYSGKKEKEPAEGNESSEAPSPVNAMNSFV

SEQ ID NO: 9503 - protein, 431 aa, Homo Sapiens
MQLKIMPKKKRLSAGRVPLILFLCQMISALEVPLDLVQPPTITQQSPKDYIIDPRENIVIQCEAKGKPPPSFSWTRNGTHFDIDKDPLVTMKPGTGTLIINIMSEGKAETYEGVYQCTARNERGAAVSNNIVVRPSRSPLWTKEKLEPITLQSGQSLVLPCRPPIGLPPPIIFWMDNSFQRLPQSERVSQGLNGDLYFSNVLPEDTREDYICYARFNHTQTIQQKQPISVKVISVDELNDTIAANLSDTEFYGAKSSRERPPTFLTPEGNASNKEELRGNVLSLECIAEGLPTPIIYWAKEDGMLPKNRTVYKNFEKTLQIIHVSEADSGNYQCIAKNALGAIHHTISVRVKAAPYWITAPQNLVLSPGEDGTLICRANGNPKPRISWLTNGVPIEIAPDDPSRKIDGDTIIFSNVQERSSAVYQCNASNE

SEQ ID NO: 9504 - protein, 771 aa, Homo Sapiens [sequence omitted]

SEQ ID NO: 9505 - protein, 61 aa, Homo Sapiens
MQLKIMPKKKRLSAGRVPLILFLCQMISALEVPLDPKLLEDLVQPPTITQQSPKDYIIDPR

SEQ ID NO: 9506 - protein, 118 aa, Homo Sapiens
MQLKIMPKKKRLSAGRVPLILFLCQMISALEVPLDPKLLEDLVQPPTITQQSPKDYIIDPRENIVIQCEAKGKPPPSFSWTRNGTHFDIDKDPLVTMKPGTGTLIINIMSEGKAETYE

SEQ ID NO: 9507 - protein, 1192 aa, Homo Sapiens
MQLKIMPKKKRLSAGRVPLILFLCQMISALEVPLDPKLLEDLVQPPTITQQSPKDYIIDPRENIVIQCEAKGKPPPSFSWTRNGTHFDIDKDPLVTMKPGTGTLIINIMSEGKAETYEGVYQCTARNERGAAVSNNIVVRPSRSPLWTKEKLEPITLQSGQSLVLPCRPPIGLPPPIIFWMDNSFQRLPQSERVSQGLNGDLYFSNVLPEDTREDYICYARFNHTQTIQQKQPISVKVISAKSSRERPPTFLTPEGNASNKEELRGNVLSLECIAEGLPTPIIYWAKEDGMLPKNRTVYKNFEKTLQIIHVSEADSGNYQCIAKNALGAIHHTISVRVKAAPYWITAPQNLVLSPGEDGTLICRANGNPKPRISWLTNGVPIEIAPDDPSRKIDGDTIIFSNVQERSSAVYQCNASNEYGYLLANAFVNVLAEPPRILTPANTLYQVIANRPALLDCAFFGSPLPTIEWFKGAKGSALHEDIYVLHENGTLEIPVAQKDSTGTYTCVARNKLGMAKNEVHLEIKDPTWIVKQPEYAVVQRGSMVSFECKVKHDHTLSLTVLWLKDNRELPSDERFTVDKDHLVVADVSDDDSGTYTCVANTTLDSVSASAVLSVVAPTPTPAPVYDVPNPPFDLELTDQLDKSVQLSWTPGDDNNSPITKFIIEYEDAMHKPGLWHHQTEVSGTQTTAQLKLSPYVNYSFRVMAVNSIGKSLPSEASEQYLTKASEPDKNPTAVEGLGSEPDNLVITWKPLNGFESNGPGLQYKVSWRQKDGDDEWTSVVVANVSKYIVSGTPTFVPYLIKVQALNDMGFAPEPAVVMGHSGEDLPMVAPGNVRVNVVNSTLAEVHWDPVPLKSIRGHLQGYRIYYWKTQSSSKRNRRHIEKKILTFQGSKTHGMLPGLEPFSHYTLNVRVVNGKGEGPASPDRVFNTPEGVPSAPSSLKIVNPTLDSLTLEWDPPSHPNGILTEYTLKYQPINSTHELGPLVDLKIPANKTRWTLKNLNFSTRYKFYFYAQTSAGSGSQITEEAVTTVDEAGILPPDVGAGKAMASRQVDIATQGWFIGLMCAVALLILILLIVCFIRRNKGGKYPVKEKEDAHADPEIQPMKEDDGTFGEYSDAEDHKPLKKGSRTPSDRTVKKEDSDDSLVDYGEGVNGQFNEDGSFIGQYSGKKEKEPAEGNESSEAPSPVNAMNSFV

SEQ ID NO: 9508 - protein, 1304 aa, Homo Sapiens
MQLKIMPKKKRLSAGRVPLILFLCQMISALEVPLDPKLLEDLVQPPTITQQSPKDYIIDPRENIVIQCEAKGKPPPSFSWTRNGTHFDIDKDPLVTMKPGTGTLIINIMSEGKAETYEGVYQCTARNERGAAVSNNIVVRPSRSPLWTKEKLEPITLQSGQSLVLPCRPPIGLPPPIIFWMDNSFQRLPQSERVSQGLNGDLYFSNVLPEDTREDYICYARFNHTQTIQQKQPISVKVISVDELNDTIAANLSDTEFYGAKSSRERPPTFLTPEGNASNKEELRGNVLSLECIAEGLPTPIIYWAKEDGMLPKNRTVYKNFEKTLQIIHVSEADSGNYQCIAKNALGAIHHTISVRVKAAPYWITAPQNLVLSPGEDGTLICRANGNPKPRISWLTNGVPIEIAPDDPSRKIDGDTIIFSNVQERSSAVYQCNASNEYGYLLANAFVNVLAEPPRILTPANTLYQVIANRPALLDCAFFGSPLPTIEWFKGAKGSALHEDIYVLHENGTLEIPVAQKDSTGTYTCVARNKLGMAKNEVHLEIKDPTWIVKQPEYAVVQRGSMVSFECKVKHDHTLSLTVLWLKDNRELPSDERFTVDKDHLVVADVSDDDSGTYTCVANTTLDSVSASAVLSVVAPTPTPAPVYDVPNPPFDLELTDQLDKSVQLSWTPGDDNNSPITKFIIEYEDAMHKPGLWHHQTEVSGTQTTAQLKLSPYVNYSFRVMAVNSIGKSLPSEASEQYLTKASEPDKNPTAVEGLGSEPDNLVITWKPLNGFESNGPGLQYKVSWRQKDGDDEWTSVVVANVSKYIVSGTPTFVPYLIKVQALNDMGFAPEPAVVMGHSGEDLPMVAPGNVRVNVVNSTLAEVHWDPVPLKSIRGHLQGYRIYYWKTQSSSKRNRRHIEKKILTFQGSKTHGMLPGLEPFSHYTLNVRVVNGKGEGPASPDRVFNTPEGVPSAPSSLKIVNPTLDSLTLEWDPPSHPNGILTEYTLKYQPINSTHELGPLVDLKIPANKTRWTLKNLNFSTRYKFYFYAQTSAGSGSQITEEAVTTVDEAGILPPDVGAGKVQAVNPRISNLTAAAAETYANISWEYEGPEHVNFYVEYGVAGSKEEWRKEIVNGSRSFFGLKGLMPGTAYKVRVGAVGDSGFVSSEDVFETGPAMASRQVDIATQGWFIGLMCAVALLILILLIVCFIRRNKGGKYPVKEKEDAHADPEIQPMKEDDGTFGEYSDAEDHKPLKKGSRTPSDRTVKKEDSDDSLVDYGEGVNGQFNEDGSFIGQYSGKKEKEPAEGNESSEAPSPVNAMNSFV

SEQ ID NO: 9509 - protein, 1211 aa, Homo Sapiens
MQLKIMPKKKRLSAGRVPLILFLCQMISALEVPLDPKLLEDLVQPPTITQQSPKDYIIDPRENIVIQCEAKGKPPPSFSWTRNGTHFDIDKDPLVTMKPGTGTLIINIMSEGKAETYEGVYQCTARNERGAAVSNNIVVRPSRSPLWTKEKLEPITLQSGQSLVLPCRPPIGLPPPIIFWMDNSFQRLPQSERVSQGLNGDLYFSNVLPEDTREDYICYARFNHTQTIQQKQPISVKVISVDELNDTIAANLSDTEFYGAKSSRERPPTFLTPEGNASNKEELRGNVLSLECIAEGLPTPIIYWAKEDGMLPKNRTVYKNFEKTLQIIHVSEADSGNYQCIAKNALGAIHHTISVRVKAAPYWITAPQNLVLSPGEDGTLICRANGNPKPRISWLTNGVPIEIAPDDPSRKIDGDTIIFSNVQERSSAVYQCNASNEYGYLLANAFVNVLAEPPRILTPANTLYQVIANRPALLDCAFFGSPLPTIEWFKGAKGSALHEDIYVLHENGTLEIPVAQKDSTGTYTCVARNKLGMAKNEVHLEIKDPTWIVKQPEYAVVQRGSMVSFECKVKHDHTLSLTVLWLKDNRELPSDERFTVDKDHLVVADVSDDDSGTYTCVANTTLDSVSASAVLSVVAPTPTPAPVYDVPNPPFDLELTDQLDKSVQLSWTPGDDNNSPITKFIIEYEDAMHKPGLWHHQTEVSGTQTTAQLKLSPYVNYSFRVMAVNSIGKSLPSEASEQYLTKASEPDKNPTAVEGLGSEPDNLVITWKPLNGFESNGPGLQYKVSWRQKDGDDEWTSVVVANVSKYIVSGTPTFVPYLIKVQALNDMGFAPEPAVVMGHSGEDLPMVAPGNVRVNVVNSTLAEVHWDPVPLKSIRGHLQGYRIYYWKTQSSSKRNRRHIEKKILTFQGSKTHGMLPGLEPFSHYTLNVRVVNGKGEGPASPDRVFNTPEGVPSAPSSLKIVNPTLDSLTLEWDPPSHPNGILTEYTLKYQPINSTHELGPLVDLKIPANKTRWTLKNLNFSTRYKFYFYAQTSAGSGSQITEEAVTTVDEAGILPPDVGAGKAMASRQVDIATQGWFIGLMCAVALLILILLIVCFIRRNKGGKYPVKEKEDAHADPEIQPMKEDDGTFGEYSDAEDHKPLKKGSRTPSDRTVKKEDSDDSLVDYGEGVNGQFNEDGSFIGQYSGKKEKEPAEGNESSEAPSPVNAMNSFV

SEQ ID NO: 9510 - protein, 1304 aa, Homo Sapiens; identical to SEQ ID NO: 9508

SEQ ID NO: 9511 - protein, 190 aa, Homo Sapiens
  misc_feature (1)..(1): Xaa can be any naturally occurring amino acid
XGILPPDVGAGKVQAVNPRISNLTAAAAETYANISWEYEGPEHVNFYVEYGVAGTMASRQVDIATQGWFIGLMCAVALLILILLIVCFIRRNKGGKYPVKEKEDAHADPEIQPMKEDDGTFGEYSDAEDHKPLKKGSRTPSDRTVKKEDSDDSLVDYGEGVNGQFNEDGSFIGQYSGKKEKEPAEGNESS

SEQ ID NO: 9512 - protein, 296 aa, Homo Sapiens
MEIYSPDMSEVAAERSSSPSTQLSADPSLDGLPAAEDMPEPQTEDGRTPGLVGLAVPCCACLEAERLRGCLNSEKICIVPILACLVSLCLCIAGLKWVFVDKIFEYDSPTHLDPGGLGQDPIISLDATAASAVWVSSEAYTSPVSRAQSESEVQVTVQGDKAVVSFEPSAAPTPKNRIFAFSFLPSTAPSFPSPTRNPEVRTPKSATQPQTTETNLQTAPKLSTSTSTTGTSHLVKCAEKEKTFCVNGGECFMVKDLSNPSRYLCKCPNEFTGDRCQNYVMASFYSTSTPFLSLPE

SEQ ID NO: 9513 - protein, 590 aa, Homo Sapiens
MGKGRAGRVGTTALPPRLKEMKSQESAAGSKLVLRCETSSEYSSLRFKWFKNGNELNRKNKPQNIKIQKKPGKSELRINKASLADSGEYMCKVISKLGNDSASANITIVESNATSTSTTGTSHLVKCAEKEKTFCVNGGECFMVKDLSNPSRYLCKCPNEFTGDRCQNYVMASFYKHLGIEFMEAEELYQKRVLTITGICIALLVVGIMCVVAYCKTKKQRKKLHDRLRQSLRSERNNMMNIANGPHHPNPPPENVQLVNQYVSKNVISSEHIVEREAETSFSTSHYTSTAHHSTTVTQTPSHSWSNGHTESILSESHSVIVMSSVENSRHSSPTGGPRGRLNGTGGPRECNSFLRHARETPDSYRDSPHSERYVSAMTTPARMSPVDFHTPSSPKSPPSEMSPPVSSMTVSMPSMAVSPFMEEERPLLLVTPPRLREKKFDHHPQQFSSFHHNPAHDSNSLPASPLRIVEDEEYETTQEYEPAQEPVKKLANSRRAKRTKPNGHIANRLEVDSNTSSQSSNSESETEDERVGEDTPFLGIQNPLAASLEATPAFRLADSRTNPAGRFSTQEEIQARLSSVIANQDPIAV

SEQ ID NO: 9514 - protein, 481 aa, Homo Sapiens
MGKGRAGRVGTTALPPRLKEMKSQESAAGSKLVLRCETSSEYSSLRFKWFKNGNELNRKNKPQNIKIQKKPGKSELRINKASLADSGEYMCKVISKLGNDSASANITIVESNEIITGMPASTEGAYVSSATSTSTTGTSHLVKCAEKEKTFCVNGGECFMVKDLSNPSRYLCKCPNEFTGDRCQNYVMASFYKHLGIEFMEAEELYQKRVLTITGICIALLVVGIMCVVAYCKTKKQRKKLHDRLRQSLRSERNNMMNIANGPHHPNPPPENVQLVNQYVSKNVISSEHIVEREAETSFSTSHYTSTAHHSTTVTQTPSHSWSNGHTESILSESHSVIVMSSVENSRHSSPTGGPRGRLNGTGGPRECNSFLRHARETPDSYRDSPHSERYVSAMTTPARMSPVDFHTPSSPKSPPSEMSPPVSSMTVSMPSMAVSPFMEEERPLLLVTPPRLREKKFDHHPQQFSSFHHNPAHDSNSLPA

SEQ ID NO: 9515 - protein, 193 aa, Homo Sapiens
MKKRNEMIFLATLKNKALPPRLKEMKSQESAAGSKLVLRCETSSEYSSLRFKWFKNGNELNRKNKPQNIKIQKKPGKSELRINKASLADSGEYMCKVISKLGNDSASANITIVESNEIITGMPASTEGAYVSSESPIRISVSTEGANTSSSTSTSTTGTSHLVKCAEKEKTFCVNGGECFMVKDLSNPSRYLC

SEQ ID NO: 9516 - protein, 135 aa, Homo Sapiens
MQIPKHISIEDITATSTSTTGTSHLVKCAEKEKTFCVNGGECFMVKDLSNPSRYLCKCPNEFTGDRCQNYVMASFYKAEELYQKRVLTITGICIALLVVGIMCVVAYCKTKKQRKKLHDRLRQSLRSERNNMMNI

SEQ ID NO: 9517 - protein, 101 aa, Homo Sapiens
MQIPKHISIEDITATSTSTTGTSHLVKCAEKEKTFCVNGGECFMVKDLSNPSRYLCKCPNEFTGDRCQNYVMASFYKHLGIEFMEAEELYQKRVLTITGIC

SEQ ID NO: 9518 - protein, 129 aa, Homo Sapiens
MQIPKHISIEDITATSTSTTGTSHLVKCAEKEKTFCVNGGECFMVKDLSNPSRYLCKCQPGFTGARCTENVPMKVQNQEKAEELYQKRVLTITGICIALLVVGIMCVVAYCKTKKQRKKLHDRLRQSLR

SEQ ID NO: 9519 - protein, 308 aa, Homo Sapiens
MQIPKHISIEDITATSTSTTGTSHLVKCAEKEKTFCVNGGECFMVKDLSNPSRYLCKCQPGFTGARCTENVPMKVQNQEKAEELYQKRVLTITGICIALLVVGIMCVVAYCKTKKQRKKLHDRLRQSLRSERNNMMNIANGPHHPNPPPENVQLVNQYVSKNVISSEHIVEREAETSFSTSHYTSTAHHSTTVTQTPSHSWSNGHTESILSESHSVIVMSSVENSRHSSPTGGPRGRLNGTGGPRECNSFLRHARETPDSYRDSPHSERHNLIAELRRNKAHRSKCMQIQLSATHLRSSSIPHLGFIL

SEQ ID NO: 9520 - protein, 254 aa, Homo Sapiens [sequence omitted]

SEQ ID NO: 9521 - protein, 422 aa, Homo Sapiens
MRWRRAPRRSGRPGPRAQRPGSAARSSPPLPLLPLLLLLGTAALAPGAAAGNEAAPAGASVCYSSPPSVGSVQELAQRAAVVIEGKVHPQRRQQGALDRKAAAAAGEAGAWGGDREPPAAGPRALGPPAEEPLLAANGTVPSWPTAPVPSAGEPGEEAPYLVKVHQVWAVKAGGLKKDSLLTVRLGTWGHPAFPSCGRLKEDSRYIFFMEPDANSTSRAPAAFRASFPPLETGRNLKKEVSRVLCKRCALPPRLKEMKSQESAAGSKLVLRCETSSEYSSLRFKWFKNGNELNRKNKPQNIKIQKKPGKSELRINKASLADSGEYMCKVISKLGNDSASANITIVESNATSTSTTGTSHLVKCAEKEKTFCVNGGECFMVKDLSNPSRYLCKCPNEFTGDRCQNYVMASFYSTSTPFLSLPE

SEQ ID NO: 9522 - protein, 637 aa, Homo Sapiens
MSERKEGRGKGKGKKKERGSGKKPESAAGSQSPALPPRLKEMKSQESAAGSKLVLRCETSSEYSSLRFKWFKNGNELNRKNKPQNIKIQKKPGKSELRINKASLADSGEYMCKVISKLGNDSASANITIVESNEIITGMPASTEGAYVSSESPIRISVSTEGANTSSSTSTSTTGTSHLVKCAEKEKTFCVNGGECFMVKDLSNPSRYLCKCPNEFTGDRCQNYVMASFYKAEELYQKRVLTITGICIALLVVGIMCVVAYCKTKKQRKKLHDRLRQSLRSERNNMMNIANGPHHPNPPPENVQLVNQYVSKNVISSEHIVEREAETSFSTSHYTSTAHHSTTVTQTPSHSWSNGHTESILSESHSVIVMSSVENSRHSSPTGGPRGRLNGTGGPRECNSFLRHARETPDSYRDSPHSERYVSAMTTPARMSPVDFHTPSSPKSPPSEMSPPVSSMTVSMPSMAVSPFMEEERPLLLVTPPRLREKKFDHHPQQFSSFHHNPAHDSNSLPASPLRIVEDEEYETTQEYEPAQEPVKKLANSRRAKRTKPNGHIANRLEVDSNTSSQSSNSESETEDERVGEDTPFLGIQNPLAASLEATPAFRLADSRTNPAGRFSTQEEIQARLSSVIANQDPIAV

SEQ ID NO: 9523 - protein, 420 aa, Homo Sapiens
MSERKEGRGKGKGKKKERGSGKKPESAAGSQSPALPPRLKEMKSQESAAGSKLVLRCETSSEYSSLRFKWFKNGNELNRKNKPQNIKIQKKPGKSELRINKASLADSGEYMCKVISKLGNDSASANITIVESNEIITGMPASTEGAYVSSESPIRISVSTEGANTSSSTSTSTTGTSHLVKCAEKEKTFCVNGGECFMVKDLSNPSRYLCKCPNEFTGDRCQNYVMASFYKAEELYQKRVLTITGICIALLVVGIMCVVAYCKTKKQRKKLHDRLRQSLRSERNNMMNIANGPHHPNPPPENVQLVNQYVSKNVISSEHIVEREAETSFSTSHYTSTAHHSTTVTQTPSHSWSNGHTESILSESHSVIVMSSVENSRHSSPTGGPRGRLNGTGGPRECNSFLRHARETPDSYRDSPHSER

SEQ ID NO: 9524 - protein, 645 aa, Homo Sapiens
MSERKEGRGKGKGKKKERGSGKKPESAAGSQSPALPPRLKEMKSQESAAGSKLVLRCETSSEYSSLRFKWFKNGNELNRKNKPQNIKIQKKPGKSELRINKASLADSGEYMCKVISKLGNDSASANITIVESNEIITGMPASTEGAYVSSESPIRISVSTEGANTSSSTSTSTTGTSHLVKCAEKEKTFCVNGGECFMVKDLSNPSRYLCKCPNEFTGDRCQNYVMASFYKHLGIEFMEAEELYQKRVLTITGICIALLVVGIMCVVAYCKTKKQRKKLHDRLRQSLRSERNNMMNIANGPHHPNPPPENVQLVNQYVSKNVISSEHIVEREAETSFSTSHYTSTAHHSTTVTQTPSHSWSNGHTESILSESHSVIVMSSVENSRHSSPTGGPRGRLNGTGGPRECNSFLRHARETPDSYRDSPHSERYVSAMTTPARMSPVDFHTPSSPKSPPSEMSPPVSSMTVSMPSMAVSPFMEEERPLLLVTPPRLREKKFDHHPQQFSSFHHNPAHDSNSLPASPLRIVEDEEYETTQEYEPAQEPVKKLANSRRAKRTKPNGHIANRLEVDSNTSSQSSNSESETEDERVGEDTPFLGIQNPLAASLEATPAFRLADSRTNPAGRFSTQEEIQARLSSVIANQDPIAV

SEQ ID NO: 9525 - protein, 640 aa, Homo Sapiens
MSERKEGRGKGKGKKKERGSGKKPESAAGSQSPALPPRLKEMKSQESAAGSKLVLRCETSSEYSSLRFKWFKNGNELNRKNKPQNIKIQKKPGKSELRINKASLADSGEYMCKVISKLGNDSASANITIVESNEIITGMPASTEGAYVSSESPIRISVSTEGANTSSSTSTSTTGTSHLVKCAEKEKTFCVNGGECFMVKDLSNPSRYLCKCQPGFTGARCTENVPMKVQNQEKAEELYQKRVLTITGICIALLVVGIMCVVAYCKTKKQRKKLHDRLRQSLRSERNNMMNIANGPHHPNPPPENVQLVNQYVSKNVISSEHIVEREAETSFSTSHYTSTAHHSTTVTQTPSHSWSNGHTESILSESHSVIVMSSVENSRHSSPTGGPRGRLNGTGGPRECNSFLRHARETPDSYRDSPHSERYVSAMTTPARMSPVDFHTPSSPKSPPSEMSPPVSSMTVSMPSMAVSPFMEEERPLLLVTPPRLREKKFDHHPQQFSSFHHNPAHDSNSLPASPLRIVEDEEYETTQEYEPAQEPVKKLANSRRAKRTKPNGHIANRLEVDSNTSSQSSNSESETEDERVGEDTPFLGIQNPLAASLEATPAFRLADSRTNPAGRFSTQEEIQARLSSVIANQDPIAV

SEQ ID NO: 9526 - protein, 462 aa, Homo Sapiens
MSERKEGRGKGKGKKKERGSGKKPESAAGSQSPALPPRLKEMKSQESAAGSKLVLRCETSSEYSSLRFKWFKNGNELNRKNKPQNIKIQKKPGKSELRINKASLADSGEYMCKVISKLGNDSASANITIVESNEIITGMPASTEGAYVSSESPIRISVSTEGANTSSSTSTSTTGTSHLVKCAEKEKTFCVNGGECFMVKDLSNPSRYLCKCQPGFTGARCTENVPMKVQNQEKAEELYQKRVLTITGICIALLVVGIMCVVAYCKTKKQRKKLHDRLRQSLRSERNNMMNIANGPHHPNPPPENVQLVNQYVSKNVISSEHIVEREAETSFSTSHYTSTAHHSTTVTQTPSHSWSNGHTESILSESHSVIVMSSVENSRHSSPTGGPRGRLNGTGGPRECNSFLRHARETPDSYRDSPHSERHNLIAELRRNKAHRSKCMQIQLSATHLRSSSIPHLGFIL

SEQ ID NO: 9527 - protein, 196 aa, Homo Sapiens
PQTEDGRTPGLVGLAVPCCACLEAERLRGCLNSEKICIVPILACLVSLCLCIAGLKWVFVDKIFEYDSPTHLDPGGLGQDPIISLDATAASAVWVSSEAYTSPVSRAQSESEVQVTVQGDKAVVSFEPSAAPTPKNRIFAFSFLPSTAPSFPSPTRNPEVRTPKSATQPQTTETNLQTAPKLCAQMSLLVIAAKTT

SEQ ID NO: 9528 - protein, 713 aa, Homo Sapiens
VPSAGEPGEEAPYLVKVHQVWAVKAGGLKKDSLLTVRLGTWGHPAFPSCGRLKEDSRYIFFMEPDANSTSRAPAAFRASFPPLETGRNLKKEVSRVLCKRCALPPRLKEMKSQESAAGSKLVLRCETSSEYSSLRFKWFKNGNELNRKNKPQNIKIQKKPGKSELRINKASLADSGEYMCKVISKLGNDSASANITIVESNEIITGMPASTEGAYVSSESPIRISVSTEGANTSSSTSTSTTGTSHLVKCAEKEKTFCVNGGECFMVKDLSNPSRYLCKCPNEFTGDRCQNYVMASFYKHLGIEFMEAEELYQKRVLTITGICIALLVVGIMCVVAYCKTKKQRKKLHDRLRQSLRSERNNMMNIANGPHHPNPPPENVQLVNQYVSKNVISSEHIVEREAETSFSTSHYTSTAHHSTTVTQTPSHSWSNGHTESILSESHSVIVMSSVENSRHSSPTGGPRGRLNGTGGPRECNSFLRHARETPDSYRDSPHSERYVSAMTTPARMSPVDFHTPSSPKSPPSEMSPPVSSMTVSMPSMAVSPFMEEERPLLLVTPPRLREKKFDHHPQQFSSFHHNPAHDSNSLPASPLRIVEDEEYETTQEYEPAQEPVKKLANSRRAKRTKPNGHIANRLEVDSNTSSQSSNSESETEDERVGEDTPFLGIQNPLAASLEATPAFRLADSRTNPAGRFSTQEEIQARLSSVIANQDPIAV

SEQ ID NO: 9529 - protein, 126 aa, Homo Sapiens
  misc_feature (1)..(1): Xaa can be any naturally occurring amino acid
XASANITIVESNEIITGMPASTEGAYVSSESPIRISVSTEGANTSSSTSTSTTGTSHLVKCAEKEKTFCVNGGECFMVKDLSNPSRYLCKCQPGFTGARCTENVPMKVQNQESAQMSLLVIAAKTT

SEQ ID NO: 9530 - protein, 165 aa, Homo Sapiens
MMRCCRRRCCCRQPPHALRPLLLLPLVLLPPLAAAAAGPNRCDTIYQGFAECLIRLGDSMGRGGELETICRSWNDFHACASQVLSGCPEEAAAVWESLQQEARQAPRPNNLHTLCGAPVHVRERGTGSETNQETLRATAPALPMAPAPPLLAAALALAYLLRPLA

SEQ ID NO: 9531 - protein, 87 aa, Homo Sapiens
MTSMPVPLRSCQAVRRRQLQCGNHYSKKLARPPVRITCTLCAVPRCMFGSAAQAPKPTRRRCGLQRLHSPWPLRPHCWRLLWLWPTS

SEQ ID NO: 9532 - protein, 88 aa, Homo Sapiens
  misc_feature (1)..(1): Xaa can be any naturally occurring amino acid
XRCCRRRCCCRQPPHALRPLLLLPLVLLPPLAAAAAGPNRCDTIYQGFAECLIRLGDSMGRGGELETICSTVDKEYLIVLREPGGWMS

SEQ ID NO: 9533 - protein, 923 aa, Homo Sapiens
MERGLPLLCAVLALVLAPAGAFRNDKCGDTIKIESPGYLTSPGYPHSYHPSEKCEWLIQAPDPYQRIMINFNPHFDLEDRDCKYDYVEVFDGENENGHFRGKFCGKIAPPPVVSSGPFLFIKFVSDYETHGAGFSIRYEIFKRGPECSQNYTTPSGVIKSPGFPEKYPNSLECTYIVFVPKMSEIILEFESFDLEPDSNPPGGMFCRYDRLEIWDGFPDVGPHIGRYCGQKTPGRIRSSSGILSMVFYTDSAIAKEGFSANYSVLQSSVSEDFKCMEALGMESGEIHSDQITASSQYSTNWSAERSRLNYPENGWTPGEDSYREWIQVDLGLLRFVTAVGTQGAISKETKKKYYVKTYKIDVSSNGEDWITIKEGNKPVLFQGNTNPTDVVVAVFPKPLITRFVRIKPATWETGISMRFEVYGCKITDYPCSGMLGMVSGLISDSQITSSNQGDRNWMPENIRLVTSRSGWALPPAPHSYINEWLQIDLGEEKIVRGIIIQGGKHRENKVFMRKFKIGYSNNGSDWKMIMDDSKRKAKSFEGNNNYDTPELRTFPALSTRFIRIYPERATHGGLGLRMELLGCEVEAPTAGPTTPNGNLVDECDDDQANCHSGTGDDFQLTGGTTVLATEKPTVIDSTIQSEFPTYGFNCEFGWGSHKTFCHWEHDNHVQLKWSVLTSKTGPIQDHTGDGNFIYSQADENQKGKVARLVSPVVYSQNSAHCMTFWYHMSGSHVGTLRVKLRYQKPEEYDQLVWMAIGHQGDHWKEGRVLLHKSLKLYQVIFEGEIGKGNLGGIAVDDISINNHISQEDCAKPADLDKKNPEIKIDETGSTPGYEGEGEGDKNISRKPGNVLKTLDPILITIIAMSALGVLLGAVCGVVLYCACWHNGMSERNLSALENYNFELVDGVKLKKDKLNTQSTYSEA

SEQ ID NO: 9534 - protein, 641 aa, Homo Sapiens
MERGLPLLCAVLALVLAPAGAFRNDKCGDTIKIESPGYLTSPGYPHSYHPSEKCEWLIQAPDPYQRIMINFNPHFDLEDRDCKYDYVEVFDGENENGHFRGKFCGKIAPPPVVSSGPFLFIKFVSDYETHGAGFSIRYEIFKRGPECSQNYTTPSGVIKSPGFPEKYPNSLECTYIVFVPKMSEIILEFESFDLEPDSNPPGGMFCRYDRLEIWDGFPDVGPHIGRYCGQKTPGRIRSSSGILSMVFYTDSAIAKEGFSANYSVLQSSVSEDFKCMEALGMESGEIHSDQITASSQYSTNWSAERSRLNYPENGWTPGEDSYREWIQVDLGLLRFVTAVGTQGAISKETKKKYYVKTYKIDVSSNGEDWITIKEGNKPVLFQGNTNPTDVVVAVFPKPLITRFVRIKPATWETGISMRFEVYGCKITDYPCSGMLGMVSGLISDSQITSSNQGDRNWMPENIRLVTSRSGWALPPAPHSYINEWLQIDLGEEKIVRGIIIQGGKHRENKVFMRKFKIGYSNNGSDWKMIMDDSKRKAKSFEGNNNYDTPELRTFPALSTRFIRIYPERATHGGLGLRMELLGCEVEGTINTDQECPCARALAKDAKKKKRWADSTHCRCVRSIHGEMWSSGKGVCSLDANL

SEQ ID NO: 9535 - protein, 704 aa, Homo Sapiens
MERGLPLLCAVLALVLAPAGAFRNDKCGDTIKIESPGYLTSPGYPHSYHPSEKCEWLIQAPDPYQRIMINFNPHFDLEDRDCKYDYVEVFDGENENGHFRGKFCGKIAPPPVVSSGPFLFIKFVSDYETHGAGFSIRYEIFKRGPECSQNYTTPSGVIKSPGFPEKYPNSLECTYIVFVPKMSEIILEFESFDLEPDSNPPGGMFCRYDRLEIWDGFPDVGPHIGRYCGQKTPGRIRSSSGILSMVFYTDSAIAKEGFSANYSVLQSSVSEDFKCMEALGMESGEIHSDQITASSQYSTNWSAERSRLNYPENGWTPGEDSYREWIQVDLGLLRFVTAVGTQGAISKETKKKYYVKTYKIDVSSNGEDWITIKEGNKPVLFQGNTNPTDVVVAVFPKPLITRFVRIKPATWETGISMRFEVYGCKITDYPCSGMLGMVSGLISDSQITSSNQGDRNWMPENIRLVTSRSGWALPPAPHSYINEWLQIDLGEEKIVRGIIIQGGKHRENKVFMRKFKIGYSNNGSDWKMIMDDSKRKAKSFEGNNNYDTPELRTFPALSTRFIRIYPERATHGGLGLRMELLGCEVEAPTAGPTTPNGNLVDECDDDQANCHSGTGDDFQLTGAETIFIPLLYHFSSCLSWDQLTPVCVLVTPHGRELPRNRSCLARTRASSFPHVIWIDELFLIATTICNNNLSHFESQRLGLS

SEQ ID NO: 9536 - protein, 644 aa, Homo Sapiens
MERGLPLLCAVLALVLAPAGAFRNDKCGDTIKIESPGYLTSPGYPHSYHPSEKCEWLIQAPDPYQRIMINFNPHFDLEDRDCKYDYVEVFDGENENGHFRGKFCGKIAPPPVVSSGPFLFIKFVSDYETHGAGFSIRYEIFKRGPECSQNYTTPSGVIKSPGFPEKYPNSLECTYIVFVPKMSEIILEFESFDLEPDSNPPGGMFCRYDRLEIWDGFPDVGPHIGRYCGQKTPGRIRSSSGILSMVFYTDSAIAKEGFSANYSVLQSSVSEDFKCMEALGMESGEIHSDQITASSQYSTNWSAERSRLNYPENGWTPGEDSYREWIQVDLGLLRFVTAVGTQGAISKETKKKYYVKTYKIDVSSNGEDWITIKEGNKPVLFQGNTNPTDVVVAVFPKPLITRFVRIKPATWETGISMRFEVYGCKITDYPCSGMLGMVSGLISDSQITSSNQGDRNWMPENIRLVTSRSGWALPPAPHSYINEWLQIDLGEEKIVRGIIIQGGKHRENKVFMRKFKIGYSNNGSDWKMIMDDSKRKAKSFEGNNNYDTPELRTFPALSTRFIRIYPERATHGGLGLRMELLGCEVEAPTAGPTTPNGNLVDECDDDQANCHSGTGDDFQLTGGTTVLATEKPTVIDSTIQSGIK

SEQ ID NO: 9537 - protein, 923 aa, Homo Sapiens; identical to SEQ ID NO: 9533

SEQ ID NO: 9538 - protein, 609 aa, Homo Sapiens
MERGLPLLCAVLALVLAPAGAFRNDKCGDTIKIESPGYLTSPGYPHSYHPSEKCEWLIQAPDPYQRIMINFNPHFDLEDRDCKYDYVEVFDGENENGHFRGKFCGKIAPPPVVSSGPFLFIKFVSDYETHGAGFSIRYEIFKRGPECSQNYTTPSGVIKSPGFPEKYPNSLECTYIVFVPKMSEIILEFESFDLEPDSNPPGGMFCRYDRLEIWDGFPDVGPHIGRYCGQKTPGRIRSSSGILSMVFYTDSAIAKEGFSANYSVLQSSVSEDFKCMEALGMESGEIHSDQITASSQYSTNWSAERSRLNYPENGWTPGEDSYREWIQVDLGLLRFVTAVGTQGAISKETKKKYYVKTYKIDVSSNGEDWITIKEGNKPVLFQGNTNPTDVVVAVFPKPLITRFVRIKPATWETGISMRFEVYGCKITDYPCSGMLGMVSGLISDSQITSSNQGDRNWMPENIRLVTSRSGWALPPAPHSYINEWLQIDLGEEKIVRGIIIQGGKHRENKVFMRKFKIGYSNNGSDWKMIMDDSKRKAKSFEGNNNYDTPELRTFPALSTRFIRIYPERATHGGLGLRMELLGCEVEGGTTVLATEKPTVIDSTIQSGIK

SEQ ID NO: 9539 - protein, 597 aa, Homo Sapiens
MERGLPLLCAVLALVLAPAGAFRNDKCGDTIKIESPGYLTSPGYPHSYHPSEKCEWLIQAPDPYQRIMINFNPHFDLEDRDCKYDYVEVFDGENENGHFRGKFCGKIAPPPVVSSGPFLFIKFVSDYETHGAGFSIRYEIFKRGPECSQNYTTPSGVIKSPGFPEKYPNSLECTYIVFVPKMSEIILEFESFDLEPDSNPPGGMFCRYDRLEIWDGFPDVGPHIGRYCGQKTPGRIRSSSGILSMVFYTDSAIAKEGFSANYSVLQSSVSEDFKCMEALGMESGEIHSDQITASSQYSTNWSAERSRLNYPENGWTPGEDSYREWIQVDLGLLRFVTAVGTQGAISKETKKKYYVKTYKIDVSSNGEDWITIKEGNKPVLFQGNTNPTDVVVAVFPKPLITRFVRIKPATWETGISMRFEVYGCKITDYPCSGMLGMVSGLISDSQITSSNQGDRNWMPENIRLVTSRSGWALPPAPHSYINEWLQIDLGEEKIVRGIIIQGGKHRENKVFMRKFKIGYSNNGSDWKMIMDDSKRKAKVRAGDWEEVIPYVLDFNQGPLAFSRGRASYFLPAMTLEEVCDGVSKTLDSRKTGIWHEK

SEQ ID NO: 9540 - protein, 906 aa, Homo Sapiens
MERGLPLLCAVLALVLAPAGAFRNDKCGDTIKIESPGYLTSPGYPHSYHPSEKCEWLIQAPDPYQRIMINFNPHFDLEDRDCKYDYVEVFDGENENGHFRGKFCGKIAPPPVVSSGPFLFIKFVSDYETHGAGFSIRYEIFKRGPECSQNYTTPSGVIKSPGFPEKYPNSLECTYIVFVPKMSEIILEFESFDLEPDSNPPGGMFCRYDRLEIWDGFPDVGPHIGRYCGQKTPGRIRSSSGILSMVFYTDSAIAKEGFSANYSVLQSSVSEDFKCMEALGMESGEIHSDQITASSQYSTNWSAERSRLNYPENGWTPGEDSYREWIQVDLGLLRFVTAVGTQGAISKETKKKYYVKTYKIDVSSNGEDWITIKEGNKPVLFQGNTNPTDVVVAVFPKPLITRFVRIKPATWETGISMRFEVYGCKITDYPCSGMLGMVSGLISDSQITSSNQGDRNWMPENIRLVTSRSGWALPPAPHSYINEWLQIDLGEEKIVRGIIIQGGKHRENKVFMRKFKIGYSNNGSDWKMIMDDSKRKAKSFEGNNNYDTPELRTFPALSTRFIRIYPERATHGGLGLRMELLGCEVEAPTAGPTTPNGNLVDECDDDQANCHSGTGDDFQLTGGTTVLATEKPTVIDSTIQSEFPTYGFNCEFGWGSHKTFCHWEHDNHVQLKWSVLTSKTGPIQDHTGDGNFIYSQADENQKGKVARLVSPVVYSQNSAHCMTFWYHMSGSHVGTLRVKLRYQKPEEYDQLVWMAIGHQGDHWKEGRVLLHKSLKLYQVIFEGEIGKGNLGGIAVDDISINNHISQEDCARSTPGYEGEGEGDKNISRKPGNVLKTLDPILITIIAMSALGVLLGAVCGVVLYCACWHNGMSERNLSALENYNFELVDGVKLKKDKLNTQSTYSEA

SEQ ID NO: 9541 - protein, 735 aa, Homo Sapiens
MSEIILEFESFDLEPDSNPPGGMFCRYDRLEIWDGFPDVGPHIGRYCGQKTPGRIRSSSGILSMVFYTDSAIAKEGFSANYSVLQSSVSEDFKCMEALGMESGEIHSDQITASSQYSTNWSAERSRLNYPENGWTPGEDSYREWIQVDLGLLRFVTAVGTQGAISKETKKKYYVKTYKIDVSSNGEDWITIKEGNKPVLFQGNTNPTDVVVAVFPKPLITRFVRIKPATWETGISMRFEVYGCKITDYPCSGMLGMVSGLISDSQITSSNQGDRNWMPENIRLVTSRSGWALPPAPHSYINEWLQIDLGEEKIVRGIIIQGGKHRENKVFMRKFKIGYSNNGSDWKMIMDDSKRKAKSFEGNNNYDTPELRTFPALSTRFIRIYPERATHGGLGLRMELLGCEVEAPTAGPTTPNGNLVDECDDDQANCHSGTGGTTVLATEKPTVIDSTIQSEFPTYGFNCEFGWGSHKTFCHWEHDNHVQLKWSVLTSKTGPIQDHTGDGNFIYSQADENQKGKVARLVSPVVYSQNSAHCMTFWYHMSGSHVGTLRVKLRYQKPEEYDQLVWMAIGHQGDHWKEGRVLLHKSLKLYQVIFEGEIGKGNLGGIAVDDISINNHISQEDCAKPADLDKKNPEIKIDETGSTPGYEGEGEGDKNISRKPGNVLKTLDPILITIIAMSALGVLLGAVCGVVLYCACWHNGMSERNLSALENYNFELVDGVKLKKDKLNTQSTYSEA

SEQ ID NO: 9542 - protein, 105 aa, Homo Sapiens
NHISQEDCARSTPGYEGEGEGDKNISRKPGNVLKTLDPILITIIAMSALGVLLGAVCGVVLYCACWHNGMSERNLSALENYNFELVDGVKLKKDKLNTQSTYSEA

SEQ ID NO: 9543 - protein, 60 aa, Homo Sapiens
  misc_feature (1)..(1): Xaa can be any naturally occurring amino acid
XINEWLQIDLGEEKIVRGIIIQGGKHRENKVFMRKFKIGYSNNGSDWKMIMDDSKRKALI

SEQ ID NO: 9544 - protein, 170 aa, Homo Sapiens
  misc_feature (1)..(1): Xaa can be any naturally occurring amino acid
XPGGMFCRYDRLEIWDGFPDVGPHIGRYCGQKTPGRIRSSSGILSMVFYTDSAIAKEGFSANYSVLQSSVSEDFKCMEALGMESGEIHSDQITASSQYSTNWSAERSRLNYPENGWTPGEDSYREWIQDAKYRLRVSVVRSKSSSSSTSLEPRPLSSLKLSFFSYKIKIT

SEQ ID NO: 9545 - protein, 77 aa, Homo Sapiens
  misc_feature (1)..(1): Xaa can be any naturally occurring amino acid
XPTAGPTTPNGNLVDECDDDQANCHSGTGDDFQLTGGTTVLATEKPTVIDSTIQSARLEVSTLNLSLHNPPQQKALI

SEQ ID NO: 9546 - protein, 100 aa, Homo Sapiens
  misc_feature (1)..(1): Xaa can be any naturally occurring amino acid
XTHGGLGLRMELLGCEVEAPTAGPTTPNGNLVDECDDDQANCHSGTGDDFQLTGGTTVLATEKPTVIDSTIQSGSRFFKHHHKQQSMRPQNLHHNSILLL

SEQ ID NO: 9547 - protein, 102 aa, Homo Sapiens
MDMFPLTWVFLALYFSRHQVRGQPDPPCGGRLNSKDAGYITSPGYPQDYPSHQNCEWIVYAPEPNQKIVLNFNPHFEIEKHDCKYDFIEIRDGDSESADLLG

SEQ ID NO: 9548 - protein, 906 aa, Homo Sapiens
MDMFPLTWVFLALYFSRHQVRGQPDPPCGGRLNSKDAGYITSPGYPQDYPSHQNCEWIVYAPEPNQKIVLNFNPHFEIEKHDCKYDFIEIRDGDSESADLLGKHCGNIAPPTIISSGSMLYIKFTSDYARQGAGFSLRYEIFKTGSEDCSKNFTSPNGTIESPGFPEKYPHNLDCTFTILAKPKMEIILQFLIFDLEHDPLQVGEGDCKYDWLDIWDGIPHVGPLIGKYCGTKTPSELRSSTGILSLTFHTDMAVAKDGFSARYYLVHQEPLENFQCNVPLGMESGRIANEQISASSTYSDGRWTPQQSRLHGDDNGWTPNLDSNKEYLQVDLRFLTMLTAIATQGAISRETQNGYYVKSYKLEVSTNGEDWMVYRHGKNHKVFQANNDATEVVLNKLHAPLLTRFVRIRPQTWHSGIALRLELFGCRVTDAPCSNMLGMLSGLIADSQISASSTQEYLWSPSAARLVSSRSGWFPRIPQAQPGEEWLQVDLGTPKTVKGVIIQGARGGDSITAVEARAFVRKFKVSYSLNGKDWEYIQDPRTQQPKLFEGNMHYDTPDIRRFDPIPAQYVRVYPERWSPAGIGMRLEVLGCDWTDSKPTVETLGPTVKSEETTTPYPTEEEATECGENCSFEDDKDLQLPSGFNCNFDFLEEPCGWMYDHAKWLRTTWASSSSPNDRTFPDDRNFLRLQSDSQREGQYARLISPPVHLPRSPVCMEFQYQATGGRGVALQVVREASQESKLLWVIREDQGGEWKHGRIILPSYDMEYQIVFEGVIGKGRSGEIAIDDIRISTDVPLENCMEPISAFAGENFKGGTLLPGTEPTVDTVPMQPIPAYWYYVMAAGGAVLVLVSVALALVLHYHRFRYAAKKTDHSITYKTSHYTNGAPLAVEPTLTIKLEQDRGSHC

SEQ ID NO: 9549 - protein, 926 aa, Homo Sapiens
MDMFPLTWVFLALYFSRHQVRGQPDPPCGGRLNSKDAGYITSPGYPQDYPSHQNCEWIVYAPEPNQKIVLNFNPHFEIEKHDCKYDFIEIRDGDSESADLLGKHCGNIAPPTIISSGSMLYIKFTSDYARQGAGFSLRYEIFKTGSEDCSKNFTSPNGTIESPGFPEKYPHNLDCTFTILAKPKMEIILQFLIFDLEHDPLQVGEGDCKYDWLDIWDGIPHVGPLIGKYCGTKTPSELRSSTGILSLTFHTDMAVAKDGFSARYYLVHQEPLENFQCNVPLGMESGRIANEQISASSTYSDGRWTPQQSRLHGDDNGWTPNLDSNKEYLQVDLRFLTMLTAIATQGAISRETQNGYYVKSYKLEVSTNGEDWMVYRHGKNHKVFQANNDATEVVLNKLHAPLLTRFVRIRPQTWHSGIALRLELFGCRVTDAPCSNMLGMLSGLIADSQISASSTQEYLWSPSAARLVSSRSGWFPRIPQAQPGEEWLQVDLGTPKTVKGVIIQGARGGDSITAVEARAFVRKFKVSYSLNGKDWEYIQDPRTQQPKLFEGNMHYDTPDIRRFDPIPAQYVRVYPERWSPAGIGMRLEVLGCDWTDSKPTVETLGPTVKSEETTTPYPTEEEATECGENCSFEDDKDLQLPSGFNCNFDFLEEPCGWMYDHAKWLRTTWASSSSPNDRTFPDDRNFLRLQSDSQREGQYARLISPPVHLPRSPVCMEFQYQATGGRGVALQVVREASQESKLLWVIREDQGGEWKHGRIILPSYDMEYQIVFEGVIGKGRSGEIAIDDIRISTDVPLENCMEPISAFAVDIPEIHEREGYEDEIDDEYEVDWSNSSSATSGSGAPSTDKEKSWLYTLDPILITIIAMSSLGVLLGATCAGLLLYCTCSYSGLSSRSCTTLENYNFELYDGLKHKVKMNHQKCCSEA

SEQ ID NO: 9550 - protein, 931 aa, Homo Sapiens
MDMFPLTWVFLALYFSRHQVRGQPDPPCGGRLNSKDAGYITSPGYPQDYPSHQNCEWIVYAPEPNQKIVLNFNPHFEIEKHDCKYDFIEIRDGDSESADLLGKHCGNIAPPTIISSGSMLYIKFTSDYARQGAGFSLRYEIFKTGSEDCSKNFTSPNGTIESPGFPEKYPHNLDCTFTILAKPKMEIILQFLIFDLEHDPLQVGEGDCKYDWLDIWDGIPHVGPLIGKYCGTKTPSELRSSTGILSLTFHTDMAVAKDGFSARYYLVHQEPLENFQCNVPLGMESGRIANEQISASSTYSDGRWTPQQSRLHGDDNGWTPNLDSNKEYLQVDLRFLTMLTAIATQGAISRETQNGYYVKSYKLEVSTNGEDWMVYRHGKNHKVFQANNDATEVVLNKLHAPLLTRFVRIRPQTWHSGIALRLELFGCRVTDAPCSNMLGMLSGLIADSQISASSTQEYLWSPSAARLVSSRSGWFPRIPQAQPGEEWLQVDLGTPKTVKGVIIQGARGGDSITAVEARAFVRKFKVSYSLNGKDWEYIQDPRTQQPKLFEGNMHYDTPDIRRFDPIPAQYVRVYPERWSPAGIGMRLEVLGCDWTDSKPTVETLGPTVKSEETTTPYPTEEEATECGENCSFEDDKDLQLPSGFNCNFDFLEEPCGWMYDHAKWLRTTWASSSSPNDRTFPDDRNFLRLQSDSQREGQYARLISPPVHLPRSPVCMEFQYQATGGRGVALQVVREASQESKLLWVIREDQGGEWKHGRIILPSYDMEYQIVFEGVIGKGRSGEIAIDDIRISTDVPLENCMEPISAFAGENFKVDIPEIHEREGYEDEIDDEYEVDWSNSSSATSGSGAPSTDKEKSWLYTLDPILITIIAMSSLGVLLGATCAGLLLYCTCSYSGLSSRSCTTLENYNFELYDGLKHKVKMNHQKCCSEA

SEQ ID NO: 9551 - protein, 901 aa, Homo Sapiens
MDMFPLTWVFLALYFSRHQVRGQPDPPCGGRLNSKDAGYITSPGYPQDYPSHQNCEWIVYAPEPNQKIVLNFNPHFEIEKHDCKYDFIEIRDGDSESADLLGKHCGNIAPPTIISSGSMLYIKFTSDYARQGAGFSLRYEIFKTGSEDCSKNFTSPNGTIESPGFPEKYPHNLDCTFTILAKPKMEIILQFLIFDLEHDPLQVGEGDCKYDWLDIWDGIPHVGPLIGKYCGTKTPSELRSSTGILSLTFHTDMAVAKDGFSARYYLVHQEPLENFQCNVPLGMESGRIANEQISASSTYSDGRWTPQQSRLHGDDNGWTPNLDSNKEYLQVDLRFLTMLTAIATQGAISRETQNGYYVKSYKLEVSTNGEDWMVYRHGKNHKVFQANNDATEVVLNKLHAPLLTRFVRIRPQTWHSGIALRLELFGCRVTDAPCSNMLGMLSGLIADSQISASSTQEYLWSPSAARLVSSRSGWFPRIPQAQPGEEWLQVDLGTPKTVKGVIIQGARGGDSITAVEARAFVRKFKVSYSLNGKDWEYIQDPRTQQPKLFEGNMHYDTPDIRRFDPIPAQYVRVYPERWSPAGIGMRLEVLGCDWTDSKPTVETLGPTVKSEETTTPYPTEEEATECGENCSFEDDKDLQLPSGFNCNFDFLEEPCGWMYDHAKWLRTTWASSSSPNDRTFPDDRNFLRLQSDSQREGQYARLISPPVHLPRSPVCMEFQYQATGGRGVALQVVREASQESKLLWVIREDQGGEWKHGRIILPSYDMEYQIVFEGVIGKGRSGEIAIDDIRISTDVPLENCMEPISAFAGGTLLPGTEPTVDTVPMQPIPAYWYYVMAAGGAVLVLVSVALALVLHYHRFRYAAKKTDHSITYKTSHYTNGAPLAVEPTLTIKLEQDRGSHC

SEQ ID NO: 9552 - protein, 555 aa, Homo Sapiens
MDMFPLTWVFLALYFSRHQVRGQPDPPCGGRLNSKDAGYITSPGYPQDYPSHQNCEWIVYAPEPNQKIVLNFNPHFEIEKHDCKYDFIEIRDGDSESADLLGKHCGNIAPPTIISSGSMLYIKFTSDYARQGAGFSLRYEIFKTGSEDCSKNFTSPNGTIESPGFPEKYPHNLDCTFTILAKPKMEIILQFLIFDLEHDPLQVGEGDCKYDWLDIWDGIPHVGPLIGKYCGTKTPSELRSSTGILSLTFHTDMAVAKDGFSARYYLVHQEPLENFQCNVPLGMESGRIANEQISASSTYSDGRWTPQQSRLHGDDNGWTPNLDSNKEYLQVDLRFLTMLTAIATQGAISRETQNGYYVKSYKLEVSTNGEDWMVYRHGKNHKVFQANNDATEVVLNKLHAPLLTRFVRIRPQTWHSGIALRLELFGCRVTDAPCSNMLGMLSGLIADSQISASSTQEYLWSPSAARLVSSRSGWFPRIPQAQPGEEWLQVDLGTPKTVKGVIIQGARGGDSITAVEARAFVRKFKVSYSLNGKDWEYIQDPRTQQPKVGCSWRPL

SEQ ID NO: 9553 - protein, 909 aa, Homo Sapiens
MDMFPLTWVFLALYFSRHQVRGQPDPPCGGRLNSKDAGYITSPGYPQDYPSHQNCEWIVYAPEPNQKIVLNFNPHFEIEKHDCKYDFIEIRDGDSESADLLGKHCGNIAPPTIISSGSMLYIKFTSDYARQGAGFSLRYEIFKTGSEDCSKNFTSPNGTIESPGFPEKYPHNLDCTFTILAKPKMEIILQFLIFDLEHDPLQVGEGDCKYDWLDIWDGIPHVGPLIGKYCGTKTPSELRSSTGILSLTFHTDMAVAKDGFSARYYLVHQEPLENFQCNVPLGMESGRIANEQISASSTYSDGRWTPQQSRLHGDDNGWTPNLDSNKEYLQVDLRFLTMLTAIATQGAISRETQNGYYVKSYKLEVSTNGEDWMVYRHGKNHKVFQANNDATEVVLNKLHAPLLTRFVRIRPQTWHSGIALRLELFGCRVTDAPCSNMLGMLSGLIADSQISASSTQEYLWSPSAARLVSSRSGWFPRIPQAQPGEEWLQVDLGTPKTVKGVIIQGARGGDSITAVEARAFVRKFKVSYSLNGKDWEYIQDPRTQQPKLFEGNMHYDTPDIRRFDPIPAQYVRVYPERWSPAGIGMRLEVLGCDWTDSKPTVETLGPTVKSEETTTPYPTEEEATECGENCSFEDDKDLQLPSGFNCNFDFLEEPCGWMYDHAKWLRTTWASSSSPNDRTFPDDRNFLRLQSDSQREGQYARLISPPVHLPRSPVCMEFQYQATGGRGVALQVVREASQESKLLWVIREDQGGEWKHGRIILPSYDMEYQIVFEGVIGKGRSGEIAIDDIRISTDVPLENCMEPISAFADEYEVDWSNSSSATSGSGAPSTDKEKSWLYTLDPILITIIAMSSLGVLLGATCAGLLLYCTCSYSGLSSRSCTTLENYNFELYDGLKHKVKMNHQKCCSEA

SEQ ID NO: 9554 - protein, 197 aa, Homo Sapiens
MQRWKAAALASVLCSSVLSIWMCREGLLLSHRLGPALVPLHRLPRTLDARIARLAQYRALLQGAPDAMELRELTPWAGRPPGPRRRAGPRRRRARARLGARPCGLRELEVRVSELGLGYASDETVLFRYCAGACEAAARVYDLGLRRLRQRRRLRRERVRAQPCCRPTAYEDEVSFLDAHSRYHTVHELSARECACV

SEQ ID NO: 9555 - protein, 214 aa, Homo Sapiens [sequence omitted]

SEQ ID NO: 9556 - protein, 851 aa, Homo Sapiens
GKEEYIATFKGSEYFCYDLSQNPIQSSSDEITLSFKTLQRNGLMLHTGKSADYVNLALKNGAVSLVINLGSGAFEALVEPVNGKFNDNAWHDVKVTRNLRQHSGIGHAMVNKLHCSVTISVDGILTTTGYTQEDYTMLGSDDFFYVGGSPSTADLPGSPVSNNFMGCLKEVVYKNNDVRLELSRLAKQGDPKMKIHGVVAFKCENVATLDPITFETPESFISLPKWNAKKTGSISFDFRTTEPNGLILFSHGKPRHQKDAKHPQMIKVDFFAIEMLDGHLYLLLDMGSGTIKIKALLKKVNDGEWYHVDFQRDGRSGTISVNTLRTPYTAPGESEILDLDDELYLGGLPENKAGLVFPTEVWTALLNYGYVGCIRDLFIDGQSKDIRQMAEVQSTAGVKPSCSKETAKPCLSNPCKNNGMCRDGWNRYVCDCSGTGYLGRSCEREATVLSYDGSMFMKIQLPVVMHTEAEDVSLRFRSQRAYGILMATTSRDSADTLRLELDAGRVKLTVNLDCIRINCNSSKGPETLFAGYNLNDNEWHTVRVVRRGKSLKLTVDDQQAMTGQMAGDHTRLEFHNIETGIITERRYLSSVPSNFIGHLQSLTFNGMAYIDLCKNGDIDYCELNARFGFRNIIADPVTFKTKSSYVALATLQAYTSMHLFFQFKTTSLDGLILYNSGDGNDFIVVELVKGYLHYVFDLGNGANLIKGSSNKPLNDNQWHNVMISRDTSNLHTVKIDTKITTQITAGARNLDLKSDLYIGGVAKETYKSLPKLVHAKEGFQGCLASVDLNGRLPDLISDALFCNGQIERGCEGPSTTCQEDSCSNQGVCLQQWDGFSCDCSMTSFSGPLCND

SEQ ID NO: 9557 - protein, 836 aa, Homo Sapiens
GKEEYIATFKGSEYFCYDLSQNPIQSSSDEITLSFKTLQRNGLMLHTGKSADYVNLALKNGAVSLVINLGSGAFEALVEPVNGKFNDNAWHDVKVTRNLRQVTISVDGILTTTGYTQEDYTMLGSDDFFYVGGSPSTADLPGSPVSNNFMGCLKEVVYKNNDVRLELSRLAKQGDPKMKIHGVVAFKCENVATLDPITFETPESFISLPKWNAKKTGSISFDFRTTEPNGLILFSHGKPRHQKDAKHPQMIKVDFFAIEMLDGHLYLLLDMGSGTIKIKALLKKVNDGEWYHVDFQRDGRSGTISVNTLRTPYTAPGESEILDLDDELYLGGLPENKAGLVFPTEVWTALLNYGYVGCIRDLFIDGQSKDIRQMAEVQSTAGVKPSCSKETAKPCLSNPCKNNGMCRDGWNRYVCDCSGTGYLGRSCEREATVLSYDGSMFMKIQLPVVMHTEAEDVSLRFRSQRAYGILMATTSRDSADTLRLELDAGRVKLTVNLDCIRINCNSSKGPETLFAGYNLNDNEWHTVRVVRRGKSLKLTVDDQQAMTGQMAGDHTRLEFHNIETGIITERRYLSSVPSNFIGHLQSLTFNGMAYIDLCKNGDIDYCELNARFGFRNIIADPVTFKTKSSYVALATLQAYTSMHLFFQFKTTSLDGLILYNSGDGNDFIVVELVKGYLHYVFDLGNGANLIKGSSNKPLNDNQWHNVMISRDTSNLHTVKIDTKITTQITAGARNLDLKSDLYIGGVAKETYKSLPKLVHAKEGFQGCLASVDLNGRLPDLISDALFCNGQIERGCEGPSTTCQEDSCSNQGVCLQQWDGFSCDCSMTSFSGPLCND

SEQ ID NO: 9558 - protein, 198 aa, Homo Sapiens
MAAENDANIAIVGNVRLVGEVPSSMTTESTATAMQSEMSTSIMETTTTLATSTARRGKPPTKEPISQTTDDILVASAECPSDDEDIDPCEPSSGGLANPTRAGGREPYPGSAEVIRESSSTTGMVVGIVAAAALCILILLYAMYKYRNRDEGSYHVDESRNYISNSAQSNGAVVKEKQPSSAKSSNKNKKNKDKEYYV

SEQ ID NO: 9559 - protein, 139 aa, Homo Sapiens
MDMRWHCENLQTTDDILVASAECPSDDEDIDPCEPSSANPTRAGGREPYPGSAEVIRESSSTTGMVVGIVAAAALCILILLYAMYKYRNRDEGSYHVDESRNYISNSAQSNGAVVKEKQPSSAKSSNKNKKNKDKEYYV

SEQ ID NO: 9560 - protein, 142 aa, Homo Sapiens
MDMRWHCENLQTTDDILVASAECPSDDEDIDPCEPSSGGLANPTRAGGREPYPGSAEVIRESSSTTGMVVGIVAAAALCILILLYAMYKYRNRDEGSYHVDESRNYISNSAQSNGAVVKEKQPSSAKSSNKNKKNKDKEYYV

SEQ ID NO: 9561 - protein, 62 aa, Homo Sapiens
MDMRWHCENLQTTDDILVASAECPSDDEDIDPCEPSSGTKQTMWKTSRDHRILPNARRERKD

SEQ ID NO: 9562 - protein, 143 aa, Homo Sapiens
MDMRWHCENLQVTTDDILVASAECPSDDEDIDPCEPSSGGLANPTRAGGREPYPGSAEVIRESSSTTGMVVGIVAAAALCILILLYAMYKYRNRDEGSYHVDESRNYISNSAQSNGAVVKEKQPSSAKSSNKNKKNKDKEYYV

SEQ ID NO: 9563 - protein, 1477 aa, Homo Sapiens
MGTALLQRGGCFLLCLSLLLLGCWAELGSGLEFPGAEGQWTRFPKWNACCESEMSFQLKTRSARGLVLYFDDEGFCDFLELILTRGGRLQLSFSIFCAEPATLLADTPVNDGAWHSVRIRRQFRNTTLFIDQVEAKWVEVKSKRRDMTVFSGLFVGGLPPELRAAALKLTLASVREREPFKGWIRDVRVNSSQVLPVDSGEVKLDDEPPNSGGGSPCEAGEEGEGGVCLNGGVCSVVDDQAVCDCSRTGFRGKDCSQEDNNVEGLAHLMMGDQGKSKGKEEYIATFKGSEYFCYDLSQNPIQSSSDEITLSFKTLQRNGLMLHTGKSADYVNLALKNGAVSLVINLGSGAFEALVEPVNGKFNDNAWHDVKVTRNLRQHSGIGHAMVTISVDGILTTTGYTQEDYTMLGSDDFFYVGGSPSTADLPGSPVSNNFMGCLKEVVYKNNDVRLELSRLAKQGDPKMKIHGVVAFKCENVATLDPITFETPESFISLPKWNAKKTGSISFDFRTTEPNGLILFSHGKPRHQKDAKHPQMIKVDFFAIEMLDGHLYLLLDMGSGTIKIKALLKKVNDGEWYHVDFQRDGRSGTISVNTLRTPYTAPGESEILDLDDELYLGGLPENKAGLVFPTEVWTALLNYGYVGCIRDLFIDGQSKDIRQMAEVQSTAGVKPSCSKETAKPCLSNPCKNNGMCRDGWNRYVCDCSGTGYLGRSCEREATVLSYDGSMFMKIQLPVVMHTEAEDVSLRFRSQRAYGILMATTSRDSADTLRLELDAGRVKLTVNLDCIRINCNSSKGPETLFAGYNLNDNEWHTVRVVRRGKSLKLTVDDQQAMTGQMAGDHTRLEFHNIETGIITERRYLSSVPSNFIGHLQSLTFNGMAYIDLCKNGDIDYCELNARFGFRNIIADPVTFKTKSSYVALATLQAYTSMHLFFQFKTTSLDGLILYNSGDGNDFIVVELVKGYLHYVFDLGNGANLIKGSSNKPLNDNQWHNVMISRDTSNLHTVKIDTKITTQITAGARNLDLKSDLYIGGVAKETYKSLPKLVHAKEGFQGCLASVDLNGRLPDLISDALFCNGQIERGCEGPSTTCQEDSCSNQGVCLQQWDGFSCDCSMTSFSGPLCNDPGTTYIFSKGGGQITYKWPPNDRPSTRADRLAIGFSTVQKEAVLVRVDSSSGLGDYLELHIHQGKIGVKFNVGTDDIAIEESNAIINDGKYHVVRFTRSGGNATLQVDSWPVIERYPAGRQLTIFNSQATIIIGGKEQGQPFQGQLSGLYYNGLKVLNMAAENDANIAIVGNVRLVGEVPSSMTTESTATAMQSEMSTSIMETTTTLATSTARRGKPPTKEPISQTTDDILVASAECPSDDEDIDPCEPSSGGLANPTRAGGREPYPGSAEVIRESSSTTGMVVGIVAAAALCILILLYAMYKYRNRDEGSYHVDESRNYISNSAQSNGAVVKEKQPSSAKSSNKNKKNKDKEYYV

SEQ ID NO: 9564 - protein, 278 aa, Homo Sapiens
MGTALLQRGGCFLLCLSLLLLGCWAELGSGLEFPGAEGQWTRFPKWNACCESEMSFQLKTRSARGLVLYFDDEGFCDFLELILTRGGRLQLSFSIFCAEPATLLADTPVNDGAWHSVRIRRQFRNTTLFIDQVEAKWVEVKSKRRDMTVFSGLFVGGLPPELRAAALKLTLASVREREPFKGWIRDVRVNSSQVLPVDSGEVKLDDEPPNSGGGSPCEAGEEGEGGVCLNGGVCSVVDDQAVCDCSRTGFRGKDCSQEDNNVEGLAHLMMGDQGKSKD

SEQ ID NO: 9565 - protein, 1547 aa, Homo Sapiens
MGTALLQRGGCFLLCLSLLLLGCWAELGSGLEFPGAEGQWTRFPKWNACCESEMSFQLKTRSARGLVLYFDDEGFCDFLELILTRGGRLQLSFSIFCAEPATLLADTPVNDGAWHSVRIRRQFRNTTLFIDQVEAKWVEVKSKRRDMTVFSGLFVGGLPPELRAAALKLTLASVREREPFKGWIRDVRVNSSQVLPVDSGEVKLDDEPPNSGGGSPCEAGEEGEGGVCLNGGVCSVVDDQAVCDCSRTGFRGKDCSQEIKFGLQCVLPVLLHDNDQGKYCCINTAKPLTEKDNNVEGLAHLMMGDQGKSKGKEEYIATFKGSEYFCYDLSQNPIQSSSDEITLSFKTLQRNGLMLHTGKSADYVNLALKNGAVSLVINLGSGAFEALVEPVNGKFNDNAWHDVKVTRNLRQHSGIGHAMVNKLHCSVTISVDGILTTTGYTQEDYTMLGSDDFFYVGGSPSTADLPGSPVSNNFMGCLKEVVYKNNDVRLELSRLAKQGDPKMKIHGVVAFKCENVATLDPITFETPESFISLPKWNAKKTGSISFDFRTTEPNGLILFSHGKPRHQKDAKHPQMIKVDFFAIEMLDGHLYLLLDMGSGTIKIKALLKKVNDGEWYHVDFQRDGRSGTISVNTLRTPYTAPGESEILDLDDELYLGGLPENKAGLVFPTEVWTALLNYGYVGCIRDLFIDGQSKDIRQMAEVQSTAGVKPSCSKETAKPCLSNPCKNNGMCRDGWNRYVCDCSGTGYLGRSCEREATVLSYDGSMFMKIQLPVVMHTEAEDVSLRFRSQRAYGILMATTSRDSADTLRLELDAGRVKLTVNLDCIRINCNSSKGPETLFAGYNLNDNEWHTVRVVRRGKSLKLTVDDQQAMTGQMAGDHTRLEFHNIETGIITERRYLSSVPSNFIGHLQSLTFNGMAYIDLCKNGDIDYCELNARFGFRNIIADPVTFKTKSSYVALATLQAYTSMHLFFQFKTTSLDGLILYNSGDGNDFIVVELVKGYLHYVFDLGNGANLIKGSSNKPLNDNQWHNVMISRDTSNLHTVKIDTKITTQITAGARNLDLKSDLYIGGVAKETYKSLPKLVHAKEGFQGCLASVDLNGRLPDLISDALFCNGQIERGCEGPSTTCQEDSCSNQGVCLQQWDGFSCDCSMTSFSGPLCNDPGTTYIFSKGGGQITYKWPPNDRPSTRADRLAIGFSTVQKEAVLVRVDSSSGLGDYLELHIHQGKIGVKFNVGTDDIAIEESNAIINDGKYHVVRFTRSGGNATLQVDSWPVIERYPAGNNDNERLAIARQRIPYRLGRVVDEWLLDKGRQLTIFNSQATIIIGGKEQGQPFQGQLSGLYYNGLKVLNMAAENDANIAIVGNVRLVGEVPSSMTTESTATAMQSEMSTSIMETTTTLATSTARRGKPPTKEPISQTTDDILVASAECPSDDEDIDPCEPSSGGLANPTRAGGREPYPGSAEVIRESSSTTGMVVGIVAAAALCILILLYAMYKYRNRDEGSYHVDESRNYISNSAQSNGAVVKEKQPSSAKSSNKNKKNKDKEYYV

SEQ ID NO: 9566 - protein, 1495 aa, Homo Sapiens
MGTALLQRGGCFLLCLSLLLLGCWAELGSGLEFPGAEGQWTRFPKWNACCESEMSFQLKTRSARGLVLYFDDEGFCDFLELILTRGGRLQLSFSIFCAEPATLLADTPVNDGAWHSVRIRRQFRNTTLFIDQVEAKWVEVKSKRRDMTVFSGLFVGGLPPELRAAALKLTLASVREREPFKGWIRDVRVNSSQVLPVDSGEVKLDDEPPNSGGGSPCEAGEEGEGGVCLNGGVCSVVDDQAVCDCSRTGFRGKDCSQEDNNVEGLAHLMMGDQGKEEYIATFKGSEYFCYDLSQNPIQSSSDEITLSFKTLQRNGLMLHTGKSADYVNLALKNGAVSLVINLGSGAFEALVEPVNGKFNDNAWHDVKVTRNLRQVTISVDGILTTTGYTQEDYTMLGSDDFFYVGGSPSTADLPGSPVSNNFMGCLKEVVYKNNDVRLELSRLAKQGDPKMKIHGVVAFKCENVATLDPITFETPESFISLPKWNAKKTGSISFDFRTTEPNGLILFSHGKPRHQKDAKHPQMIKVDFFAIEMLDGHLYLLLDMGSGTIKIKALLKKVNDGEWYHVDFQRDGRSGTISVNTLRTPYTAPGESEILDLDDELYLGGLPENKAGLVFPTEVWTALLNYGYVGCIRDLFIDGQSKDIRQMAEVQSTAGVKPSCSKETAKPCLSNPCKNNGMCRDGWNRYVCDCSGTGYLGRSCEREATVLSYDGSMFMKIQLPVVMHTEAEDVSLRFRSQRAYGILMATTSRDSADTLRLELDAGRVKLTVNLDCIRINCNSSKGPETLFAGYNLNDNEWHTVRVVRRGKSLKLTVDDQQAMTGQMAGDHTRLEFHNIETGIITERRYLSSVPSNFIGHLQSLTFNGMAYIDLCKNGDIDYCELNARFGFRNIIADPVTFKTKSSYVALATLQAYTSMHLFFQFKTTSLDGLILYNSGDGNDFIVVELVKGYLHYVFDLGNGANLIKGSSNKPLNDNQWHNVMISRDTSNLHTVKIDTKITTQITAGARNLDLKSDLYIGGVAKETYKSLPKLVHAKEGFQGCLASVDLNGRLPDLISDALFCNGQIERGCEGPSTTCQEDSCSNQGVCLQQWDGFSCDCSMTSFSGPLCNDPGTTYIFSKGGGQITYKWPPNDRPSTRADRLAIGFSTVQKEAVLVRVDSSSGLGDYLELHIHQGKIGVKFNVGTDDIAIEESNAIINDGKYHVVRFTRSGGNATLQVDSWPVIERYPAGNNDNERLAIARQRIPYRLGRVVDEWLLDKGRQLTIFNSQATIIIGGKEQGQPFQGQLSGLYYNGLKVLNMAAENDANIAIVGNVRLVGEVPSSMTTESTATAMQSEMSTSIMETTTTLATSTARRGKPPTKEPISQTTDDILVASAECPSDDEDIDPCEPSSGGLANPTRAGGREPYPGSAEVIRESSSTTGMVVGIVAAAALCILILLYAMYKYRNRDEGSYHVDESRNYISNSAQSNGAVVKEKQPSSAKSSNKNKKNKDKEYYV

SEQ ID NO: 9567 - protein, 1507 aa, Homo Sapiens
MGTALLQRGGCFLLCLSLLLLGCWAELGSGLEFPGAEGQWTRFPKWNACCESEMSFQLKTRSARGLVLYFDDEGFCDFLELILTRGGRLQLSFSIFCAEPATLLADTPVNDGAWHSVRIRRQFRNTTLFIDQVEAKWVEVKSKRRDMTVFSGLFVGGLPPELRAAALKLTLASVREREPFKGWIRDVRVNSSQVLPVDSGEVKLDDEPPNSGGGSPCEAGEEGEGGVCLNGGVCSVVDDQAVCDCSRTGFRGKDCSQEDNNVEGLAHLMMGDQGKSKGKEEYIATFKGSEYFCYDLSQNPIQSSSDEITLSFKTLQRNGLMLHTGKSADYVNLALKNGAVSLVINLGSGAFEALVEPVNGKFNDNAWHDVKVTRNLRQHSGIGHAMVTISVDGILTTTGYTQEDYTMLGSDDFFYVGGSPSTADLPGSPVSNNFMGCLKEVVYKNNDVRLELSRLAKQGDPKMKIHGVVAFKCENVATLDPITFETPESFISLPKWNAKKTGSISFDFRTTEPNGLILFSHGKPRHQKDAKHPQMIKVDFFAIEMLDGHLYLLLDMGSGTIKIKALLKKVNDGEWYHVDFQRDGRSGTISVNTLRTPYTAPGESEILDLDDELYLGGLPENKAGLVFPTEVWTALLNYGYVGCIRDLFIDGQSKDIRQMAEVQSTAGVKPSCSKETAKPCLSNPCKNNGMCRDGWNRYVCDCSGTGYLGRSCEREATVLSYDGSMFMKIQLPVVMHTEAEDVSLRFRSQRAYGILMATTSRDSADTLRLELDAGRVKLTVNLDCIRINCNSSKGPETLFAGYNLNDNEWHTVRVVRRGKSLKLTVDDQQAMTGQMAGDHTRLEFHNIETGIITERRYLSSVPSNFIGHLQSLTFNGMAYIDLCKNGDIDYCELNARFGFRNIIADPVTFKTKSSYVALATLQAYTSMHLFFQFKTTSLDGLILYNSGDGNDFIVVELVKGYLHYVFDLGNGANLIKGSSNKPLNDNQWHNVMISRDTSNLHTVKIDTKITTQITAGARNLDLKSDLYIGGVAKETYKSLPKLVHAKEGFQGCLASVDLNGRLPDLISDALFCNGQIERGCEGPSTTCQEDSCSNQGVCLQQWDGFSCDCSMTSFSGPLCNDPGTTYIFSKGGGQITYKWPPNDRPSTRADRLAIGFSTVQKEAVLVRVDSSSGLGDYLELHIHQGKIGVKFNVGTDDIAIEESNAIINDGKYHVVRFTRSGGNATLQVDSWPVIERYPAGNNDNERLAIARQRIPYRLGRVVDEWLLDKGRQLTIFNSQATIIIGGKEQGQPFQGQLSGLYYNGLKVLNMAAENDANIAIVGNVRLVGEVPSSMTTESTATAMQSEMSTSIMETTTTLATSTARRGKPPTKEPISQTTDDILVASAECPSDDEDIDPCEPSSGGLANPTRAGGREPYPGSAEVIRESSSTTGMVVGIVAAAALCILILLYAMYKYRNRDEGSYHVDESRNYISNSAQSNGAVVKEKQPSSAKSSNKNKKNKDKEYYV

SEQ ID NO: 9568 - protein, 1496 aa, Homo Sapiens
MGTALLQRGGCFLLCLSLLLLGCWAELGSGLEFPGAEGQWTRFPKWNACCESEMSFQLKTRSARGLVLYFDDEGFCDFLELILTRGGRLQLSFSIFCAEPATLLADTPVNDGAWHSVRIRRQFRNTTLFIDQVEAKWVEVKSKRRDMTVFSGLFVGGLPPELRAAALKLTLASVREREPFKGWIRDVRVNSSQVLPVDSGEVKLDDEPPNSGGGSPCEAGEEGEGGVCLNGGVCSVVDDQAVCDCSRTGFRGKDCSQEDNNVEGLAHLMMGDQGKSKGKEEYIATFKGSEYFCYDLSQNPIQSSSDEITLSFKTLQRNGLMLHTGKSADYVNLALKNGAVSLVINLGSGAFEALVEPVNGKFNDNAWHDVKVTRNLRQVTISVDGILTTTGYTQEDYTMLGSDDFFYVGGSPSTADLPGSPVSNNFMGCLKEVVYKNNDVRLELSRLAKQGDPKMKIHGVVAFKCENVATLDPITFETPESFISLPKWNAKKTGSISFDFRTTEPNGLILFSHGKPRHQKDAKHPQMIKVDFFAIEMLDGHLYLLLDMGSGTIKIKALLKKVNDGEWYHVDFQRDGRSGTISVNTLRTPYTAPGESEILDLDDELYLGGLPENKAGLVFPTEVWTALLNYGYVGCIRDLFIDGQSKDIRQMAEVQSTAGVKPSCSKETAKPCLSNPCKNNGMCRDGWNRYVCDCSGTGYLGRSCEREATVLSYDGSMFMKIQLPVVMHTEAEDVSLRFRSQRAYGILMATTSRDSADTLRLELDAGRVKLTVNLDCIRINCNSSKGPETLFAGYNLNDNEWHTVRVVRRGKSLKLTVDDQQAMTGQMAGDHTRLEFHNIETGIITERRYLSSVPSNFIGHLQSLTFNGMAYIDLCKNGDIDYCELNARFGFRNIIADPVTFKTKSSYVALATLQAYTSMHLFFQFKTTSLDGLILYNSGDGNDFIVVELVKGYLHYVFDLGNGANLIKGSSNKPLNDNQWHNVMISRDTSNLHTVKIDTKITTQITAGARNLDLKSDLYIGGVAKETYKSLPKLVHAKEGFQGCLASVDLNGRLPDLISDALFCNGQIERGCEGPSTTCQEDSCSNQGVCLQQWDGFSCDCSMTSFSGPLCNDPGTTYIFSKGGGQITYKWPPNDRPSTRADRLAIGFSTVQKEAVLVRVDSSSGLGDYLELHIHQGKIGVKFNVGTDDIAIEESNAIINDGKYHVVRFTRSGGNATLQVDSWPVIERYPAGNNDNERLAIARQRIPYRLGRVVDEWLLDKGRQLTIFNSQATIIIGGKEQGQPFQGQLSGLYYNGLKVLNMAAENDANIAIVGNVRLVGEVPSSMTTESTATAMQSEMSTSIMETTTTLATSTARRGKPPTKEPISQTTDDILVASAECPSDDEDIDPCEPSSANPTRAGGREPYPGSAEVIRESSSTTGMVVGIVAAAALCILILLYAMYKYRNRDEGSYHVDESRNYISNSAQSNGAVVKEKQPSSAKSSNKNKKNKDKEYYV

SEQ ID NO: 9569 - protein, 459 aa, Homo Sapiens
MGTALLQRGGCFLLCLSLLLLGCWAELGSGLEFPGAEGQWTRFPKWNACCESEMSFQLKTRSARGLVLYFDDEGFCDFLELILTRGGRLQLSFSIFCAEPATLLADTPVNDGAWHSVRIRRQFRNTTLFIDQVEAKWVEVKSKRRDMTVFSGLFVGGLPPELRAAALKLTLASVREREPFKGWIRDVRVNSSQVLPVDSGEVKLDDEPPNSGGGSPCEAGEEGEGGVCLNGGVCSVVDDQAVCDCSRTGFRGKDCSQGKEEYIATFKGSEYFCYDLSQNPIQSSSDEITLSFKTLQRNGLMLHTGKSADYVNLALKNGAVSLVINLGSGAFEALVEPVNGKFNDNAWHDVKVTRNLRQVTISVDGILTTTGYTQEDYTMLGSDDFFYVGGSPSTADLPGSPVSNNFMGCLKEVNIVAIRIIPNSWSHHFRSSMKAPLLKTRCSRVKRHNFKFNILLLFM

SEQ ID NO: 9570 - protein, 277 aa, Homo Sapiens
MGTALLQRGGCFLLCLSLLLLGCWAELGSGLEFPGAEGQWTRFPKWNACCESEMSFQLKTRSARGLVLYFDDEGFCDFLELILTRGGRLQLSFSIFCAEPATLLADTPVNDGAWHSVRIRRQFRNTTLFIDQVEAKWVEVKSKRRDMTVFSGLFVGGLPPELRAAALKLTLASVREREPFKGWIRDVRVNSSQVLPVDSGEVKLDDEPPNSGGGSPCEAGEEGEGGVCLNGGVCSVVDDQAVCDCSRTGFRGKDCSQDNNVEGLAHLMMGDQGKSKD

SEQ ID NO: 9571 - protein, 293 aa, Homo Sapiens
MGTALLQRGGCFLLCLSLLLLGCWAELGSGLEFPGAEGQWTRFPKWNACCESEMSFQLKTRSARGLVLYFDDEGFCDFLELILTRGGRLQLSFSIFCAEPATLLADTPVNDGAWHSVRIRRQFRNTTLFIDQVEAKWVEVKSKRRDMTVFSGLFVGGLPPELRAAALKLTLASVREREPFKGWIRDVRVNSSQVLPVDSGEVKLDDEPPNSGGGSPCEAGEEGEGGVCLNGGVCSVVDDQAVCDCSRTGFRGKDCSQEDNNVEGLAHLMMGDQGKSKEMNDYLNYKKVKICYT

SEQ ID NO: 9572 - protein, 1499 aa, Homo Sapiens
MGTALLQRGGCFLLCLSLLLLGCWAELGSGLEFPGAEGQWTRFPKWNACCESEMSFQLKTRSARGLVLYFDDEGFCDFLELILTRGGRLQLSFSIFCAEPATLLADTPVNDGAWHSVRIRRQFRNTTLFIDQVEAKWVEVKSKRRDMTVFSGLFVGGLPPELRAAALKLTLASVREREPFKGWIRDVRVNSSQVLPVDSGEVKLDDEPPNSGGGSPCEAGEEGEGGVCLNGGVCSVVDDQAVCDCSRTGFRGKDCSQEDNNVEGLAHLMMGDQGKSKGKEEYIATFKGSEYFCYDLSQNPIQSSSDEITLSFKTLQRNGLMLHTGKSADYVNLALKNGAVSLVINLGSGAFEALVEPVNGKFNDNAWHDVKVTRNLRQVTISVDGILTTTGYTQEDYTMLGSDDFFYVGGSPSTADLPGSPVSNNFMGCLKEVVYKNNDVRLELSRLAKQGDPKMKIHGVVAFKCENVATLDPITFETPESFISLPKWNAKKTGSISFDFRTTEPNGLILFSHGKPRHQKDAKHPQMIKVDFFAIEMLDGHLYLLLDMGSGTIKIKALLKKVNDGEWYHVDFQRDGRSGTISVNTLRTPYTAPGESEILDLDDELYLGGLPENKAGLVFPTEVWTALLNYGYVGCIRDLFIDGQSKDIRQMAEVQSTAGVKPSCSKETAKPCLSNPCKNNGMCRDGWNRYVCDCSGTGYLGRSCEREATVLSYDGSMFMKIQLPVVMHTEAEDVSLRFRSQRAYGILMATTSRDSADTLRLELDAGRVKLTVNLDCIRINCNSSKGPETLFAGYNLNDNEWHTVRVVRRGKSLKLTVDDQQAMTGQMAGDHTRLEFHNIETGIITERRYLSSVPSNFIGHLQSLTFNGMAYIDLCKNGDIDYCELNARFGFRNIIADPVTFKTKSSYVALATLQAYTSMHLFFQFKTTSLDGLILYNSGDGNDFIVVELVKGYLHYVFDLGNGANLIKGSSNKPLNDNQWHNVMISRDTSNLHTVKIDTKITTQITAGARNLDLKSDLYIGGVAKETYKSLPKLVHAKEGFQGCLASVDLNGRLPDLISDALFCNGQIERGCEGPSTTCQEDSCSNQGVCLQQWDGFSCDCSMTSFSGPLCNDPGTTYIFSKGGGQITYKWPPNDRPSTRADRLAIGFSTVQKEAVLVRVDSSSGLGDYLELHIHQGKIGVKFNVGTDDIAIEESNAIINDGKYHVVRFTRSGGNATLQVDSWPVIERYPAGNNDNERLAIARQRIPYRLGRVVDEWLLDKGRQLTIFNSQATIIIGGKEQGQPFQGQLSGLYYNGLKVLNMAAENDANIAIVGNVRLVGEVPSSMTTESTATAMQSEMSTSIMETTTTLATSTARRGKPPTKEPISQTTDDILVASAECPSDDEDIDPCEPSSGGLANPTRAGGREPYPGSAEVIRESSSTTGMVVGIVAAAALCILILLYAMYKYRNRDEGSYHVDESRNYISNSAQSNGAVVKEKQPSSAKSSNKNKKNKDKEYYV

SEQ ID NO: 9573 - protein, 56 aa, Homo Sapiens
MTSGSKCPSTDSASLLPRKSRGLMAYILPLVQLTSSVGEDCSFQISTFLFDLSSIS

SEQ ID NO: 9574 - protein, 176 aa, Homo Sapiens
MTSGSKCPSTDSGKEEYIATFKGSEYFCYDLSQNPIQSSSDEITLSFKTLQRNGLMLHTGKSADYVNLALKNGAVSLVINLGSGAFEALVEPVNGKFNDNAWHDVKVTRNLRQVTISVDGILTTTGYTQEDYTMLGSDDFFYVGGSPSTADLPGSPIQHESTFAEDPMFQSQTAQL

SEQ ID NO: 9575 - protein, 903 aa, Homo Sapiens
MTSGSKCPSTDSGKEEYIATFKGSEYFCYDLSQNPIQSSSDEITLSFKTLQRNGLMLHTGKSADYVNLALKNGAVSLVINLGSGAFEALVEPVNGKFNDNAWHDVKVTRNLRQVTISVDGILTTTGYTQEDYTMLGSDDFFYVGGSPSTADLPGSPVSNNFMGCLKEVVYKNNDVRLELSRLAKQGDPKMKIHGVVAFKCENVATLDPITFETPESFISLPKWNAKKTGSISFDFRTTEPNGLILFSHGKPRHQKDAKHPQMIKVDFFAIEMLDGHLYLLLDMGSGTIKIKALLKKVNDGEWYHVDFQRDGRSGTISVNTLRTPYTAPGESEILDLDDELYLGGLPENKAGLVFPTEVWTALLNYGYVGCIRDLFIDGQSKDIRQMAEVQSTAGVKPSCSKETAKPCLSNPCKNNGMCRDGWNRYVCDCSGTGYLGRSCEREATVLSYDGSMFMKIQLPVVMHTEAEDVSLRFRSQRAYGILMATTSRDSADTLRLELDAGRVKLTVNLGKGPETLFAGYNLNDNEWHTVRVVRRGKSLKLTVDDQQAMTGQMAGDHTRLEFHNIETGIITERRYLSSVPSNFIGHLQSLTFNGMAYIDLCKNGDIDYCELNARFGFRNIIADPVTFKTKSSYVALATLQAYTSMHLFFQFKTTSLDGLILYNSGDGNDFIVVELVKGYLHYVFDLGNGANLIKGSSNKPLNDNQWHNVMISRDTSNLHTVKIDTKITTQITAGARNLDLKSDLYIGGVAKETYKSLPKLVHAKEGFQGCLASVDLNGRLPDLISDALFCNGQIERGCEGPSTTCQEDSCSNQGVCLQQWDGFSCDCSMTSFSGPLCNDPGTTYIFSKGGGQITYKWPPNDRPSTRADRLAIGFSTVQKEAVLVRVDSSSGLGDYLELHITLQ

SEQ ID NO: 9576 - protein, 75 aa, Homo Sapiens
MVVGIVAAAALCILILLYAMYKYRNRDEGSYHVDESRNYISNSAQSNGAVVKEKQPSSAKSSNKNKKNKDKEYYV

SEQ ID NO: 9577 - protein, 472 aa, Homo Sapiens
MYQRMLRCGAELGSPGGGGGGGGGGGAGGRLALLWIVPLTLSGLLGVAWGASSLGAHHIHHFHGSSKHHSVPIAIYRSPASLRGGHAGTTYIFSKGGGQITYKWPPNDRPSTRADRLAIGFSTVQKEAVLVRVDSSSGLGDYLELHIHQGKIGVKFNVGTDDIAIEESNAIINDGKYHVVRFTRSGGNATLQVDSWPVIERYPAGNNDNERLAIARQRIPYRLGRVVDEWLLDKGRQLTIFNSQATIIIGGKEQGQPFQGQLSGLYYNGLKVLNMAAENDANIAIVGNVRLVGEVPSSMTTESTATAMQSEMSTSIMETTTTLATSTARRGKPPTKEPISQTTDDILVASAECPSDDEDIDPCEPSSGGLANPTRAGGREPYPGSAEVIRESSSTTGMVVGIVAAAALCILILLYAMYKYRNRDEGSYHVDESRNYISNSAQSNGAVVKEKQPSSAKSSNKNKKNKDKEYYV

SEQ ID NO: 9578 - protein, 469 aa, Homo Sapiens
MYQRMLRCGAELGSPGGGGGGGGGGGAGGRLALLWIVPLTLSGLLGVAWGASSLGAHHIHHFHGSSKHHSVPIAIYRSPASLRGGHAGTTYIFSKGGGQITYKWPPNDRPSTRADRLAIGFSTVQKEAVLVRVDSSSGLGDYLELHIHQGKIGVKFNVGTDDIAIEESNAIINDGKYHVVRFTRSGGNATLQVDSWPVIERYPAGNNDNERLAIARQRIPYRLGRVVDEWLLDKGRQLTIFNSQATIIIGGKEQGQPFQGQLSGLYYNGLKVLNMAAENDANIAIVGNVRLVGEVPSSMTTESTATAMQSEMSTSIMETTTTLATSTARRGKPPTKEPISQTTDDILVASAECPSDDEDIDPCEPSSANPTRAGGREPYPGSAEVIRESSSTTGMVVGIVAAAALCILILLYAMYKYRNRDEGSYHVDESRNYISNSAQSNGAVVKEKQPSSAKSSNKNKKNKDKEYYV

SEQ ID NO: 9579 - protein, 442 aa, Homo Sapiens
MYQRMLRCGAELGSPGGGGGGGGGGGAGGRLALLWIVPLTLSGLLGVAWGASSLGAHHIHHFHGSSKHHSVPIAIYRSPASLRGGHAGTTYIFSKGGGQITYKWPPNDRPSTRADRLAIGFSTVQKEAVLVRVDSSSGLGDYLELHIHQGKIGVKFNVGTDDIAIEESNAIINDGKYHVVRFTRSGGNATLQVDSWPVIERYPAGRQLTIFNSQATIIIGGKEQGQPFQGQLSGLYYNGLKVLNMAAENDANIAIVGNVRLVGEVPSSMTTESTATAMQSEMSTSIMETTTTLATSTARRGKPPTKEPISQTTDDILVASAECPSDDEDIDPCEPSSGGLANPTRAGGREPYPGSAEVIRESSSTTGMVVGIVAAAALCILILLYAMYKYRNRDEGSYHVDESRNYISNSAQSNGAVVKEKQPSSAKSSNKNKKNKDKEYYV

SEQ ID NO: 9580 - protein, 136 aa, Homo Sapiens
SSQVLPVDSGEVKLDDEPPNSGGGSPCEAGEEGEGGVCLNGGVCSVVDDQAVCDCSRTGFRGKDCSQEIKFGLQCVLPVLLHDNDQGKYCCINTAKPLTEKDNNVEGLAHLMMGDQGKSKEKLEIFRWIRKDFTNF

SEQ ID NO: 9581 - protein, 123 aa, Homo Sapiens
TLSGLLGVAWGASSLGAHHIHHFHGSSKHHSVPIAIYRSPASLRGGHAGTTYIFSKGGGQITYKWPPNDRPSTRADRLAIGFSTVQKEAVLVRVDSSSGLGDYLELHIAFESFTASRSSASRC

SEQ ID NO: 9582 - protein, 33 aa, Homo Sapiens
  misc_feature (1)..(1): Xaa can be any naturally occurring amino acid
XFQRDGRSDFPFASSLVPPSTQNSCPGTISVNT

SEQ ID NO: 9583 - protein, 126 aa, Homo Sapiens
  misc_feature (1)..(1): Xaa can be any naturally occurring amino acid
XPELRAAALKLTLASVREREPFKGWIRDVRVNSSQVLPVDSGEVKLDDEPPNSGGGSPCEAGEEGEGGVCLNGGVCSVVDDQAVCDCSRTGFRGKDCSQGLAHLMMGDQGMGSVPFPLCFQCFLVL

SEQ ID NO: 9584 - protein, 169 aa, Homo Sapiens
  misc_feature (1)..(1): Xaa can be any naturally occurring amino acid
XSNNFMGCLKEVVYKNNDVRLELSRLAKQGDPKMKIHGVVAFKCENVATLDPITFETPESFISLPKWNAKKTGSISFDFRTTEPNGLILFSHGKPRHQKDAKHPQMIKVDFFAIEMLDGHLYLLLDMGSGTIKIKALLKKVNDGEWYHVDFQRDGRSGQMAGDHTRLEF

SEQ ID NO: 9585 - protein, 155 aa, Homo Sapiens
  misc_feature (1)..(1): Xaa can be any naturally occurring amino acid
XVFSGLFVGGLPPELRAAALKLTLASVREREPFKGWIRDVRVNSSQVLPVDSGEVKLDDEPPNSGGGSPCEAGEEGEGGVCLNGGVCSVVDDQAVCDCSRTGFRGKDCSQEDNNVEGLAHLMMGDQGKSKELMLILLCSITTQGLETAKSLIMCT

SEQ ID NO: 9586 - protein, 276 aa, Homo Sapiens
LLLLLLGAAEGARVSSSLSTTHHVHHFHSKHGTVPIAINRMPFLTRGGHAGTTYIFGKGGALITYTWPPNDRPSTRMDRLAVGFSTHQRSAVLVRVDSASGLGDYLQLHIDQGTVGVIFNVGTDDITIDEPNAIVSDGKYHVVRFTRSGGNATLQVDSWPVNERYPAGRQLTIFNSQAAIKIGGRDQGRPFQGQVSGLYYNGLKVLALAAESDPNVRTEGHLRLVGEGPSVLLSAETTATTLLADMATTIMETTTTMATTTTRRGRSPTLRDSTTQ

SEQ ID NO: 9587 - protein, 1712 aa, Homo Sapiens
MASGSRWRPTPPPLLLLLLLALAARADGLEFGGGPGQWARYARWAGAASSGELSFSLRTNATRALLLYLDDGGDCDFLELLLVDGRLRLRFTLSCAEPATLQLDTPVADDRWHMVLLTRDARRTALAVDGEARAAEVRSKRREMQVASDLFVGGIPPDVRLSALTLSTVKYEPPFRGLLANLKLGERPPALLGSQGLRGATADPLCAPARNPCANGGLCTVLAPGEVGCDCSHTGFGGKFCSEEEHPMEGPAHLTLNSEVGSLLFSEGGAGRGGAGDVHQPTKGKEEFVATFKGNEFFCYDLSHNPIQSSTDEITLAFRTLQRNGLMLHTGKSADYVNLSLKSGAVWLVINLGSGAFEALVEPVNGKFNDNAWHDVRVTRNLRQHAGIGHAMVNKLHYLVTISVDGILTTTGYTQEDYTMLGSDDFFYIGGSPNTADLPGSPVSNNFMGCLKDVVYKNNDFKLELSRLAKEGDPKMKLQGDLSFRCEDVAALDPVTFESPEAFVALPRWSAKRTGSISLDFRTTEPNGLLLFSQGRRAGGGAGSHSSAQRADYFAMELLDGHLYLLLDMGSGGIKLRASSRKVNDGEWCHVDFQRDGRKGSISVNSRSTPFLATGDSEILDLESELYLGGLPEGGRVDLPLPPEVWTAALRAGYVGCVRDLFIDGRSRDLRGLAEAQGAVGVAPFCSRETLKQCASAPCRNGGVCREGWNRFICDCIGTGFLGRVCEREATVLSYDGSMYMKIMLPNAMHTEAEDVSLRFMSQRAYGLMMATTSRESADTLRLELDGGQMKLTVNLDCLRVGCAPSKGPETLFAGHKLNDNEWHTVRVVRRGKSLQLSVDNVTVEGQMAGAHMRLEFHNIETGIMTERRFISVVPSNFIGHLSGLVFNGQPYMDQCKDGDITYCELNARFGLRAIVADPVTFKSRSSYLALATLQAYASMHLFFQFKTTAPDGLLLFNSGNGNDFIVIELVKGYIHYVFDLGNGPSLMKGNSDKPVNDNQWHNVVVSRDPGNVHTLKIDSRTVTQHSNGARNLDLKGELYIGGLSKNMFSNLPKLVASRDGFQGCLASVDLNGRLPDLIADALHRIGQVERGCDGPSTTCTEESCANQGVCLQQWDGFTCDCTMTSYGGPVCNDPGTTYIFGKGGALITYTWPPNDRPSTRMDRLAVGFSTHQRSAVLVRVDSASGLGDYLQLHIDQGTVGVIFNVGTDDITIDEPNAIVSDGKYHVVRFTRSGGNATLQVDSWPVNERYPAGNFDNERLAIARQRIPYRLGRVVDEWLLDKGRQLTIFNSQAAIKIGGRDQGRPFQGQVSGLYYNGLKVLALAAESDPNVRTEGHLRLVGEGPSVLLSAETTATTLLADMATTIMETTTTMATTTTRRGRSPTLRDSTTQNTDDLLVASAECPSDDEDLEECEPSTGGELILPIITEDSLDPPPVATRSPFVPPPPTFYPFLTGVGATQDTLPPPAARRPPSGGPCQAERDDSDCEEPIEASGFASGEVFDSSLPPTDDEDFYTTFPLVTDRTTLLSPRKPAPRPNLRTDGATGAPGVLFAPSAPAPNLPAGKMNHRDPLQPLLENPPLGPGAPTSFEPRRPPPLRPGVTSAPGFPHLPTANPTGPGERGPPGAVEVIRESSSTTGMVVGIVAAAALCILILLYAMYKYRNRDEGSYQVDQSRNYISNSAQSNGAVVKEKAPAAPKTPSKAKKNKDKEYYV

SEQ ID NO: 9588 - protein, 1642 aa, Homo Sapiens
MASGSRWRPTPPPLLLLLLLALAARADGLEFGGGPGQWARYARWAGAASSGELSFSLRTNATRALLLYLDDGGDCDFLELLLVDGRLRLRFTLSCAEPATLQLDTPVADDRWHMVLLTRDARRTALAVDGEARAAEVRSKRREMQVASDLFVGGIPPDVRLSALTLSTVKYEPPFRGLLANLKLGERPPALLGSQGLRGATADPLCAPARNPCANGGLCTVLAPGEVGCDCSHTGFGGKFCSEEEHPMEGPAHLTLNSEGKEEFVATFKGNEFFCYDLSHNPIQSSTDEITLAFRTLQRNGLMLHTGKSADYVNLSLKSGAVWLVINLGSGAFEALVEPVNGKFNDNAWHDVRVTRNLRQHAGIGHAMVTISVDGILTTTGYTQEDYTMLGSDDFFYIGGSPNTADLPGSPVSNNFMGCLKDVVYKNNDFKLELSRLAKEGDPKMKLQGDLSFRCEDVAALDPVTFESPEAFVALPRWSAKRTGSISLDFRTTEPNGLLLFSQGRRAGGGAGSHSSAQRADYFAMELLDGHLYLLLDMGSGGIKLRASSRKVNDGEWCHVDFQRDGRKGSISVNSRSTPFLATGDSEILDLESELYLGGLPEGGRVDLPLPPEVWTAALRAGYVGCVRDLFIDGRSRDLRGLAEAQGAVGVAPFCSRETLKQCASAPCRNGGVCREGWNRFICDCIGTGFLGRVCEREATVLSYDGSMYMKIMLPNAMHTEAEDVSLRFMSQRAYGLMMATTSRESADTLRLELDGGQMKLTVNLGKGPETLFAGHKLNDNEWHTVRVVRRGKSLQLSVDNVTVEGQMAGAHMRLEFHNIETGIMTERRFISVVPSNFIGHLSGLVFNGQPYMDQCKDGDITYCELNARFGLRAIVADPVTFKSRSSYLALATLQAYASMHLFFQFKTTAPDGLLLFNSGNGNDFIVIELVKGYIHYVFDLGNGPSLMKGNSDKPVNDNQWHNVVVSRDPGNVHTLKIDSRTVTQHSNGARNLDLKGELYIGGLSKNMFSNLPKLVASRDGFQGCLASVDLNGRLPDLIADALHRIGQVERGCDGPSTTCTEESCANQGVCLQQWDGFTCDCTMTSYGGPVCNDPGTTYIFGKGGALITYTWPPNDRPSTRMDRLAVGFSTHQRSAVLVRVDSASGLGDYLQLHIDQGTVGVIFNVGTDDITIDEPNAIVSDGKYHVVRFTRSGGNATLQVDSWPVNERYPAGRQLTIFNSQAAIKIGGRDQGRPFQGQVSGLYYNGLKVLALAAESDPNVRTEGHLRLVGEGPSVLLSAETTATTLLADMATTIMETTTTMATTTTRRGRSPTLRDSTTQNTDDLLVASAECPSDDEDLEECEPSTGGELILPIITEDSLDPPPVATRSPFVPPPPTFYPFLTGVGATQDTLPPPAARRPPSGGPCQAERDDSDCEEPIEASGFASGEVFDSSLPPTDDEDFYTTFPLVTDRTTLLSPRKPAPRPNLRTDGATGAPGVLFAPSAPAPNLPAGKMNHRDPLQPLLENPPLGPGAPTSFEPRRPPPLRPGVTSAPGFPHLPTANPTGPGERGPPGAVEVIRESSSTTGMVVGIVAAAALCILILLYAMYKYRNRDEGSYQVDQSRNYISNSAQSNGAVVKEKAPAAPKTPSKAKKNKDKEYYV

SEQ ID NO: 9589 - protein, 1712 aa, Homo Sapiens; identical to SEQ ID NO: 9587

SEQ ID NO: 9590 - protein, 1705 aa, Homo Sapiens
MASGSRWRPTPPPLLLLLLLALAARADGLEFGGGPGQWARYARWAGAASSGELSFSLRTNATRALLLYLDDGGDCDFLELLLVDGRLRLRFTLSCAEPATLQLDTPVADDRWHMVLLTRDARRTALAVDGEARAAEVRSKRREMQVASDLFVGGIPPDVRLSALTLSTVKYEPPFRGLLANLKLGERPPALLGSQGLRGATADPLCAPARNPCANGGLCTVLAPGEVGCDCSHTGFGGKFCSEEEHPMEGPAHLTLNSEVGSLLFSEGGAGRGGAGDVHQPTKGKEEFVATFKGNEFFCYDLSHNPIQSSTDEITLAFRTLQRNGLMLHTGKSADYVNLSLKSGAVWLVINLGSGAFEALVEPVNGKFNDNAWHDVRVTRNLRQHAGIGHAMVTISVDGILTTTGYTQEDYTMLGSDDFFYIGGSPNTADLPGSPVSNNFMGCLKDVVYKNNDFKLELSRLAKEGDPKMKLQGDLSFRCEDVAALDPVTFESPEAFVALPRWSAKRTGSISLDFRTTEPNGLLLFSQGRRAGGGAGSHSSAQRADYFAMELLDGHLYLLLDMGSGGIKLRASSRKVNDGEWCHVDFQRDGRKGSISVNSRSTPFLATGDSEILDLESELYLGGLPEGGRVDLPLPPEVWTAALRAGYVGCVRDLFIDGRSRDLRGLAEAQGAVGVAPFCSRETLKQCASAPCRNGGVCREGWNRFICDCIGTGFLGRVCEREATVLSYDGSMYMKIMLPNAMHTEAEDVSLRFMSQRAYGLMMATTSRESADTLRLELDGGQMKLTVNLDCLRVGCAPSKGPETLFAGHKLNDNEWHTVRVVRRGKSLQLSVDNVTVEGQMAGAHMRLEFHNIETGIMTERRFISVVPSNFIGHLSGLVFNGQPYMDQCKDGDITYCELNARFGLRAIVADPVTFKSRSSYLALATLQAYASMHLFFQFKTTAPDGLLLFNSGNGNDFIVIELVKGYIHYVFDLGNGPSLMKGNSDKPVNDNQWHNVVVSRDPGNVHTLKIDSRTVTQHSNGARNLDLKGELYIGGLSKNMFSNLPKLVASRDGFQGCLASVDLNGRLPDLIADALHRIGQVERGCDGPSTTCTEESCANQGVCLQQWDGFTCDCTMTSYGGPVCNDPGTTYIFGKGGALITYTWPPNDRPSTRMDRLAVGFSTHQRSAVLVRVDSASGLGDYLQLHIDQGTVGVIFNVGTDDITIDEPNAIVSDGKYHVVRFTRSGGNATLQVDSWPVNERYPAGNFDNERLAIARQRIPYRLGRVVDEWLLDKGRQLTIFNSQAAIKIGGRDQGRPFQGQVSGLYYNGLKVLALAAESDPNVRTEGHLRLVGEGPSVLLSAETTATTLLADMATTIMETTTTMATTTTRRGRSPTLRDSTTQNTDDLLVASAECPSDDEDLEECEPSTGGELILPIITEDSLDPPPVATRSPFVPPPPTFYPFLTGVGATQDTLPPPAARRPPSGGPCQAERDDSDCEEPIEASGFASGEVFDSSLPPTDDEDFYTTFPLVTDRTTLLSPRKPAPRPNLRTDGATGAPGVLFAPSAPAPNLPAGKMNHRDPLQPLLENPPLGPGAPTSFEPRRPPPLRPGVTSAPGFPHLPTANPTGPGERGPPGAVEVIRESSSTTGMVVGIVAAAALCILILLYAMYKYRNRDEGSYQVDQSRNYISNSAQSNGAVVKEKAPAAPKTPSKAKKNKDKEYYV

SEQ ID NO: 9591 - protein, 666 aa, Homo Sapiens
MPPGGSGPGGCPRRPPALAGPLPPPPPPPPPPLLPLLPLLLLLLLGAAEGARVSSSLSTTHHVHHFHSKHGTVPIAINRMPFLTRGGHAGTTYIFGKGGALITYTWPPNDRPSTRMDRLAVGFSTHQRSAVLVRVDSASGLGDYLQLHIDQGTVGVIFNVGTDDITIDEPNAIVSDGKYHVVRFTRSGGNATLQVDSWPVNERYPAGNFDNERLAIARQRIPYRLGRVVDEWLLDKGRQLTIFNSQAAIKIGGRDQGRPFQGQVSGLYYNGLKVLALAAESDPNVRTEGHLRLVGEGPSVLLSAETTATTLLADMATTIMETTTTMATTTTRRGRSPTLRDSTTQNTDDLLVASAECPSDDEDLEECEPSTGGELILPIITEDSLDPPPVATRSPFVPPPPTFYPFLTGVGATQDTLPPPAARRPPSGGPCQAERDDSDCEEPIEASGFASGEVFDSSLPPTDDEDFYTTFPLVTDRTTLLSPRKPAPRPNLRTDGATGAPGVLFAPSAPAPNLPAGKMNHRDPLQPLLENPPLGPGAPTSFEPRRPPPLRPGVTSAPGFPHLPTANPTGPGERGPPGAVEVIRESSSTTGMVVGIVAAAALCILILLYAMYKYRNRDEGSYQVDQSRNYISNSAQSNGAVVKEKAPAAPKTPSKAKKNKDKEYYV

SEQ ID NO: 9592 - protein, 293 aa, Homo Sapiens [sequence omitted]

SEQ ID NO: 9593 - protein, 215 aa, Homo Sapiens
  misc_feature (1)..(1): Xaa can be any naturally occurring amino acid
XADPLCAPARNPCANGGLCTVLAPGEVGCDCSHTGFGGKFCSEEEHPMEVGSLLFSEGGAGRGGAGDVHQPTKGKEEFVATFKGNEFFCYDLSHNPIQSSTDEITLAFRTLQRNGLMLHTGKSADYVNLSLKSGAVWLVINLGSGAFEALVEPVNGKFNDNAWHDVRVTRNLRQVTISVDGILTTTGYTQEDYTMLGSDDFFYIGGSPNTADLPG

SEQ ID NO: 9594 - protein, 206 aa, Homo Sapiens
  misc_feature (1)..(1): Xaa can be any naturally occurring amino acid
XCSEEEHPMEGPAHLTLNSEVGSLLFSEGGAGRGGAGDVHQPTKGKEEFVATFKGNEFFCYDLSHNPIQSSTDEITLAFRTLQRNGLMLHTGKSADYVNLSLKSGAVWLVINLGSGAFEALVEPVNGKFNDNAWHDVRVTRNLRQVTISVDGILTTTGYTQEDYTMLGSDDFFYIGGSPNTADLPGSPVSNNFMGCLKDVVYKNND

SEQ ID NO: 9595 - protein, 331 aa, Homo Sapiens
MDRAAVARVGAVASASVCALVAGVVLAQYIFTLKRKTGRKTKIIEMMPEFQKSSVRIKNPTRVEEIICGLIKGGAAKLQIITDFDMTLSRFSYKGKRCPTCHNIIDNCKLVTDECRKKLLQLKEKYYAIEVDPVLTVEEKYPYMVEWYTKSHGLLVQQALPKAKLKEIVAESDVMLKEGYENFFDKLQQHSIPVFIFSAGIGDVLEEVIRQAGVYHPNVKVVSNFMDFDETGVLKGFKGELIHVFNKHDGALRNTEYFNQLKDNSNIILLGDSQGDLRMADGVANVEHILKIGYLNDRVDELLEKYMDSYDIVLVQDESLEVANSILQKIL

SEQ ID NO: 9596 - protein, 331 aa, Homo Sapiens; identical to SEQ ID NO: 9595

SEQ ID NO: 9597 - protein, 42 aa, Homo Sapiens
MPEFQKSSVRIKNPTRVEEIICGLIKGGAAKLQIITDFDMTL

SEQ ID NO: 9598 - protein, 285 aa, Homo Sapiens
MPEFQKSSVRIKNPTRVEEIICGLIKGGAAKLQIITDFDMTLSRFSYKGKRCPTCHNIIDNCKLVTDECRKKLLQLKEKYYAIEVDPVLTVEEKYPYMVEWYTKSHGLLVQQALPKAKLKEIVAESDVMLKEGYENFFDKLQQHSIPVFIFSAGIGDVLEEVIRQAGVYHPNVKVVSNFMDFDETGVLKGFKGELIHVFNKHDGALRNTEYFNQLKDNSNIILLGDSQGDLRMADGVANVEHILKIGYLNDRVDELLEKYMDSYDIVLVQDESLEVANSILQKIL

SEQ ID NO: 9599 - protein, 285 aa, Homo Sapiens; identical to SEQ ID NO: 9598

SEQ ID NO: 9600 - protein, 54 aa, Homo Sapiens
MRAPSMDRAAVARVGAVASASVCALVAGVVLAQYIFTLKRKTGRKTKIIEMKIG

SEQ ID NO: 9601 - protein, 336 aa, Homo Sapiens
MRAPSMDRAAVARVGAVASASVCALVAGVVLAQYIFTLKRKTGRKTKIIEMMPEFQKSSVRIKNPTRVEEIICGLIKGGAAKLQIITDFDMTLSRFSYKGKRCPTCHNIIDNCKLVTDECRKKLLQLKEKYYAIEVDPVLTVEEKYPYMVEWYTKSHGLLVQQALPKAKLKEIVAESDVMLKEGYENFFDKLQQHSIPVFIFSAGIGDVLEEVIRQAGVYHPNVKVVSNFMDFDETGVLKGFKGELIHVFNKHDGALRNTEYFNQLKDNSNIILLGDSQGDLRMADGVANVEHILKIGYLNDRVDELLEKYMDSYDIVLVQDESLEVANSILQKIL

SEQ ID NO: 9602 - protein, 297 aa, Homo Sapiens
MTNQESAVHVKMMPEFQKSSVRIKNPTRVEEIICGLIKGGAAKLQIITDFDMTLSRFSYKGKRCPTCHNIIDNCKLVTDECRKKLLQLKEKYYAIEVDPVLTVEEKYPYMVEWYTKSHGLLVQQALPKAKLKEIVAESDVMLKEGYENFFDKLQQHSIPVFIFSAGIGDVLEEVIRQAGVYHPNVKVVSNFMDFDETGVLKGFKGELIHVFNKHDGALRNTEYFNQLKDNSNIILLGDSQGDLRMADGVANVEHILKIGYLNDRVDELLEKYMDSYDIVLVQDESLEVANSILQKIL

SEQ ID NO: 9603 - protein, 297 aa, Homo Sapiens; identical to SEQ ID NO: 9602

SEQ ID NO: 9604 - protein, 297 aa, Homo Sapiens; identical to SEQ ID NO: 9602

SEQ ID NO: 9605 - protein, 205 aa, Homo Sapiens
MTNQESAVHVKMMPEFQKSSVRIKNPTRVEEIICGLIKGGAAKLQIITDFDMTLSRFSYKGKRCPTCHNIIDNCKLVTDECRKKLLQLKEKYYAIEVDPVLTVEEKYPYMVEWYTKSHGLLVQQALPKAKLKEIVAESDVMLKEGYENFFDKLQQHSIPVFIFSAGIGDVLEEVIRQAGVYHPNVKVVSNFMDFDETVRISNRSS

SEQ ID NO: 9606 - protein, 548 aa, Homo Sapiens
MTMAAAAVVARGAGARAATAAALRGGCGTAARGRPCAGPARPLCTAPGTAPDMKRYLWERYREAKRSTEELVPSIMSNLLNPDAIFSNNEMSLSDIEIYGFDYDYTLVFYSKHLHTLIFNAARDLLINEHRYPAEIRKYEYDPNFAIRGLHYDVQRAVLMKIDAFHYIQLGTVYRGLSVVPDEEVIEMYEGSHVPLEQMSDFYGKSSHGNTMKQFMDIFSLPEMTLLSCVNEYFLKNNIDYEPVHLYKDVKDSIRDVHIKGIMYRAIEADIEKYICYAEQTRAVLAKLADHGKKMFLITNSPSSFVDKGMSYIVGKDWRDLFDVVIVQAEKPNFFNDKRRPFRKMNEKGVLLWDKIHKLQKGQIYKQGNLYEFLKLTGWRGSRVLYFGDHIYSDLADLTLKHGWRTGAIIPELRSELKIMNTEQYIQTMTWLQTLTGLLEQMQVHRDAESQLVLQEWKKERKEMREMTKSFFNAQFGSLFRTDQNPTYFLRRLSRFADIYMASLSCLLNYDVSHTFYPRRTPLQHELPAWSERPPTFGTPLLQEAQAK

SEQ ID NO: 9607 - protein, 135 aa, Homo Sapiens
  misc_feature (1)..(1): Xaa can be any naturally occurring amino acid
XAKLADHGKKMFLITNSPSSFVDKGMSYIVGKDWRDLFDVVIVQAEKPNFFNDKRRPFRKMNEKGVLLWDKIHKLQKGQIYKQGNLYEFLKLTGWRGSRVLYFGDHIYSDLATMVNDSRPSVSAGVVTHGNYFQN

SEQ ID NO: 9608 - protein, 122 aa, Homo Sapiens
  misc_feature (1)..(1): Xaa can be any naturally occurring amino acid
XTMTWLQTLTGLLEQMQVHRDAESQLVLQEWKKERKEMREMTKSFFNAQFGSLFRTDQNPTYFLRRLSRFADIYMASLSCLLNYDVSHTFYPRRTPLQHELPAWSERPPTFGTPLLQEAQAK

SEQ ID NO: 9609 - protein, 264 aa, Homo Sapiens
MCPRAARAPATLLLALGAVLWPAAGAWELTILHTNDVHSRLEQTSEDSSKCVNASRCMGGVARLFTKVQQIRRAEPNVLLLDAGDQYQGTIWFTVYKGAEVAHFMNALRYDAMALGNHEFDNGVEGLIEPLLKEAKFPILSANIKAKGPLASQISGLYLPYKVLPVGDEVVGIVGYTSKETPFLSNPGTNLVFEDEITALQPEVDKLKTLNVNKIIALGHSGFEMDKLIAQKVRGVDVVVGGHSNTFLYTGNCFKRIAWARMSR

SEQ ID NO: 9610 - protein, 574 aa, Homo Sapiens
MCPRAARAPATLLLALGAVLWPAAGAWELTILHTNDVHSRLEQTSEDSSKCVNASRCMGGVARLFTKVQQIRRAEPNVLLLDAGDQYQGTIWFTVYKGAEVAHFMNALRYDAMALGNHEFDNGVEGLIEPLLKEAKFPILSANIKAKGPLASQISGLYLPYKVLPVGDEVVGIVGYTSKETPFLSNPGTNLVFEDEITALQPEVDKLKTLNVNKIIALGHSGFEMDKLIAQKVRGVDVVVGGHSNTFLYTGNPPSKEVPAGKYPFIVTSDDGRKVPVVQAYAFGKYLGYLKIEFDERGNVISSHGNPILLNSSIPEDPSIKADINKWRIKLDNYSTQELGKTIVYLDGSSQSCRFRECNMGNLICDAMINNNLRHTDEMFWNHVSMCILNGGGIRSPIDERNNGTITWENLAAVLPFGGTFDLVQLKGSTLKKAFEHSVHRYGQSTGEFLQVGGIHVVYDLSRKPGDRVVKLDVLCTKCRVPSYDPLKMDEVYKVILPNFLANGGDGFQMIKDELLRHDSGDQDINVVSTYISKMKVIYPAVEGRIKFSTGSHCHGSFSLIFLSLWAVIFVLYQ

SEQ ID NO: 9611 - protein, 524 aa, Homo Sapiens
MCPRAARAPATLLLALGAVLWPAAGAWELTILHTNDVHSRLEQTSEDSSKCVNASRCMGGVARLFTKVQQIRRAEPNVLLLDAGDQYQGTIWFTVYKGAEVAHFMNALRYDAMALGNHEFDNGVEGLIEPLLKEAKFPILSANIKAKGPLASQISGLYLPYKVLPVGDEVVGIVGYTSKETPFLSNPGTNLVFEDEITALQPEVDKLKTLNVNKIIALGHSGFEMDKLIAQKVRGVDVVVGGHSNTFLYTGNPPSKEVPAGKYPFIVTSDDGRKVPVVQAYAFGKYLGYLKIEFDERGNVISSHGNPILLNSSIPEDPSIKADINKWRIKLDNYSTQELGKTIVYLDGSSQSCRFRECNMGNLICDAMINNNLRHTDEMFWNHVSMCILNGGGIRSPIDERNNGIHVVYDLSRKPGDRVVKLDVLCTKCRVPSYDPLKMDEVYKVILPNFLANGGDGFQMIKDELLRHDSGDQDINVVSTYISKMKVIYPAVEGRIKFSTGSHCHGSFSLIFLSLWAVIFVLYQ

SEQ ID NO: 9612 - protein, 230 aa, Homo Sapiens
  misc_feature (1)..(1): Xaa can be any naturally occurring amino acid
XDVVVGGHSNTFLYTGNPPSKEVPAGKYPFIVTSDDGRKVPVVQAYAFGKYLGYLKIEFDERGNVISSHGNPILLNSSIPEDPSIKADINKWRIKLDNYSTQELGKTIVYLDGSSQSCRFRECNMGNLICDAMINNNLRHTDEMFWNHVSMCILNGGGIRSPIDERNNGIHVVYDLSRKPGDRVVKLDVLCTKCRVPSYDPLKMDEVYKVILPNFLANGGDGFQMIKDEL

SEQ ID NO: 9613 - protein, 179 aa, Homo Sapiens
  misc_feature (1)..(1): Xaa can be any naturally occurring amino acid
XNPILLNSSIPEDPSIKADINKWRIKLDNYSTQELGKTIVYLDGSSQSCRFRECNMGNLICDAMINNNLRHTDEMFWNHVSMCILNGGGIRSPIDERNNGTITWENLAAVLPFGGTFDLVQLKGSTLKKAFEHSVHRYGQSTGEFLQVGDLKECCPICINQDDSWKEQPTAQTYLNTWF

SEQ ID NO: 9614 - protein, 257 aa, Homo Sapiens
MSILFYVIFLAYLRGIQGNNMDQRSLPEDSLNSLIIKLIQADILKNKLSKQMVDVKENYQSTLPKAEAPREPERGGPAKSAFQPVIAMDTELLRQQRRYNSPRVLLSDSTPLEPPPLYLMEDYVGSPVVANRTSRRKRYAEHKSHRGEYSVCDSESLWVTDKSSAIDIRGHQVTVLGEIKTGNSPVKQYFYETRCKEARPVKNGCRGIDDKHWNSQCKTSQTYVRALTSENNKLVGWRWIRIDTSCVCALSRKIGRT

SEQ ID NO: 9615 - protein, 270 aa, Homo Sapiens
MVTFATILQVNKVMSILFYVIFLAYLRGIQGNNMDQRSLPEDSLNSLIIKLIQADILKNKLSKQMVDVKENYQSTLPKAEAPREPERGGPAKSAFQPVIAMDTELLRQQRRYNSPRVLLSDSTPLEPPPLYLMEDYVGSPVVANRTSRRKRYAEHKSHRGEYSVCDSESLWVTDKSSAIDIRGHQVTVLGEIKTGNSPVKQYFYETRCKEARPVKNGCRGIDDKHWNSQCKTSQTYVRALTSENNKLVGWRWIRIDTSCVCALSRKIGRT

SEQ ID NO: 9616 - protein, 143 aa, Homo Sapiens
MLPLPSCSLPILLLFLLPSVPIESQPPPSTLPPFLAPEWDLLSPRVVLSRGAPAGPPLLFLLEAGAFRESAGAPANRSRRGVSETAPASRRGELAVCDAVSGWVTDRRTAVDLRGREVEVLGEVPAAGGSPLRQYFFETRCKA

SEQ ID NO: 9617 - protein, 210 aa, Homo Sapiens
MLPLPSCSLPILLLFLLPSVPIESQPPPSTLPPFLAPEWDLLSPRVVLSRGAPAGPPLLFLLEAGAFRESAGAPANRSRRGVSETAPASRRGELAVCDAVSGWVTDRRTAVDLRGREVEVLGEVPAAGGSPLRQYFFETRCKADNAEEGGPGAGGGGCRGVDRRHWVSECKAKQSYVRALTADAQGRVGWRWIRIDTACVCTLLSRTGRA

SEQ ID NO: 9618 - protein, 316 aa, Homo Sapiens
MGVCGYLFLPWKCLVVVSLRLLFLVPTGVPVRSGDATFPKAMDNVTVRQGESATLRCTIDNRVTRVAWLNRSTILYAGNDKWCLDPRVVLLSNTQTQYSIEIQNVDVYDEGPYTCSVQTDNHPKTSRVHLIVQVSPKIVEISSDISINEGNNISLTCIATGRPEPTVTWRHISPKAVGFVSEDEYLEIQGITREQSGDYECSASNDVAAPVVRRVKVTVNYPPYISEAKGTGVPVGQKGTLQCEASAVPSAEFQWYKDDKRLIEGKKGVKVENRPFLSKLIFFNVSEHDYGNYTCVASNKLGHTNASIMLFGETVL

SEQ ID NO: 9619 - protein, 344 aa, Homo Sapiens
MGVCGYLFLPWKCLVVVSLRLLFLVPTGVPVRSGDATFPKAMDNVTVRQGESATLRCTIDNRVTRVAWLNRSTILYAGNDKWCLDPRVVLLSNTQTQYSIEIQNVDVYDEGPYTCSVQTDNHPKTSRVHLIVQVSPKIVEISSDISINEGNNISLTCIATGRPEPTVTWRHISPKAVGFVSEDEYLEIQGITREQSGDYECSASNDVAAPVVRRVKVTVNYPPYISEAKGTGVPVGQKGTLQCEASAVPSAEFQWYKDDKRLIEGKKGVKVENRPFLSKLIFFNVSEHDYGNYTCVASNKLGHTNASIMLFGPGAVSEVSNGTSRRAGCVWLLPLLVLHLLLKF

SEQ ID NO: 9620 - protein, 355 aa, Homo Sapiens
MGVCGYLFLPWKCLVVVSLRLLFLVPTGVPVRSGDATFPKAMDNVTVRQGESATLRCTIDNRVTRVAWLNRSTILYAGNDKWCLDPRVVLLSNTQTQYSIEIQNVDVYDEGPYTCSVQTDNHPKTSRVHLIVQVSPKIVEISSDISINEGNNISLTCIATGRPEPTVTWRHISPKAVGFVSEDEYLEIQGITREQSGDYECSASNDVAAPVVRRVKVTVNYPPYISEAKGTGVPVGQKGTLQCEASAVPSAEFQWYKDDKRLIEGKKGVKVENRPFLSKLIFFNVSEHDYGNYTCVASNKLGHTNASIMLFEVKTTALTPWKGPGAVSEVSNGTSRRAGCVWLLPLLVLHLLLKF

SEQ ID NO: 9621 - protein, 344 aa, Homo Sapiens
MKTIQPKMHNSISWAIFTGLAALCLFQGVPVRSGDATFPKAMDNVTVRQGESATLRCTIDNRVTRVAWLNRSTILYAGNDKWCLDPRVVLLSNTQTQYSIEIQNVDVYDEGPYTCSVQTDNHPKTSRVHLIVQVSPKIVEISSDISINEGNNISLTCIATGRPEPTVTWRHISPKAVGFVSEDEYLEIQGITREQSGDYECSASNDVAAPVVRRVKVTVNYPPYISEAKGTGVPVGQKGTLQCEASAVPSAEFQWYKDDKRLIEGKKGVKVENRPFLSKLIFFNVSEHDYGNYTCVASNKLGHTNASIMLFGPGAVSEVSNGTSRRAGCVWLLPLLVLHLLLKF

SEQ ID NO: 9622 - protein, 18 aa, Homo Sapiens
MNGKRNGEGGKRWKWKGT

SEQ ID NO: 9623 - protein, 36 aa, Homo Sapiens
MNGKRNGEGGKRWKWKGTGVPVRSGDATFPKAMDNV

SEQ ID NO: 9624 - protein, 191 aa, Homo Sapiens
MNGKRNGEGGKRWKWKGTGVPVRSGDATFPKAMDNVTVRQGESATLRCTIDNRVTRVAWLNRSTILYAGNDKWCLDPRVVLLSNTQTQYSIEIQNVDVYDEGPYTCSVQTDNHPKTSRVHLIVQVSPKIVEISSDISINEGNNISLTCIATGRPEPTVTWRHISPKAVGFVSEDEYLEIQGITREQSGDYE

SEQ ID NO: 9625 - protein, 179 aa, Homo Sapiens
VGFVSEDEYLEIQGITREQSGDYECSASNDVAAPVVRRVKVTVNYPPYISEAKGTGVPVGQKGTLQCEASAVPSAEFQWYKDDKRLIEGKKGVKVENRPFLSKLIFFNVSEHDYGNYTCVASNKLGHTNASIMLFEVKTTALTPWKGPGAVSEVSNGTSRRAGCVWLLPLLVLHLLLKF

SEQ ID NO: 9626 - protein, 168 aa, Homo Sapiens
VGFVSEDEYLEIQGITREQSGDYECSASNDVAAPVVRRVKVTVNYPPYISEAKGTGVPVGQKGTLQCEASAVPSAEFQWYKDDKRLIEGKKGVKVENRPFLSKLIFFNVSEHDYGNYTCVASNKLGHTNASIMLFGPGAVSEVSNGTSRRAGCVWLLPLLVLHLLLKF

SEQ ID NO: 9627 - protein, 119 aa, Homo Sapiens
  misc_feature (1)..(1): Xaa can be any naturally occurring amino acid
XSAEFQWYKDDKRLIEGKKGVKVENRPFLSKLIFFNVSEHDYGNYTCVASNKLGHTNASIMLFELNEPTSSTLLQEVKTTALTPWKGPGAVSEVSNGTSRRAGCVWLLPLLVLHLLLKF

SEQ ID NO: 9628 - protein, 153 aa, Homo Sapiens
HYCKEGYYRDMGKPITHRKACKACDCHPVGAAGKTCNQTTGQCPCKDGVTGITCNRCAKGYQQSRSPIAPCIKIPVAPPTTAASSVEEPEAARQPNTFQAEGLSLLPGAAEKEGARCWGYRRRLGHRVAQAECRGPRSWAWGRITSSFSFASN

SEQ ID NO: 9629 - protein, 604 aa, Homo Sapiens
MMRAVWEALAALAAVACLVGAVRGGPGLSMFAGQAAQPDPCSDENGHPRRCIPDFVNAAFGKDVRVSSTCGRPPARYCVVSERGEERLRSCHLCNASDPKKAHPPAFLTDLNNPHNLTCWQSENYLQFPHNVTLTLSLGKKFEVTYVSLQFCSPRPESMAIYKSMDYGRTWVPFQFYSTQCRKMYNRPHRAPITKQNEQEAVCTDSHTDMRPLSGGLIAFSTLDGRPSAHDFDNSPVLQDWVTATDIRVAFSRLHTFGDENEDDSELARDSYFYAVSDLQVGGRCKCNGHAARCVRDRDDSLVCDCRHNTAGPECDRCKPFHYDRPWQRATAREANECVACNCNLHARRCRFNMELYKLSGRKSGGVCLNCRHNTAGRHCHYCKEGYYRDMGKPITHRKACKACDCHPVGAAGKTCNQTTGQCPCKDGVTGITCNRCAKGYQQSRSPIAPCIKIPVAPPTTAASSVEEPEDCDSYCKASKGKLKINMKKYCKKDYAVQIHILKADKAGDWWKFTVNIISVYKQGTSRIRRGDQSLWIRSRDIACKCPKIKPLKKYLLLGNAEDSPDQSGIVADKSSLVIQWRDTWARRLRKFQQREKKGKCKKA

SEQ ID NO: 9630 - protein, 580 aa, Homo Sapiens
MPGWPWGLLLTAGTLFAALSPGPPAPADPCHDEGGAPRGCVPGLVNAALGREVLASSTCGRPATRACDASDPRRAHSPALLTSPGGTASPLCWRSESLPRAPLNVTLTVPLGKAFELVFVSLRFCSAPPASVALLKSQDHGRSWAPLGFFSSHCDLDYGRLPAPANGPAGPGPEALCFPAPLAQPDGSGLLAFSMQDSSPPGLDLDSSPVLQDWVTATDVRVVLTRPSTAGDPRDMEAVVPYSYAATDLQVGGRCKCNGHASRCLLDTQGHLICDCRHGTEGPDCGRCKPFYCDRPWQRATARESHACLACSCNGHARRCRFNMELYRLSGRRSGGVCLNCRHNTAGRHCHYCREGFYRDPGRALSDRRACRACDCHPVGAAGKTCNQTTGQCPCKDGVTGLTCNRCAPGFQQSRSPVAPCVKTPIPGPTEDSSPVQPQDCDSHCKPARGSYRISLKKFCKKDYAVQVAVGARGEARGAWTRFPVAVLAVFRSGEERARRGSSALWVPAGDAACGCPRLLPGRRYLLLGGGPGAAAGGAGGRGPGLIAARGSLVLPWRDAWTRRLRRLQRRERRGRCSAA

SEQ ID NO: 9631 - protein, 176 aa, Homo Sapiens
MGNLALGRKLWADTTCGQNATELYCFYSENTDLTCRQPKCDKCNAAYPHLAHLPSAMADSSFRFPRTWWQSAEDVHREKIQLDLEAEFYFTHLIVMFKSPRPAAMVLDRSQDFGKTWKPYKYFATNCSATFGLEDDVVKKGAICTSKYSSPFPCTGGEVIFKALSPPYDTENPYSA

SEQ ID NO: 9632 - protein, 591 aa, Homo Sapiens
MGNLALGRKLWADTTCGQNATELYCFYSENTDLTCRQPKCDKCNAAYPHLAHLPSAMADSSFRFPRTWWQSAEDVHREKIQLDLEAEFYFTHLIVMFKSPRPAAMVLDRSQDFGKTWKPYKYFATNCSATFGLEDDVVKKGAICTSKYSSPFPCTGGEVIFKALSPPYDTENPYSAKVQEQLKITNLRVQLLKRQSCPCQRNDLNEEPQHFTHYAIYDFIVKGSCFCNGHADQCIPVHGFRPVKAPGTFHMVHGKCMCKHNTAGSHCQHCAPLYNDRPWEAADGKTGAPNECRTCKCNGHADTCHFDVNVWEASGNRSGGVCDDCQHNTEGQYCQRCKPGFYRDLRRPFSAPDACKPCSCHPVGSAVLPANSVTFCDPSNGDCPCKPGVAGRRCDRCMVGYWGFGDYGCRPCDCAGSCDPITGDCISSHTDIDWYHEVPDFRPVHNKSEPAWEWEDAQGFSALLHSGKCECKEQTLGNAKAFCGMKYSYVLKIKILSAHDKGTHVEVNVKIKKVLKSTKLKIFRGKRTLYPESWTDRGCTCPILNPGLEYLVAGHEDIRTGKLIVNMKSFVQHWKPSLGRKVMDILKRECK

SEQ ID NO: 9633 - protein, 591 aa, Homo Sapiens; identical to SEQ ID NO: 9632

SEQ ID NO: 9634 - protein, 628 aa, Homo Sapiens
MGSCARLLLLWGCTVVAAGLSGVAGVSSRCEKACNPRMGNLALGRKLWADTTCGQNATELYCFYSENTDLTCRQPKCDKCNAAYPHLAHLPSAMADSSFRFPRTWWQSAEDVHREKIQLDLEAEFYFTHLIVMFKSPRPAAMVLDRSQDFGKTWKPYKYFATNCSATFGLEDDVVKKGAICTSKYSSPFPCTGGEVIFKALSPPYDTENPYSAKVQEQLKITNLRVQLLKRQSCPCQRNDLNEEPQHFTHYAIYDFIVKGSCFCNGHADQCIPVHGFRPVKAPGTFHMVHGKCMCKHNTAGSHCQHCAPLYNDRPWEAADGKTGAPNECRTCKCNGHADTCHFDVNVWEASGNRSGGVCDDCQHNTEGQYCQRCKPGFYRDLRRPFSAPDACKPCSCHPVGSAVLPANSVTFCDPSNGDCPCKPGVAGRRCDRCMVGYWGFGDYGCRPCDCAGSCDPITGDCISSHTDIDWYHEVPDFRPVHNKSEPAWEWEDAQGFSALLHSGKCECKEQTLGNAKAFCGMKYSYVLKIKILSAHDKGTHVEVNVKIKKVLKSTKLKIFRGKRTLYPESWTDRGCTCPILNPGLEYLVAGHEDIRTGKLIVNMKSFVQHWKPSLGRKVMDILKRECK

SEQ ID NO: 9635 - protein, 605 aa, Homo Sapiens
MGSCARLLLLWGCTVVAAGLSGVAGVSSRCEKACNPRMGNLALGRKLWADTTCGQNATELYCFYSENTDLTCRQPKCDKCNAAYPHLAHLPSAMADSSFRFPRTWWQSAEDVHREKIQLDLEAEFYFTHLIVMFKSPRPAAMVLDRSQDFGKTWKPYKYFATNCSATFGLEDDVVKKGAICTSKYSSPFPCTGGEVIFKALSPPYDTENPYSAKVQEQLKITNLRVQLLKRQSCPCQRNDLNEEPQHFTHYAIYDFIVKGSCFCNGHADQCIPVHGFRPVKAPGTFHMVHGKCMCKHNTAGSHCQHCAPLYNDRPWEAADGKTGAPNECRTCKCNGHADTCHFDVNVWEASGNRSGGVCDDCQHNTEGQYCQRCKPGFYRDLRRPFSAPDACKPCSCHPVGSAVLPANSVTFCDPSNGDCPCKPGVAGRRCDRCMVGYWGFGDYGCRPCDCAGSCDPITGDCISSHTDIDWYHEVPDFRPVHNKSEPAWEWEDAQGFSALLHSVLKIKILSAHDKGTHVEVNVKIKKVLKSTKLKIFRGKRTLYPESWTDRGCTCPILNPGLEYLVAGHEDIRTGKLIVNMKSFVQHWKPSLGRKVMDILKRECK

SEQ ID NO: 9636 - protein, 75 aa, Homo Sapiens
MPCQRIPEATTTLATTPGAYSSDPQCQNYCNMSDTRVHMSLRRYCQQDHVLRAQVLASEAAGPAWQRLAVRVLAV

SEQ ID NO: 9637 - protein, 489 aa, Homo Sapiens
MPVTFALLLLLGQATADPCYDPQGRPQFCLPPVTQLAAVAASCPQACALSPGNHLGARETCNGSLTLALGGPFLLTSVSLRFCTPGPPALILSAAWASGGPWRLLWHRPAWPGALGGPERVTFHSTPGPKATVAASHLRVEFGGQAGLAAAGLRGRCQCHGHAARCAARARPPRCHCRHHTTGPGCESCRPSHRDWPWRPATPRHPHPCLPCSCNQHARRCRFNSELFRLSGGRSGGVCERCRHHTAGRHCHYCQPGFWRDPSQPIFSRRACRACQCHPIGATGGTCNQTSGQCTCKLGVTGLTCNRCGPGYQQSRSPRMPCQRIPEATTTLATTPGAYSSDPQCQNYCNMSDTRVHMSLRRYCQQDHVLRAQVLASEAAGPAWQRLAVRVLAVYKQRAQPVRRGDQDAWVPRADLTCGCLRLQPGTDYLLLGSAVGDPDPTRLILDRHGLALPWRPRWARPLKRLQQEERAGGCRGVRAPTPSPRPEH

SEQ ID NO: 9638 - protein, 480 aa, Homo Sapiens
MYLSRFLSIHALWVTVSSVMQPYPLVWGHYDLCKTQIYTEEGKVWDYMACQPESTDMTKYLKVKLDPPDITCGDPPETFCAMGNPYMCNNECDASTPELAHPPELMFDFEGRHPSTFWQSATWKEYPKPLQVNITLSWSKTIELTDNIVITFESGRPDQMILEKSLDYGRTWQPYQYYATDCLDAFHMDPKSVKDLSQHTVLEIICTEEYSTGYTTNSKIIHFEIKDRFAFFAGPRLRNMASLYGQLDTTKKLRDFFTVTDLRIRLLRPAVGEIFVDELHLARYFYAISDIKVRGRCKCNLHATVCVYDNSKLTCECEHNTTGPDCGKCKKNYQGRPWSPGSYLPIPKGTANTCIPSISSIGNPPKFNRIWPNISSLEVSNPKQVAPKLALSTVSSVQVANHKRANVCDNELLHCQNGGTCHNNVRCLCPAAYTGILCEKLRCEEAGSCGSDSGQGAPPHGSPALLLLTTLLGTASPLVF

SEQ ID NO: 9639 - protein, 539 aa, Homo Sapiens
MYLSRFLSIHALWVTVSSVMQPYPLVWGHYDLCKTQIYTEEGKVWDYMACQPESTDMTKYLKVKLDPPDITCGDPPETFCAMGNPYMCNNECDASTPELAHPPELMFDFEGRHPSTFWQSATWKEYPKPLQVNITLSWSKTIELTDNIVITFESGRPDQMILEKSLDYGRTWQPYQYYATDCLDAFHMDPKSVKDLSQHTVLEIICTEEYSTGYTTNSKIIHFEIKDRFAFFAGPRLRNMASLYGQLDTTKKLRDFFTVTDLRIRLLRPAVGEIFVDELHLARYFYAISDIKVRGRCKCNLHATVCVYDNSKLTCECEHNTTGPDCGKCKKNYQGRPWSPGSYLPIPKGTANTCIPSISSIGNCECFGHSNRCSYIDLLNTVICVSCKHNTRGQHCELCRLGYFRNASAQLDDENVCIECYCNPLGSIHDRCNGSGFCECKTGTTGPKCDECLPGNSWHYGCQPNVCDNELLHCQNGGTCHNNVRCLCPAAYTGILCEKLRCEEAGSCGSDSGQGAPPHGSPALLLLTTLLGTASPLVF

SEQ ID NO: 9640 - protein, 539 aa, Homo Sapiens; identical to SEQ ID NO: 9639

SEQ ID NO: 9641 - protein, 460 aa, Homo Sapiens
MYLSRFLSIHALWVTVSSVMQPYPLVWGHYDLCKTQIYTEEGKVWDYMACQPESTDMTKYLKVKLDPPDITCGDPPETFCAMGNPYMCNNECDASTPELAHPPELMFDFEGRHPSTFWQSATWKEYPKPLQVNITLSWSKTIELTDNIVITFESGRPDQMILEKSLDYGRTWQPYQYYATDCLDAFHMDPKSVKDLSQHTVLEIICTEEYSTGYTTNSKIIHFEIKDRFAFFAGPRLRNMASLYGQLDTTKKLRDFFTVTDLRIRLLRPAVGEIFVDELHLARYFYAISDIKVRGRCKCNLHATVCVYDNSKLTCECEHNTTGPDCGKCKKNYQGRPWSPGSYLPIPKGTANTCIPSISSIGNPPKFNRIWPNISSLEVSNPKQANVCDNELLHCQNGGTCHNNVRCLCPAAYTGILCEKLRCEEAGSCGSDSGQGAPPHGSPALLLLTTLLGTASPLVF

SEQ ID NO: 9642 - protein, 480 aa, Homo Sapiens; identical to SEQ ID NO: 9638

SEQ ID NO: 9643 - protein, 438 aa, Homo Sapiens
MYLSRFLSIHALWVTVSSVMQPYPLVWGHYDLCKTQIYTEEGKVWDYMACQPESTDMTKYLKVKLDPPDITCGDPPETFCAMGNPYMCNNECDASTPELAHPPELMFDFEGRHPSTFWQSATWKEYPKPLQVNITLSWSKTIELTDNIVITFESGRPDQMILEKSLDYGRTWQPYQYYATDCLDAFHMDPKSVKDLSQHTVLEIICTEEYSTGYTTNSKIIHFEIKDRFAFFAGPRLRNMASLYGQLDTTKKLRDFFTVTDLRIRLLRPAVGEIFVDELHLARYFYAISDIKVRGRCKCNLHATVCVYDNSKLTCECEHNTTGPDCGKCKKNYQGRPWSPGSYLPIPKGTANTCIPSISSIGTNVCDNELLHCQNGGTCHNNVRCLCPAAYTGILCEKLRCEEAGSCGSDSGQGAPPHGSPALLLLTTLLGTASPLVF

SEQ ID NO: 9644 - protein, 494 aa, Homo Sapiens
MYLSRFLSIHALWVTVSSVMQPYPLVWGHYDLCKTQIYTEEGKVWDYMACQPESTDMTKYLKVKLDPPDITCGDPPETFCAMGNPYMCNNECDASTPELAHPPELMFDFEGRHPSTFWQSATWKEYPKPLQVNITLSWSKTIELTDNIVITFESGRPDQMILEKSLDYGRTWQPYQYYATDCLDAFHMDPKSVKDLSQHTVLEIICTEEYSTGYTTNSKIIHFEIKDRFAFFAGPRLRNMASLYGQLDTTKKLRDFFTVTDLRIRLLRPAVGEIFVDELHLARYFYAISDIKVRGRCKCNLHATVCVYDNSKLTCECEHNTTGPDCGKCKKNYQGRPWSPGSYLPIPKGTANTCIPSISSIGNCECFGHSNRCSYIDLLNTVICVSCKHNTRGQHCELCRLGYFRNASAQLDDENVCIANVCDNELLHCQNGGTCHNNVRCLCPAAYTGILCEKLRCEEAGSCGSDSGQGAPPHGSPALLLLTTLLGTASPLVF

SEQ ID NO: 9645 - protein, 422 aa, Homo Sapiens
MLHLLALFLHCLPLASGDYDICKSWVTTDEGPTWEFYACQPKVMRLKDYVKVKVEPSGITCGDPPERFCSHENPYLCSNECDASNPDLAHPPRLMFDKEEEGLATYWQSITWSRYPSPLEANITLSWNKTVELTDDVVMTFEYGRPTVMVLEKSLDNGRTWQPYQFYAEDCMEAFGMSARRARDMSSSSAHRVLCTEEYSRWAGSKKEKHVRFEVRDRFAIFAGPDLRNMDNLYTRLESAKGLKEFFTLTDLRMRLLRPALGGTYVQRENLYKYFYAISNIEVIGRCKCNLHANLCSMREGSLQCECEHNTTGPDCGKCKKNFRTRSWRAGSYLPLPHGSPNACATAGSFGTLQTPPPGRSPSALRGSRRGLANVKEPAGSRPQISEMLLGCTVTLHQGSVGPHIPPKLSLPDPGGPWLGSQ

SEQ ID NO: 9646 - protein, 530 aa, Homo Sapiens
MLHLLALFLHCLPLASGDYDICKSWVTTDEGPTWEFYACQPKVMRLKDYVKVKVEPSGITCGDPPERFCSHENPYLCSNECDASNPDLAHPPRLMFDKEEEGLATYWQSITWSRYPSPLEANITLSWNKTVELTDDVVMTFEYGRPTVMVLEKSLDNGRTWQPYQFYAEDCMEAFGMSARRARDMSSSSAHRVLCTEEYSRWAGSKKEKHVRFEVRDRFAIFAGPDLRNMDNLYTRLESAKGLKEFFTLTDLRMRLLRPALGGTYVQRENLYKYFYAISNIEVIGRCKCNLHANLCSMREGSLQCECEHNTTGPDCGKCKKNFRTRSWRAGSYLPLPHGSPNACATAGSFGNCECYGHSNRCSYIDFLNVVTCVSCKHNTRGQHCQHCRLGYYRNGSAELDDENVCIECNCNQIGSVHDRCNETGFCECREGAAGPKCDDCLPTHYWRQGCYPNVCDDDQLLCQNGGTCLQNQRCACPRGYTGVRCEQPRCDPADDDGGLDCDRAPGAAPRPATLLGCLLLLGLAARLGR

SEQ ID NO: 9647 - protein, 170 aa, Homo Sapiens
MMAGMKIQLVCMLLLAFSSWSLCSDSEEEMKALEADFLTNMHTSKISKAHVPSWKMTLLNVCSLVNNLNSPAEETGEVHEEELVARRKLPTALDGFSLEAMLTIYQLHKICHSRAFQHWELIQEDILDTGNDKNGKEEVIKRKIPYILKRQLYENKPRRPYILKRDSYYY

SEQ ID NO: 9648 - protein, 95 aa, Homo Sapiens
MMAGMKIQLVCMLLLAFSSWSLCSDSEEEMKALEADFLTNMHTSKLIQEDILDTGNDKNGKEEVIKRKIPYILKRQLYENKPRRPYILKRDSYYY

SEQ ID NO: 9649 - protein, 103 aa, Homo Sapiens
MGIWQRLLLFGGVSLRAGGGATAPLGGSRAMVCGRQLSGAGSETLKQRRTQIMSRGLPKQKPIEGVKQVIVVASGKGGVGKSTTAVETGFHRVNQDGLHLLIS

SEQ ID NO: 9650 - protein, 319 aa, Homo Sapiens
MGIWQRLLLFGGVSLRAGGGATAPLGGSRAMVCGRQLSGAGSETLKQRRTQIMSRGLPKQKPIEGVKQVIVVASGKGGVGKSTTAVNLALALAANDSSKAIGLLDVDVYGPSVPKMMNLKGNPELSQSNLMRPLLNYGIACMSMGFLVEESEPVVWRGLMVMSAIEKLLRQVDWGQLDYLVVDMPPGTGDVQLSVSQNIPITGAVIVSTPQDIALMDAHKGAEMFRRVHVPVLGLVQNMSVFQCPKCKHKTHIFGADGARKLAQTLGLEVLGDIPLHLNIREASDTGQPIVFSQPESDEAKAYLRIAVEVVRRLPSPSE

SEQ ID NO: 9651 - protein, 173 aa, Homo Sapiens
MGIWQRLLLFGGVSLRAGGGATAPLGGSRAMVCGRQLSGAGSETLKQRRTQIMSRGLPKQKPIEGVKQVIVVASGKGGVGKSTTAVNLALALAANDSSKAIGLLDVDVYGPSVPKMMNLKGNPELSQSNLMRPLLNYGIACMSMGFLVEESEPVVWRGLMVMSAIEKLLRQVL

SEQ ID NO: 9652 - protein, 167 aa, Homo Sapiens
MGIWQRLLLFGGVSLRAGGGATAPLGGSRAMVCGRQLSGAGSETLKQRRTQIMSRGLPKQKPIEGVKQVIVVASGKGGVGKSTTAVNLALALAANDSVLGLVQNMSVFQCPKCKHKTHIFGADGARKLAQTLGLEVLGDIPLHLNIREASDTGQPIVFSQPESDEAK

SEQ ID NO: 9653 - protein, 54 aa, Homo Sapiens
MMRIEVKVKMMLSGAGSETLKQRRTQIMSRGLPKQKPIEGVKQVIVVASGKGGV

SEQ ID NO: 9654 - protein, 133 aa, Homo Sapiens
MSRGLPKQKPIEGVKQVIVVASGKGGVGKSTTAVNLALALAANDSSKAIGLLDVDVYGPSVPKMMNLKGNPELSQSNLMRPLLNYGIACMSMGFLVEESEPVVWRGLMVMSAIEKLLRQVDWGQLDYLVVDMP

SEQ ID NO: 9655 - protein, 130 aa, Homo Sapiens
VSLRAGGGATAPLGGSRAMVCGRQLSGAGSETLKQRRTQIMSRGLPKQKPIEGVKQVIVVASGKGGVGKSTTAVNLALALAANDSSKAIGLLDVDVYGPSVPKMMNLKGNPELSQSISQRCCRSCSRPPQ

SEQ ID NO: 9656 - protein, 111 aa, Homo Sapiens
MPPSGPRGTLLLLPLLLLLLLRAVLAVPLERGAPNKEETPATESPDTGLYYHRYLQEVIDVLETDGHFREKLQAANAEDIKSGKLSRELDFVSHHVRTKLDELKRQEVSRL

SEQ ID NO: 9657 - protein, 124 aa, Homo Sapiens
MPPSGPRGTLLLLPLLLLLLLRAVLAVPLERGAPNKEETPATESPDTGLYYHRYLQEVIDVLETDGHFREKLQAANAEDIKSGKLSRELDFVSHHVRTKLDELKRQEVSRLRMLLKAKMDAEQD

SEQ ID NO: 9658 - protein, 268 aa, Homo Sapiens
MPPSGPRGTLLLLPLLLLLLLRAVLAVPLERGAPNKEETPATESPDTGLYYHRYLQEVIDVLETDGHFREKLQAANAEDIKSGKLSRELDFVSHHVRTKLDELKRQEVSRLRMLLKAKMDAEQDPNVQVDHLNLLKQFEHLDPQNQHTFEARDLELLIQTATRDLAQYDAAHHEEFKRYEMLKEHERRRYLESLGEEQRKEAERKLEEQQRRHREHPKVNVPGSQAQLKEVWEELDGLDPNRDLTHPVLGPLRYLAILFPSDINSDGV

SEQ ID NO: 9659 - protein, 461 aa, Homo Sapiens
MPPSGPRGTLLLLPLLLLLLLRAVLAVPLERGAPNKEETPATESPDTGLYYHRYLQEVIDVLETDGHFREKLQAANAEDIKSGKLSRELDFVSHHVRTKLDELKRQEVSRLRMLLKAKMDAEQDPNVQVDHLNLLKQFEHLDPQNQHTFEARDLELLIQTATRDLAQYDAAHHEEFKRYEMLKEHERRRYLESLGEEQRKEAERKLEEQQRRHREHPKVNVPGSQAQLKEVWEELDGLDPNRFNPKTFFILHDINSDGVLDEQELEALFTKELEKVYDPKNEEDDMREMEEERLRMREHVMKNVDTNQDRLVTLEEFLASTQRKEFGDTGEGWETVEMHPAYTEEELRRFEEELAAREAELNAKAQRLSQETEALGRSQGRLEAQKRELQQAVLHMEQRKQQQQQQQGHKAPAAHPEGQLKFHPDTDDVPVPAPAGDQKEVDTSEKKLLERLPEVEVPQHL

SEQ ID NO: 9660 - protein, 461 aa, Homo Sapiens; identical to SEQ ID NO: 9659

SEQ ID NO: 9661 - protein, 75 aa, Homo Sapiens
MPPSGPRGTLLLLPLLLLLLLRAVLAVPLERGAPNKEETPATESPVSGPALLSSQVFAVVLQLLQTPVPVGRMLQ

SEQ ID NO: 9662 - protein, 295 aa, Homo Sapiens
  misc_feature (1)..(1): Xaa can be any naturally occurring amino acid
XPPSGPRGTLLLLPLLLLLLLRAVLAVPLERGAPNKEETPATESPDTGLYYHRYLQEVIDVLETDGHFREKLQAANAEDIKSGKLSRELDFVSHHVRTKLDELKRQEFEHLDPQNQHTFEARDLELLIQTATRDLAQYDAAHHEEFKRYEMLKEHERRRYLESLGEEQRKEAERKLEEQQRRHREHPKVNVPGSQAQLKEVWEELDGLDPNRFNPKTFFILHDINSDGVLDEQELEALFTKELEKVYDPKNEEDDMREMEEERLRMREHVMKNVDTNQDRLVTLEEFLASTQRKE

SEQ ID NO: 9663 - protein, 34 aa, Homo Sapiens
MRWRTILLQYCFLLITCLLTALEAVPIDIDKTKV

SEQ ID NO: 9664 - protein, 34 aa, Homo Sapiens; identical to SEQ ID NO: 9663

SEQ ID NO: 9665 - protein, 39 aa, Homo Sapiens
MRWRTILLQYCFLLITCLLTALEAVPIDIDKTKVQNIHP

SEQ ID NO: 9666 - protein, 69 aa, Homo Sapiens
MRWRTILLQYCFLLITCLLTALEAVPIDIDKTKVQNIHPVESAKIEPPDTGLYYDEYLKQVIDVLETDK

SEQ ID NO: 9667 - protein, 69 aa, Homo Sapiens; identical to SEQ ID NO: 9666

SEQ ID NO: 9668 - protein, 90 aa, Homo Sapiens
MRWRTILLQYCFLLITCLLTALEAVPIDIDKTKVQNIHPVESAKIEPPDTGLYYDEYLKQVIDVLETDKHFREKLQKADIEEIKSGRLSK

SEQ ID NO: 9669 - protein, 195 aa, Homo Sapiens
MRWRTILLQYCFLLITCLLTALEAVPIDIDKTKVQNIHPVESAKIEPPDTGLYYDEYLKQVIDVLETDKHFREKLQKADIEEIKSGRLSKELDLVSHHVRTKLDELKRQEVGRLRMLIKAKLDSLQDIGMDHQALLKQFDHLNHLNPDKFESTDLDMLIKAATSDLEHYDKTRHEEFKKYEMMKEHERREYLKTL

SEQ ID NO: 9670 - protein, 198 aa, Homo Sapiens
MRWRTILLQYCFLLITCLLTALEAVPIDIDKTKVQNIHPVESAKIEPPDTGLYYDEYLKQVIDVLETDKHFREKLQKADIEEIKSGRLSKELDLVSHHVRTKLDELKRQEVGRLRMLIKAKLDSLQDIGMDHQALLKQFDHLNHLNPDKFESTDLDMLIKAATSDLEHYDKTRHEEFKKYEMMKEHERREYLKTLNEE

SEQ ID NO: 9671 - protein, 420 aa, Homo Sapiens
MRWRTILLQYCFLLITCLLTALEAVPIDIDKTKVQNIHPVESAKIEPPDTGLYYDEYLKQVIDVLETDKHFREKLQKADIEEIKSGRLSKELDLVSHHVRTKLDELKRQEVGRLRMLIKAKLDSLQDIGMDHQALLKQFDHLNHLNPDKFESTDLDMLIKAATSDLEHYDKTRHEEFKKYEMMKEHERREYLKTLNEEKRKEEESKFEEMKKKHENHPKVNHPGSKDQLKEVWEETDGLDPNDFDPKTFFKLHDVNSDGFLDEQELEALFTKELEKVYDPKNEEDDMVEMEEERLRMREHVMNEVDTNKDRLVTLEEFLKATEKKEFLEPDSWETLDQQQFFTEEELKEYENIIALQENELKKKADELQKQKEELQRQHDQLEAQKLEYHQVIQQMEQKKLQQGIPPSGPAGELKFEPRV

SEQ ID NO: 9672 - protein, 390 aa, Homo Sapiens
MRWRTILLQYCFLLITCLLTALEAVPIDIDKTKVQNIHPVESAKIEPPDTGLYYDEYLKQVIDVLETDKHFREKLQKADIEEIKSGRLSKELDLVSHHVRTKLDELKRQEVGRLRMLIKAKLDSLQDIGMDHQALLKQFDHLNHLNPDKFESTDLDMLIKAATSDLEHYDKTRHEEFKKYEMMKEHERREYLKTLNEEKRKEEESKFEEMKKKHENHPKVNHPGSKDQLKEVWEETDGLDPNDFDPKTFFKLHDVNSDGFLDEQELEALFTKELEKVYDPKNEEDDMVEMEEERLRMREHVMNETLDQQQFFTEEELKEYENIIALQENELKKKADELQKQKEELQRQHDQLEAQKLEYHQVIQQMEQKKLQQGIPPSGPAGELKFEPHI

SEQ ID NO: 9673 - protein, 420 aa, Homo Sapiens
MRWRTILLQYCFLLITCLLTALEAVPIDIDKTKVQNIHPVESAKIEPPDTGLYYDEYLKQVIDVLETDKHFREKLQKADIEEIKSGRLSKELDLVSHHVRTKLDELKRQEVGRLRMLIKAKLDSLQDIGMDHQALLKQFDHLNHLNPDKFESTDLDMLIKAATSDLEHYDKTRHEEFKKYEMMKEHERREYLKTLNEEKRKEEESKFEEMKKKHENHPKVNHPGSKDQLKEVWEETDGLDPNDFDPKTFFKLHDVNSDGFLDEQELEALFTKELEKVYDPKNEEDDMVEMEEERLRMREHVMNEVDTNKDRLVTLEEFLKATEKKEFLEPDSWETLDQQQFFTEEELKEYENIIALQENELKKKADELQKQKEELQRQHDQLEAQKLEYHQVIQQMEQKKLQQGIPPSGPAGELKFEPHI

SEQ ID NO: 9674 - protein, 338 aa, Homo Sapiens
MRWRTILLQYCFLLITCLLTALEAVPIDIDKTKVQNIHPVESAKIEPPDTGLYYDEYLKQVIDVLETDKHFREKLQKADIEEIKSGRLSKELDLVSHHVRTKLDELKRQEVGRLRMLIKAKLDSLQDIGMDHQALLKQFDHLNHLNPDKFESTDLDMLIKAATSDLEHYDKTRHEEFKKYEMMKEHERREYLKTLNEEKRKEEESKFEEMKKKHENHPKVNHPGSKDQLKEVWEETDGLDPNDFDPKTFFKLHDVNSDGFLDEQELEALFTKELEKVYDPKNEEDDMVEMEEERLRMREHVMNEVDTNKDRLVTLEEFLKATEKKEFLEPDSWESPSI

SEQ ID NO: 9675 - protein, 420 aa, Homo Sapiens; identical to SEQ ID NO: 9673

SEQ ID NO: 9676 - protein, 231 aa, Homo Sapiens
MRWRTILLQYCFLLITCLLTALEAVPIDIDKTKVQNIHPVESAKIEPPDTGLYYDEYLKQVIDVLETDKHFREKLQKADIEEIKSGRLSKELDLVSHHVRTKLDELKRQEVGRLRMLIKAKLDSLQDIGMDHQALLKQFDHLNHLNPDKFESTDLDMLIKAATSDLEHYDKTRHEEFKKYEMMKEHERREYLKTLNEEKRKEEESKFEEMKKKHENHPKVNHPVHREAKIN

SEQ ID NO: 9677 - protein, 73 aa, Homo Sapiens
  misc_feature (1)..(1): Xaa can be any naturally occurring amino acid
XEERLRMREHVMNEVDTNKDRLVTLEEFLKATEKKEFLEPDSWEVIQQMEQKKLQQGIPPSGPAGELKFEPHI

SEQ ID NO: 9678 - protein, 198 aa, Homo Sapiens
  misc_feature (1)..(1): Xaa can be any naturally occurring amino acid
XTLNEEKRKEEESKFEEMKKKHENHPKVNHPGSKDQLKEVWEETDGLDPNDFDPKTFFKLHDVNSDGFLDEQELEALFTKELEKVYDPKNEEDDMVEMEEERLRMREHVMNETLDQQQFFTEEELKEYENIIALQENELKKKADELQKQKEELQRQHDQLEAQKLEYHQVIQQMEQKKLQQGIPPSGPAGELKFEPHI

SEQ ID NO: 9679 - protein, 375 aa, Homo Sapiens
MSSSLRPGPSRWRRAASIVLAAGWSRPETATPPSRPPPAEGFRLLLLQRSPHQGFMPGAHVFSGGVLDAADRSADWLGLFAPHHGPPRFGLGPAPFSRTAFPSLPDTDDHKTDNTGTLPEDVAFRICAVREAFEEAGVLLLRPRTSPPGPAPGPGLALEPPPGLASWRDRVRQDPRHFLRLCAHLDCTPDIWALHNWSAWLTPFLRGTTRRFDTAFFLCCLREPPPVYPDLAEVVGYQWSSPSEATESFLSKEIWLPPPQFYEVRRLANFASLSDLHKFCLGRALEGLERWLPIILLTADGMVHLLPGDELYLEDSDFLENLMSTEKKTEEIMKEGKQFHRIVTYHRHLYDIHVTVQPKYKHVYPKNSVVRKSHL

SEQ ID NO: 9680 - protein, 77 aa, Homo Sapiens
MAGRLLGKALAAVSLSLALASVTIRSSRCRGIQAFRNPAGRTGLVGRGLLGRWGPNHAADPIITRGWWIQERRLVPH

SEQ ID NO: 9681 - protein, 284 aa, Homo Sapiens
MAGRLLGKALAAVSLSLALASVTIRSSRCRGIQAFRNSFSSSWFHLNTNVMSGSNGSKENSHNKARTSPYPGSKVERSQVPNEKVGWLVEWQDYKPVEYTAVSVLAGPRWADPQIRNPAGRTGLVGRGLLGRWGPNHAADPIITRWKRDSSGNKIMHPVSGKHILQFVAIKRKDCGEWAIPGGMVDPGEKISATLKREFGEEALNSLQKTSAEKREIEEKLHKLFSQDHLVIYKGYVDDPRNTDNAWMETEAVNYHDETGEIMDNLMLEAGDDAGKVKWVDIND

SEQ ID NO: 9682 - protein, 350 aa, Homo Sapiens
MAGRLLGKALAAVSLSLALASVTIRSSRCRGIQAFRNSFSSSWFHLNTNVMSGSNGSKENSHNKARTSPYPGSKVERSQVPNEKVGWLVEWQDYKPVEYTAVSVLAGPRWADPQISESNFSPKFNEKDGHVERKSKNGLYEIENGRPRNPAGRTGLVGRGLLGRWGPNHAADPIITRWKRDSSGNKIMHPVSGKHILQFVAIKRKDCGEWAIPGGMVDPGEKISATLKREFGEEALNSLQKTSAEKREIEEKLHKLFSQDHLVIYKGYVDDPRNTDNAWMETEAVNYHDETGEIMDNLMLEAGDDAGKVKWVDINDKLKLYASHSQFIKLVAEKRDAHWSEDSEADCHAL

SEQ ID NO: 9683 - protein, 206 aa, Homo Sapiens
MSGSNGSKENSHNKARTSPYPGSKVERSQVPNEKVGWLVEWQDYKPVEYTAVSVLAGPRWADPQISESNFSPKFNEKDGHVERKSKNGLYEIENGRPRNPAGRTGLVGRGLLGRWGPNHAADPIITRWKRDSSGNKIMHPVSGKHILQFVAIKRKDCGEWAIPGGMVDPGEKISATLKREFGEEALNSLQKTSAEKREIEEKLHKL

SEQ ID NO: 9684 - protein, 300 aa, Homo Sapiens
MSGSNGSKENSHNKARTSPYPGSKVERSQVPNEKVGWLVEWQDYKPVEYTAVSVLAGPRWADPQISESNFSPKFNEKDGHVERKSKNGLYEIENGRPRNPAGRTGLVGRGLLGRWGPNHAADPIITRWKRDSSGNKIMHPVSGKHILQFVAIKRKDCGEWAIPGGMVDPGEKISATLKREFGEEALNSLQKTSAEKREIEEKLHKLFSQDHLVIYKGYVDDPRNTDNAWMETEAVNYHDETGEIMDNLMLEAGDDAGKVKWVDINDKLKLYASHSQFIKLVAEKRDAHWSEDSEADCHAL

SEQ ID NO: 9685 - protein, 1391 aa, Homo Sapiens
MPSSLLGAAMPASTSAAALQEALENAGRLIDRQLQEDRMYPDLSELLMVSAPNNPTVSGMSDMDYPLQGPGLLSVPNLPEISSIRRVPLPPELVEQFGHMQCNCMMGVFPPISRAWLTIDSDIFMWNYEDGGDLAYFDGLSETILAVGLVKPKAGIFQPHVRHLLVLATPVDIVILGLSYANLQTGSGVLNDSLSGGMQLLPDPLYSLPTDNTYLLTITSTDNGRIFLAGKDGCLYEVAYQAEAGWFSQRCRKINHSKSSLSFLVPSLLQFTFSEDDPILQIAIDNSRNILYTRSEKGVIQVYDLGQDGQGMSRVASVSQNAIVSAAGNIARTIDRSVFKPIVQIAVIENSESLDCQLLAVTHAGVRLYFSTCPFRQPLARPNTLTLVHVRLPPGFSASSTVEKPSKVHRALYSKGILLMAASENEDNDILWCVNHDTFPFQKPMMETQMTAGVDGHSWALSAIDELKVDKIITPLNKDHIPITDSPVVVQQHMLPPKKFVLLSAQGSLMFHKLRPVDQLRHLLVSNVGGDGEEIERFFKLHQEDQACATCLILACSTAACDREVSAWATRAFFRYGGEAQMRFPTTLPPPSNVGPILGSPVYSSSPVPSGSPYPNPSFLGTPSHGIQPPAMSTPVCALGNPATQATNMSCVTGPEIVYSGKHNGICIYFSRIMGNIWDASLVVERIFKSGNREITAIESSVPCQLLESVLQELKGLQEFLDRNSQFAGGPLGNPNTTAKVQQRLIGFMRPENGNPQQMQQELQRKFHEAQLSEKISLQAIQQLVRKSYQALALWKLLCEHQFTIIVAELQKELQEQLKITTFKDLVIRDKELTGALIASLINCYIRDNAAVDGISLHLQDICPLLYSTDDAICSKANELLQRSRQVQNKTEKERMLRESLKEYQKISNQVDLSNVCAQYRQVRFYEGVVELSLTAAEKKDPQGLGLHFYKHGEPEEDIVGLQAFQERLNSYKCITDTLQELVNQSKAAPQSPSVPKKPGPPVLSSDPNMLSNEEAGHHFEQMLKLSQRSKDELFSIALYNWLIQVDLADKLLQVASPFLEPHLVRMAKVDQNRVRYMDLLWRYYEKNRSFSNAARVLSRLADMHSTEISLQQRLEYIARAILSAKSSTAISSIAADGEFLHELEEKMEVARIQLQIQETLQRQYSHHSSVQDAVSQLDSELMDITKLYGEFADPFKLAECKLAIIHCAGYSDPILVQTLWQDIIEKELSDSVTLSSSDRMHALSLKIVLLGKIYAGTPRFFPLDFIVQFLEQQVCTLNWDVGFVIQTMNEIGVPLPRLLEVYDQLFKSRDPFWNRMKKPLHLLDCIHVLLIRYVENPSQVLNCERRRFTNLCLDAVCGYLVELQSMSSSVAVQAITGNFKSLQAKLERLH

SEQ ID NO: 9686 - protein, 1327 aa, Homo Sapiens
MPSSLLGAAMPASTSAAALQEALENAGRLIDRQLQEDRMYPDLSELLMVSAPNNPTVSGMSDMDYPLQGPGLLSVPNLPEISSIRRVPLPPELVEQFGHMQCNCMMGVFPPISRAWLTIDSDIFMWNYEDGGDLAYFDGLSETILAVGLVKPKAGIFQPHVRHLLVLATPVDIVILGLSYANLQTGSGVLNDSLSGGMQLLPDPLYSLPTDNTYLLTITSTDNGRIFLAGKDGCLYEVAYQAEAGWFSQRCRKINHSKSSLSFLVPSLLQFTFSEDDPILQIAIDNSRNILYTRSEKGVIQVYDLGQDGQGMSRVASVSQNAIVSAAGNIARTIDRSVFKPIVQIAVIENSESLDCQLLAVTHAGVRLYFSTCPFRQPLARPNTLTLVHVRLPPGFSASSTVEKPSKVHRALYSKGILLMAASENEDNDILWCVNHDTFPFQKPMMETQMTAGVDGHSWALSAIDELKVDKIITPLNKDHIPITDSPVVVQQHMLPPKKFVLLSAQGSLMFHKLRPVDQLRHLLVSNVGGDGEEIERFFKLHQEDQACATCLILACSTAACDREVSAWATRAFFRYGGEAQMRFPTTLPPPSNVGPILGSPVYSSSPVPSGSPYPNPSFLGTPSHGIQPPAMSTPVCALGNPATQATNMSCVTGPEIVYSGKHNGICIYFSRIMGNIWDASLVVERIFKSGNREITAIESSVPCQLLESVLQELKGLQEFLDRNSQFAGGPLGNPNTTAKVQQRLIGFMRPENGNPQQMQQELQRKFHEAQLSEKISLQAIQQLVRKSYQALALWKLLCEHQFTIIVAELQKANELLQRSRQVQNKTEKERMLRESLKEYQKISNQVDLSNVCAQYRQVRFYEGVVELSLTAAEKKDPQGLGLHFYKHGEPEEDIVGLQAFQERLNSYKCITDTLQELVNQSKAAPQSPSVPKKPGPPVLSSDPNMLSNEEAGHHFEQMLKLSQRSKDELFSIALYNWLIQVDLADKLLQVASPFLEPHLVRMAKVDQNRVRYMDLLWRYYEKNRSFSNAARVLSRLADMHSTEISLQQRLEYIARAILSAKSSTAISSIAADGEFLHELEEKMEVARIQLQIQETLQRQYSHHSSVQDAVSQLDSELMDITKLYGEFADPFKLAECKLAIIHCAGYSDPILVQTLWQDIIEKELSDSVTLSSSDRMHALSLKIVLLGKIYAGTPRFFPLDFIVQFLEQQVCTLNWDVGFVIQTMNEIGVPLPRLLEVYDQLFKSRDPFWNRMKKPLHLLDCIHVLLIRYVENPSQVLNCERRRFTNLCLDAVCGYLVELQSMSSSVAVQAITGNFKSLQAKLERLH

SEQ ID NO: 9687 - protein, 54 aa, Homo Sapiens
MPSSLLGAAMPASTSAAALQEALENAGRLIDRQLQEDRMYPDLSELLMVSAPSE

SEQ ID NO: 9688 - protein, 1332 aa, Homo Sapiens
MSDMDYPLQGPGLLSVPNLPEISSIRRVPLPPELVEQFGHMQCNCMMGVFPPISRAWLTIDSDIFMWNYEDGGDLAYFDGLSETILAVGLVKPKAGIFQPHVRHLLVLATPVDIVILGLSYANLQTGSGVLNDSLSGGMQLLPDPLYSLPTDNTYLLTITSTDNGRIFLAGKDGCLYEVAYQAEAGWFSQRCRKINHSKSSLSFLVPSLLQFTFSEDDPILQIAIDNSRNILYTRSEKGVIQVYDLGQDGQGMSRVASVSQNAIVSAAGNIARTIDRSVFKPIVQIAVIENSESLDCQLLAVTHAGVRLYFSTCPFRQPLARPNTLTLVHVRLPPGFSASSTVEKPSKVHRALYSKGILLMAASENEDNDILWCVNHDTFPFQKPMMETQMTAGVDGHSWALSAIDELKVDKIITPLNKDHIPITDSPVVVQQHMLPPKKFVLLSAQGSLMFHKLRPVDQLRHLLVSNVGGDGEEIERFFKLHQEDQACATCLILACSTAACDREVSAWATRAFFRYGGEAQMRFPTTLPPPSNVGPILGSPVYSSSPVPSGSPYPNPSFLGTPSHGIQPPAMSTPVCALGNPATQATNMSCVTGPEIVYSGKHNGICIYFSRIMGNIWDASLVVERIFKSGNREITAIESSVPCQLLESVLQELKGLQEFLDRNSQFAGGPLGNPNTTAKVQQRLIGFMRPENGNPQQMQQELQRKFHEAQLSEKISLQAIQQLVRKSYQALALWKLLCEHQFTIIVAELQKELQEQLKITTFKDLVIRDKELTGALIASLINCYIRDNAAVDGISLHLQDICPLLYSTDDAICSKANELLQRSRQVQNKTEKERMLRESLKEYQKISNQVDLSNVCAQYRQVRFYEGVVELSLTAAEKKDPQGLGLHFYKHGEPEEDIVGLQAFQERLNSYKCITDTLQELVNQSKAAPQSPSVPKKPGPPVLSSDPNMLSNEEAGHHFEQMLKLSQRSKDELFSIALYNWLIQVDLADKLLQVASPFLEPHLVRMAKVDQNRVRYMDLLWRYYEKNRSFSNAARVLSRLADMHSTEISLQQRLEYIARAILSAKSSTAISSIAADGEFLHELEEKMEVARIQLQIQETLQRQYSHHSSVQDAVSQLDSELMDITKLYGEFADPFKLAECKLAIIHCAGYSDPILVQTLWQDIIEKELSDSVTLSSSDRMHALSLKIVLLGKIYAGTPRFFPLDFIVQFLEQQVCTLNWDVGFVIQTMNEIGVPLPRLLEVYDQLFKSRDPFWNRMKKPLHLLDCIHVLLIRYVENPSQVLNCERRRFTNLCLDAVCGYLVELQSMSSSVAVQAITGNFKSLQAKLERLH

SEQ ID NO: 9689 - protein, 140 aa, Homo Sapiens
CKDDEAVVQAPRHAPVVRTPSIQPSLLPHAAPFAKSHLVHGSSPGVMGTSVATSASKIIPQGADSTMLATKTVKHGAPSPSHPISAPQAAAAAALRRQMASQAPAVNTLTESTLKNVPQVVNVQELKNNPATPSTAMGGL

SEQ ID NO: 9690 - protein, 78 aa, Homo Sapiens
GEGTAAASAGGFGFGSSSNTTSFGTLASQNAPTFGSLSQQTSGFGTQSSGFSGFGSGTGGFSFGSNNSSVQGFGGWRS

SEQ ID NO: 9691 - protein, 113 aa, Homo Sapiens
LQCLAALLLLGDPLGLEGCQHSVQPQPLQALWARREAKCSERALQLPAQEDSGLGAAATPHPSARSRVRMPPLSDHCPNRLLVLGPRVADSLVLDQAQEGSALGQITRKYPPF

SEQ ID NO: 9692 - protein, 2090 aa, Homo Sapiens
MGDEMDAMIPEREMKDFQFRALKKVRIFDSPEELPKERSSLLAVSNKYGLVFAGGASGLQIFPTKNLLIQNKPGDDPNKIVDKVQGLLVPMKFPIHHLALSCDNLTLSACMMSSEYGSIIAFFDVRTFSNEAKQQKRPFAYHKLLKDAGGMVIDMKWNPTVPSMVAVCLADGSIAVLQVTETVKVCATLPSTVAVTSVCWSPKGKQLAVGKQNGTVVQYLPTLQEKKVIPCPPFYESDHPVRVLDVLWIGTYVFAIVYAAADGTLETSPDVVMALLPKKEEKHPEIFVNFMEPCYGSCTERQHHYYLSYIEEWDLVLAASAASTEVSILARQSDQINWESWLLEDSSRAELPVTDKSDDSLPMGVVVDYTNQVEITISDEKTLPPAPVLMLLSTDGVLCPFYMINQNPGVKSLIKTPERLSLEGERQPKSPGSTPTTPTSSQAPQKLDASAAAAPASLPPSSPAAPIATFSLLPAGGAPTVFSFGSSSLKSSATVTGEPPSYSSGSDSSKAAPGPGPSTFSFVPPSKASLAPTPAASPVAPSAASFSFGSSGFKPTLESTPVPSVSAPNIAMKPSFPPSTSAVKVNLSEKFTAAATSTPVSSSQSAPPMSPFSSASKPAASGPLSHPTPLSAPPSSVPLKSSVLPSPSGRSAQGSSSPVPSMVQKSPRITPPAAKPGSPQAKSLQPAVAEKQGHQWKDSDPVMAGIGEEIAHFQKELEELKARTSKACFQVGTSEEMKMLRTESDDLHTFLLEIKETTESLHGDISSLKTTLLEGFAGVEEAREQNERNRDSGYLHLLYKRPLDPKSEAQLQEIRRLHQYVKFAVQDVNDVLDLEWDQHLEQKKKQRHLLVPERETLFNTLANNREIINQQRKRLNHLVDSLQQLRLYKQTSLWSLSSAVPSQSSIHSFDSDLESLCNALLKTTIESHTKSLPKVPAKLSPMKQAQLRNFLAKRKTPPVRSTAPASLSRSAFLSQRYYEDLDEVSSTSSVSQSLESEDARTSCKDDEAVVQAPRHAPVVRTPSIQPSLLPHAAPFAKSHLVHGSSPGVMGTSVATSASKIIPQGADSTMLATKTVKHGAPSPSHPISAPQAAAAAALRRQMASQAPAVNTLTESTLKNVPQVVNVQELKNNPATPSTAMGSSVPYSTAKTPHPVLTPVAANQAKQGSLINSLKPSGPTPASGQLSSGDKASGTAKIETAVTSTPSASGQFSKPFSFSPSGTGFNFGIITPTPSSNFTAAQGATPSTKESSQPDAFSSGGGSKPSYEAIPESSPPSGITSASNTTPGEPAASSSRPVAPSGTALSTTSSKLETPPSKLGELLFPSSLAGETLGSFSGLRVGQADDSTKPTNKASSTSLTSTQPTKTSGVPSGFNFTAPPVLGKHTEPPVTSSATTTSVAPPAATSTSSTAVFGSLPVTSAGSSGVISFGGTSLSAGKTSFSFGSQQTNSTVPPSAPPPTTAATPLPTSFPTLSFGSLLSSATTPSLPMSAGRSTEEATSSALPEKPGDSEVSASAASLLEEQQSAQLPQAPPQTSDSVKKEPVLAQPAVSNSGTAASSTSLVALSAEATPATTGVPDARTEAVPPASSFSVPGQTAVTAAAISSAGPVAVETSSTPIASSTTSIVAPGPSAEAAAFGTVTSGSSVFAQPPAASSSSAFNQLTNNTATAPSATPVFGQVAASTAPSLFGQQTGSTASTAAATPQVSSSGFSSPAFGTTAPGVFGQTTFGQASVFGQSASSAASVFSFSQPGFSSVPAFGQPASSTPTSTSGSVFGAASSTSSSSSFSFGQSSPNTGGGLFGQSNAPAFGQSPGFGQGGSVFGGTSAATTTAATSGFSFCQASGFGSSNTGSVFGQAASTGGIVFGQQSSSSSGSVFGSGNTGRGGGFFSGLGGKPSQDAANKNPFSSASGGFGSTATSNTSNLFGNSGAKTFGGFASSSFGEQKPTGTFSSGGGSVASQGFGFSSPNKTGGFGAAPVFGSPPTFGGSPGFGGVPAFGSAPAFTSPLGSTGGKVFGEGTAAASAGGFGFGSSSNTTSFGTLASQNAPTFGSLSQQTSGFGTQSSGFSGFGSGTGGFSFGSNNSSVQGFGGWRS

SEQ ID NO: 9693 - protein, 2080 aa, Homo Sapiens
MGDEMDAMIPEREMKDFQFRALKKVRIFDSPEELPKERSSLLAVSNKYGLVFAGGASGLQIFPTKNLLIQNKPGDDPNKIVDKVQGLLVPMKFPIHHLALSCDNLTLSACMMSSEYGSIIAFFDVRTFSNEAKQQKRPFAYHKLLKDAGGMVIDMKWNPTVPSMVAVCLADGSIAVLQVTETVKVCATLPSTVAVTSVCWSPKGKQLAVGKQNGTVVQYLPTLQEKKVIPCPPFYESDHPVRVLDVLWIGTYVFAIVYAAADGTLETSPDVVMALLPKKEEKHPEIFVNFMEPCYGSCTERQHHYYLSYIEEWDLVLAASAASTEVSILARQSDQINWESWLLEDSSRAELPVTDKSDDSLPMGVVVDYTNQVEITISDEKTLPPAPVLMLLSTDGVLCPFYMINQNPGVKSLIKTPERLSLEGERQPKSPGSTPTTPTSSQAPQKLDASAAAAPASLPPSSPAAPIATFSLLPAGGAPTVFSFGSSSLKSSATVTGEPPSYSSGSDSSKAAPGPGPSTFSFVPPSKASLAPTPAASPVAPSAASFSFGSSGFKPTLESTPVPSVSAPNIAMKPSFPPSTSAVKVNLSENSSQSAPPMSPFSSASKPAASGPLSHPTPLSAPPSSVPLKSSVLPSPSAGRSAQGSSSPVPSMVQKSPRITPPAAKPGSPQAKSLQPAVAEKQGHQWKDSDPVMAGIGEEIAHFQKELEELKARTSKACFQVGTSEEMKMLRTESDDLHTFLLEIKETTESLHGDISSLKTTLLEGFAGVEEAREQNERNRDSGYLHLLYKRPLDPKSEAQLQEIRRLHQYVKFAVQDVNDVLDLEWDQHLEQKKKQRHLLVPERETLFNTLANNREIINQQRKRLNHLVDSLQQLRLYKQTSLWSLSSAVPSQSSIHSFDSDLESLCNALLKTTIESHTKSLPKVPAKLSPMKQAQLRNFLAKRKTPPVRSTAPASLSRSAFLSQRYYEDLDEVSSTSSVSQSLESEDARTSCKDDEAVVQAPRHAPVVRTPSIQPSLLPHAAPFAKSHLVHGSSPGVMGTSVATSASKIIPQGADSTMLATKTVKHGAPSPSHPISAPQAAAAAALRRQMASQAPAVNTLTESTLKNVPQVVNVQELKNNPATPSTAMGSSVPYSTAKTPHPVLTPVAANQAKQGSLINSLKPSGPTPASGQLSSGDKASGTAKIETAVTSTPSASGQFSKPFSFSPSGTGFNFGIITPTPSSNFTAAQGATPSTKESSQPDAFSSGGGSKPSYEAIPESSPPSGITSASNTTPGEPAASSSRPVAPSGTALSTTSSKLETPPSKLGELLFPSSLAGETLGSFSGLRVGQADDSTKPTNKASSTSLTSTQPTKTSGVPSGFNFTAPPVLGKHTEPPVTSSATTTSVAPPAATSTSSTAVFGSLPVTSAGSSGVISFGGTSLSAGKTSFSFGSQQTNSTVPPSAPPPTTAATPLPTSFPTLSFGSLLSSATTPSLPMSAGRSTEEATSSALPEKPGDSEVSASAASLLEEQQSAQLPQAPPQTSDSVKKEPVLAQPAVSNSGTAASSTSLVALSAEATPATTGVPDARTEAVPPASSFSVPGQTAVTAAAISSAGPVAVETSSTPIASSTTSIVAPGPSAEAAAFGTVTSGSSVFAQPPAASSSSAFNQLTNNTATAPSATPVFGQVAASTAPSLFGQQTGSTASTAAATPQVSSSGFSSPAFGTTAPGVFGQTTFGQASVFGQSASSAASVFSFSQPGFSSVPAFGQPASSTPTSTSGSVFGAASSTSSSSSFSFGQSSPNTGGGLFGQSNAPAFGQSPGFGQGGSVFGGTSAATTTAATSGFSFCQASGFGSSNTGSVFGQAASTGGIVFGQQSSSSSGSVFGSGNTGRGGGFFSGLGGKPSQDAANKNPFSSASGGFGSTATSNTSNLFGNSGAKTFGGFASSSFGEQKPTGTFSSGGGSVASQGFGFSSPNKTGGFGAAPVFGSPPTFGGSPGFGGVPAFGSAPAFTSPLGSTGGKVFGEGTAAASAGGFGFGSSSNTTSFGTLASQNAPTFGSLSQQTSGFGTQSSGFSGFGSGTGGFSFGSNNSSVQGFGGWRS

SEQ ID NO: 9694 - protein, 52 aa, Homo Sapiens
MKFPIHHLALSCDNLTLSACMMSSEYGSIIAFFDVRTFSNEAKQQKRPFAYH

SEQ ID NO: 9695 - protein, 1519 aa, Homo Sapiens
MKPSFPPSTSAVKVNLSEKFTAAATSTPVSSSQSAPPMSPFSSASKPAASGPLSHPTPLSAPPSSVPLKSSVLPSPSGRSAQGSSSPVPSMVQKSPRITPPAAKPGSPQAKSLQPAVAEKQGHQWKDSDPVMAGIGEEIAHFQKELEELKARTSKACFQVGTSEEMKMLRTESDDLHTFLLEIKETTESLHGDISSLKTTLLEGFAGVEEAREQNERNRDSGYLHLLYKRPLDPKSEAQLQEIRRLHQYVKFAVQDVNDVLDLEWDQHLEQKKKQRHLLVPERETLFNTLANNREIINQQRKRLNHLVDSLQQLRLYKQTSLWSLSSAVPSQSSIHSFDSDLESLCNALLKTTIESHTKSLPKVPAKLSPMKQAQLRNFLAKRKTPPVRSTAPASLSRSAFLSQRYYEDLDEVSSTSSVSQSLESEDARTSCKDDEAVVQAPRHAPVVRTPSIQPSLLPHAAPFAKSHLVHGSSPGVMGTSVATSASKIIPQGADSTMLATKTVKHGAPSPSHPISAPQAAAAAALRRQMASQAPAVNTLTESTLKNVPQVVNVQELKNNPATPSTAMGSSVPYSTAKTPHPVLTPVAANQAKQGSLINSLKPSGPTPASGQLSSGDKASGTAKIETAVTSTPSASGQFSKPFSFSPSGTGFNFGIITPTPSSNFTAAQGATPSTKESSQPDAFSSGGGSKPSYEAIPESSPPSGITSASNTTPGEPAASSSRPVAPSGTALSTTSSKLETPPSKLGELLFPSSLAGETLGSFSGLRVGQADDSTKPTNKASSTSLTSTQPTKTSGVPSGFNFTAPPVLGKHTEPPVTSSATTTSVAPPAATSTSSTAVFGSLPVTSAGSSGVISFGGTSLSAGKTSFSFGSQQTNSTVPPSAPPPTTAATPLPTSFPTLSFGSLLSSATTPSLPMSAGRSTEEATSSALPEKPGDSEVSASAASLLEEQQSAQLPQAPPQTSDSVKKEPVLAQPAVSNSGTAASSTSLVALSAEATPATTGVPDARTEAVPPASSFSVPGQTAVTAAAISSAGPVAVETSSTPIASSTTSIVAPGPSAEAAAFGTVTSGSSVFAQPPAASSSSAFNQLTNNTATAPSATPVFGQVAASTAPSLFGQQTGSTASTAAATPQVSSSGFSSPAFGTTAPGVFGQTTFGQASVFGQSASSAASVFSFSQPGFSSVPAFGQPASSTPTSTSGSVFGAASSTSSSSSFSFGQSSPNTGGGLFGQSNAPAFGQSPGFGQGGSVFGGTSAATTTAATSGFSFCQASGFGSSNTGSVFGQAASTGGIVFGQQSSSSSGSVFGSGNTGRGGGFFSGLGGKPSQDAANKNPFSSASGGFGSTATSNTSNLFGNSGAKTFGGFASSSFGEQKPTGTFSSGGGSVASQGFGFSSPNKTGGFGAAPVFGSPPTFGGSPGFGGVPAFGSAPAFTSPLGSTGGKVFGEGTAAASAGGFGFGSSSNTTSFGTLASQNAPTFGSLSQQTSGFGTQSSGFSGFGSGTGGFSFGSNNSSVQGFGGWRS

SEQ ID NO: 9696 - protein, 495 aa, Homo Sapiens
MKSSLLLRGVHFCFHLPGATPSTKESSQPDAFSSGGGSKPSYEAIPESSPPSGITSASNTTPGEPAASSSRPVAPSGTALSTTSSKLETPPSKLGELLFPSSLAGETLGSFSGLRVGQADDSTKPTNKASSTSLTSTQPTKTSGVPSGFNFTAPPVLGKHTEPPVTSSATTTSVAPPAATSTSSTAVFGSLPVTSAGSSGVISFGGTSLSAGKTSFSFGSQQTNSTVPPSAPPPTTAATPLPTSFPTLSFGSLLSSATTPSLPMSAGRSTEEATSSALPEKPGDSEVSASAASLLEEQQSAQLPQAPPQTSDSVKKEPVLAQPAVSNSGTAASSTSLVALSAEATPATTGVPDARTEAVPPASSFSVPGQTAVTAAAISSAGPVAVETSSTPIASSTTSIVAPGPSAEAAAFGTVTSGSSVFAQPPAASSSSAFNQLTNNTATAPSATPVFGQVAASTAPSLFGQQTGSTASTAAATPQVSSSGFSSPAFGTTAP

SEQ ID NO: 9697 - protein, 916 aa, Homo Sapiens
MKSSLLLRGVHFCFHLPGTAKIETAVTSTPSASGQFSKPFSFSPSGTGFNFGIITPTPSSNFTAAQGATPSTKESSQPDAFSSGGGSKPSYEAIPESSPPSGITSASNTTPGEPAASSSRPVAPSGTALSTTSSKLETPPSKLGELLFPSSLAGETLGSFSGLRVGQADDSTKPTNKASSTSLTSTQPTKTSGVPSGFNFTAPPVLGKHTEPPVTSSATTTSVAPPAATSTSSTAVFGSLPVTSAGSSGVISFGGTSLSAGKTSFSFGSQQTNSTVPPSAPPPTTAATPLPTSFPTLSFGSLLSSATTPSLPMSAGRSTEEATSSALPEKPGDSEVSASAASLLEEQQSAQLPQAPPQTSDSVKKEPVLAQPAVSNSGTAASSTSLVALSAEATPATTGVPDARTEAVPPASSFSVPGQTAVTAAAISSAGPVAVETSSTPIASSTTSIVAPGPSAEAAAFGTVTSGSSVFAQPPAASSSSAFNQLTNNTATAPSATPVFGQVAASTAPSLFGQQTGSTASTAAATPQVSSSGFSSPAFGTTAPGVFGQTTFGQASVFGQSASSAASVFSFSQPGFSSVPAFGQPASSTPTSTSGSVFGAASSTSSSSSFSFGQSSPNTGGGLFGQSNAPAFGQSPGFGQGGSVFGGTSAATTTAATSGFSFCQASGFGSSNTGSVFGQAASTGGIVFGQQSSSSSGSVFGSGNTGRGGGFFSGLGGKPSQDAANKNPFSSASGGFGSTATSNTSNLFGNSGAKTFGGFASSSFGEQKPTGTFSSGGGSVASQGFGFSSPNKTGGFGAAPVFGSPPTFGGSPGFGGVPAFGSAPAFTSPLGSTGGKVFGEGTAAASAGGFGFGSSSNTTSFGTLASQNAPTFGSLSQQTSGFGTQSSGFSGFGSGTGGFSFGSNNSSVQGFGGWRS

SEQ ID NO: 9698 - protein, 187 aa, Homo Sapiens
  misc_feature (1)..(1): Xaa can be any naturally occurring amino acid
XARQSDQINWESWLLEDSSRAELPVTDKSDDSLPMGVVVDYTNQVEITISDEKTLPPAPVLMLLSTDGVLCPFYMINQNPGVKSLIKTPERLSLEGERQPKSPASLAPTPAASPVAPSAASFSFGSSGFKPTLESTPVPSVSAPNIAMKPSFPPSTSAVKVNLSEKFTAAATSTPVSSSQSAPPMSP

SEQ ID NO: 9699 - protein, 145 aa, Homo Sapiens
  misc_feature (1)..(1): Xaa can be any naturally occurring amino acid
XGVPAFGSAPAFTSPLGSTGGKVFGEGTAAASAGGFGFGSSSNTTSFGTLASQNAPTFGSLSQQTSGFGTQSSGFSGFGSGTGGLSRVLVAGEAEGVSAGLSIPGTNRILSFFPEKCWSRLFRPTLPSKHIHPERNNRNQNSQGA

SEQ ID NO: 9700 - protein, 967 aa, Homo Sapiens
  misc_feature (1)..(1): Xaa can be any naturally occurring amino acid
XKTPHPVLTPVAANQAKQGSLINSLKPSGPTPASGQLSSGDKASGTAKIETAVTSTPSASGQFSKPFSFSPSGTGFNFGIITPTPSSNFTAAQGATPSTKESSQPDAFSSGGGSKPSYEAIPESSPPSGITSASNTTPGEPAASSSRPVAPSGTALSTTSSKLETPPSKLGELLFPSSLAGETLGSFSGLRVGQADDSTKPTNKASSTSLTSTQPTKTSGVPSGFNFTAPPVLGKHTEPPVTSSATTTSVAPPAATSTSSTAVFGSLPVTSAGSSGVISFGGTSLSAGKTSFSFGSQQTNSTVPPSAPPPTTAATPLPTSFPTLSFGSLLSSATTPSLPMSAGRSTEEATSSALPEKPGDSEVSASAASLLEEQQSAQLPQAPPQTSDSVKKEPVLAQPAVSNSGTAASSTSLVALSAEATPATTGVPDARTEAVPPASSFSVPGQTAVTAAAISSAGPVAVETSSTPIASSTTSIVAPGPSAEAAAFGTVTSGSSVFAQPPAASSSSAFNQLTNNTATAPSATPVFGQVAASTAPSLFGQQTGSTASTAAATPQVSSSGFSSPAFGTTAPGVFGQTTFGQASVFGQSASSAASVFSFSQPGFSSVPAFGQPASSTPTSTSGSVFGAASSTSSSSSFSFGQSSPNTGGGLFGQSNAPAFGQSPGFGQGGSVFGGTSAATTTAATSGFSFCQASGFGSSNTGSVFGQAASTGGIVFGQQSSSSSGSVFGSGNTGRGGGFFSGLGGKPSQDAANKNPFSSASGGFGSTATSNTSNLFGNSGAKTFGGFASSSFGEQKPTGTFSSGGGSVASQGFGFSSPNKTGGFGAAPVFGSPPTFGGSPGFGGVPAFGSAPAFTSPLGSTGGKVFGEGTAAASAGGFGSLAMSLSPTLKGRLLLMRPKAGGGREQAAPGRKSNESRSLGHLCMERALTSPLKVWEQQQHHILRHARESECPHFRITVPTDFWFWDPE

SEQ ID NO: 9701 - protein, 114 aa, Homo Sapiens
AMMLSDRLTFLGKYREFHRMYGEKRFADAASLLLSLMTSRIAPRSFWMTLLTDALPLLEQKQVIFSAEQTYELMRCLEDLTSRRPVHGESDTEQLQYGPLVLLSFTSIICWKLL

SEQ ID NO: 9702 - protein, 191 aa, Homo Sapiens
LDWVRLHVCEVDSLSADVLGSENPSKHDSFWNLGRLDEARQMLSKEADASPASAGICRIMGDLMRTMPILSPGNTQTLTELELKWQHWHEECERYLQDSTFATSPHLESLLKIMLGDEAALLEQKELLSNWYHFLVTRLLYSNPTVKPIDLHYYAQSSLDLFLGGESSPEPLDNILLAAFEFDIHQVIKEC

SEQ ID NO: 9703 - protein, 19 aa, Homo Sapiens
LLAAFEFDIHQVIKECSFL

SEQ ID NO: 9704 - protein, 18 aa, Homo Sapiens
LTDALPLLEQKQQNRLMS

SEQ ID NO: 9705 - protein, 611 aa, Homo Sapiens
MEELDGEPTVTLIPGVNSKKNQMYFDWGPGEMLVCETSFNKKEKSEMVPSCPFIYIIRKDVDVYSQILRKLFNESHGIFLGLQRIDEELTGKSRKSQLVRVSKNYRSVIRACMEEMHQVAIAAKDPANGRQFSSQVSILSAMELIWNLCEILFIEVAPAGPLLLHLLDWVRLHVCEVDSLSADVLGSENPSKHDSFWNLPGNTQTLTELELKWQHWHEECERYLQDSTFATSPHLESLLKIMLGDEAALLEQKELLSNWYHFLVTRLLYSNPTVKPIDLHYYAQSSLDLFLGGESSPEPLDNILLAAFEFDIHQVIKECSIALSNWWFVAHLTDLLDHCKLLQSHNLYFGSNMREFLLLEYASGLFAHPSLWQLGVDYFDYCPELGRVSLELHIERIPLNTEQKALKVLRICEQRQMTEQVRSICKILAMKAVRNNRLGSALSWSIRAKDAAFATLVSDRFLRDYCERGCFSDLDLIDNLGPAMMLSDRLTFLGKYREFHRMYGEKRFADAASLLLSLMTSRIAPRSFWMTLLTDALPLLEQKQVIFSAEQTYELMRCLEDLTSRRPVHGESDTEQLQDDDIETTKVEMLRLSLARNLARAIIREGSLEGS

SEQ ID NO: 9706 - protein, 656 aa, Homo Sapiens
MEELDGEPTVTLIPGVNSKKNQMYFDWGPGEMLVCETSFNKKEKSEMVPSCPFIYIIRKDVDVYSQILRKLFNESHGIFLGLQRIDEELTGKSRKSQLVRVSKNYRSVIRACMEEMHQVAIAAKDPANGRQFSSQVSILSAMELIWNLCEILFIEVAPAGPLLLHLLDWVRLHVCEVDSLSADVLGSENPSKHDSFWNLVTILVLQGRLDEARQMLSKEADASPASAGICRIMGDLMRTMPILSPGNTQTLTELELKWQHWHEECERYLQDSTFATSPHLESLLKIMLGDEAALLEQKELLSNWYHFLVTRLLYSNPTVKPIDLHYYAQSSLDLFLGGESSPEPLDNILLAAFEFDIHQVIKECSIALSNWWFVAHLTDLLDHCKLLQSHNLYFGSNMREFLLLEYASGLFAHPSLWQLGVDYFDYCPELGRVSLELHIERIPLNTEQKALKVLRICEQRQMTEQVRSICKILAMKAVRNNRLGSALSWSIRAKDAAFATLVSDRFLRDYCERGCFSDLDLIDNLGPAMMLSDRLTFLGKYREFHRMYGEKRFADAASLLLSLMTSRIAPRSFWMTLLTDALPLLEQKQVIFSAEQTYELMRCLEDLTSRRPVHGESDTEQLQDDDIETTKVEMLRLSLARNLARAIIREGSLEGS

SEQ ID NO: 9707 - protein, 169 aa, Homo Sapiens
MEELDGEPTVTLIPGVNSKKNQMYFDWGPGEMLVCETSFNKKEKSEMVPSCPFIYIIRKDVDVYSQILRKLFNESHGIFLGLQRIDEELTGKSRKSQLVRVSKNYRSVIRACMEEMHQVAIAAKDPANGRQFSSQVSILSAMELIWNLCEILFIEVAPGDHLGAAGPAG

SEQ ID NO: 9708 - protein, 544 aa, Homo Sapiens
MEEMHQVAIAAKDPANGRQFSSQVSILSAMELIWNLCEILFIEVAPAGPLLLHLLDWVRLHVCEVDSLSADVLGSENPSKHDSFWNLVTILVLQGRLDEARQMLSKEADASPASAGICRIMGDLMRTMPILSPGNTQTLTELELKWQHWHEECERYLQDSTFATSPHLESLLKIMLGDEAALLEQKELLSNWYHFLVTRLLYSNPTVKPIDLHYYAQSSLDLFLGGESSPEPLDNILLAAFEFDIHQVIKECSIALSNWWFVAHLTDLLDHCKLLQSHNLYFGSNMREFLLLEYASGLFAHPSLWQLGVDYFDYCPELGRVSLELHIERIPLNTEQKALKVLRICEQRQMTEQVRSICKILAMKAVRNNRLGSALSWSIRAKDAAFATLVSDRFLRDYCERGCFSDLDLIDNLGPAMMLSDRLTFLGKYREFHRMYGEKRFADAASLLLSLMTSRIAPRSFWMTLLTDALPLLEQKQVIFSAEQTYELMRCLEDLTSRRPVHGESDTEQLQDDDIETTKVEMLRLSLARNLARAIIREGSLEGS

SEQ ID NO: 9709 - protein, 259 aa, Homo Sapiens
MREFLLLEYASGLFAHPSLWQLGVDYFDYCPELGRVSLELHIERIPLNTEQKALKVLRICEQRQMTEQVRSICKILAMKAVRNNRLGSALSWSIRAKDAAFATLVSDRFLRDYCERGCFSDLDLIDNLGPAMMLSDRLTFLGKYREFHRMYGEKRFADAASLLLSLMTSRIAPRSFWMTLLTDALPLLEQKQVIFSAEQTYELMRCLEDLTSRRPVHGESDTEQLQDDDIETTKVEMLRLSLARNLARAIIREGSLEGS

SEQ ID NO: 9710 - protein, 120 aa, Homo Sapiens
MYFDWGPGEMLVCETSFNKKEKSEMVPSCPFIYIIRKDVDVYSQILRKLFNESHGIFLGLQRIDEELTGKSRKSQLVRVSKNYRSVIRACMEEMHQVAIAAKDPANGRQFSSQVSILSAM

SEQ ID NO: 9711 - protein, 272 aa, Homo Sapiens
VTILVLQGRLDEARQMLSKEADASPASAGICRIMGDLMRTMPILSPGNTQTLTELELKWQHWHEECERYLQDSTFATSPHLESLLKIMLGDEAALLEQKELLSNWYHFLVTRLLYSNPTVKPIDLHYYAQSSLDLFLGGESSPEPLDNILLAAFEFDIHQVIKECSFGSNMREFLLLEYASGLFAHPSLWQLGVDYFDYCPELGRVSLELHIERIPLNTEQKALKVLRICEQRQMTEQVRSICKILAMKAVRNNRLGSALSWSIRAKDAAFA

SEQ ID NO: 9712 - protein, 46 aa, Homo Sapiens
  misc_feature (1)..(1): Xaa can be any naturally occurring amino acid
XEKRFADAASLLLSLMTSRIAPRSFWMTLLTDALPLLEQKQNRLMS

SEQ ID NO: 9713 - protein, 302 aa, Homo Sapiens
  misc_feature (1)..(1): Xaa can be any naturally occurring amino acid
XHEECERYLQDSTFATSPHLESLLKSSLDLFLGGESSPEPLDNILLAAFEFDIHQVIKECSIALSNWWFVAHLTDLLDHCKLLQSHNLYFGSNMREFLLLEYASGLFAHPSLWQLGVDYFDYCPELGRVSLELHIERIPLNTEQKALKVLRICEQRQMTEQVRSICKILAMKAVRNNRLGSALSWSIRAKDAAFATLVSDRFLRDYCERGCFSDLDLIDNLGPAMMLSDRLTFLGKYREFHRMYGEKRFADAASLLLSLMTSRIAPRSFWMTLLTDALPLLEQKQVIFSAEQTYELMRCLED

SEQ ID NO: 9714 - protein, 100 aa, Homo Sapiens
  misc_feature (1)..(1): Xaa can be any naturally occurring amino acid
XLFIEVAPAGPLLLHLLDWVRLHVCEVDSLSADVLGSENPSKHDSFWNLIMLGDEAALLEQKELLSNWYHFLVTRLLYSNPTVKPIDLHYYAQPGPVSGR

SEQ ID NO: 9715 - protein, 98 aa, Homo Sapiens
  misc_feature (1)..(1): Xaa can be any naturally occurring amino acid
XSLMTSRIAPRSFWMTLLTDALPLLEQKQVKVIFSAEQTYELMRCLEDLTSRRPVHGESDTEQLQDDDIETTKVEMLRLSLARNLARAIIREGSLEGS

SEQ ID NO: 9716 - protein, 89 aa, Homo Sapiens
MPVNSSGPDWVTVIPRRIKETNSLELSQGSGTFPSGYYYKDQWRPRKFKMRQFNDPTTLQSAYKEKWCIYLVTQQSGNGLNTLLHLFQI

SEQ ID NO: 9717 - skipped

SEQ ID NO: 9718 - protein, 53 aa, Homo Sapiens
MWTNFFKLRLFCCLLAVLMVVVLVINVTQVEYLDHETVSATFIDSSGQFVSSQ

SEQ ID NO: 9719 - protein, 559 aa, Homo Sapiens
MWTNFFKLRLFCCLLAVLMVVVLVINVTQVEYLDHETVSATFIDSSGQFVSSQVTGISRNPYCGYDQQTLSSQERMEEDSLLAALHRQVPDVGPVPFVKSTDPSSSYFVILNSAAFFKVGSQLEVLVHVQDFQRKPKKYGGDYLQARIHSLKLQAGAVGRVVDYQNGFYKVFFTLLWPGKVKVSVSLVHPSEGIRVLQRLQEDKPDRVYFKSLFRSGRISETTECNVCLPGNLPLCNFTDLYTGEPWFCFKPKKLPCSSRITHFKGGYLKGLLTAAESAFFQSGVNIKMPVNSSGPDWVTVIPRRIKETNSLELSQGSGTFPSGYYYKDQWRPRKFKMRQFNDPDNITECLQRKVVHLFGDSTIRQWFEYLTTFVPDLVEFNLGSPKNVGPFLAVDQKHNILLKYRCHGPPIRFTTVFSNELHYVANELNGIVGGKNTVVAIAVWSHFSTFPLEVYIRRLRNIRRAVVRLLDRSPKTVVVIRTANAQELGPEVSLFNSDWYNFQLDTILRRMFSGVGVYLVDAWEMTLAHYLPHKLHPDEVIVKNQLDMFLSFVCPLET

SEQ ID NO: 9720 - protein, 559 aa, Homo Sapiens; identical to SEQ ID NO: 9719

SEQ ID NO: 9721 - protein, 559 aa, Homo Sapiens; identical to SEQ ID NO: 9719

SEQ ID NO: 9722 - protein, 260 aa, Homo Sapiens
MEKFNTISVSKCNKETVAMKEKCKFGMTSTIPSGHVWRNTWNPVSCSLATVKMKECLRGKLIYLMGDSTIRQWMEYFKASINTLKSVDLHESGKLQHQLAVDLDRNINIQWQKYCYPLIGSMTYSVKEMEYLTRAIDRTGGEKNTVIVISLGQHFRPFPIDVFIRRALNVHKAIQHLLLRSPDTMVIIKTENIREMYNDAERFSDFHGYIQYLIIKDIFQDLSVSIIDAWDITIAYGTNNVHPPQHVVGNQINILLNYIC

SEQ ID NO: 9723 - protein, 544 aa, Homo Sapiens
MKISMINYKSLLALLFILASWIIFTVFQNSTKVWSALNLSISLHYWNNSTKSLFPKTPLISLKPLTETELRIKEIIEKLDQQIPPRPFTHVNTTTSATHSTATILNPRDTYCRGDQLHILLEVRDHLGRRKQYGGDFLRARMSSPALMAGASGKVTDFNNGTYLVSFTLFWEGQVSLSLLLIHPSEGVSALWSARNQGYDRVIFTGQFVNGTSQVHSECGLILNTNAELCQYLDNRDQEGFYCVRPQHMPCAALTHMYSKNKKVSYLSKQEKSLFERSNVGVEIMEKFNTISVSKCNKETVAMKEKCKFGMTSTIPSGHVWRNTWNPVSCSLATVKMKECLRGKLIYLMGDSTIRQWMEYFKASINTLKSVDLHESGKLQHQLAVDLDRNINIQWQKYCYPLIGSMTYSVKEMEYLTRAIDRTGGEKNTVIVISLGQHFRPFPIDVFIRRALNVHKAIQHLLLRSPDTMVIIKTENIREMYNDAERFSDFHGYIQYLIIKDIFQDLSVSIIDAWDITIAYGTNNVHPPQHVVGNQINILLNYIC

SEQ ID NO: 9724 - protein, 139 aa, Homo Sapiens
MQAACWYVLFLLQPTVYLVTCANLTNGGKSELLKSGSSKSTLKHIWTESSKDLSISRLLSQTFRGKENDTDLDLRYDTPEPYSEQDLWDWLRNSTDLQEPRPRAKRRPIVKTGKFKKMFGWGDFHSNIKTVKLNLLITG

SEQ ID NO: 9725 - protein, 143 aa, Homo Sapiens
MQAACWYVLFLLQPTVYLVTCANLTNGGKSELLKSGSSKSTLKHIWTESSKDLSISRLLSQTFRGKENDTDLDLRYDTPEPYSEQDLWDWLRNSTDLQEPRPRAKRRPIVKTGKFKKMFGWGDFHSNIKTVKLNLLITGKIVD

SEQ ID NO: 9726 - protein, 271 aa, Homo Sapiens
MQAACWYVLFLLQPTVYLVTCANLTNGGKSELLKSGSSKSTLKHIWTESSKDLSISRLLSQTFRGKENDTDLDLRYDTPEPYSEQDLWDWLRNSTDLQEPRPRAKRRPIVKTGKFKKMFGWGDFHSNIKTVKLNLLITGKIVDHGNGTFSVYFRHNSTGQGNVSVSLVPPTKIVEFDLAQQTVIDAKDSKSFNCRIEYEKVDKATKNTLCNYDPSKTCYQEQTQSHVSWLCSKPFKVICIYISFYSTDYKLVQKVCPDYNYHSDTPYFPSG

SEQ ID NO: 9727 - protein, 253 aa, Homo Sapiens
VTCANLTNGGKSELLKSGSSKSTLKHIWTESSKDLSISRLLSQTFRGKENDTDLDLRYDTPEPYSEQDLWDWLRNSTDLQEPRPRAKRRPIVKTGKFKKMFGWGDFHSNIKTVKLNLLITGKIVDHGNGTFSVYFRHNSTGQGNVSVSLVPPTKIVEFDLAQQTVIDAKDSKSFNCRIEYEKVDKATKNTLCNYDPSKTCYQEQTQSHVSWLCSKPFKVICIYISFYSTDYKLVQKVCPDYNYHSDTPYFPSG

SEQ ID NO: 9728 - protein, 264 aa, Homo Sapiens
MRLRPLPLVVVPGLLQLLFCDSKEVVHATEGLDWEDKDAPGTLVGNVVHSRIISPLRLFVKQSPVPKPGPMAYADSMENFWDWLANITEIQEPLARTKRRPIVKTGKFKKMFGWGDFHSNIKTVKLNLLITGKIVDHGNGTFSVYFRHNSTGLGNVSVSLVPPSKVVEFEVSPQSTLETKESKSFNCRIEYEKTDRAKKTALCNFDPSKICYQEQTQSHVSWLCSKPFKVICIYIAFYSVDYKLVQKVCPDYNYHSETPYLSSG

SEQ ID NO: 9729 - protein, 354 aa, Homo Sapiens
MQLTRCCFVFLVQGSLYLVICGQDDGPPGSEDPERDDHEGQPRPRVPRKRGHISPKSRPMANSTLLGLLAPPGEAWGILGQPPNRPNHSPPPSAKVKKIFGWGDFYSNIKTVALNLLVTGKIVDHGNGTFSVHFQHNATGQGNISISLVPPSKAVEFHQEQQIFIEAKASKIFNCRMEWEKVERGRRTSLCTHDPAKICSRDHAQSSATWSCSQPFKVVCVYIAFYSTDYRLVQKGPSLLSGDVRHTPLLQTTLRSPPWRLETAGTGAAHQWTPTVCRSASHSAVETAGRRRKQWGQRPWAPSPPPLAELSAGTGGTLTPLLLLSSCGEPDAGDSWRARPSWHTVLPAPGMDSF

SEQ ID NO: 9730 - protein, 252 aa, Homo Sapiens
MQLTRCCFVFLVQGSLYLVICGQDDGPPGSEDPERDDHEGQPRPRVPRKRGHISPKSRPMANSTLLGLLAPPGEAWGILGQPPNRPNHSPPPSAKVKKIFGWGDFYSNIKTVALNLLVTGKIVDHGNGTFSVHFQHNATGQGNISISLVPPSKAVEFHQEQQIFIEAKASKIFNCRMEWEKVERGRRTSLCTHDPAKICSRDHAQSSATWSCSQPFKVVCVYIAFYSTDYRLVQKVCPDYNYHSDTPYYPSG

SEQ ID NO: 9731 - protein, 308 aa, Homo Sapiens
MRLLPEWFLLLFGPWLLRKAVSAQIPESGRPQYLGLRPAAAGAGAPGQQLPEPRSSDGLGVGRAWSWAWPTNHTGALARAGAAGALPAQRTKRKPSIKAARAKKIFGWGDFYFRVHTLKFSLLVTGKIVDHVNGTFSVYFRHNSSSLGNLSVSIVPPSKRVEFGGVWLPGPVPHPLQSTLALEGVLPGLGPPLGMAAAAAGPGLGGSLGGALAGPLGGALGVPGAKESRAFNCHVEYEKTNRARKHRPCLYDPSQVCFTEHTQSQAAWLCAKPFKVICIFVSFLSFDYKLVQKVCPDYNFQSEHPYFG

SEQ ID NO: 9732 - protein, 36 aa, Homo Sapiens
MRLLPEWFLLLFGPWLLRKPRPGLSLPPARSWEHPA

SEQ ID NO: 9733 - protein, 481 aa, Homo Sapiens
MKGRGMLVLLLHAVVLGLPSAWAVGACARACPAACACSTVERGCSVRCDRAGLLRVPAELPCEAVSIDLDRNGLRFLGERAFGTLPSLRRLSLRHNNLSFITPGAFKGLPRLAELRLAHNGDLRYLHARTFAALSRLRRLDLAACRLFSVPERLLAELPALRELAAFDNLFRRVPGALRGLANLTHAHLERGRIEAVASSSLQGLRRLRSLSLQANRVRAVHAGAFGDCGVLEHLLLNDNLLAELPADAFRGLRRLRTLNLGGNALDRVARAWFADLAELELLYLDRNSIAFVEEGAFQNLSGLLALHLNGNRLTVLAWVAFQPGFFLGRLFLFRNPWCCDCRLEWLRDWMEGSGRVTDVPCASPGSVAGLDLSQVTFGRSSDGLCVDPEELNLTTSSPGPSPEPAATTVSRFSSLLSKLLAPRVPVEEAANTTGGLANASLSDSLSSRGVGGAGRQPWFLLASCLLPSVAQHVVFGLQMD

SEQ ID NO: 9734 - protein, 481 aa, Homo Sapiens; identical to SEQ ID NO: 9733

SEQ ID NO: 9735 - protein, 157 aa, Homo Sapiens
MAKLRQKNPRAVRQAEEVRGLEHLHMDVAVNFSQGALLSPHLHNVCAEAVDAIYTRQEDVRFWLEQGVDSSVFEALPKASEQAELPRCRQVGDHGKPCVCRYGLSLAWYPCMLKYCHSRDRPTPYKCGIRSCQKSYSFDFYVPQRQLCLWDEDPYPG

SEQ ID NO: 9736 - protein, 273 aa, Homo Sapiens
MRLPGVPLARPALLLLLPLLAPLLGTGAPAELRVRVRLPDGQVTEESLQADSDADSISLELRKPDGTLVSFTADFKKDVKVFRALILGELEKGQSQFQALCFVTQLQHNEIIPSEAMAKLRQKNPRAVRQAEEVRGLEHLHMDVAVNFSQGALLSPHLHNVCAEAVDAIYTRQEDVRFWLEQGVDSSVFEALPKASEQAELPRCRQVGDHGKPCVCRYGLSLAWYPCMLKYCHSRDRPTPYKCGIRSCQKSYSFDFYVPQRQLCLWDEDPYPG

SEQ ID NO: 9737 - protein, 85 aa, Homo Sapiens
MKTLFLGVTLGLAAALSFTLEEEDEGGSVHPEENPDAEDGGAWQIQRLWGQEAHIPAGAARDGRLRLLLQRPAPWGPALHGKACG

SEQ ID NO: 9738 - protein, 147 aa, Homo Sapiens
MKTLFLGVTLGLAAALSFTLEEEDEGGSVHPEENPDAEDGGAWQIQRLWGQEAHIPAGAARDGRLRLLLQRPAPWGPALHGKACGICSLQGRAAVPTLAHLATSPAGRNPNTNLEALEEFKKLVQHKGLSEEDIFMPLQTGSCVLEH

SEQ ID NO: 9739 - protein, 228 aa, Homo Sapiens
MKTLFLGVTLGLAAALSFTLEEEDITGTWYVKAMVVDKDFPEDRRPRKVSPVKVTALGGGNLEATFTFMREDRCIQKKILMRKTEEPGKFSAYGGRKLIYLQELPGTDDYVFYCKDQRRGGLRYMGKLVASAPCRAVPLSPPWLTWPPHLQVGILIPTWRPWKNLRNWCSTRDSRRRTFSCPCRREAAFSNTRQPPGLHLQSPPYHQTQSPDHLDLPSSHDPSLLPPT

SEQ ID NO: 9740 - protein, 220 aa, Homo Sapiens
MKTLFLGVTLGLAAALSFTLEEEDITGTWYVKAMVVDKDFPEDRRPRKVSPVKVTALGGGNLEATFTFMREDRCIQKKILMRKTEEPGKFSAYGGRKLIYLQELPGTDDYVFYCKDQRRGGLRYMGKLVASAPCRAVPLSPPWLTWPPHLQVGILIPTWRPWKNLRNWCSTRDSRRRTFSCPCRREAAFSNTRVTPGSAPPEPTLPPDTEPGPPGPTLQP

SEQ ID NO: 9741 - protein, 146 aa, Homo Sapiens
MKTLFLGVTLGLAAALSFTLEEEDITGTWYVKAMVVDKDFPEDRRPRKVSPVKVTALGGGNLEATFTFMREDRCIQKKILMRKTEEPGKFSAYGGRKLIYLQELPGTDDYVFYCKDQRRGGLRYMGKLVGPCRCPHLGSPGHLTCR

SEQ ID NO: 9742 - protein, 170 aa, Homo Sapiens
MKTLFLGVTLGLAAALSFTLEEEDITGTWYVKAMVVDKDFPEDRRPRKVSPVKVTALGGGNLEATFTFMREDRCIQKKILMRKTEEPGKFSAYGGRKLIYLQELPGTDDYVFYCKDQRRGGLRYMGKLVGRNPNTNLEALEEFKKLVQHKGLSEEDIFMPLQTGSCVLEH

SEQ ID NO: 9743 - protein, 170 aa, Homo Sapiens; identical to SEQ ID NO: 9742

SEQ ID NO: 9744 - protein, 165 aa, Homo Sapiens
MKTLFLGVTLGLAAALSFTLEEEDITGTWYVKAMVVDKDFPEDRRPRKVSPVKVTALGGGKLEATFTFMREDRCIQKKILMRKTEEPGKYSACLSAVEMDQITPALWEALAIDTLRKLRIGTRRPRIRWGQEAHVPAGAAQEGPLHLLLQRPAPWGPAPHGKACG

SEQ ID NO: 9745 - protein, 220 aa, Homo Sapiens [sequence omitted]

SEQ ID NO: 9746 - protein, 170 aa, Homo Sapiens
MKTLFLGVTLGLAAALSFTLEEEDITGTWYVKAMVVDKDFPEDRRPRKVSPVKVTALGGGKLEATFTFMREDRCIQKKILMRKTEEPGKYSAYGGRKLMYLQELPRRDHYIFYCKDQHHGGLLHMGKLVGRNSDTNREALEEFKKLVQRKGLSEEDIFTPLQTGSCVPEH

SEQ ID NO: 9747 - protein, 170 aa, Homo Sapiens; identical to SEQ ID NO: 9746

SEQ ID NO: 9748 - protein, 477 aa, Homo Sapiens
MIAFLLTSVLMIPHAGGHPLDTPHLPQELPPGLPNNINITFFSGMFKNVESVAEIFDCLGPHFTWLQAVFTNFPVLIQFVNGMKCVAGLCPRDFEDYGCTCRFEMEGLPVDESDSCCFQHRRCYEEAAEMDCLQDPAKLSTEVNCVSKKIICESKDNCEHLLCTCDKAAIECLARSSLNSSLNLLDTSFCLAQTPETTIKEDLTTLLPRVVPVEPTDTSLTALSGEEAGHDQEGVGAARATSPPGSAEIVATRVTAKIVTLVPAGIKSLGLAVSSVENDPEETTEKACDRFTFLHLGSGDNMQVMPQLGEMLFCLTSRCPEEFESYGCYCGQEGRGEPRDDLDRCCLSHHCCLEQVRRLGCLLERLPWSPVVCVDHTPKCGGQSLCEKLLCACDQTAAECMTSASFNQSLKSPSRLGCPGQPAACEDSLHPVPAAPTLGSSSEEDSEEDPPQEDLGRAKRFLRKSLGPLGIGPLHGR

SEQ ID NO: 9749 - protein, 271 aa, Homo Sapiens
MIIVAFALIIFFAVKTRRKMDRYDKSNILWDKEHIYDEQPPNVEEWVKNVSAGTQDVPSPPSDYVERVDSPMAYSSNGKVNDKRFYPESSYKSTPVPEVVQELPLTSPVDDFRQPRYSSGGNFETPSKRAPAKGRAGRSKRTEQDHYETDYTTGGESCDELEEDWIREYPPITSDQQRQLYKRNFDTGLQEYKSLQSELDEINKELSRLDKELDDYREESEEYMAAADEYNRLKQVKGSADYKSKKNHCKQLKSKLSHIKKMVGDYDRQKT

SEQ ID NO: 9750 - protein, 522 aa, Homo Sapiens
MSSRPLESPPPYRPDEFKPNHYAPSNDIYGGEMHVRPMLSQPAYSFYPEDEILHFYKWTSPPGVIRILSMLIIVMCIAIFACVASTLAWDRGYGTSLLGGSVGYPYGGSGFGSYGSGYGYGYGYGYGYGGYTDPRAAKGFMLAMAAFCFIAALVIFVTSVIRSEMSRTRRYYLSVIIVSAILGIMVFIATIVYIMGVNPTAQSSGSLYGSQIYALCNQFYTPAATGLYVDQYLYHYCVVDPQEAIAIVLGFMIIVAFALIIFFAVKTRRKMDRYDKSNILWDKEHIYDEQPPNVEEWVKNVSAGTQDVPSPPSDYVERVDSPMAYSSNGKVNDKRFYPESSYKSTPVPEVVQELPLTSPVDDFRQPRYSSGGNFETPSKRAPAKGRAGRSKRTEQDHYETDYTTGGESCDELEEDWIREYPPITSDQQRQLYKRNFDTGLQEYKSLQSELDEINKELSRLDKELDDYREESEEYMAAADEYNRLKQVKGSADYKSKKNHCKQLKSKLSHIKKMVGDYDRQKT

SEQ ID NO: 9751 - protein, 522 aa, Homo Sapiens; identical to SEQ ID NO: 9750

SEQ ID NO: 9752 - protein, 216 aa, Homo Sapiens
GPLNSWIPPFSGILQQQQQAQIPGLSQFSLSALDQFAGLLPNQIPLTGEASFAQGAQAGQVDPLQLQTPPQTQPGPSHVMPYVFSFKMPQEQGQMFQYYPVYMVLPWEQPQQTVPRSPQQTRQQQYEEQAISGGQQQLAFDPQLGTAPEIAVMSTGEEIPYLQKEAINFRHDSAGVFMPSTSPKPSTTNVFTSAVDQTITPELPEEKDKTDSLREP

SEQ ID NO: 9753 - protein, 279 aa, Homo Sapiens
MKIIILLGFLGATLSAPLIPQRLMSASNSNELLLNLNNGQLLPLQLQGPLNSWIPPFSGILQQQQQAQIPGLSQFSLSALDQFAGLLPNQIPLTGEASFAQGAQAGQVDPLQLQTPPQTQPGPSHVMPYVFSFKMPQEQGQMFQYYPVYMVLPWEQPQQTVPRSPQQTRQQQYEEQIPFYAQFGYIPQLAEPAISGGQQQLAFDPQLGTAPEIAVMSTGEEIPYLQKEAINFRHDSAGVFMPSTSPKPSTTNVFTSAVDQTITPELPEEKDKTDSLREP

SEQ ID NO: 9754 - protein, 253 aa, Homo Sapiens
MKIIILLGFLGATLSAPLLLNLNNGQLLPLQLQGPLNSWIPPFSGILQQQQQAQIPGLSQFSLSALDQFAGLLPNQIPLTGEASFAQGAQAGQVDPLQLQTPPQTQPGPSHVMPYVFSFKMPQEQGQMFQYYPVYMVLPWEQPQQTVPRSPQQTRQQQYEEQIPFYAQFGYIPQLAEPAISGGQQQLAFDPQLGTAPEIAVMSTGEEIPYLQKEAINFRHDSAGVFMPSTSPKPSTTNVFTSAVDQTITPELP

SEQ ID NO: 9755 - protein, 30 aa, Homo Sapiens
QTPPQTQPGPSHVMPYVFSFKMPQEQGQNI

SEQ ID NO: 9756 - protein, 176 aa, Homo Sapiens
MARRHCFSYWLLVCWLVVTVAEALSTFYLQQHINLHMDKKRYLRLLEIHKIMRTLPTARSLHSPLHLPRGVRSQGPSPSQRHPGVPSIFFHEGPESILGFQTDLSSLQGVTTVFHSSHFIGHTVTLLIGISPEEDSREEAHLRKAEREEKPKHTEAKKSLSFRKKQQKDFCFIFRN

SEQ ID NO: 9757 - protein, 130 aa, Homo Sapiens
MARRHCFSYWLLVCWLVVTVAEGQEEVFTPPGDSQNNADATDCQIFTLTPPPAPRSPVTRAQPITKTPRCPFHFFPRRPRIHFRFPNRPFVPSRCNHRFPFQPFYWPHRYLTYRYFPRRRLQRGSSSEES

SEQ ID NO: 9758 - protein, 85 aa, Homo Sapiens
MARRHCFSYWLLVCWLVVTVAEGQEEVFTPPGDSQNNADATDCQIFTLTPPPAPRSPVTRAQPITKTPRYFPRRRLQRGSSSEES

SEQ ID NO: 9759 - protein, 40 aa, Homo Sapiens
MARRHCFSYWLLVCWLVVTVAEVETGFHHVSQDGLDLLTS

SEQ ID NO: 9760 - protein, 52 aa, Homo Sapiens
MPARALLPRRMGHRTLASTPALWASIPCPRSELRLDLVLPSGQSFRWLTASA

SEQ ID NO: 9761 - protein, 357 aa, Homo Sapiens
MPARALLPRRMGHRTLASTPALWASIPCPRSELRLDLVLPSGQSFRWREQSPAHWSGVLADQVWTLTQTEEQLHCTVYRGDKSQASRPTPDELEAVRKYFQLDVTLAQLYHHWGSVDSHFQEVAQKFQGVRLLRQDPIECLFSFICSSNNNIARITGMVERLCQAFGPRLIQLDDVTYHGFPSLQALAGPEVEAHLRKLGLGYRARYVSASARAILEEQGGLAWLQQLRESSYEEAHKALCILPGVGTKGLLGNAFDGHQLLRPLIFCQDHLREGPPIGRGDSQGEELEPQLPSSLSSIPYGFCDHCWTKDVDDPPLVTHPSPGSRDGHMTQAWPVKVVSPLATVIGHVMQASLLAL

SEQ ID NO: 9762 - protein, 424 aa, Homo Sapiens
MPARALLPRRMGHRTLASTPALWASIPCPRSELRLDLVLPSGQSFRWREQSPAHWSGVLADQVWTLTQTEEQLHCTVYRGDKSQASRPTPDELEAVRKYFQLDVTLAQLYHHWGSVDSHFQEVAQKFQGVRLLRQDPIECLFSFICSSNNNIARITGMVERLCQAFGPRLIQLDDVTYHGFPSLQALAGPEVEAHLRKLGLGYRARYVSASARAILEEQGGLAWLQQLRESSYEEAHKALCILPGVGTKVADCICLMALDKPQAVPVDVHMWHIAQRDYSWHPTTSQAKGPSPQTNKELGNFFRSLWGPYAGWAQAGLLGNAFDGHQLLRPLIFCQDHLREGPPIGRGDSQGEELEPQLPSSLSSIPYGFCDHCWTKDVDDPPLVTHPSPGSRDGHMTQAWPVKVVSPLATVIGHVMQASLLAL

SEQ ID NO: 9763 - protein, 410 aa, Homo Sapiens
MPARALLPRRMGHRTLASTPALWASIPCPRSELRLDLVLPSGQSFRWREQSPAHWSGVLADQVWTLTQTEEQLHCTVYRGDKSQASRPTPDELEAVRKYFQLDVTLAQLYHHWGSVDSHFQEVAQKFQGVRLLRQDPIECLFSFICSSNNNIARITGMVERLCQAFGPRLIQLDDVTYHGFPSLQALAGPEVEAHLRKLGLGYRARYVSASARAILEEQGGLAWLQQLRESSYEEAHKALCILPGVGTKVADCICLMALDKPQAVPVDVHMWHIAQRDYSWHPTTSQAKGPSPQTNKELGNFFRSLWGPYAGWAQATPPSYRCCSVPTCANPAMLRSHQQSAERVPKGRKARWGTLDKEIPQAPSPPFPTSLSPSPPSLMLGRGLPVTTSKARHPQIKQSVCTTRWGGGY

SEQ ID NO: 9764 - protein, 356 aa, Homo Sapiens
MPARALLPRRMGHRTLASTPALWASIPCPRSELRLDLVLPSGQSFRWREQSPAHWSGVLADQVWTLTQTEEQLHCTVYRGDKSQASRPTPDELEAVRKYFQLDVTLAQLYHHWGSVDSHFQEVAQKFQGVRLLRQDPIECLFSFICSSNNNIARITGMVERLCQAFGPRLIQLDDVTYHGFPSLQALAGPEVEAHLRKLGLGYRARYVSASARAILEEQGGLAWLQQLRESSYEEAHKALCILPGVGTKVADCICLMALDKPQAVPVDVHMWHIAQRDYSWHPTTSQAKGPSPQTNKELGNFFRSLWGPYAGWAQALCQVITTFMTFLGPHRLDQMPPEELQTSSSRLGGPPWQCI

SEQ ID NO: 9765 - protein, 324 aa, Homo Sapiens
MPARALLPRRMGHRTLASTPALWASIPCPRSELRLDLVLPSGQSFRWREQSPAHWSGVLADQVWTLTQTEEQLHCTVYRGDKSQASRPTPDELEAVRKYFQLDVTLAQLYHHWGSVDSHFQEVAQKFQGVRLLRQDPIECLFSFICSSNNNIARITGMVERLCQAFGPRLIQLDDVTYHGFPSLQALAGPEVEAHLRKLGLGYRARYVSASARAILEEQGGLAWLQQLRESSYEEAHKALCILPGVGTKVADCICLMALDKPQAVPVDVHMWHIAQRDYSWHPTTSQAKGPSPQTNKELGNFFRSLWGPYAGWAQAVSVPRCPP

SEQ ID NO: 9766 - protein, 345 aa, Homo Sapiens
MPARALLPRRMGHRTLASTPALWASIPCPRSELRLDLVLPSGQSFRWREQSPAHWSGVLADQVWTLTQTEEQLHCTVYRGDKSQASRPTPDELEAVRKYFQLDVTLAQLYHHWGSVDSHFQEVAQKFQGVRLLRQDPIECLFSFICSSNNNIARITGMVERLCQAFGPRLIQLDDVTYHGFPSLQALAGPEVEAHLRKLGLGYRARYVSASARAILEEQGGLAWLQQLRESSYEEAHKALCILPGVGTKVADCICLMALDKPQAVPVDVHMWHIAQRDYSWHPTTSQAKGPSPQTNKELGNFFRSLWGPYAGWAQAVLFSADLRQSRHAQEPPAKRRKGSKGPEG

SEQ ID NO: 9767 - protein, 322 aa, Homo Sapiens
MPARALLPRRMGHRTLASTPALWASIPCPRSELRLDLVLPSGQSFRWREQSPAHWSGVLADQVWTLTQTEEQLHCTVYRGDKSQASRPTPDELEAVRKYFQLDVTLAQLYHHWGSVDSHFQEVAQKFQGVRLLRQDPIECLFSFICSSNNNIARITGMVERLCQAFGPRLIQLDDVTYHGFPSLQALAGPEVEAHLRKLGLGYRARYVSASARAILEEQGGLAWLQQLRESSYEEAHKALCILPGVGTKVADCICLMALDKPQAVPVDVHMWHIAQRDYSWHPTTSQAKGPSPQTNKELGNFFRSLWGPYAGWAQAAGSDAS

SEQ ID NO: 9768 - protein, 195 aa, Homo Sapiens
MPARALLPRRMGHRTLASTPALWASIPCPRSELRLDLVLPSGQSFRWREQSPAHWSGVLADQVWTLTQTEEQLHCTVYRGDKSQASRPTPDELEAVRKYFQLDVTLAQLYHHWGSVDSHFQEVAQKFQGVRLLRQDPIECLFSFICSSNNNIARITGMVERLCQAFGPRLIQLDDVTYHGFPSLQALAGPPWQCI

SEQ ID NO: 9769 - protein, 168 aa, Homo Sapiens
  misc_feature (1)..(1): Xaa can be any naturally occurring amino acid
XASIPCPRSELRLDLVLPSGQSFRWREQSPAHWSGVLADQVWTLTQTEEQLHCTVYRGDKSQASRPTPDELEAVRKYFQLDVTLAQLYHHWGSVDSHFQEVAQKFQGVRLLRQDPIECLFSFICSSNNNIARITGMVERLCQAFGPRLIQLDDVTYHGFPSLQALAGG

SEQ ID NO: 9770 - protein, 128 aa, Homo Sapiens
  misc_feature (1)..(1): Xaa can be any naturally occurring amino acid
XELEAVRKYFQLDVTLAQLYHHWGSVDSHFQEVAQKFQGVRLLRQDPIECLFSFICSSNNNIARITGMVERLCQAFGPRLIQLDDVTYHGFPSLQALAGVPVPAEGLLTSASAFQSPLRSRQPEADRR

SEQ ID NO: 9771 - protein, 132 aa, Homo Sapiens
  misc_feature (1)..(1): Xaa can be any naturally occurring amino acid
XMMSPTMASPACRPWLVADCICLMALDKPQAVPVDVHMWHIAQRDYSWHPTTSQAKGPSPQTNKELGNFFRSLWGPYAGWAQATPPSYRCCSVPTCANPAMLRSHQQSAERVPKGRKARWGTLDKEIPQAPS

SEQ ID NO: 9772 - protein, 222 aa, Homo Sapiens
  misc_feature (1)..(1): Xaa can be any naturally occurring amino acid
XPCGPPSRALALSCAWTWFCLLDNLSGVRLLRQDPIECLFSFICSSNNNIARITGMVERLCQAFGPRLIQLDDVTYHGFPSLQALAGPEVEAHLRKLGLGYRARYVSASARAILEEQGGLAWLQQLRESSYEEAHKALCILPGVGTKVADCICLMALDKPQAVPVDVHMWHIAQRDYSWHPTTSQAKGPSPQTNKELGNFFRSLWGPYAGWAQAVSVPRCPP

SEQ ID NO: 9773 - protein, 263 aa, Homo Sapiens
  misc_feature (1)..(1): Xaa can be any naturally occurring amino acid
XVRKYFQLDVTLAQLYHHWGSVDSHFQEVAQKFQGVRLLRQDPIECLFSFICSSNNNIARITGMVERLCQAFGPRLIQLDDVTYHGFPSLQALAGPEVEAHLRKLGLGYRARYVSASARAILEEQGGLAWLQQLRESSYEEAHKALCILPGVGTKGLLGNAFDGHQLLRPLIFCQDHLREGPPIGRGDSQGEELEPQLPSSLSSIPYGFCDHCWTKDVDDPPLVTHPSPGSRDGHMTQAWPVKVVSPLATVIGHVMQASLLAL

SEQ ID NO: 9774 - protein, 298 aa, Homo Sapiens
MKTLQSTLLLLLLVPLIKPAPPTQQDSRIIYDYGTDNFEESIFSQDYEDKYLDGKNIKEKETVIIPNEKSLQLQKDEAITPLPPKKENDEMPTCLLCVCLSGSVYCEEVDIDAVPPLPKESAYLYARFNKIKKLTAKDFADIPNLRRLDFTGNLIEDIEDGTFSKLSLLEELSLAENQLLKLPVLPPKLTLFNAKYNKIKSRGIKANAFKKLNNLTFLYLDHNALESVPLNLPESLRVIHLQFNNIASITDDTFCKANDTSYIRDRIEEIRLEGNPIVLGKHPNSFICLKRLPIGSYF

SEQ ID NO: 9775 - protein, 298 aa, Homo Sapiens; identical to SEQ ID NO: 9774

SEQ ID NO: 9776 - protein, 268 aa, Homo Sapiens
MLAKISTTWKLFLKLLGPEILLSSLKSRHSFSHSPSHLGLMHRHEHLLRKTTKNFKTATTTLQSTLLLLLLVPLIKPAPPTQQDSRIIYDYGTDNFEESIFSQDYEDKYLDGKNIKEKETVIIPNEKSLQLQKDEAITPLPPKKENDEMPTCLLCVCLSGSVYCEEVDIDAVPPLPKESAYLYARFNKIKKLTAKDFADIPNLRRLDFTGNLIEDIEDGTFSKLSLLEELSLAENQLLKLPVLPPKLTLFNAKYNKIKSRGIKANAFK

SEQ ID NO: 9777 - protein, 545 aa, Homo Sapiens
MPPFLLLTCLFITGTSVSPVALDPCSAYISLNEPWRNTDHQLDESQGPPLCDNHVNGEWYHFTGMAGDAMPTFCIPENHCGTHAPVWLNGSHPLEGDGIVQRQACASFNGNCCLWNTTVEVKACPGGYYVYRLTKPSVCFHVYCGHFYDICDEDCHGSCSDTSECTCAPGTVLGPDRQTCFDENECEQNNGGCSEICVNLKNSYRCECGVGRVLRSDGKTCEDVEGCHNNNGGCSHSCLGSEKGYQCECPRGLVLSEDNHTCQVPVLCKSNAIEVNIPRELVGGLELFLTNTSCRGVSNGTHVNILFSLKTCGTVVDVVNDKIVASNLVTGLPKQTPGSSGDFIIRTSKLLIPVTCEFPRLYTISEGYVPNLRNSPLEIMSRNHGIFPFTLEIFKDNEFEEPYREALPTLKLRDSLYFGIEPVVHVSGLESLVESCFATPTSKIDEVLKYYLIRDGCVSDDSVKQYTSRDHLAKHFQVPVFKFVGKDHKEVFLHCRVLVCGVLDERSRCAQGCHRRMRRGAGGEDSAGLQGQTLTGGPIRIDWED

SEQ ID NO: 9778 - protein, 321 aa, Homo Sapiens
MPPFLLLTCLFITGTSVSPVALDPCSAYISLNEPWRNTDHQLDESQGPPLCDNHVNGEWYHFTGMAGDAMPTFCIPENHCGTHAPVWLNGSHPLEGDGIVQRQACASFNGNCCLWNTTVEVKACPGGYYVYRLTKPSVCFHVYCGHFYDICDEDCHGSCSDTSECTCAPGTVLGPDRQTCFDENECEQNNGGCSEICVNLKNSYRCECGVGRVLRSDGKTCEDVEGCHNNNGGCSHSCLGSEKGYQCECPRGLVLSEDNHTCQVPVLCKSNAIEVNIPRELVGGLELFLTNTSCRGVSNGTHVNILFSLKTCGTVVDLCFR

SEQ ID NO: 9779 - protein, 129 aa, Homo Sapiens
MCSRDARTKQLRQLLEKVQNMSQSIEVLDRRTQRDLQYVEKMENQMKGLESKFKQVEESHKQHLARQFKAIKAKMDELRPLIPVLEEYKADAKLVLQFKEEVQNLTSVLNELQEEIGAYDYDELQSRVS

SEQ ID NO: 9780 - protein, 163 aa, Homo Sapiens
MEGPGGSGFHLRLEAFCKCKSPINVFDPVRPALQVGLTRVLPTNPEESWQVYSSAQDSEGRCICTVVAPQQTMCSRDARTKQLRQLLEKVQNMSQSIEVLDRRTQRDLQYVEKMENQMKGLESKFKQVEESHKQHLARQFKAIKAKMDELRPLIPVLEEYKAD

SEQ ID NO: 9781 - protein, 458 aa, Homo Sapiens
MGEAPGREGRGPCPQLESPRRRRVLPTNPEESWQVYSSAQDSEGRCICTVVAPQQTMCSRDARTKQLRQLLEKVQNMSQSIEVLDRRTQRDLQYVEKMENQMKGLESKFKQVEESHKQHLARQFKAIKAKMDELRPLIPVLEEYKADAKLVLQFKEEVQNLTSVLNELQEEIGAYDYDELQSRVSNLEERLRACMQKLACGKLTGISDPVTVKTSGSRFGSWMTDPLAPEGDNRVWYMDGYHNNRFVREYKSMVDFMNTDNFTSHRLPHPWSGTGQVVYNGSIYFNKFQSHIIIRFDLKTETILKTRSLDYAGYNNMYHYAWGGHSDIDLMVDESGLWAVYATNQNAGNIVVSRLDPVSLQTLQTWNTSYPKRSAGEAFIICGTLYVTNGYSGGTKVHYAYQTNASTYEYIDIPFQNKYSHISMLDYNPKDRALYAWNNGHQILYNVTLFHVIRSDEL

SEQ ID NO: 9782 - protein, 129 aa, Homo Sapiens
MPGRWRWQRDMHPARKLLSLLFLILMGTELTQDSAAPDSLLRSSKGSTRGSLAAIVIWRGKSESRIAKTPGIFRGGGTLVLPPTHTPEWLILPLGITLPLGAPETGGGDCAAETWKGSQRAGQLCALLA

SEQ ID NO: 9783 - protein, 167 aa, Homo Sapiens
MPGRWRWQRDMHPARKLLSLLFLILMGTELTQNKRENKAEKMGGPESERKTTGEKTLNELPLFCLEAHAGSLALPRMCSPNPNPAVGLCRPAYPQSPSPGAAQTISQSLLERFCMASRRGFLGPRKAWWRVVVVHCCWTDAFIHVHTHTHTCTHRGADTCREEPTRS

SEQ ID NO: 9784 - protein, 467 aa, Homo Sapiens
MPGRWRWQRDMHPARKLLSLLFLILMGTELTQVLPTNPEESWQVYSSAQDSEGRCICTVVAPQQTMCSRDARTKQLRQLLEKVQNMSQSIEVLDRRTQRDLQYVEKMENQMKGLESKFKQVEESHKQHLARQFKAIKAKMDELRPLIPVLEEYKADAKLVLQFKEEVQNLTSVLNELQEEIGAYDYDELQSRVSNLEERLRACMQKLACGKLTGISDPVTVKTSGSRFGSWMTDPLAPEGDNRVWYMDGYHNNRFVREYKSMVDFMNTDNFTSHRLPHPWSGTGQVVYNGSIYFNKFQSHIIIRFDLKTETILKTRSLDYAGYNNMYHYAWGGHSDIDLMVDESGLWAVYATNQNAGNIVVSRLDPVSLQTLQTWNTSYPKRSAGEAFIICGTLYVTNGYSGGTKVHYAYQTNASTYEYIDIPFQNKYSHISMLDYNPKDRALYAWNNGHQILYNVTLFHVIRSDEL

SEQ ID NO: 9785 - protein, 135 aa, Homo Sapiens
MPGRWRWQRDMHPARKLLSLLFLILMGTELTQVLPTNPEESWQVYSSAQDSEGRCICTVVAPQQTMCSRDARTKQLRQLLEKVQNMSQSIEVLDRRTQRDLQYVEKMENQMKGLESKFKQVEESHKQHLARQFKG

SEQ ID NO: 9786 - protein, 208 aa, Homo Sapiens
MSQSIEVLDRRTQRDLQYVEKMENQMKGLESKFKQVEESHKQHLARQFKAIKAKMDELRPLIPVLEEYKADAKLVLQFKEEVQNLTSVLNELQEEIGAYDYDELQSRVSNLEERLRACMQKLACGKLTGISDPVTVKTSGSRFGSWMTDPLAPEGDNRVWYMDGYHNNRFVREYKSMVDFMNTDNFTSHRLPHPWSGTGQVVYNGSIY

SEQ ID NO: 9787 - protein, 485 aa, Homo Sapiens
MSVPLLKIGVVLSTMAMITNWMSQTLPSLVGLNTTKLSAAGGGTLDRSTGVLPTNPEESWQVYSSAQDSEGRCICTVVAPQQTMCSRDARTKQLRQLLEKVQNMSQSIEVLDRRTQRDLQYVEKMENQMKGLESKFKQVEESHKQHLARQFKAIKAKMDELRPLIPVLEEYKADAKLVLQFKEEVQNLTSVLNELQEEIGAYDYDELQSRVSNLEERLRACMQKLACGKLTGISDPVTVKTSGSRFGSWMTDPLAPEGDNRVWYMDGYHNNRFVREYKSMVDFMNTDNFTSHRLPHPWSGTGQVVYNGSIYFNKFQSHIIIRFDLKTETILKTRSLDYAGYNNMYHYAWGGHSDIDLMVDESGLWAVYATNQNAGNIVVSRLDPVSLQTLQTWNTSYPKRSAGEAFIICGTLYVTNGYSGGTKVHYAYQTNASTYEYIDIPFQNKYSHISMLDYNPKDRALYAWNNGHQILYNVTLFHVIRSDEL

SEQ ID NO: 9788 - protein, 153 aa, Homo Sapiens
MSVPLLKIGVVLSTMAMITNWMSQTLPSLVGLNTTKLSAAGGGTLDRSTGVLPTNPEESWQVYSSAQDSEGRCICTVVAPQQTMCSRDARTKQLRQLLEKVQNMSQSIEVLDRRTQRDLQYVEKMENQMKGLESKFKQVEESHKQHLARQFKG

SEQ ID NO: 9789 - protein, 99 aa, Homo Sapiens
  misc_feature (1)..(1): Xaa can be any naturally occurring amino acid
XSHKQHLARQFKAIKAKMDELRPLIPVLEEYKADAKLVLQFKEEVQNLTSVLNELQEEIGAYDYDELQSRVSNLEERLRACMQKLGVVHGRLSQQPLRT

SEQ ID NO: 9790 - protein, 78 aa, Homo Sapiens
MEVLELRTYRDLQYVRGMETLMRSLDARLRAADGSLSAKSFQELKDRMTELLPLSSVLEQYKADTRTIVRLREEAVGS

SEQ ID NO: 9791 - protein, 376 aa, Homo Sapiens
MEVLELRTYRDLQYVRGMETLMRSLDARLRAADGSLSAKSFQELKDRMTELLPLSSVLEQYKADTRTIVRLREEVRNLSGSLAAIQEEMGAYGYEDLQQRVMALEARLHACAQKLGCGKLTGVSNPITVRAMGSRFGSWMTDTMAPSADSRVWYMDGYYKGRRVLEFRTLGDFIKGQNFIQHLLPQPWAGTGHVVYNGSLFYNKYQSNVVVKYHFRSRSVLVQRSLPGAGYNNTFPYSWGGFSDMDFMVDESGLWAVYTTNQNAGNIVVSRLDPHTLEVMRSWDTGYPKRSAGEAFMICGVLYVTNSHLAGAKVYFAYFTNTSSYEYTDVPFHNQYSHISMLDYNPRERALYTWNNGHQVLYNVTLFHVISTSGDP

SEQ ID NO: 9792 - protein, 336 aa, Homo Sapiens
MSVPLLKIGAVLSTMAMVTNWMSQTLPSLVGLNGTVSRAGASEKITLFQNPEEGWQLYTSAQAPDGKCICTAVIPAQSTCSRDGRSRELRQLMEKVQNVSQSMEVLELRTYRDLQYVRGMETLMRSLDARLRAADGSLSAKSFQELKDRMTELLPLSSVLEQYKADTRTIVRLREEVRNLSGSLAAIQEEMGAYGYEDLQQRVMALEARLHACAQKLGCGKLTGVSNPITVRAMGSRFGSWMTDTMAPSADSRVWYMDGYYKGRRVLEFRTLGDFIKGQNFIQHLLPQPWAGTGHVVYNGSLFYNKYQSNVVVKYHFRSRSVLVQRSLPGAGYNNT

SEQ ID NO: 9793 - protein, 454 aa, Homo Sapiens
MWPLTVPPPLLLLLCSGLAGQTLFQNPEEGWQLYTSAQAPDGKCICTAVIPAQSTCSRDGRSRELRQLMEKVQNVSQSMEVLELRTYRDLQYVRGMETLMRSLDARLRAADGSLSAKSFQELKDRMTELLPLSSVLEQYKADTRTIVRLREEVRNLSGSLAAIQEEMGAYGYEDLQQRVMALEARLHACAQKLGCGKLTGVSNPITVRAMGSRFGSWMTDTMAPSADSRVWYMDGYYKGRRVLEFRTLGDFIKGQNFIQHLLPQPWAGTGHVVYNGSLFYNKYQSNVVVKYHFRSRSVLVQRSLPGAGYNNTFPYSWGGFSDMDFMVDESGLWAVYTTNQNAGNIVVSRLDPHTLEVMRSWDTGYPKRSAGEAFMICGVLYVTNSHLAGAKVYFAYFTNTSSYEYTDVPFHNQYSHISMLDYNPRERALYTWNNGHQVLYNVTLFHVISTSGDP

SEQ ID NO: 9794 - protein, 458 aa, Homo Sapiens
MQATSNLLNLLLLSLFAGLDPSKTQISPKEGWQVYSSAQDPDGRCICTVVAPEQNLCSRDAKSRQLRQLLEKVQNMSQSIEVLNLRTQRDFQYVLKMETQMKGLKAKFRQIEDDRKTLMTKHFQELKEKMDELLPLIPVLEQYKTDAKLITQFKEEIRNLSAVLTGIQEEIGAYDYEELHQRVLSLETRLRDCMKKLTCGKLMKITGPVTVKTSGTRFGAWMTDPLASEKNNRVWYMDSYTNNKIVREYKSIADFVSGAESRTYNLPFKWAGTNHVVYNGSLYFNKYQSNIIIKYSFDMGRVLAQRSLEYAGFHNVYPYTWGGFSDIDLMADEIGLWAVYATNQNAGNIVISQLNQDTLEVMKSWSTGYPKRSAGESFMICGTLYVTNSHLTGAKVYYSYSTKTSTYEYTDIPFHNQYFHISMLDYNARDRALYAWNNGHQVLFNVTLFHIIKTEDDT

SEQ ID NO: 9795 - protein, 478 aa, Homo Sapiens
MSPPLLKLGAVLSTMAMISNWMSQTLPSLVGLNTTRLSTPDTLTQISPKEGWQVYSSAQDPDGRCICTVVAPEQNLCSRDAKSRQLRQLLEKVQNMSQSIEVLNLRTQRDFQYVLKMETQMKGLKAKFRQIEDDRKTLMTKHFQELKEKMDELLPLIPVLEQYKTDAKLITQFKEEIRNLSAVLTGIQEEIGAYDYEELHQRVLSLETRLRDCMKKLTCGKLMKITGPVTVKTSGTRFGAWMTDPLASEKNNRVWYMDSYTNNKIVREYKSIADFVSGAESRTYNLPFKWAGTNHVVYNGSLYFNKYQSNIIIKYSFDMGRVLAQRSLEYAGFHNVYPYTWGGFSDIDLMADEIGLWAVYATNQNAGNIVISQLNQDTLEVMKSWSTGYPKRSAGESFMICGTLYVTNSHLTGAKVYYSYSTKTSTYEYTDIPFHNQYFHISMLDYNARDRALYAWNNGHQVLFNVTLFHIIKTEDDT

SEQ ID NO: 9796 - protein, 140 aa, Homo Sapiens
MSQSIEVLNLRTQRDFQYVLKMETQMKGLKAKFRQIEDDRKTLMTKHFQELKEKMDELLPLIPVLEQYKTDAKLITQFKEEIRNLSAVLTGIQEEIGAYDYEELHQRVLSLETRLRDCMKKLIDLKKRKEEEKRQQKGEA

SEQ ID NO: 9797 - protein, 510 aa, Homo Sapiens
MRPGLSFLLALLFFLGQAAGDLGDVGPPIPSPGFSSFPGVDSSSSFSSSSRSGSSSSRSLGSGGSVSQLFSNFTGSVDDRGTCQCSVSLPDTTFPVDRVERLEFTAHVLSQKFEKELSKVREYVQLISVYEKKLLNLTVRIDIMEKDTISYTELDFELIKVEVKEMEKLVIQLKESFGGSSEIVDQLEVEIRNMTLLVEKLETLDKNNVLAIRREIVALKTKLKECEASKDQNTPVVHPPPTPGSCGHGGVVNISKPSVVQLNWRGFSYLYGAWGRDYSPQHPNKGLYWVAPLNTDGRLLEYYRLYNTLDDLLLYINARELRITYGQGSGTAVYNNNMYVNMYNTGNIARVNLTTNTIAVTQTLPNAAYNNRFSYANVAWQDIDFAVDENGLWVIYSTEASTGNMVISKLNDTTLQVLNTWYTKQYKPSASNAFMVCGVLYATRTMNTRTEEIFYYYDTNTGKEGKLDIVMHKMQEKVQSINYNPFDQKLYVYNDGYLLNYDLSVLQKPQ

SEQ ID NO: 9798 - protein, 68 aa, Homo Sapiens
MMVALRGASALLVLFLAAFLPPPQCTQDPAMVHYIYQRFRVLEGWKNVPKQRGHTFKNSKSSQKIYLS

SEQ ID NO: 9799 - protein, 402 aa, Homo Sapiens
MMVALRGASALLVLFLAAFLPPPQCTQDPAMVHYIYQRFRVLEQGLEKCTQATRAYIQEFQEFSKNISVMLGRCQTYTSEYKSAVGNLALRVERAQREIDYIQYLREADECIESEDKTLAEMLLQEAEEEKKIRTLLNASCDNMLMGIKSLKIVKKMMDTHGSWMKDAVYNSPKVYLLIGSRNNTVWEFANIRAFMEDNTKPAPRKQILTLSWQGTGQVIYKGFLFFHNQATSNEIIKYNLQKRTVEDRMLLPGGVGRALVYQHSPSTYIDLAVDEHGLWAIHSGPGTHSHLVLTKIEPGTLGVEHSWDTPCRSQDAEASFLLCGVLYVVYSTGGQGPHRITCIYDPLGTISEEDLPNLFFPKRPRSHSMIHYNPRDKQLYAWNEGNQIIYKLQTKRKLPLK

SEQ ID NO: 9800 - protein, 402 aa, Homo Sapiens; identical to SEQ ID NO: 9799

SEQ ID NO: 9801 - protein, 56 aa, Homo Sapiens
MMVALRGASALLVLFLAAFLPPPQCTQDPAMVHYIYQRFRVLEQGLEKCTQAVTTC

SEQ ID NO: 9802 - protein, 652 aa, Homo Sapiens
MAAAALPPRPLLLLPLVLLLSGRPTRADSKVFGDLDQVRMTSEGSDCRCKCIMRPLSKDACSRVRSGRARVEDFYTVETVSSGTDCRCSCTAPPSSLNPCENEWKMEKLKKQAPELLKLQSMVDLLEGTLYSMDLMKVHAYVHKVASQMNTLEESIKANLSRENEVVKDSVRHLSEQLRHYENHSAIMLGIKKELSRLGLQLLQKDAAAAPATPATGTGSKAQDTARGKGKDISKYGSVQKSFADRGLPKPPKEKLLQVEKLRKESGKGSFLQPTAKPRALAQQQAVIRGFTYYKAGKQEVTEAVADNTLQGTSWLEQLPPKVEGRSNSAEPNSAEQDEAEPRSSERVDLASGTPTSIPATTTTATTTPTPTTSLLPTEPPSGPEVSSQGREASCEGTLRAVDPPVRHHSYGRHEGAWMKDPAARDDRIYVTNYYYGNSLVEFRNLENFKQGRWSNMYKLPYNWIGTGHVVYQGAFYYNRAFTKNIIKYDLRQRFVASWALLPDVVYEDTTPWKWRGHSDIDFAVDESGLWVIYPAVDDRDEAQPEVIVLSRLDPGDLSVHRETTWKTRLRRNSYGNCFLVCGILYAVDTYNQQEGQVAYAFDTHTGTDARPQLPFLNEHAYTTQIDYNPKERVLYAWDNGHQLTYTLHFVV

SEQ ID NO: 9803 - protein, 318 aa, Homo Sapiens
MAAAALPPRPLLLLPLVLLLSGRPTRADSKVFGDLDQVRMTSEGSDCRCKCIMRPLSKDACSRVRSGRARVEDFYTVETVSSGTDCRCSCTAPPSSLNPCENEWKMEKLKKQAPELLKSIKANLSRENEVVKDSVRHLSEQLRHYENHSAIMLGIKKELSRLGLQLLQKDAAAAPATPATGTGSKAQDTARGKGKDISKYGSVQKSFADRGLPKPPKEKLLQVEKLRKESGKGSFLQPTAKPRALAQQQAVIRGFTYYKAGKQEVTEAVADNTLQGTSWLEQLPPKVEGRSNSAEPNSAEQDEAEPRSSERVDLASGT

SEQ ID NO: 9804 - protein, 438 aa, Homo Sapiens
MSKRDKAGKDTARGKGKDISKYGSVQKSFADRGLPKPPKEKLLQVEKLRKESGKGSFLQPTAKPRALAQQQAVIRGFTYYKAGKQEVTEAVADNTLQGTSWLEQLPPKVEGRSNSAEPNSAEQDEAEPRSSERVDLASGTPTSIPATTTTATTTPTPTTSLLPTEPPSGPEVSSQGREASCEGTLRAVDPPVRHHSYGRHEGAWMKDPAARDDRIYVTNYYYGNSLVEFRNLENFKQGRWSNMYKLPYNWIGTGHVVYQGAFYYNRAFTKNIIKYDLRQRFVASWALLPDVVYEDTTPWKWRGHSDIDFAVDESGLWVIYPAVDDRDEAQPEVIVLSRLDPGDLSVHRETTWKTRLRRNSYGNCFLVCGILYAVDTYNQQEGQVAYAFDTHTGTDARPQLPFLNEHAYTTQIDYNPKERVLYAWDNGHQLTYTLHFVV

SEQ ID NO: 9805 - protein, 90 aa, Homo Sapiens
ETTWRTGLRRNFYGNCFVICGVLYAVDSYNQRNANISYAFDTHTNTQIVPRLLFENEYSYTTQIDYNPKDRLLYAWDNGHQVTYHVIFAY

SEQ ID NO: 9806 - protein, 751 aa, Homo Sapiens
MAKPRLLVLYFALIVVPAWVSSIVLTGTSEPPDAQTVAPAEDETLQNEADNQENVLSQLLGDYDKVKAMSEGSDCQCKCVVRPLGRDACQRINAGASRKEDFYTVETITSGSSCKCACVAPPSALNPCEGDFRLQKLREADSQDLKLSTIIDMLEGAFYGLDLLKLHSVTTKLVGRVDKLEEEVSKNLTKENEQIKEDMEEIRTEMNKRGKENCSENILDSMPDIRSALQRDAAAAYAHPEQYEERFLQEETVSQQINSIELLQTRPLALPEVVKSQRPLQRQVHLRGRPASQPTVIRGITYYKAKVSEEENDIEEQQDEFFSGDNGVDLLIEDQLLRHNGLMTSVTRRPAATRQGHSTAVTSDLNARTAPWSSALPQPSTSDPSIANHASVGPTLQTTSVSPDPTRESVLQPSPQVPATTVAHTATQQPAAPAPPAVSPREALMEAMHTVPVPPTTVRTDSLGKDAPAGWGTTPASPTLSPEEEDDIRNVIGRCKDTLSTITGPTTQNTYGRNEGAWMKDPLAKDERIYVTNYYYGNTLVEFRNLENFKQGRWSNSYKLPYSWIGTGHVVYNGAFYYNRAFTRNIIKYDLKQRYVAAWAMLHDVAYEEATPWRWQGHSDVDFAVDENGLWLIYPALDDEGFSQEVIVLSKLNAADLSTQKETTWRTGLRRNFYGNCFVICGVLYAVDSYNQRNANISYAFDTHTNTQIVPRLLFENEYSYTTQIDYNPKDRLLYAWDNGHQVTYHVIFAY

SEQ ID NO: 9807 - protein, 750 aa, Homo Sapiens
MAKPRLLVLYFALIVVPAWVSSIVLTGTSEPPDAQTVAPAEDETLQNEADNQENVLSQLLGDYDKVKAMSEGSDCQCKCVVRPLGRDACQRINAGASRKEDFYTVETITSGSSCKCACVAPPSALNPCEGDFRLQKLREADSQDLKLSTIIDMLEGAFYGLDLLKLHSVTTKLVGRVDKLEEEVSKNLTKENEQIKEDMEEIRTEMNKRGKENCSENILDSMPDIRSALQRDAAAAYAHPEYEERFLQEETVSQQINSIELLQTRPLALPEVVKSQRPLQRQVHLRGRPASQPTVIRGITYYKAKVSEEENDIEEQQDEFFSGDNGVDLLIEDQLLRHNGLMTSVTRRPAATRQGHSTAVTSDLNARTAPWSSALPQPSTSDPSIANHASVGPTLQTTSVSPDPTRESVLQPSPQVPATTVAHTATQQPAAPAPPAVSPREALMEAMHTVPVPPTTVRTDSLGKDAPAGWGTTPASPTLSPEEEDDIRNVIGRCKDTLSTITGPTTQNTYGRNEGAWMKDPLAKDERIYVTNYYYGNTLVEFRNLENFKQGRWSNSYKLPYSWIGTGHVVYNGAFYYNRAFTRNIIKYDLKQRYVAAWAMLHDVAYEEATPWRWQGHSDVDFAVDENGLWLIYPALDDEGFSQEVIVLSKLNAADLSTQKETTWRTGLRRNFYGNCFVICGVLYAVDSYNQRNANISYAFDTHTNTQIVPRLLFENEYSYTTQIDYNPKDRLLYAWDNGHQVTYHVIFAY

SEQ ID NO: 9808 - protein, 233 aa, Homo Sapiens
MKDPLAKDERIYVTNYYYGNTLVEFRNLENFKQGRWSNSYKLPYSWIGTGHVVYNGAFYYNRAFTRNIIKYDLKQRYVAAWAMLHDVAYEEATPWRWQGHSDVDFAVDENGLWLIYPALDDEGFSQEVIVLSKLNAADLSTQKETTWRTGLRRNFYGNCFVICGVLYAVDSYNQRNANISYAFDTHTNTQIVPRLLFENEYSYTTQIDYNPKDRLLYAWDNGHQVTYHVIFAY

SEQ ID NO: 9809 - protein, 88 aa, Homo Sapiens
TWRTGLRRNFYGNCFVICGVLYAVDSYNQRNANISYAFDTHTNTQIVPRLLFENEYSYTTQIDYNPKDRLLYAWDNGHQVTYHVIFAY

SEQ ID NO: 9810 - protein, 386 aa, Homo Sapiens
MAQWHCSQRTQAGGHGVGERLAQCQDQSSRHAAELRDFKNKMLPLLEVAEKEREALRTEADTISGRVDRLEREVDYLETQNPALPCVEFDEKVTGGPGTKGKGRRNEKYDMVTDCGYTISQVRSMKILKRFGGPAGLWTKDPLGQTEKIYVLDGTQNDTAFVFPRLRDFTLAMAARKASRVRVPFPWVGTGQLVYGGFLYFARRPPGRPGGGGEMENTLQLIKFHLANRTVVDSSVFPAEGLIPPYGLTADTYIDLAADEEGLWAVYATREDDRHLCLAKLDPQTLDTEQQWDTPCPRENAEAAFVICGTLYVVYNTRPASRARIQCSFDASGTLTPERAALPYFPRRYGAHASLRYNPRERQLYAWDDGYQIVYKLEMRKKEEEV

SEQ ID NO: 9811 - protein, 406 aa, Homo Sapiens
MGPSTPLLILFLLSWSGPLQGQQHHLVEYMERRLAALEERLAQCQDQSSRHAAELRDFKNKMLPLLEVAEKEREALRTEADTISGRVDRLEREVDYLETQNPALPCVEFDEKVTGGPGTKGKGRRNEKYDMVTDCGYTISQVRSMKILKRFGGPAGLWTKDPLGQTEKIYVLDGTQNDTAFVFPRLRDFTLAMAARKASRVRVPFPWVGTGQLVYGGFLYFARRPPGRPGGGGEMENTLQLIKFHLANRTVVDSSVFPAEGLIPPYGLTADTYIDLAADEEGLWAVYATREDDRHLCLAKLDPQTLDTEQQWDTPCPRENAEAAFVICGTLYVVYNTRPASRARIQCSFDASGTLTPERAALPYFPRRYGAHASLRYNPRERQLYAWDDGYQIVYKLEMRKKEEEV

SEQ ID NO: 9812 - protein, 345 aa, Homo Sapiens
MLPLLEVAEKEREALRTEADTISGRVDRLEREVDYLETQNPALPCVEFDEKVTGGPGTKGKGRRNEKYDMVTDCGYTISQVRSMKILKRFGGPAGLWTKDPLGQTEKIYVLDGTQNDTAFVFPRLRDFTLAMAARKASRVRVPFPWVGTGQLVYGGFLYFARRPPGRPGGGGEMENTLQLIKFHLANRTVVDSSVFPAEGLIPPYGLTADTYIDLAADEEGLWAVYATREDDRHLCLAKLDPQTLDTEQQWDTPCPRENAEAAFVICGTLYVVYNTRPASRARIQCSFDASGTLTPERAALPYFPRRYGAHASLRYNPRERQLYAWDDGYQIVYKLEMRKKEEEV

SEQ ID NO: 9813 - protein, 421 aa, Homo Sapiens
MGFLSPIYVIFFFFGVKVHCQYETYQWDEDYDQEPDDDYQTGFPFRQNVDYGVPFHQYTLGCVSECFCPTNFPSSMYCDNRKLKTIPNIPMHIQQLYLQFNEIEAVTANSFINATHLKEINLSHNKIKSQKIDYGVFAKLPNLLQLHLEHNNLEEFPFPLPKSLERLLLGYNEISKLQTNAMDGLVNLTMLDLCYNYLHDSLLKDKIFAKMEKLMQLNLCSNRLESMPPGLPSSLMYLSLENNSISSIPEKYFDKLPKLHTLRMSHNKLQDIPYNIFNLPNIVELSVGHNKLKQAFYIPRNLEHLYLQNNEIEKMNLTVMCPSIDPLHYHHLTYIRVDQNKLKEPISSYIFFCFPHIHTIYYGEQRSTNGQTIQLKTQVFRRFPDDDDESEDHDDPDNAHESPEQEGAEGHFDLHYYENQE

SEQ ID NO: 9814 - protein, 440 aa, Homo Sapiens
MEYQILKMSLCLFILLFLTPGILCICPLQCICTERHRHVDCSGRNLSTLPSGLQENIIHLNLSYNHFTDLHNQLTQYTNLRTLDISNNRLESLPAHLPRSLWNMSAANNNIKLLDKSDTAYQWNLKYLDVSKNMLEKVVLIKNTLRSLEVLNLSSNKLWTVPTNMPSKLHIVDLSNNSLTQILPGTLINLTNLTHLYLHNNKFTFIPDQSFDQLFQLQEITLYNNRWSCDHKQNITYLLKWMMETKAHVIGTPCSTQISSLKEHNMYPTPSGFTSSLFTVSGMQTVDTINSLSVVTQPKVTKIPKQYRTKETTFGATLSKDTTFTSTDKAFVPYPEDTSTETINSHEAAAATLTIHLQDGMVTNTSLTSSTKSSPTPMTLSITSGMPNNFSEMPQQSTTLNLWREETTTNVKTPLPSVANAWKVNASFLLLLNVVVMLAV

SEQ ID NO: 9815 - protein, 158 aa, Homo Sapiens
MALEVLMLLAVLIWTGAENLHVKISCSLDWLMVSVIPVAESRNLYIFADELHLGMGCPANRIHTYVYEFIYLVRDCGIRTRVVSEETLLFQTELYFTPRNIDHDPQEIHLECSTSRKSVWLTPVSTENEIKLDPSPFIADFQTTAEELGLLSSSPNLL

SEQ ID NO: 9816 - protein, 86 aa, Homo Sapiens
MVSVIPVAESRNLYIFADELHLGMGCPANRIHTYVYEFIYLVRDCGIRTRVVSEETLLFQTELYFTPRNIDHDPQEIHLECSTSSV

SEQ ID NO: 9817 - protein, 304 aa, Homo Sapiens
MDNVTVRQGESATLRCTIDDRVTRVAWLNRSTILYAGNDKWSIDPRVIILVNTPTQYSIMIQNVDVYDEGPYTCSVQTDNHPKTSRVHLIVQVPPQIMNISSDITVNEGSSVTLLCLAIGRPEPTVTWRHLSVKEGQGFVSEDEYLEISDIKRDQSGEYECSALNDVAAPDVRKVKITVNYPPYISKAKNTGVSVGQKGILSCEASAVPMAEFQWFKEETRLATGLDGMRIENKGRMSTLTFFNVSEKDYGNYTCVATNKLGNTNASITLYGPGAVIDGVNSASRALACLWLSGTLLAHFFIKF

SEQ ID NO: 9818 - protein, 345 aa, Homo Sapiens
MGVCGYLFLPWKCLVVVSLRLLFLVPTGVPVRSGDATFPKAMDNVTVRQGESATLRCTIDDRVTRVAWLNRSTILYAGNDKWSIDPRVIILVNTPTQYSIMIQNVDVYDEGPYTCSVQTDNHPKTSRVHLIVQVPPQIMNISSDITVNEGSSVTLLCLAIGRPEPTVTWRHLSVKEGQGFVSEDEYLEISDIKRDQSGEYECSALNDVAAPDVRKVKITVNYPPYISKAKNTGVSVGQKGILSCEASAVPMAEFQWFKEETRLATGLDGMRIENKGRMSTLTFFNVSEKDYGNYTCVATNKLGNTNASITLYGPGAVIDGVNSASRALACLWLSGTLLAHFFIKF

SEQ ID NO: 9819 - protein, 354 aa, Homo Sapiens
MGVCGYLFLPWKCLVVVSLRLLFLVPTGVPVRSGDATFPKAMDNVTVRQGESATLRCTIDDRVTRVAWLNRSTILYAGNDKWSIDPRVIILVNTPTQYSIMIQNVDVYDEGPYTCSVQTDNHPKTSRVHLIVQVPPQIMNISSDITVNEGSSVTLLCLAIGRPEPTVTWRHLSVKEGQGFVSEDEYLEISDIKRDQSGEYECSALNDVAAPDVRKVKITVNYPPYISKAKNTGVSVGQKGILSCEASAVPMAEFQWFKEETRLATGLDGMRIENKGRMSTLTFFNVSEKDYGNYTCVATNKLGNTNASITLYEISPSSAVAGPGAVIDGVNSASRALACLWLSGTLLAHFFIKF

SEQ ID NO: 9820 - protein, 345 aa, Homo Sapiens; identical to SEQ ID NO: 9818

SEQ ID NO: 9821 - protein, 338 aa, Homo Sapiens
MYHPAYWVVFSATTALLFIPGVPVRSGDATFPKAMDNVTVRQGESATLRCTIDDRVTRVAWLNRSTILYAGNDKWSIDPRVIILVNTPTQYSIMIQNVDVYDEGPYTCSVQTDNHPKTSRVHLIVQVPPQIMNISSDITVNEGSSVTLLCLAIGRPEPTVTWRHLSVKEGQGFVSEDEYLEISDIKRDQSGEYECSALNDVAAPDVRKVKITVNYPPYISKAKNTGVSVGQKGILSCEASAVPMAEFQWFKEETRLATGLDGMRIENKGRMSTLTFFNVSEKDYGNYTCVATNKLGNTNASITLYGPGAVIDGVNSASRALACLWLSGTLLAHFFIKF

SEQ ID NO: 9822 - protein, 248 aa, Homo Sapiens
MKLTFFLGLLALISCFTPSESQRFSRRPYLPGQLPPPPLYRPRWVPPSPPPPYDSRLNSPLSLPFVPGRVPPSSFSRFSQAVILSQLFPLESIRQPRLFPGYPNLHFPLRPYYVGPIRILKPPFPPIPFFLAIYLPISNPEPQINITTADTTITTNPPTTATATTSTSTKPTMTISSSTVPISSTPEPATSISAATPAASTENTTQILANRPHTVLLNATVQVTTSNQTILSSPAFKSFWQKLFAIFG

SEQ ID NO: 9823 - protein, 174 aa, Homo Sapiens
MRLLAFLSLLALVLQETGTASLPRKERKRREEQMPREGDSFEVLPLRNDVLNPDNYGEVIDLSNYEELTDYGDQLPEVKVTSLAPATSISPAKSTTAPGTPSSNPTMTRPTTAGLLLSSQPNHEDIPPLPRRTAYLYARFNRISRIRAEDFKGLTKLKRIDLSNNLISSIDNDA

SEQ ID NO: 9824 - protein, 332 aa, Homo Sapiens
MRLLAFLSLLALVLQETGTASLPRKERKRREEQMPREGDSFEVLPLRNDVLNPDNYGEVIDLSNYEELTDYGDQLPEVKVTSLAPATSISPAKSTTAPGTPSSNPTMTRPTTAGLLLSSQPNHGLPTCLVCVCLGSSVYCDDIDLEDIPPLPRRTAYLYARFNRISRIRAEDFKGLTKLKRIDLSNNLISSIDNDAFRLLHALQDLILPENQLEALPVLPSGIEFLDVRLNRLQSSGIQPAAFRAMEKLQFLYLSDNLLDSIPGPLPLSLRSVHLQNNLIETMQRDVFCDPEEHKHTRRQLEDIRLDGNPINLSLFPSAYFCLPRLPIGRFT

SEQ ID NO: 9825 - protein, 301 aa, Homo Sapiens
MHPEPAPPPSRSSPELPPSGGSTTSGSRRSRRRSGDGEPPGAPPPPPSAVTYPDWIGQSYSEVMSLNEHSMQALSWRKLYLSRAKLKASSRTSALLSGFAMVAMVEVQLDADHDYPPGLLIAFSACTTVLVAVHLFALMISTCILPNIEAVSNVHNLNSVKESPHERMHRHIELAWAFSTVIGTLLFLAEVVLLCWVKFLPLKKQPGQPRPTSKPPASGAAANVSTSGITPGQAAAIASTTIMVPFGLIFIVFAVHFYRSLVSHKTDRQFQELNELAEFARLQDQLDHRGDHPLTPGSHYA

SEQ ID NO: 9826 - protein, 201 aa, Homo Sapiens
MALSWVLTVLSLLPLLEAQIPLCANLVPVPITNATLDRITGKWFYIASAFRNEEYNKSVQEIQATFFYFTPNKTEDTIFLREYQTRQDQCIYNTTYLNVQRENGTISRYVGGQEHFAHLLILRDTKTYMLAFDVNDEKNWGLSVYADKPETTKEQLGEFYEALDCLRIPKSDVVYTDWKKDKCEPLEKQHEKERKQEEGES

SEQ ID NO: 9827 - protein, 201 aa, Homo Sapiens
MALSWVLTVLSLLPLLEAQIPLCANLVPVPITNATLDRITGKWFYIASAFRNEEYNKSVQEIQATFFYFTPNKTEDTIFLREYQTRQNQCFYNSSYLNVQRENGTVSRYEGGREHVAHLLFLRDTKTLMFGSYLDDEKNWGLSFYADKPETTKEQLGEFYEALDCLCIPRSDVMYTDWKKDKCEPLEKQHEKERKQEEGES

SEQ ID NO: 9828 - protein, 65 aa, Homo Sapiens
MDYGLQFTSSRKFLSISPIVLYLLASFYTKYDAAHFLINTASLLSVLLPKLPQFHGVRVFGINKY

SEQ ID NO: 9829 - protein, 153 aa, Homo Sapiens
MNVGVAHSEVNPNTRVMNSRGIWLAYIILVGLLHMVLLSIPFFSIPVVWTLTNVIHNLATYVFLHTVKGTPFETPDQGKARLLTHWEQMDYGLQFTSSRKFLSISPIVLYLLASFYTKYDAAHFLINTASLLSVLLPKLPQFHGVRVFGINKY

SEQ ID NO: 9830 - protein, 153 aa, Homo Sapiens; identical to SEQ ID NO: 9829

SEQ ID NO: 9831 - protein, 119 aa, Homo Sapiens
MVLLSIPFFSIPVVWTLTNVIHNLATYVFLHTVKGTPFETPDQGKARLLTHWEQMDYGLQFTSSRKFLSISPIVLYLLASFYTKYDAAHFLINTASLLSVLLPKLPQFHGVRVFGINKY

SEQ ID NO: 9832 - protein, 75 aa, Homo Sapiens
MAAETLLSSLLGLLLLGLLLPASLTGGVGSLNLEELSEMRYGIEILPLPVMGGQPFFASLPPDPPFFPRANLRTW

SEQ ID NO: 9833 - protein, 75 aa, Homo Sapiens; identical to SEQ ID NO: 9832

SEQ ID NO: 9834 - protein, 125 aa, Homo Sapiens
MAAETLLSSLLGLLLLGLLLPASLTGGVGSLNLEELSEMRYGIEILPLPVMGGQSQSSDVVIVSSKYKQRYECRLPAGAIHFQREREEETPAYQGPGIPELLSPMRDAPCLLKGGMERPQVENRL

SEQ ID NO: 9835 - protein, 406 aa, Homo Sapiens
MAAETLLSSLLGLLLLGLLLPASLTGGVGSLNLEELSEMRYGIEILPLPVMGGQSQSSDVVIVSSKYKQRYECRLPAGAIHFQREREEETPAYQGPGIPELLSPMRDAPCLLKTKDWWTYEFCYGRHIQQYHMEDSASGAPNDFQNNVQVKVIRSPADLIRFIEELKGGTKKGKPNIGQEQPVDDAAEVPQREPEKERGDPERQREMEEEEDEDEDEDEDEDERQLLGEFEKELEGILLPSDRDRLRSEVKAGMERELENIIQETEKELDPDGLKKESERDRAMLALTSTLNKLIKRLEEKQSPELVKKHKKKRVVPKKPPPSPQPTGKIEIKIVRPWAEGTEEGARWLTDEDTRNLKEIFFNILVPGAEEAQKERQRQKELESNYRRVWGSPGGEGTGDLDEFDF

SEQ ID NO: 9836 - protein, 560 aa, Homo Sapiens
MAAETLLSSLLGLLLLGLLLPASLTGGVGSLNLEELSEMRYGIEILPLPVMGGQSQSSDVVIVSSKYKQRYECRLPAGAIHFQREREEETPAYQGPGIPELLSPMRDAPCLLKTKDWWTYEFCYGRHIQQYHMEDSEIKGEFLCDEGAGISGDYIDRVDEPLSCSYVLTIRTPRLCPHPLLRPPPSAAPQAILCHPSLQPEEYMAYVQRQADSKQYGDKIIEELQDLGPQVWSETKSGVAPQKMAGASPTKDDSKDSDFWKMLNEPEDQAPGGEEVPAEEQDPSPEAADSASGAPNDFQNNVQVKVIRSPADLIRFIEELKGGTKKGKPNIGQEQPVDDAAEVPQREPEKERGDPERQREMEEEEDEDEDEDEDEDERQLLGEFEKELEGILLPSDRDRLRSEVKAGMERELENIIQETEKELDPDGLKKESERDRAMLALTSTLNKLIKRLEEKQSPELVKKHKKKRVVPKKPPPSPQPTGKIEIKIVRPWAEGTEEGARWLTDEDTRNLKEIFFNILVPGAEEAQKERQRQKELESNYRRVWGSPGGEGTGDLDEFDF

SEQ ID NO: 9837 - protein, 613 aa, Homo Sapiens
MAAETLLSSLLGLLLLGLLLPASLTGGVGSLNLEELSEMRYGIEILPLPVMGGQSQSSDVVIVSSKYKQRYECRLPAGAIHFQREREEETPAYQGPGIPELLSPMRDAPCLLKTKDWWTYEFCYGRHIQQYHMEDSEIKGEVLYLGYYQSAFDWDDETAKASKQHRLKRYHSQTYGNGSKCDLNGRPREAEVRFLCDEGAGISGDYIDRVDEPLSCSYVLTIRTPRLCPHPLLRPPPSAAPQAILCHPSLQPEEYMAYVQRQAVDSKQYGDKIIEELQDLGPQVWSETKSGVAPQKMAGASPTKDDSKDSDFWKMLNEPEDQAPGGEEVPAEEQDPSPEAADSASGAPNDFQNNVQVKVIRSPADLIRFIEELKGGTKKGKPNIGQEQPVDDAAEVPQREPEKERGDPERQREMEEEEDEDEDEDEDEDERQLLGEFEKELEGILLPSDRDRLRSEVKAGMERELENIIQETEKELDPDGLKKESERDRAMLALTSTLNKLIKRLEEKQSPELVKKHKKKRVVPKKPPPSPQPTGKIEIKIVRPWAEGTEEGARWLTDEDTRNLKEIFFNILVPGAEEAQKERQRQKELESNYRRVWGSPGGEGTGDLDEFDF

SEQ ID NO: 9838 - protein, 667 aa, Homo Sapiens
MAAETLLSSLLGLLLLGLLLPASLTGGVGSLNLEELSEMRYGIEILPLPVMGGQSQSSDVVIVSSKYKQRYECRLPAGAIHFQREREEETPAYQGPGIPELLSPMRDAPCLLKTKDWWTYEFCYGRHIQQYHMEDSEIKGEVLYLGYYQSAFDWDDETAKASKQHRLKRYHSQTYGNGSKCDLNGRPREAEVRFLCDEGAGISGDYIDRVDEPLSCSYVLTIRTPRLCPHPLLRPPPSAAPQAILCHPSLQPEEYMAYVQRQADSKQYGDKIIEELQDLGPQVWSETKSGVAPQKMAGASPTKDDSKDSDFWKMLNEPEDQAPGGEEVPAEEQDPSPEAADSASGAPNDFQNNVQVKVIRSPADLIRFIEELKGGTKKGKPNIGQEQPVDDAAEVPQREPEKERGDPERQREMEEEEDEDEDEDEDEDERQLLGEFEKELEGILLPSDRDRLRSEVKAGMERELENIIQETEKELDPDGLKKESERDRAMLALTSTLNKLIKRLEEKQSPELVKKHKKKRVVPKKPPPSPQPTEEDPEHRVRVRVTKLRLGGPNQDLTVLEMKRENPQLKQIEGLVKELLEREGLTAAGKIEIKIVRPWAEGTEEGARWLTDEDTRNLKEIFFNILVPGAEEAQKERQRQKELESNYRRVWGSPGGEGTGDLDEFDF

SEQ ID NO: 9839 - protein, 597 aa, Homo Sapiens
MAAETLLSSLLGLLLLGLLLPASLTGGVGSLNLEELSEMRYGIEILPLPVMGGQSQSSDVVIVSSKYKQRYECRLPAGAIHFQREREEETPAYQGPGIPELLSPMRDAPCLLKTKDWWTYEFCYGRHIQQYHMEDSEIKGEVLYLGYYQSAFDWDDETAKASKQHRLKRYHSQTYGNGSKCDLNGRPREAEVRFLCDEGAGISGDYIDRVDEPLSCSYVLTIRTPRLCPHPLLRPPPSAAPQAILCHPSLQPEEYMAYVQRQADSKQYGDKIIEELQDLGPQVWSETKSGVAPQKMAGASPTKDDSKDSDFWKMLNEPEDQAPGGEEVPAEEQDPSPEAADSASGAPNDFQNNVQVKVIRSPADLIRFIEELKGGTKKGKPNIGQEQPVDDAAEVPQREPEKERGDPERQREMEEEEDEDEDEDEDEDERQLLGEFEKELEGILLPSDRDRLRSETEKELDPDGLKKESERDRAMLALTSTLNKLIKRLEEKQSPELVKKHKKKRVVPKKPPPSPQPTGKIEIKIVRPWAEGTEEGARWLTDEDTRNLKEIFFNILVPGAEEAQKERQRQKELESNYRRVWGSPGGEGTGDLDEFDF

SEQ ID NO: 9840 - protein, 652 aa, Homo Sapiens
MAAETLLSSLLGLLLLGLLLPASLTGGVGSLNLEELSEMRYGIEILPLPVMGGQSQSSDVVIVSSKYKQRYECRLPAGAIHFQREREEETPAYQGPGIPELLSPMRDAPCLLKTKDWWTYEFCYGRHIQQYHMEDSEIKGEVLYLGYYQSAFDWDDETAKASKQHRLKRYHSQTYGNGSKCDLNGRPREAEVRFLCDEGAGISGDYIDRVDEPLSCSYVLTIRTPRLCPHPLLRPPPSAAPQAILCHPSLQPEEYMAYVQRQADSKQYGDKIIEELQDLGPQVWSETKSGVAPQKMAGASPTKDDSKDSDFWKMLNEPEDQAPGGEEVPAEEQDPSPEAADSASGAPNDFQNNVQVKVIRSPADLIRFIEELKGGTKKGKPNIGQEQPVDDAAEVPQREPEKERGDPERQREMEEEEDEDEDEDEDEDERQLLGEFEKELEGILLPSDRDRLRSETEKELDPDGLKKESERDRAMLALTSTLNKLIKRLEEKQSPELVKKHKKKRVVPKKPPPSPQPTEEDPEHRVRVRVTKLRLGGPNQDLTVLEMKRENPQLKQIEGLVKELLEREGLTAAGKIEIKIVRPWAEGTEEGARWLTDEDTRNLKEIFFNILVPGAEEAQKERQRQKELESNYRRVWGSPGGEGTGDLDEFDF

SEQ ID NO: 9841 - protein, 612 aa, Homo Sapiens
MAAETLLSSLLGLLLLGLLLPASLTGGVGSLNLEELSEMRYGIEILPLPVMGGQSQSSDVVIVSSKYKQRYECRLPAGAIHFQREREEETPAYQGPGIPELLSPMRDAPCLLKTKDWWTYEFCYGRHIQQYHMEDSEIKGEVLYLGYYQSAFDWDDETAKASKQHRLKRYHSQTYGNGSKCDLNGRPREAEVRFLCDEGAGISGDYIDRVDEPLSCSYVLTIRTPRLCPHPLLRPPPSAAPQAILCHPSLQPEEYMAYVQRQADSKQYGDKIIEELQDLGPQVWSETKSGVAPQKMAGASPTKDDSKDSDFWKMLNEPEDQAPGGEEVPAEEQDPSPEAADSASGAPNDFQNNVQVKVIRSPADLIRFIEELKGGTKKGKPNIGQEQPVDDAAEVPQREPEKERGDPERQREMEEEEDEDEDEDEDEDERQLLGEFEKELEGILLPSDRDRLRSEVKAGMERELENIIQETEKELDPDGLKKESERDRAMLALTSTLNKLIKRLEEKQSPELVKKHKKKRVVPKKPPPSPQPTGKIEIKIVRPWAEGTEEGARWLTDEDTRNLKEIFFNILVPGAEEAQKERQRQKELESNYRRVWGSPGGEGTGDLDEFDF

SEQ ID NO: 9842 - protein, 580 aa, Homo Sapiens
MAAETLLSSLLGLLLLGLLLPASLTGGVGSLNLEELSEMRYGIEILPLPVMGGQSQSSDVVIVSSKYKQRYECRLPAGAIHFQREREEETPAYQGPGIPELLSPMRDAPCLLKTKDWWTYEFCYGRHIQQYHMEDSEIKGEVLYLGYYQSAFDWDDETAKFLCDEGAGISGDYIDRVDEPLSCSYVLTIRTPRLCPHPLLRPPPSAAPQAILCHPSLQPEEYMAYVQRQAVDSKQYGDKIIEELQDLGPQVWSETKSGVAPQKMAGASPTKDDSKDSDFWKMLNEPEDQAPGGEEVPAEEQDPSPEAADSASGAPNDFQNNVQVKVIRSPADLIRFIEELKGGTKKGKPNIGQEQPVDDAAEVPQREPEKERGDPERQREMEEEEDEDEDEDEDEDERQLLGEFEKELEGILLPSDRDRLRSEVKAGMERELENIIQETEKELDPDGLKKESERDRAMLALTSTLNKLIKRLEEKQSPELVKKHKKKRVVPKKPPPSPQPTGKIEIKIVRPWAEGTEEGARWLTDEDTRNLKEIFFNILVPGAEEAQKERQRQKELESNYRRVWGSPGGEGTGDLDEFDF

SEQ ID NO: 9843 - protein, 146 aa, Homo Sapiens
MAAETLLSSLLGLLLLGLLLPASLTGGVGSLNLEELSEMRYGIEILPLPVMGGQSQSSDVVIVSSKYKQRYECRLPAGAIHFQREREEETPAYQGPGIPELLSPMRDAPCLLKTKDWWTYEFCYGRHIQQYHMEDSEIKGLQAASS

SEQ ID NO: 9844 - protein, 186 aa, Homo Sapiens
MAAETLLSSLLGLLLLGLLLPASLTGGVGSLNLEELSEMRYGIEILPLPVMGGQSQSSDVVIVSSKYKQRYECRLPAGAIHFQREREEETPAYQGPGIPELLSPMRDAPCLLKTKDWWTYEFCYGRHIQQYHMEGILLPSDRDRLRSEVKAGMERELENIIQETEKELDPDGLKKESERDRAMLAL

SEQ ID NO: 9845 - protein, 162 aa, Homo Sapiens
MAAETLLSSLLGLLLLGLLLPASLTGGVGSLNLEELSEMRYGIEILPLPVMGGQSQSSDVVIVSSKYKQRYECRLPAGAIHFQREREEETPAYQGPGIPELLSPMRDAPCLLKTYGNGSKCDLNGRPREAEVRFLCDEGAGISGDYIDRVDEPLSCSYVLTI

SEQ ID NO: 9846 - protein, 538 aa, Homo Sapiens
MAAETLLSSLLGLLLLGLLLPASLTGGVGSLNLEELSEMRYGIEILPLPVMGGQTKDWWTYEFCYGRHIQQYHMEDSEIKGEVLYLGYYQSAFDWDDETAKASKQHRLKRYHSQTYGNGSKCDLNGRPREAEVRFLCDEGAGISGDYIDRVDEPLSCSYVLTIRTPRLCPHPLLRPPPSAAPQAILCHPSLQPEEYMAYVQRQADSKQYGDKIIEELQDLGPQVWSETKSGVAPQKMAGASPTKDDSKDSDFWKMLNEPEDQAPGGEEVPAEEQDPSPEAADSASGAPNDFQNNVQVKVIRSPADLIRFIEELKGGTKKGKPNIGQEQPVDDAAEVPQREPEKERGDPERQREMEEEEDEDEDEDEDEDERQLLGEFEKELEGILLPSDRDRLRSETEKELDPDGLKKESERDRAMLALTSTLNKLIKRLEEKQSPELVKKHKKKRVVPKKPPPSPQPTGKIEIKIVRPWAEGTEEGARWLTDEDTRNLKEIFFNILVPGAEEAQKERQRQKELESNYRRVWGSPGGEGTGDLDEFDF

SEQ ID NO: 9847 - protein, 252 aa, Homo Sapiens
MALVLILQLLTLFPPASYHPKPWLGAQPATVVTPGVNVTLRCRAPQPAWRFGLFKPGEIAPLLFRDVSSELAEFFLEEVTPAQGGSYRCCYRRPDWGPGVWSQPSDVLELLVTEELPRPSLVALPGPVVGPGANVSLRCAGRLRNMSFVLYREGVAAPLQYRHSAQPWADFTLLGARAPGTYSCYYHTPSAPYVLSQRSEVLVISWEDSGSSDYTRGNLVRLGLAGLVLISLGALVTFDWRSQNRAPAGIRP

SEQ ID NO: 9848 - protein, 271 aa, Homo Sapiens
MALVLILQLLTLFPPASYHPKPWLGAQPATVVTPGVNVTLRCRAPQPAWRFGLFKPGEIAPLLFRDVSSELAEFFLEEVTPAQGGSYRCCYRRPDWGPGVWSQPSDVLELLVTEELPRPSLVALPGPVVGPGANVSLRCAGRLRNMSFVLYREGVAAPLQYRHSAQPWADFTLLGARAPGTYSCYYHTPSAPYVLSQRSEVLVISWEGEGPEARPASSAPGMQAPGPPPSDPGAQAPSLSSFRPRGLVLQPLLPQTQDSWDPAPPPSDPGV

SEQ ID NO: 9849 - protein, 271 aa, Homo Sapiens; identical to SEQ ID NO: 9848

SEQ ID NO: 9850 - protein, 268 aa, Homo Sapiens [sequence omitted]

SEQ ID NO: 9851 - protein, 161 aa, Homo Sapiens
MALVLILQLLTLWPLCHTDITPSAGRILSGGGDSSPRGKLPLLLPKARLGAGCLVPAQRCPGAAGDRGAAAAVAGGAARAGGGSWRQREPALRGPPAEHELRAVPRGRGGPAAVPPLRAALGRLHAAGRPRPRHLQLLLSHALRALRAVAAQRGAGHQLGR

SEQ ID NO: 9852 - protein, 267 aa, Homo Sapiens
MALVLILQLLTLWPLCHTDITPSVAIIVPPASYHPKPWLGAQPATVVTPGVNVTLRCRAPQPAWRFGLFKPGEIAPLLFRDVSSELAEFFLEEVTPAQGGSYRCCYRRPDWGPGVWSQPSDVLELLVTEELPRPSLVALPGPVVGPGANVSLRCAGRLRNMSFVLYREGVAAPLQYRHSAQPWADFTLLGARAPGTYSCYYHTPSAPYVLSQRSEVLVISWEDSGSSDYTRGNLVRLGLAGLVLISLGALVTFDWRSQNRAPAGIRP

SEQ ID NO: 9853 - protein, 267 aa, Homo Sapiens; identical to SEQ ID NO: 9852

SEQ ID NO: 9854 - protein, 286 aa, Homo Sapiens
MALVLILQLLTLWPLCHTDITPSVAIIVPPASYHPKPWLGAQPATVVTPGVNVTLRCRAPQPAWRFGLFKPGEIAPLLFRDVSSELAEFFLEEVTPAQGGSYRCCYRRPDWGPGVWSQPSDVLELLVTEELPRPSLVALPGPVVGPGANVSLRCAGRLRNMSFVLYREGVAAPLQYRHSAQPWADFTLLGARAPGTYSCYYHTPSAPYVLSQRSEVLVISWEGEGPEARPASSAPGMQAPGPPPSDPGAQAPSLSSFRPRGLVLQPLLPQTQDSWDPAPPPSDPGV

SEQ ID NO: 9855 - protein, 286 aa, Homo Sapiens; identical to SEQ ID NO: 9854

SEQ ID NO: 9856 - protein, 263 aa, Homo Sapiens
MALVLILQLLTLWPLCHTDITPSVPPASYHPKPWLGAQPATVVTPGVNVTLRCRAPQPAWRFGLFKPGEIAPLLFRDVSSELAEFFLEEVTPAQGGSYRCCYRRPDWGPGVWSQPSDVLELLVTEELPRPSLVALPGPVVGPGANVSLRCAGRLRNMSFVLYREGVAAPLQYRHSAQPWADFTLLGARAPGTYSCYYHTPSAPYVLSQRSEVLVISWEDSGSSDYTRGNLVRLGLAGLVLISLGALVTFDWRSQNRAPAGIRP

SEQ ID NO: 9857 - protein, 282 aa, Homo Sapiens
MALVLILQLLTLWPLCHTDITPSVPPASYHPKPWLGAQPATVVTPGVNVTLRCRAPQPAWRFGLFKPGEIAPLLFRDVSSELAEFFLEEVTPAQGGSYRCCYRRPDWGPGVWSQPSDVLELLVTEELPRPSLVALPGPVVGPGANVSLRCAGRLRNMSFVLYREGVAAPLQYRHSAQPWADFTLLGARAPGTYSCYYHTPSAPYVLSQRSEVLVISWEGEGPEARPASSAPGMQAPGPPPSDPGAQAPSLSSFRPRGLVLQPLLPQTQDSWDPAPPPSDPGV

SEQ ID NO: 9858 - protein, 231 aa, Homo Sapiens
MASMAAIGSCSKEYRVLLGQLQKQTDLMQDTSRLLDPYIRIQGLDVPKLREHCRERPGAFPSEETLRGLGRRGFLQTLNATLGCVLHRLADLEQRLPKAQDLERSGLNIEDLEKLQMARPNILGLRNNIYCMAQLLDNSDTAEPTKAGRGASQPPTPTPASDAFQRKLEGCRFLHGYHRFMHSVGRVFSKWGESPNRSRRHSPHQALRKGVRRTRPSRKGKRLMTRGQLPR

SEQ ID NO: 9859 - protein, 20 aa, Homo Sapiens
MGVLLTQRTLLNTYPRPGCS

SEQ ID NO: 9860 - protein, 252 aa, Homo Sapiens
MGVLLTQRTLLSLVLALLFPSMASMAAIGSCSKEYRVLLGQLQKQTDLMQDTSRLLDPYIRIQGLDVPKLREHCRERPGAFPSEETLRGLGRRGFLQTLNATLGCVLHRLADLEQRLPKAQDLERSGLNIEDLEKLQMARPNILGLRNNIYCMAQLLDNSDTAEPTKAGRGASQPPTPTPASDAFQRKLEGCRFLHGYHRFMHSVGRVFSKWGESPNRSRRHSPHQALRKGVRRTRPSRKGKRLMTRGQLPR

SEQ ID NO: 9861 - protein, 188 aa, Homo Sapiens
LEPATEYMARVRCADASHFWKWSEWSGQNFTTLEAAPSEAPDVWRIVSLEPGNHTVTLFWKPLSKLHANGKILFYNVVVENLDKPSSSELHSIPAPANSTKLILDRCSYQICVIANNSVGASPASVIVISADPENSVSTCFSGTVPSVWGEGDFSHGSGHFCPGDSSTYMGNYLKFIQVTATLTNSHH

SEQ ID NO: 9862 - protein, 979 aa, Homo Sapiens
MALFAVFQTTFFLTLLSLRTYQSEVLAERLPLTPVSLKVSTNSTRQSLHLQWTVHNLPYHQELKMVFQIQISRIETSNVIWVGNYSTTVKWNQVLHWSWESELPLECATHFVRIKSLVDDAKFPEPNFWSNWSSWEEVSVQDSTGQDILFVFPKDKLVEEGTNVTICYVSRNIQNNVSCYLEGKQIHGEQLDPHVTAFNLNSVPFIRNKGTNIYCEASQGNVSEGMKGIVLFVSKVLEEPKDFSCETEDFKTLHCTWDPGTDTALGWSKQPSQSYTLFESFSGEKKLCTHKNWCNWQITQDSQETYNFTLIAENYLRKRSVNILFNLTHRVYLMNPFSVNFENVNATNAIMTWKVHSIRNNFTYLCQIELHGEGKMMQYNVSIKVNGEYFLSELEPATEYMARVRCADASHFWKWSEWSGQNFTTLEAAPSEAPDVWRIVSLEPGNHTVTLFWKPLSKLHANGKILFYNVVVENLDKPSSSELHSIPAPANSTKLILDRCSYQICVIANNSVGASPASVIVISADPENKEVEEERIAGTEGGFSLSWKPQPGDVIGYVVDWCDHTQDVLGDFQWKNVGPNTTSTVISTDAFRPGVRYDFRIYGLSTKRIACLLEKKTGYSQELAPSDNPHVLVDTLTSHSFTLSWKDYSTESQPGFIQGYHVYLKSKARQCHPRFEKAVLSDGSECCKYKIDNPEEKALIVDNLKPESFYEFFITPFTSAGEGPSATFTKVTTPDEHSSMLIHILLPMVFCVLLIMVMCYLKSQWIKETCYPDIPDPYKSSILSLIKFKENPHLIIMNVSDCIPDAIEVVSKPEGTKIQFLGTRKSLTETELTKPNYLYLLPTEKNHSGPGPCICFENLTYNQAASDSGSCGHVPVSPKAPSMLGLMTSPENVLKALEKNYMNSLGEIPAGETSLNYVSQLASPMFGDKDSLPTNPVEAPHCSEYKMQMAVSLRLALPPPTENSSLSSITLLDPGEHYC

SEQ ID NO: 9863 - protein, 342 aa, Homo Sapiens
MALFAVFQTTFFLTLLSLRTYQSEVLAERLPLTPVSLKVSTNSTRQSLHLQWTVHNLPYHQELKMVFQIQISRIETSNVIWVGNYSTTVKWNQVLHWSWESELPLECATHFVRIKSLVDDAKFPEPNFWSNWSSWEEVSVQDSTGQDILFVFPKDKLVEEGTNVTICYVSRNIQNNVSCYLEGKQIHGEQLDPHVTAFNLNSVPFIRNKGTNIYCEASQGNVSEGMKGIVLFVSKVLEEPKDFSCETEDFKTLHCTWDPGTDTALGWSKQPSQSYTLFESFSGEKKLCTHKNWCNWQITQDSQETYNFTLIAENYLRKRSVNILFNLTHRGETRVVTAHRGH

SEQ ID NO: 9864 - protein, 35 aa, Homo Sapiens
  misc_feature (1)..(1): Xaa can be any naturally occurring amino acid
XIKETCYPDIPDPYKSSILSLIKFKISSKVWLNRR

SEQ ID NO: 9865 - protein, 62 aa, Homo Sapiens
  misc_feature (1)..(1): Xaa can be any naturally occurring amino acid
XSMLIHILLPMVFCVLLIMVMCYLKSQWIKETCYPDIPDPYKSSILSLIKFKISSKVWLNRR

SEQ ID NO: 9866 - protein, 111 aa, Homo Sapiens
MLDWRLASAHFILAVTLTLWSSGKVLSVDVTTTEAFDSGVIDVQSTPTVREEKSATDLTAKLLLLDELVSLENDVIETKKKRSFSGFGSPLDRLSAGSVDHKGKQRCNFLG

SEQ ID NO: 9867 - protein, 133 aa, Homo Sapiens
MLDWRLASAHFILAVTLTLWSSGKVLSVDVTTTEAFDSGVIDVQSTPTVREEKSATDLTAKLLLLDELVSLENDVIETKKKRSFSGFGSPLDRLSAGSVDHKGKQRKVVDHPKRRFGIPMDRIGRNRLSNSRG

SEQ ID NO: 9868 - protein, 815 aa, Homo Sapiens
MFRLGLLVCFYNDLELLDATVAQVLLYQMIKCSHLRGFQAGVQKLKAELLDIAMENQTLNETLGSLSDAVVGLTYSQLESLSPEAVHGAISTLNQVSGWAKSQVIILSAKYLAHEKVLSFYNVSQMGALLAGVSTQAFCSMKRKDISQVLRSAVSQYVSDLSPAQQQGILSKMVQAEDTAPGIVEIQGAFFKEVSLFDLRRQPGFNSTVLKDKELGRSQALFLYELLLKTTRRPEELLSAGQLVKGVTCSHIDAMSTDFFLAHFQDFQNNFALLSPYQVNCLAWKYWEVSRLSMPPFLLAALPARYLASVPASQCVPFLISLGKSWLDSLVLDSHKKTSVLRKVQQCLDDSIADEYTVDIMGNLLCHLPAAIIDRGISPRAWATALHGLRDCPDLNPEQKAAVRLKLLGQYGLPQHWTAETTKDLGPFLVLFSGDELSSIATKFPEILLQAASKMARTLPTKEFLWAVFQSVRNSSDKIPSYDPMPGCHGVVAPSSDDIFKLAEANACWALEDLRCMEEDTFIRTVELLGAVQGFSRPQLMTLKEKAIQVWDMPSYWREHHIVSLGRIALALNESELEQLDLSSIDTVASLSWQTEWTPGQAESILQGYLDDSGYSIQDLKSFHLVGLGATLCAINITEIPLIKISEFRVVVARIGTLLCSTHVLAEFKRKAEVVFGDPTEWTSSVLQELGTIAAGLTKAELRMLDKDLMPYFQPSAIKCLPDEIFKELSAEQIASLGPENAAAVTHAQRRRLSPLQLQSLQQALDGAKTHSWQDAPASAGPTRTSSSRSPAGALQSWGLWLGCPLLVLMAKLLW

SEQ ID NO: 9869 - protein, 1060 aa, Homo Sapiens
MGNSITYRDQAAVENHLEQRLHQPQKLLEDLRKTDAQQFRTAMKCLLEDKKDGLDLKDIIIDLGEIRERALQSPGVNRSLFLITLERCFQMLNSLECVEILGKVLRGSSGSFLQPDITERLPRDLREDAFKNLSAVFKDLYDKTSAHSQRALYSWMTGILQTSSNATDDSASWVSAEHLWVLGRYMVHLSFEEITKISPIEIGLFISYDNATKQLDMVYDITPELAQAFLERISSSNFNMRNTSTIHRLGLLVCFYNDLELLDATVAQVLLYQMIKCSHLRGFQAGVQKLKAELLDIAMENQTLNETLGSLSDAVVGLTYSQLESLSPEAVHGAISTLNQVSGWAKSQVIILSAKYLAHEKVLSFYNVSQMGALLAGVSTQAFCSMKRKDISQVLRSAVSQYVSDLSPAQQQGILSKMVQAEDTAPGIVEIQGAFFKEVSLFDLRRQPGFNSTVLKDKELGRSQALFLYELLLKTTRRPEELLSAGQLVKGVTCSHIDAMSTDFFLAHFQDFQNNFALLSPYQVNCLAWKYWEVSRLSMPPFLLAALPARYLASVPASQCVPFLISLGKSWLDSLVLDSHKKTSVLRKVQQCLDDSIADEYTVDIMGNLLCHLPAAIIDRGISPRAWATALHGLRDCPDLNPEQKAAVRLKLLGQYGLPQHWTAETTKDLGPFLVLFSGDELSSIATKFPEILLQAASKMARTLPTKEFLWAVFQSVRNSSDKIPSYDPMPGCHGVVAPSSDDIFKLAEANACWALEDLRCMEEDTFIRTVELLGAVQGFSRPQLMTLKEKAIQVWDMPSYWREHHIVSLGRIALALNESELEQLDLSSIDTVASLSWQTEWTPGQAESILQGYLDDSGYSIQDLKSFHLVGLGATLCAINITEIPLIKISEFRVVVARIGTLLCSTHVLAEFKRKAEVVFGDPTEWTSSVLQELGTIAAGLTKAELRMLDKDLMPYFQPSAIKCLPDEIFKELSAEQIASLGPENAAAVTHAQRRRLSPLQLQSLQQALDGAKTHSWQDAPASAGPTRTSSSRSPAGALQSWGLWLGCPLLVLMAKLLW

SEQ ID NO: 9870 - protein, 1153 aa, Homo Sapiens
MSQEPTTYSLFLFLFLSHGVSSYTVPNSRQDLHPLLQNMAEEIIDGSYLNALLDLIQFQSSHVWTDDLSHRVLAYLNSRNVAFTIPSLQAAVENHLEQRLHQPQKLLEDLRKTDAQQFRTAMKCLLEDKKDGLDLKDIIIDLGEIRERALQSPGVNRSLFLITLERCFQMLNSLECVEILGKVLRGSSGSFLQPDITERLPRDLREDAFKNLSAVFKDLYDKTSAHSQRALYSWMTGILQTSSNATDDSASWVSAEHLWVLGRYMVHLSFEEITKISPIEIGLFISYDNATKQLDMVYDITPELAQAFLERISSSNFNMRNTSTIHRQAHELWALEPFPKMLGLLVCFYNDLELLDATVAQVLLYQMIKCSHLRGFQAGVQKLKAELLDIAMENQTLNETLGSLSDAVVGLTYSQLESLSPEAVHGAISTLNQVSGWAKSQVIILSAKYLAHEKVLSFYNVSQMGALLAGVSTQAFCSMKRKDISQVLRSAVSQYVSDLSPAQQQGILSKMVQAEDTAPGIVEIQGAFFKEVSLFDLRRQPGFNSTVLKDKELGRSQALFLYELLLKTTRRPEELLSAGQLVKGVTCSHIDAMSTDFFLAHFQDFQNNFALLSPYQVNCLAWKYWEVSRLSMPPFLLAALPARYLASVPASQCVPFLISLGKSWLDSLVLDSHKKTSVLRKVQQCLDDSIADEYTVDIMGNLLCHLPAAIIDRGISPRAWATALHGLRDCPDLNPEQKAAVRLKLLGQYGLPQHWTAETTKDLGPFLVLFSGDELSSIATKFPEILLQAASKMARTLPTKEFLWAVFQSVRNSSDKIPSYDPMPGCHGVVAPSSDDIFKLAEANACWALEDLRCMEEDTFIRTVELLGAVQGFSRPQLMTLKEKAIQVWDMPSYWREHHIVSLGRIALALNESELEQLDLSSIDTVASLSWQTEWTPGQAESILQGYLDDSGYSIQDLKSFHLVGLGATLCAINITEIPLIKISEFRVVVARIGTLLCSTHVLAEFKRKAEVVFGDPTEWTSSVLQELGTIAAGLTKAELRMLDKDLMPYFQPSAIKCLPDEIFKELSAEQIASLGPENAAAVTHAQRRRLSPLQLQSLQQALDGAKTHSWQDAPASAGPTRTSSSRSPAGALQSWGLWLGCPLLVLMAKLLW

SEQ ID NO: 9871 - protein, 1139 aa, Homo Sapiens
MSQEPTTYSLFLFLFLSHGVSSYTVPNSRQDLHPLLQNMAEEIIDGSYLNALLDLIQFQSSHVWTDDLSHRVLAYLNSRNVAFTIPSLQAAVENHLEQRLHQPQKLLEDLRKTDAQQFRTAMKCLLEDKKDGLDLKDIIIDLGEIRERALQSPGVNRSLFLITLERCFQMLNSLECVEILGKVLRGSSGSFLQPDITERLPRDLREDAFKNLSAVFKDLYDKTSAHSQRALYSWMTGILQTSSNATDDSASWVSAEHLWVLGRYMVHLSFEEITKISPIEIGLFISYDNATKQLDMVYDITPELAQAFLERISSSNFNMRNTSTIHRLGLLVCFYNDLELLDATVAQVLLYQMIKCSHLRGFQAGVQKLKAELLDIAMENQTLNETLGSLSDAVVGLTYSQLESLSPEAVHGAISTLNQVSGWAKSQVIILSAKYLAHEKVLSFYNVSQMGALLAGVSTQAFCSMKRKDISQVLRSAVSQYVSDLSPAQQQGILSKMVQAEDTAPGIVEIQGAFFKEVSLFDLRRQPGFNSTVLKDKELGRSQALFLYELLLKTTRRPEELLSAGQLVKGVTCSHIDAMSTDFFLAHFQDFQNNFALLSPYQVNCLAWKYWEVSRLSMPPFLLAALPARYLASVPASQCVPFLISLGKSWLDSLVLDSHKKTSVLRKVQQCLDDSIADEYTVDIMGNLLCHLPAAIIDRGISPRAWATALHGLRDCPDLNPEQKAAVRLKLLGQYGLPQHWTAETTKDLGPFLVLFSGDELSSIATKFPEILLQAASKMARTLPTKEFLWAVFQSVRNSSDKIPSYDPMPGCHGVVAPSSDDIFKLAEANACWALEDLRCMEEDTFIRTVELLGAVQGFSRPQLMTLKEKAIQVWDMPSYWREHHIVSLGRIALALNESELEQLDLSSIDTVASLSWQTEWTPGQAESILQGYLDDSGYSIQDLKSFHLVGLGATLCAINITEIPLIKISEFRVVVARIGTLLCSTHVLAEFKRKAEVVFGDPTEWTSSVLQELGTIAAGLTKAELRMLDKDLMPYFQPSAIKCLPDEIFKELSAEQIASLGPENAAAVTHAQRRRLSPLQLQSLQQALDGAKTHSWQDAPASAGPTRTSSSRSPAGALQSWGLWLGCPLLVLMAKLLW

SEQ ID NO: 9872 - protein, 1139 aa, Homo Sapiens; identical to SEQ ID NO: 9871

SEQ ID NO: 9873 - protein, 353 aa, Homo Sapiens
MSQEPTTYSLFLFLFLSHGVSSYTVPNSRQDLHPLLQNMAEEIIDGSYLNALLDLIQFQSSHVWTDDLSHRVLAYLNSRNVAFTIPSLQAAVENHLEQRLHQPQKLLEDLRKTDAQQFRTAMKCLLEDKKDGLDLKDIIIDLGEIRERALQSPGVNRSLFLITLERCFQMLNSLECVEILGKVLRGSSGSFLQPDITERLPRDLREDAFKNLSAVFKDLYDKTSAHSQRALYSWMTGILQTSSNATDDSASWVSAEHLWVLGRYMVHLSFEEITKISPIEIGLFISYDNATKQLDMVYDITPELAQAFLERISSSNFNMRNTSTIHSSKQNSWTLPWRTRPSMRPWVLCRMQL

SEQ ID NO: 9874 - protein, 94 aa, Homo Sapiens
AMGDKATVVGGQAEAPDSVAMSSWERRLHRAKCAPSYLFSCFNGGECVHPAFCDCRRFNATGPRCQMVYNAGPERDSICRAWGQHHVETFDGLY

SEQ ID NO: 9875 - protein, 2913 aa, Homo Sapiens
MGVLASALCWLLCVWLPWGEQAAESLRVQRLAAAPVLWGSAEPQPEPAGQPSSSHQEATLAMGDKATVVGGQQAEAPDSVAMSSWERRLHRAKCAPSYLFSCFNGGECVHPAFCDCRRFNATGPRCQMVYNAGPERDSICRAWGQHHVETFDGLYYYLSGKGSYTLVGRHEPEGQSFSIQVHNDPQCGSSPYTCSRAVSLFFVGEQEIHLAKEVTHGGMRVQLPHVMGSARLQQLAGYVIVRHQSAFTLAWDGASAVYIKMSPELLGWTHGLCGNNNADPKDDLVTSSGKLTDDVVEFVHSWQEQAPNQPPGPTTSSLPRPPCLQQNPGTMQGVYEQCEALLRPPFDACHAYVSPLPFTASCTSDLCQSMGDVATWCRALAEYARACAQAGRPLQGWRTQLRQCTVHCKEKAFTYNECIACCPASCHPRASCVDSEIACVDGCYCPNGLIFEDGGCVAPAECPCEFHGTLYPPGSVVKEDCNTCTCTSGKWECSTAVCPAECSVTGDIHFTTFDGRRYTFPATCQYILAKSRSSGTFTVTLQNAPCGLNQDGACVQSVSVILHQDPRRQVTLTQAGDVLLFDQYKIIPPYTDDAFEIRRLSSVFLRVRTNVGVRVLYDREGLRLYLQVDQRWVEDTVGLCGTFNGNTQDDFLSPVGVPESTPQLFGNSWKTLSACSPLVSGSPLDPCDVHLQAASYSVQACSVLTGEMFAPCSAFLSPVPYFEQCRRDACRCGQPCLCATLAHYAHLCRRHGLPVDFRARLPACALSCEASKEYSPCVAPCGRTCQDLASPEACGVDGGDDLSRDECVEGCACPPDTYLDTQADLCVPRNQCSCHFQGVDYPPGDSDIPSLGHCHCKDGVMSCDSRAPAAACPAGQVFVNCSDLHTDLELSRERTCEQQLLNLSVSARGPCLSGCACPQGLLRHGDACFLPEECPCTWKGKEYFPGDQVMSPCHTCVCQRGSFQCTLHPCASTCTAYGDRHYRTFDGLPFDFVGACKVHLVKSTSDVSFSVIVENVNCYSSGMICRKFISINVGNSLIVFDDDSGNPSPESFLDDKQEVHTWRVGFFTLVHFPQEHITLLWDQRTTVHVQAGPQWQGQLAGLCGNFDLKTINEMRTPENLELTNPQEFGSSWAAVECPDTLDPRDMCVLNPLREPFAKKECSILLSEVFEICHPVVDVTWFYSNCLTDTCGCSQGGDCECFCASVSAYAHQCCQHGVAVDWRTPRLCPYDCDFFNKVLGKGPYQLSSLAAGGALVGMKAVGDDIVLVRTEDVAPADIVSFLLTAALYKAKAHDPDVVSLEAADRPNFFLHVTANGSLELAKWQGRDTFQQHASFLLHRGTRQAGLVALESLAKPSSFLYVSGAVLALRLYEHTEVFRRGTLFRLLDAKPSGAAYPICEWRYDACASPCFQTCRDPRAASCRDVPRVEGCVPVCPTPQVLDEVTQRCVYLEDCVEPAVWVPTEALGNETLPPSQGLPTPSDEEPQLSQESPRTPTHRPALTPAAPLTTALNPPVTATEEPVVSPGPTQTTLQQPLELTASQLPAGPTESPASKGVTASLLAIPHTPESSSLPVALQTPTPGMVSGAMETTRVTVIFAGSPNITVSSRSPPAPRFPLMTKAVTVRGHGSLPVRTTPPQPSLTASPSSRPVASPGAISRSPTSSGSHKAVLTPAVTKVISRTGVPQPTQAQSASSPSTPLTVAGTAAEQVPVSPLATRSLEIVLSTEKGEAGHSQPMGSPASPQPHPLPSAPPRPAQHTTMATRSPALPPETPAAASLSTATDGLAATPFMSLESTRPSQLLSGLPPDTSLPLAKVGTSAPVATPGPKASVITTPLQPQATTLPAQTLSPVLPFTPAAMTQAHPPTHIAPPAAGTAPGLLLGATLPTSGVLPVAEGTASMVSVVPRKSTTGKVAILSKQVSLPTSMYGSAEGGPTELTPATSHPLTPLVAEPEGAQAGTALPVPTSYALSRVSARTAPQDSMLVLLPQLAEAHGTSAGPHLAAEPVDEATTEPSGRSAPALSIVEGLAEALATTTEANTSTTCVPIAEQDCVRHICLEGQLIRVNQSQHCPQGAAPPRCGILGLAVRVGGDRCCPLWECACRCSIFPDLSFVTFDGSHVALFKEAIYILSQSPDEMLTVHVLDCKSANLGHLNWPPFCLVMLNMTHLAHQVTIDRFNRKVTVDLQPVWPPVSRYGFRIEDTGHMYMILTPSDIQIQWLHSSGLMIVEASKTSKAQGHGLCGICDGDAANDLTLKDGSVVGGAEDPAPFLDSWQVPSSLTSVGQTRFRPDSCATTDCSPCLRMVSNRTFSACHRFVPPESFCELWIRDTKYVQQPCVALTVYVAMCHKFHVCIEWRRSDYCPFLCSSDSTYQACVTACEPPKTCQDGILGPLDPEHCQVLGEGCVCSEGTILHRRHSALCIPEAKCACTDSMGVPRALGETWNSSLSGCCQHQCQAPDTIVPVDLGCPSPRPESCLRFGEVALLLPTKDPCCLGTVCVCNQTLCEGLAPTCRPGHRLLTHFQEDSCCPSYSCECDPDLCEAELVPSCRQDQILITGRLGDSCCTSYFCACGDCPDSIPECQEGEALTVHRNTTELCCPLYQCVCENFRCPQVQCGLGTALVEVWSPDRCCPYKSCECDCDTIPVPRCHLWEKSQLDEEFMHSVENVCGCAKYECVKAPVCLSRELGVMQPGQTVVELSADGVCHTSRCTTVLDPLTNFYQINTTSVLCDIHCEANQEYEHPRDLAACCGSCRNVSCLFTFPNGTTSLFLPGASWIADCARHHCSSTPLGAVLVRSPISCPPLNETECAKVGGSVVPSLEGCCRTCKEDGRSCKKVTIRMTIRKNECRSSTPVNLVSCDGRCPSASIYNYNINTYARFCKCCREVGLQRRSVQLFCATNATWVPYTVQEPTDCACQWS

SEQ ID NO: 9876 - protein, 2925 aa, Homo Sapiens
MGVLASALCWLLCVWLPWGEQAAESLRVQRLGERVVDSGRSGARGMRNVKGMRNGPAQTRVSSSSSHQEATLAMGDKATVVGGQQAEAPDSVAMSSWERRLHRAKCAPSYLFSCFNGGECVHPAFCDCRRFNATGPRCQMVYNAGPERDSICRAWGQHHVETFDGLYYYLSGKGSYTLVGRHEPEGQSFSIQVHNDPQCGSSPYTCSRAVSLFFVGEQEIHLAKEVTHGGMRVQLPHVMGSARLQQLAGYVIVRHQSAFTLAWDGASAVYIKMSPELLGWTHGLCGNNNADPKDDLVTSSGKLTDDVVEFVHSWQEQAPNQPPGPTTSSLPRPPCLQQNPGTMQGVYEQCEALLRPPFDACHAYVSPLPFTASCTSDLCQSMGDVATWCRALAEYARACAQAGRPLQGWRTQLRQCTVHCKEKAFTYNECIACCPASCHPRASCVDSEIACVDGCYCPNGLIFEDGGCVAPAECPCEFHGTLYPPGSVVKEDCNTCTCTSGKWECSTAVCPAECSVTGDIHFTTFDGRRYTFPATCQYILAKSRSSGTFTVTLQNAPCGLNQDGACVQSVSVILHQDPRRQVTLTQAGDVLLFDQYKIIPPYTDDAFEIRRLSSVFLRVRTNVGVRVLYDREGLRLYLQVDQRWVEDTVGLCGTFNGNTQDDFLSPVGVPESTPQLFGNSWKTLSACSPLVSGSPLDPCDVHLQAASYSVQACSVLTGEMFAPCSAFLSPVPYFEQCRRDACRCGQPCLCATLAHYAHLCRRHGLPVDFRARLPACALSCEASKEYSPCVAPCGRTCQDLASPEACGVDGGDDLSRDECVEGCACPPDTYLDTQADLCVPRNQCSCHFQGVDYPPGDSDIPSLGHCHCKDGVMSCDSRAPAAACPAGQVFVNCSDLHTDLELSRERTCEQQLLNLSVSARGPCLSGCACPQGLLRHGDACFLPEECPCTWKGKEYFPGDQVMSPCHTCVCQRGSFQCTLHPCASTCTAYGDRHYRTFDGLPFDFVGACKVHLVKSTSDVSFSVIVENVNCYSSGMICRKFISINVGNSLIVFDDDSGNPSPESFLDDKQEVHTWRVGFFTLVHFPQEHITLLWDQRTTVHVQAGPQWQGQLAGLCGNFDLKTINEMRTPENLELTNPQEFGSSWAAVECPDTLDPRDMCVLNPLREPFAKKECSILLSEVFEICHPVVDVTWFYSNCLTDTCGCSQGGDCECFCASVSAYAHQCCQHGVAVDWRTPRLCPYDCDFFNKVLGKGPYQLSSLAAGGALVGMKAVGDDIVLVRTEDVAPADIVSFLLTAALYKAKAHDPDVVSLEAADRPNFFLHVTANGSLELAKWQGRDTFQQHASFLLHRGTRQAGLVALESLAKPSSFLYVSGAVLALRLYEHTEVFRRGTLFRLLDAKPSGAAYPICEWRYDACASPCFQTCRDPRAASCRDVPRVEGCVPVCPTPQVLDEVTQRCVYLEDCVEPAVWVPTEALGNETLPPSQGLPTPSDEEPQLSQESPRTPTHRPALTPAAPLTTALNPPVTATEEPVVSPGPTQTTLQQPLELTASQLPAGPTESPASKGVTASLLAIPHTPESSSLPVALQTPTPGMVSGAMETTRVTVIFAGSPNITVSSRSPPAPRFPLMTKAVTVRGHGSLPVRTTPPQPSLTASPSSRPVASPGAISRSPTSSGSHKAVLTPAVTKVISRTGVPQPTQAQSASSPSTPLTVAGTAAEQVPVSPLATRSLEIVLSTEKGEAGHSQPMGSPASPQPHPLPSAPPRPAQHTTMATRSPALPPETPAAASLSTATDGLAATPFMSLESTRPSQLLSGLPPDTSLPLAKVGTSAPVATPGPKASVITTPLQPQATTLPAQTLSPVLPFTPAAMTQAHPPTHIAPPAAGTAPGLLLGATLPTSGVLPVAEGTASMVSVVPRKSTTGKVAILSKQVSLPTSMYGSAEGGPTELTPATSHPLTPLVAEPEGAQAGTALPVPTSYALSRVSARTAPQDSMLVLLPQLAEAHGTSAGPHLAAEPVDEATTEPSGRSAPALSIVEGLAEALATTTEANTSTTCVPIAEQDCVRHICLEGQLIRVNQSQHCPQGAAPPRCGILGLAVRVGGDRCCPLWECACRCSIFPDLSFVTFDGSHVALFKEAIYILSQSPDEMLTVHVLDCKSANLGHLNWPPFCLVMLNMTHLAHQVTIDRFNRKVTVDLQPVWPPVSRYGFRIEDTGHMYMILTPSDIQIQWLHSSGLMIVEASKTSKAQGHGLCGICDGDAANDLTLKDGSVVGGAEDPAPFLDSWQVPSSLTSVGQTRFRPDSCATTDCSPCLRMVSNRTFSACHRFVPPESFCELWIRDTKYVQQPCVALTVYVAMCHKFHVCIEWRRSDYCPFLCSSDSTYQACVTACEPPKTCQDGILGPLDPEHCQVLGEGCVCSEGTILHRRHSALCIPEAKCACTDSMGVPRALGETWNSSLSGCCQHQCQAPDTIVPVDLGCPSPRPESCLRFGEVALLLPTKDPCCLGTVCVCNQTLCEGLAPTCRPGHRLLTHFQEDSCCPSYSCECDPDLCEAELVPSCRQDQILITGRLGDSCCTSYFCACGDCPDSIPECQEGEALTVHRNTTELCCPLYQCVCENFRCPQVQCGLGTALVEVWSPDRCCPYKSCECDCDTIPVPRCHLWEKSQLDEEFMHSVENVCGCAKYECVKAPVCLSRELGVMQPGQTVVELSADGVCHTSRCTTVLDPLTNFYQINTTSVLCDIHCEANQEYEHPRDLAACCGSCRNVSCLFTFPNGTTSLFLPGASWIADCARHHCSSTPLGAVLVRSPISCPPLNETECAKVGGSVVPSLEGCCRTCKEDGRSCKKVTIRMTIRKNECRSSTPVNLVSCDGRCPSASIYNYNINTYARFCKCCREVGLQRRSVQLFCATNATWVPYTVQEPTDCACQWS

SEQ ID NO: 9877 - protein, 71 aa, Homo Sapiens
GEFLTVDLNSTHFCCPQYYCVCEPNLCPMPLLNCAEDMNLVKENVSGQCCPTWHCECNCENLIMPTCEVIS

SEQ ID NO: 9878 - protein, 2344 aa, Homo Sapiens
MIPWSIFLLHVLLFSLQEYICASSILMGTSKNGFNENRQKRALLAAQFEATSPRYFFHDAINWGESKIKGSCPYECLNGAFCSKTGTCDCQIFQALGTRCQIIPNMGNGRDGICKTWGQYHFETFDGIYYYFPGNCSYIFAKDCGDLEPRYTVWVHNSPKCLGSVYSCYRSISLFFSNQEEIRIYGHEIKKNGISLTLPQTIGQIFIEKLADYILVKTTFGFSLAWDGISGIYLKLSEDHKGKSCGLCGNYNDIQSDDFIILQEDYTEDIAMFANSWSVQTPDDTKCVLTPSDFPNPCSSGMPAFEAIFFKCQILLQFPFLSCHEYIDPYLYIASCVNDLCKTDDDETYCRAATEYARACSHAGYPIQDWRDDFPACTDKCDDSFVHRDCISCCPPTCTFEKQCLGSNLHCLDGCYCPDGLVMDNGTCISLENCPCGFHGLAYSVGSKIEQECTECVCVGGVWNCTEQDCPVQCSVVGDSHFTTFDGRHYSFIGMCQYILVKGTGKDKFTITLQKAPCEQNLGLVCLQSITLILEDDFNKQVTLGRGGQILTSPNQGFNLNGIVEIQTLSSLFILLKTTFGLKILFAIDGERIYIQLTSAWKRRTLGLCGTFNGNIRDDFLSPSGMIEGTPQLHANAWRVSSTCFAPVHVPVVDPCNINQQNIGYAAHCDVIHQELFAPCHIYISPGLYYQLCRHDACKCGSSCLCNALAHYAYLCGQHGVPIDFRTQISFCAVVCQKGMLYHHCSSFCLHSCISLSSPEQCSDDCAEGCNCPEGKFYEDTLNFCVPIFHCRCHYRGSVYQPGELIPTPSGLCQCSNGTVKCDELATPSAVHICPEGKEYFDCRFPDPELPAGGVNCETTCANLAMNFTCTPSSPCISGCVCAPGMAEHRGKCYVPESCPCIWKDWEYLSGEVIATPCYTCVCRRGMFNCTYYPCPAVCTIYGDRHYYSFDGLEYDYISDCQVFLIKSADDSDISVIAQNKKCFDNDIVCSKSVLISVGDTEIYLNDTPYKQKQSGFFLENKSTYQLWKAGYYIVVYFPEKDITILWDRKTTIHIKVGPQWKNKLSGLCGNFDKCTSNDMTTSNNLEVRNARVFGDSWALGQCESPDETIKPCEAHQNKFPYAKKECSILYSDIFASCRNVIDVTSFAKNCHEDTCNCNLGGDCECLCTSIAAYAYKCCQEGISIHWRSSTVCSLDCEYYNEGLGEGPYMLASYGQSGLVLGANMTSRSVFCLPRSSVHTSLFFYFMITPGLFKEKVSSLALVSLESAERPNYFLYVHDNDTLSLELWEANSAFHRRATFFHHQGLWIPGYSAFELYSKKGFFIIFTDSSVKASKYDDSEEFKHSSSFSIEEIQAAVPYRKMCEWRYEPCATPCFKTCSDPEALACKFLPPVEGCLPYCPKNMILDEVTLKCVYPRDCIPVIPTEPTLMPPAKPTVPMFTVWEMITPSDITVFDMLTPTTGLECEPQKFDPVYDCSQYICLNMEWQLYNWSLNCPKDVEMPDCGFRGRPVQVNSDICCPEWECPCRCSMLSELSIITFDGNNAALYSMASYILVRIPGEIIVAHIEKCSMNQNGNSLKKLAPSGRISGLCFKKLNVTTPIHKIIVNRLARKVEVDSIVVPLPFSSQELSIEDSGSMYVITTPAGLIIKWSHLTGIIDIHFGFRFNLSSYTEGLCGICNEDPDDDLRMQNGTIITNMEDIGLFIESWEIEKSFEVTMRRPVRNCTEHDCSQCIDLLNRRIFIPCHDKVSPEDFCEKMWINYTYFWNYECDALSAYVALCNKFDICIQWRTPDYCSLSCPEGKEYQPCVRPCEARTCLNQWFYGHTSCLNLREDCVCKVGTILHRPHSAQCIPEKECACTDSEDQPRTAGEIWNGGIDECTLYKCLENGSIIPIEPDCDEEPTPVCEREAEVVMGIIDKWTCCSKEVCGCDTTLCETSIPTCTNSQKLIVGHSPLSCCPQYKCECDPLKCPSISTPECREDQFMIQVRQEEPCCFSPFCVCESCTKPVPLCHDGEFLTVDLNSTHFCCPQYYCVCEPNLCPMPLLNCAEDMNLVKENVSGQCCPTWHCECNCENLIMPTCEVGEFTAIDHNFQSDCGCIQYLCEKDDVCVFQEVSVLNPGQSMIKYLEEDFCYAIECLEEKDNHTGFHTLNFTLVNCSKKCDVHQVYTPSPSDYGCCGTCKNVSCKFHMENGTSVVYAVGSTWHYNCTTYECVKTDEGAIILNYTMVCPPFNETECKMNEGIVKLYNEGCCKICKREERICQKVIIKSVIRKQDCMSQSPINVASCDGKCPSATIYNINIESHLRFCKCCRENGVRNLSVPLYCSGNGTEIMYTLQEPIDCTCQWN

SEQ ID NO: 9879 - protein, 2353 aa, Homo Sapiens
MNIVRKLNLMIPWSIFLLHVLLFSLQEYICASSILMGTSKNGFNENRQKRALLAAQFEATSPRYFFHDAINWGESKIKGSCPYECLNGAFCSKTGTCDCQIFQALGTRCQIIPNMGNGRDGICKTWGQYHFETFDGIYYYFPGNCSYIFAKDCGDLEPRYTVWVHNSPKCLGSVYSCYRSISLFFSNQEEIRIYGHEIKKNGISLTLPQTIGQIFIEKLADYILVKTTFGFSLAWDGISGIYLKLSEDHKGKSCGLCGNYNDIQSDDFIILQEDYTEDIAMFANSWSVQTPDDTKCVLTPSDFPNPCSSGMPAFEAIFFKCQILLQFPFLSCHEYIDPYLYIASCVNDLCKTDDDETYCRAATEYARACSHAGYPIQDWRDDFPACTDKCDDSFVHRDCISCCPPTCTFEKQCLGSNLHCLDGCYCPDGLVMDNGTCISLENCPCGFHGLAYSVGSKIEQECTECVCVGGVWNCTEQDCPVQCSVVGDSHFTTFDGRHYSFIGMCQYILVKGTGKDKFTITLQKAPCEQNLGLVCLQSITLILEDDFNKQVTLGRGGQILTSPNQGFNLNGIVEIQTLSSLFILLKTTFGLKILFAIDGERIYIQLTSAWKRRTLGLCGTFNGNIRDDFLSPSGMIEGTPQLHANAWRVSSTCFAPVHVPVVDPCNINQQNIGYAAHCDVIHQELFAPCHIYISPGLYYQLCRHDACKCGSSCLCNALAHYAYLCGQHGVPIDFRTQISFCAVVCQKGMLYHHCSSFCLHSCISLSSPEQCSDDCAEGCNCPEGKFYEDTLNFCVPIFHCRCHYRGSVYQPGELIPTPSGLCQCSNGTVKCDELATPSAVHICPEGKEYFDCRFPDPELPAGGVNCETTCANLAMNFTCTPSSPCISGCVCAPGMAEHRGKCYVPESCPCIWKDWEYLSGEVIATPCYTCVCRRGMFNCTYYPCPAVCTIYGDRHYYSFDGLEYDYISDCQVFLIKSADDSDISVIAQNKKCFDNDIVCSKSVLISVGDTEIYLNDTPYKQKQSGFFLENKSTYQLWKAGYYIVVYFPEKDITILWDRKTTIHIKVGPQWKNKLSGLCGNFDKCTSNDMTTSNNLEVRNARVFGDSWALGQCESPDETIKPCEAHQNKFPYAKKECSILYSDIFASCRNVIDVTSFAKNCHEDTCNCNLGGDCECLCTSIAAYAYKCCQEGISIHWRSSTVCSLDCEYYNEGLGEGPYMLASYGQSGLVLGANMTSRSVFCLPRSSVHTSLFFYFMITPGLFKEKVSSLALVSLESAERPNYFLYVHDNDTLSLELWEANSAFHRRATFFHHQGLWIPGYSAFELYSKKGFFIIFTDSSVKASKYDDSEEFKHSSSFSIEEIQAAVPYRKMCEWRYEPCATPCFKTCSDPEALACKFLPPVEGCLPYCPKNMILDEVTLKCVYPRDCIPVIPTEPTLMPPAKPTVPMFTVWEMITPSDITVFDMLTPTTGLECEPQKFDPVYDCSQYICLNMEWQLYNWSLNCPKDVEMPDCGFRGRPVQVNSDICCPEWECPCRCSMLSELSIITFDGNNAALYSMASYILVRIPGEIIVAHIEKCSMNQNGNSLKKLAPSGRISGLCFKKLNVTTPIHKIIVNRLARKVEVDSIVVPLPFSSQELSIEDSGSMYVITTPAGLIIKWSHLTGIIDIHFGFRFNLSSYTEGLCGICNEDPDDDLRMQNGTIITNMEDIGLFIESWEIEKSFEVTMRRPVRNCTEHDCSQCIDLLNRRIFIPCHDKVSPEDFCEKMWINYTYFWNYECDALSAYVALCNKFDICIQWRTPDYCSLSCPEGKEYQPCVRPCEARTCLNQWFYGHTSCLNLREDCVCKVGTILHRPHSAQCIPEKECACTDSEDQPRTAGEIWNGGIDECTLYKCLENGSIIPIEPDCDEEPTPVCEREAEVVMGIIDKWTCCSKEVCGCDTTLCETSIPTCTNSQKLIVGHSPLSCCPQYKCECDPLKCPSISTPECREDQFMIQVRQEEPCCFSPFCVCESCTKPVPLCHDGEFLTVDLNSTHFCCPQYYCVCEPNLCPMPLLNCAEDMNLVKENVSGQCCPTWHCECNCENLIMPTCEVGEFTAIDHNFQSDCGCIQYLCEKDDVCVFQEVSVLNPGQSMIKYLEEDFCYAIECLEEKDNHTGFHTLNFTLVNCSKKCDVHQVYTPSPSDYGCCGTCKNVSCKFHMENGTSVVYAVGSTWHYNCTTYECVKTDEGAIILNYTMVCPPFNETECKMNEGIVKLYNEGCCKICKREERICQKVIIKSVIRKQDCMSQSPINVASCDGKCPSATIYNINIESHLRFCKCCRENGVRNLSVPLYCSGNGTEIMYTLQEPIDCTCQWN

SEQ ID NO: 9880 - protein, 2308 aa, Homo Sapiens
MNIVRKLNLMIPWSIFLLHVLLFSLQEYICASSILMGTSKNGFNENRQKRALLAAQFEATSPRYFFHDAINWGESKIKGSCPYECLNGAFCSKTGTCDCQIFQALGTRCQIIPNMGNGRDGICKTWGQYHFETFDGIYYYFPGNCSYIFAKDCGDLEPRYTVWVHNSPKCLGSVYSCYRSISLFFSNQEEIRIYGHEIKKNGISLTLPQTIGQIFIEKLADYILVKTTFGFSLAWDGISGIYLKLSEDHKGKSCGLCGNYNDIQSDDFIILQEDYTEDIAMFANSWSVQTPDDTKCVLTPSDFPNPCSSGMPAFEAIFFKCQILLQFPFLSCHEYIDPYLYIASCVNDLCKTDDDETYCRAATEYARACSHAGYPIQDWRDDFPACTDKCDDSFVHRDCISCCPPTCTFEKQCLGSNLHCLDGCYCPDGLVMDNGTCISLENCPCGFHGLAYSVGSKIEQECTECVCVGGVWNCTEQDCPVQCSVVGDSHFTTFDGRHYSFIGMCQYILVKGTGKDKFTITLQKAPCEQNLGLVCLQSITLILEDDFNKQVTLGRGGQILTSPNQGFNLNGIVEIQTLSSLFILLKTTFGLKILFAIDGERIYIQLTSAWKRRTLGLCGTFNGNIRDDFLSPSGMIEGTPQLHANAWRVSSTCFAPVHVPVVDPCNINQQNIGYAAHCDVIHQELFAPCHIYISPGLYYQLCRHDACKCGSSCLCNALAHYAYLCGQHGVPIDFRTQISFCAVVCQKGMLYHHCSSFCLHSCISLSSPEQCSDDCAEGCNCPEGKFYEDTLNFCVPIFHCRCHYRGSVYQPGELIPTPSGLCQCSNGTVKCDELATPSAVHICPEGKEYFDCRFPDPELPAGGVNCETTCANLAMNFTCTPSSPCISGCVCAPGMAEHRGKCYVPESCPCIWKDWEYLSGEVIATPCYTCVCRRGMFNCTYYPCPAVCTIYGDRHYYSFDGLEYDYISDCQVFLIKKQSGFFLENKSTYQLWKAGYYIVVYFPEKDITILWDRKTTIHIKVGPQWKNKLSGLCGNFDKCTSNDMTTSNNLEVRNARVFGDSWALGQCESPDETIKPCEAHQNKFPYAKKECSILYSDIFASCRNVIDVTSFAKNCHEDTCNCNLGGDCECLCTSIAAYAYKCCQEGISIHWRSSTVCSLDCEYYNEGLGEGPYMLASYGQSGLVLGANMTSRSVFCLPRSSVHTSLFFYFMITPGLFKEKVSSLALVSLESAERPNYFLYVHDNDTLSLELWEANSAFHRRATFFHHQGLWIPGYSAFELYSKKGFFIIFTDSSVKASKYDDSEEFKHSSSFSIEEIQAAVPYRKMCEWRYEPCATPCFKTCSDPEALACKFLPPVEGCLPYCPKNMILDEVTLKCVYPRDCIPVIPTEPTLMPPAKPTVPMFTVWEMITPSDITVFDMLTPTTGLECEPQKFDPVYDCSQYICLNMEWQLYNWSLNCPKDVEMPDCGFRGRPVQVNSDICCPEWECPCRCSMLSELSIITFDGNNAALYSMASYILVRIPGEIIVAHIEKCSMNQNGNSLKKLAPSGRISGLCFKKLNVTTPIHKIIVNRLARKVEVDSIVVPLPFSSQELSIEDSGSMYVITTPAGLIIKWSHLTGIIDIHFGFRFNLSSYTEGLCGICNEDPDDDLRMQNGTIITNMEDIGLFIESWEIEKSFEVTMRRPVRNCTEHDCSQCIDLLNRRIFIPCHDKVSPEDFCEKMWINYTYFWNYECDALSAYVALCNKFDICIQWRTPDYCSLSCPEGKEYQPCVRPCEARTCLNQWFYGHTSCLNLREDCVCKVGTILHRPHSAQCIPEKECACTDSEDQPRTAGEIWNGGIDECTLYKCLENGSIIPIEPDCDEEPTPVCEREAEVVMGIIDKWTCCSKEVCGCDTTLCETSIPTCTNSQKLIVGHSPLSCCPQYKCECDPLKCPSISTPECREDQFMIQVRQEEPCCFSPFCVCESCTKPVPLCHDGEFLTVDLNSTHFCCPQYYCVCEPNLCPMPLLNCAEDMNLVKENVSGQCCPTWHCECNCENLIMPTCEVGEFTAIDHNFQSDCGCIQYLCEKDDVCVFQEVSVLNPGQSMIKYLEEDFCYAIECLEEKDNHTGFHTLNFTLVNCSKKCDVHQVYTPSPSDYGCCGTCKNVSCKFHMENGTSVVYAVGSTWHYNCTTYECVKTDEGAIILNYTMVCPPFNETECKMNEGIVKLYNEGCCKICKREERICQKVIIKSVIRKQDCMSQSPINVASCDGKCPSATIYNINIESHLRFCKCCRENGVRNLSVPLYCSGNGTEIMYTLQEPIDCTCQWN

SEQ ID NO: 9881 - protein, 101 aa, Homo Sapiens
NFTLVNCSKKCDVHQVYTPSPSDYGCCGTCKNVSCKFHMENGTSVVYAVGSTWHYNCTTYECVKTDEGAIILNYTMVCPPFNETECKMVCTLLYLRKFIII

SEQ ID NO: 9882 - protein, 752 aa, Homo Sapiens
  misc_feature (1)..(1): Xaa can be any naturally occurring amino acid
XEIIVAHIEKCSMNQNGNSLKKLAPSGRISGLCFKKLNVTTPIHKIIVNRLARKVEVDSIVVPLPFSSQELSIEDSGSMYVITTPAGLIIKWSHLTGIIDIHFGFRFNLSSYTEGLCGICNEDPDDDLRMQNGTIITNMEDIGLFIESWEIEKSFEVTMRRPVRNCTEHDCSQCIDLLNRRIFIPCHDKVSPEDFCEKMWINYTYFWNYECDALSAYVALCNKFDICIQWRTPDYCSLSCPEGKEYQPCVRPCEARTCLNQWFYGHTSCLNLREDCVCKVGTILHRPHSAQCIPEKECACTDSEDQPRTAGEIWNGGIDECTLYKCLENGSIIPIEPDCDEEPTPVCEREAEVVMGIIDKWTCCSKEVCGCDTTLCETSIPTCTNSQKLIVGHSPLSCCPQYKCECDPLKCPSISTPECREDQFMIQVRQEEPCCFSPFCVCESCTKPVPLCHDGEFLTVDLNSTHFCCPQYYCVCEPNLCPMPLLNCAEDMNLVKENVSGQCCPTWHCEKDDVCVFQEVSVLNPGQSMIKYLEEDFCYAIECLEEKDNHTGFHTLNFTLVNCSKKCDVHQVYTPSPSDYGCCGTCKNVSCKFHMENGTSVVYAVGSTWHYNCTTYECVKTDEGAIILNYTMVCPPFNETECKMNEGIVKLYNEGCCKICKREERICQKVIIKSVIRKQDCMSQSPINVASCDGKCPSATIYNINIESHLRFCKCCRENGVRNLSVPLYCSGNGTEIMYTLQEPIDCTCQWN

SEQ ID NO: 9883 - protein, 166 aa, Homo Sapiens
  misc_feature (1)..(1): Xaa can be any naturally occurring amino acid
XHSPLSCCPQYKCECDPLKCPSISTPECREDQFMIQVRQEEPCCFSPFCVCESCTKPVPLCHDGEFLTVDLNSTHFCCPQYYCVCEPNLCPMPLLNCAEDMNLVKENVSGQCCPTWHCECNCENLIMPTCEVQPCADADIRTLGCLGRADQEHFHEAKFLRENLLQ

SEQ ID NO: 9884 - protein, 477 aa, Homo Sapiens
MWMFSWLCAILIILAIAGMNTIAKTTPHTKFTKKSEEREMPKGLKPSSGPPPEEEETLFTEMAEMAEPITKPSALDSVFGTATLSPFENFTLDPADFFLNCCDCCSPVPGQKGEPGETGQPGPKGEAGNLGIPGPPGVVGPQGPRGYKGEKGLKGERGDQGVPGYPGKPGAQGEPGPKGDKGNIGLGGVKGQKGSKGDTCGNCTKGEKGDQGAMGSPGLHGGPGAKGEKGEMGEKGEMGDKGCCGDSGERGGKGQKGEGGMKGEKGSKGDSGMEGKSGRNGLPGAKGDPGIKGEKGELGPPGLLGPTGPKGDIGNKGVRGPTGKKGSRGFKGSKGELARVPRSAFSAGLSKPFPPPNIPIKFEKILYNDQGNYSPVTGKFNCSIPGTYVFSYHITVRGRPARISLVAQNKKQFKSRETLYGQEIDQASLLVILKLSAGDQVWLEVSKDWNGVYVSAEDDSIFTGFLLYPEETSGISP

SEQ ID NO: 9885 - protein, 128 aa, Homo Sapiens
MARILLLFLPGLVAVCAVHGIFMDRLASKKLCADDECVYTISLASAQEDYNAPDCRFINVKKGQQIYVYSKLVKENGAGEFWAGSVYGDGQDEMGVVGYFPRNLVKEQRVYQEATKEVPTTDIDFFCE

SEQ ID NO: 9886 - protein, 89 aa, Homo Sapiens
MQACMVPGLALCLLLGPLAGAKPVQEEGDPYAELPAMPYWPFSTSDFWNYVQHFQALGAYPQIEDMARTFFAHFPLGSTLGFHVPYQED

SEQ ID NO: 9887 - protein, 89 aa, Homo Sapiens; identical to SEQ ID NO: 9886

SEQ ID NO: 9888 - protein, 1134 aa, Homo Sapiens
MGLLASAGLLLLLVIGHPRSLGLKCGIRMVNMKSKEPAVGSRFFSRISSWRNSTVTGHPWQVSLKSDEHHFCGGSLIQEDRVVTAAHCLDSLSEKQLKNITVTSGEYSLFQKDKQEQNIPVSKIITHPEYNSREYMSPDIALLYLKHKVKFGNAVQPICLPDSDDKVEPGILCLSSGWGKISKTSEYSNVLQEMELPIMDDRACNTVLKSMNLPPLGRTMLCAGFPDWGMDACQGDSGGPLVCRRGGGIWILAGITSWVAGCAGGSVPVRNNHVKASLGIFSKVSELMDFITQNLFTGLDRGQPLSKVGSRYITKALSSVQEVNGSQRGKGILDMEKQVGCDHDYVSLRSSSGVLFNQRSLMEDDGKQNKRVCGKILPSPLLAETSEAMVPFVSDTEDSGSGFELTVTAVQKSEAGSGCGSLAILVEEGTNHSAKYPDLYPSNTRCHWFICAPEKHIIKLTFEDFAVKFSPNCIYDAVVIYGDSEEKHKLAKLCGMLTITSIFSSSNMTVIYFKSDGKNRLQGFKARFTILPSESLNKFEPKLPPQNNPVSTVKAILHDVCGIPPFSPQWLSRRIAGGEEACPHCWPWQVGLRFLGDYQCGGAIINPVWILTAAHCVQLKNNPLSWTIIAGDHDRNLKESTEQVRRAKHIIVHEDFNTLSYDSDIALIQLSSPLEYNSVVRPVCLPHSAEPLFSSEICAVTGWGSISADGGLASRLQQIQVHVLEREVCEHTYYSAHPGGITEKMICAGFAASGEKDFCQGDSGGPLVCRHENGPFVLYGIVSWGAGCVQPWKPGVFARVMIFLDWIQSKINGPASLQTNNKCKTLKQQLPPPTPSPDSASWPGCCSEAELEKPRGFFPTPRYLLDYRGRLECSWVLRVSASSMAKFTIEYLSLLGSPVCQDSVLIIYEERHSKRKTAGGLHGRRLYSMTFMSPGPLVRVTFHALVRGAFGISYIVLKVLGPKDSKITRLSQSSNREHLVPCEDVLLTKPEGIMQIPRNSHRTTMGCQWRLVAPLNHIIQLNIINFPMKPTTFVCHGHLRVYEGFGPGKKLIASFAGTLAMILTKDILKREKLNFINTYIMHIWENSVYDNVRSVGKRKQKKFASNLSYSMEAEKSRIQVPADLVPAKGSLSGS

SEQ ID NO: 9889 - protein, 80 aa, Homo Sapiens
REHLVPCEDVLLTKPEGIMQIPRNSHRTTMGCQWRLVAPLNHIIQLNIINFPMKPTTFVCHGHLRVYEGFGPGKKLIGEC

SEQ ID NO: 9890 - protein, 121 aa, Homo Sapiens
  misc_feature (1)..(1): Xaa can be any naturally occurring amino acid
XKITRLSQSSNREHLVPCEDVLLTKPEGIMQIPRNSHRTTMGCQWRLVAPLNHIIQLNIINFPMKPTTFVCHGHLRVYEGFGPGKKLIAHLHGSKKEFILISSAAYLTVHFKTDESERKRF

SEQ ID NO: 9891 - protein, 565 aa, Homo Sapiens
MLISRNKLILLLGIVFFERGKSATLSLPKAPSCGQSLVKVQPWNYFNIFSRILGGSQVEKGSYPWQVSLKQRQKHICGGSIVSPQWVITAAHCIANRNIVSTLNVTAGEYDLSQTDPGEQTLTIETVIIHPHFSTKKPMDYDIALLKMAGAFQFGHFVGPICLPELREQFEAGFICTTAGWGRLTEGGVLSQVLQEVNLPILTWEECVAALLTLKRPISGKTFLCTGFPDGGRDACQGDSGGSLMCRNKKGAWTLAGVTSWGLGCGRGWRNNVRKSDQGSPGIFTDISKVLPWIHEHIQTGNRRKSSRAWCSEQDVIVSGAEGKLHFPESLHLYYESKQRCVWTLLVPEEMHVLLSFSHLDVESCHHSYLSMYSLEDRPIGKFCGESLPSSILIGSNSLRLKFVSDATDNAAGFNLTYKALKPNYIPDSGCSYLTVLFEEGLIQSLNYPENYSDKANCDWIFQASKHHLIKLSFQSLEIEESGDCTSDYVTVHSDVERKKEIARLCGYDVPTPVLSPSSIMLISFQSDENGTCRGFQATVSFIPKAVYPDLNISISEDESMFLET

SEQ ID NO: 9892 - protein, 565 aa, Homo Sapiens; identical to SEQ ID NO: 9891

SEQ ID NO: 9893 - protein, 678 aa, Homo Sapiens
MWKLLLWVGLVLVLKHHDGAAHKLVCYFTNWAHSRPGPASILPHDLDPFLCTHLIFAFASMNNNQIVAKDLQDEKILYPEFNKLKERNRELKTLLSIGGWNFGTSRFTTMLSTFANREKFIASVISLLRTHDFDGLDLFFLYPGLRGSPMHDRWTFLFLIEELLFAFRKEALLTMRPRLLLSAAVSGVPHIVQTSYDVRFLGRLLDFINVLSYDLHGSWERFTGHNSPLFSLPEDPKSSAYAMNYWRKLGAPSEKLIMGIPTYGRTFRLLKASKNGLQARAIGPASPGKYTKQEGFLAYFEICSFVWGAKKHWIDYQYVPYANKGKEWVGYDNAISFSYKAWFIRREHFGGAMVWTLDMDDVRGTFCGTGPFPLVYVLNDILVRAEFSSTSLPQFWLSSAVNSSSTDPERLAVTTAWTTDSKILPPGGEAGVTEIHGKCENMTITPRGTTVTPTKETVSLGKHTVALGEKTEITGAMTMTSVGHQSMTPGEKALTPVGHQSVTTGQKTLTSVGYQSVTPGEKTLTPVGHQSVTPVSHQSVSPGGTTMTPVHFQTETLRQNTVAPRRKAVAREKVTVPSRNISVTPEGQTMPLRGENLTSEVGTHPRMGNLGLQMEAENRMMLSSSPVIQLPEQTPLAFDNRFVPIYGNHSSVNSVTPQTSPLSLKKEIPENSAVDEEA

SEQ ID NO: 9894 - protein, 520 aa, Homo Sapiens
MAALKLLSSGLRLCASARGSGATWYKGCVCSFSTSAHRHTKFYTDPVEAVKDIPDGATVLVGGFGLCGIPENLIDALLKTGVKGLTAVSNNAGVDNFGLGLLLRSKQIKRMVSSYVGENAEFERQYLSGELEVELTPQGTLAERIRAGGAGVPAFYTPTGYGTLVQEGGSPIKYNKDGSVAIASKPREVREFNGQHFILEEAITGDFALVKAWKADRAGNVIFRKSARNFNLPMCKAAETTVVEVEEIVDIGAFAPEDIHIPQIYVHRLIKGEKYEKRIERLSIRKEGDGEAKSAKPGDDVRERIIKRAALEFEDGMYANLGIGIPLLASNFISPNITVHLQSENGVLGLGPYPRQHEADADLINAGKETVTILPGASFFSSDESFAMIRGGHVDLTMLGAMQVSKYGDLANWMIPGKMVKGMGGAMDLVSSAKTKVVVTMEHSAKGNAHKIMEKCTLPLTGKQCVNRIITEKAVFDVDKKKGLTLIELWEGLTVDDVQKSTGCDFAVSPKLMPMQQIAN

SEQ ID NO: 9895 - protein, 123 aa, Homo Sapiens
MLGAMQVSKYGDLANWMIPGKMVKGMGGAMDLVSSAKTKVVVTMEHSAKGNAHKIMEKCTLPLTGKQCVNRIITEKAVFDVDKKKGLTLIELWEGLTVDDVQKSTGCDFAVSPKLMPMQQIAN

SEQ ID NO: 9896 - protein, 123 aa, Homo Sapiens; identical to SEQ ID NO: 9895

SEQ ID NO: 9897 - protein, 334 aa, Homo Sapiens
MMVREFNGQHFILEEAITGDFALVKAWKADRAGNVIFRKSARNFNLPMCKAAETTVVEVEEIVDIGAFAPEDIHIPQIYVHRLIKGEKYEKRIERLSIRKEGDGEAKSAKPGDDVRERIIKRAALEFEDGMYANLGIGIPLLASNFISPNITVHLQSENGVLGLGPYPRQHEADADLINAGKETVTILPGASFFSSDESFAMIRGGHVDLTMLGAMQVSKYGDLANWMIPGKMVKGMGGAMDLVSSAKTKVVVTMEHSAKGNAHKIMEKCTLPLTGKQCVNRIITEKAVFDVDKKKGLTLIELWEGLTVDDVQKSTGCDFAVSPKLMPMQQIAN

SEQ ID NO: 9898 - protein, 517 aa, Homo Sapiens
MAALRLLASVLGRGVPAGGSGLALSQGCARCFATSPRLRAKFYADPVEMVKDISDGATVMIGGFGLCGIPENLIAALLRTRVKDLQVVSSNVGVEDFGLGLLLAARQVRRIVCSYVGENTLCESQYLAGELELELTPQGTLAERIRAGGAGVPAFYTPTGYGTLVQEGGAPIRYTPDGHLALMSQPREVREFNGDHFLLERAIRADFALVKGWKADRAGNVVFRRSARNFNVPMCKAADVTAVEVEEIVEVGAFPPEDIHVPNIYVDRVIKGQKYEKRIERLTILKEEDGDAGKEEDARTRIIRRAALEFEDGMYANLGIGIPLLASNFISPSMTVHLHSENGILGLGPFPTEDEVDADLINAGKQTVTVLPGGCFFASDDSFAMIRGGHIQLTMLGAMQVSKYGDLANWMIPGKKVKGMGGAMDLVSSQKTRVVVTMQHCTKDNTPKIMEKCTMPLTGKRCVDRIITEKAVFDVHRKKELTLRELWEGLTVDDIKKSTGCAFAVSPNLRPMQQVAP

SEQ ID NO: 9899 - protein, 56 aa, Homo Sapiens
MACAAVMIPGLLRCSVGAIRIEAASLRLTLSTLRHLTLTRLCQQLRCVELPVSHRQ

SEQ ID NO: 9900 - protein, 312 aa, Homo Sapiens
MACAAVMIPGLLRCSVGAIRIEAASLRLTLSTLRHLTLTSIMKSKRKTDHMERTASVLRREIVSAAKVCGAASESPSVKSLRLLVADQDFSFKAGQWVDFFIPGVSVVGGFSICSSPRLLEQERVIELAVKYTNHPPALWVHNTCTLDCEVAVRVGGEFFFDPQPADASRNLVLIAGGVGINPLLSILRHAADLLREQANKRNGYEIGTIKLFYSAKNTSELLFKKNILDLVNEFPEKIACSLHVTKQTTQINAELKPYITEGRITEKEIRDHISKETLFYICGPPPMTDFFSKQLENNHVPKEHICFEKWW

SEQ ID NO: 9901 - protein, 312 aa, Homo Sapiens; identical to SEQ ID NO: 9900

SEQ ID NO: 9902 - protein, 311 aa, Homo Sapiens
MACAAVMIPGLLRCSVGAIRIEAASLRLTLSTLRHLTLTSIMKSKRKTDHMERTASVLRREIVSAAKVCGAASESPSVKSLRLLVADQDFSFKAGQWVDFFIPGVSVVGGFSICSSPRLLEQERVIELAVKYTNHPPALWVHNTCTLDCEVAVRVGGEFFFDPQPADASRNLVLIAGGVGINPLLSILRHAADLLREQANKRNGYEIGTIKLFYSAKNTSELLFKKNILDLVNEFPEKIACSLHVTKQTTQINAELKPYITGRITEKEIRDHISKETLFYICGPPPMTDFFSKQLENNHVPKEHICFEKWW

SEQ ID NO: 9903 - protein, 71 aa, Homo Sapiens
MACAAVMIPGLLRCSVGAIRIEAASLRLTLSTLRHLTLTSIMKSKRKTDHMERTASVLRRESNLFHQGRKH

SEQ ID NO: 9904 - protein, 330 aa, Homo Sapiens
MTPKISWTSKFSVCPESAMACAAVMIPGLLRCSVGAIRIEAASLRLTLSTLRHLTLTSIMKSKRKTDHMERTASVLRREIVSAAKVCGAASESPSVKSLRLLVADQDFSFKAGQWVDFFIPGVSVVGGFSICSSPRLLEQERVIELAVKYTNHPPALWVHNTCTLDCEVAVRVGGEFFFDPQPADASRNLVLIAGGVGINPLLSILRHAADLLREQANKRNGYEIGTIKLFYSAKNTSELLFKKNILDLVNEFPEKIACSLHVTKQTTQINAELKPYITEGRITEKEIRDHISKETLFYICGPPPMTDFFSKQLENNHVPKEHICFEKWW

SEQ ID NO: 9905 - protein, 330 aa, Homo Sapiens; identical to SEQ ID NO: 9904

SEQ ID NO: 9906 - protein, 125 aa, Homo Sapiens
MAGPSLACCLLGLLALTSACYIQNCPLGGKRAAPDLDVRKCLPCGPGGKGRCFGPNICCAEELGCFVGTAEALRCQEENYLPSPCQSGQKACGSGGRCAVLGLCCSPDGCHADPACDAEATFSQR

SEQ ID NO: 9907 - protein, 207 aa, Homo Sapiens
MAVRALKLLTTLLAVVAAASQAEVESEAGWGMVTPDLLFAEGTAAYARGDWPGVVLSMERALRSRAALRALRLRCRTQCAADFPWELDPDWSPSPAQASGAAALRDLSFFGGLLRRAACLRRCLGPPAAHSLSEEMELEFRKRSPYNYLQVAYFKDLETQPHMQEFRLGVRLYSEEQPQEAVPHLEAALQEYFVAYEECRALCEGPY

SEQ ID NO: 9908 - protein, 804 aa, Homo Sapiens
MAVRALKLLTTLLAVVAAASQAEVESEAGWGMVTPDLLFAEGTAAYARGDWPGVVLSMERALRSRAALRALRLRCRTQCAADFPWELDPDWSPSPAQASGAAALRDLSFFGGLLRRAACLRRCLGPPAAHSLSEEMELEFRKRSPYNYLQVAYFKINKLEKAVAAAHTFFVGNPEHMEMQQNLDYYQTMSGVKEADFKDLETQPHMQEFRLGVRLYSEEQPQEAVPHLEAALQEYFVAYEECRALCEGPYDYDGYNYLEYNADLFQAITDHYIQVLNCKQNCVTELASHPSREKPFEDFLPSHYNYLQFAYYNIGNYTQAVECAKTYLLFFPNDEVMNQNLAYYAAMLGEEHTRSIGPRESAKEYRQRSLLEKELLFFAYDVFGIPFVDPDSWTPEEVIPKRLQEKQKSERETAVRISQEIGNLMKEIETLVEEKTKESLDVSRLTREGGPLLYEGISLTMNSKLLNGSQRVVMDGVISDHECQELQRLTNVAATSGDGYRGQTSPHTPNEKFYGVTVFKALKLGQEGKVPLQSAHLYYNVTEKVRRIMESYFRLDTPLYFSYSHLVCRTAIEEVQAERKDDSHPVHVDNCILNAETLVCVKEPPAYTFRDYSAILYLNGDFDGGNFYFTELDAKTVTAEVQPQCGRAVGFSSGTENPHGVKAVTRGQRCAIALWFTLDPRHSERVRAARAGESSWCCGDPFPERPWFAFLFPKSHCQWLRHERSTWDTSSNALSLWSHCLVLPGPAVNGIQVGKEVKTGSDAEFLVPSLGPTSAVLFQRVGPAGKEMSLGPLRNLPCPLGSSS

SEQ ID NO: 9909 - protein, 736 aa, Homo Sapiens
MAVRALKLLTTLLAVVAAASQAEVESEAGWGMVTPDLLFAEGTAAYARGDWPGVVLSMERALRSRAALRALRLRCRTQCAADFPWELDPDWSPSPAQASGAAALRDLSFFGGLLRRAACLRRCLGPPAAHSLSEEMELEFRKRSPYNYLQVAYFKINKLEKAVAAAHTFFVGNPEHMEMQQNLDYYQTMSGVKEADFKDLETQPHMQEFRLGVRLYSEEQPQEAVPHLEAALQEYFVAYEECRALCEGPYDYDGYNYLEYNADLFQAITDHYIQVLNCKQNCVTELASHPSREKPFEDFLPSHYNYLQFAYYNIGNYTQAVECAKTYLLFFPNDEVMNQNLAYYAAMLGEEHTRSIGPRESAKEYRQRSLLEKELLFFAYDVFGIPFVDPDSWTPEEVIPKRLQEKQKSERETAVRISQEIGNLMKEIETLVEEKTKESLDVSRLTREGGPLLYEGISLTMNSKLLNGSQRVVMDGVISDHECQELQRLTNVAATSGDGYRGQTSPHTPNEKFYGVTVFKALKLGQEGKVPLQSAHLYYNVTEKVRRIMESYFRLDTPLYFSYSHLVCRTAIEEVQAERKDDSHPVHVDNCILNAETLVCVKEPPAYTFRDYSAILYLNGDFDGGNFYFTELDAKTVTAEVQPQCGRAVGFSSGTENPHGVKAVTRGQRCAIALWFTLDPRHSERDRVQADDLVKMLFSPEEMDLSQEQPLDAQQGPPEPAQESLSGSESKPKDEL

SEQ ID NO: 9910 - protein, 697 aa, Homo Sapiens
MAVRALKLLTTLLAVVAAASQAEVESEAGWGMVTPDLLFAEGTAAYARGDWPGVVLSMERALRSRAALRALRLRCRTQCAADFPWELDPDWSPSPAQASGAAALRDLSFFGGLLRRAACLRRCLGPPAAHSLSEEMELEFRKRSPYNYLQVAYFKINKLEKAVAAAHTFFVGNPEHMEMQQNLDYYQTMSGVKEADFKDLETQPHMQEFRLGVRLYSEEQPQEAVPHLEAALQEYFVAYEECRALCEGPYDYDGYNYLEYNADLFQAITDHYIQVLNCKQNCVTELASHPSREKPFEDFLPSHYNYLQFAYYNIGNYTQAVECAKTYLLFFPNDEVMNQNLAYYAAMLGEEHTRSIGPRESAKEYRQRSLLEKELLFFAYDVFGIPFVDPDSWTPEEVIPKRLQEKQKSERETAVRISQEIGNLMKEIETLVEEKTKESLDVSRLTREGGPLLYEGISLTMNSKLLNGSQRVVMDGVISDHECQELQRLTNVAATSGDGYRGQTSPHTPNEKFYGVTVFKALKLGQEGKVPLQSAHLYYNVTEKVRRIMESYFRLDTPLYFSYSHLVCRTAIEEVQAERKDDSHPVHVDNCILNAETLVCVKEPPAYTFRDYSAILYLNGDFDGGNFYFTELDAKTVTAEVQPQCGRAVGFSSGTENPHGVKAVTRGQRCAIALWFTLDPRHSERVRAARAGQGAGR

SEQ ID NO: 9911 - protein, 222 aa, Homo Sapiens
  misc_feature (1)..(1): Xaa can be any naturally occurring amino acid
XTPEEVIPKRLQEKQKSERETAVRISQEIGNLMKEIETLVEEKTKESLDVSRLTREGGPLLYEGISLTMNSKLLNGSQRVVMDGVISDHECQELQRLTNVAATSGDGYRGQTSPHTPNEKFYGVTVFKALKFHVAGEASQSWWKAKRSKSHLTWMAAGKERTSAAGARRQSSSAECPPVLQRDGEGAAHHGVLLPPGYAPLLFLLSSGVPHCHRRGPGREEG

SEQ ID NO: 9912 - protein, 134 aa, Homo Sapiens
MEMQQNIENYRATAGVEALQLVDREAKPHMESYNAGVKHYEADDFEMAIRHFEQALREYFVEDTECRTLCEGPQRFEEYEYLGYKAGLYEAIADHYMQVLVCQHECVRELATRPGRLSPIENFLPLHYDYLQFA

SEQ ID NO: 9913 - protein, 137 aa, Homo Sapiens
MEMQQNIENYRATAGVEALQLVDREAKPHMESYNAGVKHYEADDFEMAIRHFEQALREYFVEDTECRTLCEGPQRFEEYEYLGYKAGLYEAIADHYMQVLVCQHECVRELATRPGRLSPIENFLPLHYDYLQFAYYR

SEQ ID NO: 9914 - protein, 527 aa, Homo Sapiens
MEMQQNIENYRATAGVEALQLVDREAKPHMESYNAGVKHYEADDFEMAIRHFEQALREYFVEDTECRTLCEGPQRFEEYEYLGYKAGLYEAIADHYMQVLVCQHECVRELATRPGRLSPIENFLPLHYDYLQFAYYRVGEYVKALECAKAYLLCHPDDEDVLDNVDYYESLLDDSIDPASIEAREDLTMFVKRHKLESELIKSAAEGLGFSYTEPNYWIRYGGRQDENRVPSGVNVEGAEVHGFSMGKKLSPKIDRDLREGGPLLYENITFVYNSEQLNGTQRVLLDNVLSEEQCRELHSVASGIMLVGDGYRGKTSPHTPNEKFEGATVLKALKSGYEGRVPLKSARLFYDISEKARRIVESYFMLNSTLYFSYTHMVCRTALSGQQDRRNDLSHPIHADNCLLDPEANECWKEPPAYTFRDYSALLYMNDDFEGGEFIFTEMDAKTVTASIKPKCGRMISFSSGGENPHGVKAVTKGKRCAVALWFTLDPLYRELERIQADEVIAILDQEQQGKHELNINPKDEL

SEQ ID NO: 9915 - protein, 708 aa, Homo Sapiens
MRERIWAPPLLLLLPLLLPPPLWGGPPDSPRRELELEPGPLQPFDLLYASGAAAYYSGDYERAVRDLEAALRSHRRLREIRTRCARHCAARHPLPPPPPGEGPGAELPLFRSLLGRARCYRSCETQRLGGPASRHRVSEDVRSDFQRRVPYNYLQRAYIKLNQLEKAVEAAHTFFVANPEHMEMQQNIENYRATAGVEALQLVDREAKPHMESYNAGVKHYEADDFEMAIRHFEQALREYFVEDTECRTLCEGPQRFEEYEYLGYKAGLYEAIADHYMQVLVCQHECVRELATRPGRLSPIENFLPLHYDYLQFAYYRVGEYVKALECAKAYLLCHPDDEDVLDNVDYYESLLDDSIDPASIEAREDLTMFVKRHKLESELIKSAAEGLGFSYTEPNYWIRYGGRQDENRVPSGVNVEGAEVHGFSMGKKLSPKIDRDLREGGPLLYENITFVYNSEQLNGTQRVLLDNVLSEEQCRELHSVASGIMLVGDGYRGKTSPHTPNEKFEGATVLKALKSGYEGRVPLKSARLFYDISEKARRIVESYFMLNSTLYFSYTHMVCRTALSGQQDRRNDLSHPIHADNCLLDPEANECWKEPPAYTFRDYSALLYMNDDFEGGEFIFTEMDAKTVTASIKPKCGRMISFSSGGENPHGVKAVTKGKRCAVALWFTLDPLYRELERIQADEVIAILDQEQQGKHELNINPKDEL

SEQ ID NO: 9916 - protein, 736 aa, Homo Sapiens
MLRLLRPLLLLLLLPPPGSPEPPGLTQLSPGAPPQAPDLLYADGLRAYAAGAWAPAVALLREALRSQAALGRVRLDCGASCAADPGAALPAVLLGAPEPDSGPGPTQGSWERQLLRAALRRADCLTQCAARRLGPGGAARLRVGSALRDAFRRREPYNYLQRAYYQLKKLDLAAAAAHTFFVANPMHLQMREDMAKYRRMSGVRPQSFRDLETPPHWAAYDTGLELLGRQEAGLALPRLEEALQGSLAQMESCRADCEGPEEQQGAEEEEDGAASQGGLYEAIAGHWIQVLQCRQRCVGETATRPGRSFPVPDFLPNQLRRLHEAHAQVGNLSQAIENVLSVLLFYPEDEAAKRALNQYQAQLGEPRPGLGPREDIQRFILRSLGEKRQLYYAMEHLGTSFKDPDPWTPAALIPEALREKLREDQEKRPWDHEPVKPKPLTYWKDVLLLEGVTLTQDSRQLNGSERAVLDGLLTPAECGVLLQLAKDAAGAGARSGYRGRRSPHTPHERFEGLTVLKAAQLARAGTVGSQGAKLLLEVSERVRTLTQAYFSPERPLHLSFTHLVCRSAIEGEQEQRMDLSHPVHADNCVLDPDTGECWREPPAYTYRDYSGLLYLNDDFQGGDLFFTEPNALTVTARVRPRCGRLVAFSSGVENPHGVWAVTRGRRCALALWHTWAPEHREQEWIEAKELLQESQEEEEEEEEEMPSKDPSPEPPSRRHQRVQDKTGRAPRVREEL

SEQ ID NO: 9917 - protein, 85 aa, Homo Sapiens
MARVAWGLLWLLLGSAGAQYEKYSFRGFPPEDLMPLAAAYGHALEQYEGESWRESARYLEAALRLHRLLRDSEAFCHANCSGPAP

SEQ ID NO: 9918 - protein, 437 aa, Homo Sapiens
MARVAWGLLWLLLGSAGAQYEKYSFRGFPPEDLMPLAAAYGHALEQYEGESWRESARYLEAALRLHRLLRDSEAFCHANCSGPAPAAKPDPDGGRADEWACELRLFGRVLERAACLRRCKRTLPAFQVPYPPRQLLRDFQSRLPYQYLHYALFKANRLEKAVAAAYTFLQRNPKHELTAKYLNYYQGMLDVADESLTDLEAQPYEAVFLRAVKLYNSGDFRSSTEDMERALSEYLAVFARCLAGCEGAHEQVDFKDFYPAIADLFAESLQCKVDCEANLTPNVGGYFVDKFVATMYHYLQFAYYKLNDVRQAARSAASYMLFDPKDSVMQQNLVYYRFHRARWGLEEEDFQPREEAMLYHNQTAELRELLEFTHMYLQSDDEMELEETEPPLEPEDALSDAEFEGEGDYEEGMYADWWQEPDAKGDEAEAEPEPELA

SEQ ID NO: 9919 - protein, 437 aa, Homo Sapiens; identical to SEQ ID NO: 9918

SEQ ID NO: 9920 - protein, 221 aa, Homo Sapiens
  misc_feature (1)..(1): Xaa can be any naturally occurring amino acid
XKRTLPAFQVPYPPRQLLRDFQSRLPYQYLHYALFKANRLEKAVAAAYTFLQRNPKHELTAKYLNYYQGMLDVADESLTDLEAQPYEAVFLRAVKLYNSGDFRSSTEDMERALSEYLAVFARCLAGCEGAHEQVDFKDFYPAIAVNDVRQAARSAASYMLFDPKDSVMQQNLVYYRFHRARWGLEEEDFQPREEAMLYHNQTAELRELLEFTHMYLQSDDE

SEQ ID NO: 9921 - protein, 73 aa, Homo Sapiens
  misc_feature (1)..(1): Xaa can be any naturally occurring amino acid
XLRELLEFTHMYLQSDDEMELEETEPPLEPEDALSDAEFEGEGDYEEGMYADWWQEPDAKGDEAEAEPEPELA

SEQ ID NO: 9922 - protein, 534 aa, Homo Sapiens
MIWYILIIGILLPQSLAHPGFFTSIGQMTDLIHTEKDLVTSLKDYIKAEEDKLEQIKKWAEKLDRLTSTATKDPEGFVGHPVNAFKLMKRLNTEWSELENLVLKDMSDGFISNLTIQRQYFPNDEDQVGAAKALLRLQDTYNLDTDTISKGNLPGVKHKSFLTAEDCFELGKVAYTEADYYHTELWMEQALRQLDEGEISTIDKVSVLDYLSYAVYQQGDLDKALLLTKKLLELDPEHQRANGNLKYFEYIMAKEKDVNKSASDDQSDQKTTPKKKGVAVDYLPERQKYEMLCRGEGIKMTPRRQKKLFCRYHDGNRNPKFILAPAKQEDEWDKPRIIRFHDIISDAEIEIVKDLAKPRLSRATVHDPETGKLTTAQYRVSKSAWLSGYENPVVSRINMRIQDLTGLDVSTAEELQVANYGVGGQYEPHFDFARKDEPDAFKELGTGNRIATWLFYMSDVSAGGATVFPEVGASVWPKKGTAVFWYNLFASGEGDYSTRHAACPVLVGNKWVSNKWLHERGQEFRRPCTLSELE

SEQ ID NO: 9923 - protein, 534 aa, Homo Sapiens
MIWYILIIGILLPQSLAHPGFFTSIGQMTDLIHTEKDLVTSLKDYIKAEEDKLEQIKKWAEKLDRLTSTATKDPEGFVGHPVNAFKLMKRLNTEWSELENLVLKDMSDGFISNLTIQRQYFPNDEDQVGAAKALLRLQDTYNLDTDTISKGNLPGVKHKSFLTAEDCFELGKVAYTEADYYHTELWMEQALRQLDEGEISTIDKVSVLDYLSYAVYQQGDLDKALLLTKKLLELDPEHQRANGNLKYFEYIMAKEKDVNKSASDDQSDQKTTPKKKGVAVDYLPERQKYEMLCRGEGIKMTPRRQKKLFCRYHDGNRNPKFILAPAKQEDEWDKPRIIRFHDIISDAEIEIVKDLAKPRLRRATISNPITGDLETVHYRISKSAWLSGYENPVVSRINMRIQDLTGLDVSTAEELQVANYGVGGQYEPHFDFARKDEPDAFKELGTGNRIATWLFYMSDVSAGGATVFPEVGASVWPKKGTAVFWYNLFASGEGDYSTRHAACPVLVGNKWVSNKWLHERGQEFRRPCTLSELE

SEQ ID NO: 9924 - protein, 534 aa, Homo Sapiens; identical to SEQ ID NO: 9922

SEQ ID NO: 9925 - protein, 516 aa, Homo Sapiens
MIWYILIIGILLPQSLAHPGFFTSIGQMTDLIHTEKDLVTSLKDYIKAEEDKLEQIKKWAEKLDRLTSTATKDPEGFVGHPVNAFKLMKRLNTEWSELENLVLKDMSDGFISNLTIQRQYFPNDEDQVGAAKALLRLQDTYNLDTDTISKGNLPGVKHKSFLTAEDCFELGKVAYTEADYYHTELWMEQALRQLDEGEISTIDKVSVLDYLSYAVYQQGDLDKALLLTKKLLELDPEHQRANGNLKYFEYIMAKEKDVNKSASDDQSDQKTTPKKKGVAVDYLPERQKYEMLCRGEGIKMTPRRQKKLFCRYHDGNRNPKFILAPAKQEDEWDKPRIIRFHDIISDAEIEIVKDLAKPRLSRATVHDPETGKLTTAQYRVSKSAWLSGYENPVVSRINMRIQDLTGLDVSTAEELQKDEPDAFKELGTGNRIATWLFYMSDVSAGGATVFPEVGASVWPKKGTAVFWYNLFASGEGDYSTRHAACPVLVGNKWVSNKWLHERGQEFRRPCTLSELE

SEQ ID NO: 9926 - protein, 534 aa, Homo Sapiens; identical to SEQ ID NO: 9923

SEQ ID NO: 9927 - protein, 50 aa, Homo Sapiens
MKLWVSALLMAWFGVLSCVQAEFFTSIGHMTDLIYAEKELVQSLKEYILV

SEQ ID NO: 9928 - protein, 101 aa, Homo Sapiens
MKLWVSALLMAWFGVLSCVQAEFFTSIGHMTDLIYAEKELVQSLKEYILVEEAKLSKIKSWANKMEALTSKSAADAEGYLAHPVNAYKLVKRLNTDWPALE

SEQ ID NO: 9929 - protein, 114 aa, Homo Sapiens
MKLWVSALLMAWFGVLSCVQAEFFTSIGHMTDLIYAEKELVQSLKEYILVEEAKLSKIKSWANKMEALTSKSAADAEGYLAHPVNAYKLVKRLNTDWPALEDLVLQDSAAGFIA

SEQ ID NO: 9930 - protein, 147 aa, Homo Sapiens
MKLWVSALLMAWFGVLSCVQAEFFTSIGHMTDLIYAEKELVQSLKEYILVEEAKLSKIKSWANKMEALTSKSAADAEGYLAHPVNAYKLVKRLNTDWPALEDLVLQDSAAGFIANLSVQRQFFPTDEDEIGAAKALMRLQDTYRLDP

SEQ ID NO: 9931 - protein, 153 aa, Homo Sapiens
MKLWVSALLMAWFGVLSCVQAEFFTSIGHMTDLIYAEKELVQSLKEYILVEEAKLSKIKSWANKMEALTSKSAADAEGYLAHPVNAYKLVKRLNTDWPALEDLVLQDSAAGFIANLSVQRQFFPTDEDEIGAAKALMRLQDTYRLDPGTISRG

SEQ ID NO: 9932 - protein, 167 aa, Homo Sapiens
MKLWVSALLMAWFGVLSCVQAEFFTSIGHMTDLIYAEKELVQSLKEYILVEEAKLSKIKSWANKMEALTSKSAADAEGYLAHPVNAYKLVKRLNTDWPALEDLVLQDSAAGFIANLSVQRQFFPTDEDEIGAAKALMRLQDTYRLDPGTISRGELPGTKYQAMLSVD

SEQ ID NO: 9933 - protein, 184 aa, Homo Sapiens
MKLWVSALLMAWFGVLSCVQAEFFTSIGHMTDLIYAEKELVQSLKEYILVEEAKLSKIKSWANKMEALTSKSAADAEGYLAHPVNAYKLVKRLNTDWPALEDLVLQDSAAGFIANLSVQRQFFPTDEDEIGAAKALMRLQDTYRLDPGTISRGELPGTKYQAMLSVDDCFGMGRSAYNEGDYYH

SEQ ID NO: 9934 - protein, 204 aa, Homo Sapiens
MKLWVSALLMAWFGVLSCVQAEFFTSIGHMTDLIYAEKELVQSLKEYILVEEAKLSKIKSWANKMEALTSKSAADAEGYLAHPVNAYKLVKRLNTDWPALEDLVLQDSAAGFIANLSVQRQFFPTDEDEIGAAKALMRLQDTYRLDPGTISRGELPGTKYQAMLSVDDCFGMGRSAYNEGDYYHTVLWMEQVLKQLDAGEEATT

SEQ ID NO: 9935 - protein, 535 aa, Homo Sapiens
MKLWVSALLMAWFGVLSCVQAEFFTSIGHMTDLIYAEKELVQSLKEYILVEEAKLSKIKSWANKMEALTSKSAADAEGYLAHPVNAYKLVKRLNTDWPALEDLVLQDSAAGFIANLSVQRQFFPTDEDEIGAAKALMRLQDTYRLDPGTISRGELPGTKYQAMLSVDDCFGMGRSAYNEGDYYHTVLWMEQVLKQLDAGEEATTTKSQVLDYLSYAVFQLGDLHRALELTRRLLSLDPSHERAGGNLRYFEQLLEEEREKTLTNQTEAELATPEGIYERPVDYLPERDVYESLCRGEGVKLTPRRQKRLFCRYHHGNRAPQLLIAPFKEEDEWDSPHIVRYYDVMSDEEIERIKEIAKPKLARATVRDPKTGVLTVASYRVSKSSWLEEDDDPVVARVNRRMQHITGLTVKTAELLQVANYGVGGQYEPHFDFSRNDERDTFKHLGTGNRVATFLNYMSDVEAGGATVFPDLGAAIWPKKGTAVFWYNLLRSGEGDYRTRHAACPVLVGCKWVSNKWFHERGQEFLRPCGSTEVD

SEQ ID NO: 9936 - protein, 533 aa, Homo Sapiens
MKLWVSALLMAWFGVLSCVQAEFFTSIGHMTDLIYAEKELVQSLKEYILVEEAKLSKIKSWANKMEALTSKSAADAEGYLAHPVNAYKLVKRLNTDWPALEDLVLQDSAAGFIANLSVQRQFFPTDEDEIGAAKALMRLQDTYRLDPGTISRGELPGTKYQAMLSVDDCFGMGRSAYNEGDYYHTVLWMEQVLKQLDAGEEATTTKSQVLDYLSYAVFQLGDLHRALELTRRLLSLDPSHERAGGNLRYFEQLLEEEREKTLTNQTEAELATPEGIYERPVDYLPERDVYESLCRGEGVKLTPRRQKRLFCRYHHGNRAPQLLIAPFKEEDEWDSPHIVRYYDVMSDEEIERIKEIAKPKLARATVRDPKTGVLTVASYRVSKSSWLEEDDDPVVARVNRRMQHITGLTVKTAELLQVANYGVGGQYEPHFDFSRRPFDSGLKTEGNRLATFLNYMSDVEAGGATVFPDLGAAIWPKKGTAVFWYNLLRSGEGDYRTRHAACPVLVGCKWVSNKWFHERGQEFLRPCGSTEVD

SEQ ID NO: 9937 - protein, 533 aa, Homo Sapiens; identical to SEQ ID NO: 9936

SEQ ID NO: 9938 - protein, 533 aa, Homo Sapiens; identical to SEQ ID NO: 9936

SEQ ID NO: 9939 - protein, 535 aa, Homo Sapiens; identical to SEQ ID NO: 9935

SEQ ID NO: 9940 - protein, 535 aa, Homo Sapiens; identical to SEQ ID NO: 9935

SEQ ID NO: 9941 - protein, 236 aa, Homo Sapiens
MKRQLVTNSFLHHLLIGQKRPRNAPRTLPSVTMKLWVSALLMAWFGVLSCVQAEFFTSIGHMTDLIYAEKELVQSLKEYILVEEAKLSKIKSWANKMEALTSKSAADAEGYLAHPVNAYKLVKRLNTDWPALEDLVLQDSAAGFIANLSVQRQFFPTDEDEIGAAKALMRLQDTYRLDPGTISRGELPGTKYQAMLSVDDCFGMGRSAYNEGDYYHTVLWMEQVLKQLDAGEEATT

SEQ ID NO: 9942 - protein, 104 aa, Homo Sapiens
MGPGARLAALLAVLALGTGDPERAAARGDTFSALTSVARALAPERRLLGLLRRYLRGEEARLRDLTRFYDKVLSLHEDSTTPVANPLLAFTLIKRLQSDWRNVL

SEQ ID NO: 9943 - protein, 544 aa, Homo Sapiens
MGPGARLAALLAVLALGTGDPERAAARGDTFSALTSVARALAPERRLLGLLRRYLRGEEARLRDLTRFYDKVLSLHEDSTTPVANPLLAFTLIKRLQSDWRNVVHSLEASENIRALKDGYEKVEQDLPAFEDLEGAARALMRLQDVYMLNVKGLARGVFQRVTGSAITDLYSPKRLFSLTGDDCFQVGKVAYDMGDYYHAIPWLEEAVSLFRGSYGEWKTEDEASLEDALDHLAFAYFRAGNVSCALSLSREFLLYSPDNKRMARNVLKYERLLAESPNHVVAEAVIQRPNIPHLQTRDTYEGLCQTLGSQPTLYQIPSLYCSYETNSNAYLLLQPIRKEVIHLEPYIALYHDFVSDSEAQKIRELAEPWLQRSVVASGEKQLQVEYRISKSAWLKDTVDPKLVTLNHRIAALTGLDVRPPYAEYLQVVNYGIGGHYEPHFDHATSPSSPLYRMKSGNRVATFMIYLSSVEAGGATAFIYANLSVPVVRNAALFWWNLHRSGEGDSDTLHAGCPVLVGDKWVANKWIHEYGQEFRRPCSSSPED

SEQ ID NO: 9944 - protein, 604 aa, Homo Sapiens
MGPGARLAALLAVLALGTGDPERAAARGDTFSALTSVARALAPERRLLGLLRRYLRGEEARLRDLTRFYDKVLSLHEDSTTPVANPLLAFTLIKRLQSDWRNVVHSLEASENIRALKDGYEKVEQDLPAFEDLEGAARALMRLQDVYMLNVKGLARGVFQRVTGSAITDLYSPKRLFSLTGDDCFQVGKVAYDMGDYYHAIPWLEEAVSLFRGSYGEWKTEDEASLEDALDHLAFAYFRAGNVSCALSLSREFLLYSPDNKRMARNVLKYERLLAESPNHVVAEAVIQRPNIPHLQTRDTYEGLCQTLGSQPTLYQIPSLYCSYETNSNAYLLLQPIRKEVIHLEPYIALYHDFVSDSEAQKIRELAEPWLQRSVVASGEKQLQVEYRISKSAWLKDTVDPKLVTLNHRIAALTGLDVRPPYAEYLQVVNYGIGGHYEPHFDHATSPSSPLYRMKSGNRVATFMIYLSSVEAGGATAFIYANLSVPVVRHCFGGTCTGVVKGTVTHFMLAVLSWWEISGWPTSGYMSMDRNSADPAAPALKTELLAERSWWSPVAFQRSQEPKAGVGEEKAEQPPGRRPCQLCLCLANQRQGRGCYQGTLRMYI

SEQ ID NO: 9945 - protein, 257 aa, Homo Sapiens
MGPGARLAALLAVLALGTGDPERAAARGDTFSALTSVARALAPERRLLGLLRRYLRGEEARLRDLTRFYDKVLSLHEDSTTPVANPLLAFTLIKRLQSDWRNVVHSLEASENIRALKDGYEKVEQDLPAFEDLEGAARALMRLQDVYMLNVKGLARGVFQRVTGSAITDLYSPKRLFSLTGDDCFQVGKVAYDMGDYYHAIPWLEEAVSLFRGSYGEWKTEDEASLEDALDHLAFAYFRAGNVSCALSLSREFLLYR

SEQ ID NO: 9946 - protein, 61 aa, Homo Sapiens
SVPVVRNAALFWWNLHRSGEGDSDTLHAGCPVLVGDKWVANKWIHEYGQEFRRPCSSSPED

SEQ ID NO: 9947 - protein, 200 aa, Homo Sapiens
METRLPPRNIQDVESDSAKQFLQAAEAIDDIPFGITSNSDVFSKYQLDKDGVVLFKKFDEGRNNFEGEVTKENLLDFIKHNQLPLVIEFTEQTAPKIFGGEIKTHILLFLPKSVSDYDGKLSNFKTAAESFKGKILFIFIDSDHTDNQRILEFFGLKKEECPAVRLITLEEEMTKYKPESEELTAERITEFCHRFLEGKI

SEQ ID NO: 9948 - protein, 117 aa, Homo Sapiens
METRLPPRNIQFDEGRNNFEGEVTKENLLDFIKHNQLPLVIEFTEQTAPKIFGGEIKTHILLFLPKSVSDYDGKLSNFKTAAESFKGKILFIFIDSDHTDNQRILEFFGLKKEECPA

SEQ ID NO: 9949 - protein, 54 aa, Homo Sapiens
MLRRALLCLAVAALVRADAPEEEDHVLVLRKSNFAEALAAHKCPLVWPLQGSGP

SEQ ID NO: 9950 - protein, 156 aa, Homo Sapiens
MLRRALLCLAVAALVRADAPEEEDHVLVLRKSNFAEALAAHKYLLVDATEESDLAQQYGVRGYPTIKFFRNGDTASPKEYTAGREADDIVNWLKKRTGPAATTLPDGAAAESLVESSEVAVIGFFKDVESDSAKQFLQAAEAIDDIPFGITSNSDV

SEQ ID NO: 9951 - protein, 208 aa, Homo Sapiens
MLRRALLCLAVAALVRADAPEEEDHVLVLRKSNFAEALAAHKYLLVEFSGREADDIVNWLKKRTGPAATTLPDGAAAESLVESSEVAVIGFFKDVESDSAKQFLQAAEAIDDIPFGITSNSDVFSKYQLDKDGVVLFKKFDEGRNNFEGEVTKENLLDFIKHNQLPLVIEFTEQTAPKIFGGEIKTHILLFLPKSVSDYDGKLSNFKT

SEQ ID NO: 9952 - protein, 148 aa, Homo Sapiens
MLRRALLCLAVAALVRADAPEEEDHVLVLRKSNFAEALAAHKYLLVEFYAPWCGHCKALAPEYAKAAGKLKAEGSEIRLAKMDSTANEVEAVKVHSFPTLKFFPASADRTVIDYNGERTLDGFKKFLESGGQDGAGDDDDLEDLEEAE

SEQ ID NO: 9953 - protein, 188 aa, Homo Sapiens
MLRRALLCLAVAALVRADAPEEEDHVLVLRKSNFAEALAAHKYLLVEFYAPWCGHCKALAPEYAKAAGKLKAEGSEIRLAKVDATEESDLAQQYGVRGYPTIKFFRNGDTASPKEYTAAESLVESSEVAVIGFFKDVESDSAKQFLQAAEAIDDIPFGITSNSDVFSKYQLDKDGVVLFKKFDEGRNN

SEQ ID NO: 9954 - protein, 508 aa, Homo Sapiens
MLRRALLCLAVAALVRADAPEEEDHVLVLRKSNFAEALAAHKYLLVEFYAPWCGHCKALAPEYAKAAGKLKAEGSEIRLAKVDATEESDLAQQYGVRGYPTIKFFRNGDTASPKEYTAGREADDIVNWLKKRTGPAATTLPDGAAAESLVESSEVAVIGFFKDVESDSAKQFLQAAEAIDDIPFGITSNSDVFSKYQLDKDGVVLFKKFDEGRNNFEGEVTKENLLDFIKHNQLPLVIEFTEQTAPKIFGGEIKTHILLFLPKSVSDYDGKLSNFKTAAESFKGKILFIFIDSDHTDNQRILEFFGLKKEECPAVRLITLEEEMTKYKPESEELTAERITEFCHRFLEGKIKPHLMSQELPEDWDKQPVKVLVGKNFEDVAFDEKKNVFVEFYAPWCGHCKQLAPIWDKLGETYKDHENIVIAKMDSTANEVEAVKVHSFPTLKFFPASADRTVIDYNGERTLDGFKKFLESGGQDGAGDDDDLEDLEEAEEPDMEEDDDQKAVKDEL

SEQ ID NO: 9955 - protein, 464 aa, Homo Sapiens
MLRRALLCLAVAALVRADAPEEEDHVLVLRKSNFAEALAAHKYLLVEFYAPWCGHCKALAPEYAKAAGKLKAEGSEIRLAKVDATEESDLAQQYGVRGYPTIKFFRNGDTASPKEYTGDVESDSAKQFLQAAEAIDDIPFGITSNSDVFSKYQLDKDGVVLFKKFDEGRNNFEGEVTKENLLDFIKHNQLPLVIEFTEQTAPKIFGGEIKTHILLFLPKSVSDYDGKLSNFKTAAESFKGKILFIFIDSDHTDNQRILEFFGLKKEECPAVRLITLEEEMTKYKPESEELTAERITEFCHRFLEGKIKPHLMSQELPEDWDKQPVKVLVGKNFEDVAFDEKKNVFVEFYAPWCGHCKQLAPIWDKLGETYKDHENIVIAKMDSTANEVEAVKVHSFPTLKFFPASADRTVIDYNGERTLDGFKKFLESGGQDGAGDDDDLEDLEEAEEPDMEEDDDQKAVKDEL

SEQ ID NO: 9956 - protein, 166 aa, Homo Sapiens
MLRRALLCLAVAALVRADAPEEEDHVLVLRKSNFAEALAAHKYLLVEFYAPWCGHCKALAPEYAKAAGKLKAEGSEIRLAKVDATEESDLAQQYGVRGYPTIKFFRNGDTASPKEYTGFDEGRNNFEGEVTKENLLDFIKHNQLPLVIEFTEQTAPKIFGGEIKTH

SEQ ID NO: 9957 - protein, 106 aa, Homo Sapiens
MLRRALLCLAVAALVRADAPEEEDHVLVLRKSNFAEALAAHKYLLVEFYAPWCGHCKALAPEYAKAAGKLKAEGSEIRPPRRSLSPVWEGRSRTGHGHSVPPAVSP

SEQ ID NO: 9958 - protein, 274 aa, Homo Sapiens
  misc_feature (1)..(1): Xaa can be any naturally occurring amino acid
XFEGEVTKENLLDFIKHNQLPLVIEFTEQSVSDYDGKLSNFKTAAESFKGKILFIFIDSDHTDNQRILEFFGLKKEECPAVRLITLEEEMTKYKPESEELTAERITEFCHRFLEGKIKPHLMSQELPEDWDKQPVKVLVGKNFEDVAFDEKKNVFVEFYAPWCGHCKQLAPIWDKLGETYKDHENIVIAKMDSTANEVEAVKVHSFPTLKFFPASADRTVIDYNGERTLDGFKKFLESGGQDGAGDDDDLEDLEEAEEPDMEEDDDQKAVKDEL

SEQ ID NO: 9959 - protein, 132 aa, Homo Sapiens
LMATLKAPLRVHITSLLPTPEDNLEIVLHRWENNSCVEKKVLGEKTENPKKFKINYTVANEATLLDTDYDNFLFLCLQDTTTPIQSMMCQYLARVLVEDDEIMQGFIRAFRPLPRHLWYLLDLKQMEEPCRF

SEQ ID NO: 9960 - protein, 143 aa, Homo Sapiens
MLCLLLTLGVALVCGVPAMDIPQTKQDLELPKLAGTWHSMAMATNNISLMATLKAPLRVHITSLLPTPEDNLEIVLHRWENNSCVEKKVLGEKTENPKKFKINSRVLVEDDEIMQGFIRAFRPLPRHLWYLLDLKQMEEPCRF

SEQ ID NO: 9961 - protein, 180 aa, Homo Sapiens
MLCLLLTLGVALVCGVPAMDIPQTKQDLELPKLAGTWHSMAMATNNISLMATLKAPLRVHITSLLPTPEDNLEIVLHRWENNSCVEKKVLGEKTENPKKFKINYTVANEATLLDTDYDNFLFLCLQDTTTPIQSMMCQYLARVLVEDDEIMQGFIRAFRPLPRHLWYLLDLKQMEEPCRF

SEQ ID NO: 9962 - protein, 180 aa, Homo Sapiens; identical to SEQ ID NO: 9961

SEQ ID NO: 9963 - protein, 180 aa, Homo Sapiens; identical to SEQ ID NO: 9961

SEQ ID NO: 9964 - protein, 169 aa, Homo Sapiens
MLCLLLTLGVALVCGVPAMDIPQTKQDLELPKLAGTWHSMAMATNNISLMATLKAPLRVHITSLLPTPEDNLEIVLHRWENNSCVEKKVLGEKTENPKKFKINYTVANEATLLDTDYDNFLFLCLQDTTTPIQSMMCQYLESWWRTMRSCRDSSGLSGPCPGTYGTCWT

SEQ ID NO: 9965 - protein, 33 aa, Homo Sapiens
  misc_feature (1)..(1): Xaa can be any naturally occurring amino acid
XEIMQGFIRAFRPLPRHLWYLLDLKQMEEPCRF

SEQ ID NO: 9966 - protein, 126 aa, Homo Sapiens
  misc_feature (1)..(1): Xaa can be any naturally occurring amino acid
XPLRVHITSLLPTPEDNLEIVLHRWENNSCVEKKVLGEKTENPKKFKINYTVANEATLLDTDYDNFLFLCLQDTTTPIQSMMCQYLARVLVEDDEIMQGFIRAFRPLPRHLWYLLDLKQMEEPCRF

SEQ ID NO: 9967 - protein, 131 aa, Homo Sapiens
  misc_feature (1)..(1): Xaa can be any naturally occurring amino acid
XVPAMDIPQTKQDLELPKAPLRVHITSLLPTPEDNLEIVLHRWENNSCVEKKVLGEKTENPKKFKINCKASGAPQLSWKPQGPRTDPASSTARVLVEDDEIMQGFIRAFRPLPRHLWYLLDLKQMEEPCRF

SEQ ID NO: 9968 - protein, 25 aa, Homo Sapiens
MAGRVPSLLVLLVFPSSCLAFRSPL

SEQ ID NO: 9969 - protein, 28 aa, Homo Sapiens
MAGRVPSLLVLLVFPSSCLAFRSPLSVF

SEQ ID NO: 9970 - protein, 29 aa, Homo Sapiens
MAGRVPSLLVLLVFPSSCLAFRSPLSVFK

SEQ ID NO: 9971 - protein, 42 aa, Homo Sapiens
MAGRVPSLLVLLVFPSSCLAFRSPLSVFKRFKETTRPFSNEC

SEQ ID NO: 9972 - protein, 53 aa, Homo Sapiens
MAGRVPSLLVLLVFPSSCLAFRSPLSVFKRFKETTRPFSNECLGTTRPVVPID

SEQ ID NO: 9973 - protein, 68 aa, Homo Sapiens
MAGRVPSLLVLLVFPSSCLAFRSPLSVFKRFKETTRPFSNECLGTTRPVVPIDSSDFALDIRMPGVTP

SEQ ID NO: 9974 - protein, 175 aa, Homo Sapiens
MAGRVPSLLVLLVFPSSCLAFRSPLSVFKRFKETTRPFSNECLGTTRPVVPIDSSDFALDIRMPGVTPKQLTSSLEPAWILSITCYFLDAICLHPLEVTGFVMKEPVQIKPIFCMPGREMLPLPGSPKVLDSELEERLEVNTLYYRYTMGILVLLEIITRTVLVCPYTSHVCHSL

SEQ ID NO: 9975 - protein, 974 aa, Homo Sapiens
MAGRVPSLLVLLVFPSSCLAFRSPLSVFKRFKETTRPFSNECLGTTRPVVPIDSSDFALDIRMPGVTPKQSDTYFCMSMRIPVDEEAFVIDFKPRASMDTVHHMLLFGCNMPSSTGSYWFCDEGTCTDKANILYAWARNAPPTRLPKGVGFRVGGETGSKYFVLQVHYGDISAFRDNNKDCSGVSLHLTRLPQPLIAGMYLMMSVDTVIPAGEKVVNSDISCHYKNYPMHVFAYRVHTHHLGKVVSGYRVRNGQWTLIGRQSPQLPQAFYPVGHPVDVSFGDLLAARCVFTGEGRTEATHIGGTSSDEMCNLYIMYYMEAKHAVSFMTCTQNVAPDMFRTIPPEANIPIPVKSDMVMMHEHHKETEYKDKIPLLQQPKREEEEVLDQGDFYSLLSKLLGEREDVVHVHKYNPTEKAESESDLVAEIANVVQKKDLGRSDAREGAEHERGNAILVRDRIHKFHRLVSTLRPPESRVFSLQQPPPGEGTWEPEHTGDFHMEEALDWPGVYLLPGQVSGVALDPKNNLVIFHRGDHVWDGNSFDSKFVYQQIGLGPIEEDTILVIDPNNAAVLQSSGKNLFYLPHGLSIDKDGNYWVTDVALHQVFKLDPNNKEGPVLILGRSMQPGSDQNHFCQPTDVAVDPGTGAIYVSDGYCNSRIVQFSPSGKFITQWGEESSGSSPLPGQFTVPHSLALVPLLGQLCVADRENGRIQCFKTDTKEFVREIKHSSFGRNVFAISYIPGLLFAVNGKPHFGDQEPVQGFVMNFSNGEIIDIFKPVRKHFDMPHDIVASEDGTVYIGDAHTNTVWKFTLTEKLEHRSVKKAGIEVQEIKEAEAVVETKMENKPTSSELQKMQEKQKLIKEPGSGVPVVLITTLLVIPVVVLLAIAIFIRWKKSRAFGADSEHKLETSSGRVLGRFRGKGSGGLNLGNFFASRKGYSRKGFDRLSTEGSDQEKEDDGSESEEEYSAPLPALAPSSS

SEQ ID NO: 9976 - protein, 887 aa, Homo Sapiens
MAGRVPSLLVLLVFPSSCLAFRSPLSVFKRFKETTRPFSNECLGTTRPVVPIDSSDFALDIRMPGVTPKQSDTYFCMSMRIPVDEEAFVIDFKPRASMDTVHHMLLFGCNMPSSTGSYWFCDEGTCTDKANILYAWARNAPPTRLPKGVGFRVGGETGSKYFVLQVHYGDISAFRDNNKDCSGVSLHLTRLPQPLIAGMYLMMSVDTVIPAGEKVVNSDISCHYKNYPMHVFAYRVHTHHLGKVVSGYRVRNGQWTLIGRQSPQLPQAFYPVGHPVDVSFGDLLAARCVFTGEGRTEATHIGGTSSDEMCNLYIMYYMEAKHAVSFMTCTQNVAPDMFRTIPPEANIPIPVKSDMVMMHEHHKETEYKDKIPLLQQPKREEEEVLDQGDFYSLLSKLLGEREDVVHVHKYNPTEKAESESDLVAEIANVVQKKDLGRSDAREGAEHERGNAILVRDRIHKFHRLVSTLRPPESRVFSLQQPPPGEGTWEPEHTGDFHMEEALDWPGVYLLPGQVSGVALDPKNNLVIFHRGDHVWDGNSFDSKFVYQQIGLGPIEEDTILVIDPNNAAVLQSSGKNLFYLPHGLSIDKDGNYWVTDVALHQVFKLDPNNKEGPVLILGRSMQPGSDQNHFCQPTDVAVDPGTGAIYVSDGYCNSRIVQFSPSGKFITQWGEESSGSSPLPGQFTVPHSLALVPLLGQLCVADRENGRIQCFKTDTKEFVREIKHSSFGRNVFAISYIPGLLFAVNGKPHFGDQEPVQGFVMNFSNGEIIDIFKPVRKHFDMPHDIVASEDGTVYIGDAHTNTVWKFTLTEKLEHRSVKKAGIEVQEIKGKGSGGLNLGNFFASRKGYSRKGFDRLSTEGSDQEKEDDGSESEEEYSAPLPALAPSSS

SEQ ID NO: 9977 - protein, 866 aa, Homo Sapiens
MAGRVPSLLVLLVFPSSCLAFRSPLSVFKRFKETTRPFSNECLGTTRPVVPIDSSDFALDIRMPGVTPKQSDTYFCMSMRIPVDEEAFVIDFKPRASMDTVHHMLLFGCNMPSSTGSYWFCDEGTCTDKANILYAWARNAPPTRLPKGVGFRVGGETGSKYFVLQVHYGDISAFRDNNKDCSGVSLHLTRLPQPLIAGMYLMMSVDTVIPAGEKVVNSDISCHYKNYPMHVFAYRVHTHHLGKVVSGYRVRNGQWTLIGRQSPQLPQAFYPVGHPVDVSFGDLLAARCVFTGEGRTEATHIGGTSSDEMCNLYIMYYMEAKHAVSFMTCTQNVAPDMFRTIPPEANIPIPVKSDMVMMHEHHKETEYKDKIPLLQQPKREEEEVLDQDFHMEEALDWPGVYLLPGQVSGVALDPKNNLVIFHRGDHVWDGNSFDSKFVYQQIGLGPIEEDTILVIDPNNAAVLQSSGKNLFYLPHGLSIDKDGNYWVTDVALHQVFKLDPNNKEGPVLILGRSMQPGSDQNHFCQPTDVAVDPGTGAIYVSDGYCNSRIVQFSPSGKFITQWGEESSGSSPLPGQFTVPHSLALVPLLGQLCVADRENGRIQCFKTDTKEFVREIKHSSFGRNVFAISYIPGLLFAVNGKPHFGDQEPVQGFVMNFSNGEIIDIFKPVRKHFDMPHDIVASEDGTVYIGDAHTNTVWKFTLTEKLEHRSVKKAGIEVQEIKEAEAVVETKMENKPTSSELQKMQEKQKLIKEPGSGVPVVLITTLLVIPVVVLLAIAIFIRWKKSRAFGDSEHKLETSSGRVLGRFRGKGSGGLNLGNFFASRKGYSRKGFDRLSTEGSDQEKEDDGSESEEEYSAPLPALAPSSS

SEQ ID NO: 9978 - protein, 905 aa, Homo Sapiens
MAGRVPSLLVLLVFPSSCLAFRSPLSVFKRFKETTRPFSNECLGTTRPVVPIDSSDFALDIRMPGVTPKQSDTYFCMSMRIPVDEEAFVIDFKPRASMDTVHHMLLFGCNMPSSTGSYWFCDEGTCTDKANILYAWARNAPPTRLPKGVGFRVGGETGSKYFVLQVHYGDISAFRDNNKDCSGVSLHLTRLPQPLIAGMYLMMSVDTVIPAGEKVVNSDISCHYKNYPMHVFAYRVHTHHLGKVVSGYRVRNGQWTLIGRQSPQLPQAFYPVGHPVDVSFGDLLAARCVFTGEGRTEATHIGGTSSDEMCNLYIMYYMEAKHAVSFMTCTQNVAPDMFRTIPPEANIPIPVKSDMVMMHEHHKETEYKDKIPLLQQPKREEEEVLDQGDFYSLLSKLLGEREDVVHVHKYNPTEKAESESDLVAEIANVVQKKDLGRSDAREGAEHERGNAILVRDRIHKFHRLVSTLRPPESRVFSLQQPPPGEGTWEPEHTGDFHMEEALDWPGVYLLPGQVSGVALDPKNNLVIFHRGDHVWDGNSFDSKFVYQQIGLGPIEEDTILVIDPNNAAVLQSSGKNLFYLPHGLSIDKDGNYWVTDVALHQVFKLDPNNKEGPVLILGRSMQPGSDQNHFCQPTDVAVDPGTGAIYVSDGYCNSRIVQFSPSGKFITQWGEESSGSSPLPGQFTVPHSLALVPLLGQLCVADRENGRIQCFKTDTKEFVREIKHSSFGRNVFAISYIPGLLFAVNGKPHFGDQEPVQGFVMNFSNGEIIDIFKPVRKHFDMPHDIVASEDGTVYIGDAHTNTVWKFTLTEKLEHRSVKKAGIEVQEIKDSEHKLETSSGRVLGRFRGKGSGGLNLGNFFASRKGYSRKGFDRLSTEGSDQEKEDDGSESEEEYSAPLPALAPSSS

SEQ ID NO: 9979 - protein, 973 aa, Homo Sapiens [sequence omitted]

SEQ ID NO: 9980 - protein, 679 aa, Homo Sapiens
  misc_feature (1)..(1): Xaa can be any naturally occurring amino acid
XMHVFAYRVHTHHLGKVVSGYRVRNGQWTLIGRQSPQLPQAFYPVGHPVDVSFGDLLAARCVFTGEGRTEATHIGGTSSDEMCNLYIMYYMEAKHAVSFMTCTQNVAPDMFRTIPPEANIPIPVKSDMVMMHEHHKETEYKDKIPLLQQPKREEEEVLDQGDFYSLLSKLLGEREDVVHVHKYNPTEKAESESDLVAEIANVVQKKDLGRSDAREGAEHERGNAILVRDRIHKFHRLVSTLRPPESRVFSLQQPPPGEGTWEPEHTGDFHMEEALDWPGVYLLPGQVSGVALDPKNNLVIFHRGDHVWDGNSFDSKFVYQQIGLGPIEEDTILVIDPNNAAVLQSSGKNLFYLPHGLSIDKDGNYWVTDVALHQVFKLDPNNKEGPVLILGRSMQPGSDQNHFCQPTDVAVDPGTGAIYVSDGYCNSRIVQFSPSGKFITQWGEESSGSSPLPGQFTVPHSLALVPLLGQLCVADRENGRIQCFKTDTKEFVREIKHSSFGRNVFAISYIPGLLFAVNGKPHFGDQEPVQGFVMNFSNGEIIDIFKPVRKHFDMPHDIVASEDGTVYIGDAHTNTVWKFTLTEKLEHRSVKKAGIEVQEIKADSEHKLETSSGRVLGRFRGKGSGGLNLGNFFASRKGYSRKGFDRLSTEGSDQEKEDDGSESEEEYSAPLPALAPSSS

SEQ ID NO: 9981 - protein, 250 aa, Homo Sapiens
  misc_feature (1)..(1): Xaa can be any naturally occurring amino acid
XRIQCFKTDTKEFVREIKHSSFGRNVFAISYIPGLLFAVNGKPHFGDQEPVQGFVMNFSNGEIIDIFKPVRKHFDMPHDIVASEDGTVYIGDAHTNTVWKFTLTEKLEHRSVKKAGIEVQEIKEAEAVVETKMENKPTSSELQKMQEKQKLIKEPGSGVPVVLITTLLVIPVVVLLAIAIFIRWKKSRAFGGKGSGGLNLGNFFASRKGYSRKGFDRLSTEGSDQEKEDDGSESEEEYSAPLPALAPSSS

SEQ ID NO: 9982 - protein, 675 aa, Homo Sapiens
MCRECCEYDQIECVCPGKREVVGYTIPCCRNEENECDSCLIHPGCTIFENCKSCRNGSWGGTLDDFYVKGFYCAECRAGWYGGDCMRCGQVLRAPKGQILLESYPLNAHCEWTIHAKPGFVIQLRFVMLSLEFDYMCQYDYVEVRDGDNRDGQIIKRVCGNERPAPIQSIGSSLHVLFHSDGSKNFDGFHAIYEEITACSSSPCFHDGTCVLDKAGSYKCACLAGYTGQRCENLLEAGKSKIKASEDSLSVLEERNCSDPGGPVNGYQKITGGPGLINGRHAKIGTVVSFFCNNSYVLSGNEKRTCQQNGEWSGKQPICIKACREPKISDLVRRRVLPMQVQSRETPLHQLYSAAFSKQKLQSAPTKKPALPFGDLPMGYQHLHTQLQYECISPFYRRLGSSRRTCLRTGKWSGRAPSCIPICGKIENITAPKTQGLRWPWQAAIYRRTSGVHDGSLHKGAWFLVCSGALVNERTVVVAAHCVTDLGKVTMIKTADLKVVLGKFYRDDDRDEKTIQSLQISAIILHPNYDPILLDADIAILKLLDKARISTRVQPICLAASRDLSTSFQESHITVAGWNVLADVRSPGFKNDTLRSGVVSVVDSLLCEEQHEDHGIPVSVTDNMFCASWEPTAPSDICTAETGGIAAVSFPGRASPEPRWHLMGLVSWSYDKTCS

SEQ ID NO: 9983 - protein, 680 aa, Homo Sapiens
MCRECCEYDQIECVCPGKREVVGYTIPCCRNEENECDSCLIHPGCTIFENCKSCRNGSWGGTLDDFYVKGFYCAECRAGWYGGDCMRCGQVLRAPKGQILLESYPLNAHCEWTIHAKPGFVIQLRFVMLSLEFDYMCQYDYVEVRDGDNRDGQIIKRVCGNERPAPIQSIGSSLHVLFHSDGSKNFDGFHAIYEEITACSSSPCFHDGTCVLDKAGSYKCACLAGYTGQRCENLLEERNCSDPGGPVNGYQKITGGPGLINGRHAKIGTVVSFFCNNSYVLSGNEKRTCQQNGEWSGKQPICIKACREPKISDLVRRRVLPMQVQSRETPLHQLYSAAFSKQKLQSAPTKKPALPFGDLPMGYQHLHTQLQYECISPFYRRLGSSRRTCLRTGKWSGRAPSCIPICGKIENITAPKTQGLRWPWQAAIYRRTSGVHDGSLHKGAWFLVCSGALVNERTVVVAAHCVTDLGKVTMIKTADLKVVLGKFYRDDDRDEKTIQSLQISAIILHPNYDPILLDADIAILKLLDKARISTRVQPICLAASRDLSTSFQESHITVAGWNVLADVRSPGFKNDTLRSGVVSVVDSLLCEEQHEDHGIPVSVTDNMFCASWEPTAPSDICTAETGGIAAVSFPGRASPEPRWHLMGLVSWSYDKTCSHRLSTAFTKVLPFKDWIERNMK

SEQ ID NO: 9984 - protein, 178 aa, Homo Sapiens
MELGCWTQLGLTFLQLLLISSLPREYTVINEACPGAEWNIMCRECCEYDQIECVCPGKREVVGYTIPCCRNEENECDSCLIHPGCTIFENCKSCRNGSWGGTLDDFYVKGFYCAECRAGWYGGDCMPCSSSPCFHDGTCVLDKAGSYKCACLAGYTGQRCENLLEERNCSDPGGPVNG

SEQ ID NO: 9985 - protein, 609 aa, Homo Sapiens
MELGCWTQLGLTFLQLLLISSLPREYTVINEACPGAEWNIMCRECCEYDQIECVCPGKREVVGYTIPCCRNEENECDSCLIHPGCTIFENCKSCRNGSWGGTLDDFYVKGFYCAECRAGWYGGDCMPCSSSPCFHDGTCVLDKAGSYKCACLAGYTGQRCENLLEERNCSDPGGPVNGYQKITGGPGLINGRHAKIGTVVSFFCNNSYVLSGNEKRTCQQNGEWSGKQPICIKACREPKISDLVRRRVLPMQVQSRETPLHQLYSAAFSKQKLQSAPTKKPALPFGDLPMGYQHLHTQLQYECISPFYRRLGSSRRTCLRTGKWSGRAPSCIPICGKIENITAPKTQGLRWPWQAAIYRRTSGVHDGSLHKGAWFLVCSGALVNERTVVVAAHCVTDLGKVTMIKTADLKVVLGKFYRDDDRDEKTIQSLQISAIILHPNYDPILLDADIAILKLLDKARISTRVQPICLAASRDLSTSFQESHITVAGWNVLADVRSPGFKNDTLRSGVVSVVDSLLCEEQHEDHGIPVSVTDNMFCASWEPTAPSDICTAETGGIAAVSFPGRASPEPRWHLMGLVSWSYDKTCSHRLSTAFTKVLPFKDWIERNMK

SEQ ID NO: 9986 - protein, 737 aa, Homo Sapiens
MELGCWTQLGLTFLQLLLISSLPREYTVINEACPGAEWNIMCRECCEYDQIECVCPGKREVVGYTIPCCRNEENECDSCLIHPGCTIFENCKSCRNGSWGGTLDDFYVKGFYCAECRAGWYGGDCMRCGQVLRAPKGQILLESYPLNAHCEWTIHAKPGFVIQLRFVMLSLEFDYMCQYDYVEVRDGDNRDGQIIKRVCGNERPAPIQSIGSSLHVLFHSDGSKNFDGFHAIYEEITACSSSPCFHDGTCVLDKAGSYKCACLAGYTGQRCENLLEAGKSKIKASEDSLSVLEERNCSDPGGPVNGYQKITGGPGLINGRHAKIGTVVSFFCNNSYVLSGNEKRTCQQNGEWSGKQPICIKACREPKISDLVRRRVLPMQVQSRETPLHQLYSAAFSKQKLQSAPTKKPALPFGDLPMGYQHLHTQLQYECISPFYRRLGSSRRTCLRTGKWSGRAPSCIPICGKIENITAPKTQGLRWPWQAAIYRRTSGVHDGSLHKGAWFLVCSGALVNERTVVVAAHCVTDLGKVTMIKTADLKVVLGKFYRDDDRDEKTIQSLQISAIILHPNYDPILLDADIAILKLLDKARISTRVQPICLAASRDLSTSFQESHITVAGWNVLADVRSPGFKNDTLRSGVVSVVDSLLCEEQHEDHGIPVSVTDNMFCASWEPTAPSDICTAETGGIAAVSFPGRASPEPRWHLMGLVSWSYDKTCSHRLSTAFTKVLPFKDWIERNMK

SEQ ID NO: 9987 - protein, 720 aa, Homo Sapiens
MELGCWTQLGLTFLQLLLISSLPREYTVINEACPGAEWNIMCRECCEYDQIECVCPGKREVVGYTIPCCRNEENECDSCLIHPGCTIFENCKSCRNGSWGGTLDDFYVKGFYCAECRAGWYGGDCMRCGQVLRAPKGQILLESYPLNAHCEWTIHAKPGFVIQLRFVMLSLEFDYMCQYDYVEVRDGDNRDGQIIKRVCGNERPAPIQSIGSSLHVLFHSDGSKNFDGFHAIYEEITACSSSPCFHDGTCVLDKAGSYKCACLAGYTGQRCENLLEERNCSDPGGPVNGYQKITGGPGLINGRHAKIGTVVSFFCNNSYVLSGNEKRTCQQNGEWSGKQPICIKACREPKISDLVRRRVLPMQVQSRETPLHQLYSAAFSKQKLQSAPTKKPALPFGDLPMGYQHLHTQLQYECISPFYRRLGSSRRTCLRTGKWSGRAPSCIPICGKIENITAPKTQGLRWPWQAAIYRRTSGVHDGSLHKGAWFLVCSGALVNERTVVVAAHCVTDLGKVTMIKTADLKVVLGKFYRDDDRDEKTIQSLQISAIILHPNYDPILLDADIAILKLLDKARISTRVQPICLAASRDLSTSFQESHITVAGWNVLADVRSPGFKNDTLRSGVVSVVDSLLCEEQHEDHGIPVSVTDNMFCASWEPTAPSDICTAETGGIAAVSFPGRASPEPRWHLMGLVSWSYDKTCSHRLSTAFTKVLPFKDWIERNMK

SEQ ID NO: 9988 - protein, 416 aa, Homo Sapiens
MLKLAPWCLSFVTTPMFLVAMRKELASRMEWSGKQPICIKACREPKISDLVRRRVLPMQVQSRETPLHQLYSAAFSKQKLQSAPTKKPALPFGDLPMGYQHLHTQLQYECISPFYRRLGSSRRTCLRTGKWSGRAPSCIPICGKIENITAPKTQGLRWPWQAAIYRRTSGVHDGSLHKGAWFLVCSGALVNERTVVVAAHCVTDLGKVTMIKTADLKVVLGKFYRDDDRDEKTIQSLQISAIILHPNYDPILLDADIAILKLLDKARISTRVQPICLAASRDLSTSFQESHITVAGWNVLADVRSPGFKNDTLRSGVVSVVDSLLCEEQHEDHGIPVSVTDNMFCASWEPTAPSDICTAETGGIAAVSFPGRASPEPRWHLMGLVSWSYDKTCSHRLSTAFTKVLPFKDWIERNMK

SEQ ID NO: 9989 - protein, 1251 aa, Homo Sapiens
MRLLLLVPLLLAPAPGSSAPKVRRQSDTWGPWSQWSPCSRTCGGGVSFRERPCYSQRRDGGSSCVGPARSHRSCRTESCPDGARDFRAEQCAEFDGAEFQGRRYRWLPYYSAPNKCELNCIPKGENFYYKHREAVVDGTPCEPGKRDVCVDGSCRVVGCDHELDSSKQEDKCLRCGGDGTTCYPVAGTFDANDLSRAVKNVRGEYYLNGHWTIEAARALPAASTILHYERGAEGDLAPERLHARGPTSEPLVIELISQEPNPGVHYEYHLPLRRPSPGFSWSHGSWSDCSAECGGGHQSRLVFCTIDHEAYPDHMCQRQPRPADRRSCNLHPCPETKRWKAGPWAPCSASCGGGSQSRSVYCISSDGAGIQEAVEEAECAGLPGKPPAIQACNLQRCAAWSPEPWGECSVSCGVGVRKRSVTCRGERGSLLHTAACSLEDRPPLTEPCVHEDCPLLSDQAWHVGTWGLCSKSCSSGTRRRQVICAIGPPSHCGSLQHSKPVDVEPCNTQPCHLPQEVPSMQDVHTPASNPWMPLGPQESPASDSRGQWWAAQEHPSARGDHRGERGDPRGDQGTHLSALGPAPSLQQPPYQQPLRSGSGPHDCRHSPHGCCPDGHTASLGPQWQGCPGAPCQQSRYGCCPDRVSVAEGPHHAGCTKSYGGDSTGGMPRSRAVASTVHNTHQPQAQQNEPSECRGSQFGCCYDNVATAAGPLGEGCVGQPSHAYPVRCLLPSAHGSCADWAARWYFVASVGQCNRFWYGGCHGNANNFASEQECMSSCQGSLHGPRRPQPGASGRSTHTDGGGSSPAGEQEPSQHRTGAAVQRKPWPSGGLWRQDQQPGPGEAPHTQAFGEWPWGQELGSRAPGLGGDAGSPAPPFHSSSYRISLAGVEPSLVQAALGQLVRLSCSDDTAPESQAAWQKDGQPISSDRHRLQFDGSLIIHPLQAEDAGTYSCGSTRPGRDSQKIQLRIIGGDMAVLSEAELSRFPQPRDPAQDFGQAGAAGPLGAIPSSHPQPANRLRLDQNQPRVVDASPGQRIRMTCRAEGFPPPAIEWQRDGQPVSSPRHQLQPDGSLVISRVAVEDGGFYTCVAFNGQDRDQRWVQLRVLGELTISGLPPTVTVPEGDTARLLCVVAGESVNIRWSRNGLPVQADGHRVHQSPDGTLLIYNLRARDEGSYTCSAYQGSQAVSRSTEVKVVSPAPTAQPRDPGRDCVDQPELANCDLILQAQLCGNEYYSSFCCASCSRFQPHAQPIWQ

SEQ ID NO: 9990 - protein, 929 aa, Homo Sapiens
MRLLLLVPLLLAPAPGSSAPKVRRQSDTWGPWSQWSPCSRTCGGGVSFRERPCYSQRRDGGSSCVGPARSHRSCRTESCPDGARDFRAEQCAEFDGAEFQGRRYRWLPYYSAPNKCELNCIPKGENFYYKHREAVVDGTPCEPGKRDVCVDGSCRVVGCDHELDSSKQEDKCLRCGGDGTTCYPVAGTFDANDLSRAVKNVRGEYYLNGHWTIEAARALPAASTILHYERGAEGDLAPERLHARGPTSEPLVIELISQEPNPGVHYEYHLPLRRPSPGFSWSHGSWSDCSAECGGGHQSRLVFCTIDHEAYPDHMCQRQPRPADRRSCNLHPCPETKRWKAGPWAPCSASCGGGSQSRSVYCISSDGAGIQEAVEEAECAGLPGKPPAIQACNLQRCAAWSPEPWGECSVSCGVGVRKRSVTCRGERGSLLHTAACSLEDRPPLTEPCVHEDCPLLSDQAWHVGTWGLCSKSCSSGTRRRQVICAIGPPSHCGSLQHSKPVDVEPCNTQPCHLPQEVPSMQDVHTPASNPWMPLGPQESPASDSRGQWWAAQEHPSARGDHRGERGDPRGDQGTHLSALGPAPSLQQPPYQQPLRSGSGPHDCRHSPHGCCPDGHTASLGPQWQGCPGAPCQQSRYGCCPDRVSVAEGPHHAGCTKSYGGDSTGGMPRSRAVASTVHNTHQPQAQQNEPSECRGSQFGCCYDNVATAAGPLGEGCVGQPSHAYPVRCLLPSAHGSCADWAARWYFVASVGQCNRFWYGGCHGNANNFASEQECMSSCQGSLHGPRRPQPGASGRSTHTDGGGSSPAGEQEPSQHRTGAAVQRKPWPSGGLWRQDQQPGPGEAPHTQAFGEWPWGQELGSRAPGLGGDAGSPAPPFHSSSYRISLAGVEPSLVQAALGQLVRLSCSDDTAPESQAAWQKDGQPISSDRFT

SEQ ID NO: 9991 - protein, 808 aa, Homo Sapiens
MRLLLLVPLLLAPAPGSSAPKVRRQSDTWGPWSQWSPCSRTCGGGVSFRERPCYSQRRDGGSSCVGPARSHRSCRTESCPDGARDFRAEQCAEFDGAEFQGRRYRWLPYYSAPNKCELNCIPKGENFYYKHREAVVDGTPCEPGKRDVCVDGSCRVVGCDHELDSSKQEDKCLRCGGDGTTCYPVAGTFDANDLSRGYNQILIVPMGATSILIDEAAASRNFLAVKNVRGEYYLNGHWTIEAARALPAASTILHYERGAEGDLAPERLHARGPTSEPLVIELISQEPNPGVHYEYHLPLRRPSPGFSWSHGSWSDCSAECGGGHQSRLVFCTIDHEAYPDHMCQRQPRPADRRSCNLHPCPETKRWKAGPWAPCSASCGGGSQSRSVYCISSDGAGIQEAVEEAECAGLPGKPPAIQACNLQRCAAWSPEPWGECSVSCGVGVRKRSVTCRGERGSLLHTAACSLEDRPPLTEPCVHEDCPLLSDQAWHVGTWGLCSKSCSSGTRRRQVICAIGPPSHCGSLQHSKPVDVEPCNTQPCHLPQEVPSMQDVHTPASNPWMPLGPQESPASDSRGQWWAAQEHPSARGDHRGERGDPRGDQGTHLSALGPAPSLQQPPYQQPLRSGSGPHDCRHSPHGCCPDGHTASLGPQWQGCPGAPCQQSRYGCCPDRVSVAEGPHHAGCTKSYGGDSTGGMPRSRAVASTVHNTHQPQAQQNEPSECRGSQFGCCYDNVATAAGPLGEGCVGQPSHGLAWQVWSPRWCRQPWGSWCGSPAQTTLPRNPRLPGRKMASPSPLTGVCDGPPTSSDRCV

SEQ ID NO: 9992 - protein, 1262 aa, Homo Sapiens
MRLLLLVPLLLAPAPGSSAPKVRRQSDTWGPWSQWSPCSRTCGGGVSFRERPCYSQRRDGGSSCVGPARSHRSCRTESCPDGARDFRAEQCAEFDGAEFQGRRYRWLPYYSAPNKCELNCIPKGENFYYKHREAVVDGTPCEPGKRDVCVDGSCRVVGCDHELDSSKQEDKCLRCGGDGTTCYPVAGTFDANDLSRGYNQILIVPMGATSILIDEAAASRNFLAVKNVRGEYYLNGHWTIEAARALPAASTILHYERGAEGDLAPERLHARGPTSEPLVIELISQEPNPGVHYEYHLPLRRPSPGFSWSHGSWSDCSAECGGGHQSRLVFCTIDHEAYPDHMCQRQPRPADRRSCNLHPCPETKRWKAGPWAPCSASCGGGSQSRSVYCISSDGAGIQEAVEEAECAGLPGKPPAIQACNLQRCAAWSPEPWGECSVSCGVGVRKRSVTCRGERGSLLHTAACSLEDRPPLTEPCVHEDCPLLSDQAWHVGTWGLCSKSCSSGTRRRQVICAIGPPSHCGSLQHSKPVDVEPCNTQPCHLPQEVPSMQDVHTPASNPWMPLGPQESPASDSRGQWWAAQEHPSARGDHRGERGDPRGDQGTHLSALGPAPSLQQPPYQQPLRSGSGPHDCRHSPHGCCPDGHTASLGPQWQGCPGAPCQQSRYGCCPDRVSVAEGPHHAGCTKSYGGDSTGGMPRSRAVASTVHNTHQPQAQQNEPSECRGSQFGCCYDNVATAAGPLGEGCVGQPSHDWAARWYFVASVGQCNRFWYGGCHGNANNFASEQECMSSCQGSLHGPRRPQPGASGRSTHTDGGGSSPAGEQEPSQHRTGAAVQRKPWPSGGLWRQDQQPGPGEAPHTQAFGEWPWGQELGSRAPGLGGDAGSPAPPFHSSSYRISLAGVEPSLVQAALGQLVRLSCSDDTAPESQAAWQKDGQPISSDRHRLQFDGSLIIHPLQAEDAGTYSCGSTRPGRDSQKIQLRIIGGDMAVLSEAELSRFPQPRDPAQDFGQAGAAGPLGAIPSSHPQPANRLRLDQNQPRVVDASPGQRIRMTCRAEGFPPPAIEWQRDGQPVSSPRHQLQPDGSLVISRVAVEDGGFYTCVAFNGQDRDQRWVQLRVLGELTISGLPPTVTVPEGDTARLLCVVAGESVNIRWSRNGLPVQADGHRVHQSPDGTLLIYNLRARDEGSYTCSAYQGSQAVSRSTEVKVVSPAPTAQPRDPGRDCVDQPELANCDLILQAQLCGNEYYSSFCCASCSRFQPHAQPIWQ

SEQ ID NO: 9993 - protein, 1278 aa, Homo Sapiens
MRLLLLVPLLLAPAPGSSAPKVRRQSDTWGPWSQWSPCSRTCGGGVSFRERPCYSQRRDGGSSCVGPARSHRSCRTESCPDGARDFRAEQCAEFDGAEFQGRRYRWLPYYSAPNKCELNCIPKGENFYYKHREAVVDGTPCEPGKRDVCVDGSCRVVGCDHELDSSKQEDKCLRCGGDGTTCYPVAGTFDANDLSRGYNQILIVPMGATSILIDEAAASRNFLAVKNVRGEYYLNGHWTIEAARALPAASTILHYERGAEGDLAPERLHARGPTSEPLVIELISQEPNPGVHYEYHLPLRRPSPGFSWSHGSWSDCSAECGGGHQSRLVFCTIDHEAYPDHMCQRQPRPADRRSCNLHPCPETKRWKAGPWAPCSASCGGGSQSRSVYCISSDGAGIQEAVEEAECAGLPGKPPAIQACNLQRCAAWSPEPWGECSVSCGVGVRKRSVTCRGERGSLLHTAACSLEDRPPLTEPCVHEDCPLLSDQAWHVGTWGLCSKSCSSGTRRRQVICAIGPPSHCGSLQHSKPVDVEPCNTQPCHLPQEVPSMQDVHTPASNPWMPLGPQESPASDSRGQWWAAQEHPSARGDHRGERGDPRGDQGTHLSALGPAPSLQQPPYQQPLRSGSGPHDCRHSPHGCCPDGHTASLGPQWQGCPGAPCQQSRYGCCPDRVSVAEGPHHAGCTKSYGGDSTGGMPRSRAVASTVHNTHQPQAQQNEPSECRGSQFGCCYDNVATAAGPLGEGCVGQPSHAYPVRCLLPSAHGSCADWAARWYFVASVGQCNRFWYGGCHGNANNFASEQECMSSCQGSLHGPRRPQPGASGRSTHTDGGGSSPAGEQEPSQHRTGAAVQRKPWPSGGLWRQDQQPGPGEAPHTQAFGEWPWGQELGSRAPGLGGDAGSPAPPFHSSSYRISLAGVEPSLVQAALGQLVRLSCSDDTAPESQAAWQKDGQPISSDRHRLQFDGSLIIHPLQAEDAGTYSCGSTRPGRDSQKIQLRIIGGDMAVLSEAELSRFPQPRDPAQDFGQAGAAGPLGAIPSSHPQPANRLRLDQNQPRVVDASPGQRIRMTCRAEGFPPPAIEWQRDGQPVSSPRHQLQPDGSLVISRVAVEDGGFYTCVAFNGQDRDQRWVQLRVLGELTISGLPPTVTVPEGDTARLLCVVAGESVNIRWSRNGLPVQADGHRVHQSPDGTLLIYNLRARDEGSYTCSAYQGSQAVSRSTEVKVVSPAPTAQPRDPGRDCVDQPELANCDLILQAQLCGNEYYSSFCCASCSRFQPHAQPIWQ

SEQ ID NO: 9994 - protein, 1278 aa, Homo Sapiens; identical to SEQ ID NO: 9993

SEQ ID NO: 9995 - protein, 214 aa, Homo Sapiens
VHNTHQPQAQQNEPSECRGSQFGCCYDNVATAAGPLGEGCVGQPSHAYPVRCLLPSAHGSCADWAARWYFVASVGQCNRFWYGGCHGNANNFASEQECMSSCQGSLHGPRRPQPGASGRSTHTDGGGSSPAGEQEPSQHRTGAAVQRKPWPSGGLWRQDQQPGPGEAPHTQAFGEWPWGQELGSRAPGLGGDAGSPAPPFHSSSYRSHFPPLQD

SEQ ID NO: 9996 - protein, 311 aa, Homo Sapiens
  misc_feature (1)..(1): Xaa can be any naturally occurring amino acid
XCMSSCQGSLHGPRRPQPGASGRSTHTDGGGSSPAGEQEPSQHRTGAAVQRKPWPSGGLWRQDQQPGPGEAPHTQAFGEWPWGQELGSRAPGLGGDAGSPAPPFHSSSYRISLAGVEPSLVQAALGQLVRLSCSDDTAPESQAAWQKDGQPISSDRHRLQFDGSLIIHPLQAEDAGTYSCGSTRPGRDSQKIQLRIIGGDMAVLSEAELSRFPQPRDPAQDFGQAGAAGPLGAIPSSHPQPANRLRLDQNQPRVVDASPGQRIRMTCRAEGFPPPAIEWQRDGQPVSSPSTHRPAQGPWQGLRRPARAGQL

SEQ ID NO: 9997 - protein, 1627 aa, Homo Sapiens
MRLWSWVLHLGLLSAALGCGLAERPRRARRDPRAGRPPRPAAGPATCATRAARGRRASPPPPPPPGGAWEAVRVPRRRQQREARGATEEPSPPSRALYFSGRGEQLRLRADLELPRDAFTLQVWLRAEGGQRSPAVITGLYDKCSYISRDRGWVVGIHTISDQDNKDPRYFFSLKTDRARQVTTINAHRSYLPGQWVYLAATYDGQFMKLYVNGAQVATSGEQVGGIFSPLTQKCKVLMLGGSALNHNYRGYIEHFSLWKVARTQREILSDMETHGAHTALPQLLLQENWDNVKHAWSPMKDGSSPKVEFSNAHGFLLDTSLEPPLCGQTLCDNTEVIASYNQLSSFRQPKVVRYRVVNLYEDDHKNPTVTREQVDFQHHQLAEAFKQYNISWELDVLEVSNSSLRRRLILANCDISKIGDENCDPECNHTLTGHDGGDCRHLRHPAFVKKQHNGVCDMDCNYERFNFDGGECCDPEITNVTQTCFDPDSPHRAYLDVNELKNILKLDGSTHLNIFFAKSSEEELAGVATWPWDKEALMHLGGIVLNPSFYGMPGHTHTMIHEIGHSLGLYHVFRGISEIQSCSDPCMETEPSFETGDLCNDTNPAPKHKSCGDPGPGNDTCGFHSFFNTPYNNFMSYADDDCTDSFTPNQVARMHCYLDLVYQGWQPSRKPAPVALAPQVLGHTTDSVTLEWFPPIDGHFFERELGSACHLCLEGRILVQYASNASSPMPCSPSGHWSPREAEGHPDVEQPCKSSVRTWSPNSAVNPHTVPPACPEPQGCYLELEFLYPLVPESLTIWVTFVSTDWDSSGAVNDIKLLAVSGKNISLGPQNVFCDVPLTIRLWDVGEEVYGIQIYTLDEHLEIDAAMLTSTADTPLCLQCKPLKYKVVRDPPLQMDVASILHLNRKFVDMDLNLGSVYQYWVITISGTEESEPSPAVTYIHGSGYCGDGIIQKDQGEQCDDMNKINGDGCSLFCRQEVSFNCIDEPSRCYFHDGDGVCEEFEQKTSIKDCGVYTPQGFLDQWASNASVSHQDQQCPGWVIIGQPAASQVCRTKVIDLSEGISQHAWYPCTISYPYSQLAQTTFWLRAYFSQPMVAAAVIVHLVTDGTYYGDQKQETISVQLLDTKDQSHDLGLHVLSCRNNPLIIPVVHDLSQPFYHSQAVRVSFSSPLVAISGVALRSFDNFDPVTLSSCQRGETYSPAEQSCVHFACEKTDCPELAVENASLNCSSSDRYHGAQCTVSCRTGYVLQIRRDDELIKSQTGPSVTVTCTEGKWNKQVACEPVDCSIPDHHQVYAASFSCPEGTTFGSQCSFQCRHPAQLKGNNSLLTCMEDGLWSFPEALCELMCLAPPPVPNADLQTARCRENKHKVGSFCKYKCKPGYHVPGSSRKSKKRAFKTQCTQDGSWQEGACVPVTCDPPPPKFHGLYQCTNGFQFNSECRIKCEDSDASQGLGSNVIHCRKDGTWNGSFHVCQEMQGQCSVPNELNSNLKLQCPDGYAIGSECATSCLDHNSESIILPMNVTVRDIPHWLNPTRVERVVCTAGLKWYPHPALIHCVKGCEPFMGDNYCDAINNRAFCNYDGGDCCTSTVKTKKVTPFPMSCDLQGDCACRDPQAQEHSRKDLRGYSHG

SEQ ID NO: 9998 - protein, 827 aa, Homo Sapiens
MMCLKILRISLAILAGWALCSANSELGWTRKKSLVEREHLNQVLLEGERCWLGAKVRRPRASPQHHLFGVYPSRAGNYLRPYPVGEQEIHHTGRSKPDTEGNAVSLVPPDLTENPAGLRGAVEEPAAPWVGDSPIGQSELLGDDDAYLGNQRSKESLGEAGIQKGSAMAATTTTAIFTTLNEPKPETQRRGWAKSRQRRQVWKRRAEDGQGDSGISSHFQPWPKHSLKHRVKKSPPEESNQNGGEGSYREAETFNSQVGLPILYFSGRRERLLLRPEVLAEIPREAFTVEAWVKPEGGQNNPAIIAGVFDNCSHTVSDKGWALGIRSGKDKGKRDARFFFSLCTDRVKKATILISHSRYQPGTWTHVAATYDGRHMALYVDGTQVASSLDQSGPLNSPFMASCRSLLLGGDSSEDGHYFRGHLGTLVFWSTALPQSHFQHSSQHSSGEEEATDLVLTASFEPVNTEWVPFRDEKYPRLEVLQGFEPEPEILSPLQPPLCGQTVCDNVELISQYNGYWPLRGEKVIRYQVVNICDDEGLNPIVSEEQIRLQHEALNEAFSRYNISWQLSVHQVHNSTLRHRVVLVNCEPSKIGNDHCDPECEHPLTGYDGGDCRLQGRCYSWNRRDGLCHVECNNMLNDFDDGDCCDPQVADVRKTCFDPDSPKRAYMSVKELKEALQLNSTHFLNIYFASSVREDLAGAATWPWDKDAVTHLGGIVLSPAYYGMPGHTDTMIHEVGHVLGLYHVFKGVSERESCNDPCKETVPSMETGDLCADTAPTPKSELCREPEPTSDTCGFTRFPGAPFTNYMSYTGITTVLFCFLLRIHGGL

SEQ ID NO: 9999 - protein, 1791 aa, Homo Sapiens
MMCLKILRISLAILAGWALCSANSELGWTRKKSLVEREHLNQVLLEGERCWLGAKVRRPRASPQHHLFGVYPSRAGNYLRPYPVGEQEIHHTGRSKPDTEGNAVSLVPPDLTENPAGLRGAVEEPAAPWVGDSPIGQSELLGDDDAYLGNQRSKESLGEAGIQKGSAMAATTTTAIFTTLNEPKPETQRRGWAKSRQRRQVWKRRAEDGQGDSGISSHFQPWPKHSLKHRVKKSPPEESNQNGGEGSYREAETFNSQVGLPILYFSGRRERLLLRPEVLAEIPREAFTVEAWVKPEGGQNNPAIIAGVFDNCSHTVSDKGWALGIRSGKDKGKRDARFFFSLCTDRVKKATILISHSRYQPGTWTHVAATYDGRHMALYVDGTQVASSLDQSGPLNSPFMASCRSLLLGGDSSEDGHYFRGHLGTLVFWSTALPQSHFQHSSQHSSGEEEATDLVLTASFEPVNTEWVPFRDEKYPRLEVLQGFEPEPEILSPLQPPLCGQTVCDNVELISQYNGYWPLRGEKVIRYQVVNICDDEGLNPIVSEEQIRLQHEALNEAFSRYNISWQLSVHQVHNSTLRHRVVLVNCEPSKIGNDHCDPECEHPLTGYDGGDCRLQGRCYSWNRRDGLCHVECNNMLNDFDDGDCCDPQVADVRKTCFDPDSPKRAYMSVKELKEALQLNSTHFLNIYFASSVREDLAGAATWPWDKDAVTHLGGIVLSPAYYGMPGHTDTMIHEVGHVLGLYHVFKGVSERESCNDPCKETVPSMETGDLCADTAPTPKSELCREPEPTSDTCGFTRFPGAPFTNYMSYTDDNCTDNFTPNQVARMHCYLDLVYQQWTESRKPTPIPIPPMVIGQTNKSLTIHWLPPISGVVYDRASGSLCGACTEDGTFRQYVHTASSRRVCDSSGYWTPEEAVGPPDVDQPCEPSLQAWSPEVHLYHMNMTVPCPTEGCSLELLFQHPVQADTLTLWVTSFFMESSQVLFDTEILLENKESVHLGPLDTFCDIPLTIKLHVDGKVSGVKVYTFDERIEIDAALLTSQPHSPLCSGCRPVRYQVLRDPPFASGLPVVVTHSHRKFTDVEVTPGQMYQYQVLAEAGGELGEASPPLNHIHGAPYCGDGKVSERLGEECDDGDLVSGDGCSKVCELEEGFNCVGEPSLCYMYEGDGICEPFERKTSIVDCGIYTPKGYLDQWATRAYSSHEDKKKCPVSLVTGEPHSLICTSYHPDLPNHRPLTGWFPCVASENETQDDRSEQPEGSLKKEDEVWLKVCFNRPGEARAIFIFLTTDGLVPGEHQQPTVTLYLTDVRGSNHSLGTYGLSCQHNPLIINVTHHQNVLFHHTTSVLLNFSSPRVGISAVALRTSSRIGLSAPSNCISEDEGQNHQGQSCIHRPCGKQDSCPSLLLDHADVVNCTSIGPGLMKCAITCQRGFALQASSGQYIRPMQKEILLTCSSGHWDQNVSCLPVDCGVPDPSLVNYANFSCSEGTKFLKRCSISCVPPAKLQGLSPWLTCLEDGLWSLPEVYCKLECDAPPIILNANLLLPHCLQDNHDVGTICKYECKPGYYVAESAEGKVRNKLLKIQCLEGGIWEQGSCIPVVCEPPPPVFEGMYECTNGFSLDSQCVLNCNQEREKLPILCTKEGLWTQEFKLCENLQGECPPPPSELNSVEYKCEQGYGIGAVCSPLCVIPPSDPVMLPENITADTLEHWMEPVKVQSIVCTGRRQWHPDPVLVHCIQSCEPFQADGWCDTINNRAYCHYDGGDCCSSTLSSKKVIPFAADCDLDECTCRDPKAEENQ

SEQ ID NO: 10000 - protein, 678 aa, Homo Sapiens
MAAPGPLPAAALSPGAPTPRELMHGVAGVTSRAGRDREAGSVLPAGNRGARKASRRSSSRSMSRDNKFSKKDCLSIRNVVASIQTKEGLNLKLISGDVLYIWADVIVNSVPMNLQLGGGPLSRAFLQKAGPMLQKELDDRRRETEEKVGNIFMTSGCNLDCKAVLHAVAPYWNNGAETSWQIMANIIKKCLTTVEVLSFSSITFPMIGTGSLQFPKAVFAKLILSEVFEYSSSTRPITSPLQEVHFLVYTNDDEGCQAFLDEFTNWSRINPNKARIPMAGDTQGVVGTVSKPCFTAYEMKIGAITFQVATGDIATEQVDVIVNSTARTFNRKSGVSRAILEGAGQAVESECAVLAAQPHRDFIITPGGCLKCKIIIHVPGGKDVRKTVTSVLEECEQRKYTSVSLPAIGTGNAGKNPITVADNIIDAIVDFSSQHSTPSLKTVKVVIFQPELLNIFYDSMKKRDLSASLNFQSTFSMTTCNLPEHWTDMNHQLFCMVQLEPGQSEYNTIKDKFTRTCSSYAIEKIERIQNAFLWQSYQVKKRQMDIKNDHKNNERLLFHGTDADSVPYVNQHGFNRSCAGKNAVSYGKGTYFAVDASYSAKDTYSKPDSNGRKHMYVVRVLTGVFTKGRAGLVTPPPKNPHNPTDLFDSVTNNTRSPKLFVVFFDNQAYPEYLITFTA

SEQ ID NO: 10001 - protein, 483 aa, Homo Sapiens
MAAPGPLPAAALSPGAPTPRELMHGVAGVTSRAGRDREAGSVLPAGNRGARKASRRSSSRSMSRDNKFSKKDCLSIRNVVASIQTKEGLNLKLISGDVLYIWADVIVNSVPMNLQLGGGPLSRAFLQKAGPMLQKELDDRRRETEEKVGNIFMTSGCNLDCKAVLHAVAPYWNNGAETSWQVATGDIATEQVDVIVNSTARTFNRKSGVSRAILEGAGQAVESECAVLAAQPHRDFIITPGGCLKCKIIIHVPGGKDVRKTVTSVLEECEQRKYTSVSLPAIGTGNLPEHWTDMNHQLFCMVQLEPGQSEYNTIKDKFTRTCSSYAIEKIERIQNAFLWQSYQVKKRQMDIKNDHKNNERLLFHGTDADSVPYVNQHGFNRSCAGKNAVSYGKGTYFAVDASYSAKDTYSKPDSNGRKHMYVVRVLTGVFTKGRAGLVTPPPKNPHNPTDLFDSVTNNTRSPKLFVVFFDNQAYPEYLITFTA

SEQ ID NO: 10002 - protein, 444 aa, Homo Sapiens
MLQRIGLIFLHNIVVVSNCFYFQAFLDEFTNWSRINPNKARIPMAGDTQGVVGTVSKPCFTAYEMKIGAITFQVATGDIATEQVDVIVNSTARTFNRKSGVSRAILEGAGQAVESECAVLAAQPHRDFIITPGGCLKCKIIIHVPGGKDVRKTVTSVLEECEQRKYTSVSLPAIGTGNAGKNPITVADNIIDAIVDFSSQHSTPSLKTVKVVIFQPELLNIFYDSMKKRDLSASLNFQSTFSMTTCNLPEHWTDMNHQLFCMVQLEPGQSEYNTIKDKFTRTCSSYAIEKIERIQNAFLWQSYQVKKRQMDIKNDHKNNERLLFHGTDADSVPYVNQHGFNRSCAGKNAVSYGKGTYFAVDASYSAKDTYSKPDSNGRKHMYVVRVLTGVFTKGRAGLVTPPPKNPHNPTDLFDSVTNNTRSPKLFVVFFDNQAYPEYLITFTA

SEQ ID NO: 10003 - protein, 375 aa, Homo Sapiens
MLQRIGLIFLHNIVVVSNCFYFQAFLDEFTNWSRINPNKARIPMAGDTQGVVGTVSKPCFTAYEMKIGAITFQVATGDIATEQVDVIVNSTARTFNRKSGVSRAILEGAGQAVESECAVLAAQPHRDFIITPGGCLKCKIIIHVPGGKDVRKTVTSVLEECEQRKYTSVSLPAIGTGNLPEHWTDMNHQLFCMVQLEPGQSEYNTIKDKFTRTCSSYAIEKIERIQNAFLWQSYQVKKRQMDIKNDHKNNERLLFHGTDADSVPYVNQHGFNRSCAGKNAVSYGKGTYFAVDASYSAKDTYSKPDSNGRKHMYVVRVLTGVFTKGRAGLVTPPPKNPHNPTDLFDSVTNNTRSPKLFVVFFDNQAYPEYLITFTA

SEQ ID NO: 10004 - protein, 397 aa, Homo Sapiens
MHHVFKDHQRGEKRGFLSPENKNCRRLELRRGCSCSWGLCSQALMASLAGSLLPGSDRSGVETSEYAQGGVSDLQEEGKNAINSPMSPALVDVHPEDTQLEENEERTMIDPTSKEDPKFKELVKVLLDWINDVLVEERIIVKQLEEDLYDGQVLQKLLEKLAGCKLNVAEVTQSEIGQKQKLQTVLEAVHDLLRPRGWALRWSVDSIHGKNLVAILHLLVSLAMHFRAPIRLPEHVTVQVVVVRKREGLLHSSHISEELTTTTEMMMGRFERDAFDTLFDHAPDKLSVVKKSLITFVNKHLNKLNLEVTELETQFADGVYLVLLMGLLEDYFVPLHHFYLTPESFDQKVHNVSFAFELMLDGGLKKPKARPEDVVNLDLKSTLRVLYNLFTKYKNVE

SEQ ID NO: 10005 - protein, 194 aa, Homo Sapiens
MPRLKCSGAVIAHCSLELLASSDPSASASQGARTTVSDLQEEGKNAINSPMSPALVDVHPEDTQLEENEERTMIDPTSKEDPKFKELVKVLLDWINDVLVEERIIVKQLEEDLYDGQVLQKLLEKLAGCKLNVAEVTQSEIGQKQKLQTVLEAVHDLLRPRGWALRWSVDSIHGKNLVAILHLLVSLAMHFRAP

SEQ ID NO: 10006 - protein, 327 aa, Homo Sapiens
MSDLQEEGKNAINSPMSPALVDVHPEDTQLEENEERTMIDPTSKEDPKFKELVKVLLDWINDVLVEERIIVKQLEEDLYDGQVLQKLLEKLAGCKLNVAEVTQSEIGQKQKLQTVLEAVHDLLRPRGWALRWSVDSIHGKNLVAILHLLVSLAMHFRAPIRLPEHVTVQVVVVRKREGLLHSSHISEELTTTTEMMMGRFERDAFDTLFDHAPDKLSVVKKSLITFVNKHLNKLNLEVTELETQFADGVYLVLLMGLLEDYFVPLHHFYLTPESFDQKVHNVSFAFELMLDGGLKKPKARPEDVVNLDLKSTLRVLYNLFTKYKNVE

SEQ ID NO: 10007 - protein, 289 aa, Homo Sapiens
MSPALVDVHPEDTQLEENEERTMIDPTSKEDPKFKELVKVLLDWINDVLVEERIIVKQLEEDLYDGQVLQKLLEKLAGCKLNVAEVTQSEIGQKQKLQTVLEAVHDLLRPRGWALRWSVDSIHGKNLVAILHLLVSLAMHFRAPIRLPEHVTVQVVVVRKREGLLHSSHISEELTTTTEMMMGRFERDAFDTLFDHAPDKLSVVKKFADGVYLVLLMGLLEDYFVPLHHFYLTPESFDQKVHNVSFAFELMLDGGLKKPKARPEDVVNLDLKSTLRVLYNLFTKYKNVE

SEQ ID NO: 10008 - protein, 364 aa, Homo Sapiens
MSSAPRSPTPRPRRMKKDESFLGKLGGTLARKRRAREVSDLQEEGKNAINSPMSPALVDVHPEDTQLEENEERTMIDPTSKEDPKFKELVKVLLDWINDVLVEERIIVKQLEEDLYDGQVLQKLLEKLAGCKLNVAEVTQSEIGQKQKLQTVLEAVHDLLRPRGWALRWSVDSIHGKNLVAILHLLVSLAMHFRAPIRLPEHVTVQVVVVRKREGLLHSSHISEELTTTTEMMMGRFERDAFDTLFDHAPDKLSVVKKSLITFVNKHLNKLNLEVTELETQFADGVYLVLLMGLLEDYFVPLHHFYLTPESFDQKVHNVSFAFELMLDGGLKKPKARPEDVVNLDLKSTLRVLYNLFTKYKNVE

SEQ ID NO: 10009 - protein, 114 aa, Homo Sapiens
MDKSLLLELPILLCCFRALSGSLSMRNDAVIEIVQCRMCHLQFPGEKCSRGRGICTATTEEACMVGRMFKRDGNPWLTFMGCLKNCADVKGIRWSVYLVNFRCCRSHDLCNEDL

SEQ ID NO: 10010 - protein, 126 aa, Homo Sapiens
MDKSLLLELPILLCCFRALSGSLSMRNDAVNEIVAVKNNFPVIEIVQCRMCHLQFPGEKCSRGRGICTATTEEACMVGRMFKRDGNPWLTFMGCLKNCADVKGIRWSVYLVNFRCCRSHDLCNEDL

SEQ ID NO: 10011 - protein, 113 aa, Homo Sapiens
MLVLFLLGTVFLLCPYWGELHDPIKATEIMCYECKKYHLGLCYGVMTSCSLKHKQSCAVENFYILTRKGQSMYHYSKLSCMTSCEDINFLGFTKRVELICCDHSNYCNLPEGV

SEQ ID NO: 10012 - protein, 70 aa, Homo Sapiens
MLVLFLLGTVFLLCPYWGELHDPIKGQSMYHYSKLSCMTSCEDINFLGFTKRVELICCDHSNYCNLPEGV

SEQ ID NO: 10013 - protein, 98 aa, Homo Sapiens
MNKHFLFLFLLYCLIVAVTSLQCITCHLRTRTDRCRRGFGVCTAQKGEACMLLRIYQRNTLQISYMVCQKFCRDMTFDLRNRTYVHTCCNYNYCNFKL

SEQ ID NO: 10014 - protein, 59 aa, Homo Sapiens
MRKMNTLLLVSLSFLYLKEGDKHMYSTHMCKYKCREEESSKRGLLRVTLCCDRNFCNVF

SEQ ID NO: 10015 - protein, 98 aa, Homo Sapiens
MRKMNTLLLVSLSFLYLKEVMGLKCNTCIYTEGWKCMAGRGTCIAKENELCSTTAYFRGDKHMYSTHMCKYKCREEESSKRGLLRVTLCCDRNFCNVF

SEQ ID NO: 10016 - protein, 125 aa, Homo Sapiens
MLGMSLASLHFLWQTLDYLSPIPFWPTFPSTSSPAQHFGPRLPSPDPTLFCSLLTSWPPRFSHLTQLHPRHQRILQQQQHSQTPREPHFLLTTLLRKCQWWVSLKGCSSWLKVPQPRSLGLSSQT

SEQ ID NO: 10017 - protein, 543 aa, Homo Sapiens
MNCLEGPGKTCGPLASEEELVSACQLEKEEENEGEEEEEEEDEEDLDPDLDPDLEEEENDLGDPAVLGAVHNTQRALLSSPGVKAPGMLGMSLASLHFLWQTLDYLSPIPFWPTFPSTSSPAQHFGPRLPSPDPTLFCSLLTSWPPRFSHLTQLHPRHQRILQQQQHSQTPSPPAKKPWSQQPDPYANLMTRKEKDWVIKVQMVQLQSAKPRLDDYYYQEYYQKLEKKQADEELLGRRNRVESLKLVTPYIPKAEAYESVVRIEGSLGQVAVSTCFSPRRAIDAVPHGTQEQDIEAASSQRLRVLYRIEKMFLQLLEIEEGWKYRPPPPCFSEQQSNQVEKLFQTLKTQEQNNLEEAADGFLQVLSVRKGKALVARLLPFLPQDQAVTILLAITHHLPLLVRRDVADQALQMLFKPLGKCISHLTLHELLQGLQGLTLLPPGSSERPVTVVLQNQFGISLLYALLSHGEQLVSLHSSLEEPNSDHTAWTDMVVLIAWEIAQMPTASLAEPLAFPSNLLPLFCHHVDKQLVQQLEARMEFAWIY

SEQ ID NO: 10018 - protein, 543 aa, Homo Sapiens; identical to SEQ ID NO: 10017

SEQ ID NO: 10019 - protein, 354 aa, Homo Sapiens
MTRKEKDWVIKVQMVQLQSAKPRLDDYYYQEYYQKLEKKQADEELLGRRNRVESLKLVTPYIPKAEAYESVVRIEGSLGQVAVSTCFSPRRAIDAVPHGTQEQDIEAASSQRLRVLYRIEKMFLQLLEIEEGWKYRPPPPCFSEQQSNQVEKLFQTLKTQEQNNLEEAADGFLQVLSVRKGKALVARLLPFLPQDQAVTILLAITHHLPLLVRRDVADQALQMLFKPLGKCISHLTLHELLQGLQGLTLLPPGSSERPVTVVLQNQFGISLLYALLSHGEQLVSLHSSLEEPNSDHTAWTDMVVLIAWEIAQMPTASLAEPLAFPSNLLPLFCHHVDKQLVQQLEARMEFAWIY

SEQ ID NO: 10020 - protein, 158 aa, Homo Sapiens
QALQMLFKPLGKCISHLTLHELLQGLQGLTLLPPGSSERPVTVVLQNQDRHGGSDCLGDSPNAYSLSGRTPSFPQQPTSPVLSPRGQTIGSAAGGQDGVCLDLLICLFWNTCMWEVESSDTSYIDYVYRDPESLKTFLMPLYIGEPFPIFISFLQKSK

SEQ ID NO: 10021 - protein, 188 aa, Homo Sapiens
  misc_feature (1)..(1): Xaa can be any naturally occurring amino acid
XENEGEEEEEEEDEEDLDPDLDPDLEEEENDLGDPAVLGAVHNTQRALLSSPGVKAPGMLGMSLASLHFLWQTLDYLSPIPFWPTFPSTSSPAQHFGPRLPSPDPTLFCSLLTSWPPRFSHLTQLHPRHQRILQQQQHSQTPREPHFLLTTLLRKCQWWVSLKGCSSWLKVPQPRSLGLSSQTPMLTS

SEQ ID NO: 10022 - protein, 304 aa, Homo Sapiens
MAGPCCVWGVVFFSCLSPAGHGGVNQLGGVFVNGRPLPDVVRQRIVELAHQGVRPCDISRQLRVSHGCVSKILGRYYETGSIKPGVIGGSKPKVATPKVVDKIAEYKRQNPTMFAWEIRDRLLAEGICDNDTVPSVSSINRIIRTKVQQPFHPTPDGAGTGVTAPGHTIVPSTASPPVSSASNDPVGSYSINGILGIPRSNDVSEGSVPNGDSQSGVDSLRKHLRADTFTQQQLEALDRVFERPSYPDVFQASEHIKSEQGNEYSLPALTPGLDEVKSSLSASTNPELGSNVSGTQTYPVVTGR

SEQ ID NO: 10023 - protein, 396 aa, Homo Sapiens
MDMHCKADPFSAMHPGHGGVNQLGGVFVNGRPLPDVVRQRIVELAHQGVRPCDISRQLRVSHGCVSKILGRYYETGSIKPGVIGGSKPKVATPKVVDKIAEYKRQNPTMFAWEIRDRLLAEGICDNDTVPSVSSINRIIRTKVQQPFHPTPDGAGTGVTAPGHTIVPSTASPPVSSASNDPVGSYSINGILGIPRSNGEKRKRDEDVSEGSVPNGDSQSGVDSLRKHLRADTFTQQQLEALDRVFERPSYPDVFQASEHIKSEQGNEYSLPALTPGLDEVKSSLSASTNPELGSNVSGTQTYPVVTGRDMASTTLPGYPPHVPPTGQGSYPTSTLAGMVPEAAVGPSSSLMSKPGRKLAEVPPCVQPTGASSPATRTATPSTRPTTRLGDSATPPY

SEQ ID NO: 10024 - protein, 394 aa, Homo Sapiens
MDMHCKADPFSAMHPGHGGVNQLGGVFVNGRPLPDVVRQRIVELAHQGVRPCDISRQLRVSHGCVSKILGRYYETGSIKPGVIGGSKPKVATPKVVDKIAEYKRQNPTMFAWEIRDRLLAEGICDNDTVPSVSSINRIIRTKVQQPFHPTPDGAGTGVTAPGHTIVPSTASPPVSSASNDPVGSYSINGILGIPRSNGEKRKRDEDVSEGSVPNGDSQSGVDSLRKHLRADTFTQQQLEALDRVFERPSYPDVFQASEHIKSEQGNEYSLPALTPGLDEVKSSLSASTNPELGSNVSGTQTYPVVTGRDMASTTLPGYPPHVPPTGQGSYPTSTLAGMVPGSEFSGNPYSHPQYTAYNEAWRFSNPALLSSPYYYSAAPRGSAPAAAAAAYDRH

SEQ ID NO: 10025 - protein, 214 aa, Homo Sapiens
MDMHCKADPFSAMHPGHGGVNQLGGVFVNGRPLPDVVRQRIVELAHQGVRPCDISRQLRVSHGCVSKILGRYYETGSIKPGVIGGSKPKVATPKVVDKIAEYKRQNPTMFAWEIRDRLLAEGICDNDTVPSVSSINRIIRTKVQQPFHPTPDGAGTGVTAPGHTIVPSTASPPVSSASNDPVGSYSINGILGIPRSNGEKRKRDEVEVYTDPAH

SEQ ID NO: 10026 - protein, 417 aa, Homo Sapiens
MDMHCKADPFSAMHPGHGGVNQLGGVFVNGRPLPDVVRQRIVELAHQGVRPCDISRQLRVSHGCVSKILGRYYETGSIKPGVIGGSKPKVATPKVVDKIAEYKRQNPTMFAWEIRDRLLAEGICDNDTVPSVSSINRIIRTKVQQPFHPTPDGAGTGVTAPGHTIVPSTASPPVSSASNDPVGSYSINGILGIPRSNGEKRKRDEVEVYTDPAHIRGGGGLHLVWTLRDVSEGSVPNGDSQSGVDSLRKHLRADTFTQQQLEALDRVFERPSYPDVFQASEHIKSEQGNEYSLPALTPGLDEVKSSLSASTNPELGSNVSGTQTYPVVTGRDMASTTLPGYPPHVPPTGQGSYPTSTLAGMVPGSEFSGNPYSHPQYTAYNEAWRFSNPALLSSPYYYSAAPRGSAPAAAAAAYDRH

SEQ ID NO: 10027 - protein, 393 aa, Homo Sapiens
MDMHCKADPFSAMHRHGGVNQLGGVFVNGRPLPDVVRQRIVELAHQGVRPCDISRQLRVSHGCVSKILGRYYETGSIKPGVIGGSKPKVATPKVVDKIAEYKRQNPTMFAWEIRDRLLAEGICDNDTVPSVSSINRIIRTKVQQPFHPTPDGAGTGVTAPGHTIVPSTASPPVSSASNDPVGSYSINGILGIPRSNGEKRKRDEDVSEGSVPNGDSQSGVDSLRKHLRADTFTQQQLEALDRVFERPSYPDVFQASEHIKSEQGNEYSLPALTPGLDEVKSSLSASTNPELGSNVSGTQTYPVVTGRDMASTTLPGYPPHVPPTGQGSYPTSTLAGMVPGSEFSGNPYSHPQYTAYNEAWRFSNPALLSSPYYYSAAPRGSAPAAAAAAYDRH

SEQ ID NO: 10028 - protein, 257 aa, Homo Sapiens
MAWSSKSWLCLIASSCPRDTLLPSAHHASPVPASHLTQVSNGCVSKILGRYYRTGVLEPKGIGGSKPRLATPPVVARIAQLKGECPALFAWEIQRQLCAEGLCTQDKTPSVSSINRVLRALQEDQGLPCTRLRSPAVLAPAVLTPHSGSETPRGTHPGTGHRNRTIFSPSQAEALEKEFQRGQYPDSVARGKLATATSLPEDTVRVWFSNRRAKWRRQEKLKWEMQLPGASQGLTVPRVAPGIISAQGPTVFMSRKY

SEQ ID NO: 10029 - protein, 257 aa, Homo Sapiens; identical to SEQ ID NO: 10028

SEQ ID NO: 10030 - protein, 341 aa, Homo Sapiens
MAWSSKSWLCLIASSCPRDTLLPSAHHASPVPASHLTQVSNGCVSKILGRYYRTGVLEPKGIGGSKPRLATPPVVARIAQLKGECPALFAWEIQRQLCAEGLCTQDKTPSVSSINRVLRALQEDQGLPCTRLRSPAVLAPAVLTPHSGSETPRGTHPGTGHRNRTIFSPSQAEALEKEFQRGQYPDSVARGKLATATSLPEDTVRVWFSNRRAKWRRQEKLKWEMQLPGASQGLTVPRVAPGIISAQQSPGSVPTAALPALEPLGPSCYQLCWATAPERCLSDTPPKACLKPCWGHLPPQPNSLDSGLLCLPCPSSHCHLASLSGSQALLWPGCPLLYGLE

SEQ ID NO: 10031 - protein, 348 aa, Homo Sapiens
MHQDGISSMNQLGGLFVNGRPLPLDTRQQIVRLAVSGMRPCDISRILKVSNGCVSKILGRYYRTGVLEPKGIGGSKPRLATPPVVARIAQLKGECPALFAWEIQRQLCAEGLCTQDKTPSVSSINRVLRALQEDQGLPCTRLRSPAVLAPAVLTPHSGSETPRGTHPGTGHRNRTIFSPSQAEALEKEFQRGQYPDSVARGKLATATSLPEDTVRVWFSNRRAKWRRQEKLKWEMQLPGASQGLTVPRVAPGIISAQQSPGSVPTAALPALEPLGPSCYQLCWATAPERCLSDTPPKACLKPCWDCGSFLLPVIAPSCVDVAWPCLDASLAHHLIGGAGKATPTHFSH

SEQ ID NO: 10032 - protein, 349 aa, Homo Sapiens
MHQDGISSMNQLGGLFVNGRPLPLDTRQQIVRLAVSGMRPCDISRILKVSNGCVSKILGRYYRTGVLEPKGIGGSKPRLATPPVVARIAQLKGECPALFAWEIQRQLCAEGLCTQDKTPSVSSINRVLRALQEDQGLPCTRLRSPAVLAPAVLTPHSGSETPRGTHPGTGHRNRTIFSPSQAEALEKEFQRGQYPDSVARGKLATATSLPEDTVRVWFSNRRAKWRRQEKLKWEMQLPGASQGLTVPRVAPGIISAQQSPGSVPTAALPALEPLGPSCYQLCWATAPERCLSDTPPKACLKPCWDCGSFLLPVIAPSCVDVAWPCLDASLAHHLIGGAGKATPTHFSHP

SEQ ID NO: 10033 - protein, 351 aa, Homo Sapiens
MHQDGISSMNQLGGLFVNGRPLPLDTRQQIVRLAVSGMRPCDISRILKVSNGCVSKILGRYYRTGVLEPKGIGGSKPRLATPPVVARIAQLKGECPALFAWEIQRQLCAEGLCTQDKTPSVSSINRVLRALQEDQGLPCTRLRSPAVLAPAVLTPHSGSETPRGTHPGTGHRNRTIFSPSQAEALEKEFQRGQYPDSVARGKLATATSLPEDTVRVWFSNRRAKWRRQEKLKWEMQLPGASQGLTVPRVAPGIISAQQSPGSVPTAALPALEPLGPSCYQLCWATAPERCLSDTPPKACLKPCWGHLPPQPNSLDSGLLCLPCPSSHCHLASLSGSQALLWPGCPLLYGLE

SEQ ID NO: 10034 - protein, 343 aa, Homo Sapiens
MNQLGGLFVNGRPLPLDTRQQIVRLAVSGMRPCDISRILKVSNGCVSKILGRYYRTGVLEPKGIGGSKPRLATPPVVARIAQLKGECPALFAWEIQRQLCAEGLCTQDKTPSVSSINRVLRALQEDQGLPCTRLRSPAVLAPAVLTPHSGSETPRGTHPGTGHRNRTIFSPSQAEALEKEFQRGQYPDSVARGKLATATSLPEDTVRVWFSNRRAKWRRQEKLKWEMQLPGASQGLTVPRVAPGIISAQQSPGSVPTAALPALEPLGPSCYQLCWATAPERCLSDTPPKACLKPCWGHLPPQPNSLDSGLLCLPCPSSHCHLASLSGSQALLWPGCPLLYGLE

SEQ ID NO: 10035 - protein, 423 aa, Homo Sapiens
MAAALRVAAVGARLSVLASGLRAAVRSLCSQAITVGAPVIGLNDSGGARIQEGVESLAGYADIFLRNVTASGVIPQISLIMGPCAGGAVYSPALTDFTFMVKDTSYLFITGPDVVKSVTNEDVTQEELGGAKTHTTMSGVAHRAFENDVDALCNLRDFFNYLPLSSQDPAPVRECHDPSDRLVPELDTIVPLESTKAYNMVDIIHSVVDEREFFEIMPNYAKNIIVGFARMNGRTVGIVGNQPKVASGCLDINSSVKGARFVRFCDAFNIPLITFVDVPGFLPGTAQEYGGIIRHGAKLLYAFAEATVPKVTVITRKAYGGAYDVMSSKHLCGDTNYAWPTAEIAVMGAKGAVEIIFKGHENVEAAQAEYIEKFANPFPAAVRGFVDDIIQPSSTRARICCDLDVLASKKVQRPWRKHANIPL

SEQ ID NO: 10036 - protein, 192 aa, Homo Sapiens [sequence omitted]

SEQ ID NO: 10037 - protein, 516 aa, Homo Sapiens
MAAALRVAAVGARLSVLASGLRAAVRSLCSQATSVNERIENKRRTALLGGGQRRIDAQHKRGKLTARERISLLLDPGSFVESDMFVEHRCADFGMAADKNKDFTVFGGSLSGAHAQKICKIMDQAITVGAPVIGLNDSGGARIQEGVESLAGYADIFLRNVTASGVIPQISLIMGPCAGGAVYSPALTDFTFMVKDTSYLFITGPDVVKSVTNEDVTQEELGGAKTHTTMSGVAHRAFENDVDALCNLRDFFNYLPLSSQDPAPVRECHDPSDRLVPELDTIVPLESTKAYNMVDIIHSVVDEREFFEIMPNYAKNIIVGFARMNGRTVGIVGNQPKVASGCLDINSSVKGARFVRFCDAFNIPLITFVDVPGFLPGTAQEYGGIIRHGAKLLYAFAEATVPKVTVITRKAYGGAYDVMSSKHLCGDTNYAWPTAEIAVMGAKGAVEIIFKGHENVEAAQAEYIEKFANPFPAAVRGFVDDIIQPSSTRARICCDLDVLASKKVQRPWRKHANIPL

SEQ ID NO: 10038 - protein, 539 aa, Homo Sapiens
MAAALRVAAVGARLSVLASGLRAAVRSLCSQATSVNERIENKRRTALLGGGQRRIDAQHKRGKLTARERISLLLDPGSFVESDMFVEHRCADFGMAADKNKFPGDSVVTGRGRINGRLVYVFSQDFTVFGGSLSGAHAQKICKIMDQAITVGAPVIGLNDSGGARIQEGVESLAGYADIFLRNVTASGVIPQISLIMGPCAGGAVYSPALTDFTFMVKDTSYLFITGPDVVKSVTNEDVTQEELGGAKTHTTMSGVAHRAFENDVDALCNLRDFFNYLPLSSQDPAPVRECHDPSDRLVPELDTIVPLESTKAYNMVDIIHSVVDEREFFEIMPNYAKNIIVGFARMNGRTVGIVGNQPKVASGCLDINSSVKGARFVRFCDAFNIPLITFVDVPGFLPGTAQEYGGIIRHGAKLLYAFAEATVPKVTVITRKAYGGAYDVMSSKHLCGDTNYAWPTAEIAVMGAKGAVEIIFKGHENVEAAQAEYIEKFANPFPAAVRGFVDDIIQPSSTRARICCDLDVLASKKVQRPWRKHANIPL

SEQ ID NO: 10039 - protein, 559 aa, Homo Sapiens
MAAALRVAAVGARLSVLASGLRAAVRSLCSQATSVNERIENKRRTALLGGGQRRIDAQHKRGKLTARERISLLLDPGSFVESDMFVEHRCADFGMAADKNKFPGDSVVTGRGRINGRLVYVFSQDFTVFGGSLSGAHAQKICKIMDQAITVGAPVIGLNDSGGARIQEGVESLAGYADIFLRNVTASGVIPQISLIMGPCAGGAVYSPALTDFTFMVKDTSYLFITGPDVVKSVTNEDVTQEELGGAKTHTTMSGVAHRAFENDVDALCNLRDFFNYLPLSSQDPAPVRECHDPSDRLVPELDTIVPLESTKAYNMVDIIHSVVDEREFFEIMPNYAKNIIVGFARMNGRTVGIVGNQPKVASDSISFTPWNYARRQYRPYFAGCLDINSSVKGARFVRFCDAFNIPLITFVDVPGFLPGTAQEYGGIIRHGAKLLYAFAEATVPKVTVITRKAYGGAYDVMSSKHLCGDTNYAWPTAEIAVMGAKGAVEIIFKGHENVEAAQAEYIEKFANPFPAAVRGFVDDIIQPSSTRARICCDLDVLASKKVQRPWRKHANIPL

SEQ ID NO: 10040 - protein, 303 aa, Homo Sapiens
MAAALRVAAVGARLSVLASGLRAAVRSLCSQATSVNERIENKRRTALLGGGQRRIDAQHKRGKLTARERISLLLDPGSFVESDMFVEHRCADFGMAADKNKFPGDSVVTGRGRINGRLVYVFSQDFTVFGGSLSGAHAQKICKIMDQAITVGAPVIGLNDSGGARIQEGVESLAGYADIFLRNVTASGVIPQISLIMGPCAGGAVYSPALTDFTFMVKDTSYLFITGPDVVKSVTNEDVTQEELGGAKTHTTMSGVAHRAFENDVDALCNLRDFFNYLPLSSQDPAPVRECHDPSPTFCLWLH

SEQ ID NO: 10041 - protein, 550 aa, Homo Sapiens
MAAALRVAAVGARLSVLASGLRAAVRSLCSQATSVNERIENKRRTALLGGGQRRIDAQHKRGKLTARERISLLLDPGSFVESDMFVEHRCADFGMAADKNKFPGDSVVTGRGRINGRLVYVFSQDFTVFGGSLSGAHAQKICKIMDQAITVGAPVIGLNDSGGARIQEGVESLAGYADIFLRNVTASGVIPQISLIMGPCAGGAVYSPALTDFTFMVKDTSYLFITGPDVVKSVTNEDVTQEELGGAKTHTTMSGVAHRAFENDVDALCNLRDFFNYLPLSSQDPAPVRECHDPSDRLVPELDTIVPLESTKAYNMVDIIHSVVDEREFFEIMPNYAKNIIVGFARMNGRTVGIVGNQPKVASGCLDINSSVKGARFVRFCDAFNIPLITFVDVPGFLPGTAQEYGGIIRHGAKLLYAFAEATVPKVTVITRKAYGGAYDVMSSKHLCGDTNYAWPTAEIAVMGAKGAVEIIFKGHENVEAAQAEYIEKFANPFPAAVRGFVDDIIQPSSTRARICCDLDVLASKKVRVQEVFHQVVQSGHRDGRGAVRW

SEQ ID NO: 10042 - protein, 405 aa, Homo Sapiens
MAAALRVAAVGARLSVLASGLRAAVRSLCSQATSVNERIENKRRTALLGGGQRRIDAQHKRGKLTARERISLLLDPGSFVESDMFVEHRCADFGMAADKNKFPGDSVVTGRGRINGRLVYVFSQDFTVFGGSLSGAHAQKICKIMDQAITVGAPVIGLNDSGGARIQEGVESLAGYADIFLRNVTASGVIPQISLIMGPCAGGAVYSPALTDFTFMVKDTSYLFITGPDVVKSVTNEDVTQEELGGAKTHTTMSGVAHRAFENDVDALCNLRDFFNYLPLSSQDPAPVRECHDPSDRLVPELDTIVPLESTKAYNMVDIIHSVVDEREFFEIMPNYAKNIIVGFARMNGRTVGIVGNQPKVASGCLDINSSVKGARFVRFCDAFNIPLITFVDVPGFLPGLWRCL

SEQ ID NO: 10043 - protein, 520 aa, Homo Sapiens
MAAALRVAAVGARLSVLASGLRAAVRSLCSQATSVNERIENKRRTALLGGGQRRIDAQHKRGKLTARERISLLLDPGSFVESDMFVEHRCADFGMAADKNKFPGDSVVTGRGRINGRLVYVFSQIMDQAITVGAPVIGLNDSGGARIQEGVESLAGYADIFLRNVTASGVIPQISLIMGPCAGGAVYSPALTDFTFMVKDTSYLFITGPDVVKSVTNEDVTQEELGGAKTHTTMSGVAHRAFENDVDALCNLRDFFNYLPLSSQDPAPVRECHDPSDRLVPELDTIVPLESTKAYNMVDIIHSVVDEREFFEIMPNYAKNIIVGFARMNGRTVGIVGNQPKVASGCLDINSSVKGARFVRFCDAFNIPLITFVDVPGFLPGTAQEYGGIIRHGAKLLYAFAEATVPKVTVITRKAYGGAYDVMSSKHLCGDTNYAWPTAEIAVMGAKGAVEIIFKGHENVEAAQAEYIEKFANPFPAAVRGFVDDIIQPSSTRARICCDLDVLASKKVQRPWRKHANIPL

SEQ ID NO: 10044 - protein, 570 aa, Homo Sapiens
MAAALRVAAVGARLSVLASGLRAAVRSLCSQATSVNERIENKRRTALLGGGQRRIDAQHKRGKLTARERISLLLDPGSFVESDMFVEHRCADFGMAADKNKFPGDSVVTGRGRINGRLVYVFSQIRASAMSPRLVSDSWTQAIHLPWPPKVLGLQDFTVFGGSLSGAHAQKICKIMDQAITVGAPVIGLNDSGGARIQEGVESLAGYADIFLRNVTASGVIPQISLIMGPCAGGAVYSPALTDFTFMVKDTSYLFITGPDVVKSVTNEDVTQEELGGAKTHTTMSGVAHRAFENDVDALCNLRDFFNYLPLSSQDPAPVRECHDPSDRLVPELDTIVPLESTKAYNMVDIIHSVVDEREFFEIMPNYAKNIIVGFARMNGRTVGIVGNQPKVASGCLDINSSVKGARFVRFCDAFNIPLITFVDVPGFLPGTAQEYGGIIRHGAKLLYAFAEATVPKVTVITRKAYGGAYDVMSSKHLCGDTNYAWPTAEIAVMGAKGAVEIIFKGHENVEAAQAEYIEKFANPFPAAVRGFVDDIIQPSSTRARICCDLDVLASKKVQRPWRKHANIPL

SEQ ID NO: 10045 - protein, 559 aa, Homo Sapiens
MAAALRVAAVGARLSVLASGLRAAVRSLCSQATSVNERIENKRRTALLGGGQRRIDAQHKRGKLTARERISLLLDPGSFVESDMFVEHRCADFGMAADKNKFPGDSVVTGRGRINGRLVYVFSQQIIGWAQWLPLVISALWEAEDFTVFGGSLSGAHAQKICKIMDQAITVGAPVIGLNDSGGARIQEGVESLAGYADIFLRNVTASGVIPQISLIMGPCAGGAVYSPALTDFTFMVKDTSYLFITGPDVVKSVTNEDVTQEELGGAKTHTTMSGVAHRAFENDVDALCNLRDFFNYLPLSSQDPAPVRECHDPSDRLVPELDTIVPLESTKAYNMVDIIHSVVDEREFFEIMPNYAKNIIVGFARMNGRTVGIVGNQPKVASGCLDINSSVKGARFVRFCDAFNIPLITFVDVPGFLPGTAQEYGGIIRHGAKLLYAFAEATVPKVTVITRKAYGGAYDVMSSKHLCGDTNYAWPTAEIAVMGAKGAVEIIFKGHENVEAAQAEYIEKFANPFPAAVRGFVDDIIQPSSTRARICCDLDVLASKKVQRPWRKHANIPL

SEQ ID NO: 10046 - protein, 482 aa, Homo Sapiens
MAAALRVAAVGARLSVLASGLRAAVRSLCSQATSVNERIENKRRTALLGGGQRRIDAQHKRGKLTARERISLLLDPGSFVESDMFVEHRCADFGMAADKNKFPGDSVVTGRGRINGRLVYVFSQRNVTASGVIPQISLIMGPCAGGAVYSPALTDFTFMVKDTSYLFITGPDVVKSVTNEDVTQEELGGAKTHTTMSGVAHRAFENDVDALCNLRDFFNYLPLSSQDPAPVRECHDPSDRLVPELDTIVPLESTKAYNMVDIIHSVVDEREFFEIMPNYAKNIIVGFARMNGRTVGIVGNQPKVASGCLDINSSVKGARFVRFCDAFNIPLITFVDVPGFLPGTAQEYGGIIRHGAKLLYAFAEATVPKVTVITRKAYGGAYDVMSSKHLCGDTNYAWPTAEIAVMGAKGAVEIIFKGHENVEAAQAEYIEKFANPFPAAVRGFVDDIIQPSSTRARICCDLDVLASKKVQRPWRKHANIPL

SEQ ID NO: 10047 - protein, 84 aa, Homo Sapiens
MFVEHRCADFGMAADKNKFPGDSVVTGRGRINGRLVYVFSQDFTVFGGSLSGAHAQKICKIMDQAITVGAPVIGLNDSGGARIQ

SEQ ID NO: 10048 - protein, 134 aa, Homo Sapiens
MFVEHRCADFGMAADKNKFPGDSVVTGRGRINGRLVYVFSQDFTVFGGSLSGAHAQKICKIMDQAITVGAPVIGLNDSGGARIQEGVESLAGYADIFLRNVTASGVIPQISLIMGPCAGGAVYSPALTDFTFMV

SEQ ID NO: 10049 - protein, 163 aa, Homo Sapiens
  misc_feature (1)..(1): Xaa can be any naturally occurring amino acid
XESSWPSEISWAAHFGEGKLTARERISLLLDPGSFVESDMFVEHRCADFGMAADKNKFPGDSVVTGRGRINGRLVYVFSQDFTVFGGSLSGAHAQKICKIMDQAITVGAPVIGLNDSGGARIQEGVESLAGYADIFLRNVTASGVIPQISLIMGPCAGGAVYS

SEQ ID NO: 10050 - protein, 1237 aa, Homo Sapiens
MDSGAGGRRCPEAALLILGPPRMEHLRHSPGPGGQRLLLPSMLLALLLLLAPSPGHATRVVYKVPEEQPPNTLIGSLAADYGFPDVGHLYKLEVGAPYLRVDGKTGDIFTTETSIDREGLRECQNQLPGDPCILEFEVSITDLVQNGSPRLLEGQIEVQDINDNTPNFASPVITLAIPENTNIGSLFPIPLASDRDAGPNGVASYELQAGPEAQELFGLQVAEDQEEKQPQLIVMGNLDRERWDSYDLTIKVQDGGSPPRASSALLRVTVLDTNDNAPKFERPSYEAELSENSPIGHSVIQVKANDSDQGANAEIEYTFHQAPEVVRRLLRLDRNTGLITVQGPVDREDLSTLRFSVLAKDRGTNPKSARAQVVVTVKDMNDNAPTIEIRGIGLVTHQDGMANISEDVAEETAVALVQVSDRDEGENAAVTCVVAGDVPFQLRQASETGSDSKKKYFLQTTTPLDYEKVKDYTIEIVAVDSGNPPLSSTNSLKVQVVDVNDNAPVFTQSVTEVAFPENNKPGEVIAEITASDADSGSNAELVYSLEPEPAAKGLFTISPETGEIQVKTSLDREQRESYELKVVAADRGSPSLQGTATVLVNVLDCNDNDPKFMLSGYNFSVMENMPALSPVGMVTVIDGDKGENAQVQLSVEQDNGDFVIQNGTGTILSSLSFDREQQSTYTFQLKAVDGGVPPRSAYVGVTINVLDENDNAPYITAPSNTSHKLLTPQTRLGETVSQVAAEDFDSGVNAELIYSIAGGNPYGLFQIGSHSGAITLEKEIERRHHGLHRLVVKVSDRGKPPRYGTALVHLYVNETLANRTLLETLLGHSLDTPLDIDIAGDPEYERSKQRGNILFGVVAGVVAVALLIALAVLVRYCRQREAKSGYQAGKKETKDLYAPKPSGKASKGNKSKGKKSKSPKPVKPVEDEDEAGLQKSLKFNLMSDAPGDSPRIHLPLNYPPGSPDLGRHYRSNSPLPSIQLQPQSPSASKKHQVVQDLPPANTFVGTGDTTSTGSEQYSDYSYRTNPPKYPSKQLPHRRVTFSATSQAQELQDPSQHSYYDSGLEESETPSSKSSSGPRLGPLALPEDHYERTTPDGSIGEMEHPENDLRPLPDVAMTGTCTRECSEFGHSDTCWMPGQSSPSRRTKSSALKLSTFVPYQDRGGQEPAGAGSPSPPEDRNTKTAPVRLLPSYSAFSHSSHDSCKDSATLEEIPLTQTSDFPPAATPASAQTAKREIYL

SEQ ID NO: 10051 - protein, 1060 aa, Homo Sapiens
MDSGAGGRRCPEAALLILGPPRMEHLRHSPGPGGQRLLLPSMLLALLLLLAPSPGHATRVVYKVPEEQPPNTLIGSLAADYGFPDVGHLYKLEVGAPYLRVDGKTGDIFTTETSIDREGLRECQNQLPGDPCILEFEVSITDLVQNGSPRLLEGQIEVQDINDNTPNFASPVITLAIPENTNIGSLFPIPLASDRDAGPNGVASYELQAGPEAQELFGLQVAEDQEEKQPQLIVMGNLDRERWDSYDLTIKVQDGGSPPRASSALLRVTVLDTNDNAPKFERPSYEAELSENSPIGHSVIQVKANDSDQGANAEIEYTFHQAPEVVRRLLRLDRNTGLITVQGPVDREDLSTLRFSVLAKDRGTNPKSARAQVVVTVKDMNDNAPTIEIRGIGLVTHQDGMANISEDVAEETAVALVQVSDRDEGENAAVTCVVAGDVPFQLRQASETGSDSKKKYFLQTTTPLDYEKVKDYTIEIVAVDSGNPPLSSTNSLKVQVVDVNDNAPVFTQSVTEVAFPENNKPGEVIAEITASDADSGSNAELVYSLEPEPAAKGLFTISPETGEIQVKTSLDREQRESYELKVVAADRGSPSLQGTATVLVNVLDCNDNDPKFMLSGYNFSVMENMPALSPVGMVTVIDGDKGENAQVQLSVEQDNGDFVIQNGTGTILSSLSFDREQQSTYTFQLKAVDGGVPPRSAYVGVTINVLDENDNAPYITAPSNTSHKLLTPQTRLGETVSQVAAEDFDSGVNAELIYSIAGGNPYGLFQIGSHSGAITLEKEIERRHHGLHRLVVKVSDRGKPPRYGTALVHLYVNETLANRTLLETLLGHSLDTPLDIDIAGDPEYERSKQRGNILFGVVAGVVAVALLIALAVLVRYCRQREAKSGYQAGKKETKDLYAPKPSGKASKGNKSKGKKSKSPKPVKPVEDEDEAGLQKSLKFNLMSDAPGDSPRIHLPLNYPPGSPDLGRHYRSNSPLPSIQLQPQSPSASKKHQVVQDLPPANTFVGTGDTTSTGSEQYSDYSYRTNPPKYPSKQVGQPFQLSTPQPLPHPYHGAIWTEVWE

SEQ ID NO: 10052 - protein, 382 aa, Homo Sapiens
MDSGAGGRRCPEAALLILGPPRMEHLRHSPGPGGQRLLLPSMLLALLLLLAPSPGHATRVVYKVPEEQPPNTLIGSLAADYGFPDVGHLYKLEVGAPYLRVDGKTGDIFTTETSIDREGLRECQNQLPGDPCILEFEVSITDLVQNGSPRLLEGQIEVQDINDNTPNFASPVITLAIPENTNIGSLFPIPLASDRDAGPNGVASYELQAGPEAQELFGLQVAEDQEEKQPQLIVMGNLDRERWDSYDLTIKVQDGGSPPRASSALLRVTVLDTNDNAPKFERPSYEAELSENSPIGHSVIQLPHRRVTFSATSQAQELQDPSQHSYYDSGLEESETPSSKSSSGPRLGPLALPEDHYERTTPDGSIGEMEHPENEPAGRSRP

SEQ ID NO: 10053 - protein, 150 aa, Homo Sapiens
MEHLRHSPGPGGQRLLLPSMLLALLLLLAPSPGHATRVVYKVPEEQPPNTLIGSLAADYGFPDVGHLYKLEVGAPYLRVDGKTGDIFTTETSIDREGLRECQNQLPGDPCILEFEVSITDLVQNGSPRLLEGQIEVQDINDNTPNFASPV

SEQ ID NO: 10054 - protein, 126 aa, Homo Sapiens
  misc_feature (1)..(1): Xaa can be any naturally occurring amino acid
XGPNGVASYELQAGPEAQELFGLQVAEDQEEKQPQLIVMGNLDRERWDSYDLTIKVQDGGSPPRASSALLRVTVLDTNDNAPKFERPSYEAELSENSPIGHSVIQSLVDWDLEKRLRKKRETDSRG

SEQ ID NO: 10055 - protein, 17 aa, Homo Sapiens
  misc_feature (1)..(1): Xaa can be any naturally occurring amino acid
XIQVRGPLRITVRVTHH

SEQ ID NO: 10056 - protein, 23 aa, Homo Sapiens
MMQLLQLLLGLLGPGGYLFLLGD

SEQ ID NO: 10057 - protein, 1184 aa, Homo Sapiens
MMQLLQLLLGLLGPGGYLFLLGDCQEVTTLTVKYQVSEEVPSGTVIGKLSQELGREERRRQAGAAFQVLQLPQALPIQVDSEEGLLSTGRRLDREQLCRQWDPCLVSFDVLATGDLALIHVEIQVLDINDHQPRFPKGEQELEISESASLRTRIPLDRALDPDTGPNTLHTYTLSPSEHFALDVIVGPDETKHAELIVVKELDREIHSFFDLVLTAYDNGNPPKSGTSLVKVNVLDSNDNSPAFAESSLALEIQEDAAPGTLLIKLTATDPDQGPNGEVEFFLSKHMPPEVLDTFSIDAKTGQVILRRPLDYEKNPAYEVDVQARDLGPNPIPAHCKVLIKVLDVNDNIPSIHVTWASQPSLVSEALPKDSFIALVMADDLDSGHNGLVHCWLSQELGHFRLKRTNGNTYMLLTNATLDREQWPKYTLTLLAQDQGLQPLSAKKQLSIQISDINDNAPVFEKSRYEVSTRENNLPSLHLITIKAHDADLGINGKVSYRIQDSPVAHLVAIDSNTGEVTAQRSLNYEEMAGFEFQVIAEDSGQPMLASSVSVWVSLLDANDNAPEVVQPVLSDGKASLSVLVNASTGHLLVPIETPNGLGPAGTDTPPLATHSSRPFLLTTIVARDADSGANGEPLYSIRSGNEAHLFILNPHTGQLFVNVTNASSLIGSEWELEIVVEDQGSPPLQTRALLRVMFVTSVDHLRDSARKPGALSMSMLTVICLAVLLGIFGLILALFMSICRTEKKDNRAYNCREAESTYRQQPKRPQKHIQKADIHLVPVLRGQAGEPCEVGQSHKDVDKEAMMEAGWDPCLQAPFHLTPTLYRTLRNQGNQGAPAESREVLQDTVNLLFNHPRQRNASRENLNLPEPQPATGQPRSRPLKVAGSPTGRLAGDQGSEEAPQRPPASSATLRRQRHLNGKVSPEKESGPRQILRSLVRLSVAAFAERNPVEELTVDSPPVQQISQLLSLLHQGQFQPKPNHRGNKYLAKPGGSRSAIPDTDGPSARAGGQTDPEQEEGPLDPEEDLSVKQLLEEELSSLLDPSTGLALDRLSAPDPAWMARLSLPLTTNYRDNVISPDAAATEEPRTFQTFGKAEAPELSPTGTRLASTFVSEMSSLLEMLLEQRSSMPVEAASEALRRLSVCGRTLSLDLATSAASGMKVQGDPGGKTGTEGKSRGSSSSSRCL

SEQ ID NO: 10058 - protein, 460 aa, Homo Sapiens
LVEKKIEDLTEILDRYVQEQIPGAKVVVESIGARRHGDAFSLEDYTKCDLTVYAIDPQTNRAIDRNELFKFLDGKLLDINKDFQPYYGEGGRILEIRTPEAVTSIKKRGESLGYTEGALLALAFIIILCCIPAILVVLVSYRQFKVRQAECTKTARIQAALPAAKPAVPAPAPVAAPPPPPPPPPGAHLYEELGDSSMRGYGSEQQQLLRPSLLKPEELSMESGIDPGQEYGQDYYSYEHGYEMPQYGSRRRLLPPAGQEEYGEVVGEAEEEYEEEEWARKRMIKLVVDREYETSSTGEDSAPECQRNRLHHPSIHSNINGNIYIAQNGSVVRTRRACLTDNLKVASPVRLGGPFKKLDKLAVTHEENVPLNTLSKGPFSTEKMNARPTLVTFAPCPVGTDNTAVKPLRNRLKSTVEQESMIDSKNIKEALEFHSDHTQSDDEELWMGPWNNLHIPMTKL

SEQ ID NO: 10059 - protein, 92 aa, Homo Sapiens
MFRQFYLWTCLASGIILGSLFEICLGQYDDDCKLARGGPPATIVAIDEESRNGTILVDNMLIKGTAGGPDPTIELSLKDNVDYWVLMDPVKQ

SEQ ID NO: 10060 - protein, 1915 aa, Homo Sapiens
MFRQFYLWTCLASGIILGSLFEICLGQYDDDCKLARGGPPATIVAIDEESRNGTILVDNMLIKGTAGGPDPTIELSLKDNVDYWVLMDPVKQMLFLNSTGRVLDRDPPMNIHSIVVQVQCINKKVGTIIYHEVRIVVRDRNDNSPTFKHESYYATVNELTPVGTTIFTGFSGDNGATDIDDGPNGQIEYVIQYNPDDPDRAQNLNERRTTTTTLTVDVLDGDDLGPMFLPCVLVPNTRDCRPLTYQAAIPELRTPEELNPIIVTPPIQAIDQDRNIQPPSDRPGILYSILVGTPEDYPRFFHMHPRTAELSLLEPVNRDFHQKFDLVIKAEQDNGHPLPAFAGLHIEILDENNQSPYFTMPSYQGYILESAPVGATISDSLNLTSPLRIVALDKDIEDTKDPELHLFLNDYTSVFTVTQTGITRYLTLLQPVDREEQQTYTFSITAFDGVQESEPVIVNIQVMDANDNTPTFPEISYDVYVYTDMRPGDSVIQLTAVDADEGSNGEITYEILVGAQGDFIINKTTGLITIAPGVEMIVGRTYALTVQAADNAPPAERRNSICTVYIEVLPPNNQSPPRFPQLMYSLEISEAMRVGAVLLNLQATDREGDSITYAIENGDPQRVFNLSETTGILTLGKALDRESTDRYILIITASDGRPDGTSTATVNIVVTDVNDNAPVFDPYLPRNLSVVEEEANAFVGQVKATDPDAGINGQVHYSLGNFNNLFRITSNGSIYTAVKLNREVRDYYELVVVATDGAVHPRHSTLTLAIKVLDIDDNSPVFTNSTYTVLVEENLPAGTTILQIEAKDVDLGANVSYRIRSPEVKHFFALHPFTGELSLLRSLDYEAFPDQEASITFLVEAFDIYGTMPPGIATVTVIVKDMNDYPPVFSKRIYKGMVAPDAVKGTPITTVYAEDADPPGLPASRVRYRVDDVQFPYPASIFEVEEDSGRVITRVNLNEEPTTIFKLVVVAFDDGEPVMSSSATVKILVLHPGEIPRFTQEEYRPPPVSELATKGTMVGVISAAAINQSIVYSIVSGNEEDTFGINNITGVIYVNGPLDYETRTSYVLRVQADSLEVVLANLRVPSKSNTAKVYIEIQDENNHPPVFQKKFYIGGVSEDARMFTSVLRVKATDKDTGNYSVMAYRLIIPPIKEGKEGFVVETYTGLIKTAMLFHNMRRSYFKFQVIATDDYGKGLSGKADVLVSVVNQLDMQVIVSNVPPTLVEKKIEDLTEILDRYVQEQIPGAKVVVESIGARRHGDAFSLEDYTKCDLTVYAIDPQTNRAIDRNELFKFLDGKLLDINKDFQPYYGEGGRILEIRTPEAVTSIKKRGESLGYTEGALLALAFIIILCCIPAILVVLVSYRQRQAECTKTARIQAALPAAKPAVPAPAPVAAPPPPPPPPPGAHLYEELGDSSILFLLYHFQQSRGNNSVSEDRKHQQVVMPFSSNTIEAHKSAHVDGSLKSNKLKSARKFTFLSDEDDLSAHNPLYKENISQVSTNSDISQRTDFVDPFSPKIQAKSKSLRGPREKIQRLWSQSVSLPRRLMRKVPNRPEIIDLQQWQGTRQKAENENTGICTNKRGSSNPLLTTEEANLTEKEEIRQGETLMIEGTEQLKSLSSDSSFCFPRPHFSFSTLPTVSRTVELKSEPNVISSPAECSLELSPSRPCVLHSSLSRRETPICMLPIETERNIFENFAHPPNISPSACPLPPPPPISPPSPPPAPAPLAPPPDISPFSLFCPPPSPPSIPLPLPPPTFFPLSVSTSGPPTPPLLPPFPTPLPPPPPSIPCPPPPSASFLSTECVCITGVKCTTNLMPAEKIKSSMTQLSTTTVCKTDPQREPKGILRHVKNLAELEKSVANMYSQIEKNYLRTNVSELQTMCPSEVTNMEITSEQNKGSLNNIVEGTEKQSHSQSTSL

SEQ ID NO: 10061 - protein, 1955 aa, Homo Sapiens
MFRQFYLWTCLASGIILGSLFEICLGQYDDDCKLARGGPPATIVAIDEESRNGTILVDNMLIKGTAGGPDPTIELSLKDNVDYWVLMDPVKQMLFLNSTGRVLDRDPPMNIHSIVVQVQCINKKVGTIIYHEVRIVVRDRNDNSPTFKHESYYATVNELTPVGTTIFTGFSGDNGATDIDDGPNGQIEYVIQYNPDDPTSNDTFEIPLMLTGNIVLRKRLNYEDKTRYFVIIQANDRAQNLNERRTTTTTLTVDVLDGDDLGPMFLPCVLVPNTRDCRPLTYQAAIPELRTPEELNPIIVTPPIQAIDQDRNIQPPSDRPGILYSILVGTPEDYPRFFHMHPRTAELSLLEPVNRDFHQKFDLVIKAEQDNGHPLPAFAGLHIEILDENNQSPYFTMPSYQGYILESAPVGATISDSLNLTSPLRIVALDKDIEDTKDPELHLFLNDYTSVFTVTQTGITRYLTLLQPVDREEQQTYTFSITAFDGVQESEPVIVNIQVMDANDNTPTFPEISYDVYVYTDMRPGDSVIQLTAVDADEGSNGEITYEILVGAQGDFIINKTTGLITIAPGVEMIVGRTYALTVQAADNAPPAERRNSICTVYIEVLPPNNQSPPRFPQLMYSLEISEAMRVGAVLLNLQATDREGDSITYAIENGDPQRVFNLSETTGILTLGKALDRESTDRYILIITASDGRPDGTSTATVNIVVTDVNDNAPVFDPYLPRNLSVVEEEANAFVGQVKATDPDAGINGQVHYSLGNFNNLFRITSNGSIYTAVKLNREVRDYYELVVVATDGAVHPRHSTLTLAIKVLDIDDNSPVFTNSTYTVLVEENLPAGTTILQIEAKDVDLGANVSYRIRSPEVKHFFALHPFTGELSLLRSLDYEAFPDQEASITFLVEAFDIYGTMPPGIATVTVIVKDMNDYPPVFSKRIYKGMVAPDAVKGTPITTVYAEDADPPGLPASRVRYRVDDVQFPYPASIFEVEEDSGRVITRVNLNEEPTTIFKLVVVAFDDGEPVMSSSATVKILVLHPGEIPRFTQEEYRPPPVSELATKGTMVGVISAAAINQSIVYSIVSGNEEDTFGINNITGVIYVNGPLDYETRTSYVLRVQADSLEVVLANLRVPSKSNTAKVYIEIQDENNHPPVFQKKFYIGGVSEDARMFTSVLRVKATDKDTGNYSVMAYRLIIPPIKEGKEGFVVETYTGLIKTAMLFHNMRRSYFKFQVIATDDYGKGLSGKADVLVSVVNQLDMQVIVSNVPPTLVEKKIEDLTEILDRYVQEQIPGAKVVVESIGARRHGDAFSLEDYTKCDLTVYAIDPQTNRAIDRNELFKFLDGKLLDINKDFQPYYGEGGRILEIRTPEAVTSIKKRGESLGYTEGALLALAFIIILCCIPAILVVLVSYRQFKVRQAECTKTARIQAALPAAKPAVPAPAPVAAPPPPPPPPPGAHLYEELGDSSILFLLYHFQQSRGNNSVSEDRKHQQVVMPFSSNTIEAHKSAHVDGSLKSNKLKSARKFTFLSDEDDLSAHNPLYKENISQVSTNSDISQRTDFVDPFSPKIQAKSKSLRGPREKIQRLWSQSVSLPRRLMRKVPNRPEIIDLQQWQGTRQKAENENTGICTNKRGSSNPLLTTEEANLTEKEEIRQGETLMIEGTEQLKSLSSDSSFCFPRPHFSFSTLPTVSRTVELKSEPNVISSPAECSLELSPSRPCVLHSSLSRRETPICMLPIETERNIFENFAHPPNISPSACPLPPPPPISPPSPPPAPAPLAPPPDISPFSLFCPPPSPPSIPLPLPPPTFFPLSVSTSGPPTPPLLPPFPTPLPPPPPSIPCPPPPSASFLSTECVCITGVKCTTNLMPAEKIKSSMTQLSTTTVCKTDPQREPKGILRHVKNLAELEKSVANMYSQIEKNYLRTNVSELQTMCPSEVTNMEITSEQNKGSLNNIVEGTEKQSHSQSTSL

SEQ ID NO: 10062 - protein, 961 aa, Homo Sapiens
MFRQFYLWTCLASGIILGSLFEICLGQYDDDCKLARGGPPATIVAIDEESRNGTILVDNMLIKGTAGGPDPTIELSLKDNVDYWVLMDPVKQMLFLNSTGRVLDRDPPMNIHSIVVQVQCINKKVGTIIYHEVRIVVRDRNDNSPTFKHESYYATVNELTPVGTTIFTGFSGDNGATDIDDGPNGQIEYVIQYNPDDPTSNDTFEIPLMLTGNIVLRKRLNYEDKTRYFVIIQANDRAQNLNERRTTTTTLTVDVLDGDDLGPMFLPCVLVPNTRDCRPLTYQAAIPELRTPEELNPIIVTPPIQAIDQDRNIQPPSDRPGILYSILVGTPEDYPRFFHMHPRTAELSLLEPVNRDFHQKFDLVIKAEQDNGHPLPAFAGLHIEILDENNQSPYFTMPSYQGYILESAPVGATISDSLNLTSPLRIVALDKDIEDTKDPELHLFLNDYTSVFTVTQTGITRYLTLLQPVDREEQQTYTFSITAFDGVQESEPVIVNIQVMDANDNTPTFPEISYDVYVYTDMRPGDSVIQLTAVDADEGSNGEITYEILVGAQGDFIINKTTGLITIAPGVEMIVGRTYALTVQAADNAPPAERRNSICTVYIEVLPPNNQSPPRFPQLMYSLEISEAMRVGAVLLNLQATDREGDSITYAIENGDPQRVFNLSETTGILTLGKALDRESTDRYILIITASDGRPDGTSTATVNIVVTDVNDNAPVFDPYLPRNLSVVEEEANAFVGQVKATDPDAGINGQVHYSLGNFNNLFRITSNGSIYTAVKLNREVRDYYELVVVATDGAVHPRHSTLTLAIKVLDIDDNSPVFTNSTYTVLVEENLPAGTTILQIEAKDVDLGANVSYRIRSPEVKHFFALHPFTGELSLLRSLDYEAFPDQEASITFLVEAFDIYGTMPPGIATVTVIVKDMNDYPPVFSKRIYKGMVAPDAVKGTPITTVYAEDADPPVSRRH

SEQ ID NO: 10063 - protein, 654 aa, Homo Sapiens
MFRQFYLWTCLASGIILGSLFEICLGQYDDDCKLARGGPPATIVAIDEESRNGTILVDNMLIKGTAGGPDPTIELSLKDNVDYWVLMDPVKQMLFLNSTGRVLDRDPPMNIHSIVVQVQCINKKVGTIIYHEVRIVVRDRNDNSPTFKHESYYATVNELTPVGTTIFTGFSGDNGATDIDDGPNGQIEYVIQYNPDDPTSNDTFEIPLMLTGNIVLRKRLNYEDKTRYFVIIQANDRAQNLNERRTTTTTLTVDVLDGDDLGPMFLPCVLVPNTRDCRPLTYQAAIPELRTPEELNPIIVTPPIQAIDQDRNIQPPSDRPGILYSILVGTPEDYPRFFHMHPRTAELSLLEPVNRDFHQKFDLVIKAEQDNGHPLPAFAGLHIEILDENNQSPYFTMPSYQGYILESAPVGATISDSLNLTSPLRIVALDKDIEDTKDPELHLFLNDYTSVFTVTQTGITRYLTLLQPVDREEQQTYTFSITAFDGVQESEPVIVNIQVMDANDNTPTFPEISYDVYVYTDMRPGDSVIQLTAVDADEGSNGEITYEILVGAQGDFIINKTTGLITIAPGVEMIVGRTYALTVQAADNAPPAERRNSICTVYIEVLPPNNQSPPRFPQLMYSLEISEAMRVGAVLLNLQHGDSNLRESTGQGKH

SEQ ID NO: 10064 - protein, 1677 aa, Homo Sapiens
MFRQFYLWTCLASGIILGSLFEICLGQYDDDCKLARGGPPATIVAIDEESRNGTILVDNMLIKGTAGGPDPTIELSLKDNVDYWVLMDPVKQMLFLNSTGRVLDRDPPMNIHSIVVQVQCINKKVGTIIYHEVRIVVRDRNDNSPTFKHESYYATVNELTPVGTTIFTGFSGDNGATDIDDGPNGQIEYVIQYNPDDPTSNDTFEIPLMLTGNIVLRKRLNYEDKTRYFVIIQANDRAQNLNERRTTTTTLTVDVLDGDDLGPMFLPCVLVPNTRDCRPLTYQAAIPELRTPEELNPIIVTPPIQAIDQDRNIQPPSDRPGILYSILVGTPEDYPRFFHMHPRTAELSLLEPVNRDFHQKFDLVIKAEQDNGHPLPAFAGLHIEILDENNQSPYFTMPSYQGYILESAPVGATISDSLNLTSPLRIVALDKDIEDTKDPELHLFLNDYTSVFTVTQTGITRYLTLLQPVDREEQQTYTFSITAFDGVQESEPVIVNIQVMDANDNTPTFPEISYDVYVYTDMRPGDSVIQLTAVDADEGSNGEITYEILVGAQGDFIINKTTGLITIAPGVEMIVGRTYALTVQAADNAPPAERRNSICTVYIEVLPPNNQSPPRFPQLMYSLEISEAMRVGAVLLNLQATDREGDSITYAIENGDPQRVFNLSETTGILTLGKALDRESTDRYILIITASDGRPDGTSTATVNIVVTDVNDNAPVFDPYLPRNLSVVEEEANAFVGQVKATDPDAGINGQVHYSLGNFNNLFRITSNGSIYTAVKLNREVRDYYELVVVATDGAVHPRHSTLTLAIKVLDIDDNSPVFTNSTYTVLVEENLPAGTTILQIEAKDVDLGANVSYRIRSPEVKHFFALHPFTGELSLLRSLDYEAFPDQEASITFLVEAFDIYGTMPPGIATVTVIVKDMNDYPPVFSKRIYKGMVAPDAVKGTPITTVYAEDADPPGLPASRVRYRVDDVQFPYPASIFEVEEDSGRVITRVNLNEEPTTIFKLVVVAFDDGEPVMSSSATVKILVLHPGEIPRFTQEEYRPPPVSELATKGTMVGVISAAAINQSIVYSIVSGNEEDTFGINNITGVIYVNGPLDYETRTSYVLRVQADSLEVVLANLRVPSKSNTAKVYIEIQDENNHPPVFQKKFYIGGVSEDARMFTSVLRVKATDKDTGNYSVMAYRLIIPPIKEGKEGFVVETYTGLIKTAMLFHNMRRSYFKFQVIATDDYGKGLSGKADVLVSVVNQLDMQVIVSNVPPTLVEKKIEDLTEILDRYVQEQIPGAKVVVESIGARRHGDAFSLEDYTKCDLTVYAIDPQTNRAIDRNELFKFLDGKLLDINKDFQPYYGEGGRILEIRTPEAVTSIKKRGESLGYTEGALLALAFIIILCCIPAILVVLVSYRQFKVRQAECTKTARIQAALPAAKPAVPAPAPVAAPPPPPPPPPGAHLYEELGDSSMHKYEMPQYGSRRRLLPPAGQEEYGEVVGEAEEEYEEEEWARKRMIKLVVDREYETSSTGEDSAPECQRNRLHHPSIHSNINGNIYIAQNGSVVRTRRACLTDNLKVASPVRLGGPFKKLDKLAVTHEENVPLNTLSKGPFSTEKMNARPTLVTFAPCPVGTDNTAVKPLRNRLKSTVEQESMIDSKNIKEALEFHSDHTQSDDEELWMGPWNNLHIPMTKL

SEQ ID NO: 10065 - protein, 1957 aa, Homo Sapiens
MFRQFYLWTCLASGIILGSLFEICLGQYDDDCKLARGGPPATIVAIDEESRNGTILVDNMLIKGTAGGPDPTIELSLKDNVDYWVLMDPVKQMLFLNSTGRVLDRDPPMNIHSIVVQVQCINKKVGTIIYHEVRIVVRDRNDNSPTFKHESYYATVNELTPVGTTIFTGFSGDNGATDIDDGPNGQIEYVIQYNPDDPTSNDTFEIPLMLTGNIVLRKRLNYEDKTRYFVIIQANDRAQNLNERRTTTTTLTVDVLDGDDLGPMFLPCVLVPNTRDCRPLTYQAAIPELRTPEELNPIIVTPPIQAIDQDRNIQPPSDRPGILYSILVGTPEDYPRFFHMHPRTAELSLLEPVNRDFHQKFDLVIKAEQDNGHPLPAFAGLHIEILDENNQSPYFTMPSYQGYILESAPVGATISDSLNLTSPLRIVALDKDIEDTKDPELHLFLNDYTSVFTVTQTGITRYLTLLQPVDREEQQTYTFSITAFDGVQESEPVIVNIQVMDANDNTPTFPEISYDVYVYTDMRPGDSVIQLTAVDADEGSNGEITYEILVGAQGDFIINKTTGLITIAPGVEMIVGRTYALTVQAADNAPPAERRNSICTVYIEVLPPNNQSPPRFPQLMYSLEISEAMRVGAVLLNLQATDREGDSITYAIENGDPQRVFNLSETTGILTLGKALDRESTDRYILIITASDGRPDGTSTATVNIVVTDVNDNAPVFDPYLPRNLSVVEEEANAFVGQVKATDPDAGINGQVHYSLGNFNNLFRITSNGSIYTAVKLNREVRDYYELVVVATDGAVHPRHSTLTLAIKVLDIDDNSPVFTNSTYTVLVEENLPAGTTILQIEAKDVDLGANVSYRIRSPEVKHFFALHPFTGELSLLRSLDYEAFPDQEASITFLVEAFDIYGTMPPGIATVTVIVKDMNDYPPVFSKRIYKGMVAPDAVKGTPITTVYAEDADPPGLPASRVRYRVDDVQFPYPASIFEVEEDSGRVITRVNLNEEPTTIFKLVVVAFDDGEPVMSSSATVKILVLHPGEIPRFTQEEYRPPPVSELATKGTMVGVISAAAINQSIVYSIVSGNEEDTFGINNITGVIYVNGPLDYETRTSYVLRVQADSLEVVLANLRVPSKSNTAKVYIEIQDENNHPPVFQKKFYIGGVSEDARMFTSVLRVKATDKDTGNYSVMAYRLIIPPIKEGKEGFVVETYTGLIKTAMLFHNMRRSYFKFQVIATDDYGKGLSGKADVLVSVVNQLDMQVIVSNVPPTLVEKKIEDLTEILDRYVQEQIPGAKVVVESIGARRHGDAFSLEDYTKCDLTVYAIDPQTNRAIDRNELFKFLDGKLLDINKDFQPYYGEGGRILEIRTPEAVTSIKKRGESLGYTEGALLALAFIIILCCIPAILVVLVSYRQFKVRQAECTKTARIQAALPAAKPAVPAPAPVAAPPPPPPPPPGAHLYEELGDSSMHNLFLLYHFQQSRGNNSVSEDRKHQQVVMPFSSNTIEAHKSAHVDGSLKSNKLKSARKFTFLSDEDDLSAHNPLYKENISQVSTNSDISQRTDFVDPFSPKIQAKSKSLRGPREKIQRLWSQSVSLPRRLMRKVPNRPEIIDLQQWQGTRQKAENENTGICTNKRGSSNPLLTTEEANLTEKEEIRQGETLMIEGTEQLKSLSSDSSFCFPRPHFSFSTLPTVSRTVELKSEPNVISSPAECSLELSPSRPCVLHSSLSRRETPICMLPIETERNIFENFAHPPNISPSACPLPPPPPISPPSPPPAPAPLAPPPDISPFSLFCPPPSPPSIPLPLPPPTFFPLSVSTSGPPTPPLLPPFPTPLPPPPPSIPCPPPPSASFLSTECVCITGVKCTTNLMPAEKIKSSMTQLSTTTVCKTDPQREPKGILRHVKNLAELEKSVANMYSQIEKNYLRTNVSELQTMCPSEVTNMEITSEQNKGSLNNIVEGTEKQSHSQSTSL

SEQ ID NO: 10066 - protein, 1540 aa, Homo Sapiens
MFRQFYLWTCLASGIILGSLFEICLGQYDDDCKLARGGPPATIVAIDEESRNGTILVDNMLIKGTAGGPDPTIELSLKDNVDYWVLMDPVKQMLFLNSTGRVLDRDPPMNIHSIVVQVQCINKKVGTIIYHEVRIVVRDRNDNSPTFKHESYYATVNELTPVGTTIFTGFSGDNGATDIDDGPNGQIEYVIQYNPDDPTSNDTFEIPLMLTGNIVLRKRLNYEDKTRYFVIIQANDRAQNLNERRTTTTTLTVDVLDGDDLGPMFLPCVLVPNTRDCRPLTYQAAIPELRTPEELNPIIVTPPIQAIDQDRNIQPPSDRPGILYSILVGTPEDYPRFFHMHPRTAELSLLEPVNRDFHQKFDLVIKAEQDNGHPLPAFAGLHIEILDENNQSPYFTMPSYQGYILESAPVGATISDSLNLTSPLRIVALDKDIEDTKDPELHLFLNDYTSVFTVTQTGITRYLTLLQPVDREEQQTYTFSITAFDGVQESEPVIVNIQVMDANDNTPTFPEISYDVYVYTDMRPGDSVIQLTAVDADEGSNGEITYEILVGAQGDFIINKTTGLITIAPGVEMIVGRTYALTVQAADNAPPAERRNSICTVYIEVLPPNNQSPPRFPQLMYSLEISEAMRVGAVLLNLQATDREGDSITYAIENGDPQRVFNLSETTGILTLGKALDRESTDRYILIITASDGRPDGTSTATVNIVVTDVNDNAPVFDPYLPRNLSVVEEEANAFVGQVKATDPDAGINGQVHYSLGNFNNLFRITSNGSIYTAVKLNREVRDYYELVVVATDGAVHPRHSTLTLAIKVLDIDDNSPVFTNSTYTVLVEENLPAGTTILQIEAKDVDLGANVSYRIRSPEVKHFFALHPFTGELSLLRSLDYEAFPDQEASITFLVEAFDIYGTMPPGIATVTVIVKDMNDYPPVFSKRIYKGMVAPDAVKGTPITTVYAEDADPPGLPASRVRYRVDDVQFPYPASIFEVEEDSGRVITRVNLNEEPTTIFKLVVVAFDDGEPVMSSSATVKILVLHPGEIPRFTQEEYRPPPVSELATKGTMVGVISAAAINQSIVYSIVSGNEEDTFGINNITGVIYVNGPLDYETRTSYVLRVQADSLEVVLANLRVPSKSNTAKVYIEIQDENNHPPVFQKKFYIGGVSEDARMFTSVLRVKATDKDTGNYSVMAYRLIIPPIKEGKEGFVVETYTGLIKTAMLFHNMRRSYFKFQVIATDDYGKGLSGKADVLVSVVNQLDMQVIVSNVPPTLVEKKIEDLTEILDRYVQEQIPGAKVVVESIGARRHGDAFSLEDYTKCDLTVYAIDPQTNRAIDRNELFKFLDGKLLDINKDFQPYYGEGGRILEIRTPEAVTSIKKRGESLGYTEGALLALAFIIILCCIPAILVVLVSYRQVFKGRQAECTKTARIQAALPAAKPAVPAPAPVAAPPPPPPPPPGAHLYEELGDSSMNRNYPWSLELILARNMDKIITVMSMGMKCLNMGVAVDCYHQLDRRNMVRWLVKLRKNMRRKRKSQRKLKNQRLKLESLVRRKK

SEQ ID NO: 10067 - protein, 654 aa, Homo Sapiens; identical to SEQ ID NO: 10063

SEQ ID NO: 10068 - protein, 1783 aa, Homo Sapiens
MFRQFYLWTCLASGIILGSLFEICLGQYDDDCKLARGGPPATIVAIDEESRNGTILVDNMLIKGTAGGPDPTIELSLKDNVDYWVLMDPVKQMLFLNSTGRVLDRDPPMNIHSIVVQVQCINKKVGTIIYHEVRIVVRDRNDNSPTFKHESYYATVNELTPVGTTIFTGFSGDNGATDIDDGPNGQIEYVIQYNPDDPTSNDTFEIPLMLTGNIVLRKRLNYEDKTRYFVIIQANDRAQNLNERRTTTTTLTVDVLDGDDLGPMFLPCVLVPNTRDCRPLTYQAAIPELRTPEELNPIIVTPPIQAIDQDRNIQPPSDRPGILYSILVGTPEDYPRFFHMHPRTAELSLLEPVNRDFHQKFDLVIKAEQDNGHPLPAFAGLHIEILDENNQSPYFTMPSYQGYILESAPVGATISDSLNLTSPLRIVALDKDIEDVPPSGVPTKDPELHLFLNDYTSVFTVTQTGITRYLTLLQPVDREEQQTYTFSITAFDGVQESEPVIVNIQVMDANDNTPTFPEISYDVYVYTDMRPGDSVIQLTAVDADEGSNGEITYEILVGAQGDFIINKTTGLITIAPGVEMIVGRTYALTVQAADNAPPAERRNSICTVYIEVLPPNNQSPPRFPQLMYSLEISEAMRVGAVLLNLQATDREGDSITYAIENGDPQRVFNLSETTGILTLGKALDRESTDRYILIITASDGRPDGTSTATVNIVVTDVNDNAPVFDPYLPRNLSVVEEEANAFVGQVKATDPDAGINGQVHYSLGNFNNLFRITSNGSIYTAVKLNREVRDYYELVVVATDGAVHPRHSTLTLAIKVLDIDDNSPVFTNSTYTVLVEENLPAGTTILQIEAKDVDLGANVSYRIRSPEVKHFFALHPFTGELSLLRSLDYEAFPDQEASITFLVEAFDIYGTMPPGIATVTVIVKDMNDYPPVFSKRIYKGMVAPDAVKGTPITTVYAEDADPPGLPASRVRYRVDDVQFPYPASIFEVEEDSGRVITRVNLNEEPTTIFKLVVVAFDDGEPVMSSSATVKILVLHPGEIPRFTQEEYRPPPVSELATKGTMVGVISAAAINQSIVYSIVSGNEEDTFGINNITGVIYVNGPLDYETRTSYVLRVQADSLEVVLANLRVPSKSNTAKVYIEIQDENNHPPVFQKKFYIGGVSEDARMFTSVLRVKATDKDTGNYSVMAYRLIIPPIKEGKEGFVVETYTGLIKTAMLFHNMRRSYFKFQVIATDDYGKGLSGKADVLVSVVNQLDMQVIVSNVPPTLVEKKIEDLTEILDRYVQEQIPGAKVVVESIGARRHGDAFSLEDYTKCDLTVYAIDPQTNRAIDRNELFKFLDGKLLDINKDFQPYYGEGGRILEIRTPEAVTSIKKRGESLGYTEGALLALAFIIILCCIPAILVVLVSYRQFKVRQAECTKTARIQAALPAAKPAVPAPAPVAAPPPPPPPPPGAHLYEELGDSSMYEMPQYGSRRRLLPPAGQEEYGEVVGEAEEEYEEEEEEPKKIKKPKVEIREPSEEEEVVVTIEKPPAAEPTYTTWKRARIFPMIFKKVRGLADKRGIVDLEGEEWQRRLEEEDKDYLKLTLDQEEATESTVESEEESSSDYTEYSEEESEFSESETTEEESESETPSEEEESSTPESEESESTESEGEKARKNIVLARRRPMVEEVKEVKGRKEEPQEEQKEPKMEEEEHSEEEESGPAPVEESTDPEAQDIPEEGSAESASVEGGVESEEESESGSSSSSSESQSGGPWGYQVPAYDRSKNANQKKSPGANSEGYNTAL

SEQ ID NO: 10069 - protein, 1886 aa, Homo Sapiens
MFRQFYLWTCLASGIILGSLFEICLGQYDDDCKLARGGPPATIVAIDEESRNGTILVDNMLIKGTAGGPDPTIELSLKDNVDYWVLMDPVKQMLFLNSTGRVLDRDPPMNIHSIVVQVQCINKKVGTIIYHEVRIVVRDRNDNSPTFKHESYYATVNELTPVGTTIFTGFSGDNGATDIDDGPNGQIEYVIQYNPDDPTSNDTFEIPLMLTGNIVLRKRLNYEDKTRYFVIIQANDRAQNLNERRTTTTTLTVDVLDGDDLGPMFLPCVLVPNTRDCRPLTYQAAIPELRTPEELNPIIVTPPIQAIDQDRNIQPPSDRPGILYSILVGTPEDYPRFFHMHPRTAELSLLEPVNRDFHQKFDLVIKAEQDNGHPLPAFAGLHIEILDENNQSPYFTMPSYQGYILESAPVGATISDSLNLTSPLRIVALDKDIEDTKDPELHLFLNDYTSVFTVTQTGITRYLTLLQPVDREEQQTYTFSITAFDGVQESEPVIVNIQVMDANDNTPTFPEISYDVYVYTDMRPGDSVIQLTAVDADEGSNGEITYEILVGAQGDFIINKTTGLITIAPGVEMIVGRTYALTVQAADNAPPAERSTGILTLGKALDRESTDRYILIITASDGRPDGTSTATVNIVVTDVNDNAPVFDPYLPRNLSVVEEEANAFVGQVKATDPDAGINGQVHYSLGNFNNLFRITSNGSIYTAVKLNREVRDYYELVVVATDGAVHPRHSTLTLAIKVLDIDDNSPVFTNSTYTVLVEENLPAGTTILQIEAKDVDLGANVSYRIRSPEVKHFFALHPFTGELSLLRSLDYEAFPDQEASITFLVEAFDIYGTMPPGIATVTVIVKDMNDYPPVFSKRIYKGMVAPDAVKGTPITTVYAEDADPPGLPASRVRYRVDDVQFPYPASIFEVEEDSGRVITRVNLNEEPTTIFKLVVVAFDDGEPVMSSSATVKILVLHPGEIPRFTQEEYRPPPVSELATKGTMVGVISAAAINQSIVYSIVSGNEEDTFGINNITGVIYVNGPLDYETRTSYVLRVQADSLEVVLANLRVPSKSNTAKVYIEIQDENNHPPVFQKKFYIGGVSEDARMFTSVLRVKATDKDTGNYSVMAYRLIIPPIKEGKEGFVVETYTGLIKTAMLFHNMRRSYFKFQVIATDDYGKGLSGKADVLVSVVNQLDMQVIVSNVPPTLVEKKIEDLTEILDRYVQEQIPGAKVVVESIGARRHGDAFSLEDYTKCDLTVYAIDPQTNRAIDRNELFKFLDGKLLDINKDFQPYYGEGGRILEIRTPEAVTSIKKRGESLGYTEGALLALAFIIILCCIPAILVVLVSYRQFKVRQAECTKTARIQAALPAAKPAVPAPAPVAAPPPPPPPPPGAHLYEELGDSSMHNLFLLYHFQQSRGNNSVSEDRKHQQVVMPFSSNTIEAHKSAHVDGSLKSNKLKSARKFTFLSDEDDLSAHNPLYKENISQVSTNSDISQRTDFVDPFSPKIQAKSKSLRGPREKIQRLWSQSVSLPRRLMRKVPNRPEIIDLQQWQGTRQKAENENTGICTNKRGSSNPLLTTEEANLTEKEEIRQGETLMIEGTEQLKSLSSDSSFCFPRPHFSFSTLPTVSRTVELKSEPNVISSPAECSLELSPSRPCVLHSSLSRRETPICMLPIETERNIFENFAHPPNISPSACPLPPPPPISPPSPPPAPAPLAPPPDISPFSLFCPPPSPPSIPLPLPPPTFFPLSVSTSGPPTPPLLPPFPTPLPPPPPSIPCPPPPSASFLSTECVCITGVKCTTNLMPAEKIKSSMTQLSTTTVCKTDPQREPKGILRHVKNLAELEKSVANMYSQIEKNYLRTNVSELQTMCPSEVTNMEITSEQNKGSLNNIVEGTEKQSHSQSTSL

SEQ ID NO: 10070 - protein, 1676 aa, Homo Sapiens
MFRQFYLWTCLASGIILGSLFEICLGQYDDDCKLARGGPPATIVAIDEESRNGTILVDNMLIKGTAGGPDPTIELSLKDNVDYWVLMDPVKQMLFLNSTGRVLDRDPPMNIHSIVVQVQCINKKVGTIIYHEVRIVVRDRNDNSPTFKHESYYATVNELTPVGTTIFTGFSGDNGATDIDDGPNGQIEYVIQYNPDDPTSNDTFEIPLMLTGNIVLRKRLNYEDKTRYFVIIQANDRAQNLNERRTTTTTLTVDVLDGDDLGPMFLPCVLVPNTRDCRPLTYQAAIPELRTPEELNPIIVTPPIQAIDQDRNIQPPSDRPGILYSILVGTPEDYPRFFHMHPRTAELSLLEPVNRDFHQKFDLVIKAEQDNGHPLPAFAGLHIEILDENNQSPYFTMPSYQGYILESAPVGATISDSLNLTSPLRIVALDKDIEDTKDPELHLFLNDYTSVFTVTQTGITRYLTLLQPVDREEQQTYTFSITAFDGVQESEPVIVNIQVMDANDNTPTFPEISYDVYVYTDMRPGDSVIQLTAVDADEGSNGEITYEILVGAQGDFIINKTTGLITIAPGVEMIVGRTYALTVQAADNAPPAERRNSICTVYIEVLPPNNQSPPRFPQLMYSLEISEAMRVGAVLLNLQATDREGDSITYAIENGDPQRVFNLSETTGILTLGKALDRESTDRYILIITASDGRPDGTSTATVNIVVTDVNDNAPVFDPYLPRNLSVVEEEANAFVGQVKATDPDAGINGQVHYSLGNFNNLFRITSNGSIYTAVKLNREVRDYYELVVVATDGAVHPRHSTLTLAIKVLDIDDNSPVFTNSTYTVLVEENLPAGTTILQIEAKDVDLGANVSYRIRSPEVKHFFALHPFTGELSLLRSLDYEAFPDQEASITFLVEAFDIYGTMPPGIATVTVIVKDMNDYPPVFSKRIYKGMVAPDAVKGTPITTVYAEDADPPGLPASRVRYRVDDVQFPYPASIFEVEEDSGRVITRVNLNEEPTTIFKLVVVAFDDGEPVMSSSATVKILVLHPGEIPRFTQEEYRPPPVSELATKGTMVGVISAAAINQSIVYSIVSGNEEDTFGINNITGVIYVNGPLDYETRTSYVLRVQADSLEVVLANLRVPSKSNTAKVYIEIQDENNHPPVFQKKFYIGGVSEDARMFTSVLRVKATDKDTGNYSVMAYRLIIPPIKEGKEGFVVETYTGLIKTAMLFHNMRRSYFKFQVIATDDYGKGLSGKADVLVSVVNQLDMQVIVSNVPPTLVEKKIEDLTEILDRYVQEQIPGAKVVVESIGARRHGDAFSLEDYTKCDLTVYAIDPQTNRAIDRNELFKFLDGKLLDINKDFQPYYGEGGRILEIRTPEAVTSIKKRGESLGYTEGALLALAFIIILCCIPAILVVLVSYRQVFKGRQAECTKTARIQAALPAAKPAVPAPAPVAAPPPPPPPPPGAHLYEELGDSSMYEMPQYGSRRRLLPPAGQEEYGEVVGEAEEEYEEEEWARKRMIKLVVDREYETSSTGEDSAPECQRNRLHHPSIHSNINGNIYIAQNGSVVRTRRACLTDNLKVASPVRLGGPFKKLDKLAVTHEENVPLNTLSKGPFSTEKMNARPTLVTFAPCPVGTDNTAVKPLRNRLKSTVEQESMIDSKNIKEALEFHSDHTQSDDEELWMGPWNNLHIPMTKL

SEQ ID NO: 10071 - protein, 650 aa, Homo Sapiens
MFRQFYLWTCLASGIILGSLFEICLGQYDDDCKLARGGPPATIVAIDEESRNGTILVDNMLIKGTAGGPDPTIELSLKDNVDYWVLMDPVKQMLFLNSTGRVLDRDPPMNIHSIVVQVQCINKKVGTIIYHEVRIVVRDRNDNSPTFKHESYYATVNELTPVGTTIFTGFSGDNGATDIDDGPNGQIEYVIQYNPDDPTSNDTFEIPLMLTGNIVLRKRLNYEDKTRYFVIIQANDRAQNLNERRTTTTTLTVDVLDGDDLGPMFLPCVLVPNTRDCRPLTYQAAIPELRTPEELNPIIVTPPIQAIDQDRNIQPPSDRPGILYSILVGTPEDYPRFFHMHPRTAELSLLEPVNRDFHQKFDLVIKEEPKKIKKPKVEIREPSEEEEVVVTIEKPPAAEPTYTTWKRARIFPMIFKKVRGLADKRGIVDLEGEEWQRRLEEEDKDYLKLTLDQEEATESTVESEEESSSDYTEYSEEESEFSESETTEEESESETPSEEEESSTPESEESESTESEGEKARKNIVLARRRPMVEEVKEVKGRKEEPQEEQKEPKMEEEEHSEEEESGPAPVEESTDPEAQDIPEEGSAESASVEGGVESEEESESGSSSSSSESQSGGPWGYQVPAYDRSKNANQKKSPGANSEGYNTAL

SEQ ID NO: 10072 - protein, 981 aa, Homo Sapiens
MFRQFYLWTCLASGIILGSLFEICLGQYDDDCKLARGGPPATIVAIDEESRNGTILVDNMLIKGTAGGPDPTIELSLKDNVDYWVLMDPVKQMLFLNSTGRVLDRDPPMNIHSIVVQVQCINKKVGTIIYHEVRIVVRDRNDNSPTFKHESYYATVNELTPVGTTIFTGFSGDNGATDIDDGPNGQIEYVIQYNPDDPTSNDTFEIPLMLTGNIVLRKRLNYEDKTRYFVIIQANDRAQNLNERRTTTTTLTVDVLDGDDLGPMFLPCVLVPNTRDCRPLTYQAAIPELRTPEELNPIIVTPPIQAIDQDRNIQPPSDRPGILYSILVGTPEDYPRFFHMHPRTAELSLLEPVNRDFHQKFDLVIKAEQDNGHPLPAFAGLHIEILDENNQSPYFTMPSYQGYILESAPVGATISDSLNLTSPLRIVALDKDIEDTKDPELHLFLNDYTSVFTVTQTGITRYLTLLQPVDREEQQTYTFSITAFDGVQESEPVIVNIQVMDANDNTPTFPEISYDVYVYTDMRPGDSVIQLTAVDADEGSNGEITYEILVGAQGDFIINKTTGLITIAPGVEMIVGRTYALTVQAADNAPPAERRNSICTVYIEVLPPNNQSPPRFPQLMYSLEISEAMRVGAVLLNLQATDREGDSITYAIENGDPQRVFNLSETTGILTLGKALDRESTDRYILIITASDGRPDGEEPKKIKKPKVEIREPSEEEEVVVTIEKPPAAEPTYTTWKRARIFPMIFKKVRGLADKRGIVDLEGEEWQRRLEEEDKDYLKLTLDQEEATESTVESEEESSSDYTEYSEEESEFSESETTEEESESETPSEEEESSTPESEESESTESEGEKARKNIVLARRRPMVEEVKEVKGRKEEPQEEQKEPKMEEEEHSEEEESGPAPVEESTDPEAQDIPEEGSAESASVEGGVESEEESESGSSSSSSESQSGGPWGYQVPAYDRSKNANQKKSPGANSEGYNTAL

SEQ ID NO: 10073 - protein, 329 aa, Homo Sapiens
MFRQFYLWTCLASGIILGSLFEICLGQYDDDCKLARGGPPATIVAIDEESRNGTILVDNMLIKGTAGGPDPTIELSLKDNVDYWVLMDPVKQMLFLNSTGRVLDRDPPMNIHSIVVQVQCINKKVGTIIYHEVRIVVRDRNDNSPTFKHESYYATVNELTPVGTTIFTGFSGDNGATDIDDGPNGQIEYVIQYNPDDPTSNDTFEIPLMLTGNIVLRKRLNYEDKTRYFVIIQANDRAQNLNERRTTTTTLTVDVLDGDDLGPMFLPCVLVPNTRDCRPLTYQAAIPELRTPDLGSLCSGTNSWCQGRSGVHWSSPAWRCLFPRRLHQM

SEQ ID NO: 10074 - protein, 719 aa, Homo Sapiens
MFRQFYLWTCLASGIILGSLFEICLGQYDDDCKLARGGPPATIVAIDEESRNGTILVDNMLIKGTAGGPDPTIELSLKDNVDYWVLMDPVKQMLFLNSTGRVLDRDPPMNIHSIVVQVQCINKKVGTIIYHEVRIVVRDRNDNSPTFKHESYYATVNELTPVGTTIFTGFSGDNGATDIDDGPNGQIEYVIQYNPDDPTSNDTFEIPLMLTGNIVLRKRLNYEDKTRYFVIIQANDRAQNLNERRTTTTTLTVDVLDGDDLGPMFLPCVLVPNTRDCRPLTYQAAIPELRTPEELNPIIVTPPIQAIDQDRNIQPPSDRPGILYSILVGTPEDYPRFFHMHPRTAELSLLEPVNRDFHQKFDLVIKAEQDNGHPLPAFAGLHIEILDENNQSPYFTMPSYQGYILESAPVGATISDSLNLTSPLRIVALDKDIEDEEPKKIKKPKVEIREPSEEEEVVVTIEKPPAAEPTYTTWKRARIFPMIFKKVRGLADKRGIVDLEGEEWQRRLEEEDKDYLKLTLDQEEATESTVESEEESSSDYTEYSEEESEFSESETTEEESESETPSEEEESSTPESEESESTESEGEKARKNIVLARRRPMVEEVKEVKGRKEEPQEEQKEPKMEEEEHSEEEESGPAPVEESTDPEAQDIPEEGSAESASVEGGVESEEESESGSSSSSSESQSGGPWGYQVPAYDRSKNANQKKSPGANSEGYNTAL

SEQ ID NO: 10075 - protein, 1952 aa, Homo Sapiens
MFRQFYLWTCLASGIILGSLFEICLGQYDDDCKLARGGPPATIVAIDEESRNGTILVDNMLIKGTAGGPDPTIELSLKDNVDYWVLMDPVKQMLFLNSTGRVLDRDPPMNIHSIVVQVQCINKKVGTIIYHEVRIVVRDRNDNSPTFKHESYYATVNELTPVGTTIFTGFSGDNGATDIDDGPNGQIEYVIQYNPDDPTSNDTFEIPLMLTGNIVLRKRLNYEDKTRYFVIIQANDRAQNLNERRTTTTTLTVDVLDGDDLGPMFLPCVLVPNTRDCRPLTYQAAIPELRTPEELNPIIVTPPIQAIDQDRNIQPPSDRPGILYSILVGTPEDYPRFFHMHPRTAELSLLEPVNRDFHQKFDLVIKAEQDNGHPLPAFAGLHIEILDENNQSPYFTMPSYQGYILESAPVGATISDSLNLTSPLRIVALDKDIEDTKDPELHLFLNDYTSVFTVTQTGITRYLTLLQPVDREEQQTYTFSITAFDGVQESEPVIVNIQVMDANDNTPTFPEISYDVYVYTDMRPGDSVIQLTAVDADEGSNGEITYEILVGAQGDFIINKTTGLITIAPGVEMIVGRTYALTVQAADNAPPAERRNSICTVYIEVLPPNNQSPPRFPQLMYSLEISEAMRVGAVLLNLQATDREGDSITYAIENGDPQRVFNLSETTGILTLGKALDRESTDRYILIITASDGRPDGTSTATVNIVVTDVNDNAPVFDPYLPRNLSVVEEEANAFVGQVKATDPDAGINGQVHYSLGNFNNLFRITSNGSIYTAVKLNREVRDYYELVVVATDGAVHPRHSTLTLAIKVLDIDDNSPVFTNSTYTVLVEENLPAGTTILQIEAKDVDLGANVSYRIRSPEVKHFFALHPFTGELSLLRSLDYEAFPDQEASITFLVEAFDIYGTMPPGIATVTVIVKDMNDYPPVFSKRIYKGMVAPDAVKGTPITTVYAEDADPPGLPASRVRYRVDDVQFPYPASIFEVEEDSGRVITRVNLNEEPTTIFKLVVVAFDDGEPVMSSSATVKILVLHPGEIPRFTQEEYRPPPVSELATKGTMVGVISAAAINQSIVYSIVSGNEEDTFGINNITGVIYVNGPLDYETRTSYVLRVQADSLEVVLANLRVPSKSNTAKVYIEIQDENNHPPVFQKKFYIGGVSEDARMFTSVLRVKATDKDTGNYSVMAYRLIIPPIKEGKEGFVVETYTGLIKTAMLFHNMRRSYFKFQVIATDDYGKGLSGKADVLVSVVNQLDMQVIVSNVPPTLVEKKIEDLTEILDRYVQEQIPGAKVVVESIGARRHGDAFSLEDYTKCDLTVYAIDPQTNRAIDRNELFKFLDGKLLDINKDFQPYYGEGGRILEIRTPEAVTSIKKRGESLGYTEGALLALAFIIILCCIPAILVVLVSYRQRQAECTKTARIQAALPAAKPAVPAPAPVAAPPPPPPPPPGAHLYEELGDSSILFLLYHFQQSRGNNSVSEDRKHQQVVMPFSSNTIEAHKSAHVDGSLKSNKLKSARKFTFLSDEDDLSAHNPLYKENISQVSTNSDISQRTDFVDPFSPKIQAKSKSLRGPREKIQRLWSQSVSLPRRLMRKVPNRPEIIDLQQWQGTRQKAENENTGICTNKRGSSNPLLTTEEANLTEKEEIRQGETLMIEGTEQLKSLSSDSSFCFPRPHFSFSTLPTVSRTVELKSEPNVISSPAECSLELSPSRPCVLHSSLSRRETPICMLPIETERNIFENFAHPPNISPSACPLPPPPPISPPSPPPAPAPLAPPPDISPFSLFCPPPSPPSIPLPLPPPTFFPLSVSTSGPPTPPLLPPFPTPLPPPPPSIPCPPPPSASFLSTECVCITGVKCTTNLMPAEKIKSSMTQLSTTTVCKTDPQREPKGILRHVKNLAELEKSVANMYSQIEKNYLRTNVSELQTMCPSEVTNMEITSEQNKGSLNNIVEGTEKQSHSQSTSL

SEQ ID NO: 10076 - protein, 1539 aa, Homo Sapiens
MFRQFYLWTCLASGIILGSLFEICLGQYDDDCKLARGGPPATIVAIDEESRNGTILVDNMLIKGTAGGPDPTIELSLKDNVDYWVLMDPVKQMLFLNSTGRVLDRDPPMNIHSIVVQVQCINKKVGTIIYHEVRIVVRDRNDNSPTFKHESYYATVNELTPVGTTIFTGFSGDNGATDIDDGPNGQIEYVIQYNPDDPTSNDTFEIPLMLTGNIVLRKRLNYEDKTRYFVIIQANDRAQNLNERRTTTTTLTVDVLDGDDLGPMFLPCVLVPNTRDCRPLTYQAAIPELRTPEELNPIIVTPPIQAIDQDRNIQPPSDRPGILYSILVGTPEDYPRFFHMHPRTAELSLLEPVNRDFHQKFDLVIKAEQDNGHPLPAFAGLHIEILDENNQSPYFTMPSYQGYILESAPVGATISDSLNLTSPLRIVALDKDIEDTKDPELHLFLNDYTSVFTVTQTGITRYLTLLQPVDREEQQTYTFSITAFDGVQESEPVIVNIQVMDANDNTPTFPEISYDVYVYTDMRPGDSVIQLTAVDADEGSNGEITYEILVGAQGDFIINKTTGLITIAPGVEMIVGRTYALTVQAADNAPPAERRNSICTVYIEVLPPNNQSPPRFPQLMYSLEISEAMRVGAVLLNLQATDREGDSITYAIENGDPQRVFNLSETTGILTLGKALDRESTDRYILIITASDGRPDGTSTATVNIVVTDVNDNAPVFDPYLPRNLSVVEEEANAFVGQVKATDPDAGINGQVHYSLGNFNNLFRITSNGSIYTAVKLNREVRDYYELVVVATDGAVHPRHSTLTLAIKVLDIDDNSPVFTNSTYTVLVEENLPAGTTILQIEAKDVDLGANVSYRIRSPEVKHFFALHPFTGELSLLRSLDYEAFPDQEASITFLVEAFDIYGTMPPGIATVTVIVKDMNDYPPVFSKRIYKGMVAPDAVKGTPITTVYAEDADPPGLPASRVRYRVDDVQFPYPASIFEVEEDSGRVITRVNLNEEPTTIFKLVVVAFDDGEPVMSSSATVKILVLHPGEIPRFTQEEYRPPPVSELATKGTMVGVISAAAINQSIVYSIVSGNEEDTFGINNITGVIYVNGPLDYETRTSYVLRVQADSLEVVLANLRVPSKSNTAKVYIEIQDENNHPPVFQKKFYIGGVSEDARMFTSVLRVKATDKDTGNYSVMAYRLIIPPIKEGKEGFVVETYTGLIKTAMLFHNMRRSYFKFQVIATDDYGKGLSGKADVLVSVVNQLDMQVIVSNVPPTLVEKKIEDLTEILDRYVQEQIPGAKVVVESIGARRHGDAFSLEDYTKCDLTVYAIDPQTNRAIDRNELFKFLDGKLLDINKDFQPYYGEGGRILEIRTPEAVTSIKKRGESLGYTEGALLALAFIIILCCIPAILVVLVSYRQFKVRQAECTKTARIQAALPAAKPAVPAPAPVAAPPPPPPPPPGAHLYEELGDSSMHKNYPWSLELILARNMDKIITVMSMGMKCLNMGVAVDCYHQLDRRNMVRWLVKLRKNMRRKRKSQRKLKNQRLKLESLVRRKK

SEQ ID NO: 10077 - protein, 1675 aa, Homo Sapiens
MFRQFYLWTCLASGIILGSLFEICLGQYDDDCKLARGGPPATIVAIDEESRNGTILVDNMLIKGTAGGPDPTIELSLKDNVDYWVLMDPVKQMLFLNSTGRVLDRDPPMNIHSIVVQVQCINKKVGTIIYHEVRIVVRDRNDNSPTFKHESYYATVNELTPVGTTIFTGFSGDNGATDIDDGPNGQIEYVIQYNPDDPTSNDTFEIPLMLTGNIVLRKRLNYEDKTRYFVIIQANDRAQNLNERRTTTTTLTVDVLDGDDLGPMFLPCVLVPNTRDCRPLTYQAAIPELRTPEELNPIIVTPPIQAIDQDRNIQPPSDRPGILYSILVGTPEDYPRFFHMHPRTAELSLLEPVNRDFHQKFDLVIKAEQDNGHPLPAFAGLHIEILDENNQSPYFTMPSYQGYILESAPVGATISDSLNLTSPLRIVALDKDIEDTKDPELHLFLNDYTSVFTVTQTGITRYLTLLQPVDREEQQTYTFSITAFDGVQESEPVIVNIQVMDANDNTPTFPEISYDVYVYTDMRPGDSVIQLTAVDADEGSNGEITYEILVGAQGDFIINKTTGLITIAPGVEMIVGRTYALTVQAADNAPPAERRNSICTVYIEVLPPNNQSPPRFPQLMYSLEISEAMRVGAVLLNLQATDREGDSITYAIENGDPQRVFNLSETTGILTLGKALDRESTDRYILIITASDGRPDGTSTATVNIVVTDVNDNAPVFDPYLPRNLSVVEEEANAFVGQVKATDPDAGINGQVHYSLGNFNNLFRITSNGSIYTAVKLNREVRDYYELVVVATDGAVHPRHSTLTLAIKVLDIDDNSPVFTNSTYTVLVEENLPAGTTILQIEAKDVDLGANVSYRIRSPEVKHFFALHPFTGELSLLRSLDYEAFPDQEASITFLVEAFDIYGTMPPGIATVTVIVKDMNDYPPVFSKRIYKGMVAPDAVKGTPITTVYAEDADPPGLPASRVRYRVDDVQFPYPASIFEVEEDSGRVITRVNLNEEPTTIFKLVVVAFDDGEPVMSSSATVKILVLHPGEIPRFTQEEYRPPPVSELATKGTMVGVISAAAINQSIVYSIVSGNEEDTFGINNITGVIYVNGPLDYETRTSYVLRVQADSLEVVLANLRVPSKSNTAKVYIEIQDENNHPPVFQKKFYIGGVSEDARMFTSVLRVKATDKDTGNYSVMAYRLIIPPIKEGKEGFVVETYTGLIKTAMLFHNMRRSYFKFQVIATDDYGKGLSGKADVLVSVVNQLDMQVIVSNVPPTLVEKKIEDLTEILDRYVQEQIPGAKVVVESIGARRHGDAFSLEDYTKCDLTVYAIDPQTNRAIDRNELFKFLDGKLLDINKDFQPYYGEGGRILEIRTPEAVTSIKKRGESLGYTEGALLALAFIIILCCIPAILVVLVSYRQFKVRQAECTKTARIQAALPAAKPAVPAPAPVAAPPPPPPPPPGAHLYEELGDSSMYEMPQYGSRRRLLPPAGQEEYGEVVGEAEEEYEEEEWARKRMIKLVVDREYETSSTGEDSAPECQRNRLHHPSIHSNINGNIYIAQNGSVVRTRRACLTDNLKVASPVRLGGPFKKLDKLAVTHEENVPLNTLSKGPFSTEKMNARPTLVTFAPCPVGTDNTAVKPLRNRLKSTVEQESMIDSKNIKEALEFHSDHTQSDDEELWMGPWNNLHIPMTKL

SEQ ID NO: 10078 - protein, 1740 aa, Homo Sapiens
MFRQFYLWTCLASGIILGSLFEICLGQYDDDCKLARGGPPATIVAIDEESRNGTILVDNMLIKGTAGGPDPTIELSLKDNVDYWVLMDPVKQMLFLNSTGRVLDRDPPMNIHSIVVQVQCINKKVGTIIYHEVRIVVRDRNDNSPTFKHESYYATVNELTPVGTTIFTGFSGDNGATDIDDGPNGQIEYVIQYNPDDPTSNDTFEIPLMLTGNIVLRKRLNYEDKTRYFVIIQANDRAQNLNERRTTTTTLTVDVLDGDDLGPMFLPCVLVPNTRDCRPLTYQAAIPELRTPEELNPIIVTPPIQAIDQDRNIQPPSDRPGILYSILVGTPEDYPRFFHMHPRTAELSLLEPVNRDFHQKFDLVIKAEQDNGHPLPAFAGLHIEILDENNQSPYFTMPSYQGYILESAPVGATISDSLNLTSPLRIVALDKDIEDTKDPELHLFLNDYTSVFTVTQTGITRYLTLLQPVDREEQQTYTFSITAFDGVQESEPVIVNIQVMDANDNTPTFPEISYDVYVYTDMRPGDSVIQLTAVDADEGSNGEITYEILVGAQGDFIINKTTGLITIAPGVEMIVGRTYALTVQAADNAPPAERRNSICTVYIEVLPPNNQSPPRFPQLMYSLEISEAMRVGAVLLNLQATDREGDSITYAIENGDPQRVFNLSETTGILTLGKALDRESTDRYILIITASDGRPDGTSTATVNIVVTDVNDNAPVFDPYLPRNLSVVEEEANAFVGQVKATDPDAGINGQVHYSLGNFNNLFRITSNGSIYTAVKLNREVRDYYELVVVATDGAVHPRHSTLTLAIKVLDIDDNSPVFTNSTYTVLVEENLPAGTTILQIEAKDVDLGANVSYRIRSPEVKHFFALHPFTGELSLLRSLDYEAFPDQEASITFLVEAFDIYGTMPPGIATVTVIVKDMNDYPPVFSKRIYKGMVAPDAVKGTPITTVYAEDADPPGLPASRVRYRVDDVQFPYPASIFEVEEDSGRVITRVNLNEEPTTIFKLVVVAFDDGEPVMSSSATVKILVLHPGEIPRFTQEEYRPPPVSELATKGTMVGVISAAAINQSIVYSIVSGNEEDTFGINNITGVIYVNGPLDYETRTSYVLRVQADSLEVVLANLRVPSKSNTAKVYIEIQDENNHPPVFQKKFYIGGVSEDARMFTSVLRVKATDKDTGNYSVMAYRLIIPPIKEGKEGFVVETYTGLIKTAMLFHNMRRSYFKFQVIATDDYGKGLSGKADVLVSVVNQLDMQVIVSNVPPTLVEKKIEDLTEILDRYVQEQIPGAKVVVESIGARRHGDAFSLEDYTKCDLTVYAIDPQTNRAIDRNELFKFLDGKLLDINKDFQPYYGEGGRILEIRTPEAVTSIKKRGESLGYTEGALLALAFIIILCCIPAILVVLVSYRQFKVRQAECTKTARIQAALPAAKPAVPAPAPVAAPPPPPPPPPGAHLYEELGDSSIWSFCWQLVICMRTCAIWRTLTRRGYGSEQQQLLRPSLLKPEELSMESGIDPGQEYGQDYYSYEHGYEMPQYGSRRRLLPPAGQEEYGEVVGEAEEEYEEEEWARKRMIKLVVDREYETSSTGEDSAPECQRNRLHHPSIHSNINGNIYIAQNGSVVRTRRACLTDNLKVASPVRLGGPFKKLDKLAVTHEENVPLNTLSKGPFSTEKMNARPTLVTFAPCPVGTDNTAVKPLRNRLKSTVEQESMIDSKNIKEALEFHSDHTQSDDEELWMGPWNNLHIPMTKL

SEQ ID NO: 10079 - protein, 1888 aa, Homo Sapiens
MFRQFYLWTCLASGIILGSLFEICLGQYDDDCKLARGGPPATIVAIDEESRNGTILVDNMLIKGTAGGPDPTIELSLKDNVDYWVLMDPVKQMLFLNSTGRVLDRDPPMNIHSIVVQVQCINKKVGTIIYHEVRIVVRDRNDNSPTFKHESYYATVNELTPVGTTIFTGFSGDNGATDIDDGPNGQIEYVIQYNPDDPTSNDTFEIPLMLTGNIVLRKRLNYEDKTRYFVIIQANDRAQNLNERRTTTTTLTVDVLDGDDLGPMFLPCVLVPNTRDCRPLTYQAAIPELRTPEELNPIIVTPPIQAIDQDRNIQPPSDRPGILYSILVGTPEDYPRFFHMHPRTAELSLLEPVNRDFHQKFDLVIKAEQDNGHPLPAFAGLHIEILDENNQSPYFTMPSYQGYILESAPVGATISDSLNLTSPLRIVALDKDIEDTKDPELHLFLNDYTSVFTVTQTGITRYLTLLQPVDREEQQTYTFSITAFDGVQESEPVIVNIQVMDANDNTPTFPEISYDVYVYTDMRPGDSVIQLTAVDADEGSNGEITYEILVGAQGDFIINKTTGLITIAPGVEMIVGRTYALTVQAADNAPPAERSTGILTLGKALDRESTDRYILIITASDGRPDGTSTATVNIVVTDVNDNAPVFDPYLPRNLSVVEEEANAFVGQVKATDPDAGINGQVHYSLGNFNNLFRITSNGSIYTAVKLNREVRDYYELVVVATDGAVHPRHSTLTLAIKVLDIDDNSPVFTNSTYTVLVEENLPAGTTILQIEAKDVDLGANVSYRIRSPEVKHFFALHPFTGELSLLRSLDYEAFPDQEASITFLVEAFDIYGTMPPGIATVTVIVKDMNDYPPVFSKRIYKGMVAPDAVKGTPITTVYAEDADPPGLPASRVRYRVDDVQFPYPASIFEVEEDSGRVITRVNLNEEPTTIFKLVVVAFDDGEPVMSSSATVKILVLHPGEIPRFTQEEYRPPPVSELATKGTMVGVISAAAINQSIVYSIVSGNEEDTFGINNITGVIYVNGPLDYETRTSYVLRVQADSLEVVLANLRVPSKSNTAKVYIEIQDENNHPPVFQKKFYIGGVSEDARMFTSVLRVKATDKDTGNYSVMAYRLIIPPIKEGKEGFVVETYTGLIKTAMLFHNMRRSYFKFQVIATDDYGKGLSGKADVLVSVVNQLDMQVIVSNVPPTLVEKKIEDLTEILDRYVQEQIPGAKVVVESIGARRHGDAFSLEDYTKCDLTVYAIDPQTNRAIDRNELFKFLDGKLLDINKDFQPYYGEGGRILEIRTPEAVTSIKKRGESLGYTEGALLALAFIIILCCIPAILVVLVSYRQVFKGRQAECTKTARIQAALPAAKPAVPAPAPVAAPPPPPPPPPGAHLYEELGDSSILSSLFLLYHFQQSRGNNSVSEDRKHQQVVMPFSSNTIEAHKSAHVDGSLKSNKLKSARKFTFLSDEDDLSAHNPLYKENISQVSTNSDISQRTDFVDPFSPKIQAKSKSLRGPREKIQRLWSQSVSLPRRLMRKVPNRPEIIDLQQWQGTRQKAENENTGICTNKRGSSNPLLTTEEANLTEKEEIRQGETLMIEGTEQLKSLSSDSSFCFPRPHFSFSTLPTVSRTVELKSEPNVISSPAECSLELSPSRPCVLHSSLSRRETPICMLPIETERNIFENFAHPPNISPSACPLPPPPPISPPSPPPAPAPLAPPPDISPFSLFCPPPSPPSIPLPLPPPTFFPLSVSTSGPPTPPLLPPFPTPLPPPPPSIPCPPPPSASFLSTECVCITGVKCTTNLMPAEKIKSSMTQLSTTTVCKTDPQREPKGILRHVKNLAELEKSVANMYSQIEKNYLRTNVSELQTMCPSEVTNMEITSEQNKGSLNNIVEGTEKQSHSQSTSL

SEQ ID NO: 10080 - protein, 1962 aa, Homo Sapiens
MFRQFYLWTCLASGIILGSLFEICLGQYDDDWQYEDCKLARGGPPATIVAIDEESRNGTILVDNMLIKGTAGGPDPTIELSLKDNVDYWVLMDPVKQMLFLNSTGRVLDRDPPMNIHSIVVQVQCINKKVGTIIYHEVRIVVRDRNDNSPTFKHESYYATVNELTPVGTTIFTGFSGDNGATDIDDGPNGQIEYVIQYNPDDPTSNDTFEIPLMLTGNIVLRKRLNYEDKTRYFVIIQANDRAQNLNERRTTTTTLTVDVLDGDDLGPMFLPCVLVPNTRDCRPLTYQAAIPELRTPEELNPIIVTPPIQAIDQDRNIQPPSDRPGILYSILVGTPEDYPRFFHMHPRTAELSLLEPVNRDFHQKFDLVIKAEQDNGHPLPAFAGLHIEILDENNQSPYFTMPSYQGYILESAPVGATISDSLNLTSPLRIVALDKDIEDTKDPELHLFLNDYTSVFTVTQTGITRYLTLLQPVDREEQQTYTFSITAFDGVQESEPVIVNIQVMDANDNTPTFPEISYDVYVYTDMRPGDSVIQLTAVDADEGSNGEITYEILVGAQGDFIINKTTGLITIAPGVEMIVGRTYALTVQAADNAPPAERRNSICTVYIEVLPPNNQSPPRFPQLMYSLEISEAMRVGAVLLNLQATDREGDSITYAIENGDPQRVFNLSETTGILTLGKALDRESTDRYILIITASDGRPDGTSTATVNIVVTDVNDNAPVFDPYLPRNLSVVEEEANAFVGQVKATDPDAGINGQVHYSLGNFNNLFRITSNGSIYTAVKLNREVRDYYELVVVATDGAVHPRHSTLTLAIKVLDIDDNSPVFTNSTYTVLVEENLPAGTTILQIEAKDVDLGANVSYRIRSPEVKHFFALHPFTGELSLLRSLDYEAFPDQEASITFLVEAFDIYGTMPPGIATVTVIVKDMNDYPPVFSKRIYKGMVAPDAVKGTPITTVYAEDADPPGLPASRVRYRVDDVQFPYPASIFEVEEDSGRVITRVNLNEEPTTIFKLVVVAFDDGEPVMSSSATVKILVLHPGEIPRFTQEEYRPPPVSELATKGTMVGVISAAAINQSIVYSIVSGNEEDTFGINNITGVIYVNGPLDYETRTSYVLRVQADSLEVVLANLRVPSKSNTAKVYIEIQDENNHPPVFQKKFYIGGVSEDARMFTSVLRVKATDKDTGNYSVMAYRLIIPPIKEGKEGFVVETYTGLIKTAMLFHNMRRSYFKFQVIATDDYGKGLSGKADVLVSVVNQLDMQVIVSNVPPTLVEKKIEDLTEILDRYVQEQIPGAKVVVESIGARRHGDAFSLEDYTKCDLTVYAIDPQTNRAIDRNELFKFLDGKLLDINKDFQPYYGEGGRILEIRTPEAVTSIKKRGESLGYTEGALLALAFIIILCCIPAILVVLVSYRQFKVRQAECTKTARIQAALPAAKPAVPAPAPVAAPPPPPPPPPGAHLYEELGDSSMHNLFLLYHFQQSRGNNSVSEDRKHQQVVMPFSSNTIEAHKSAHVDGSLKSNKLKSARKFTFLSDEDDLSAHNPLYKENISQVSTNSDISQRTDFVDPFSPKIQAKSKSLRGPREKIQRLWSQSVSLPRRLMRKVPNRPEIIDLQQWQGTRQKAENENTGICTNKRGSSNPLLTTEEANLTEKEEIRQGETLMIEGTEQLKSLSSDSSFCFPRPHFSFSTLPTVSRTVELKSEPNVISSPAECSLELSPSRPCVLHSSLSRRETPICMLPIETERNIFENFAHPPNISPSACPLPPPPPISPPSPPPAPAPLAPPPDISPFSLFCPPPSPPSIPLPLPPPTFFPLSVSTSGPPTPPLLPPFPTPLPPPPPSIPCPPPPSASFLSTECVCITGVKCTTNLMPAEKIKSSMTQLSTTTVCKTDPQREPKGILRHVKNLAELEKSVANMYSQIEKNYLRTNVSELQTMCPSEVTNMEITSEQNKGSLNNIVEGTEKQSHSQSTSL

SEQ ID NO: 10081 - protein, 1789 aa, Homo Sapiens
MFRQFYLWTCLASGIILGSLFEICLGQYDDDWQYEDCKLARGGPPATIVAIDEESRNGTILVDNMLIKGTAGGPDPTIELSLKDNVDYWVLMDPVKQMLFLNSTGRVLDRDPPMNIHSIVVQVQCINKKVGTIIYHEVRIVVRDRNDNSPTFKHESYYATVNELTPVGTTIFTGFSGDNGATDIDDGPNGQIEYVIQYNPDDPTSNDTFEIPLMLTGNIVLRKRLNYEDKTRYFVIIQANDRAQNLNERRTTTTTLTVDVLDGDDLGPMFLPCVLVPNTRDCRPLTYQAAIPELRTPEELNPIIVTPPIQAIDQDRNIQPPSDRPGILYSILVGTPEDYPRFFHMHPRTAELSLLEPVNRDFHQKFDLVIKAEQDNGHPLPAFAGLHIEILDENNQSPYFTMPSYQGYILESAPVGATISDSLNLTSPLRIVALDKDIEDVPPSGVPTKDPELHLFLNDYTSVFTVTQTGITRYLTLLQPVDREEQQTYTFSITAFDGVQESEPVIVNIQVMDANDNTPTFPEISYDVYVYTDMRPGDSVIQLTAVDADEGSNGEITYEILVGAQGDFIINKTTGLITIAPGVEMIVGRTYALTVQAADNAPPAERRNSICTVYIEVLPPNNQSPPRFPQLMYSLEISEAMRVGAVLLNLQATDREGDSITYAIENGDPQRVFNLSETTGILTLGKALDRESTDRYILIITASDGRPDGTSTATVNIVVTDVNDNAPVFDPYLPRNLSVVEEEANAFVGQVKATDPDAGINGQVHYSLGNFNNLFRITSNGSIYTAVKLNREVRDYYELVVVATDGAVHPRHSTLTLAIKVLDIDDNSPVFTNSTYTVLVEENLPAGTTILQIEAKDVDLGANVSYRIRSPEVKHFFALHPFTGELSLLRSLDYEAFPDQEASITFLVEAFDIYGTMPPGIATVTVIVKDMNDYPPVFSKRIYKGMVAPDAVKGTPITTVYAEDADPPGLPASRVRYRVDDVQFPYPASIFEVEEDSGRVITRVNLNEEPTTIFKLVVVAFDDGEPVMSSSATVKILVLHPGEIPRFTQEEYRPPPVSELATKGTMVGVISAAAINQSIVYSIVSGNEEDTFGINNITGVIYVNGPLDYETRTSYVLRVQADSLEVVLANLRVPSKSNTAKVYIEIQDENNHPPVFQKKFYIGGVSEDARMFTSVLRVKATDKDTGNYSVMAYRLIIPPIKEGKEGFVVETYTGLIKTAMLFHNMRRSYFKFQVIATDDYGKGLSGKADVLVSVVNQLDMQVIVSNVPPTLVEKKIEDLTEILDRYVQEQIPGAKVVVESIGARRHGDAFSLEDYTKCDLTVYAIDPQTNRAIDRNELFKFLDGKLLDINKDFQPYYGEGGRILEIRTPEAVTSIKKRGESLGYTEGALLALAFIIILCCIPAILVVLVSYRQVFKGRQAECTKTARIQAALPAAKPAVPAPAPVAAPPPPPPPPPGAHLYEELGDSSMYEMPQYGSRRRLLPPAGQEEYGEVVGEAEEEYEEEEEEPKKIKKPKVEIREPSEEEEVVVTIEKPPAAEPTYTTWKRARIFPMIFKKVRGLADKRGIVDLEGEEWQRRLEEEDKDYLKLTLDQEEATESTVESEEESSSDYTEYSEEESEFSESETTEEESESETPSEEEESSTPESEESESTESEGEKARKNIVLARRRPMVEEVKEVKGRKEEPQEEQKEPKMEEEEHSEEEESGPAPVEESTDPEAQDIPEEGSAESASVEGGVESEEESESGSSSSSSESQSGGPWGYQVPAYDRSKNANQKKSPGANSEGYNTAL

SEQ ID NO: 10082 - protein, 1682 aa, Homo Sapiens
MFRQFYLWTCLASGIILGSLFEICLGQYDDDWQYEDCKLARGGPPATIVAIDEESRNGTILVDNMLIKGTAGGPDPTIELSLKDNVDYWVLMDPVKQMLFLNSTGRVLDRDPPMNIHSIVVQVQCINKKVGTIIYHEVRIVVRDRNDNSPTFKHESYYATVNELTPVGTTIFTGFSGDNGATDIDDGPNGQIEYVIQYNPDDPTSNDTFEIPLMLTGNIVLRKRLNYEDKTRYFVIIQANDRAQNLNERRTTTTTLTVDVLDGDDLGPMFLPCVLVPNTRDCRPLTYQAAIPELRTPEELNPIIVTPPIQAIDQDRNIQPPSDRPGILYSILVGTPEDYPRFFHMHPRTAELSLLEPVNRDFHQKFDLVIKAEQDNGHPLPAFAGLHIEILDENNQSPYFTMPSYQGYILESAPVGATISDSLNLTSPLRIVALDKDIEDTKDPELHLFLNDYTSVFTVTQTGITRYLTLLQPVDREEQQTYTFSITAFDGVQESEPVIVNIQVMDANDNTPTFPEISYDVYVYTDMRPGDSVIQLTAVDADEGSNGEITYEILVGAQGDFIINKTTGLITIAPGVEMIVGRTYALTVQAADNAPPAERRNSICTVYIEVLPPNNQSPPRFPQLMYSLEISEAMRVGAVLLNLQATDREGDSITYAIENGDPQRVFNLSETTGILTLGKALDRESTDRYILIITASDGRPDGTSTATVNIVVTDVNDNAPVFDPYLPRNLSVVEEEANAFVGQVKATDPDAGINGQVHYSLGNFNNLFRITSNGSIYTAVKLNREVRDYYELVVVATDGAVHPRHSTLTLAIKVLDIDDNSPVFTNSTYTVLVEENLPAGTTILQIEAKDVDLGANVSYRIRSPEVKHFFALHPFTGELSLLRSLDYEAFPDQEASITFLVEAFDIYGTMPPGIATVTVIVKDMNDYPPVFSKRIYKGMVAPDAVKGTPITTVYAEDADPPGLPASRVRYRVDDVQFPYPASIFEVEEDSGRVITRVNLNEEPTTIFKLVVVAFDDGEPVMSSSATVKILVLHPGEIPRFTQEEYRPPPVSELATKGTMVGVISAAAINQSIVYSIVSGNEEDTFGINNITGVIYVNGPLDYETRTSYVLRVQADSLEVVLANLRVPSKSNTAKVYIEIQDENNHPPVFQKKFYIGGVSEDARMFTSVLRVKATDKDTGNYSVMAYRLIIPPIKEGKEGFVVETYTGLIKTAMLFHNMRRSYFKFQVIATDDYGKGLSGKADVLVSVVNQLDMQVIVSNVPPTLVEKKIEDLTEILDRYVQEQIPGAKVVVESIGARRHGDAFSLEDYTKCDLTVYAIDPQTNRAIDRNELFKFLDGKLLDINKDFQPYYGEGGRILEIRTPEAVTSIKKRGESLGYTEGALLALAFIIILCCIPAILVVLVSYRQFKVRQAECTKTARIQAALPAAKPAVPAPAPVAAPPPPPPPPPGAHLYEELGDSSMHKYEMPQYGSRRRLLPPAGQEEYGEVVGEAEEEYEEEEWARKRMIKLVVDREYETSSTGEDSAPECQRNRLHHPSIHSNINGNIYIAQNGSVVRTRRACLTDNLKVASPVRLGGPFKKLDKLAVTHEENVPLNTLSKGPFSTEKMNARPTLVTFAPCPVGTDNTAVKPLRNRLKSTVEQESMIDSKNIKEALEFHSDHTQSDDEELWMGPWNNLHIPMTKL

SEQ ID NO: 10083 - protein, 1964 aa, Homo Sapiens
MFRQFYLWTCLASGIILGSLFEICLGQYDDDWQYEDCKLARGGPPATIVAIDEESRNGTILVDNMLIKGTAGGPDPTIELSLKDNVDYWVLMDPVKQMLFLNSTGRVLDRDPPMNIHSIVVQVQCINKKVGTIIYHEVRIVVRDRNDNSPTFKHESYYATVNELTPVGTTIFTGFSGDNGATDIDDGPNGQIEYVIQYNPDDPTSNDTFEIPLMLTGNIVLRKRLNYEDKTRYFVIIQANDRAQNLNERRTTTTTLTVDVLDGDDLGPMFLPCVLVPNTRDCRPLTYQAAIPELRTPEELNPIIVTPPIQAIDQDRNIQPPSDRPGILYSILVGTPEDYPRFFHMHPRTAELSLLEPVNRDFHQKFDLVIKAEQDNGHPLPAFAGLHIEILDENNQSPYFTMPSYQGYILESAPVGATISDSLNLTSPLRIVALDKDIEDTKDPELHLFLNDYTSVFTVTQTGITRYLTLLQPVDREEQQTYTFSITAFDGVQESEPVIVNIQVMDANDNTPTFPEISYDVYVYTDMRPGDSVIQLTAVDADEGSNGEITYEILVGAQGDFIINKTTGLITIAPGVEMIVGRTYALTVQAADNAPPAERRNSICTVYIEVLPPNNQSPPRFPQLMYSLEISEAMRVGAVLLNLQATDREGDSITYAIENGDPQRVFNLSETTGILTLGKALDRESTDRYILIITASDGRPDGTSTATVNIVVTDVNDNAPVFDPYLPRNLSVVEEEANAFVGQVKATDPDAGINGQVHYSLGNFNNLFRITSNGSIYTAVKLNREVRDYYELVVVATDGAVHPRHSTLTLAIKVLDIDDNSPVFTNSTYTVLVEENLPAGTTILQIEAKDVDLGANVSYRIRSPEVKHFFALHPFTGELSLLRSLDYEAFPDQEASITFLVEAFDIYGTMPPGIATVTVIVKDMNDYPPVFSKRIYKGMVAPDAVKGTPITTVYAEDADPPGLPASRVRYRVDDVQFPYPASIFEVEEDSGRVITRVNLNEEPTTIFKLVVVAFDDGEPVMSSSATVKILVLHPGEIPRFTQEEYRPPPVSELATKGTMVGVISAAAINQSIVYSIVSGNEEDTFGINNITGVIYVNGPLDYETRTSYVLRVQADSLEVVLANLRVPSKSNTAKVYIEIQDENNHPPVFQKKFYIGGVSEDARMFTSVLRVKATDKDTGNYSVMAYRLIIPPIKEGKEGFVVETYTGLIKTAMLFHNMRRSYFKFQVIATDDYGKGLSGKADVLVSVVNQLDMQVIVSNVPPTLVEKKIEDLTEILDRYVQEQIPGAKVVVESIGARRHGDAFSLEDYTKCDLTVYAIDPQTNRAIDRNELFKFLDGKLLDINKDFQPYYGEGGRILEIRTPEAVTSIKKRGESLGYTEGALLALAFIIILCCIPAILVVLVSYRQVFKGRQAECTKTARIQAALPAAKPAVPAPAPVAAPPPPPPPPPGAHLYEELGDSSILSSLFLLYHFQQSRGNNSVSEDRKHQQVVMPFSSNTIEAHKSAHVDGSLKSNKLKSARKFTFLSDEDDLSAHNPLYKENISQVSTNSDISQRTDFVDPFSPKIQAKSKSLRGPREKIQRLWSQSVSLPRRLMRKVPNRPEIIDLQQWQGTRQKAENENTGICTNKRGSSNPLLTTEEANLTEKEEIRQGETLMIEGTEQLKSLSSDSSFCFPRPHFSFSTLPTVSRTVELKSEPNVISSPAECSLELSPSRPCVLHSSLSRRETPICMLPIETERNIFENFAHPPNISPSACPLPPPPPISPPSPPPAPAPLAPPPDISPFSLFCPPPSPPSIPLPLPPPTFFPLSVSTSGPPTPPLLPPFPTPLPPPPPSIPCPPPPSASFLSTECVCITGVKCTTNLMPAEKIKSSMTQLSTTTVCKTDPQREPKGILRHVKNLAELEKSVANMYSQIEKNYLRTNVSELQTMCPSEVTNMEITSEQNKGSLNNIVEGTEKQSHSQSTSL

SEQ ID NO: 10084 - protein, 1681 aa, Homo Sapiens
MFRQFYLWTCLASGIILGSLFEICLGQYDDDWQYEDCKLARGGPPATIVAIDEESRNGTILVDNMLIKGTAGGPDPTIELSLKDNVDYWVLMDPVKQMLFLNSTGRVLDRDPPMNIHSIVVQVQCINKKVGTIIYHEVRIVVRDRNDNSPTFKHESYYATVNELTPVGTTIFTGFSGDNGATDIDDGPNGQIEYVIQYNPDDPTSNDTFEIPLMLTGNIVLRKRLNYEDKTRYFVIIQANDRAQNLNERRTTTTTLTVDVLDGDDLGPMFLPCVLVPNTRDCRPLTYQAAIPELRTPEELNPIIVTPPIQAIDQDRNIQPPSDRPGILYSILVGTPEDYPRFFHMHPRTAELSLLEPVNRDFHQKFDLVIKAEQDNGHPLPAFAGLHIEILDENNQSPYFTMPSYQGYILESAPVGATISDSLNLTSPLRIVALDKDIEDTKDPELHLFLNDYTSVFTVTQTGITRYLTLLQPVDREEQQTYTFSITAFDGVQESEPVIVNIQVMDANDNTPTFPEISYDVYVYTDMRPGDSVIQLTAVDADEGSNGEITYEILVGAQGDFIINKTTGLITIAPGVEMIVGRTYALTVQAADNAPPAERRNSICTVYIEVLPPNNQSPPRFPQLMYSLEISEAMRVGAVLLNLQATDREGDSITYAIENGDPQRVFNLSETTGILTLGKALDRESTDRYILIITASDGRPDGTSTATVNIVVTDVNDNAPVFDPYLPRNLSVVEEEANAFVGQVKATDPDAGINGQVHYSLGNFNNLFRITSNGSIYTAVKLNREVRDYYELVVVATDGAVHPRHSTLTLAIKVLDIDDNSPVFTNSTYTVLVEENLPAGTTILQIEAKDVDLGANVSYRIRSPEVKHFFALHPFTGELSLLRSLDYEAFPDQEASITFLVEAFDIYGTMPPGIATVTVIVKDMNDYPPVFSKRIYKGMVAPDAVKGTPITTVYAEDADPPGLPASRVRYRVDDVQFPYPASIFEVEEDSGRVITRVNLNEEPTTIFKLVVVAFDDGEPVMSSSATVKILVLHPGEIPRFTQEEYRPPPVSELATKGTMVGVISAAAINQSIVYSIVSGNEEDTFGINNITGVIYVNGPLDYETRTSYVLRVQADSLEVVLANLRVPSKSNTAKVYIEIQDENNHPPVFQKKFYIGGVSEDARMFTSVLRVKATDKDTGNYSVMAYRLIIPPIKEGKEGFVVETYTGLIKTAMLFHNMRRSYFKFQVIATDDYGKGLSGKADVLVSVVNQLDMQVIVSNVPPTLVEKKIEDLTEILDRYVQEQIPGAKVVVESIGARRHGDAFSLEDYTKCDLTVYAIDPQTNRAIDRNELFKFLDGKLLDINKDFQPYYGEGGRILEIRTPEAVTSIKKRGESLGYTEGALLALAFIIILCCIPAILVVLVSYRQVFKGRQAECTKTARIQAALPAAKPAVPAPAPVAAPPPPPPPPPGAHLYEELGDSSMYEMPQYGSRRRLLPPAGQEEYGEVVGEAEEEYEEEEWARKRMIKLVVDREYETSSTGEDSAPECQRNRLHHPSIHSNINGNIYIAQNGSVVRTRRACLTDNLKVASPVRLGGPFKKLDKLAVTHEENVPLNTLSKGPFSTEKMNARPTLVTFAPCPVGTDNTAVKPLRNRLKSTVEQESMIDSKNIKEALEFHSDHTQSDDEELWMGPWNNLHIPMTKL

SEQ ID NO: 10085 - protein, 1790 aa, Homo Sapiens
MFRQFYLWTCLASGIILGSLFEICLGQYDDDWQYEDCKLARGGPPATIVAIDEESRNGTILVDNMLIKGTAGGPDPTIELSLKDNVDYWVLMDPVKQMLFLNSTGRVLDRDPPMNIHSIVVQVQCINKKVGTIIYHEVRIVVRDRNDNSPTFKHESYYATVNELTPVGTTIFTGFSGDNGATDIDDGPNGQIEYVIQYNPDDPTSNDTFEIPLMLTGNIVLRKRLNYEDKTRYFVIIQANDRAQNLNERRTTTTTLTVDVLDGDDLGPMFLPCVLVPNTRDCRPLTYQAAIPELRTPEELNPIIVTPPIQAIDQDRNIQPPSDRPGILYSILVGTPEDYPRFFHMHPRTAELSLLEPVNRDFHQKFDLVIKAEQDNGHPLPAFAGLHIEILDENNQSPYFTMPSYQGYILESAPVGATISDSLNLTSPLRIVALDKDIEDVPPSGVPTKDPELHLFLNDYTSVFTVTQTGITRYLTLLQPVDREEQQTYTFSITAFDGVQESEPVIVNIQVMDANDNTPTFPEISYDVYVYTDMRPGDSVIQLTAVDADEGSNGEITYEILVGAQGDFIINKTTGLITIAPGVEMIVGRTYALTVQAADNAPPAERRNSICTVYIEVLPPNNQSPPRFPQLMYSLEISEAMRVGAVLLNLQATDREGDSITYAIENGDPQRVFNLSETTGILTLGKALDRESTDRYILIITASDGRPDGTSTATVNIVVTDVNDNAPVFDPYLPRNLSVVEEEANAFVGQVKATDPDAGINGQVHYSLGNFNNLFRITSNGSIYTAVKLNREVRDYYELVVVATDGAVHPRHSTLTLAIKVLDIDDNSPVFTNSTYTVLVEENLPAGTTILQIEAKDVDLGANVSYRIRSPEVKHFFALHPFTGELSLLRSLDYEAFPDQEASITFLVEAFDIYGTMPPGIATVTVIVKDMNDYPPVFSKRIYKGMVAPDAVKGTPITTVYAEDADPPGLPASRVRYRVDDVQFPYPASIFEVEEDSGRVITRVNLNEEPTTIFKLVVVAFDDGEPVMSSSATVKILVLHPGEIPRFTQEEYRPPPVSELATKGTMVGVISAAAINQSIVYSIVSGNEEDTFGINNITGVIYVNGPLDYETRTSYVLRVQADSLEVVLANLRVPSKSNTAKVYIEIQDENNHPPVFQKKFYIGGVSEDARMFTSVLRVKATDKDTGNYSVMAYRLIIPPIKEGKEGFVVETYTGLIKTAMLFHNMRRSYFKFQVIATDDYGKGLSGKADVLVSVVNQLDMQVIVSNVPPTLVEKKIEDLTEILDRYVQEQIPGAKVVVESIGARRHGDAFSLEDYTKCDLTVYAIDPQTNRAIDRNELFKFLDGKLLDINKDFQPYYGEGGRILEIRTPEAVTSIKKRGESLGYTEGALLALAFIIILCCIPAILVVLVSYRQFKVRQAECTKTARIQAALPAAKPAVPAPAPVAAPPPPPPPPPGAHLYEELGDSSMHKYEMPQYGSRRRLLPPAGQEEYGEVVGEAEEEYEEEEEEPKKIKKPKVEIREPSEEEEVVVTIEKPPAAEPTYTTWKRARIFPMIFKKVRGLADKRGIVDLEGEEWQRRLEEEDKDYLKLTLDQEEATESTVESEEESSSDYTEYSEEESEFSESETTEEESESETPSEEEESSTPESEESESTESEGEKARKNIVLARRRPMVEEVKEVKGRKEEPQEEQKEPKMEEEEHSEEEESGPAPVEESTDPEAQDIPEEGSAESASVEGGVESEEESESGSSSSSSESQSGGPWGYQVPAYDRSKNANQKKSPGANSEGYNTAL

SEQ ID NO: 10086 - protein, 72 aa, Homo Sapiens
MFRQFYLWTCLASGIILGSLFEICLGQYDDGTILVDNMLIKGTAGGPDPTIELSLKDNVDYWVLMDPVKQML

SEQ ID NO: 10087 - protein, 1932 aa, Homo Sapiens
MFRQFYLWTCLASGIILGSLFEICLGQYDDGTILVDNMLIKGTAGGPDPTIELSLKDNVDYWVLMDPVKQMLFLNSTGRVLDRDPPMNIHSIVVQVQCINKKVGTIIYHEVRIVVRDRNDNSPTFKHESYYATVNELTPVGTTIFTGFSGDNGATDIDDGPNGQIEYVIQYNPDDPTSNDTFEIPLMLTGNIVLRKRLNYEDKTRYFVIIQANDRAQNLNERRTTTTTLTVDVLDGDDLGPMFLPCVLVPNTRDCRPLTYQAAIPELRTPEELNPIIVTPPIQAIDQDRNIQPPSDRPGILYSILVGTPEDYPRFFHMHPRTAELSLLEPVNRDFHQKFDLVIKAEQDNGHPLPAFAGLHIEILDENNQSPYFTMPSYQGYILESAPVGATISDSLNLTSPLRIVALDKDIEDTKDPELHLFLNDYTSVFTVTQTGITRYLTLLQPVDREEQQTYTFSITAFDGVQESEPVIVNIQVMDANDNTPTFPEISYDVYVYTDMRPGDSVIQLTAVDADEGSNGEITYEILVGAQGDFIINKTTGLITIAPGVEMIVGRTYALTVQAADNAPPAERRNSICTVYIEVLPPNNQSPPRFPQLMYSLEISEAMRVGAVLLNLQATDREGDSITYAIENGDPQRVFNLSETTGILTLGKALDRESTDRYILIITASDGRPDGTSTATVNIVVTDVNDNAPVFDPYLPRNLSVVEEEANAFVGQVKATDPDAGINGQVHYSLGNFNNLFRITSNGSIYTAVKLNREVRDYYELVVVATDGAVHPRHSTLTLAIKVLDIDDNSPVFTNSTYTVLVEENLPAGTTILQIEAKDVDLGANVSYRIRSPEVKHFFALHPFTGELSLLRSLDYEAFPDQEASITFLVEAFDIYGTMPPGIATVTVIVKDMNDYPPVFSKRIYKGMVAPDAVKGTPITTVYAEDADPPGLPASRVRYRVDDVQFPYPASIFEVEEDSGRVITRVNLNEEPTTIFKLVVVAFDDGEPVMSSSATVKILVLHPGEIPRFTQEEYRPPPVSELATKGTMVGVISAAAINQSIVYSIVSGNEEDTFGINNITGVIYVNGPLDYETRTSYVLRVQADSLEVVLANLRVPSKSNTAKVYIEIQDENNHPPVFQKKFYIGGVSEDARMFTSVLRVKATDKDTGNYSVMAYRLIIPPIKEGKEGFVVETYTGLIKTAMLFHNMRRSYFKFQVIATDDYGKGLSGKADVLVSVVNQLDMQVIVSNVPPTLVEKKIEDLTEILDRYVQEQIPGAKVVVESIGARRHGDAFSLEDYTKCDLTVYAIDPQTNRAIDRNELFKFLDGKLLDINKDFQPYYGEGGRILEIRTPEAVTSIKKRGESLGYTEGALLALAFIIILCCIPAILVVLVSYRQRQAECTKTARIQAALPAAKPAVPAPAPVAAPPPPPPPPPGAHLYEELGDSSMHNLFLLYHFQQSRGNNSVSEDRKHQQVVMPFSSNTIEAHKSAHVDGSLKSNKLKSARKFTFLSDEDDLSAHNPLYKENISQVSTNSDISQRTDFVDPFSPKIQAKSKSLRGPREKIQRLWSQSVSLPRRLMRKVPNRPEIIDLQQWQGTRQKAENENTGICTNKRGSSNPLLTTEEANLTEKEEIRQGETLMIEGTEQLKSLSSDSSFCFPRPHFSFSTLPTVSRTVELKSEPNVISSPAECSLELSPSRPCVLHSSLSRRETPICMLPIETERNIFENFAHPPNISPSACPLPPPPPISPPSPPPAPAPLAPPPDISPFSLFCPPPSPPSIPLPLPPPTFFPLSVSTSGPPTPPLLPPFPTPLPPPPPSIPCPPPPSASFLSTECVCITGVKCTTNLMPAEKIKSSMTQLSTTTVCKTDPQREPKGILRHVKNLAELEKSVANMYSQIEKNYLRTNVSELQTMCPSEVTNMEITSEQNKGSLNNIVEGTEKQSHSQSTSL

SEQ ID NO: 10088 - protein, 1150 aa, Homo Sapiens
MPSYQGYILESAPVGATISDSLNLTSPLRIVALDKDIEDVPPSGVPTKDPELHLFLNDYTSVFTVTQTGITRYLTLLQPVDREEQQTYTFSITAFDGVQESEPVIVNIQVMDANDNTPTFPEISYDVYVYTDMRPGDSVIQLTAVDADEGSNGEITYEILVGAQGDFIINKTTGLITIAPGVEMIVGRTYALTVQAADNAPPAERRNSICTVYIEVLPPNNQSPPRFPQLMYSLEISEAMRVGAVLLNLQATDREGDSITYAIENGDPQRVFNLSETTGILTLGKALDRESTDRYILIITASDGRPDGTSTATVNIVVTDVNDNAPVFDPYLPRNLSVVEEEANAFVGQVKATDPDAGINGQVHYSLGNFNNLFRITSNGSIYTAVKLNREVRDYYELVVVATDGAVHPRHSTLTLAIKVLDIDDNSPVFTNSTYTVLVEENLPAGTTILQIEAKDVDLGANVSYRIRSPEVKHFFALHPFTGELSLLRSLDYEAFPDQEASITFLVEAFDIYGTMPPGIATVTVIVKDMNDYPPVFSKRIYKGMVAPDAVKGTPITTVYAEDADPPGLPASRVRYRVDDVQFPYPASIFEVEEDSGRVITRVNLNEEPTTIFKLVVVAFDDGEPVMSSSATVKILVLHPGEIPRFTQEEYRPPPVSELATKGTMVGVISAAAINQSIVYSIVSGNEEDTFGINNITGVIYVNGPLDYETRTSYVLRVQADSLEVVLANLRVPSKSNTAKVYIEIQDENNHPPVFQKKFYIGGVSEDARMFTSVLRVKATDKDTGNYSVMAYRLIIPPIKEGKEGFVVETYTGLIKTAMLFHNMRRSYFKFQVIATDDYGKGLSGKADVLVSVVNQLDMQVIVSNVPPTLVEKKIEDLTEILDRYVQEQIPGAKVVVESIGARRHGDAFSLEDYTKCDLTVYAIDPQTNRAIDRNELFKFLDGKLLDINKDFQPYYGEGGRILEIRTPEAVTSIKKRGESLGYTEGALLALAFIIILCCIPAILVVLVSYRQFKVRQAECTKTARIQAALPAAKPAVPAPAPVAAPPPPPPPPPGAHLYEELGDSSMHKNYPWSLELILARNMDKIITVMSMGMKCLNMGVAVDCYHQLDRRNMVRWLVKLRKNMRRKRKSQRKLKNQRLKLESLVRRKK

SEQ ID NO: 10089 - protein, 416 aa, Homo Sapiens
MQVIVSNVPPTLVEKKIEDLTEILDRYVQEQIPGAKVVVESIGARRHGDAFSLEDYTKCDLTVYAIDPQTNRAIDRNELFKFLDGKLLDINKDFQPYYGEGGRILEIRTPEAVTSIKKRGESLGYTEGALLALAFIIILCCIPAILVVLVSYRQRGYGSEQQQLLRPSLLKPEELSMESGIDPGQEYGQDYYSYEHGYEMPQYGSRRRLLPPAGQEEYGEVVGEAEEEYEEEEWARKRMIKLVVDREYETSSTGEDSAPECQRNRLHHPSIHSNINGNIYIAQNGSVVRTRRACLTDNLKVASPVRLGGPFKKLDKLAVTHEENVPLNTLSKGPFSTEKMNARPTLVTFAPCPVGTDNTAVKPLRNRLKSTVEQESMIDSKNIKEALEFHSDHTQSDDEELWMGPWNNLHIPMTKL

SEQ ID NO: 10090 - protein, 1360 aa, Homo Sapiens
  misc_feature (1)..(1): Xaa can be any naturally occurring amino acid
XHIEILDENNQSPYFTMPSYQGYILESAPVGATISDSLNLTSPLRIVALDKDIEDTKDPELHLFLNDYTSVFTVTQTGITRYLTLLQPVDREEQQTYTFSITAFDGVQESEPVIVNIQVMDANDNTPTFPEISYDVYVYTDMRPGDSVIQLTAVDADEGSNGEITYEILVGAQGDFIINKTTGLITIAPGVEMIVGRTYALTVQAADNAPPAERRNSICTVYIEVLPPNNQSPPRFPQLMYSLEISEAMRVGAVLLNLQATDREGDSITYAIENGDPQRVFNLSETTGILTLGKALDRESTDRYILIITASDGRPDGTSTATVNIVVTDVNDNAPVFDPYLPRNLSVVEEEANAFVGQVKATDPDAGINGQVHYSLGNFNNLFRITSNGSIYTAVKLNREVRDYYELVVVATDGAVHPRHSTLTLAIKVLDIDDNSPVFTNSTYTVLVEENLPAGTTILQIEAKDVDLGANVSYRIRSPEVKHFFALHPFTGELSLLRSLDYEAFPDQEASITFLVEAFDIYGTMPPGIATVTVIVKDMNDYPPVFSKRIYKGMVAPDAVKGTPITTVYAEDADPPGLPASRVRYRVDDVQFPYPASIFEVEEDSGRVITRVNLNEEPTTIFKLVVVAFDDGEPVMSSSATVKILVLHPGEIPRFTQEEYRPPPVSELATKGTMVGVISAAAINQSIVYSIVSGNEEDTFGINNITGVIYVNGPLDYETRTSYVLRVQADSLEVVLANLRVPSKSNTAKVYIEIQDENNHPPVFQKKFYIGGVSEDARMFTSVLRVKATDKDTGNYSVMAYRLIIPPIKEGKEGFVVETYTGLIKTAMLFHNMRRSYFKFQVIATDDYGKGLSGKADVLVSVVNQLDMQVIVSNVPPTLVEKKIEDLTEILDRYVQEQIPGAKVVVESIGARRHGDAFSLEDYTKCDLTVYAIDPQTNRAIDRNELFKFLDGKLLDINKDFQPYYGEGGRILEIRTPEAVTSIKKRGESLGYTEGALLALAFIIILCCIPAILVVLVSYRQFKVRQAECTKTARIQAALPAAKPAVPAPAPVAAPPPPPPPPPGAHLYEELGDSSIWSFCWQLVICMRTCAIWRTLTRRGYGSEQQQLLRPSLLKPEELSMESGIDPGQEYGQDYYSYEHGYEMPQYGSRRRLLPPAGQEEYGEVVGEAEEEYEEEEWARKRMIKLVVDREYETSSTGEDSAPECQRNRLHHPSIHSNINGNIYIAQNGSVVRTRRACLTDNLKVASPVRLGGPFKKLDKLAVTHEENVPLNTLSKGPFSTEKMNARPTLVTFAPCPVGTDNTAVKPLRNRLKSTVEQESMIDSKNIKEALEFHSDHTQSDDEELWMGPWNNLHIPMTKL

SEQ ID NO: 10091 - protein, 37 aa, Homo Sapiens
  misc_feature (1)..(1): Xaa can be any naturally occurring amino acid
XMKCLNMGVAVDCYHQLDRRNMVRWLVKLRKNMRRKR

SEQ ID NO: 10092 - protein, 807 aa, Homo Sapiens
MVFSRRGGLGARDLLLWLLLLAAWEVGSGQLHYSIPEEAKHGTFVGRVAQDLGLELAELVPRLFRVASKTHRDLLEVNLQNGILFVNSRIDREELCQWSAECSIHLELIADRPLQVFHVEVKVKDINDNPPVFRGREQIIFIPESRLLNSRFPIEGAADADIGANALLTYTLSPSDYFSLDVEASDELSKSLWLELRKYLDREETPELHLLLTATDGGKPELQGTVELLITVLDVNDNAPLFDQAVYRVHLLETTANGTLVTTLNASDADEGVNGEVVFSFDSGISRDIQEKFKVDSSSGEIRLIDKLDYEETKSYEIQVKAVDKGSPPMSNHCKVLVKVLDVNDNAPELAVTSLYLPIREDAPLSTVIALITVSDRDSGANGQVTCSLMPHVPFKLVSTFKNYYSLVLDSALDRESLSVYELVVTARDGGSPSLWATARVSVEVADVNDNAPAFAQPEYTVFVKENNPPGCHIFTVSARDADAQENALVSYSLVERRVGERALSNYVSVHAESGKVYALQPLDHEELELLQFQVSARDAGVPPLGSNVTLQVFVLDENDNAPALLAPRVGGTIGAVSELVPRLVGAGHVVAKVRAVDADSGYNAWLSYELQPAAGGARIPFRVGLYTGEISTTRVLDEADLSRYRLLVLVKDHGEPALTATATVLVSLVESGQAPKASSRASVGVAGPEAALVDVNVYLIIAICAVSSLLVLTLLLYTALRCSVPPTEGAYVPGKPTLVCSSALGSWSNSQQRRQRVCSSEGPPKTDLMAFSPGLSPSLNTSERNEQPEANLDLSGNVSPTFEFWL

SEQ ID NO: 10093 - protein, 686 aa, Homo Sapiens
MVFSRRGGLGARDLLLWLLLLAAWEVGSGQLHYSIPEEAKHGTFVGRVAQDLGLELAELVPRLFRVASKTHRDLLEVNLQNGILFVNSRIDREELCQWSAECSIHLELIADRPLQVFHVEVKVKDINDNPPVFRGREQIIFIPESRLLNSRFPIEGAADADIGANALLTYTLSPSDYFSLDVEASDELSKSLWLELRKYLDREETPELHLLLTATDGGKPELQGTVELLITVLDVNDNAPLFDQAVYRVHLLETTANGTLVTTLNASDADEGVNGEVVFSFDSGISRDIQEKFKVDSSSGEIRLIDKLDYEETKSYEIQVKAVDKGSPPMSNHCKVLVKVLDVNDNAPELAVTSLYLPIREDAPLSTVIALITVSDRDSGANGQVTCSLMPHVPFKLVSTFKNYYSLVLDSALDRESLSVYELVVTARDGGSPSLWATARVSVEVADVNDNAPAFAQPEYTVFVKENNPPGCHIFTVSARDADAQENALVSYSLVERRVGERALSNYVSVHAESGKVYALQPLDHEELELLQFQPRQPNPDWRYSASLRAGMHSSVHLEEAGILRAGPGGPDQQWPTVSSATPEPEAGEVSPPVGAGVNSNSWTFKYGPGNPKQSGPGELPDKFIIPGSPAIISIRQEPTNSQIDKSDFITFGKKEETKKKKKKKKGNKTQEKKEKGNSTTDNSDQ

SEQ ID NO: 10094 - protein, 950 aa, Homo Sapiens
MVFSRRGGLGARDLLLWLLLLAAWEVGSGQLHYSIPEEAKHGTFVGRVAQDLGLELAELVPRLFRVASKTHRDLLEVNLQNGILFVNSRIDREELCQWSAECSIHLELIADRPLQVFHVEVKVKDINDNPPVFRGREQIIFIPESRLLNSRFPIEGAADADIGANALLTYTLSPSDYFSLDVEASDELSKSLWLELRKYLDREETPELHLLLTATDGGKPELQGTVELLITVLDVNDNAPLFDQAVYRVHLLETTANGTLVTTLNASDADEGVNGEVVFSFDSGISRDIQEKFKVDSSSGEIRLIDKLDYEETKSYEIQVKAVDKGSPPMSNHCKVLVKVLDVNDNAPELAVTSLYLPIREDAPLSTVIALITVSDRDSGANGQVTCSLMPHVPFKLVSTFKNYYSLVLDSALDRESLSVYELVVTARDGGSPSLWATARVSVEVADVNDNAPAFAQPEYTVFVKENNPPGCHIFTVSARDADAQENALVSYSLVERRVGERALSNYVSVHAESGKVYALQPLDHEELELLQFQVSARDAGVPPLGSNVTLQVFVLDENDNAPALLAPRVGGTIGAVSELVPRLVGAGHVVAKVRAVDADSGYNAWLSYELQPAAGGARIPFRVGLYTGEISTTRVLDEADLSRYRLLVLVKDHGEPALTATATVLVSLVESGQAPKASSRASVGVAGPEAALVDVNVYLIIAICAVSSLLVLTLLLYTALRCSVPPTEGAYVPGKPTLVCSSALGSWSNSQQRRQRVCSSEGPPKTDLMAFSPGLSPSLNTSERNEQPEANLDLSGNPRQPNPDWRYSASLRAGMHSSVHLEEAGILRAGPGGPDQQWPTVSSATPEPEAGEVSPPVGAGVNSNSWTFKYGPGNPKQSGPGELPDKFIIPGSPAIISIRQEPTNSQIDKSDFITFGKKEETKKKKKKKKGNKTQEKKEKGNSTTDNSDQ

SEQ ID NO: 10095 - protein, 948 aa, Homo Sapiens
MVSRCSCLGVQCLLLSLLLLAAWEVGSGQLHYSVYEEARHGTFVGRIAQDLGLELAELVQRLFRVASKRHGDLLEVNLQNGILFVNSRIDREELCGRSVECSIHLEVIVDRPLQVFHVDVEVKDINDNPPRFSVTEQKLSIPESRLLDSRFPLEGASDADVGENALLTYKLSPNEYFVLDIINKKDKDKFPVLVLRKLLDREENPQLKLLLTATDGGKPEFTGSVSLLILVLDANDNAPIFDRPVYEVKMYENQVNQTLVIRLNASDSDEGINKEMMYSFSSLVPPTIRRKFWINERTGEIKVNDAIDFEDSNTYEIHVDVTDKGNPPMVGHCTVLVELLDENDNSPEVIVTSLSLPVKEDAQVGTVIALISVSDHDSGANGQVTCSLTPHVPFKLVSTYKNYYSLVLDSALDRERVSAYELVVTARDGGSPPLWATASVSVEVADVNDNAPAFAQSEYTVFVKENNPPGCHIFTVSAWDADAQENALVSYSLVERRLGERSLSSYVSVHAESGKVYALQPLDHEELELLQFQVSARDGGVPPLGSNLTLQVFVLDENDNAPALLASPAGSAGGAVSELVLRSVVAGHVVAKVRAVDADSGYNAWLSYELQSAAVGARIPFRVGLYTGEISTTRALDETDSPRQRLLVLVKDHGEPSLTATATVLVSLVEGSQAPKASSRASVGVAPEVALVDVNVYLIIAICAVSSLLVLTLLLYTALRCSAAPTEGACGPVKPTLVCSSAVGSWSYSQQRRQRVCSGEGLPKADLMAFSPSLPPCPMVDVDGEDQSIGGDHSRKPRQPNPDWRYSASLRAGMHSSVHLEEAGILRAGPGGPDQQWPTVSSATPEPEAGEVSPPVGAGVNSNSWTFKYGPGNPKQSGPGELPDKFIIPGSPAIISIRQEPTNSQIDKSDFITFGKKEETKKKKKKKKGNKTQEKKEKGNSTTDNSDQ

SEQ ID NO: 10096 - protein, 844 aa, Homo Sapiens
MVSRCSCLGVQCLLLSLLLLAAWEVGSGQLHYSVYEEARHGTFVGRIAQDLGLELAELVQRLFRVASKRHGDLLEVNLQNGILFVNSRIDREELCGRSVECSIHLEVIVDRPLQVFHVDVEVKDINDNPPRFSVTEQKLSIPESRLLDSRFPLEGASDADVGENALLTYKLSPNEYFVLDIINKKDKDKFPVLVLRKLLDREENPQLKLLLTATDGGKPEFTGSVSLLILVLDANDNAPIFDRPVYEVKMYENQVNQTLVIRLNASDSDEGINKEMMYSFSSLVPPTIRRKFWINERTGEIKVNDAIDFEDSNTYEIHVDVTDKGNPPMVGHCTVLVELLDENDNSPEVIVTSLSLPVKEDAQVGTVIALISVSDHDSGANGQVTCSLTPHVPFKLVSTYKNYYSLVLDSALDRERVSAYELVVTARDGGSPPLWATASVSVEVADVNDNAPAFAQSEYTVFVKENNPPGCHIFTVSAWDADAQENALVSYSLVERRLGERSLSSYVSVHAESGKVYALQPLDHEELELLQFQVSARDGGVPPLGSNLTLQVFVLDENDNAPALLASPAGSAGGAVSELVLRSVVAGHVVAKVRAVDADSGYNAWLSYELQSAAVGARIPFRVGLYTGEISTTRALDETDSPRQRLLVLVKDHGEPSLTATATVLVSLVEGSQAPKASSRASVGVAPEVALVDVNVYLIIAICAVSSLLVLTLLLYTALRCSAAPTEGACGPVKPTLVCSSAVGSWSYSQQRRQRVCSGEGLPKADLMAFSPSLPPCPMVDVDGEDQSIGGDHSRKVGYYVFIFLLCFMNNIFSYRIFSNMYQNISFLSTFHLCLNISSDTFVI

SEQ ID NO: 10097 - protein, 685 aa, Homo Sapiens
MVSRCSCLGVQCLLLSLLLLAAWEVGSGQLHYSVYEEARHGTFVGRIAQDLGLELAELVQRLFRVASKRHGDLLEVNLQNGILFVNSRIDREELCGRSVECSIHLEVIVDRPLQVFHVDVEVKDINDNPPRFSVTEQKLSIPESRLLDSRFPLEGASDADVGENALLTYKLSPNEYFVLDIINKKDKDKFPVLVLRKLLDREENPQLKLLLTATDGGKPEFTGSVSLLILVLDANDNAPIFDRPVYEVKMYENQVNQTLVIRLNASDSDEGINKEMMYSFSSLVPPTIRRKFWINERTGEIKVNDAIDFEDSNTYEIHVDVTDKGNPPMVGHCTVLVELLDENDNSPEVIVTSLSLPVKEDAQVGTVIALISVSDHDSGANGQVTCSLTPHVPFKLVSTYKNYYSLVLDSALDRERVSAYELVVTARDGGSPPLWATASVSVEVADVNDNAPAFAQSEYTVFVKENNPPGCHIFTVSAWDADAQENALVSYSLVERRLGERSLSSYVSVHAESGKVYALQPLDHEELELLQFQPRQPNPDWRYSASLRAGMHSSVHLEEAGILRAGPGGPDQQWPTVSSATPEPEAGEVSPPVGAGVNSNSWTFKYGPGNPKQSGPGELPDKFIIPGSPAIISIRQEPTNSQIDKSDFITFGKKEETKKKKKKKKGNKTQEKKEKGNSTTDNSDQ

SEQ ID NO: 10098 - protein, 949 aa, Homo Sapiens
MFGFQRRGLGTPRLQLWLLLLEFWEVGSGQLHYSVSEEAKHGTFVGRIAQDLGLELAELVQRLFRVASKTHGDLLEVNLQNGILFVNSRIDREELCGQSAECSIHLEVIVDRPLQVFHVNVEVKDINDNPPVFSLREQKLLIAESKQSDSRFPLEGASDADIEENALLTYRLSKNEYFSLDSPTNGKQIKRLSLILKKSLDREKTPELNLLLTATDGGKPELTGTVRLLVQVLDVNDNDPEFDKSEYKVSLMENAAKETLVLKLNATDRDEGVNGEVTYSLMSIKPNGRHLFTLDQNNGEVRVNGTLDYEENKFYKIEVQATDKGTPPMAGHCTVWVEILDTNDNSPEVAVTSLSLPVREDAQPSTVIALISVSDRDSGVNGQVTCSLTPHVPFKLVSTFKNYYSLVLDSALDRENVWAYELVVTARDGGSPSLWATARVSVEVADVNDNAPAFAQPEYTVFVKENNPPGCHIFTVSARDADAQENALVSYSLVERRLGDRALSSYVSVHAESGKVYALQPLDHEELELLQFQVSARDAGVPPLSSNVTLQVFVLDENDNAPALLATQAGSAGGAVNKLVPRSVGAGHVVAKVRAVDADSGYNAWLSYELQPAAGGSRIPFRVGLYTGEISTTRALDEADSPRHRLLVLVKDHGEPALTATATVLVSLVESGQAPKASSRTLAGAASPEAALVDVNVYLIIAICVVSSLLVLTLLLYTALWWSATPTEGACAPGKPTLVCSRAVGSWSYSQQRRQRVCSEEGPPKTDLMAFSPSLPLGLNKEEEGERQEPGSNHPGQPRQPNPDWRYSASLRAGMHSSVHLEEAGILRAGPGGPDQQWPTVSSATPEPEAGEVSPPVGAGVNSNSWTFKYGPGNPKQSGPGELPDKFIIPGSPAIISIRQEPTNSQIDKSDFITFGKKEETKKKKKKKKGNKTQEKKEKGNSTTDNSDQ

SEQ ID NO: 10099 - protein, 810 aa, Homo Sapiens
MFGFQRRGLGTPRLQLWLLLLEFWEVGSGQLHYSVSEEAKHGTFVGRIAQDLGLELAELVQRLFRVASKTHGDLLEVNLQNGILFVNSRIDREELCGQSAECSIHLEVIVDRPLQVFHVNVEVKDINDNPPVFSLREQKLLIAESKQSDSRFPLEGASDADIEENALLTYRLSKNEYFSLDSPTNGKQIKRLSLILKKSLDREKTPELNLLLTATDGGKPELTGTVRLLVQVLDVNDNDPEFDKSEYKVSLMENAAKETLVLKLNATDRDEGVNGEVTYSLMSIKPNGRHLFTLDQNNGEVRVNGTLDYEENKFYKIEVQATDKGTPPMAGHCTVWVEILDTNDNSPEVAVTSLSLPVREDAQPSTVIALISVSDRDSGVNGQVTCSLTPHVPFKLVSTFKNYYSLVLDSALDRENVWAYELVVTARDGGSPSLWATARVSVEVADVNDNAPAFAQPEYTVFVKENNPPGCHIFTVSARDADAQENALVSYSLVERRLGDRALSSYVSVHAESGKVYALQPLDHEELELLQFQVSARDAGVPPLSSNVTLQVFVLDENDNAPALLATQAGSAGGAVNKLVPRSVGAGHVVAKVRAVDADSGYNAWLSYELQPAAGGSRIPFRVGLYTGEISTTRALDEADSPRHRLLVLVKDHGEPALTATATVLVSLVESGQAPKASSRTLAGAASPEAALVDVNVYLIIAICVVSSLLVLTLLLYTALWWSATPTEGACAPGKPTLVCSRAVGSWSYSQQRRQRVCSEEGPPKTDLMAFSPSLPLGLNKEEEGERQEPGSNHPGQVSFLQIPPIRKCM

SEQ ID NO: 10100 - protein, 199 aa, Homo Sapiens
  misc_feature (1)..(1): Xaa can be any naturally occurring amino acid
XVSSLLVLTLLLYTALWWSATPTEGACAPGKPTLVCSRAVGSWSYSQQRRQRVCSEEGPPKTDLMAFSPSLPLGLNKEEEGERQEPGSNHPGQPRQPNPDWRYSASLRAGMHSSVHLEEAGILRAGPGGPDQQWPTVSSATPEPEAGEVSPPVGAGVNSNSWTFKYGPGNPKQSGPEPKKQTQVSFLLRRKGEASQPRQ

SEQ ID NO: 10101 - protein, 803 aa, Homo Sapiens
MVFTPEDRLGKQCLLLPLLLLAAWKVGSGQLHYSVPEEAKHGTFVGRIAQDLGLELAELVPRLFRMASKDREDLLEVNLQNGILFVNSRIDREELCGRSAECSIHLEVIVDRPLQVFHVDVEVRDINDNPPLFPVEEQRVLIYESRLPDSVFPLEGASDADVGSNSILTYKLSSSEYFGLDVKINSDDNKQIGLLLKKSLDREEAPAHNLFLTATDGGKPELTGTVQLLVTVLDVNDNAPTFEQSEYEVRIFENADNGTTVIRLNASDRDEGANGAISYSFNSLVAAMVIDHFSIDRNTGEIVIRGNLDFEQENLYKILIDATDKGHPPMAGHCTVLVRILDKNDNVPEIALTSLSLPVREDAQFGTVIALISVNDLDSGANGQVNCSLTPHVPFKLVSTFKNYYSLVLDSALDRESVSAYELVVTARDGGSPSLWATASLSVEVADMNDNAPAFAQPEYTVFVKENNPPGCHIFTVSARDADAQENALVSYSLVERRVGERALSSYISVHAESGKVYALQPLDHEELELLQFQVSARDAGVPPLGSNVTLQVFVLDENDNAPALLAPRVGGTGGAVSELVPRSLGAGQVVAKVRAVDADSGYNAWLSYELQPPASSARFPFRVGLYTGEISTTRVLDEADSPRHRLLVLVKDHGEPALTATATVLVSLVESGQAPKASSRASVGAAGPEAALVDVNVYLIIAICAVSSLLVLTLLLYTALRCSAPPTEGACTADKPTLVCSSAVGSWSYSQQRRQRVCSGEGPPKMDLMAFSPSLSPCPIMMGKAENQDLNEDHDAKVSEFS

SEQ ID NO: 10102 - protein, 686 aa, Homo Sapiens
MVFTPEDRLGKQCLLLPLLLLAAWKVGSGQLHYSVPEEAKHGTFVGRIAQDLGLELAELVPRLFRMASKDREDLLEVNLQNGILFVNSRIDREELCGRSAECSIHLEVIVDRPLQVFHVDVEVRDINDNPPLFPVEEQRVLIYESRLPDSVFPLEGASDADVGSNSILTYKLSSSEYFGLDVKINSDDNKQIGLLLKKSLDREEAPAHNLFLTATDGGKPELTGTVQLLVTVLDVNDNAPTFEQSEYEVRIFENADNGTTVIRLNASDRDEGANGAISYSFNSLVAAMVIDHFSIDRNTGEIVIRGNLDFEQENLYKILIDATDKGHPPMAGHCTVLVRILDKNDNVPEIALTSLSLPVREDAQFGTVIALISVNDLDSGANGQVNCSLTPHVPFKLVSTFKNYYSLVLDSALDRESVSAYELVVTARDGGSPSLWATASLSVEVADMNDNAPAFAQPEYTVFVKENNPPGCHIFTVSARDADAQENALVSYSLVERRVGERALSSYISVHAESGKVYALQPLDHEELELLQFQPRQPNPDWRYSASLRAGMHSSVHLEEAGILRAGPGGPDQQWPTVSSATPEPEAGEVSPPVGAGVNSNSWTFKYGPGNPKQSGPGELPDKFIIPGSPAIISIRQEPTNSQIDKSDFITFGKKEETKKKKKKKKGNKTQEKKEKGNSTTDNSDQ

SEQ ID NO: 10103 - protein, 950 aa, Homo Sapiens
MVFTPEDRLGKQCLLLPLLLLAAWKVGSGQLHYSVPEEAKHGTFVGRIAQDLGLELAELVPRLFRMASKDREDLLEVNLQNGILFVNSRIDREELCGRSAECSIHLEVIVDRPLQVFHVDVEVRDINDNPPLFPVEEQRVLIYESRLPDSVFPLEGASDADVGSNSILTYKLSSSEYFGLDVKINSDDNKQIGLLLKKSLDREEAPAHNLFLTATDGGKPELTGTVQLLVTVLDVNDNAPTFEQSEYEVRIFENADNGTTVIRLNASDRDEGANGAISYSFNSLVAAMVIDHFSIDRNTGEIVIRGNLDFEQENLYKILIDATDKGHPPMAGHCTVLVRILDKNDNVPEIALTSLSLPVREDAQFGTVIALISVNDLDSGANGQVNCSLTPHVPFKLVSTFKNYYSLVLDSALDRESVSAYELVVTARDGGSPSLWATASLSVEVADMNDNAPAFAQPEYTVFVKENNPPGCHIFTVSARDADAQENALVSYSLVERRVGERALSSYISVHAESGKVYALQPLDHEELELLQFQVSARDAGVPPLGSNVTLQVFVLDENDNAPALLAPRVGGTGGAVSELVPRSLGAGQVVAKVRAVDADSGYNAWLSYELQPPASSARFPFRVGLYTGEISTTRVLDEADSPRHRLLVLVKDHGEPALTATATVLVSLVESGQAPKASSRASVGAAGPEAALVDVNVYLIIAICAVSSLLVLTLLLYTALRCSAPPTEGACTADKPTLVCSSAVGSWSYSQQRRQRVCSGEGPPKMDLMAFSPSLSPCPIMMGKAENQDLNEDHDAKPRQPNPDWRYSASLRAGMHSSVHLEEAGILRAGPGGPDQQWPTVSSATPEPEAGEVSPPVGAGVNSNSWTFKYGPGNPKQSGPGELPDKFIIPGSPAIISIRQEPTNSQIDKSDFITFGKKEETKKKKKKKKGNKTQEKKEKGNSTTDNSDQ

SEQ ID NO: 10104 - protein, 458 aa, Homo Sapiens
MDVNDNAPEITVSSITSPIPENTPETVVMVFRIRDRDSGDNGKMVCSIPEDIPFVLKSSVNNYYTLETERPLDRESRAEYNITITVTDLGTPRLKTEHNITVLVSDVNDNAPAFTQTSYALFVRENNSPALHIGSISATDRDSGTNAQVNYSLLPSQDPHLPLASLVSINADNGHLFALRSLDYEALQGFQFRVGATDHGSPALSSEALVRVLVLDANDNSPFVLYPLQNGSAPCTELVPWAAEPGYLVTKVVAVDGDSGQNAWLSYQLLKATEPGLFGVWAHNGEVRTARLLSERDAAKHRLVVLVKDNGEPPRSATATLHVLLVDGFSQPYLPLPEAAPAQAQADSLTVYLVVALASVSSLFLFSVLLFVAVRLCRRSRAAPVGRCSVPEGPFPGHLVDVSGTGTLSQSYHYEVCVTGGSRSNKFKFLKPIIPNFLPQSTGSEVEENPPFQNNLGF

SEQ ID NO: 10105 - protein, 67 aa, Homo Sapiens
MENGGAGTLQIRQVLLFFVLLGMSQAGSETGNFLVMEELQSGSFVGNLAKTLGLEHLWILKQLSHTQ

SEQ ID NO: 10106 - protein, 795 aa, Homo Sapiens
MENGGAGTLQIRQVLLFFVLLGMSQAGSETGNFLVMEELQSGSFVGNLAKTLGLEVSELSSRGARVVSNDNKECLQLDTNTGDLLLREMLDREELCGSNEPCVLYFQVLMKNPTQFLQIELQVRDINDHSPVFLEKEMLLEIPENSPVGAVFLLESAKDLDVGINAVKSYTINPNSHFHVKIRVNPDNRKYPELVLDKALDYEERPELSFILTALDGGSPPRSGTALVRVVVVDINDNSPEFEQAFYEVKILENSILGSLVVTVSAWDLDSGTNSELSYTFSHASEDIRKTFEINQKSGDITLTAPLDFEAIESYSIIIQATDGGGLFGKSTVRIQVMDVNDNAPEITVSSITSPIPENTPETVVMVFRIRDRDSGDNGKMVCSIPEDIPFVLKSSVNNYYTLETERPLDRESRAEYNITITVTDLGTPRLKTEHNITVLVSDVNDNAPAFTQTSYALFVRENNSPALHIGSISATDRDSGTNAQVNYSLLPSQDPHLPLASLVSINADNGHLFALRSLDYEALQGFQFRVGATDHGSPALSSEALVRVLVLDANDNSPFVLYPLQNGSAPCTELVPWAAEPGYLVTKVVAVDGDSGQNAWLSYQLLKATEPGLFGVWAHNGEVRTARLLSERDAAKHRLVVLVKDNGEPPRSATATLHVLLVDGFSQPYLPLPEAAPAQAQADSLTVYLVVALASVSSLFLFSVLLFVAVRLCRRSRAAPVGRCSVPEGPFPGHLVDVSGTGTLSQSYHYEVCVTGGSRSNKFKFLKPIIPNFLPQSTGSEVEENPPFQNNLGF

SEQ ID NO: 10107 - protein, 935 aa, Homo Sapiens
MANRLQRGDRSRLLLLLCIFLGTLRGFRARQIRYSVPEETEKGSFVGNISKDLGLEPRELAKRGVRIVSRGKTQLFAVNPRSGSLITAGRIDREELCETVSSCFLNMELLVEDTLKIYGVEVEIIDINDNAPSFQEDEVEIKVSEHAIPGARFALPNARDPDVGVNSLQSYQLSPNNYFSLQLRGRTDGAKNPELVLEGSLDREKEAAHLLLLTALDGGDPIRKGAVPIRVVVLDVNDHIPMFTQSVYRVSVPENISSGTRVLMVNATDPDEGINGEVMYSFRNMESKASEIFQLDSQTGEVQVRGSLDFEKYRFYEMEIQGQDGGGLFTTTTMLITVVDVNDNAPEITITSSINSILENSPPGTVIALLNVQDQDSGENGQVSCFIPNHLPFKLEKTYGNYYKLITSRVLDRELVQSYNITLTATDQGSPPLSAETHVWLNVADDNDNPPVFPHSSYSAYIPENNPRGASIFSVTALDPDSKQNALVTYSLTDDTVQGVPLSSYVSINSNTGVLYALQSFDYEQFRDLELRVIARDSGDPPLSSNVSLSLFVLDQNDNAPEILYPALPTDGSTGVELAPRSAEPGYLVTKVVAVDKDSGQNAWLSYRLLKASEPGLFAVGEHTGEVRTARALLDRDALKQSLVVAVQDHGQPPLSATVTLTVAVADSIPEVLADLGSLESLANSETSDLSLYLVVAVAAVSCIFLVFVIVLLALRLWRWHKSRLLQASEGGLAGMPTSHFVGVDGVQAFLQTYSHEVSLIADSQKSHLIFPQPNYGDTLISQESCEKSEPLLIAEDSAIILGKCDPTSNQQAPPNTDWRFSQAQRPGTSGSQNGDDTGTWPNNQFDTEMLQAMILASASEAADGSSTLGGGAGTMGLSARYGPQFTLQHVPDYRQNVYIPGSNATLTNAAGKRDGKAPAGGNGNKKKSGKKEKK

SEQ ID NO: 10108 - protein, 750 aa, Homo Sapiens
MANRLQRGDRSRLLLLLCIFLGTLRGFRARQIRYSVPEETEKGSFVGNISKDLGLEPRELAKRGVRIVSRGKTQLFAVNPRSGSLITAGRIDREELCETVSSCFLNMELLVEDTLKIYGVEVEIIDINDNAPSFQEDEVEIKVSEHAIPGARFALPNARDPDVGVNSLQSYQLSPNNYFSLQLRGRTDGAKNPELVLEGSLDREKEAAHLLLLTALDGGDPIRKGAVPIRVVVLDVNDHIPMFTQSVYRVSVPENISSGTRVLMVNATDPDEGINGEVMYSFRNMESKASEIFQLDSQTGEVQVRGSLDFEKYRFYEMEIQGQDGGGLFTTTTMLITVVDVNDNAPEITITSSINSILENSPPGTVIALLNVQDQDSGENGQVSCFIPNHLPFKLEKTYGNYYKLITSRVLDRELVQSYNITLTATDQGSPPLSAETHVWLNVADDNDNPPVFPHSSYSAYIPENNPRGASIFSVTALDPDSKQNALVTYSLTDDTVQGVPLSSYVSINSNTGVLYALQSFDYEQFRDLELRVIARDSGDPPLSSNVSLSLFVLDQNDNAPEILYPALPTDGSTGVELAPRSAEPGYLVTKVVAVDKDSGQNAWLSYRLLKASEPGLFAVGEHTGEQAPPNTDWRFSQAQRPGTSGSQNGDDTGTWPNNQFDTEMLQAMILASASEAADGSSTLGGGAGTMGLSARYGPQFTLQHVPDYRQNVYIPGSNATLTNAAGKRDGKAPAGGNGNKKKSGKKEKK

SEQ ID NO: 10109 - protein, 837 aa, Homo Sapiens
MANRLQRGDRSRLLLLLCIFLGTLRGFRARQIRYSVPEETEKGSFVGNISKDLGLEPRELAKRGVRIVSRGKTQLFAVNPRSGSLITAGRIDREELCETVSSCFLNMELLVEDTLKIYGVEVEIIDINDNAPSFQEDEVEIKVSEHAIPGARFALPNARDPDVGVNSLQSYQLSPNNYFSLQLRGRTDGAKNPELVLEGSLDREKEAAHLLLLTALDGGDPIRKGAVPIRVVVLDVNDHIPMFTQSVYRVSVPENISSGTRVLMVNATDPDEGINGEVMYSFRNMESKASEIFQLDSQTGEVQVRGSLDFEKYRFYEMEIQGQDGGGLFTTTTMLITVVDVNDNAPEITITSSINSILENSPPGTVIALLNVQDQDSGENGQVSCFIPNHLPFKLEKTYGNYYKLITSRVLDRELVQSYNITLTATDQGSPPLSAETHVWLNVADDNDNPPVFPHSSYSAYIPENNPRGASIFSVTALDPDSKQNALVTYSLTDDTVQGVPLSSYVSINSNTGVLYALQSFDYEQFRDLELRVIARDSGDPPLSSNVSLSLFVLDQNDNAPEILYPALPTDGSTGVELAPRSAEPGYLVTKVVAVDKDSGQNAWLSYRLLKASEPGLFAVGEHTGEVRTARALLDRDALKQSLVVAVQDHGQPPLSATVTLTVAVADSIPEVLADLGSLESLANSETSDLSLYLVVAVAAVSCIFLVFVIVLLALRLWRWHKSRLLQASEGGLAGMPTSHFVGVDGVQAFLQTYSHEVSLIADSQKSHLIFPQPNYGDTLISQESCEKSEPLLIAEDSAIILGKCDPTSNQVRFISLPPNCWCLGTSLLRRCFLSLL

SEQ ID NO: 10110 - protein, 198 aa, Homo Sapiens
MLTCLVLSGVAQPVAFGQGQQFLPVHPQNPGFVQNPSGALPKAYPDNHLSQVDVNELFSKLLKTGILKLSQTDSATTQVSEVTAQPPPEEEEDQNEDQDVPDLTNFTVEELKQRYDSVINRLYTGIQCYSCGMRFTTSQTDVYADHLDWHYRQNRTEKDVSRKVTHRRWYYSLTDWIEFEEIADLEERAKSQFFEKVH

SEQ ID NO: 10111 - protein, 1555 aa, Homo Sapiens
MSEQTPAEAGAAGAREDACRDYQSSLEDLTFNSKPHINMLTILAEENLPFAKEIVSLIEAQTAKAPSSEKLPVMYLMDSIVKNVGREYLTAFTKNLVATFICVFEKVDENTRKSLFKLRSTWDEIFPLKKLYALDVRVNSLDPAWPIKPLPPNVNTSSIHVNPKFLNKSPEEPSTPGTVVSSPSISTPPIVPDIQKNLTQEQLIRQQLLAKQKQLLELQQKKLELELEQAKAQLAVSLSVQQETSNLGPGSAPSKLHVSQIPPMAVKAPHQVPVQSEKSRPGPSLQIQDLKGTNRDPRLNRISQHSHGKDQSHRKEFLMNTLNQSDTKTSKTIPSEKLNSSKQEKSKSGEKITKKELDQLDSKSKSKSKSPSPLKNKLSHTKDLKNQESESMRLSDMNKRDPRLKKHLQDKTDGKDDDVKEKRKTAEKKDKDEHMKSSEHRLAGSRNKIINGIVQKQDTITEESEKQGTKPGRSSTRKRSRSRSPKSRSPIIHSPKRRDRRSPKRRQRSMSPTSTPKAGKIRQSGAKQSHMEEFTPPSREDRNAKRSTKQDIRDPRRMKKTEEERPQETTNQHSTKSGTEPKENVENWQSSKSAKRWKSGWEENKSLQQVDEHSKPPHLRHRESWSSTKGILSPRAPKQQQHRLSVDANLQIPKELTLASKRELLQKTSERLASGEITQDDFLVVVHQIRQLFQYQEGVREEQRSPFNDRFPLKRPRYEDSDKPFVDSPASRFAGLDTNQRLTALAEDRPLFDGPSRPSVARDGPTKMIFEGPNKLSPRIDGPPTPASLRFDGSPGQMGGGGPLRFEGPQGQLGGGCPLRFEGPPGPVGTPLRFEGPIGQAGGGGFRFEGSPGLRFEGSPGGLRFEGPGGQPVGGLRFEGHRGQPVGGLRFEGPHGQPVGGLRFDNPRGQPVGGLRFEGGHGPSGAAIRFDGPHGQPGGGIRFEGPLLQQGVGMRFEGPHGQSVAGLRFEGQHNQLGGNLRFEGPHGQPGVGIRFEGPLVQQGGGMRFEGPSVPGGGLRIEGPLGQGGPRFEGCHALRFDGQPGQPSLLPRFDGLHGQPGPRFERTPGQPGPQRFDGPPGQQVQPRFDGVPQRFDGPQHQQASRFDIPLGLQGTRFDNHPSQRLESVSFNQTGPYNDPPGNAFNAPSQGLQFQRHEQIFDSPQGPNFNGPHGPGNQSFSNPLNRASGHYFDEKNLQSSQFGNFGNIPAPMTVGNIQASQQVLSGVAQPVAFGQGQQFLPVHPQNPGFVQNPSGALPKAYPDNHLSQVDVNELFSKLLKTGILKLSQTDSATTQVSEVTAQPPPEEEEDQNEDQDVPDLTNFTVEELKQRYDSVINRLYTGIQCYSCGMRFTTSQTDVYADHLDWHYRQNRTEKDVSRKVTHRRWYYSLTDWIEFEEIADLEERAKSQFFEKVHEEVVLKTQEAAKEKEFQSVPAGPAGAVESCEICQEQFEQYWDEEEEEWHLKNAIRVDGKIYHPSCYEDYQNTSSFDCTPSPSKTPVENPLNIMLNIVKNELQEPCDSPKVKEERIDTPPACTEESIATPSEIKTENDTVESV

SEQ ID NO: 10112 - protein, 999 aa, Homo Sapiens
MSEQTPAEAGAAGAREDACRDYQSSLEDLTFNSKPHINMLTILAEENLPFAKEIVSLIEAQTAKAPSSEKLPVMYLMDSIVKNVGREYLTAFTKNLVATFICVFEKVDENTRKSLFKLRSTWDEIFPLKKLYALDVRVNSLDPAWPIKPLPPNVNTSSIHVNPKFLNKSPEEPSTPGTVVSSPSISTPPIVPDIQKNLTQEQLIRQQLLAKQKQLLELQQKKLELELEQAKAQLAVSLSVQQETSNLGPGSAPSKLHVSQIPPMAVKAPHQVPVQSEKSRPGPSLQIQDLKGTNRDPRLNRISQHSHGKDQSHRKEFLMNTLNQSDTKTSKTIPSEKLNSSKQEKSKSGEKITKKELDQLDSKSKSKSKSPSPLKNKLSHTKDLKNQESESMRLSDMNKRDPRLKKHLQDKTDGKDDDVKEKRKTAEKKDKDEHMKSSEHRLAGSRNKIINGIVQKQDTITEESEKQGTKPGRSSTRKRSRSRSPKSRSPIIHSPKRRDRRSPKRRQRSMSPTSTPKAGKIRQSGAKQSHMEEFTPPSREDRNAKRSTKQDIRDPRRMKKTEEERPQETTNQHSTKSGTEPKENVENWQSSKSAKRWKSGWEENKSLQQVDEHSKPPHLRHRESWSSTKGILSPRAPKQQQHRLSVDANLQIPKELTLASKRELLQKTSERLASGEITQDDFLVVVHQIRQLFQYQEGKHRCNVRDSPTEENKGGLKKKPLLSDAELTYYEHKAKLKRTQVQHSFPRLDLLDPDIFDYPLTDALLSGIECEPSKSKHASRNSGAQFDRKEQFSERARRLSPISGSRTYAENLSPHEGRRRHDEQVSAKGVREEQRSPFNDRFPLKRPRYEDSDKPFVDSPASRFAGLDTNQRLTALAEDRPLFDGPSRPSVARDGPTKMIFEGPNKLSPRIDGPPTPASLRFDGSPGQMGGGGPLRFEGPQGQLGGGCPLRFEGPPGPVGTPLRFEGPIGQAGGGGFRFEGSPGLRFEGSPGGLRFEGP

SEQ ID NO: 10113 - protein, 784 aa, Homo Sapiens
MSEQTPAEAGAAGAREDACRDYQSSLEDLTFNSKPHINMLTILAEENLPFAKEIVSLIEAQTAKAPSSEKLPVMYLMDSIVKNVGREYLTAFTKNLVATFICVFEKVDENTRKSLFKLRSTWDEIFPLKKLYALDVRVNSLDPAWPIKPLPPNVNTSSIHVNPKFLNKSPEEPSTPGTVVSSPSISTPPIVPDIQKNLTQEQLIRQQLLAKQKQLLELQQKKLELELEQAKAQLAVSLSVQQETSNLGPGSAPSKLHVSQIPPMAVKAPHQVPVQSEKSRPGPSLQIQDLKGTNRDPRLNRISQHSHGKDQSHRKEFLMNTLNQSDTKTSKTIPSEKLNSSKQEKSKSGEKITKKELDQLDSKSKSKSKSPSPLKNKLSHTKDLKNQESESMRLSDMNKRDPRLKKHLQDKTDGKDDDVKEKRKTAEKKDKDEHMKSSEHRLAGSRNKIINGIVQKQDTITEESEKQGTKPGRSSTRKRSRSRSPKSRSPIIHSPKRRDRRSPKRRQRSMSPTSTPKAGKIRQSGAKQSHMEEFTPPSREDRNAKRSTKQDIRDPRRMKKTEEERPQETTNQHSTKSGTEPKENVENWQSSKSAKRWKSGWEENKSLQQVDEHSKPPHLRHRESWSSTKGILSPRAPKQQQHRLSVDANLQIPKELTLASKRELLQKTSERLASGEITQDDFLVVVHQIRQLFQYQEGVREEQRSPFNDRFPLKRPRYEDSDKPFVDSPASRFAGLDTNQRLTALAEDRPLFDGPSRPSVARDGPTKMIFEGPNKLSPRIDGPP

SEQ ID NO: 10114 - protein, 99 aa, Homo Sapiens
MSEQTPAEAGAAGAREDACRDYQSSLEDLTFNSKPHINMLTILAEENLPFAKEIVSLIEAQTAKVDENTRKSLFKLRSTWDEIFPLKKLYALDVRVNSL

SEQ ID NO: 10115 - protein, 449 aa, Homo Sapiens
MLPAATASLLGPLLTACALLPFAQGQTPNYTRPVFLCGGDVKGESGYVASEGFPNLYPPNKECIWTITVPEGQTVSLSFRVFDLELHPACRYDALEVFAGSGTSGQRLGRFCGTFRPAPLVAPGNQVTLRMTTDEGTGGRGFLLWYSGRATSGTEHQFCGGRLEKAQGTLTTPNWPESDYPPGISCSWHIIAPPDQVIALTFEKFDLEPDTYCRYDSVSVFNGAVSDDSRRLGKFCGDAVPGSISSEGNELLVQFVSDLSVTADGFSASYKTLPRGTAKEGQGPGPKRGTEPKVKLPPKSQPPEKTEESPSAPDAPTCPKQCRRTGTLQSNFCASSLVVTATVKSMVREPGEGLAVTVSLIGAYKTGGLDLPSPPTGASLKFYVPCKQCPPMKKGVSYLLMGQVEENRGPVLPPESFVVLHRPNQDQILTNLSKRKCPSQPVRAAASQD

SEQ ID NO: 10116 - protein, 303 aa, Homo Sapiens
MRGANAWAPLCLLLAAATQLSRQQSPERPVFTCGGILTGESGFIGSEGFPGVYPPNSKCTWKITVPEGKVVVLNFRFIDLESDNLCRYDFVDVYNGHANGQRIGRFCGTFRPGALVSSGNKMMVQMISDANTAGNGFMAMFSAAEPNERGDQYCGGLLDRPSGSFKTPNWPDRDYPAGVTCVWHIVAPKNQLIELKFEKFDVERDNYCRYDYVAVFNGGEVNDARRIGKYCGDSPPAISRHCYHNHHSRWEFARHSLDHQHLQRGKFGDSAGGQEHECQADCRLQAVPSPQKRSKLHYYGPSR

SEQ ID NO: 10117 - protein, 415 aa, Homo Sapiens
MRGANAWAPLCLLLAAATQLSRQQSPERPVFTCGGILTGESGFIGSEGFPGVYPPNSKCTWKITVPEGKVVVLNFRFIDLESDNLCRYDFVDVYNGHANGQRIGRFCGTFRPGALVSSGNKMMVQMISDANTAGNGFMAMFSAAEPNERGDQYCGGLLDRPSGSFKTPNWPDRDYPAGVTCVWHIVAPKNQLIELKFEKFDVERDNYCRYDYVAVFNGGEVNDARRIGKYCGDSPPAPIVSERNELLIQFLSDLSLTADGFIGHYIFRPKKLPTTTEQPVTTTFPVTTGLKPTVALCQQKCRRTGTLEGNYCSSDFVLAGTVITTITRDGSLHATVSIINIYKEGNLAIQQAGKNMSARLTVVCKQCPLLRRGLNYIIMGQVGEDGRGKIMPNSFIMMFKTKNQKLLDALKNKQC

SEQ ID NO: 10118 - protein, 140 aa, Homo Sapiens
TEQPVTTTFPVTTGLKPTVALCQQKCRRTGTLEGNYCSSDFVLAGTVITTITRDGSLHATVSIINIYKEGNLAIQQAGKNMSARLTVVCKQCPLLRRGLNYIIMGQVGEDGRGKIMPNSFIMMFKTKNQKLLDALKNKQC

SEQ ID NO: 10119 - protein, 101 aa, Homo Sapiens
  misc_feature (1)..(1): Xaa can be any naturally occurring amino acid
XGTFRPGALVSSGNKMMVQMISDANTAGNGFMAMFSAAEPNERGKKKKRGPESTSPLSRVAMLCQGISIVEDSLTDLPALLKPPTGQTGITLQESLVCGTL

SEQ ID NO: 10120 - protein, 158 aa, Homo Sapiens
MERRAWSLQCTAFVLFCAWCALNSAKAKRQFVNEWAAEIPGGPEAASAIAEELGYDLLGQIGSLENHYLFKHKNHPRRSRRSAFHITKRLSDDDRVIWAEQQYEKERSKRSALRDSALNLFNDPMWNQQWYLQDTRMTAALPKLDLHVIPVWQKGITG

SEQ ID NO: 10121 - protein, 753 aa, Homo Sapiens
MERRAWSLQCTAFVLFCAWCALNSAKAKRQFVNEWAAEIPGGPEAASAIAEELGYDLLGQIGSLENHYLFKHKNHPRRSRRSAFHITKRLSDDDRVIWAEQQYEKERSKRSALRDSALNLFNDPMWNQQWYLQDTRMTAALPKLDLHVIPVWQKGITGKGVVITVLDDGLEWNHTDIYANYDPEASYDFNDNDHDPFPRYDPTNENKHGTRCAGEIAMQANNHKCGVGVAYNSKVGGIRMLDGIVTDAIEASSIGFNPGHVDIYSASWGPNDDGKTVEGPGRLAQKAFEYGVKQGRQGKGSIFVWASGNGGRQGDNCDCDGYTDSIYTISISSASQQGLSPWYAEKCSSTLATSYSSGDYTDQRITSADLHNDCTETHTGTSASAPLAAGIFALALEANPNLTWRDMQHLVVWTSEYDPLANNPGWKKNGAGLMVNSRFGFGLLNAKALVDLADPRTWRSVPEKKECVVKDNDFEPRALKANGEVIIEIPTRACEGQENAIKSLEHVQFEATIEYSRRGDLHVTLTSAAGTSTVLLAERERDTSPNGFKNWDFMSVHTWGENPIGTWTLRITDMSGRIQNEGRIVNWKLILHGTSSQPEHMKQPRVYTSYNTVQNDRRGVEKMVDPGEEQPTQENPKENTLVSKSPSSSSVGGRRDELEEGAPSQAMLRLLQSAFSKNSPPKQSPKKSPSAKLNIPYENFYEALEKLNKPSQLKDSEDSLYNDYVDVFYNTKPYKHRDDRLLQALVDILNEEN

SEQ ID NO: 10122 - protein, 706 aa, Homo Sapiens
MGKGSISFLFFSQIGSLENHYLFKHKNHPRRSRRSAFHITKRLSDDDRVIWAEQQYEKERSKRSALRDSALNLFNDPMWNQQWYLQDTRMTAALPKLDLHVIPVWQKGITGKGVVITVLDDGLEWNHTDIYANYDPEASYDFNDNDHDPFPRYDPTNENKHGTRCAGEIAMQANNHKCGVGVAYNSKVGGIRMLDGIVTDAIEASSIGFNPGHVDIYSASWGPNDDGKTVEGPGRLAQKAFEYGVKQGRQGKGSIFVWASGNGGRQGDNCDCDGYTDSIYTISISSASQQGLSPWYAEKCSSTLATSYSSGDYTDQRITSADLHNDCTETHTGTSASAPLAAGIFALALEANPNLTWRDMQHLVVWTSEYDPLANNPGWKKNGAGLMVNSRFGFGLLNAKALVDLADPRTWRSVPEKKECVVKDNDFEPRALKANGEVIIEIPTRACEGQENAIKSLEHVQFEATIEYSRRGDLHVTLTSAAGTSTVLLAERERDTSPNGFKNWDFMSVHTWGENPIGTWTLRITDMSGRIQNEGRIVNWKLILHGTSSQPEHMKQPRVYTSYNTVQNDRRGVEKMVDPGEEQPTQENPKENTLVSKSPSSSSVGGRRDELEEGAPSQAMLRLLQSAFSKNSPPKQSPKKSPSAKLNIPYENFYEALEKLNKPSQLKDSEDSLYNDYVDVFYNTKPYKHRDDRLLQALVDILNEEN

SEQ ID NO: 10123 - protein, 260 aa, Homo Sapiens
MAGSPLLWGPRAGGVGLLVLLLLGLFRPPPALCARPVKEPRGLSAASPPLAETGAPRRFRRSVPRGEAAGAVQELARALAHLLEAERQERARAEAQEAEDQQARVLAQLLRVWGAPRNSDPALGLDDDPDAPAAQLARALLRARLDPAALAAQLVPAPVPAAALRPRPPVYDDGPAGPDAEEAGDETPDVDPELLRYLLGRILAGSADSEGVAAPRRLRRAADHDVGSELPPEGVLGALLRVKRLETPAPQVPARRLLPP

SEQ ID NO: 10124 - protein, 638 aa, Homo Sapiens
MKGGCVSQWKAAAGFLFCVMVFASAERPVFTNHFLVELHKGGEDKARQVAAEHGFGVRKLPFAEGLYHFYHNGLAKAKRRRSLHHKQQLERDPRVKMALQQEGFDRKKRGYRDINEIDINMNDPLFTKQWYLINTGQADGTPGLDLNVAEAWELGYTGKGVTIGIMDDGIDYLHPDLASNYNAEASYDFSSNDPYPYPRYTDDWFNSHGTRCAGEVSAAANNNICGVGVAYNSKVAGIRMLDQPFMTDIIEASSISHMPQLIDIYSASWGPTDNGKTVDGPRELTLQAMADGVNKGRGGKGSIYVWASGDGGSYDDCNCDGYASSMWTISINSAINDGRTALYDESCSSTLASTFSNGRKRNPEAGVATTDLYGNCTLRHSGTSAAAPEAAGVFALALEANLGLTWRDMQHLTVLTSKRNQLHDEVHQWRRNGVGLEFNHLFGYGVLDAGAMVKMAKDWKTVPERFHCVGGSVQDPEKIPSTGKLVLTLTTDACEGKENFVRYLEHVQAVITVNATRRGDLNINMTSPMGTKSILLSRRPRDDDSKVGFDKWPFMTTHTWGEDARGTWTLELGFVGSAPQKGVLKEWTLMLHGTQSAPYIDQVVRDYQSKLAMSKKEELEEELDEAVERSLKSILNKN

SEQ ID NO: 10125 - protein, 603 aa, Homo Sapiens
MKGGCVSQWKAAAGFLFCVMVFASAERPVFTNHFLVELHKGGEDKARQVAAEHGFGVRKVKMALQQEGFDRKKRGYRDINEIDINMNDPLFTKQWYLINTGQADGTPGLDLNVAEAWELGYTGKGVTIGIMDDGIDYLHPDLASNYNAEASYDFSSNDPYPYPRYTDDWFNSHGTRCAGEVSAAANNNICGVGVAYNSKVAGIRMLDQPFMTDIIEASSISHMPQLIDIYSASWGPTDNGKTVDGPRELTLQAMADGVNKGRGGKGSIYVWASGDGGSYDDCNCDGYASSMWTISINSAINDGRTALYDESCSSTLASTFSNGRKRNPEAGVATTDLYGNCTLRHSGTSAAAPEAAGVFALALEANLGLTWRDMQHLTVLTSKRNQLHDEVHQWRRNGVGLEFNHLFGYGVLDAGAMVKMAKDWKTVPERFHCVGGSVQDPEKIPSTGKLVLTLTTDACEGKENFVRYLEHVQAVITVNATRRGDLNINMTSPMGTKSILLSRRPRDDDSKVGFDKWPFMTTHTWGEDARGTWTLELGFVGSAPQKGVLKEWTLMLHGTQSAPYIDQVVRDYQSKLAMSKKEELEEELDEAVERSLKSILNKN

SEQ ID NO: 10126 - protein, 619 aa, Homo Sapiens
MVFASAERPVFTNHFLVELHKGGEDKARQVAAEHGFGVRKLPFAEGLYHFYHNGLAKAKRRRSLHHKQQLERDPRVKMALQQEGFDRKKRGYRDINEIDINMNDPLFTKQWYLINTGQADGTPGLDLNVAEAWELGYTGKGVTIGIMDDGIDYLHPDLASNYNAEASYDFSSNDPYPYPRYTDDWFNSHGTRCAGEVSAAANNNICGVGVAYNSKVAGIRMLDQPFMTDIIEASSISHMPQLIDIYSASWGPTDNGKTVDGPRELTLQAMADGVNKGRGGKGSIYVWASGDGGSYDDCNCDGYASSMWTISINSAINDGRTALYDESCSSTLASTFSNGRKRNPEAGVATTDLYGNCTLRHSGTSAAAPEAAGVFALALEANLGLTWRDMQHLTVLTSKRNQLHDEVHQWRRNGVGLEFNHLFGYGVLDAGAMVKMAKDWKTVPERFHCVGGSVQDPEKIPSTGKLVLTLTTDACEGKENFVRYLEHVQAVITVNATRRGDLNINMTSPMGTKSILLSRRPRDDDSKVGFDKWPFMTTHTWGEDARGTWTLELGFVGSAPQKGVLKEWTLMLHGTQSAPYIDQVVRDYQSKLAMSKKEELEEELDEAVERSLKSILNKN

SEQ ID NO: 10127 - protein, 755 aa, Homo Sapiens
MRPAPIALWLRLVLALALVRPRAVGWAPVRAPIYVSSWAVQVSQGNREVERLARKFGFVNLGPIFPDGQYFHLRHRGVVQQSLTPHWGHRLHLKKNPKVQWFQQQTLQRRVKRSVVVPTDPWFSKQWYMNSEAQPDLSILQAWSQGLSGQGIVVSVLDDGIEKDHPDLWANYDPLASYDFNDYDPDPQPRYTPSKENRHGTRCAGEVAAMANNGFCGVGVAFNARIGGVRMLDGTITDVIEAQSLSLQPQHIHIYSASWGPEDDGRTVDGPGILTREAFRRGVTKGRGGLGTLFIWASGNGGLHYDNCNCDGYTNSIHTLSVGSTTQQGRVPWYSEACASTLTTTYSSGVATDPQIVTTDLHHGCTDQHTGTSASAPLAAGMIALALEANPFLTWRDMQHLVVRASKPAHLQAEDWRTNGVGRQVSHHYGYGLLDAGLLVDTARTWLPTQPQRKCAVRVQSRPTPILPLIYIRENVSACAGLHNSIRSLEHVQAQLTLSYSRRGDLEISLTSPMGTRSTLVAIRPLDVSTEGYNNWVFMSTHFWDENPQGVWTLGLENKGYYFNTGTLYRYTLLLYGTAEDMTARPTGPQVTSSACVQRDTEGLCQACDGPAYILGQLCLAYCPPRFFNHTRLVTAGPGHTAAPALRVCSSCHASCYTCRGGSPRDCTSCPPSSTLDQQQGSCMGPTTPDSRPRLRAAACPHHRCPASAMVLSLLAVTLGGPVLCGMSMDLPLYAWLSRARATPTKPQVWLPAGT

SEQ ID NO: 10128 - protein, 230 aa, Homo Sapiens
MRPAPIALWLRLVLALALVRPRAVGWAPVRAPIYVSSWAVQVSQGNREVERLARKFGFVNLGPIFPDGQYFHLRHRGVVQQSLTPHWGHRLHLKKNPKVQWFQQQTLQRRVKRSVVVPTDPWFSKQWYMNSEAQPDLSILQAWSQGLSGQGIVVSVLDDGIEKDHPDLWANYDPLASYDFNDYDPDPQPRYTPSKENRRTDAGRYHHRCHRGPVAEPAAAAHPHLQRQLG

SEQ ID NO: 10129 - protein, 318 aa, Homo Sapiens
  misc_feature (1)..(1): Xaa can be any naturally occurring amino acid
XPIALWLRLVLALALVRPRAVGWAPVRAPIYVSSWAVQVSQGNREVERLARKFGFVNLGPIFPDGQYFHLRHRGVVQQSLTPHWGHRLHLKKNPKVQWFQQQTLQRRVKRSVVVPTDPWFSKQWYMNSEAQPDLSILQAWSQGLSGQGIVVSVLDDGIEKDHPDLWANYDPLASYDFNDYDPDPQPRYTPSKENRRTDAGRYHHRCHRGPVAEPAAAAHPHLQRQLGSRGRRPHGGRPRHPHPRGLPAWCDQASTRFPWAAPPSRAACPGTAKPAPPPSPPPTAAAWPPTPRSSPRTCITGAQTSTRAPRPQPHWRPA

SEQ ID NO: 10130 - protein, 101 aa, Homo Sapiens
CQPCHRFCATCAGAGADGCINCTEGYFMEDGRCVQSCSISYYFDHSSENGYKSCKKCDISCLTCNGPGFKNCTSCPSGYLLDLGMCQMGAICKDVSLFRGA

SEQ ID NO: 10131 - protein, 690 aa, Homo Sapiens
MGWGSRCCCPGRLDLLCVLALLGGCLLPVCRTRVYTNHWAVKIAGGFPEANRIASKYGFINIGQIGALKDYYHFYHSRTIKRSVISSRGTHSFISMEPKVEWIQQQVVKKRTKRDYDFSRAQSTYFNDPKWPSMWYMHCSDNTHPCQSDMNIEGAWKRGYTGKNIVVTILDDGIERTHPDLMQNYDALASCDVNGNDLDPMPRYDASNENKHGTRCAGEVAAAANNSHCTVGIAFNAKIGGVRMLDGDVTDMVEAKSVSFNPQHVHIYSASWGPDDDGKTVDGPAPLTRQAFENGVRMGRRGLGSVFVWASGNGGRSKDHCSCDGYTNSIYTISISSTAESGKKPWYLEECSSTLATTYSSGESYDKKIITTDLRQRCTDNHTGTSASAPMAAGIIALALEANPFLTWRDVQHVIVRTSRAGHLNANDWKTNAAGFKVSHLYGFGLMDAEAMVMEAEKWTTVPRQHVCVESTDRQIKTIRPNSAVRSIYKASGCSDNPNRHVNYLEHVVVRITITHPRRGDLAIYLTSPSGTRSQLLANRLFDHSMEGFKNWEFMTIHCWGERAAGDWVLEVYDTPSQLRNFKTPGKLKEWSLVLYGTSVQPYSPTNEFPKVERFRYSRVEDPTDDYGTEDYAGELASSGTQAKKRQLMHHPTTWENRMEWNGMKWNGMKWNGMEWNGMEWNRIESNRIE

SEQ ID NO: 10132 - protein, 913 aa, Homo Sapiens
MGWGSRCCCPGRLDLLCVLALLGGCLLPVCRTRVYTNHWAVKIAGGFPEANRIASKYGFINIGQIGALKDYYHFYHSRTIKRSVISSRGTHSFISMEPKVEWIQQQVVKKRTKRDYDFSRAQSTYFNDPKWPSMWYMHCSDNTHPCQSDMNIEGAWKRGYTGKNIVVTILDDGIERTHPDLMQNYDALASCDVNGNDLDPMPRYDASNENKHGTRCAGEVAAAANNSHCTVGIAFNAKIGGVRMLDGDVTDMVEAKSVSFNPQHVHIYSASWGPDDDGKTVDGPAPLTRQAFENGVRMGRRGLGSVFVWASGNGGRSKDHCSCDGYTNSIYTISISSTAESGKKPWYLEECSSTLATTYSSGESYDKKIITTDLRQRCTDNHTGTSASAPMAAGIIALALEANPFLTWRDVQHVIVRTSRAGHLNANDWKTNAAGFKVSHLYGFGLMDAEAMVMEAEKWTTVPRQHVCVESTDRQIKTIRPNSAVRSIYKASGCSDNPNRHVNYLEHVVVRITITHPRRGDLAIYLTSPSGTRSQLLANRLFDHSMEGFKNWEFMTIHCWGERAAGDWVLEVYDTPSQLRNFKTPGKLKEWSLVLYGTSVQPYSPTNEFPKVERFRYSRVEDPTDDYGTEDYAGPCDPECSEVGCDGPGPDHCNDCLHYYYKLKNNTRICVSSCPPGHYHADKKRCRKCAPNCESCFGSHGDQCMSCKYGYFLNEETNSCVTHCPDGSYQDTKKNLCRKCSENCKTCTEFHNCTECRDGLSLQGSRCSVSCEDGRYFNGQDCQPCHRFCATCAGAGADGCINCTEGYFMEDGRCVQSCSISYYFDHSSENGYKSCKKCDISCLTCNGPGFKNCTSCPSGYLLDLGMCQMGAICKDATEESWAEGGFCMLVKKNNLCQRKVLQQLCCKTCTFQG

SEQ ID NO: 10133 - protein, 1860 aa, Homo Sapiens
MGWGSRCCCPGRLDLLCVLALLGGCLLPVCRTRVYTNHWAVKIAGGFPEANRIASKYGFINIGQIGALKDYYHFYHSRTIKRSVISSRGTHSFISMEPKVEWIQQQVVKKRTKRDYDFSRAQSTYFNDPKWPSMWYMHCSDNTHPCQSDMNIEGAWKRGYTGKNIVVTILDDGIERTHPDLMQNYDALASCDVNGNDLDPMPRYDASNENKHGTRCAGEVAAAANNSHCTVGIAFNAKIGGVRMLDGDVTDMVEAKSVSFNPQHVHIYSASWGPDDDGKTVDGPAPLTRQAFENGVRMGRRGLGSVFVWASGNGGRSKDHCSCDGYTNSIYTISISSTAESGKKPWYLEECSSTLATTYSSGESYDKKIITTDLRQRCTDNHTGTSASAPMAAGIIALALEANPFLTWRDVQHVIVRTSRAGHLNANDWKTNAAGFKVSHLYGFGLMDAEAMVMEAEKWTTVPRQHVCVESTDRQIKTIRPNSAVRSIYKASGCSDNPNRHVNYLEHVVVRITITHPRRGDLAIYLTSPSGTRSQLLANRLFDHSMEGFKNWEFMTIHCWGERAAGDWVLEVYDTPSQLRNFKTPGKLKEWSLVLYGTSVQPYSPTNEFPKVERFRYSRVEDPTDDYGTEDYAGPCDPECSEVGCDGPGPDHCNDCLHYYYKLKNNTRICVSSCPPGHYHADKKRCRKCAPNCESCFGSHGDQCMSCKYGYFLNEETNSCVTHCPDGSYQDTKKNLCRKCSENCKTCTEFHNCTECRDGLSLQGSRCSVSCEDGRYFNGQDCQPCHRFCATCAGAGADGCINCTEGYFMEDGRCVQSCSISYYFDHSSENGYKSCKKCDISCLTCNGPGFKNCTSCPSGYLLDLGMCQMGAICKDGEYVDEHGHCQTCEASCAKCQGPTQEDCTTCPMTRIFDDGRCVSNCPSWKFEFENQCHPCHHTCQRCQGSGPTHCTSCGADNYGREHFLYQGECGDSCPEGHYATEGNTCLPCPDNCELCHSVHVCTRCMKGYFIAPTNHTCQKLECGQGEVQDPDYEECVPCEEGCLGCSLDDPGTCTSCAMGYYRFDHHCYKTCPEKTYSEEVECKACDSNCGSCDQNGCYWCEEGFFLLGGSCVRKCGPGFYGDQEMGECESCHRACETCTGPGHDECSSCQEGLQLLRGMCVHATKTQEEGKFWNDILRKLQPCHSSCKTCNGSATLCTSCPKGAYLLAQACVSSCPQGTWPSVRSGSCENCTEACAICSGADLCKKCQMQPGHPLFLHEGRCYSKCPEGSYAEDGICERCSSPCRTCEGNATNCHSCEGGHVLHHGVCQENCPERHVAVKGVCKHCPEMCQDCIHEKTCKECTPEFFLHDDMCHQSCPRGFYADSRHCVPCHKDCLECSGPKADDCELCLESSWVLYDGLCLEECPAGTYYEKETKECRDCHKSCLTCSSSGTCTTCQKGLIMNPRGSCMANEKCSPSEYWDEDAPGCKPCHVKCFHCMGPAEDQCQTCPMNSLLLNTTCVKDCPEGYYADEDSNRCAHCHSSCRTCEGRHSRQCHSCRPGWFQLGKECLLQCREGYYADNSTGRCERCNRSCKGCQGPRPTDCLSCDRFFFLLRSKGECHRSCPDHYYVEQSTQTCERCHPTCDQCKGKGALNCLSCVWSYHLMGGICTSDCLVGEYRVGEGEKFNCEKCHESCMECKGPGAKNCTLCPANLVLHMDDSHCLHCCNTSDPPSAQECCDCQDTTDECILRTSKVRPATEHFKTALFITSSMMLVLLLGAAVVVWKKSRGRVQPAAKAGYEKLADPNKSYSSYKSSYRESTSFEEDQVIEYRDRDYDEDDDDDIVYMGQDGTVYRKFKYGLLDDDDIDELEYDDESYSYYQ

SEQ ID NO: 10134 - protein, 1560 aa, Homo Sapiens
NSIYTISISSTAESGKKPWYLEECSSTLATTYSSGESYDKKIITTDLRQRCTDNHTGTSASAPMAAGIIALALEANPFLTWRDVQHVIVRTSRAGHLNANDWKTNAAGFKVSHLYGFGLMDAEAMVMEAEKWTTVPRQHVCVESTDRQIKTIRPNSAVRSIYKASGCSDNPNRHVNYLEHVVVRITITHPRRGDLAIYLTSPSGTRSQLLANRLFDHSMEGFKNWEFMTIHCWGERAAGDWVLEVYDTPSQLRNFKTPGKLKEWSLVLYGTSVQPYSPTNEFPKVERFRYSRVEDPTDDYGTEDYAGPCDPECSEVGCDGPGPDHCNDCLHYYYKLKNNTRICVSSCPPGHYHADKKRCRKCAPNCESCFGSHGDQCMSCKYGYFLNEETNSCVTHCPDGSYQDTKKNLCRKCSENCKTCTEFHNCTECRDGLSLQGSRCSVSCEDGRYFNGQDCQPCHRFCATCAGAGADGCINCTEGYFMEDGRCVQSCSISYYFDHSSENGYKSCKKCDISCLTCNGPGFKNCTSCPSGYLLDLGMCQMGAICKDGEYVDEHGHCQTCEASCAKCQGPTQEDCTTCPMTRIFDDGRCVSNCPSWKFEFENQCHPCHHTCQRCQGSGPTHCTSCGADNYGREHFLYQGECGDSCPEGHYATEGNTCLPCPDNCELCHSVHVCTRCMKGYFIAPTNHTCQKLECGQGEVQDPDYEECVPCEEGCLGCSLDDPGTCTSCAMGYYRFDHHCYKTCPEKTYSEEVECKACDSNCGSCDQNGCYWCEEGFFLLGGSCVRKCGPGFYGDQEMGECESCHRACETCTGPGHDECSSCQEGLQLLRGMCVHATKTQEEGKFWNEAVSTANLSVVKSLLQERRRWKVQIKRDILRKLQPCHSSCKTCNGSATLCTSCPKGAYLLAQACVSSCPQGTWPSVRSGSCENCTEACAICSGADLCKKCQMQPGHPLFLHEGRCYSKCPEGSYAEDGICERCSSPCRTCEGNATNCHSCEGGHVLHHGVCQENCPERHVAVKGVCKHCPEMCQDCIHEKTCKECTPEFFLHDDMCHQSCPRGFYADSRHCVPCHKDCLECSGPKADDCELCLESSWVLYDGLCLEECPAGTYYEKETKECRDCHKSCLTCSSSGTCTTCQKGLIMNPRGSCMANEKCSPSEYWDEDAPGCKPCHVKCFHCMGPAEDQCQTCPMNSLLLNTTCVKDCPEGYYADEDSNRCAHCHSSCRTCEGRHSRQCHSCRPGWFQLGKECLLQCREGYYADNSTGRCERCNRSCKGCQGPRPTDCLSCDRFFFLLRSKGECHRSCPDHYYVEQSTQTCERCHPTCDQCKGKGALNCLSCVWSYHLMGGICTSDCLVGEYRVGEGEKFNCEKCHESCMECKGPGAKNCTLCPANLVLHMDDSHCLHCCNTSDPPSAQECCDCQDTTDECILRTSKVRPATEHFKTALFITSSMMLVLLLGAAVVVWKKSRGRVQPAAKAGYEKLADPNKSYSSYKSSYRESTSFEEDQVIEYRDRDYDEDDDDDIVYMGQDGTVYRKFKYGLLDDDDIDELEYDDESYSYYQ

SEQ ID NO: 10135 - protein, 692 aa, Homo Sapiens
MGTVSSRRSWWPLPLLLLLLLLLGPAGARAQEDEDGDYEELVLALRSEEDGLAEAPEHGTTATFHRCAKDPWRLPGTYVVVLKEETHLSQSERTARRLQAQAARRGYLTKILHVFHGLLPGFLVKMSGDLLELALKLPHVDYIEEDSSVFAQSIPWNLERITPPRYRADEYQPPDGGSLVEVYLLDTSIQSDHREIEGRVMVTDFENVPEEDGTRFHRQASKCDSHGTHLAGVVSGRDAGVAKGASMRSLRVLNCQGKGTVSGTLIGLEFIRKSQLVQPVGPLVVLLPLAGGYSRVLNAACQRLARAGVVLVTAAGNFRDDACLYSPASAPEVITVGATNAQDQPVTLGTLGTNFGRCVDLFAPGEDIIGASSDCSTCFVSQSGTSQAAAHVAGIAAMMLSAEPELTLAELRQRLIHFSAKDVINEAWFPEDQRVLTPNLVAALPPSTHGAGWQLFCRTVWSAHSGPTRMATAVARCAPDEELLSCSSFSRSGKRRGERMEAQGGKLVCRAHNAFGGEGVYAIARCCLLPQANCSVHTAPPAEASMGTRVHCHQQGHVLTGCSSHWEVEDLGTHKPPVLRPRGQPNQCVGHREASIHASCCHAPGLECKVKEHGIPAPQEQVTVACEEGWTLTGCSALPGTSHVLGAYAVDNTCVVRSRDVSTTGSTSEGAVTAVAICCRSRHLAQASQELQ

SEQ ID NO: 10136 - protein, 293 aa, Homo Sapiens
MGRVVAELVSSLLGLWLLLCSCGCPEGAELRAPPDKIAIIGAGIGGTSAAYYLRQKFGKDVKIDLFEREEVGGRLATMMVQGQEYEAGGSVIHPLNLHMKRFVKDLGLSAVQASGGLLGIYNGETLVFEESNWFIINVIKLVWRYGFQSLRMHMWVEDVLDKFMRIYRYQSHDYAFSSVEKLLHALGGDDFLGMLNRTLLETLQKAGFSEKFLNEMIAPVMRVNYGQSTDINAFVGAVSLSCSDSGLWAVEGGNKLVCSGLLQASKSNLISGSVMYIEEKTKTKYTVLGLCPL

SEQ ID NO: 10137 - protein, 505 aa, Homo Sapiens
MGRVVAELVSSLLGLWLLLCSCGCPEGAELRAPPDKIAIIGAGIGGTSAAYYLRQKFGKDVKIDLFEREEVGGRLATMMVQGQEYEAGGSVIHPLNLHMKRFVKDLGLSAVQASGGLLGIYNGETLVFEESNWFIINVIKLVWRYGFQSLRMHMWVEDVLDKFMRIYRYQSHDYAFSSVEKLLHALGGDDFLGMLNRTLLETLQKAGFSEKFLNEMIAPVMRVNYGQSTDINAFVGAVSLSCSDSGLWAVEGGNKLVCSGLLQASKSNLISGSVMYIEEKTKTKYTGNPTKMYEVVYQIGTETRSDFYDIVLVATPLNRKMSNITFLNFDPPIEEFHQYYQHIVTTLVKGELNTSIFSSRPIDKFGLNTVLTTDNSDLFINSIGIVPSVREKEDPEPSTDGTYVWKIFSQETLTKAQILKLFLSYDYAVKKPWLAYPHYKPPEKCPSIILHDRLYYLNGIECAASAMEMSAIAAHNAALLAYHRWNGHTDMIDQDGLYEKLKTEL

SEQ ID NO: 10138 - protein, 130 aa, Homo Sapiens
MMVQGQEYEAGGSVIHPLNLHMKRFVKDLGLSAVQASGGLLGIYNGETLVFEESNWFIINVIKLVWRYGFQSLRMHMWVEDVLDKFMRIYRYQSHDYAFSSVEKLLHALGGDDFLGMLNRTLLETLQKAG

SEQ ID NO: 10139 - protein, 154 aa, Homo Sapiens
MMVQGQEYEAGGSVIHPLNLHMKRFVKDLGLSAVQASGGLLGIYNGETLVFEESNWFIINVIKLVWRYGFQSLRMHMWVEDVLDKFMRIYRYQSHDYAFSSVEKLLHALGGDDFLGMLNRTLLETLQKAGFSEKFLNEMIAPVMRVNYGQSTDI

SEQ ID NO: 10140 - protein, 209 aa, Homo Sapiens
MMVQGQEYEAGGSVIHPLNLHMKRFVKDLGLSAVQASGGLLGIYNGETLVFEESNWFIINVIKLVWRYGFQSLRMHMWVEDVLDKFMRIYRYQSHDYAFSSVEKLLHALGGDDFLGMLNRTLLETLQKAGFSEKFLNEMIAPVMRVNYGQSTDINAFVGAVSLSCSDSGLWAVEGGNKLVCSGLLQASKSNLISGSVMYIEEKTKTKYT

SEQ ID NO: 10141 - protein, 111 aa, Homo Sapiens
MARAAPLLAALTALLAAAAAGGDAPPGKIAVVGAGIGGSAVAHFLQQHFGPRVQIDVYEKGTVGGRLATISVNKQHYESGAASFHSLSLHMQDFVKLLDGATETREGKELA

SEQ ID NO: 10142 - protein, 494 aa, Homo Sapiens
MARAAPLLAALTALLAAAAAGGDAPPGKIAVVGAGIGGSAVAHFLQQHFGPRVQIDVYEKGTVGGRLATISVNKQHYESGAASFHSLSLHMQDFVKLLGLRHRREVVGRSAIFGGEHFMLEETDWYLLNLFRLWWHYGISFLRLQMWVEEVMEKFMRIYKYQAHGYAFSGVEELLYSLGESTFVNMTQHSVAESLLQVGVTQRFIDDVVSAVLRASYGQSAAMPAFAGAMSLAGAQGSLWSVEGGNKLVCSGLLKLTKANVIHATVTSVTLHSTEGKALYQVAYENEVGNSSDFYDIVVIATPLHLDNSSSNLTFAGFHPPIDDVQGSFQPTVVSLVHGYLNSSYFGFPDPKLFPFANILTTDFPSFFCTLDNICPVNISASFRRKQPQEAAVWRVQSPKPLFRTQLKTLFRSYYSVQTAEWQAHPLYGSRPTLPRFALHDQLFYLNALEWAASSVEVMAVAAKNVALLAYNRWYQDLDKIDQKDLMHKVKTEL

SEQ ID NO: 10143 - protein, 82 aa, Homo Sapiens
MARAAPLLAALTALLAAAAAGGDAPPGKIGAGRTRGGWGWDWGLCCGPFSPAALWTSGADRRVREGNRGWPLGHHLSQQAAL

SEQ ID NO: 10144 - protein, 82 aa, Homo Sapiens; identical to SEQ ID NO: 10143

SEQ ID NO: 10145 - protein, 404 aa, Homo Sapiens
MQDFVKLLGLRHRREVVGRSAIFGGEHFMLEETDWYLLNLFRLWWHYGISFLRLQMWVEEVMEKFMRIYKYQAHGYAFSGVEELLYSLGESTFVNMTQHSVAESLLQVGVTQRFIDDVVSAVLRASYGQSAAMPAFAGAMSLAGAQGSLWSVEGGNKLVCSGLLKLTKANVIHATVTSVTLHSTEGKALYQVAYENEVGNSSDFYDIVVIATPLHLDNSSSNLTFAGFHPPIDDVQGSFQPTVVSLVHGYLNSSYFGFPDPKLFPFANILTTDFPSFFCTLDNICPVNISASFRRKQPQEAAVWRVQSPKPLFRTQLKTLFRSYYSVQTAEWQAHPLYGSRPTLPRFALHDQLFYLNALEWAASSVEVMAVAAKNVALLAYNRWYQDLDKIDQKDLMHKVKTEL

SEQ ID NO: 10146 - protein, 933 aa, Homo Sapiens
MAASRLDFGEVETFLDRHPELFEDYLMRKGKQEMVEKWLQRHSQGQGALGPRPSLAGTSSLAHSTCRGGSSVGGGTGPNGSAHSQPLPGGGDCGGVPLSPSWAGGSRGDGNLQRRASQKELRKSFARSKAIHVNRTYDEQVTSRAQEPLSSVRRRALLRKASSLPPTTAHILSALLESRVNLPRYPPTAIDYKCHLKKHNERQFFLELVKDISNDLDLTSLSYKILIFVCLMVDADRCSLFLVEGAAAGKKTLVSKFFDVHAGTPLLPCSSTENSNEVQVPWGKGIIGYVGEHGETVNIPDAYQDRRFNDEIDKLTGYKTKSLLCMPIRSSDGEIIGVAQAINKIPEGAPFTEDDEKVMQMYLPFCGIAISNAQLFAASRKEYERSRALLEVVNDLFEEQTDLEKIVKKIMHRAQTLLKCERCSVLLLEDIESPVVKFTKSFELMSPKCSADAENSFKESMEKSSYSDWLINNSIAELVASTGLPVNISDAYQDPRFDAEADQISGFHIRSVLCVPIWNSNHQIIGVAQVLNRLDGKPFDDADQRLFEAFVIFCGLGINNTIMYDQVKKSWAKQSVALDVLSYHATCSKAEVDKFKAANIPLVSELAIDDIHFDDFSLDVDAMITAALRMFMELGMVQKFKIDYETLCRWLLTVRKNYRMVLYHNWRHAFNVCQLMFAMLTTAGFQDILTEVEILAVIVGCLCHDLDHRGTNNAFQAKSGSALAQLYGTSATLEHHHFNHAVMILQSEGHNIFANLSSKEYSDLMQLLKQSILATDLTLYFERRTEFFELVSKGEYDWNIKNHRDIFRSMLMTACDLGAVTKPWEISRQVAELVTSEFFEQGDRERLELKLTPSAIFDRNRKDELPRLQLEWIDSICMPLYQALVKVNVKLKPMLDSVATNRSKWEELHQKRLLASTASSSPASVMVAKEDRN

SEQ ID NO: 10147 - protein, 575 aa, Homo Sapiens
MQMYLPFCGIAISNAQLFAASRKEYERSRALLEVVNDLFEEQTDLEKIVKKIMHRAQTLLKCERCSVLLLEDIESPVVKFTKSFELMSPKCSADAENSFKESMEKSSYSDWLINNSIAELVASTGLPVNISDAYQDPRFDAEADQISGFHIRSVLCVPIWNSNHQIIGVAQVLNRLDGKPFDDADQRLFEAFVIFCGLGINNTIMYDQVKKSWAKQSVALDVLSYHATCSKAEVDKFKAANIPLVSELAIDDIHFDDFSLDVDAMITAALRMFMELGMVQKFKIDYETLCRWLLTVRKNYRMVLYHNWRHAFNVCQLMFAMLTTAGFQDILTEVEILAVIVGCLCHDLDHRGTNNAFQAKSGSALAQLYGTSATLEHHHFNHAVMILQSEGHNIFANLSSKEYSDLMQLLKQSILATDLTLYFERRTEFFELVSKGEYDWNIKNHRDIFRSMLMTACDLGAVTKPWEISRQVAELVTSEFFEQGDRERLELKLTPSAIFDRNRKDELPRLQLEWIDSICMPLYQALVKVNVKLKPMLDSVATNRSKWEELHQKRLLASTASSSPASVMVAKEDRN

SEQ ID NO: 10148 - protein, 36 aa, Homo Sapiens
MQMYLPFCGIAISNAQLFAASRKEYERSRSYVRDVY

SEQ ID NO: 10149 - protein, 489 aa, Homo Sapiens
MSPKCSADAENSFKESMEKSSYSDWLINNSIAELVASTGLPVNISDAYQDPRFDAEADQISGFHIRSVLCVPIWNSNHQIIGVAQVLNRLDGKPFDDADQRLFEAFVIFCGLGINNTIMYDQVKKSWAKQSVALDVLSYHATCSKAEVDKFKAANIPLVSELAIDDIHFDDFSLDVDAMITAALRMFMELGMVQKFKIDYETLCRWLLTVRKNYRMVLYHNWRHAFNVCQLMFAMLTTAGFQDILTEVEILAVIVGCLCHDLDHRGTNNAFQAKSGSALAQLYGTSATLEHHHFNHAVMILQSEGHNIFANLSSKEYSDLMQLLKQSILATDLTLYFERRTEFFELVSKGEYDWNIKNHRDIFRSMLMTACDLGAVTKPWEISRQVAELVTSEFFEQGDRERLELKLTPSAIFDRNRKDELPRLQLEWIDSICMPLYQALVKVNVKLKPMLDSVATNRSKWEELHQKRLLASTASSSPASVMVAKEDRN

SEQ ID NO: 10150 - protein, 437 aa, Homo Sapiens
  misc_feature (1)..(1): Xaa can be any naturally occurring amino acid
XLPFCGIAISNAQLFAASRKEYERSRALLEVVNDLFEEQTDLEKIVKKIMHRAQTLLKCERCSVLLLEDIESPVVKFTKSFELMSPKCSADAENSFKESMEKSSYSDWLINNSIAELVASTGLPVNISDAYQDPRFDAEADQISGFHIRSVLCVPIWNSNHQIIGVAQVLNRLDGKPFDDADQRLFEVLSYHATCSKAEVDKFKAANIPLVSELAIDDIHFDDFSLDVDAMITAALRMFMELGMVQKFKIDYETLCRWLLTVRKNYRMVLYHNWRHAFNVCQLMFAMLTTAGFQDILTEVEILAVIVGCLCHDLDHRGTNNAFQAKSGSALAQLYGTSATLEHHHFNHAVMILQSEGHNIFANLSSKEYSDLMQLLKQSILATDLTLYFERRTEFFELVSKGEYDWNIKNHRDIFRSMLMTACDLGAVTKPWEISRQ

SEQ ID NO: 10151 - protein, 136 aa, Homo Sapiens
  misc_feature (1)..(1): Xaa can be any naturally occurring amino acid
XVLPLVEERKISMLMTACDLGAVTKPWEISRQVAELVTSEFFEQGDRERLELKLTPSAIFDRNRKDELPRLQLEWIDSICMPLYQALVKVNVKLKPMLDSVATNRSKWEELHQKRLLASTASSSPASVMVAKEDRN

SEQ ID NO: 10152 - protein, 327 aa, Homo Sapiens
FPTASSVPEHKGVGFHAWDVRNLRKLRGQVPAGSLPPTDPSLHRWFLAPLPSPEVIGVAELVNKINGPWFSKFDEDLATAFSIYCGISIAHSLLYKKVNEAQYRSHLANEMMMYHMKVSDDEYTKLLHDGIQPVAAIDSNFASFTYTPRSLPEDDTSMAILSMLQDMNFINNYKIDCPTLARFCLMVKKGYRDPPYHNWMHAFSVSHFCYLLYKNLELTNYLEDIEIFALFISCMCHDLDHRGTNNSFQVASKSVLAALYSSEGSVMERHHFAQAIAILNTHGCNIFDHFSRKDYQRMLDLMRDIILATDLAHHLRIFKDLQKMAEG

SEQ ID NO: 10153 - protein, 38 aa, Homo Sapiens
MGQACGHSILCRSQQYPAARPAEPQPGPPCKGARTPRE

SEQ ID NO: 10154 - protein, 941 aa, Homo Sapiens
MGQACGHSILCRSQQYPAARPAEPRGQQVFLKPDEPPPPPQPCADSLQDALLSLGSVIDISGLQRAVKEALSAVLPRVETVYTYLLDGESQLVCEDPPHELPQEGKVREAIISQKRLGCNGLGFSDLPGKPLARLVAPLAPDTQVLVMPLADKEAGAVAAVILVHCGQLSDNEEWSLQAVEKHTLVALRRVQVLQQRGPREAPRAVQNPPEGTAEDQKGGAAYTDRDRKILQLCGELYDLDASSLQLKVLQYLQQETRASRCCLLLVSEDNLQLSCKVIGDKVLGEEVSFPLTGCLGQVVEDKKSIQLKDLTSEDVQQLQSMLGCELQAMLCVPVISRATDQVVALACAFNKLEGDLFTDEDEHVIQHCFHYTSTVLTSTLAFQKEQKLKCECQALLQVAKNLFTHLDDVSVLLQEIITEARNLSNAEICSVFLLDQNELVAKVFDGGVVDDESYEIRIPADQGIAGHVATTGQILNIPDAYAHPLFYRGVDDSTGFRTRNILCFPIKNENQEVIGVAELVNKINGPWFSKFDEDLATAFSIYCGISIAHSLLYKKVNEAQYRSHLANEMMMYHMKVSDDEYTKLLHDGIQPVAAIDSNFASFTYTPRSLPEDDTSMAILSMLQDMNFINNYKIDCPTLARFCLMVKKGYRDPPYHNWMHAFSVSHFCYLLYKNLELTNYLEDIEIFALFISCMCHDLDHRGTNNSFQVASKSVLAALYSSEGSVMERHHFAQAIAILNTHGCNIFDHFSRKDYQRMLDLMRDIILATDLAHHLRIFKDLQKMAEVGYDRNNKQHHRLLLCLLMTSCDLSDQTKGWKTTRKIAELIYKEFFSQGDLEKAMGNRPMEMMDREKAYIPELQISFMEHIAMPIYKLLQDLFPKAAELYERVASNREHWTKVSHKFTIRGLPSNNSLDFLDEEYEVPDLDGTRAPINGCCSLDAE

SEQ ID NO: 10155 - protein, 826 aa, Homo Sapiens
MGQACGHSILCRSQQYPAARPAEPRGQQVFLKPDEPPPPPQPCADSLQVHCGQLSDNEEWSLQAVEKHTLVALRRVQVLQQRGPREAPRAVQNPPEGTAEDQKGGAAYTDRDRKILQLCGELYDLDASSLQLKVLQYLQQETRASRCCLLLVSEDNLQLSCKVIGDKVLGEEVSFPLTGCLGQVVEDKKSIQLKDLTSEDVQQLQSMLGCELQAMLCVPVISRATDQVVALACAFNKLEGDLFTDEDEHVIQHCFHYTSTVLTSTLAFQKEQKLKCECQALLQVAKNLFTHLDDVSVLLQEIITEARNLSNAEICSVFLLDQNELVAKVFDGGVVDDESYEIRIPADQGIAGHVATTGQILNIPDAYAHPLFYRGVDDSTGFRTRNILCFPIKNENQEVIGVAELVNKINGPWFSKFDEDLATAFSIYCGISIAHSLLYKKVNEAQYRSHLANEMMMYHMKVSDDEYTKLLHDGIQPVAAIDSNFASFTYTPRSLPEDDTSMAILSMLQDMNFINNYKIDCPTLARFCLMVKKGYRDPPYHNWMHAFSVSHFCYLLYKNLELTNYLEDIEIFALFISCMCHDLDHRGTNNSFQVASKSVLAALYSSEGSVMERHHFAQAIAILNTHGCNIFDHFSRKDYQRMLDLMRDIILATDLAHHLRIFKDLQKMAEVGYDRNNKQHHRLLLCLLMTSCDLSDQTKGWKTTRKIAELIYKEFFSQGDLEKAMGNRPMEMMDREKAYIPELQISFMEHIAMPIYKLLQDLFPKAAELYERVASNREHWTKVSHKFTIRGLPSNNSLDFLDEEYEVPDLDGTRAPINGCCSLDAE

SEQ ID NO: 10156 - protein, 39 aa, Homo Sapiens
MGQACGHSILCRSQQYPAARPAEPSLQLPEHCFHTCDLI

SEQ ID NO: 10157 - protein, 932 aa, Homo Sapiens
MKKQRIQEGKSLAHRRGQQVFLKPDEPPPPPQPCADSLQDALLSLGSVIDISGLQRAVKEALSAVLPRVETVYTYLLDGESQLVCEDPPHELPQEGKVREAIISQKRLGCNGLGFSDLPGKPLARLVAPLAPDTQVLVMPLADKEAGAVAAVILVHCGQLSDNEEWSLQAVEKHTLVALRRVQVLQQRGPREAPRAVQNPPEGTAEDQKGGAAYTDRDRKILQLCGELYDLDASSLQLKVLQYLQQETRASRCCLLLVSEDNLQLSCKVIGDKVLGEEVSFPLTGCLGQVVEDKKSIQLKDLTSEDVQQLQSMLGCELQAMLCVPVISRATDQVVALACAFNKLEGDLFTDEDEHVIQHCFHYTSTVLTSTLAFQKEQKLKCECQALLQVAKNLFTHLDDVSVLLQEIITEARNLSNAEICSVFLLDQNELVAKVFDGGVVDDESYEIRIPADQGIAGHVATTGQILNIPDAYAHPLFYRGVDDSTGFRTRNILCFPIKNENQEVIGVAELVNKINGPWFSKFDEDLATAFSIYCGISIAHSLLYKKVNEAQYRSHLANEMMMYHMKVSDDEYTKLLHDGIQPVAAIDSNFASFTYTPRSLPEDDTSMAILSMLQDMNFINNYKIDCPTLARFCLMVKKGYRDPPYHNWMHAFSVSHFCYLLYKNLELTNYLEDIEIFALFISCMCHDLDHRGTNNSFQVASKSVLAALYSSEGSVMERHHFAQAIAILNTHGCNIFDHFSRKDYQRMLDLMRDIILATDLAHHLRIFKDLQKMAEVGYDRNNKQHHRLLLCLLMTSCDLSDQTKGWKTTRKIAELIYKEFFSQGDLEKAMGNRPMEMMDREKAYIPELQISFMEHIAMPIYKLLQDLFPKAAELYERVASNREHWTKVSHKFTIRGLPSNNSLDFLDEEYEVPDLDGTRAPINGCCSLDAE

SEQ ID NO: 10158 - protein, 198 aa, Homo Sapiens
MLQDMNFINNYKIDCPTLARFCLMVKKGYRDPPYHNWMHAFSVSHFCYLLYKNLELTNYLEDIEIFALFISCMCHDLDHRGTNNSFQVASKSVLAALYSSEGSVMERHHFAQAIAILNTHGCNIFDHFSRKDYQRMLDLMRDIILATDLAHHLRIFKDLQKMAEVGYDRNNKQHHRLLLCLLMTSCDLSDQTKGWKTT

SEQ ID NO: 10159 - protein, 178 aa, Homo Sapiens
MMMYHMKVSDDEYTKLLHDGIQPVAAIDSNFASFTYTPRSLPEDDTSMAILSMLQDMNFINNYKIDCPTLARFCLMVKKGYRDPPYHNWMHAFSVSHFCYLLYKNLELTNYLEDIEIFALFISCMCHDLDHRGTNNSFQVASKSVLAALYSSEGSVMERHHFAQAIAILNTHGCNIFD

SEQ ID NO: 10160 - protein, 87 aa, Homo Sapiens
MRRQPAASLDPLAKEPGPPGSRDDRLEDALLSLGSVIDISGLQRAVKEALSAVLPRVETVYTYLLDGESQLVCEDPPHELPQEGKVR

SEQ ID NO: 10161 - protein, 144 aa, Homo Sapiens
MRRQPAASLDPLAKEPGPPGSRDDRLEDALLSLGSVIDISGLQRAVKEALSAVLPRVETVYTYLLDGESQLVCEDPPHELPQEGKVREAIISQKRLGCNGLGFSDLPGKPLARLVAPLAPDTQVLVMPLADKEAGAVAAVILVH

SEQ ID NO: 10162 - protein, 920 aa, Homo Sapiens
MRRQPAASLDPLAKEPGPPGSRDDRLEDALLSLGSVIDISGLQRAVKEALSAVLPRVETVYTYLLDGESQLVCEDPPHELPQEGKVREAIISQKRLGCNGLGFSDLPGKPLARLVAPLAPDTQVLVMPLADKEAGAVAAVILVHCGQLSDNEEWSLQAVEKHTLVALRRVQVLQQRGPREAPRAVQNPPEGTAEDQKGGAAYTDRDRKILQLCGELYDLDASSLQLKVLQYLQQETRASRCCLLLVSEDNLQLSCKVIGDKVLGEEVSFPLTGCLGQVVEDKKSIQLKDLTSEDVQQLQSMLGCELQAMLCVPVISRATDQVVALACAFNKLEGDLFTDEDEHVIQHCFHYTSTVLTSTLAFQKEQKLKCECQALLQVAKNLFTHLDDVSVLLQEIITEARNLSNAEICSVFLLDQNELVAKVFDGGVVDDESYEIRIPADQGIAGHVATTGQILNIPDAYAHPLFYRGVDDSTGFRTRNILCFPIKNENQEVIGVAELVNKINGPWFSKFDEDLATAFSIYCGISIAHSLLYKKVNEAQYRSHLANEMMMYHMKVSDDEYTKLLHDGIQPVAAIDSNFASFTYTPRSLPEDDTSMAILSMLQDMNFINNYKIDCPTLARFCLMVKKGYRDPPYHNWMHAFSVSHFCYLLYKNLELTNYLEDIEIFALFISCMCHDLDHRGTNNSFQVASKSVLAALYSSEGSVMERHHFAQAIAILNTHGCNIFDHFSRKDYQRMLDLMRDIILATDLAHHLRIFKDLQKMAEVGYDRNNKQHHRLLLCLLMTSCDLSDQTKGWKTTRKIAELIYKEFFSQGDLEKAMGNRPMEMMDREKAYIPELQISFMEHIAMPIYKLLQDLFPKAAELYERVASNREHWTKVSHKFTIRGLPSNNSLDFLDEEYEVPDLDGTRAPINGCCSLDAE

SEQ ID NO: 10163 - protein, 92 aa, Homo Sapiens
MSYILKMPGTCLPGEGTTYELPPSSLHPSSAPVTSGGTCPALLTEAGWEAPIMAFTEAASAVGPSWTHSGASRSSSSRTSRRRRRSHAPTAC

SEQ ID NO: 10164 - protein, 106 aa, Homo Sapiens
MVLVLHHILIAVVQFLRRGQQVFLKPDEPPPPPQPCADSLQDALLSLGSVIDISGLQRAVKEALSAVLPRVETVYTYLLDGESQLVCEDPPHELPQEGKVRCTVAS

SEQ ID NO: 10165 - protein, 934 aa, Homo Sapiens
MVLVLHHILIAVVQFLRRGQQVFLKPDEPPPPPQPCADSLQDALLSLGSVIDISGLQRAVKEALSAVLPRVETVYTYLLDGESQLVCEDPPHELPQEGKVREAIISQKRLGCNGLGFSDLPGKPLARLVAPLAPDTQVLVMPLADKEAGAVAAVILVHCGQLSDNEEWSLQAVEKHTLVALRRVQVLQQRGPREAPRAVQNPPEGTAEDQKGGAAYTDRDRKILQLCGELYDLDASSLQLKVLQYLQQETRASRCCLLLVSEDNLQLSCKVIGDKVLGEEVSFPLTGCLGQVVEDKKSIQLKDLTSEDVQQLQSMLGCELQAMLCVPVISRATDQVVALACAFNKLEGDLFTDEDEHVIQHCFHYTSTVLTSTLAFQKEQKLKCECQALLQVAKNLFTHLDDVSVLLQEIITEARNLSNAEICSVFLLDQNELVAKVFDGGVVDDESYEIRIPADQGIAGHVATTGQILNIPDAYAHPLFYRGVDDSTGFRTRNILCFPIKNENQEVIGVAELVNKINGPWFSKFDEDLATAFSIYCGISIAHSLLYKKVNEAQYRSHLANEMMMYHMKVSDDEYTKLLHDGIQPVAAIDSNFASFTYTPRSLPEDDTSMAILSMLQDMNFINNYKIDCPTLARFCLMVKKGYRDPPYHNWMHAFSVSHFCYLLYKNLELTNYLEDIEIFALFISCMCHDLDHRGTNNSFQVASKSVLAALYSSEGSVMERHHFAQAIAILNTHGCNIFDHFSRKDYQRMLDLMRDIILATDLAHHLRIFKDLQKMAEVGYDRNNKQHHRLLLCLLMTSCDLSDQTKGWKTTRKIAELIYKEFFSQGDLEKAMGNRPMEMMDREKAYIPELQISFMEHIAMPIYKLLQDLFPKAAELYERVASNREHWTKVSHKFTIRGLPSNNSLDFLDEEYEVPDLDGTRAPINGCCSLDAE

SEQ ID NO: 10166 - protein, 685 aa, Homo Sapiens
MVLVLHHILIAVVQFLRRGQQVFLKPDEPPPPPQPCADSLQDALLSLGSVIDISGLQRAVKEALSAVLPRVETVYTYLLDGESQLVCEDPPHELPQEGKVRFTDEDEHVIQHCFHYTSTVLTSTLAFQKEQKLKCECQALLQVAKNLFTHLDDVSVLLQEIITEARNLSNAEICSVFLLDQNELVAKVFDGGVVDDESYEIRIPADQGIAGHVATTGQILNIPDAYAHPLFYRGVDDSTGFRTRNILCFPIKNENQEVIGVAELVNKINGPWFSKFDEDLATAFSIYCGISIAHSLLYKKVNEAQYRSHLANEMMMYHMKVSDDEYTKLLHDGIQPVAAIDSNFASFTYTPRSLPEDDTSMAILSMLQDMNFINNYKIDCPTLARFCLMVKKGYRDPPYHNWMHAFSVSHFCYLLYKNLELTNYLEDIEIFALFISCMCHDLDHRGTNNSFQVASKSVLAALYSSEGSVMERHHFAQAIAILNTHGCNIFDHFSRKDYQRMLDLMRDIILATDLAHHLRIFKDLQKMAEVGYDRNNKQHHRLLLCLLMTSCDLSDQTKGWKTTRKIAELIYKEFFSQGDLEKAMGNRPMEMMDREKAYIPELQISFMEHIAMPIYKLLQDLFPKAAELYERVASNREHWTKVSHKFTIRGLPSNNSLDFLDEEYEVPDLDGTRAPINGCCSLDAE

SEQ ID NO: 10167 - protein, 92 aa, Homo Sapiens
MVLVLHHILIAVVQFLRRGQQVFLKPDEPPPPPQPCADSLQETVYTYLLDGRLSSPRSGWAAMGWASQTCQGSPWPGWWLHWLLIPKCWSCR

SEQ ID NO: 10168 - protein, 65 aa, Homo Sapiens
MVLVLHHILIAVVQFLRRGQQVFLKPDEPPPPPQPCADSLQPAWTPLQRSQDPQGVETTDWRTPC

SEQ ID NO: 10169 - protein, 65 aa, Homo Sapiens; identical to SEQ ID NO: 10168

SEQ ID NO: 10170 - protein, 65 aa, Homo Sapiens; identical to SEQ ID NO: 10168

SEQ ID NO: 10171 - protein, 336 aa, Homo Sapiens
PGLDRSRGRGRAELGGEVGGLGDPGSRRRARRGAERRLRDPDTEVRRGPLSDRRLALAGELYDLDASSLQLKVLQYLQQETRASRCCLLLVSEDNLQLSCKVIGDKVLGEEVSFPLTGCLGQVVEDKKSIQLKDLTSEDVQQLQSMLGCELQAMLCVPVISRATDQVVALACAFNKLEGDLFTDEDEHVIQHCFHYTSTVLTSTLAFQKEQKLKCECQALLQVAKNLFTHLDDVSVLLQEIITEARNLSNAEICSVFLLDQNELVAKVFDGGVVDDESYEIRIPADQGIAGHVATTGQILNIPDAYAHPLFYRGVDDSTGFRTRNILCFPIKNENQ

SEQ ID NO: 10172 - protein, 75 aa, Homo Sapiens
  misc_feature (1)..(1): Xaa can be any naturally occurring amino acid
XLWLVASGGRHSAFPVSHPKGVGLACLPSTVASTGGCHWETGRAWEFRELRPAWTPLQRSQDPQGVETTDWRTPC

SEQ ID NO: 10173 - protein, 172 aa, Homo Sapiens
  misc_feature (1)..(1): Xaa can be any naturally occurring amino acid
XSAVTPSPCLSLSQLQQETRASRCCLLLVSEDNLQLSCKVIGDKVLGEEVSFPLTGCLGQVVEDKKSIQLKDLTSEDVQQLQSMLGCELQAMLCVPVISRATDQVVALACAFNKLEGDLFTDEDEHVIQHCFHYTSTVLTSTLAFQKEQKLKCECQALLQVAKNLFTHLDDV

SEQ ID NO: 10174 - protein, 482 aa, Homo Sapiens
MEVCYQLPVLPLDRPVPQHVLSRRGAISFSSSSALFGCPNPRQLSQRRGAISYDSSDQTALYIRMLGDVRVRSRAGFESERRGSHPYIDFRIFHSQSEIEVSVSARNIRRLLSFQRYLRSSRFFRGTAVSNSLNILDDDYNGQAKCMLEKVGNWNFDIFLFDRLTNGNSLVSLTFHLFSLHGLIEYFHLDMMKLRRFLVMIQEDYHSQNPYHNAVHAADVTQAMHCYLKEPKLANSVTPWDILLSLIAAATHDLDHPGVNQPFLIKTNHYLATLYKNTSVLENHHWRSAVGLLRESGLFSHLPLESRQQMETQIGALILATDISRQNEYLSLFRSHLDRGDLCLEDTRHRHLVLQMALKCADICNPCRTWELSKQWSEKVTEEFFHQGDIEKKYHLGVSPLCDRHTESIANIQIGFMTYLVEPLFTEWARFSNTRLSQTMLGHVGLNKASWKGLQREQSSSEDTDAAFELNSQLLPQENRLS

SEQ ID NO: 10175 - protein, 424 aa, Homo Sapiens
MEVCYQLPVLPLDRPVPQHVLSRRGAISFSSSSALFGCPNPRQLSQRRGAISYDSSDQTALYIRMLGDVRVRSRAGFESERRGSHPYIDFRIFHSQSEIEVSVSARNIRRLLSFQRYLRSSRFFRGTAVSNSLNILDDDYNGQAKCMLEKVGNWNFDIFLFDRLTNGNSLVSLTFHLFSLHGLIEYFHLDMMKLRRFLVMIQEDYHSQNPYHNAVHAADVTQAMHCYLKEPKLANSVTPWDILLSLIAAATHDLDHPGVNQPFLIKTNHYLATLYKNTSVLENHHWRSAVGLLRESGLFSHLPLESRQQMETQIGALILATDISRQNEYLSLFRSHLDRGDLCLEDTRHRHLVLQMALKCADICNPCRTWELSKQWSEKVTEEFFHQGDIEKKYHLGVSPLCDRHTESIANIQIGNYTYLDIAG

SEQ ID NO: 10176 - protein, 86 aa, Homo Sapiens
MGITLIWCLALVLIKWITSKRRGAISYDSSDQTALYIRMLGDVRVRSRAGFESERRGSHPYIDFRIFHSQSEIEVSVSARNIRRLL

SEQ ID NO: 10177 - protein, 456 aa, Homo Sapiens
MGITLIWCLALVLIKWITSKRRGAISYDSSDQTALYIRMLGDVRVRSRAGFESERRGSHPYIDFRIFHSQSEIEVSVSARNIRRLLSFQRYLRSSRFFRGTAVSNSLNILDDDYNGQAKCMLEKVGNWNFDIFLFDRLTNGNSLVSLTFHLFSLHGLIEYFHLDMMKLRRFLVMIQEDYHSQNPYHNAVHAADVTQAMHCYLKEPKLANSVTPWDILLSLIAAATHDLDHPGVNQPFLIKTNHYLATLYKNTSVLENHHWRSAVGLLRESGLFSHLPLESRQQMETQIGALILATDISRQNEYLSLFRSHLDRGDLCLEDTRHRHLVLQMALKCADICNPCRTWELSKQWSEKVTEEFFHQGDIEKKYHLGVSPLCDRHTESIANIQIGFMTYLVEPLFTEWARFSNTRLSQTMLGHVGLNKASWKGLQREQSSSEDTDAAFELNSQLLPQENRLS

SEQ ID NO: 10178 - protein, 243 aa, Homo Sapiens
MARLWGALSLWPLWAAVPWGGAAAVGVRACSSTAAPDGVEGPALRRSYWRHLRRLVLGPPEPPFSHVCQVGDPVLRGVAAPVERAQLGGPELQRLTQRLVQVMRRRRCVGLSAPQLGVPRQVLALELPEALCRECPPRQRALRQMEPFPLRVFVNPSLRVLDSRLVTFPEGCESVAGFLACVPRFQAVQISGLDPNGEQVVWQASGWAARIIQHEMDHLQGCLFIDKMDSRTFTNVYWMKVND

SEQ ID NO: 10179 - protein, 86 aa, Homo Sapiens
MRTLACLLLLGCGYLAHVLAEEAEIPREVIERLARSQIHSIRDLQRLLEIDSVGSEDSLDTSLRAHGVHATKHVPEKRPLPIRRKR

SEQ ID NO: 10180 - protein, 196 aa, Homo Sapiens
MRTLACLLLLGCGYLAHVLAEEAEIPREVIERLARSQIHSIRDLQRLLEIDSVGSEDSLDTSLRAHGVHATKHVPEKRPLPIRRKRSIEEAVPAVCKTRTVIYEIPRSQVDPTSANFLIWPPCVEVKRCTGCCNTSSVKCQPSRVHHRSVKVAKVEYVRKKPKLKEVQVRLEEHLECACATTSLNPDYREEDTDVR

SEQ ID NO: 10181 - protein, 211 aa, Homo Sapiens [sequence omitted]

SEQ ID NO: 10182 - protein, 205 aa, Homo Sapiens
QRQAAALGSQSPSPAGLRAGAVPPARACLQEAEIPREVIERLARSQIHSIRDLQRLLEIDSVGSEDSLDTSLRAHGVHATKHVPEKRPLPIRRKRSIEEAVPAVCKTRTVIYEIPRSQVDPTSANFLIWPPCVEVKRCTGCCNTSSVKCQPSRVHHRSVKVAKVEYVRKKPKLKEVQVRLEEHLECACATTSLNPDYREEDTDVR

SEQ ID NO: 10183 - protein, 226 aa, Homo Sapiens
MFIMGLGDPIPEELYEMLSDHSIRSFDDLQRLLHGDPGEEDGAELDLNMTRSHSGGELESLARGRRSLGSLTIAEPAMIAECKTRTEVFEISRRLIDRTNANFLVWPPCVEVQRCSGCCNNRNVQCRPTQVQLRPVQVRKIEIVRKKPIFKKATVTLEDHLACKCETVAAARPVTRSPGGSQEQRAKTPQTRVTIRTVRVRRPPKGKHRKFKHTHDKTALKETLGA

SEQ ID NO: 10184 - protein, 136 aa, Homo Sapiens
MLSDHSIRSFDDLQRLLHGDPGEEDGAELDLNMTRSHSGGELESLARGRRSLGSLTIAEPAMIAECKTRTEVFEISRRLIDRTNANFLVWPPCVEVQRCSGCCNNRNVQCRPTQVQLRPVQVRKIEIVRKKPIFKK

SEQ ID NO: 10185 - protein, 144 aa, Homo Sapiens
MLSDHSIRSFDDLQRLLHGDPGEEDGAELDLNMTRSHSGGELESLARGRRSLGSLTIAEPAMIAECKTRTEVFEISRRLIDRTNANFLVWPPCVEVQRCSGCCNNRNVQCRPTQVQLRPVQVRKIEIVRKKPIFKKATVTLEDH

SEQ ID NO: 10186 - protein, 241 aa, Homo Sapiens
MNRCWALFLSLCCYLRLVSAEGDPIPEELYEMLSDHSIRSFDDLQRLLHGDPGEEDGAELDLNMTRSHSGGELESLARGRRSLGSLTIAEPAMIAECKTRTEVFEISRRLIDRTNANFLVWPPCVEVQRCSGCCNNRNVQCRPTQVQLRPVQVRKIEIVRKKPIFKKATVTLEDHLACKCETVAAARPVTRSPGGSQEQRAKTPQTRVTIRTVRVRRPPKGKHRKFKHTHDKTALKETLGA

SEQ ID NO: 10187 - protein, 50 aa, Homo Sapiens
MSLFGLLLLTSALAGQRQGTQAESNLSSKFQFSSNKEQNGRNYIQASGLA

SEQ ID NO: 10188 - protein, 282 aa, Homo Sapiens
MSLFGLLLLTSALAGQRQGTQAESNLSSKFQFSSNKEQNGVQDPQHERIITVSTNGSIHSPRFPHTYPRNTVLVWRLVAVEENVWIQLTFDERFGLEDPEDDICKYDFVEVEEPSDGTILGRWCGSGTVPGKQISKGNQIRIRFVSDEYFPSEPGFCIHYNIVMPQFTEAVSPSVLPPSALPLDLLNNAITAFSTLEDLIRYLEPERWQLDLEDLYRPTWQLLGKAFVFGRKSRVVDLNLLTEEVLQLRPKTGVRGLHKSLTDVALEHHEECDCVCRGSTGG

SEQ ID NO: 10189 - protein, 345 aa, Homo Sapiens
MSLFGLLLLTSALAGQRQGTQAESNLSSKFQFSSNKEQNGVQDPQHERIITVSTNGSIHSPRFPHTYPRNTVLVWRLVAVEENVWIQLTFDERFGLEDPEDDICKYDFVEVEEPSDGTILGRWCGSGTVPGKQISKGNQIRIRFVSDEYFPSEPGFCIHYNIVMPQFTEAVSPSVLPPSALPLDLLNNAITAFSTLEDLIRYLEPERWQLDLEDLYRPTWQLLGKAFVFGRKSRVVDLNLLTEEVRLYSCTPRNFSVSIREELKRTDTIFWPGCLLVKRCGGNCACCLHNCNECQCVPSKVTKKYHEVLQLRPKTGVRGLHKSLTDVALEHHEECDCVCRGSTGG

SEQ ID NO: 10190 - protein, 53 aa, Homo Sapiens
  misc_feature (1)..(1): Xaa can be any naturally occurring amino acid
XTFDERFGLEDPEDDICKYDFVEVEEPSDGTILGRWCGSGFCIHYNIVMPNLP

SEQ ID NO: 10191 - protein, 206 aa, Homo Sapiens
IFEAVGAQGTVVLDEESLHVDDLDLFDGDSGLRFAEDLEVSELKVGADLEREGDLGEVPPHAVHESNHLTDLYRRDETIQVKGNGYVQSPRFPNSYPRNLLLTWRLHSQENTRIQLVFDNQFGLEEAENDICRYDFVEVEDISETSTIIRGRWCGHKEVPPRIKSRTNQIKITFKSDDYFVAKPGFKIYYSLLEDFQPAAASETNW

SEQ ID NO: 10192 - protein, 364 aa, Homo Sapiens
MHRLIFVYTLICANFCSCRDTSATPQSASIKALRNANLRRDDLYRRDETIQVKGNGYVQSPRFPNSYPRNLLLTWRLHSQENTRIQLVFDNQFGLEEAENDICRYDFVEVEDISETSTIIRGRWCGHKEVPPRIKSRTNQIKITFKSDDYFVAKPGFKIYYSLLEDFQPAAASETNWESVTSSISGVSYNSPSVTDPTLIADALDKKIAEFDTVEDLLKYFNPESWQEDLENMYLDTPRYRGRSYHDRKSKVDLDRLNDDAKRYSCTPRNYSVNIREELKLANVVFFPRCLLVQRCGGNCGCGTVNWRSCTCNSGKTVKKYHEVLQFEPGHIKRRGRAKTMALVDIQLDHHERCDCICSSRPPR

SEQ ID NO: 10193 - protein, 370 aa, Homo Sapiens
MHRLIFVYTLICANFCSCRDTSATPQSASIKALRNANLRRDESNHLTDLYRRDETIQVKGNGYVQSPRFPNSYPRNLLLTWRLHSQENTRIQLVFDNQFGLEEAENDICRYDFVEVEDISETSTIIRGRWCGHKEVPPRIKSRTNQIKITFKSDDYFVAKPGFKIYYSLLEDFQPAAASETNWESVTSSISGVSYNSPSVTDPTLIADALDKKIAEFDTVEDLLKYFNPESWQEDLENMYLDTPRYRGRSYHDRKSKVDLDRLNDDAKRYSCTPRNYSVNIREELKLANVVFFPRCLLVQRCGGNCGCGTVNWRSCTCNSGKTVKKYHEVLQFEPGHIKRRGRAKTMALVDIQLDHHERCDCICSSRPPR

SEQ ID NO: 10194 - protein, 154 aa, Homo Sapiens
MGTSHPAFLVLGCLLTGLSLILCQLSLPSILPNENEKVVQLNSSFSLRCFGESEVSWQYPMSEEESSDVEIRNEENNSGLFVTVLEVSSASAAHTGLYTCYYNHTQTEENELEGRHIYIYVPDPDVAFVPLGMTDYLVIVEDDDSAIIPCRTTD

SEQ ID NO: 10195 - protein, 158 aa, Homo Sapiens
MGTSHPAFLVLGCLLTGLSLILCQLSLPSILPNENEKVVQLNSSFSLRCFGESEVSWQYPMSEEESSDVEIRNEENNSGLFVTVLEVSSASAAHTGLYTCYYNHTQTEENELEGRHIYIYVPDPDVAFVPLGMTDYLVIVEDDDSAIIPCRTTDPETP

SEQ ID NO: 10196 - protein, 159 aa, Homo Sapiens
MGTSHPAFLVLGCLLTGLSLILCQLSLPSILPNENEKVVQLNSSFSLRCFGESEVSWQYPMSEEESSDVEIRNEENNSGLFVTVLEVSSASAAHTGLYTCYYNHTQTEENELEGRHIYIYVPDPDVAFVPLGMTDYLVIVEDDDSAIIPCRTTDPETPV

SEQ ID NO: 10197 - protein, 1089 aa, Homo Sapiens
MGTSHPAFLVLGCLLTGLSLILCQLSLPSILPNENEKVVQLNSSFSLRCFGESEVSWQYPMSEEESSDVEIRNEENNSGLFVTVLEVSSASAAHTGLYTCYYNHTQTEENELEGRHIYIYVPDPDVAFVPLGMTDYLVIVEDDDSAIIPCRTTDPETPVTLHNSEGVVPASYDSRQGFNGTFTVGPYICEATVKGKKFQTIPFNVYALKATSELDLEMEALKTVYKSGETIVVTCAVFNNEVVDLQWTYPGEVKGKGITMLEEIKVPSIKLVYTLTVPEATVKDSGDYECAARQATREVKEMKKVTISVHEKGFIEIKPTFSQLEAVNLHEVKHFVVEVRAYPPPRISWLKNNLTLIENLTEITTDVEKIQEIRYRSKLKLIRAKEEDSGHYTIVAQNEDAVKSYTFELLTQVPSSILDLVDDHHGSTGGQTVRCTAEGTPLPDIEWMICKDIKKCNNETSWTILANNVSNIITEIHSRDRSTVEGRVTFAKVEETIAVRCLAKNLLGAENRELKLVAPTLRSELTVAAAVLVLLVIVIISLIVLVVIWKQKPRYEIRWRVIESISPDGHEYIYVDPMQLPYDSRWEFPRDGLVLGRVLGSGAFGKVVEGTAYGLSRSQPVMKVAVKMLKPTARSSEKQALMSELKIMTHLGPHLNIVNLLGACTKSGPIYIITEYCFYGDLVNYLHKNRDSFLSHHPEKPKKELDIFGLNPADESTRSYVILSFENNGDYMDMKQADTTQYVPMLERKEVSKYSDIQRSLYDRPASYKKKSMLDSEVKNLLSDDNSEGLTLLDLLSFTYQVARGMEFLASKNCVHRDLAARNVLLAQGKIVKICDFGLARDIMHDSNYVSKGSTFLPVKWMAPESIFDNLYTTLSDVWSYGILLWEIFSLGGTPYPGMMVDSTFYNKIKSGYRMAKPDHATSEVYEIMVKCWNSEPEKRPSFYHLSEIVENLLPGQYKKSYEKIHLDFLKSDHPAVARMRVDSDNAYIGVTYKNEEDKLKDWEGGLDEQRLSADSGYIIPLPDIDPVPEEEDLGKRNRHSSQTSEESAIETGSSSSTFIKREDETIEDIDMMDDIGIDSSDLVEDSFL

SEQ ID NO: 10198 - protein, 743 aa, Homo Sapiens
MGTSHPAFLVLGCLLTGLSLILCQLSLPSILPNENEKVVQLNSSFSLRCFGESEVSWQYPMSEEESSDVEIRNEENNSGLFVTVLEVSSASAAHTGLYTCYYNHTQTEENELEGRHIYIYVPDPDVAFVPLGMTDYLVIVEDDDSAIIPCRTTDPETPVTLHNSEGVVPASYDSRQGFNGTFTVGPYICEATVKGKKFQTIPFNVYALKATSELDLEMEALKTVYKSGETIVVTCAVFNNEVVDLQWTYPGEVKGKGITMLEEIKVPSIKLVYTLTVPEATVKDSGDYECAARQATREVKEMKKVTISVHEKGFIEIKPTFSQLEAVNLHEVKHFVVEVRAYPPPRISWLKNNLTLIENLTEITTDVEKIQEIRYRSKLKLIRAKEEDSGHYTIVAQNEDAVKSYTFELLTQVPSSILDLVDDHHGSTGGQTVRCTAEGTPLPDIEWMICKDIKKCNNETSWTILANNVSNIITEIHSRDRSTVEGRVTFAKVEETIAVRCLAKNLLGAENRELKLVAPTLRSELTVAAAVLVLLVIVIISLIVLVVIWKQKPRYEIRWRVIESISPDGHEYIYVDPMQLPYDSRWEFPRDGLVLGRVLGSGAFGKVVEGTAYGLSRSQPVMKVAVKMLKPTARSSEKQALMSELKIMTHLGPHLNIVNLLGACTKSGPIYIITEYCFYGDLVNYLHKNRDSFLSHHPEKPKKELDIFGLNPADESTRSSGQGCLSSGTLQELSVDLQARGPC

SEQ ID NO: 10199 - protein, 218 aa, Homo Sapiens
MGTSHPAFLVLGCLLTGLSLILCQLSLPSILPNENEKVVQLNSSFSLRCFGESEVSWQYPMSEEESSDVEIRNEENNSGLFVTVLEVSSASAAHTGLYTCYYNHTQTEENELEGRHIYIYVPDPDVAFVPLGMTDYLVIVEDDDSAIIPCRTTDPETPVTLHNSEGVVPASYDSRQGFNGTFTVGPYICEATVKGKKFQTIPFNVYALKGTCIISFLL

SEQ ID NO: 10200 - protein, 147 aa, Homo Sapiens
MLPRLVLNSWAQMICLPQLPKFPRAMGTSHPAFLVLGCLLTGLSLILCQLSLPSILPNENEKVVQLNSSFSLRCFGESEVSWQYPMSEEESSDVEIRNEENNSGLFVTVLEVSSASAAHTGLYTCYYNHTQTEENELEGRHIYIYVP

SEQ ID NO: 10201 - protein, 174 aa, Homo Sapiens
MRLPGAMPALALKGELLLLSLLLLLEPQISQGLVVTPPGPELVLNVSSTFVLTCSGSAPVVWERMSQEPPQEMAKAQDGTFSSVLTLTNLTGLDTGEYFCTHNDSRGLETDERKRLYIFVPDPTVGFLPNDAEELFIFLTEITEITIPCRVTDPQLVVTLHEKKGDVALPVPYD

SEQ ID NO: 10202 - protein, 239 aa, Homo Sapiens
MRLPGAMPALALKGELLLLSLLLLLEPQISQGLVVTPPGPELVLNVSSTFVLTCSGSAPVVWERMSQEPPQEMAKAQDGTFSSVLTLTNLTGLDTGEYFCTHNDSRGLETDERKRLYIFVPDPTVGFLPNDAEELFIFLTEITEITIPCRVTDPQLVVTLHEKKGDVALPVPYDHQRGFSGIFEDRSYICKTTIGDREVDSDAYYVYRLQGEPPFWPDAQQSVIHQRLCERSADCGPPG

SEQ ID NO: 10203 - protein, 1106 aa, Homo Sapiens
MRLPGAMPALALKGELLLLSLLLLLEPQISQGLVVTPPGPELVLNVSSTFVLTCSGSAPVVWERMSQEPPQEMAKAQDGTFSSVLTLTNLTGLDTGEYFCTHNDSRGLETDERKRLYIFVPDPTVGFLPNDAEELFIFLTEITEITIPCRVTDPQLVVTLHEKKGDVALPVPYDHQRGFSGIFEDRSYICKTTIGDREVDSDAYYVYRLQVSSINVSVNAVQTVVRQGENITLMCIVIGNEVVNFEWTYPRKESGRLVEPVTDFLLDMPYHIRSILHIPSAELEDSGTYTCNVTESVNDHQDEKAINITVVESGYVRLLGEVGTLQFAELHRSRTLQVVFEAYPPPTVLWFKDNRTLGDSSAGEIALSTRNVSETRYVSELTLVRVKVAEAGHYTMRAFHEDAEVQLSFQLQINVPVRVLELSESHPDSGEQTVRCRGRGMPQPNIIWSACRDLKRCPRELPPTLLGNSSEEESQLETNVTYWEEEQEFEVVSTLRLQHVDRPLSVRCTLRNAVGQDTQEVIVVPHSLPFKVVVISAILALVVLTIISLIILIMLWQKKPRYEIRWKVIESVSSDGHEYIYVDPMQLPYDSTWELPRDQLVLGRTLGSGAFGQVVEATAHGLSHSQATMKVAVKMLKSTARSSEKQALMSELKIMSHLGPHLNVVNLLGACTKGGPIYIITEYCRYGDLVDYLHRNKHTFLQHHSDKRRPPSAELYSNALPVGLPLPSHVSLTGESDGGYMDMSKDESVDYVPMLDMKGDVKYADIESSNYMAPYDNYVPSAPERTCRATLINESPVLSYMDLVGFSYQVANGMEFLASKNCVHRDLAARNVLICEGKLVKICDFGLARDIMRDSNYISKGSTFLPLKWMAPESIFNSLYTTLSDVWSFGILLWEIFTLGGTPYPELPMNEQFYNAIKRGYRMAQPAHASDEIYEIMQKCWEEKFEIRPPFSQLVLLLERLLGEGYKKKYQQVDEEFLRSDHPAILRSQARLPGFHGLRSPLDTSSVLYTAVQPNEGDNDYIIPLPDPKPEVADEGPLEGSPSLASSTLNEVNTSSTISCDSPLEPQDEPEPEPQLELQVEPEPELEQLPDSGCPAPRAEAEDSFL

SEQ ID NO: 10204 - protein, 146 aa, Homo Sapiens
MSQEPPQEMAKAQDGTFSSVLTLTNLTGLDTGEYFCTHNDSRGLETDERKRLYIFVPDPTVGFLPNDAEELFIFLTEITEITIPCRVTDPQLVVTLHEKKGDVALPVPYDHQRGFSGIFEDRSYICKTTIGDREVDSDAYYVYRLQ

SEQ ID NO: 10205 - protein, 375 aa, Homo Sapiens
MKVWLLLGLLLVHEALEDVTGQHLPKNKRPKEPGENRIKPTNKKVKPKIPKMKDRDSANSAPKTQSIMMQVLDKGRFQKPAATLSLLAGQTVELRCKGSRIGWSYPAYLDTFKDSRLSVKQNERYGQLTLVNSTSADTGEFSCWVQLCSGYICRKDEAKTGSTYIFFTEKGELFVPSPSYFDVVYLNPDRQAVVPCRVTVLSAKVTLHREFPAKEIPANGTDIVYDMKRGFVYLQPHSEHQGVVYCRAEAGGRSQISVKYQLLYVAVPSGPPSTTILASSNKVKSGDDISVLCTVLGEPDVEVEFTWIFPGQKDERPVTIQDTWRLIHRGLGHTTRISQSVITVEDFETIDAGYYICTAQNLQGQTTVATTVEFS

SEQ ID NO: 10206 - protein, 375 aa, Homo Sapiens; identical to SEQ ID NO: 10205

SEQ ID NO: 10207 - protein, 109 aa, Homo Sapiens
MELQTYRYHGHSMSDPGVSYRTREEIQEVRSKSDPIMLLKDRMVNSNLASVEELKEIDVEVRKEIEDAAQFATADPEPPLEELGYHIYSSDPPFEVRGANQWIKFKSVS

SEQ ID NO: 10208 - protein, 359 aa, Homo Sapiens
MRKMLAAVSRVLSGASQKPASRVLVASRNFANDATFEIKKCDLHRLEEGPPVTTVLTREDGLKYYRMMQTVRRMELKADQLYKQKIIRGFCHLCDGQEACCVGLEAGINPTDHLITAYRAHGFTFTRGLSVREILAELTGRKGGCAKGKGGSMHMYAKNFYGGNGIVGAQGQIFEAYNMAALWKLPCIFICENNRYGMGTSVERAAASTDYYKRGDFIPGLRVDGMDILCVREATRFAAAYCRSGKGPILMELQTYRYHGHSMSDPGVSYRTREEIQEVRSKSDPIMLLKDRMVNSNLASVEELKEIDVEVRKEIEDAAQFATADPEPPLEELGYHIYSSDPPFEVRGANQWIKFKSVS

SEQ ID NO: 10209 - protein, 390 aa, Homo Sapiens
MRKMLAAVSRVLSGASQKPASRVLVASRNFANDATFEIKKCDLHRLEEGPPVTTVLTREDGLKYYRMMQTVRRMELKADQLYKQKIIRGFCHLCDGQEACCVGLEAGINPTDHLITAYRAHGFTFTRGLSVREILAELTGRKGGCAKGKGGSMHMYAKNFYGGNGIVGAQVPLGAGIALACKYNGKDEVCLTLYGDGAANQGQIFEAYNMAALWKLPCIFICENNRYGMGTSVERAAASTDYYKRGDFIPGLRVDGMDILCVREATRFAAAYCRSGKGPILMELQTYRYHGHSMSDPGVSYRTREEIQEVRSKSDPIMLLKDRMVNSNLASVEELKEIDVEVRKEIEDAAQFATADPEPPLEELGYHIYSSDPPFEVRGANQWIKFKSVS

SEQ ID NO: 10210 - protein, 180 aa, Homo Sapiens
MRKMLAAVSRVLSGASQKPASRVLVASRNFANDATFEIKKCDLHRLEEGPPVTTVLTREDGLKYYRMMQTVRRMELKADQLYKQKIIRGFCHLCDGQEACCVGLEAGINPTDHLITAYRAHGFTFTRGLSVREILAELTGRKGGCAKGKGGSMHMYAKNFYGGNGIVGAQVVKDEDCVLL

SEQ ID NO: 10211 - protein, 204 aa, Homo Sapiens
MRKMLAAVSRVLSGASQKPASRVLVASRNFANDATFEIKKCDLHRLEEGPPVTTVLTREDGLKYYRMMQTVRRMELKADQLYKQKIIRGFCHLCDGQFLLPLTQEACCVGLEAGINPTDHLITAYRAHGFTFTRGLSVREILAELTGRKGGCAKGKGGSMHMYAKNFYGGNGIVGAQVPLGAGIALACKYNGKDEVCLTLYGDG

SEQ ID NO: 10212 - protein, 397 aa, Homo Sapiens
MRKMLAAVSRVLSGASQKPASRVLVASRNFANDATFEIKKCDLHRLEEGPPVTTVLTREDGLKYYRMMQTVRRMELKADQLYKQKIIRGFCHLCDGQFLLPLTQEACCVGLEAGINPTDHLITAYRAHGFTFTRGLSVREILAELTGRKGGCAKGKGGSMHMYAKNFYGGNGIVGAQVPLGAGIALACKYNGKDEVCLTLYGDGAANQGQIFEAYNMAALWKLPCIFICENNRYGMGTSVERAAASTDYYKRGDFIPGLRVDGMDILCVREATRFAAAYCRSGKGPILMELQTYRYHGHSMSDPGVSYRTREEIQEVRSKSDPIMLLKDRMVNSNLASVEELKEIDVEVRKEIEDAAQFATADPEPPLEELGYHIYSSDPPFEVRGANQWIKFKSVS

SEQ ID NO: 10213 - protein, 121 aa, Homo Sapiens
MRKMLAAVSRVLSGASQKPFAGSPPPRHLTVGRKLSSRYEVTFESAQASRVLVASRNFANDATFEIKKCDLHRLEEGPPVTTVLTREDGLKYYRMMQTVRRMELKADQLYKQKIIRGFCHL

SEQ ID NO: 10214 - protein, 205 aa, Homo Sapiens
MRKMLAAVSRVLSGASQKPRHGLATLPSLVSISRLKQSSHLGLPKCWDYSHSLKTRQASRVLVASRNFANDATFEIKKCDLHRLEEGPPVTTVLTREDGLKYYRMMQTVRRMELKADQLYKQKIIRGFCHLCDGQEACCVGLEAGINPTDHLITAYRAHGFTFTRGLSVREILAELTGRKGGCAKGKGGSMHMYAKNFYGGNGIV

SEQ ID NO: 10215 - protein, 428 aa, Homo Sapiens
MRKMLAAVSRVLSGASQKPRHGLATLPSLVSISRLKQSSHLGLPKCWDYSHSLKTRQASRVLVASRNFANDATFEIKKCDLHRLEEGPPVTTVLTREDGLKYYRMMQTVRRMELKADQLYKQKIIRGFCHLCDGQEACCVGLEAGINPTDHLITAYRAHGFTFTRGLSVREILAELTGRKGGCAKGKGGSMHMYAKNFYGGNGIVGAQVPLGAGIALACKYNGKDEVCLTLYGDGAANQGQIFEAYNMAALWKLPCIFICENNRYGMGTSVERAAASTDYYKRGDFIPGLRVDGMDILCVREATRFAAAYCRSGKGPILMELQTYRYHGHSMSDPGVSYRTREEIQEVRSKSDPIMLLKDRMVNSNLASVEELKEIDVEVRKEIEDAAQFATADPEPPLEELGYHIYSSDPPFEVRGANQWIKFKSVS

SEQ ID NO: 10216 - protein, 154 aa, Homo Sapiens
AVLNGQVKEIPPDWDQRPVKTLVGKNFEQVAFDETKNVFVKFYAPWCTHCKEMAPAWEALAEKYQDHEDIIIAELDATANELDAFAVHGFPTLKYFPAGPGRKVIEYKSTRDLETFSKFLDNGGVLPTEEPPEEPAAPFPEPPANSTMGSKEEL

SEQ ID NO: 10217 - protein, 522 aa, Homo Sapiens
MSRQLLPVLLLLLLRASCPWGQEQGARSPSEEPPEEEIPKEDGILVLSRHTLGLALREHPALLVEFYAPWCGHCQALAPEYSKAAAVLAAESMVVTLAKVDGPAQRELAEEFGVTEYPTLKFFRNGNRTHPEEYTGPRDAEGIAEWLRRRVGPSAMRLEDEAAAQALIGGRDLVVIGFFQDEDVATFLALAQDALDMTFGLTDRPRLFQQFGLTKDTVVLFKKFDEGRADFPVDEELGLDLGDLSRFLVTHSMRLVTEFNSQTSAKIFAARILNHLLLFVNQTLAAHRELLAGFGEAAPRFRGQVLFVVVDVAADNEHVLQYFGLKAEAAPTLRLVNLETTKKYAPVDGGPVTAASITAFCHAVLNGQVKPYLLSQEIPPDWDQRPVKTLVGKNFEQVAFDETKNVFVKFYAPWCTHCKEMAPAWEALAEKYQDHEDIIIAELDATANELDAFAVHGFPTLKYFPAGPGRKVIEYKSTRDLETFSKFLDNGGVLPTEEPPEEPAAPFPEPPANSTMGSKEEL

SEQ ID NO: 10218 - protein, 525 aa, Homo Sapiens
MSRQLLPVLLLLLLRASCPWGQEQGARSPSEEPPEEEIPKEDGILVLSRHTLGLALREHPALLVEFYAPWCGHCQALAPEYSKAAAVLAAESMVVTLAKVDGPAQRELAEEFGVTEYPTLKFFRNGNRTHPEEYTGPRDAEGIAEWLRRRVGPSAMRLEDEAAAQALIGGRDLVVIGFFQDLQDEDVATFLALAQDALDMTFGLTDRPRLFQQFGLTKDTVVLFKKFDEGRADFPVDEELGLDLGDLSRFLVTHSMRLVTEFNSQTSAKIFAARILNHLLLFVNQTLAAHRELLAGFGEAAPRFRGQVLFVVVDVAADNEHVLQYFGLKAEAAPTLRLVNLETTKKYAPVDGGPVTAASITAFCHAVLNGQVKPYLLSQEIPPDWDQRPVKTLVGKNFEQVAFDETKNVFVKFYAPWCTHCKEMAPAWEALAEKYQDHEDIIIAELDATANELDAFAVHGFPTLKYFPAGPGRKVIEYKSTRDLETFSKFLDNGGVLPTEEPPEEPAAPFPEPPANSTMGSKEEL

SEQ ID NO: 10219 - protein, 227 aa, Homo Sapiens
  misc_feature (1)..(1): Xaa can be any naturally occurring amino acid
XLLPVLLLLLLRASCPWGQEQGARSPSEEPPEEEIPKEDGILVLSRHTLGLALREHPALLVEFYAPWCGHCQALAPEYSKAAAVLAAESMVVTLAKVDGPAQRELAEEFGVTEYPTLKFFRNGNRTHPEEYTGPRDAEGIAEWLRRRVGPSAMRLEDEAAAQALIGGRDLVVIGFFQDALDMTFGLTDRPRLFQQFGLTKDTVVLFKKFDEGRADFPVDEELGLDLG

SEQ ID NO: 10220 - protein, 71 aa, Homo Sapiens
MRLRRLALFPGVALLLAAARLAAASDVLELTDDNFESRISDTGSAGLMLVEFFAPCSIPAGFEEESLLQPH

SEQ ID NO: 10221 - protein, 505 aa, Homo Sapiens
MRLRRLALFPGVALLLAAARLAAASDVLELTDDNFESRISDTGSAGLMLVEFFAPWCGHCKRLAPEYEAAATRLKGIVPLAKVDCTANTNTCNKYGVSGYPTLKIFRDGEEAGAYDGPRTADGIVSHLKKQAGPASVPLRTEEEFKKFISDKDASIVGFFDDSFSEAHSEFLKAASNLRDNYRFAHTNVESLVNEYDDNGEGIILFRPSHLTNKFEDKTVAYTEQKMTSGKIKKFIQENIFGICPHMTEDNKDLIQGKDLLIAYYDVDYEKNAKGSNYWRNRVMMVAKKFLDAGHKLNFAVASRKTFSHELSDFGLESTAGEIPVVAIRTAKGEKFVMQEEFSRDGKALERFLQDYFDGNLKRYLKSEPIPESNDGPVKVVVAENFDEIVNNENKDVLIEFYAPWCGHCKNLEPKYKELGEKLSKDPNIVIAKMDATANDVPSPYEVRGFPTIYFSPANKKLNPKKYEGGRELSDFISYLQREATNPPVIQEEKPKKKKKAQEDL

SEQ ID NO: 10222 - protein, 75 aa, Homo Sapiens
MRLRRLALFPGVALLLAAARLAAASDVLELTDDNFESRISDTGSAGLMLVEFFAPWLQNSPSQRDPSATLWLLKR

SEQ ID NO: 10223 - protein, 123 aa, Homo Sapiens
SDVLELTDDNFESRISDTGSAGLMLVEFFAPWCGHCKRLAPEYEAAATRLKGIVPLAKVDCTANTNTCNKYGVSGYPTLKIFRDGEEAGAYDGPRTAGVSSYFVLHISLTSLRTRLWHIQSKK

SEQ ID NO: 10224 - protein, 163 aa, Homo Sapiens
MRPRKAFLLLLLLGLVQLLAVAGAEGPDEDFRQVQANSRRTRPGSGKGEGEPLERRGEGVKKQVRVLWNSKHSFSKCDSSNRENAIEDEEEEEEEDDDEEEDDLEVKEENGVLVLNDANFDNFVADKDTVLLEFYAPWCGHCKQFAPEYEKIANILKDKDPPI

SEQ ID NO: 10225 - protein, 645 aa, Homo Sapiens
MRPRKAFLLLLLLGLVQLLAVAGAEGPDEDSSNRENAIEDEEEEEEEDDDEEEDDLEVKEENGVLVLNDANFDNFVADKDTVLLEFYAPWCGHCKQFAPEYEKIANILKDKDPPIPVAKIDATSASVLASRFDVSGYPTIKILKKGQAVDYEGSRTQEEIVAKVREVSQPDWTPPPEVTLVLTKENFDEVVNDADIILVEFYAPWCGHCKKLAPEYEKAAKELSKRSPPIPLAKVDATAETDLAKRFDVSGYPTLKIFRKGRPYDYNGPREKYGIVDYMIEQSGPPSKEILTLKQVQEFLKDGDDVIIIGVFKGESDPAYQQYQDAANNLREDYKFHHTFSTEIAKFLKVSQGQLVVMQPEKFQSKYEPRSHMMDVQGSTQDSAIKDFVLKYALPLVGHRKVSNDAKRYTRRPLVVVYYSVDFSFDYRAATQFWRSKVLEVAKDFPEYTFAIADEEDYAGEVKDLGLSESGEDVNAAILDESGKKFAMEPEEFDSDTLREFVTAFKKGKLKPVIKSQPVPKNNKGPVKVVVGKTFDSIVMDPKKDVLIEFYAPWCGHCKQLEPVYNSLAKKYKGQKGLVIAKMDATANDVPSDRYKVEGFPTIYFAPSGDKKNPVKFEGGDRDLEHLSKFIEEHATKLSRTKEEL

SEQ ID NO: 10226 - protein, 519 aa, Homo Sapiens
MARAGPAWLLLAIWVVLPSWLSSAKVSSLIERISDPKDLKKLLRTRNNVLVLYSKSEVAAENHLRLLSTVAQAVKGQGTICWVDCGDAESRKLCKKMKVDLSPKDKKVELFHYQDGAFHTEYNRAVTFKSIVAFLKDPKGPPLWEEDPGAKDVVHLDSEKDFRRLLKKEEKPLLIMFYAPWCSMCKRMMPHFQKAATQLRGHAVLAGMNVYSSEFENIKEEYSVRGFPTICYFEKGRFLFQYDNYGSTAEDIVEWLKNPQPPQPQVPETPWADEGGSVYHLTDEDFDQFVKEHSSVLVMFHAPWCGHCKKMKPEFEKAAEALHGEADSSGVLAAVDATVNKALAERFHISEFPTLKYFKNGEKYAVPVLRTKKKFLEWMQNPEAPPPPEPTWEEQQTSVLHLVGDNFRETLKKKKHTLVMFYAPWCPHCKKVIPHFTATADAFKDDRKIACAAVDCVKDKNQDLCQQEAVKGYPTFHYYHYGKFAEKYDSDRTELGFTNYIRALREGDHERLGKKKEEL

SEQ ID NO: 10227 - protein, 262 aa, Homo Sapiens
MARAGPAWLLLAIWVVLPSWLSSAKVSSLIERISDPKDLKKLLRTRNNVLVLYSKSEVAAENHLRLLSTVAQAVKGQGTICWVDCGDAESRKLCKKMKVDLSPKDKKVELFHYQDGAFHTEYNRAVTFKSIVAFLKDPKGPPLWEEDPGAKDVVHLDSEKDFRRLLKKEEKPLLIMFYAPWCSMCKRMMPHFQKAATQLRGHAVLAGMNVYSSEFENIKEEYSVRGFPTICYFEKGRFLFQYDNYGSTAEDIVEWLKKVWPL

SEQ ID NO: 10228 - protein, 64 aa, Homo Sapiens
MKVDLSPKDKKVELFHYQDGAFHTEYNRAVTFKSIVAFLKDPKGPPLWEEDPGAKDVVHLDSEK

SEQ ID NO: 10229 - protein, 83 aa, Homo Sapiens
  misc_feature (1)..(1): Xaa can be any naturally occurring amino acid
XTLVMFYAPWCPHCKKVIPHFTATADAFKDDRKIACAAVDCVKDKNQDLCQQEAVKGYPTFHYYHYGKFAEKYDSDRTVFSVG

SEQ ID NO: 10230 - protein, 440 aa, Homo Sapiens
MALLVLGLVSCTFFLAVNGLYSSSDDVIELTPSNFNREVIQSDSLWLVEFYAPWCGHCQRLTPEWKKAATALKDVVKVGAVDADKHHSLGGQYGVQGFPTIKIFGSNKNRPEDYQGGRTGEAIVDAALSALRQLVKDRLGGRSGGYSSGKQGRSDSSSKKDVIELTDDSFDKNVLDSEDVWMVEFYAPWCGHCKNLEPEWAAAASEVKEQTKGKVKLAAVDATVNQVLASRYGIRGFPTIKIFQKGESPVDYDGGRTRSDIVSRALDLFSDNAPPPELLEIINEDIAKRTCEEHQLCVVAVLPHILDTGAAGRNSYLEVLLKLADKYKKKMWGWLWTEAGAQSELETALGIGGFGYPAMAAINARKMKFALLKGSFSEQGINEFLRELSFGRGSTAPVGGGAFPTIVEREPWDGRDGELPVEDDIDLSDVELDDLGKDEL

SEQ ID NO: 10231 - protein, 437 aa, Homo Sapiens
MILGLVSCTFFLAVNGLYSSSDDVIELTPSNFNREVIQSDSLWLVEFYAPWCGHCQRLTPEWKKAATALKDVVKVGAVDADKHHSLGGQYGVQGFPTIKIFGSNKNRPEDYQGGRTGEAIVDAALSALRQLVKDRLGGRSGGYSSGKQGRSDSSSKKDVIELTDDSFDKNVLDSEDVWMVEFYAPWCGHCKNLEPEWAAAASEVKEQTKGKVKLAAVDATVNQVLASRYGIRGFPTIKIFQKGESPVDYDGGRTRSDIVSRALDLFSDNAPPPELLEIINEDIAKRTCEEHQLCVVAVLPHILDTGAAGRNSYLEVLLKLADKYKKKMWGWLWTEAGAQSELETALGIGGFGYPAMAAINARKMKFALLKGSFSEQGINEFLRELSFGRGSTAPVGGGAFPTIVEREPWDGRDGELPVEDDIDLSDVELDDLGKDEL

SEQ ID NO: 10232 - protein, 488 aa, Homo Sapiens
MRIITAPASKVSRGSNELMILARRSDRGSPTSPAHSLSRKSPIMYPSTTMANAPGLVSCTFFLAVNGLYSSSDDVIELTPSNFNREVIQSDSLWLVEFYAPWCGHCQRLTPEWKKAATALKDVVKVGAVDADKHHSLGGQYGVQGFPTIKIFGSNKNRPEDYQGGRTGEAIVDAALSALRQLVKDRLGGRSGGYSSGKQGRSDSSSKKDVIELTDDSFDKNVLDSEDVWMVEFYAPWCGHCKNLEPEWAAAASEVKEQTKGKVKLAAVDATVNQVLASRYGIRGFPTIKIFQKGESPVDYDGGRTRSDIVSRALDLFSDNAPPPELLEIINEDIAKRTCEEHQLCVVAVLPHILDTGAAGRNSYLEVLLKLADKYKKKMWGWLWTEAGAQSELETALGIGGFGYPAMAAINARKMKFALLKGSFSEQGINEFLRELSFGRGSTAPVGGGAFPTIVEREPWDGRDGELPVEDDIDLSDVELDDLGKDEL

SEQ ID NO: 10233 - protein, 492 aa, Homo Sapiens
MRRDLREKLVWVCRPLAPVEVPANISSDFQPCSPTSPAHSLSRKSPIMYPSTTMANAPGLVSCTFFLAVNGLYSSSDDVIELTPSNFNREVIQSDSLWLVEFYAPWCGHCQRLTPEWKKAATALKDVVKVGAVDADKHHSLGGQYGVQGFPTIKIFGSNKNRPEDYQGGRTGEAIVDAALSALRQLVKDRLGGRSGGYSSGKQGRSDSSSKKDVIELTDDSFDKNVLDSEDVWMVEFYAPWCGHCKNLEPEWAAAASEVKEQTKGKVKLAAVDATVNQVLASRYGIRGFPTIKIFQKGESPVDYDGGRTRSDIVSRALDLFSDNAPPPELLEIINEDIAKRTCEEHQLCVVAVLPHILDTGAAGRNSYLEVLLKLADKYKKKMWGWLWTEAGAQSELETALGIGGFGYPAMAAINARKMKFALLKGSFSEQGINEFLRELSFGRGSTAPVGGGAFPTIVEREPWDGRDGELPVEDDIDLSDVELDDLGKDEL

SEQ ID NO: 10234 - protein, 492 aa, Homo Sapiens; identical to SEQ ID NO: 10233

SEQ ID NO: 10235 - protein, 11 aa, Homo Sapiens
MYPSTTMANAP

SEQ ID NO: 10236 - protein, 445 aa, Homo Sapiens
MYPSTTMANAPGLVSCTFFLAVNGLYSSSDDVIELTPSNFNREVIQSDSLWLVEFYAPWCGHCQRLTPEWKKAATALKDVVKVGAVDADKHHSLGGQYGVQGFPTIKIFGSNKNRPEDYQGGRTGEAIVDAALSALRQLVKDRLGGRSGGYSSGKQGRSDSSSKKDVIELTDDSFDKNVLDSEDVWMVEFYAPWCGHCKNLEPEWAAAASEVKEQTKGKVKLAAVDATVNQVLASRYGIRGFPTIKIFQKGESPVDYDGGRTRSDIVSRALDLFSDNAPPPELLEIINEDIAKRTCEEHQLCVVAVLPHILDTGAAGRNSYLEVLLKLADKYKKKMWGWLWTEAGAQSELETALGIGGFGYPAMAAINARKMKFALLKGSFSEQGINEFLRELSFGRGSTAPVGGGAFPTIVEREPWDGRDGELPVEDDIDLSDVELDDLGKDEL

SEQ ID NO: 10237 - protein, 177 aa, Homo Sapiens
MDLLWMPLLLVAACVSAVHSSPEVNAGVSSIHITKPVHILEERSLLVLTPAGLTQMLNQTRFLMVLFHEVLLLLPRLKYNGAILAHRNLHLPGSSDSPASASQVAGITDNPSSKQSRNLAEELGKAVEIMGKGKNGIGFGKVDITIEKELQQEFGITKAPELKLFFEGNRSEPISCK

SEQ ID NO: 10238 - protein, 584 aa, Homo Sapiens
MDLLWMPLLLVAACVSAVHSSPEVNAGVSSIHITKPVHILEERSLLVLTPAGLTQMLNQTRFLMVLFHNPSSKQSRNLAEELGKAVEIMGKGKNGIGFGKVDITIEKELQQEFGITKAPELKLFFEGNRSEPISCKGVVESAALVVWLRRQISQKAFLFNSSEQVAEFVISRPLVIVGFFQDLEEEVAELFYDVIKDFPELTFGVITIGNVIGRFHVTLDSVLVFKKGKIVNRQKLINDSTNKQELNRVIKQHLTDFVIEYNTENKDLISELHIMSHMLLFVSKSSESYGIIIQHYKLASKEFQNKILFILVDADEPRNGRVFKYFRVTEVDIPSVQILNLSSDARYKMPSDDITYESLKKFGRSFLSKNATKHQSSEEIPKYWDQGLVKQLVGKNFNVVVFDKEKDVFVMFYAPWSKKCKMLFPLLEELGRKYQNHSTIIIAKIDVTANDIQLMYLDRYPFFRLFPSGSQQAVLYKGEHTLKGFSDFLESHIKTKIEDEDELLSVEQNEVIEEEVLAEEKEVPMMRKGLPEQQSPELENMTKYVSKLEEPAGKKKTSEEVVVVVAKPKGPPVQKKKPKVKEEL

SEQ ID NO: 10239 - protein, 254 aa, Homo Sapiens [sequence omitted]

SEQ ID NO: 10240 - protein, 254 aa, Homo Sapiens [sequence omitted]

SEQ ID NO: 10241 - protein, 254 aa, Homo Sapiens [sequence omitted]

SEQ ID NO: 10242 - protein, 1154 aa, Homo Sapiens
MGLLLMILASAVLGSFLTLLAQFFLLYRRQPEPPADEAARAGEGFRYIKPVPGLLLREYLYGGGRDEEPSGAAPEGGATPTAAPETPAPPTRETCYFLNATILFLFRELRDTALTRRWVTKKIKVEFEELLQTKTAGRLLEGLSLRDVFLGETVPFIKTIRLVRPVVPSATGEPDGPEGEALPAACPEELAFEAEVEYNGGFHLAIDVDLVFGKSAYLFVKLSRVVGRLRLVFTRVPFTHWFFSFVEDPLIDFEVRSQFEGRPMPQLTSIIVNQLKKIIKRKHTLPNYKIRFKPFFPYQTLQGFEEDEEHIHIQQWALTEGRLKVTLLECSRLLIFGSYDREANVHCTLELSSSVWEEKQRSSIKTVELIKGNLQSVGLTLRLVQSTDGYAGHVIIETVAPNSPAAIADLQRGDRLIAIGGVKITSTLQVLKLIKQAGDRVLVYYERPVGQSNQGAVLQDNFGQLEENFLSSSCQSGYEEEAAGLTVDTESRELDSEFEDLASDVRAQNEFKDEAQSLSHSPKRVPTTLSIKPLGAISPVLNRKLAVGSHPLPPKIQSKDGNKPPPLKTSEITDPAQVSKPTQGSAFKPPVPPRPQAKVPLPSADAPNQAEPDVLVEKPEKVVPPPLVDKSAEKQAKNVDAIDDAAAPKQFLAKQEVAKDVTSETSCPTKDSSDDRQTWESSEILYRNKLGKWTRTRASCLFDIEACHRYLNIALWCRDPFKLGGLICLGHVSLKLEDVALGCLATSNTEYLSKLRLEAPSPKAIVTRTALRNLSMQKGFNDKFCYGDITIHFKYLKEGESDHHVVTNVEKEKEPHLVEEVSVLPKEEQFVGQMGLTENKHSFQDTQFQNPTWCDYCKKKVWTKAASQCMFCAYVCHKKCQEKCLAETSVCGATDRRIDRTLKNLRLEGQETLLGLPPRVDAEASKSVNKTTGLTRHIINTSSRLLNLRQVSKTRLSEPGTDLVEPSPKHTPNTSDNEGSDTEVCGPNSPSKRGNSTGIKLVRKEGGLDDSVFIAVKEIGRDLYRGLPTEERIQKLEFMLDKLQNEIDQELEHNNSLVREEKETTDTRKKSLLSAALAKSGERLQALTLLMIHYRAGIEDIETLESLSLDQHSKKISKYTDDTEEDLDNEISQLIDSQPFSSISDDLFGPSESV

SEQ ID NO: 10243 - protein, 778 aa, Homo Sapiens
MGCNLCTFQKREEHYKLLYEVSQVNGKDLSKATHEEAVEAFRNAKEPIVVQVLRRTPLSRPAYGMASEVQLMNASTQTDITFEHIMALAKLRPPTPPVPDICPFLLSDSCHSLHPMEHEFYEDNEYISSLPADADRTEDFEYEEVELCRVSSQEKLGLTVCYRTDDEEDTGIYVSEVDPNSIAAKDGRIREGDRILQINGEDVQNREEAVALLSNDECKRIVLLVARPEIQLDEGWLEDERNEFLEELNLEMLEEEHNEAMQPTANEVEQPKKQEEEEGTTDTATSSSNNHEKDSGVGRTDESLRNDESSEQENAAEDPNSTSLKSKRDLGQSQDTLGSVELQYNESLVSGEYIDSDCIGNPDEDCERFRQLLELKCKIRNHGEYDLYYSSSTIECNQGEQEGVEHELQLLNEELRNIELECQNIMQAHRLQKVTDQYGDIWTLHDGGFRNYNTSIDMQRGKLDDIMEHPEKSDKDSSSAYNTAESCRSTPLTVDRSPDSSLPRVINLTNKKNLRSTMAATQSSSGQSSKESTSTKAKTTEQGCSAESKEKVLEGSKLPDQEKAVSEHIPYLSPYHSSSYRYANIPAHARHYQSYMQLIQQKSAVEYAQSQLSLVSMCKESQKCSEPKMEWKVKIRSDGTRYITKRPVRDRILKERALKIKEERSGMTTDDDTMSEMKMGRYWSKEERKQHLVRAKEQRRRREFMMRSRLECLKESPQSGSEGKKEINIIELSHKKMMKKRNKKILDNWMTIQELMTHGAKSPDGTRVHNAFLSVTTV

SEQ ID NO: 10244 - protein, 1036 aa, Homo Sapiens
MGFALERFAEAVDPALECKLCGQVLEEPLCTPCGHVFCASCLLPWAVRRRRCPLQCQPLAPGELYRVLPLRSLIQKLRVQCDYRARGCGHSVRLHELEAHVEHCDFGPARRLRSRGGCASGLGGGEVPARGGCGPTPRAGRGGGARGGPPGGRWGRGRGPGPRVLAWRRREKALLAQLWALQGEVQLTARRYQEKFTQYMAHVRNFVGDLGGGHRRDGEHKPFTIVLERENDTLGFNIIGGRPNQNNQEGTSTEGIYVSKILENGPADRADGLEIHDKIMEVNGKDLSKATHEEAVEAFRNAKEPIVVQVLRRTPLSRPAYGMASEVQLMNASTQTDITFEHIMALAKLRPPTPPVPDICPFLLSDSCHSLHPMEHEFYEDNEYISSLPADADRTEDFEYEEVELCRVSSQEKLGLTVCYRTDDEEDTGIYVSEVDPNSIAAKDGRIREGDRILQINGEDVQNREEAVALLSNDECKRIVLLVARPEIQLDEGWLEDERNEFLEELNLEMLEEEHNEAMQPTANEVEQPKKQEEEEGTTDTATSSSNNHEKDSGVGRTDESLRNDESSEQENAAEDPNSTSLKSKRDLGQSQDTLGSVELQYNESLVSGEYIDSDCIGNPDEDCERFRQLLELKCKIRNHGEYDLYYSSSTIECNQGEQEGVEHELQLLNEELRNIELECQNIMQAHRLQKVTDQYGDIWTLHDGGFRNYNTSIDMQRGKLDDIMEHPEKSDKDSSSAYNTAESCRSTPLTVDRSPDSSLPRVINLTNKKNLRSTMAATQSSSGQSSKESTSTKAKTTEQGCSAESKEKVLEGSKLPDQEKAVSEHIPYLSPYHSSSYRYANIPAHARHYQSYMQLIQQKSAVEYAQSQLSLVSMCKESQKCSEPKMEWKVKIRSDGTRYITKRPVRDRILKERALKIKEERSGMTTDDDTMSEMKMGRYWSKEERKQHLVRAKEQRRRREFMMRSRLECLKESPQSGSEGKKEINIIELSHKKMMKKRNKKILDNWMTIQELMTHGAKSPDGTRVHNAFLSVTTV

SEQ ID NO: 10245 - protein, 776 aa, Homo Sapiens
MSGKRQFFLKPLALLTCWPSTVNGKDLSKATHEEAVEAFRNAKEPIVVQVLRRTPLSRPAYGMASEVQLMNASTQTDITFEHIMALAKLRPPTPPVPDICPFLLSDSCHSLHPMEHEFYEDNEYISSLPADADRTEDFEYEEVELCRVSSQEKLGLTVCYRTDDEEDTGIYVSEVDPNSIAAKDGRIREGDRILQINGEDVQNREEAVALLSNDECKRIVLLVARPEIQLDEGWLEDERNEFLEELNLEMLEEEHNEAMQPTANEVEQPKKQEEEEGTTDTATSSSNNHEKDSGVGRTDESLRNDESSEQENAAEDPNSTSLKSKRDLGQSQDTLGSVELQYNESLVSGEYIDSDCIGNPDEDCERFRQLLELKCKIRNHGEYDLYYSSSTIECNQGEQEGVEHELQLLNEELRNIELECQNIMQAHRLQKVTDQYGDIWTLHDGGFRNYNTSIDMQRGKLDDIMEHPEKSDKDSSSAYNTAESCRSTPLTVDRSPDSSLPRVINLTNKKNLRSTMAATQSSSGQSSKESTSTKAKTTEQGCSAESKEKVLEGSKLPDQEKAVSEHIPYLSPYHSSSYRYANIPAHARHYQSYMQLIQQKSAVEYAQSQLSLVSMCKESQKCSEPKMEWKVKIRSDGTRYITKRPVRDRILKERALKIKEERSGMTTDDDTMSEMKMGRYWSKEERKQHLVRAKEQRRRREFMMRSRLECLKESPQSGSEGKKEINIIELSHKKMMKKRNKKILDNWMTIQELMTHGAKSPDGTRVHNAFLSVTTV

SEQ ID NO: 10246 - protein, 77 aa, Homo Sapiens
MSPPLCPLLLLAVGLRLAGTLNPSDPNTCSFWESFTTTTKESHSRPFSLLPSEPCERPWEGPHTCPQPTNSEETPGF

SEQ ID NO: 10247 - protein, 173 aa, Homo Sapiens
MSPPLCPLLLLAVGLRLAGTLNPSDPNTCSFWESFTTTTKESHSRPFSLLPSEPCERPWEGPHTCPQPTVVYRTVYRQVVKTDHRQRLQCCHGFYESRGFCVPLCAQECVHGRCVAPNQCQCVPGWRGDDCSSECAPGMWGPQCDKPCSCGNNSSCDPKSGVCSCPSGLQPPN

SEQ ID NO: 10248 - protein, 1037 aa, Homo Sapiens
MSPPLCPLLLLAVGLRLAGTLNPSDPNTCSFWESFTTTTKESHSRPFSLLPSEPCERPWEGPHTCPQPTVVYRTVYRQVVKTDHRQRLQCCHGFYESRGFCVPLCAQECVHGRCVAPNQCQCVPGWRGDDCSSECAPGMWGPQCDKPCSCGNNSSCDPKSGVCSCPSGLQPPNCLQPCTPGYYGPACQFRCQCHGAPCDPQTGACFCPAERTGPSCDVSCSQGTSGFFCPSTHSCQNGGVFQTPQGSCSCPPGWMGTICSLPCPEGFHGPNCSQECRCHNGGLCDRFTGQCRCAPGYTGDRCREECPVGRFGQDCAETCDCAPDARCFPANGACLCEHGFTGDRCTDRLCPDGFYGLSCQAPCTCDREHSLSCHPMNGECSCLPGWAGLHCNESCPQDTHGPGCQEHCLCLHGGVCQATSGLCQCAPGYTGPHCASLCPPDTYGVNCSARCSCENAIACSPIDGECVCKEGWQRGNCSVPCPPGTWGFSCNASCQCAHEAVCSPQTGACTCTPGWHGAHCQLPCPKGQFGEGCASRCDCDHSDGCDPVHGRCQCQAGWMGARCHLSCPEGLWGVNCSNTCTCKNGGTCLPENGNCVCAPGFRGPSCQRSCQPGRYGKRCVPCKCANHSFCHPSNGTCYCLAGWTGPDCSQPCPPGHWGENCAQTCQCHHGGTCHPQDGSCICPLGWTGHHCLEGCPLGTFGANCSQPCQCGPGEKCHPETGACVCPPGHSGAPCRIGIQEPFTVMPTTPVAYNSLGAVIGIAVLGSLVVALVALFIGYRHWQKGKEHHHLAVAYSSGRLDGSEYVMPDVPPSYSHYYSNPSYHTLSQCSPNPPPPNKVPGPLFASLQNPERPGGAQGHDNHTTLPADWKHRREPPPGPLDRGSSRLDRSYSYSYSNGPGPFYNKGLISEEELGASVASLSSENPYATIRDLPSLPGGPRESSYMEMKGPPSGSPPRQPPQFWDSQRRRQPQPQRDSGTYEQPSPLIHDRDSVGSQPPLPPGLPPGHYDSPKNSHIPGHYDLPPVRHPPSPPLRRQDR

SEQ ID NO: 10249 - protein, 1037 aa, Homo Sapiens; identical to SEQ ID NO: 10248

SEQ ID NO: 10250 - protein, 227 aa, Homo Sapiens
MGWTMRLVTAALLLGLMMVVTGDEDENSPCAHEALLDEDTLFCQGLEVFYPELGNIGCKVVPDCNNYRQKITSWMEPIVKFPGAVDGATYILVMVDPDAPSRAEPRQRFWRHWLVTDIKGADLKKGKIQGQELSAYQAPSPPAHSGFHRYQFFVYLQEGKVISLLPKENKTRGSWKMDRFLNRFHLGEPEASTQFMTQNYQDSPTLQAPRERASEPKHKNQAEIAAC

SEQ ID NO: 10251 - protein, 93 aa, Homo Sapiens
MSRRRAEPGCGGSGRRAGAPGEGRGRRRYAPGPAAKALPRRRLALQSQVPMGWTMRLVTAALLLGLMMVVTGDEDENSPCAHEALLDEDTLFC

SEQ ID NO: 10252 - protein, 135 aa, Homo Sapiens
MQPRWAQGATMWLGVLLTLLLCSSLEGQENSFTINSVDMKSLPDWTVQNGKNLTLQCFADVSTTSHVKPQHQMLFYKDDVLFYNISSMKSTESYFIPEVRIYDSGTYKCTVIVNNKEKTTAEYQVLVEGVPSPRV

SEQ ID NO: 10253 - protein, 230 aa, Homo Sapiens
MQPRWAQGATMWLGVLLTLLLCSSLEGQENSFTINSVDMKSLPDWTVQNGKNLTLQCFADVSTTSHVKPQHQMLFYKDDVLFYNISSMKSTESYFIPEVRIYDSGTYKCTVIVNNKEKTTAEYQVLVEGVPSPRVTLDKKEAIQGGIVRVNCSVPEEKAPIHFTIEKLELNEKMVKLKREKNSRDQNFVILEFPVEEQDRVLSFRCQARIISGIHMQTSESTKSELVTVT

SEQ ID NO: 10254 - protein, 738 aa, Homo Sapiens
MQPRWAQGATMWLGVLLTLLLCSSLEGQENSFTINSVDMKSLPDWTVQNGKNLTLQCFADVSTTSHVKPQHQMLFYKDDVLFYNISSMKSTESYFIPEVRIYDSGTYKCTVIVNNKEKTTAEYQVLVEGVPSPRVTLDKKEAIQGGIVRVNCSVPEEKAPIHFTIEKLELNEKMVKLKREKNSRDQNFVILEFPVEEQDRVLSFRCQARIISGIHMQTSESTKSELVTVTESFSTPKFHISPTGMIMEGAQLHIKCTIQVTHLAQEFPEIIIQKDKAIVAHNRHGNKAVYSVMAMVEHSGNYTCKVESSRISKVSSIVVNITELFSKPELESSFTHLDQGERLNLSCSIPGAPPANFTIQKEDTIVSQTQDFTKIASKSDSGTYICTAGIDKVVKKSNTVQIVVCEMLSQPRISYDAQFEVIKGQTIEVRCESISGTLPISYQLLKTSKVLENSTKNSNDPAVFKDNPTEDVEYQCVADNCHSHAKMLSEVLRVKVIAPVDEVQISILSSKVVESGEDIVLQCAVNEGSGPITYKFYREKEGKPFYQMTSNATQAFWTKQKASKEQEGEYYCTAFNRANHASSVPRSKILTVRVILAPWKKGLIAVVIIGVIIALLIIAAKCYFLRKAKAKQMPVEMSRPAVPLLNSNNEKMSDPNMEANSHYGHNDDVRNHAMKPINDNKEPLNSDVQYTEVQVSSAESHKDLGKKDTETVYSEVRKAVPDAVESRYSRTEGSLDGT

SEQ ID NO: 10255 - protein, 184 aa, Homo Sapiens [sequence omitted]

SEQ ID NO: 10256 - protein, 88 aa, Homo Sapiens
FLTLCTWLLLLGPGLLATVRAECSQDCATCSYRLVRPADINFLKHPRIDQFIHSTNEYLMEEAPDGGKSQCNASKWRHGVLMEKQQDL

SEQ ID NO: 10257 - protein, 105 aa, Homo Sapiens
MARFLTLCTWLLLLGPGLLATVRAECSQDCATCSYRLVRPADINFLACVMECEGKLPSLKIWETCKELLQLSKPELPQDGTSTLRENSKPEESHLLAKRYGGFMK

SEQ ID NO: 10258 - protein, 267 aa, Homo Sapiens
MARFLTLCTWLLLLGPGLLATVRAECSQDCATCSYRLVRPADINFLACVMECEGKLPSLKIWETCKELLQLSKPELPQDGTSTLRENSKPEESHLLAKRYGGFMKRYGGFMKKMDELYPMEPEEEANGSEILAKRYGGFMKKDAEEDDSLANSSDLLKELLETGDNRERSHHQDGSDNEEEVSKRYGGFMRGLKRSPQLEDEAKELQKRYGGFMRRVGRPEWWMDYQKRYGGFLKRFAEALPSDEEGESYSKEVPEMEKRYGGFMRF

SEQ ID NO: 10259 - protein, 267 aa, Homo Sapiens; identical to SEQ ID NO: 10258

SEQ ID NO: 10260 - protein, 79 aa, Homo Sapiens
MARFLTLCTWLLLLGPGLLATVRAECSQDCATCSYRLVRPADINFLDCGGGEEEGCSFQNFPYCFLCSCCYHLLLLSLL

SEQ ID NO: 10261 - protein, 92 aa, Homo Sapiens
MARFLTLCTWLLLLGPGLLATVRAECSQDCATCSYRLVRPADINFLVSVARGECCAPCETEFPQQYADCLRPTARRVWRFAPGRSRSGASPW

SEQ ID NO: 10262 - protein, 81 aa, Homo Sapiens
MSRSSKVVLGLSVLLTAATVAGVHVKQQWDQQRLRDGVIRDIERQIRKKENIRLLGEQIILTEQLEAEREKMLLAKGSQKS

SEQ ID NO: 10263 - protein, 101 aa, Homo Sapiens
MSSAAGFCASRPGLLFLGLLLLPLVVAFASAEAEEDGDLQCLCVKTTSQVRPRHITSLEVIKAGPHCPTAQLIATLKNGRKICLDLQAPLYKKIIKKLLES

SEQ ID NO: 10264 - protein, 104 aa, Homo Sapiens
MSSAARSRLTRATRQEMLFLALLLLPVVVAFARAEAEEDGDLQCLCVKTTSQVRPRHITSLEVIKAGPHCPTAQLIATLKNGRKICLDLQALLYKKIIKEHLES

SEQ ID NO: 10265 - protein, 776 aa, Homo Sapiens
MCGYERCRPCRGAHGYLRGGQGVLHLRGLPGHGGRRLKHRRGRLGECLQHPASGAVRGDWREKPGCWSHRFPCPGRHALVGGTIIGSARCQAFRTREGRLKAACNLLQRGITNLCVIGGDGSLTGANLFRKEWSGLLEELARNGQIDKEAVQKYAYLNVVGMVGSIDNDFCGTDMTIGTDSALHRIIEVVDAIMTTAQSHQRTFVLEVMGRHCGYLALVSALACGADWVFLPESPPEEGWEEQMCVKLSENRARKKRLNIIIVAEGAIDTQNKPITSEKIKELVVTQLGYDTRVTILGHVQRGGTPSAFDRILASRMGVEAVIALLEATPDTPACVVSLNGNHAVRLPLMECVQMTQDVQKAMDERRFQDAVRLRGRSFAGNLNTYKRLAIKLPDDQIPKTNCNVAVINVGAPAAGMNAAVRSAVRVGIADGHRMLAIYDGFDGFAKGQIKEIGWTDVGGWTGQGGSILGTKRVLPGKYLEEIATQMRTHSINALLIIGGFEAYLGLLELSAAREKHEEFCVPMVMVPATVSNNVPGSDFSIGADTALNTITDTCDRIKQSASGTKRRVFIIETMGGYCGYLANMGGLAAGADAAYIFEEPFDIRDLQSNVEHLTEKMKTTIQRGLVLRNESCSENYTTDFIYQLYSEEGKGVFDCRKNVLGHMQQGGAPSPFDRNFGTKISARAMEWITAKLKEARGRGKKFTTDDSICVLGISKRNVIFQPVAELKKQTDFEHRIPKEQWWLKLRPLMKILAKYKASYDVSDSGQLEHVQPWSV

SEQ ID NO: 10266 - protein, 784 aa, Homo Sapiens
MDADDSRAPKGSLRKFLEHLSGAGKAIGVLTSGGDAQGMNAAVRAVVRMGIYVGAKVYFIYEGYQGMVDGGSNIAEADWESVSSILQVGGTIIGSARCQAFRTREGRLKAACNLLQRGITNLCVIGGDGSLTGANLFRKEWSGLLEELARNGQIDKEAVQKYAYLNVVGMVGSIDNDFCGTDMTIGTDSALHRIIEVVDAIMTTAQSHQRTFVLEVMGRHCGYLALVSALACGADWVFLPESPPEEGWEEQMCVKLSENRARKKRLNIIIVAEGAIDTQNKPITSEKIKELVVTQLGYDTRVTILGHVQRGGTPSAFDRILASRMGVEAVIALLEATPDTPACVVSLNGNHAVRLPLMECVQMTQDVQKAMDERRFQDAVRLRGRSFAGNLNTYKRLAIKLPDDQIPKTNCNVAVINVGAPAAGMNAAVRSAVRVGIADGHRMLAIYDGFDGFAKGQIKEIGWTDVGGWTGQGGSILGTKRVLPGKYLEEIATQMRTHSINALLIIGGFEAYLGLLELSAAREKHEEFCVPMVMVPATVSNNVPGSDFSIGADTALNTITDTCDRIKQSASGTKRRVFIIETMGGYCGYLANMGGLAAGADAAYIFEEPFDIRDLQSNVEHLTEKMKTTIQRGLVLRNESCSENYTTDFIYQLYSEEGKGVFDCRKNVLGHMQQGGAPSPFDRNFGTKISARAMEWITAKLKEARGRGKKFTTDDSICVLGISKRNVIFQPVAELKKQTDFEHRIPKEQWWLKLRPLMKILAKYKASYDVSDSGQLEHVQPWSV

SEQ ID NO: 10267 - protein, 202 aa, Homo Sapiens
MGGYCGYLANMGGLAAGADAAYIFEEPFDIRDLQSNVEHLTEKMKTTIQRGLVLRNESCSENYTTDFIYQLYSEEGKGVFDCRKNVLGHMQQGGAPSPFDRNFGTKISARAMEWITAKLKEARGRGKKFTTDDSICVLGISKRNVIFQPVAELKKQTDFEHRIPKEQWWLKLRPLMKILAKYKASYDVSDSGQLEHVQPWSV

SEQ ID NO: 10268 - protein, 118 aa, Homo Sapiens
MGRHCGYLALVSALACGADWVFLPESPPEEGWEEQMCVKLSENRARKKRLNIIIVAEGAIDTQNKPITSEKIKELVVTQLGYDTRVTILGHVQRGGTPSAFDRILASRMGVEAVIALL

SEQ ID NO: 10269 - protein, 240 aa, Homo Sapiens
MGRHCGYLALVSALACGADWVFLPESPPEEGWEEQMCVKLSENRARKKRLNIIIVAEGAIDTQNKPITSEKIKELVVTQLGYDTRVTILGHVQRGGTPSAFDRILASRMGVEAVIALLEATPDTPACVVSLNGNHAVRLPLMECVQMTQDVQKAMDERRFQDAVRLRGRSFAGNLNTYKRLAIKLPDDQIPKTNCNVAVINVGAPAAGMNAAVRSAVRVGIADGHRMLAIYDGFDGFAKG

SEQ ID NO: 10270 - protein, 113 aa, Homo Sapiens
MNAAVRAVVRMGIYVGAKVYFIYEGYQGMVDGGSNIAEADWESVSSILQVGGTIIGSARCQAFRTREGRLKAACNLLQRGITNLCVIGGDGSLTGANLFRKEWSGLLEELARN

SEQ ID NO: 10271 - protein, 210 aa, Homo Sapiens
MNAAVRAVVRMGIYVGAKVYFIYEGYQGMVDGGSNIAEADWESVSSILQVGGTIIGSARCQAFRTREGRLKAACNLLQRGITNLCVIGGDGSLTGANLFRKEWSGLLEELARNGQIDKEAVQKYAYLNVVGMVGSIDNDFCGTDMTIGTDSALHRIIEVVDAIMTTAQSHQRTFVLEVMGRHCGYLALVSALACGADWVFLPESPPEEGW

SEQ ID NO: 10272 - protein, 166 aa, Homo Sapiens
  misc_feature (1)..(1): Xaa can be any naturally occurring amino acid
XADGHRMLAIYDGFDGFAKGQIKEIGWTDVGGWTGQGGSILGTKRVLPGKYLEEIATQMRTHSINALLIIGGFEAYKSACDMAEARGRHQELCIPLCVVPATISNNVPGTEISLGSDTGLNAVVETCDRIKQSASGTKRRVFIIETMGGYCGYLANMGGLAAGADA

SEQ ID NO: 10273 - protein, 103 aa, Homo Sapiens
  misc_feature (1)..(1): Xaa can be any naturally occurring amino acid
XFIYQLYSEEGKGVFDCRKNVLGHMQQGGAPSPFDRNFGTKISARAMEWITAKLKEARGRGKKFTTDDSICVLGISKRNVIFQPVAELKKQTDFETVSMQPPR

SEQ ID NO: 10274 - protein, 140 aa, Homo Sapiens
MAGWNAYIDNLMADGTCQDAAIVGYKDSPSVWAAVPGKTFVNITPAEVGVLVGKDRSSFYVNGLTLGGQKCSVIRDSLLQDGEFSMDLRTKSTGGAPTFNVTVTKTDKTLVLLMGKEGVHGGLINKKCYEMASHLRRSQY

SEQ ID NO: 10275 - protein, 104 aa, Homo Sapiens
MGAWFLFQPAEVGVLVGKDRSSFYVNGLTLGGQKCSVIRDSLLQDGEFSMDLRTKSTGGAPTFNVTVTKTDKTLVLLMGKEGVHGGLINKKCYEMASHLRRSQY

SEQ ID NO: 10276 - protein, 165 aa, Homo Sapiens
MHSRPRRRRRRGHTRRRPPVLPFGGGSGGARAAAQRAEPRSGRQRVPRALRLPPPASRGSSSPVRGPSSSAESSPSSSAMAGWNAYIDNLMADGTCQDAAIVGYKDSPSVWAAVPGKTFVNITPAEVGVLVGKDRSSFYVNGLTLGGQKCSVIRDSLLQDGEFSM

SEQ ID NO: 10277 - protein, 265 aa, Homo Sapiens
MEYFGTIGIGTPAQDFTVVFDTGSSNLWVPSVYCSSLACTNHNRFNPEDSSTYQSTSETVSITYGTGSMTGILGYDTVQVGGISDTNQIFGLSETEPGSFLYYAPFDGILGLAYPSISSSGATPVFDNIWNQGLVSQDLFSVYLSADDQSGSVVIFGGIDSSYYTGSLNWVPVTVEGYWQITVDSITMNGEAIACAEGCQAIVDTGTSLLTGPTSPIANIQSDIGASENSDGDMVVSCSAISSLPDIVFTINGVQYPVPPSAYIL

SEQ ID NO: 10278 - protein, 388 aa, Homo Sapiens
MKWLLLLGLVALSECIMYKVPLIRKKSLRRTLSERGLLKDFLKKHNLNPARKYFPQWKAPTLVDEQPLENYLDMEYFGTIGIGTPAQDFTVVFDTGSSNLWVPSVYCSSLACTNHNRFNPEDSSTYQSTSETVSITYGTGSMTGILGYDTVQVGGISDTNQIFGLSETEPGSFLYYAPFDGILGLAYPSISSSGATPVFDNIWNQGLVSQDLFSVYLSADDQSGSVVIFGGIDSSYYTGSLNWVPVTVEGYWQITVDSITMNGEAIACAEGCQAIVDTGTSLLTGPTSPIANIQSDIGASENSDGDMVVSCSAISSLPDIVFTINGVQYPVPPSAYILQSEGSCISGFQGMNLPTESGELWILGDVFIRQYFTVFDRANNQVGLAPVA

SEQ ID NO: 10279 - protein, 128 aa, Homo Sapiens
MNGEAIACAEGCQAIVDTGTSLLTGPTSPIANIQSDIGASENSDGDMVVSCSAISSLPDIVFTINGVQYPVPPSAYILQSEGSCISGFQGMNLPTESGELWILGDVFIRQYFTVFDRANNQVGLAPVA

SEQ ID NO: 10280 - protein, 234 aa, Homo Sapiens
MVSGNNSDSAHCIGTGLRGKETTLVTPQDSPRKCPIKGSPEEATADGHTNGRTKKFMSSPLTFHSDDQSGSVVIFGGIDSSYYTGSLNWVPVTVEGYWQITVDSITMNGEAIACAEGCQAIVDTGTSLLTGPTSPIANIQSDIGASENSDGDMVVSCSAISSLPDIVFTINGVQYPVPPSAYILQSEGSCISGFQGMNLPTESGELWILGDVFIRQYFTVFDRANNQVGLAPVA

SEQ ID NO: 10281 - protein, 388 aa, Homo Sapiens
MKWLLLLGLVALSECIMYKVPLIRKKSLRRTLSERGLLKDFLKKHNLNPARKYFPQWEAPTLVDEQPLENYLDMEYFGTIGIGTPAQDFTVVFDTGSSNLWVPSVYCSSLACTNHNRFNPEDSSTYQSTSETVSITYGTGSMTGILGYDTVQVGGISDTNQIFGLSETEPGSFLYYAPFDGILGLAYPSISSSGATPVFDNIWNQGLVSQDLFSVYLSADDQSGSVVIFGGIDSSYYTGSLNWVPVTVEGYWQITVDSITMNGEAIACAEGCQAIVDTGTSLLTGPTSPIANIQSDIGASENSDGDMVVSCSAISSLPDIVFTINGVQYPVPPSAYILQSEGSCISGFQGMNLPTESGELWILGDVFIRQYFTVFDRANNQVGLAPVA

SEQ ID NO: 10282 - protein, 128 aa, Homo Sapiens; identical to SEQ ID NO: 10279

SEQ ID NO: 10283 - protein, 234 aa, Homo Sapiens; identical to SEQ ID NO: 10280

SEQ ID NO: 10284 - protein, 388 aa, Homo Sapiens
MKWLLLLGLVALSECIMYKVPLIRKKSLRRTLSERGLLKDFLKKHNLNPARKYFPQWEAPTLVDEQPLENYLDMEYFGTIGIGTPAQDFTVVFDTGSSNLWVPSVYCSSLACTNHNRFNPEDSSTYQSTSETVSITYGTGSMTGILGYDTVQVGGISDTNQIFGLSETEPGSFLYYAPFDGILGLAYPSISSSGATPVFDNIWNQGLVSQDLFSVYLSADDKSGSVVIFGGIDSSYYTGSLNWVPVTVEGYWQITVDSITMNGETIACAEGCQAIVDTGTSLLTGPTSPIANIQSDIGASENSDGDMVVSCSAISSLPDIVFTINGVQYPVPPSAYILQSEGSCISGFQGMNVPTESGELWILGDVFIRQYFTVFDRANNQVGLAPVA

SEQ ID NO: 10285 - protein, 128 aa, Homo Sapiens
MNGETIACAEGCQAIVDTGTSLLTGPTSPIANIQSDIGASENSDGDMVVSCSAISSLPDIVFTINGVQYPVPPSAYILQSEGSCISGFQGMNVPTESGELWILGDVFIRQYFTVFDRANNQVGLAPVA

SEQ ID NO: 10286 - protein, 234 aa, Homo Sapiens
MVSGNNSDGAHCMGPGLRGKETTLVTPQDSPGKCPINGRSEEATADGHTNGRTKKFMSSPLTFHSDDKSGSVVIFGGIDSSYYTGSLNWVPVTVEGYWQITVDSITMNGETIACAEGCQAIVDTGTSLLTGPTSPIANIQSDIGASENSDGDMVVSCSAISSLPDIVFTINGVQYPVPPSAYILQSEGSCISGFQGMNVPTESGELWILGDVFIRQYFTVFDRANNQVGLAPVA

SEQ ID NO: 10287 - protein, 289 aa, Homo Sapiens
MAFRQALQLAACGLAGGSAAVLFSAVAVGKPRAGGDAEPRPAEPPAWAGGARPGPGVWDPNWDRREPLSLINVRKRNVESGEEELASKLDHYKAKATRHIFLIRHSQYHVDGSLEKDRTLTPLGREQAELTGLRLASLGLKFNKIVHSSMTRAIETTDIISRHLPGVCKVSTDLLREGAPIEPDPPVSHWKPEAVQYYEDGARIEAAFRNYIHRADARQEEDSYEIFICHANVIRYIVCRALQFPPEGWLRLSLNNGSITHLVIRPNGRVALRTLGDTGFMPPDKITRS

SEQ ID NO: 10288 - protein, 255 aa, Homo Sapiens
MAFRQALQLAACGLAGGSAAVLFSAVAVGKPRAGGDAEPRPAEPPAWAGGARPGPGVWDPNWDRREPLSLINVRKRNVESGEEELASKLDHYKAKATRHIFLIRHSQYHVDGSLEKDRTLTPLGREQAELTGLRLASLGLKFNKIVHSSMTRAIETTDIISRHLPGVCKVSTDLLREGAPIEPDPPVSHWKPEAVQYYEDGARIEAAFRNYIHRADARQEEDSYEIFICHANVIRYIVCSIPPLLSAGDFVLLGS

SEQ ID NO: 10289 - protein, 140 aa, Homo Sapiens
MTRAIETTDIISRHLPGVCKVSTDLLREGAPIEPDPPVSHWKPEAVQYYEDGARIEAAFRNYIHRADARQEEDSYEIFICHANVIRYIVCRALQFPPEGWLRLSLNNGSITHLVIRPNGRVALRTLGDTGFMPPDKITRS

SEQ ID NO: 10290 - protein, 140 aa, Homo Sapiens; identical to SEQ ID NO: 10289

SEQ ID NO: 10291 - protein, 269 aa, Homo Sapiens
MAGLAARLVLLAGAAALASGSQGDREPVYRDCVLQCEEQNCSGGALNHFRSRQPIYMSLAGWTCRDDCKYECMWVTVGLYLQEGHKVPQFHGKVSLNAWFWSTVFHTRDTDLTEKMDYFCASTVILHSIYLCCVRTVGLQHPAVVSAFRALLLLMLTVHVSYLSLIRFDYGYNLVANVAIGLVNVVWWLAWCLWNQRRLPHVRKCVVVVLLLQGLSLLELLDFPPLFWVLDAHAIWHISTIPVHVLFFSFLEDDSLYLLKESEDKFKLD

SEQ ID NO: 10292 - protein, 299 aa, Homo Sapiens
MAGLAARLVLLAGAAALASGSQGDREPVYRDCVLQCEEQNCSGGALNHFRSRQPIYMSLAGWTCRDDCKYECMWVTVGLYLQEGHKVPQFHGKWPFSRFLFFQEPASAVASFLNGLASLVMLCRYRTFVPASSPMYHTCVAFAWKMDYFCASTVILHSIYLCCVRTVGLQHPAVVSAFRALLLLMLTVHVSYLSLIRFDYGYNLVANVAIGLVNVVWWLAWCLWNQRRLPHVRKCVVVVLLLQGLSLLELLDFPPLFWVLDAHAIWHISTIPVHVLFFSFLEDDSLYLLKESEDKFKLD

SEQ ID NO: 10293 - protein, 148 aa, Homo Sapiens
MAGLAARLVLLAGAAALASGSQGDREPVYRDCVLQCEEQNCSGGALNHFRSRQPIYMSLAGWTCRDDCKYECMWVTVGLYLQEGHKVPQFHGKWPFSRFLFFQEPASAVASFLNGLASLVMLCRYRTFVPASSPMYHTCVAFAWLSGR

SEQ ID NO: 10294 - protein, 320 aa, Homo Sapiens
MAGLAARLVLLAGAAALASGSQGDREPVYRDCVLQCEEQNCSGGALNHFRSRQPIYMSLAGWTCRDDCKYECMWVTVGLYLQEGHKVPQFHGKWPFSRFLFFQEPASAVASFLNGLASLVMLCRYRTFVPASSPMYHTCVAFAWVSLNAWFWSTVFHTRDTDLTEKMDYFCASTVILHSIYLCCVRTVGLQHPAVVSAFRALLLLMLTVHVSYLSLIRFDYGYNLVANVAIGLVNVVWWLAWCLWNQRRLPHVRKCVVVVLLLQGLSLLELLDFPPLFWVLDAHAIWHISTIPVHVLFFSFLEDDSLYLLKESEDKFKLD

SEQ ID NO: 10295 - protein, 240 aa, Homo Sapiens
MKDVGPESCGQPTPCWPSPALESVLGKASQHLGLESGQPLYLLELNWGGTECALSSTGRTAACFLPISLLPTSPAAWLGPEALCLPGRPGTTGLRDTGGPLLLPPPTLLQDTTRWCWMLVLWPAKVHGDSPHGILRDQAAGIGKEFHPDHCPSQVPRRPHHTPFQGQGSSKPRARILCCCLVESLPPCVGSVGQAECIGDRAVSMGLGVCELRPRCAVWRRVLSGKRCGFKVCVCRGWVC

SEQ ID NO: 10296 - protein, 70 aa, Homo Sapiens
MWVTVGLYLQEGHKVPQFHGKWPFSRFLFFQEPASAVASFLNGLASLVMLCRYRTFVPASSPMYHTCVAF

SEQ ID NO: 10297 - protein, 44 aa, Homo Sapiens
SFLNGLASLVMLCRYRTFVPASSPMYHTCVAFAWMRKLRHSKAK

SEQ ID NO: 10298 - protein, 150 aa, Homo Sapiens
  misc_feature (1)..(1): Xaa can be any naturally occurring amino acid
XARLVLLAGAAALASGSQGDREPVYRDCVLQCEEQNCSGGALNHFRSRQPIYMSLAGWTCRDDCKYECMWVTVGLYLQEGHKVPQFHGKWPFSRFLFFQEPASAVASFLNGLASLVMLCRYRTFVPASSPMYHTCVAFAWMRKLRHSKAK

SEQ ID NO: 10299 - protein, 86 aa, Homo Sapiens
MCLHPSSTPPFHQPRKEAVICKQRVPLKKFKSIRETMKEKGLLGEFLRTHKYDPAWKYRFGDLSVTYEPMAYMDAAYFGEISIGTP

SEQ ID NO: 10300 - protein, 315 aa, Homo Sapiens
MKWMVVVLVCLQLLEAAVVKVPLKKFKSIRETMKEKGLLGEFLRTHKYDPAWKYRFGDLSVTYEPMAYMDAAYFGEISIGTPPQNFLVLFDTGSSNLWVPSVYCQSQACTSHSRFNPSESSTYSTNGQTFSLQYGSGSLTGFFGYDTLTVQSIQVPNQEFGLSENEPGTNFVYAQFDGIMGLAYPALSVDEATTAMQGMVQEGALTSPVFSVYLSNLVLESSGLGPLLTPSRAAPPSSTLQLPEKPLEQTWNILTPFTKTLPVSNLSRKVTSWAGVGIPVTCLPEAGSGGERRAECGLGVPTTRGPPRSQHHSGA

SEQ ID NO: 10301 - protein, 388 aa, Homo Sapiens
MKWMVVVLVCLQLLEAAVVKVPLKKFKSIRETMKEKGLLGEFLRTHKYDPAWKYRFGDLSVTYEPMAYMDAAYFGEISIGTPPQNFLVLFDTGSSNLWVPSVYCQSQACTSHSRFNPSESSTYSTNGQTFSLQYGSGSLTGFFGYDTLTVQSIQVPNQEFGLSENEPGTNFVYAQFDGIMGLAYPALSVDEATTAMQGMVQEGALTSPVFSVYLSNQQGSSGGAVVFGGVDSSLYTGQIYWAPVTQELYWQIGIEEFLIGGQASGWCSEGCQAIVDTGTSLLTVPQQYMSALLQATGAQEDEYGQFLVNCNSIQNLPSLTFIINGVEFPLPPSSYILSNNGYCTVGVEPTYLSSQNGQPLWILGDVFLRSYYSVYDLGNNRVGFATAA

SEQ ID NO: 10302 - protein, 140 aa, Homo Sapiens [sequence omitted]

SEQ ID NO: 10303 - protein, 221 aa, Homo Sapiens
MPVMRLFPCFLQLLAGLALPAVPPQQWALSAGNGSSEVEVVPFQEVWGRSYCRALERLVDVVSEYPSEVEHMFSPSCVSLLRCTGCCGDENLHCVPVETANVTMQLLKIRSGDRPSYVELTFSQHVRCECRHSPGRQSPDMPGDFRADAPSFLPPRRSLPMLFRMEWGCALTGSQSAVWPSSPVPEEIPRMHPGRNGKKQQRKPLREKMKPERCGDAVPRR

SEQ ID NO: 10304 - protein, 149 aa, Homo Sapiens
MPVMRLFPCFLQLLAGLALPAVPPQQWALSAGNGSSEVEVVPFQEVWGRSYCRALERLVDVVSEYPSEVEHMFSPSCVSLLRCTGCCGDENLHCVPVETANVTMQLLKIRSGDRPSYVELTFSQHVRCECRPLREKMKPERCGDAVPRR

SEQ ID NO: 10305 - protein, 170 aa, Homo Sapiens
MPVMRLFPCFLQLLAGLALPAVPPQQWALSAGNGSSEVEVVPFQEVWGRSYCRALERLVDVVSEYPSEVEHMFSPSCVSLLRCTGCCGDENLHCVPVETANVTMQLLKIRSGDRPSYVELTFSQHVRCECRPLREKMKPERRRPKGRGKRRREKQRPTDCHLCGDAVPRR

SEQ ID NO: 10306 - protein, 169 aa, Homo Sapiens
MPVMRLFPCFLQLLAGLALPAVPPQWALSAGNGSSEVEVVPFQEVWGRSYCRALERLVDVVSEYPSEVEHMFSPSCVSLLRCTGCCGDENLHCVPVETANVTMQLLKIRSGDRPSYVELTFSQHVRCECRPLREKMKPERRRPKGRGKRRREKQRPTDCHLCGDAVPRR

SEQ ID NO: 10307 - protein, 196 aa, Homo Sapiens
MSRRSMLLAWALPSLLRLGAAQETEDPACCSPIVPRNEWKALASECAQHLSLPLRYVVVSHTAGSSCNTPASCQQQARNVQHYHMKTLGWCDVGYNFLIGEDGLVYEGRGWNFTGAHSGHLWNPMSIGISFMGNYMDRVPTPQAIRAAQGLLACGVAQGALRSNYVLKGHRDVQRTLSPGNQLYHLIQNWPHYRSP

SEQ ID NO: 10308 - protein, 105 aa, Homo Sapiens
MAQGVLWILLGLLLWSDPGTASLPLLMDSVIQALAELEQKVPAAKTRHTASAWLMSAPNSGPHNRLYHFLLGAWSLNATELDPCPLSPELLGLTKEVARHDVREG

SEQ ID NO: 10309 - protein, 634 aa, Homo Sapiens
MAQGVLWILLGLLLWSDPGTASLPLLMDSVIQALAELEQKVPAAKTRHTASAWLMSAPNSGPHNRLYHFLLGAWSLNATELDPCPLSPELLGLTKEVARHDVREGKEYGVVLAPDGSTVAVEPLLAGLEAGLQGRRVINLPLDSMAAPWETGDTFPDVVAIAPDVRATSSPGLRDGSPDVTTADIGANTPDATKGCPDVQASLPDAKAKSPPTMVDSLLAVTLAGNLGLTFLRGSQTQSHPDLGTEGCWDQLSAPRTFTLLDPKASLLTMAFLNGALDGVILGDYLSRTPEPRPSLSHLLSQYYGAGVARDPGFRSNFRRQNGAALTSASILAQQVWGTLVLLQRLEPVHLQLQCMSQEQLAQVAANATKEFTEAFLGCPAIHPRCRWGAAPYRGRPKLLQLPLGFLYVHHTYVPAPPCTDFTRCAANMRSMQRYHQDTQGWGDIGYSFVVGSDGYVYEGRGWHWVGAHTLGHNSRGFGVAIVGNYTAALPTEAALRTVRDTLPSCAVRAGLLRPDYALLGHRQLVRTDCPGDALFDLLRTWPHFTAVSLRSLHYTARRPSVYTSSTRPLPPACNSCARTASARPPTSRRHVYSGNLGPAFAGHSAGNIPDPVTSAYAASAQPQTQPACPFPSS

SEQ ID NO: 10310 - protein, 576 aa, Homo Sapiens
MAQGVLWILLGLLLWSDPGTASLPLLMDSVIQALAELEQKVPAAKTRHTASAWLMSAPNSGPHNRLYHFLLGAWSLNATELDPCPLSPELLGLTKEVARHDVREGKEYGVVLAPDGSTVAVEPLLAGLEAGLQGRRVINLPLDSMAAPWETGDTFPDVVAIAPDVRATSSPGLRDGSPDVTTADIGANTPDATKGCPDVQASLPDAKAKSPPTMVDSLLAVTLAGNLGLTFLRGSQTQSHPDLGTEGCWDQLSAPRTFTLLDPKASLLTMAFLNGALDGVILGDYLSRTPEPRPSLSHLLSQYYGAGVARDPGFRSNFRRQNGAALTSASILAQQVWGTLVLLQRLEPVHLQLQCMSQEQLAQVAANATKEFTEAFLGCPAIHPRCRWGAAPYRGRPKLLQLPLGFLYVHHTYVPAPPCTDFTRCAANMRSMQRYHQDTQGWGDIGYSFVVGSDGYVYEGRGWHWVGAHTLGHNSRGFGVAIVGNYTAALPTEAALRTVRDTLPSCAVRAGLLRPDYALLGHRQLVRTDCPGDALFDLLRTWPHFTATVKPRPARSVSKRSRREPPPRTLPATDLQ

SEQ ID NO: 10311 - protein, 181 aa, Homo Sapiens
MGTRRRGRTFHCQPSTAEVLCRGQPEIPLGSWNPATMAQGVLWILLGLLLWSDPGTASLPLLMDSVIQALAELEQKVPAAKTRHTASAWLMSAPNSGPHNRLYHFLLGAWSLNATELDPCPLSPELLGLTKEVARHDVREGKEYGVVLAPDGSTVAVEPLLAGLEAGLQGRRVINLPLDSM

SEQ ID NO: 10312 - protein, 341 aa, Homo Sapiens
MGTLPWLLAFFILGLQAWDTPTIVSRKEWGARPLACRALLTLPVAYIITDQLPGMQCQQQSVCSQMLRGLQSHSVYTIGWCDVAYNFLVGDDGRVYEGVGWNIQGLHTQGYNNISLGIAFFGNKIGSSPSPAALSAAEGLISYAIQKGHLSPRYIQPLLLKEETCLDPQHPVMPRKVCPNIIKRSAWEARETHCPKMNLPAKYVIIIHTAGTSCTVSTDCQTVVRNIQSFHMDTRNFCDIGYHFLVGQDGGVYEGVGWHIQGSHTYGFNDIALGIAFIGYFVEKPPNAAALEAAQDLIQCAVVEGYLTPNYLLMGHSDVVNILSPGQALYNIISTWPHFKH

SEQ ID NO: 10313 - protein, 369 aa, Homo Sapiens
MLPWLLVFSALGIQAWGDSSWNKTQAKQVSEGLQYLFENISQLTEKDVSTTVSRKAWGAEAVGCSIQLTTPVNVLVIHHVPGLECHDQTVCSQRLRELQAHHVHNNSGCDVAYNFLVGDDGRVYEGVGWNIQGVHTQGYNNISLGFAFFGTKKGHSPSPAALSAMENLITYAVQKGHLSSSYVQPLLGKGENCLAPRQKTSLKKACPGVVPRSVWGARETHCPRMTLPAKYGIIIHTAGRTCNISDECRLLVRDIQSFYIDRLKSCDIGYNFLVGQDGAIYEGVGWNVQGSSTPGYDDIALGITFMGTFTGIPPNAAALEAAQDLIQCAMVKGYLTPNYLLVGHSDVARTLSPGQALYNIISTWPHFKH

SEQ ID NO: 10314 - protein, 373 aa, Homo Sapiens
MLPWLLVFSALGIQAWGDSSWNKTQAKQVSEGLQYLFENISQLTEKGLPTDVSTTVSRKAWGAEAVGCSIQLTTPVNVLVIHHVPGLECHDQTVCSQRLRELQAHHVHNNSGCDVAYNFLVGDDGRVYEGVGWNIQGVHTQGYNNISLGFAFFGTKKGHSPSPAALSAMENLITYAVQKGHLSSSYVQPLLGKGENCLAPRQKTSLKKACPGVVPRSVWGARETHCPRMTLPAKYGIIIHTAGRTCNISDECRLLVRDIQSFYIDRLKSCDIGYNFLVGQDGAIYEGVGWNVQGSSTPGYDDIALGITFMGTFTGIPPNAAALEAAQDLIQCAMVKGYLTPNYLLVGHSDVARTLSPGQALYNIISTWPHFKH

SEQ ID NO: 10315 - protein, 580 aa, Homo Sapiens
MDYPKMDYFLDVESAHRLLDVESAQRFFYSQGAQARRATLLLPPTLMAASSEDDIDRRPIRRVRSKSDTPYLAEARISFNLGAAEEVERLAAMRSDSLVPGTHTPPIRRRSKFANLGRIFKPWKWRKKKSEKFKHTSAALERKISMRQSREELIKRGVLKEIYDKDGELSISNEEDSLENGQSLSSSQLSLPALSEMEPVPMPRDPCSYEVLQPSDIMDGPDPGAPVKLPCLPVKLSPPLPPKKVMICMPVGGPDLSLVSYTAQKSGQQGVAQHHHTVLPSQIQHQLQYGSHGQHLPSTTGSLPMHPSGCRMIDELNKTLAMTMQRLESSEQRVPCSTSYHSSGLHSGDGVTKAGPMGLPEIRQVPTVVIECDDNKENVPHESDYEDSSCLYTREEEEEEEDEDDDSSLYTSSLAMKVCRKDSLAIKLSNRPSKRELEEKNILPRQTDEERLELRQQIGTKLTRRLSQRPTAEELEQRNILKPRNEQEEQEEKREIKRRLTRKLSQRPTVEELRERKILIRFSDYVEVADAQDYDRRADKPWTRLTAADKAAIRKELNEFKSTEMEVHELSRHLTRFHRP

SEQ ID NO: 10316 - protein, 484 aa, Homo Sapiens
MDYPKMDYFLDVESAHRLLDVESAQRFFYSQGAQARRATLLLPPTLMAASSEDDIDRRPIRRVRSKSDTPYLAEARISFNLGAAEEVERLAAMRSDSLVPGTHTPPIRRRSKFANLGRIFKPWKWRKKKSEKFKHTSAALERKISMRQSREELIKRGVLKEIYDKDGELSISNEEDSLENGQSLSSSQLSLPALSEMEPVPMPRDPCSYEVLQPSDIMDGPDPGAPVKLPCLPVKLSPPLPPKKVMICMPVGGPDLSLVSYTAQKSGQQGVAQHHHTVLPSQIQHQLQYGSHGQHLPSTTGSLPMHPSGCRMIDELNKTLAMTMQRLESSEQRVPCSTSYHSSGLHSGDGVTKAGPMGLPEIRQVPTVVIECDDNKENVPHESDYEDSSCLYTREEEEEEEDEDDDSSLYTSSLAMKVCRKDSLAIKLSNRPSKRELEEKNILPRQTDEERLELRQQIGTKLTRRLSQRPTAEELEQRNILKRK

SEQ ID NO: 10317 - protein, 169 aa, Homo Sapiens
MDYPKMDYFLDVESAHRLLDVESAQRFFYSQGAQARRATLLLPPTLMAASSEDDIDRRPIRRVRSKSDTPYLAEARISFNLGAGVSLFGDMDEARMGPAVPTLGRPLGLELCSLENHGLLKTAPTYTTSAHICSGPSTGGQFSTQGMSPVQGAKRRRVVWLPLEGEEFG

SEQ ID NO: 10318 - protein, 144 aa, Homo Sapiens
MYLQGPRKLMTQGGYDMVQKLFLDFFRRRLSQRPTAEELEQRNILKPRNEQEEQEEKREIKRRLTRKLSQRPTVEELRERKILIRFSDYVEVADAQDYDRRADKPWTRLTAADKAAIRKELNEFKSTEMEVHELSRHLTRFHRP

SEQ ID NO: 10319 - protein, 140 aa, Homo Sapiens
MYLQGPRKLMTQGGYDMVQKLFLDFFRRRLSQRPTAEELEQRNILKPRNEQEEQEEKREIKRRLTRKLSQRPTVEELRERKILIRFSDYVEVADAQDYDRRADKPWTRLTAADKVSRGECWRVGGRTVCWVSLGSPLGSV

SEQ ID NO: 10320 - protein, 230 aa, Homo Sapiens
NLGRIFKPWKWRKKKSEKFKHTSAALERKISMRQSREELIKRGVLKEIYDKDGELSISNEEDSLENGQSLSSSQLSLPALSEMEPVPMPRDPCSYEVLQPSDIMDGPVSEESPSASESGVLLSQDPSAKPVLLLPPKKPAAFPGDHEETPVKQLPLLKQPPALPPKPTTRIANHLTDWHQAHQVGQRHPLPPWQWAFSSPGSSKRIQSRPGAVAYACNPSTLGGRGRWIT

SEQ ID NO: 10321 - protein, 265 aa, Homo Sapiens
  misc_feature (1)..(1): Xaa can be any naturally occurring amino acid
XSPFTPFSPLLSFFLSPFFFLFPSLSHSLPTPSLPLPSPFPSPSPVREPLPLPSSPFRLSPSPSVSFSLSARRATLLLPPTLMAASSEDDIDRRPIRRVRSKSDTPYLAEARISFNLGAAEEVERLAAMRSDSLVPGTHTPPIRRRSKFANLGRIFKPWKWRKKKSEKFKHTSAALERKISMRQSREELIKRGVLKEIYDKDGELSISNEEDSLENGQSLSSSQLSLPALSEMEPVPMPRDPCSYEVLQPSDIMDGPVSEESPSA

SEQ ID NO: 10322 - protein, 124 aa, Homo Sapiens
MAAKVFESIGKFGLALAVAGGVVNSALYNVDAGHRAVIFDRFRGVQDIVVGEGTHFLIPWVQKPIIFDCRSRPRNVPVITGSKDLQNVNITLRILFRPVASQLPRIFTSIGEDYDERVLPSITT

SEQ ID NO: 10323 - protein, 201 aa, Homo Sapiens
MAAKVFESIGKFGLALAVAGGVVNSALYNVDAGHRAVIFDRFRGVQDIVVGEGTHFLIPWVQKPIIFDCRSRPRNVPVITGSKDLQNVNITLRILFRPVASQLPRIFTSIGEDYDERVLPSITTEILKSVVARFDAGELITQRELVSRQVSDDLTERAATFGLILDDVSLTHLTFGKEFTEAVEAKQVAQQEAERARFVVE

SEQ ID NO: 10324 - protein, 202 aa, Homo Sapiens
MAAKVFESIGKFGLALAVAGGVVNSALYNVDAGHRAVIFDRFRGVQDIVVGEGTHFLIPWVQKPIIFDCRSRPRNVPVITGSKDLQNVNITLRILFRPVASQLPRIFTSIGEDYDERVLPSITTEILKSVVARFDAGELITQRELVSRQVSDDLTERAATFGLILDDVSLTHLTFGKEFTEAVEAKQVAQQEAERARFVVEK

SEQ ID NO: 10325 - protein, 216 aa, Homo Sapiens
MAAKVFESIGKFGLALAVAGGVVNSALYNVDAGHRAVIFDRFRGVQDIVVGEGTHFLIPWVQKPIIFDCRSRPRNVPVITGSKDLQNVNITLRILFRPVASQLPRIFTSIGEDYDERVLPSITTEILKSVVARFDAGELITQRELVSRQVSDDLTERAATFGLILDDVSLTHLTFGKEFTEAVEAKQVAQQEAERARFVVEKAEQQKKAAIISAEG

SEQ ID NO: 10326 - protein, 246 aa, Homo Sapiens
MAAKVFESIGKFGLALAVAGGVVNSALYNVDAGHRAVIFDRFRGVQDIVVGEGTHFLIPWVQKPIIFDCRSRPRNVPVITGSKDLQNVNITLRILFRPVASQLPRIFTSIGEDYDERVLPSITTEILKSVVARFDAGELITQRELVSRQVSDDLTERAATFGLILDDVSLTHLTFGKEFTEAVEAKQVAQQEAERARFVVEKAEQQKKAAIISAEGDSKAAELIANSLATAGDGLIELRKLEAAED

SEQ ID NO: 10327 - protein, 272 aa, Homo Sapiens
MAAKVFESIGKFGLALAVAGGVVNSALYNVDAGHRAVIFDRFRGVQDIVVGEGTHFLIPWVQKPIIFDCRSRPRNVPVITGSKDLQNVNITLRILFRPVASQLPRIFTSIGEDYDERVLPSITTEILKSVVARFDAGELITQRELVSRQVSDDLTERAATFGLILDDVSLTHLTFGKEFTEAVEAKQVAQQEAERARFVVEKAEQQKKAAIISAEGDSKAAELIANSLATAGDGLIELRKLEAAEDIAYQLSRSRNITYLPAGQSVLLQLPQ

SEQ ID NO: 10328 - protein, 272 aa, Homo Sapiens; identical to SEQ ID NO: 10327

SEQ ID NO: 10329 - protein, 272 aa, Homo Sapiens; identical to SEQ ID NO: 10327

SEQ ID NO: 10330 - protein, 155 aa, Homo Sapiens
MAAKVFESIGKFGLALAVAGGVVNSALYNVDAGHRAVIFDRFRGVQDIVVGEGTHFLIPWVQKPIIFDCRSRPRNVPVITGSKDLQNVNITLRILFRPVASQLPRIFTSIGEDYDERVLPSITTEILKSVVARFDAGELITYLPAGQSVLLQLPQ

SEQ ID NO: 10331 - protein, 258 aa, Homo Sapiens
MIAISAVSSALLFSLLCEASTVVLLNSTDSSPPTNNFTDIEAALKAQLDSADIPKARRKRYISQNDMIAILDYHNQVRGKVFPPAANMEYMVWDENLAKSAEAWAATCIWDHGPSYLLRFLGQNLSVRTGRYRSILQLVKPWYDEVKDYAFPYPQDCNPRCPMRCFGPMCTHYTQMVWATSNRIGCAIHTCQNMNVWGSVWRRAVYLVCNYAPKGNWIGEAPYKVGVPCSSCPPSYGGSCTDNLCFPGVTSNYLYWFK

SEQ ID NO: 10332 - protein, 258 aa, Homo Sapiens; identical to SEQ ID NO: 10331

SEQ ID NO: 10333 - protein, 117 aa, Homo Sapiens
MRASSFLIVVVFLIAGTLVLEAAVTGVPVKGQDTVKGRVPFNGQDPVKGQVSVKGQDKVKAQEPVKGPVSTKPGSCPIILIRCAMLNPPNRCLKDTDCPGIKKCCEGSCGMACFVPQ

SEQ ID NO: 10334 - protein, 77 aa, Homo Sapiens [sequence omitted]

SEQ ID NO: 10335 - protein, 111 aa, Homo Sapiens
MESRMWPALLLSHLLPLWPLLLLPLPPPAQGSSSSPRTPPAPARPPCARGGPSAPRHVCVWERAPPPSRSPRVPRSRRQVLPGTAPPATPSGFEEGPPSSQYPWAIVWGPT

SEQ ID NO: 10336 - protein, 172 aa, Homo Sapiens
MESRMWPALLLSHLLPLWPLLLLPLPPPAQGSSSSPRTPPAPARPPCARGGPSAPRHVCVWERAPPPSRSPRVPRSRRQVLPGTAPPATPSGFEEGPPSSQYPWAIVWGPTVSREDGGDPNSANPGFLDYGFAAPHGLATPHPNSDSMRGDGDGLILGEAPATLRPFLFGGR

SEQ ID NO: 10337 - protein, 282 aa, Homo Sapiens
MESRMWPALLLSHLLPLWPLLLLPLPPPAQGSSSSPRTPPAPARPPCARGGPSAPRHVCVWERAPPPSRSPRVPRSRRQVLPGTAPPATPSGFEEGPPSSQYPWAIVWGPTVSREDGGDPNSANPGFLDYGFAAPHGLATPHPNSDSMRGDGDGLILGEAPATLRPFLFGGRGEGVDPQLYVTITISIIIVLVATGIIFKFCWDRSQKRRRPSGQQGALRQEESQQPLTDLSPAGVTVLGAFGDSPTPTPDHEEPRGGPRPGMPHPKGAPAFQLNRIPLVNL

SEQ ID NO: 10338 - protein, 282 aa, Homo Sapiens; identical to SEQ ID NO: 10337

SEQ ID NO: 10339 - protein, 276 aa, Homo Sapiens
MESRMWPALLLSHLLPLWPLLLLPLPPPAQGSSSSPRTPPAPARPPCARGGPSAPRHVCVWERAPPPSRSPRVPRSRRQVLPGTAPPATPSGFEEGPPSSQYPWAIVWGPTVSREDGGDPNSANPGFLDYGFAAPHGLATPHPNSDSMRGDGDGLILGEAPATLRPFLFGGRGEGVDPQLYVTITISIIIVLVATGIIFKFCWDRSQKRRRPSGQQGALRQEESQQPLTDLSPAGVTVLGAFGDSPTPTPDHEEPRGGPRPGMPHPKGAPAFQLNR

SEQ ID NO: 10340 - protein, 27 aa, Homo Sapiens
KNMELNVYGDDVEVDYRSYEGMVEMVS

SEQ ID NO: 10341 - protein, 395 aa, Homo Sapiens
MAVTDSLSRAATVLATVLLLSFGSVAASHIEDQAEQFFRSGHTNNWAVLVCTSRFWFNYRHVANTLSVYRSVKRLGIPDSHIVLMLADDMACNPRNPKPATVFSHKNMELNVYGDDVEVDYRSYEVTVENFLRVLTGRIPPSTPRSKRLLSDDRSNILIYMTGHGGNGFLKFQDSEEITNIELADAFEQMWQKRRYNELLFIIDTCQGASMYERFYSPNIMALASSQVGEDSLSHQPDPAIGVHLMDRYTFYVLEFLEEINPASQTNMNDLFQVCPKSLCVSTPGHRTDLFQRDPKNVLITDFFGSVRKVEITTETIKLQQDSEIMESSYKEDQMDEKLMEPLKYAEQLPVAQIIHQKPKLKDWHPPGGFILGLWALIIMVFFKTYGIKHMKFIF

SEQ ID NO: 10342 - protein, 332 aa, Homo Sapiens
MAVTDSLSRAATVLATVLLLSFGSVAASHIEDQAEQFFRSGHTNNWAVLVCTSRFWFNYRHVANTLSVYRSVKRLGIPDSHIVLMLADDMACNPRNPKPATVFSHKNMELNVYGDDVEVDYRSYEVTVENFLRVLTGRIPPSTPRSKRLLSDDRSNILIYMTGHGGNGFLKFQDSEEITNIELADAFEQMWQKRRYNELLFIIDTCQGASMYERFYSPNIMALASSQVGEDSLSHQPDPAIGVHLMDRYTFYVLEFLEEINPASQTNMNDLFQVCPKSLCVSTPGHRTDLFQRDPKNVLITDFFGSVRKVEITTETIKLQQDSEIMESRYSS

SEQ ID NO: 10343 - protein, 301 aa, Homo Sapiens
MAVTDSLSRAATVLATVLLLSFGSVAASHIEVTVENFLRVLTGRIPPSTPRSKRLLSDDRSNILIYMTGHGGNGFLKFQDSEEITNIELADAFEQMWQKRRYNELLFIIDTCQGASMYERFYSPNIMALASSQVGEDSLSHQPDPAIGVHLMDRYTFYVLEFLEEINPASQTNMNDLFQVCPKSLCVSTPGHRTDLFQRDPKNVLITDFFGSVRKVEITTETIKLQQDSEIMESSYKEDQMDEKLMEPLKYAEQLPVAQIIHQKPKLKDWHPPGGFILGLWALIIMVFFKTYGIKHMKFIF

SEQ ID NO: 10344 - protein, 101 aa, Homo Sapiens
MEAMWLLCVALAVLAWGFLWVWDSSERMKSREQGGRLGAESRTLLVIAHPDDEAMFFAPTVLGLARLRHWVYLLCFSAGISQMTQACSGTQSTWPESSFST

SEQ ID NO: 10345 - protein, 150 aa, Homo Sapiens
MEAMWLLCVALAVLAWGFLWVWDSSERMKSREQGGRLGAESRTLLVIAHPDDEAMFFAPTVLGLARLRHWVYLLCFSAGNYYNQGETRKKELLQSCDVLGIPLSSVMIIDNRDFPDDPGMQWDTEHVARVLLQHIEVNGINLKDRANSRL

SEQ ID NO: 10346 - protein, 188 aa, Homo Sapiens
MEAMWLLCVALAVLAWGFLWVWDSSERMKSREQGGRLGAESRTLLVIAHPDDEAMFFAPTVLGLARLRHWVYLLCFSAGNYYNQGETRKKELLQSCDVLGIPLSSVMIIDNRDFPDDPGMQWDTEHVARVLLQHIEVNGINLVVTFDAGGVSGHSNHIALYAAVRALHSEGKLPKESCPQPSRGSGWG

SEQ ID NO: 10347 - protein, 252 aa, Homo Sapiens
MEAMWLLCVALAVLAWGFLWVWDSSERMKSREQGGRLGAESRTLLVIAHPDDEAMFFAPTVLGLARLRHWVYLLCFSAGNYYNQGETRKKELLQSCDVLGIPLSSVMIIDNRDFPDDPGMQWDTEHVARVLLQHIEVNGINLVVTFDAGGVSGHSNHIALYAAVRALHSEGKLPKGCSVLTLQSVNVLRKYISLLDLPLSLLHTQDVLFVLNSKEVAQAKKAMSCHRSQLLWFRRLYIIFSRYMRINSLSFL

SEQ ID NO: 10348 - protein, 244 aa, Homo Sapiens
MEAMWLLCVALAVLAWGFLWVWDSSERMKSREQGGRLGAESRTLLVIAHPDDEAMFFAPTVLGLARLRHWVYLLCFSAGNYYNQGETRKKELLQSCDVLGIPLSSVMIIDNRDFPDDPGMQWDTEHVARVLLQHIEVNGINLVVTFDAGGVSGHSNHIALYAAVRVLCAHASVCECAAQVHLPSGSALVSASYAGCPLRAQQQRSGTGQESHVLPPQPAPLVPPPLHYLLPVHENQLTELPLKP

SEQ ID NO: 10349 - protein, 145 aa, Homo Sapiens
MEAMWLLCVALAVLAWGFLWVWDSSERMKSREQGGRLGAESRTLLVIAHPDDEAMFFAPTVLGLARLRHWVYLLCFSAGNYYNQGETRKKELLQSCDVLGIPLSSVMIIDNRLSYLRLMCLSEAQGPQQHTPVSQSSDYSSLGMG

SEQ ID NO: 10350 - protein, 102 aa, Homo Sapiens
VVTFDAGGVSGHSNHIALYAAVRVLCAHASVCECAAQVHLPSGSALVSASYAGCPLRAQQQRSGTGQESHVLPPQPAPLVPPPLHYLLPVHENQLTELPLKP

SEQ ID NO: 10351 - protein, 92 aa, Homo Sapiens
  misc_feature (1)..(1): Xaa can be any naturally occurring amino acid
XCVALAVLAWGFLWVWDSSERMKSREQGGRLGAESRTLLVIAHPDDEAMFFAPTVLGLARLRHWVYLLCFSAVFRRELSEYTEGLTSEPLTA

SEQ ID NO: 10352 - protein, 580 aa, Homo Sapiens
LALLVLLLLGPGGWCLAEPPRDSLREELVITPLPSGDVAATFQFRTRWDSELQREGVSHYRLFPKALGQLISKYSLRELHLSFTQGFWRTRYWGPPFLQAPSGAELWVWFQDTVTEREGSPTPSWDCPDCGARGGVGSRRVIPISGMWIPRGQSPRPTPDRPLSPSDTDHYFLRYAVLPREVVCTENLTPWKKLLPCSSKAGLSVLLKADRLFHTSYHSQAVHIRPVCRNARCTSISWELRQTLSVVFDAFITGQGKKDWSLFRMFSRTLTEPCPLASESRVYVDITTYNQDNETLEVHPPPTTTYQDVILGTRKTYAIYDLLDTAMINNSRNLNIQLKWKRPPENEAPPVPFLHAQRYVSGYGLQKGELSTLLYNTHPYRAFPVLLLDTVPWYLRLYVHTLTITSKGKENKPSYIHYQPAQDRLQPHLLEMLIQLPANSVTKVSIQFERALLKWTEYTPDPNHGFYVSPSVLSALVPSMVAAKPVDWEESPLFNSLFPVSDGSNYFVRLYTEPLLVNLPTPDFSMPYNVICLTCTVVAVCYGSFYNLLTRTFHIEEPRTGGLAKRLANLIRRARGVPPL

SEQ ID NO: 10353 - protein, 329 aa, Homo Sapiens
LRYAVLPREVVCTENLTPWKKLLPCSSKAGLSVLLKADRLFHTSYHSQAVHIRPVCRNARCTSISWELRQTLSVVFDAFITGQGKKDWSLFRMFSRTLTEPCPLASESRVYVDITTYNQDNETLEVHPPPTTTYQDVILGTRKTYAIYDLLDTAMINNSRNLNIQLKWKRPPENEAPPVPFLHAQRYVSGYGLQKGELSTLLYNTHPYRAFPVLLLDTVPWYLRLYVHTLTITSKGKENKPSYIHYQPAQDRLQPHLLEMLIQLPANSVTKVSIQFERALLKWTEYTPDPNHGFYVSPSVLSALVPSMVAAKPVDWEESPLFNSLLPWT

SEQ ID NO: 10354 - protein, 476 aa, Homo Sapiens
MAAAMPLALLVLLLLGPGGWCLAEPPRDSLREELVITPLPSGDVAATFQFRTRWDSELQREGDTDHYFLRYAVLPREVVCTENLTPWKKLLPCSSKAGLSVLLKADRLFHTSYHSQAVHIRPVCRNARCTSISWELRQTLSVVFDAFITGQGKKDWSLFRMFSRTLTEPCPLASESRVYVDITTYNQDNETLEVHPPPTTTYQDVILGTRKTYAIYDLLDTAMINNSRNLNIQLKWKRPPENEAPPVPFLHAQRYVSGYGLQKGELSTLLYNTHPYRAFPVLLLDTVPWYLRLYVHTLTITSKGKENKPSYIHYQPAQDRLQPHLLEMLIQLPANSVTKVSIQFERALLKWTEYTPDPNHGFYVSPSVLSALVPSMVAAKPVDWEESPLFNSLFPVSDGSNYFVRLYTEPLLVNLPTPDFSMPYNVICLTCTVVAVCYGSFYNLLTRTFHIEEPRTGGLAKRLANLIRRARGVPPL

SEQ ID NO: 10355 - protein, 275 aa, Homo Sapiens
MAAAMPLALLVLLLLGPGGWCLAEPPRDSLREELVITPLPSGDVAATFQFRTRWDSELQREGDTDHYFLRYAVLPREVVCTENLTPWKKLLPCSSKAGLSVLLKADRLFHTSYHSQAVHIRPVCRNARCTSISWELRQTLSVVFDAFITGQGKKDWSLFRMFSRTLTEPCPLASESRVYVDITTYNQDNETLEVHPPPTTTYQDVILGTRKTYAIYDLLDTAMINNSRNLNIQLKWKRPPENGYIHYQPAQDRLQPHLLEMLIQLPANSVTKVSI

SEQ ID NO: 10356 - protein, 101 aa, Homo Sapiens
MAAAMPLALLVLLLLGPGGWCLAEPPRDSLREELVITPLPSGDVAATFQFRTRWDSELQREGDTDHYFLRYAVLPREVVCTENLTPWKKLLPCSSKASLCC

SEQ ID NO: 10357 - protein, 384 aa, Homo Sapiens
MAAAMPLALLVLLLLGPGGWCLAEPPRDSLREELVITPLPSGDVAATFQFRTRWDSELQREGDWSLFRMFSRTLTEPCPLASESRVYVDITTYNQDNETLEVHPPPTTTYQDVILGTRKTYAIYDLLDTAMINNSRNLNIQLKWKRPPENEAPPVPFLHAQRYVSGYGLQKGELSTLLYNTHPYRAFPVLLLDTVPWYLRLYVHTLTITSKGKENKPSYIHYQPAQDRLQPHLLEMLIQLPANSVTKVSIQFERALLKWTEYTPDPNHGFYVSPSVLSALVPSMVAAKPVDWEESPLFNSLFPVSDGSNYFVRLYTEPLLVNLPTPDFSMPYNVICLTCTVVAVCYGSFYNLLTRTFHIEEPRTGGLAKRLANLIRRARGVPPL

SEQ ID NO: 10358 - protein, 441 aa, Homo Sapiens
MAAAMPLALLVLLLLGPGGWCLAEPPRDSLREELVITPLPSGDVAATFQFRTRWDSELQREGGLSVLLKADRLFHTSYHSQAVHIRPVCRNARCTSISWELRQTLSVVFDAFITGQGKKDWSLFRMFSRTLTEPCPLASESRVYVDITTYNQDNETLEVHPPPTTTYQDVILGTRKTYAIYDLLDTAMINNSRNLNIQLKWKRPPENEAPPVPFLHAQRYVSGYGLQKGELSTLLYNTHPYRAFPVLLLDTVPWYLRLYVHTLTITSKGKENKPSYIHYQPAQDRLQPHLLEMLIQLPANSVTKVSIQFERALLKWTEYTPDPNHGFYVSPSVLSALVPSMVAAKPVDWEESPLFNSLFPVSDGSNYFVRLYTEPLLVNLPTPDFSMPYNVICLTCTVVAVCYGSFYNLLTRTFHIEEPRTGGLAKRLANLIRRARGVPPL

SEQ ID NO: 10359 - protein, 96 aa, Homo Sapiens
MAAAMPLALLVLLLLGPGGWCLAEPPRDSLREELVITPLPSGDVAATFQFRTRWDSELQREGGRPLCAAEGRSLVPHQLPLPGSAYPPCLQKCTLY

SEQ ID NO: 10360 - protein, 522 aa, Homo Sapiens
MAAAMPLALLVLLLLGPGGWCLAEPPRDSLREELVITPLPSGDVAATFQFRTRWDSELQREGVSHYRLFPKALGQLISKYSLRELHLSFTQGFWRTRYWGPPFLQAPSDTDHYFLRYAVLPREVVCTENLTPWKKLLPCSSKAGLSVLLKADRLFHTSYHSQAVHIRPVCRNARCTSISWELRQTLSVVFDAFITGQGKKDWSLFRMFSRTLTEPCPLASESRVYVDITTYNQDNETLEVHPPPTTTYQDVILGTRKTYAIYDLLDTAMINNSRNLNIQLKWKRPPENEAPPVPFLHAQRYVSGYGLQKGELSTLLYNTHPYRAFPVLLLDTVPWYLRLYVHTLTITSKGKENKPSYIHYQPAQDRLQPHLLEMLIQLPANSVTKVSIQFERALLKWTEYTPDPNHGFYVSPSVLSALVPSMVAAKPVDWEESPLFNSLFPVSDGSNYFVRLYTEPLLVNLPTPDFSMPYNVICLTCTVVAVCYGSFYNLLTRTFHIEEPRTGGLAKRLANLIRRARGVPPL

SEQ ID NO: 10361 - protein, 314 aa, Homo Sapiens
MAAAMPLALLVLLLLGPGGWCLAEPPRDSLREELVITPLPSGDVAATFQFRTRWDSELQREGVSHYRLFPKALGQLISKYSLRELHLSFTQGFWRTRYWGPPFLQAPSGAELVDKSWKELSNVLSGIFCASLNFIDSTNTVTPTASFKPLGLANDTDHYFLRYAVLPREVVCTENLTPWKKLLPCSSKAGLSVLLKADRLFHTSYHSQAVHIRPVCRNARCTSISWELRQTLSVVFDAFITGQGKKDWSLFRMFSRTLTEPCPLASESRVYVDITTYNQDNETLEVHPPPTTTYQDVILGTRKTYAIYDLLDTA

SEQ ID NO: 10362 - protein, 240 aa, Homo Sapiens
MAAAMPLALLVLLLLGPGGWCLAEPPRDSLREELVITPLPSGDVAATFQFRTRWDSELQREGVSHYRLFPKALGQLISKYSLRELHLSFTQGFWRTRYWGPPFLQAPSGAELWVWFQDTVTDVDKSWKELSNVLSGIFCASLNFIDSTNTVTPTASFKPLGLANDTDHYFLRYAVLPREVVCTENLTPWKKLLPCSSKAGLSVLLKADRLFHTSYHSQAVHIRPVCRHLLGAEADPVSCI

SEQ ID NO: 10363 - protein, 578 aa, Homo Sapiens
MAAAMPLALLVLLLLGPGGWCLAEPPRDSLREELVITPLPSGDVAATFQFRTRWDSELQREGVSHYRLFPKALGQLISKYSLRELHLSFTQGFWRTRYWGPPFLQAPSGAELWVWFQDTVTDVDKSWKELSNVLSGIFCASLNFIDSTNTVTPTASFKPLGLANDTDHYFLRYAVLPREVVCTENLTPWKKLLPCSSKAGLSVLLKADRLFHTSYHSQAVHIRPVCRNARCTSISWELRQTLSVVFDAFITGQGKKDWSLFRMFSRTLTEPCPLASESRVYVDITTYNQDNETLEVHPPPTTTYQDVILGTRKTYAIYDLLDTAMINNSRNLNIQLKWKRPPENEAPPVPFLHAQRYVSGYGLQKGELSTLLYNTHPYRAFPVLLLDTVPWYLRLYVHTLTITSKGKENKPSYIHYQPAQDRLQPHLLEMLIQLPANSVTKVSIQFERALLKWTEYTPDPNHGFYVSPSVLSALVPSMVAAKPVDWEESPLFNSLFPVSDGSNYFVRLYTEPLLVNLPTPDFSMPYNVICLTCTVVAVCYGSFYNLLTRTFHIEEPRTGGLAKRLANLIRRARGVPPL

SEQ ID NO: 10364 - protein, 511 aa, Homo Sapiens
MAAAMPLALLVLLLLGPGGWCLAEPPRDSLREELVITPLPSGDVAATFQFRTRWDSELQREGVSHYRLFPKALGQLISKYSLRELHLSFTQGFWRTRYWGPPFLQAPSGAELWVWFQDTVTDVDKSWKELSNVLSGIFCASLNFIDSTNTVTPTASFKPLGLANDTDHYFLRYAVLPREVVCTENLTPWKKLLPCSSKAGLSVLLKADRLFHTSYHSQAVHIRPVCRNARCTSISWELRQTLSVVFDAFITGQGKKDWSLFRMFSRTLTEPCPLASESRVYVDITTYNQDNETLEVHPPPTTTYQDVILGTRKTYAIYDLLDTAMINNSRNLNIQLKWKRPPENGYIHYQPAQDRLQPHLLEMLIQLPANSVTKVSIQFERALLKWTEYTPDPNHGFYVSPSVLSALVPSMVAAKPVDWEESPLFNSLFPVSDGSNYFVRLYTEPLLVNLPTPDFSMPYNVICLTCTVVAVCYGSFYNLLTRTFHIEEPRTGGLAKRLANLIRRARGVPPL

SEQ ID NO: 10365 - protein, 331 aa, Homo Sapiens
MAAAMPLALLVLLLLGPGGWCLAEPPRDSLREELVITPLPSGDVAATFQFRTRWDSELQREGVSHYRLFPKALGQLISKYSLRELHLSFTQGFWRTRYWGPPFLQAPSGAELWVWFQDTVTDVDKSWKELSNVLSGIFCASLNFIDSTNTVTPTASFKPLGLANDTDHYFLRYAVLPREVVCTENLTPWKKLLPCSSKAGLSVLLKADRLFHTSYHSQAVHIRPVCRNARCTSISWELRQTLSVVFDAFITGQGKKALRSVSQTGPSSGCSPEPSRSPAPWLQRAESMWTSPPTTSPAFVSPGQRDIRGAPTPDHYISGRHPRHSEDLCHL

SEQ ID NO: 10366 - protein, 300 aa, Homo Sapiens
MAAAMPLALLVLLLLGPGGWCLAEPPRDSLREELVITPLPSGDVAATFQFRTRWDSELQREGVSHYRLFPKALGQLISKYSLRELHLSFTQGFWRTRYWGPPFLQAPSGAELWVWFQDTVTDVDKSWKELSNVLSGIFCASLNFIDSTNTVTPTASFKPLGLANDTDHYFLRYAVLPREVVCTENLTPWKKLLPCSSKAGLSVLLKADRLFHTSYHSQAVHIRPVCRNARCTSISWELRQTLSVVFDAFITGQGKKDWSLFRMFSRTLTEPCPLASESRVYVDITTYNQPCLCVPRTTRH

SEQ ID NO: 10367 - protein, 505 aa, Homo Sapiens
MAAAMPLALLVLLLLGPGGWCLAEPPRDSLREELVITPLPSGDVAATFQFRTRWDSELQREGVSHYRLFPKALGQLISKYSLRELHLSFTQGFWRTRYWGPPFLQAPSGAELWVWFQDTVTDVDKSWKELSNVLSGIFCASLNFIDSTNTVTPTASFKPLGLANDTDHYFLRYAVLPREVVCTENLTPWKKLLPCSSKAGLSVLLKADRLFHTSYHSQAVHIRPVCRNARCTSISWELRQTLSVVFDAFITGQGKKDWSLFRMFSRTLTEPCPLASESRVYVDITTYNQDNETLEVHPPPTTTYQDVILGTRKTYAIYDLLDTAMINNSRNLNIQLKWKRPPENEAPPVPFLHAQRYVSGYGLQKGELSTLLYNTHPYRAFPVLLLDTVPWYLRLYVHTLTITSKGKENKPSYIHYQPAQDRLQPHLLEMLIQLPANSVTKVSIQFERALLKWTEYTPDPNHGFYVSPSVLSALVPSMVAAKPVDWEESPLFNSLEPVTCAALRC

SEQ ID NO: 10368 - protein, 499 aa, Homo Sapiens
MAAAMPLALLVLLLLGPGGWCLAEPPRDSLREELVITPLPSGDVAATFQFRTRWDSELQREGVSHYRLFPKALGQLISKYSLRELHLSFTQGFWRTRYWGPPFLQAPSGAELWVWFQDTVTDVDKSWKELSNVLSGIFCASLNFIDSTNTVTPTASFKPLGLANDTDHYFLRYAVLPREVVCTENLTPWKKLLPCSSKAGLSVLLKADRLFHTSYHSQAVHIRPVCRNARCTSISWELRQTLSVVFDAFITGQGKKDWSLFRMFSRTLTEPCPLASESRVYVDITTYNQDNETLEVHPPPTTTYQDVILGTRKTYAIYDLLDTAMINNSRNLNIQLKWKRPPENEAPPVPFLHAQRYVSGYGLQKGELSTLLYNTHPYRAFPVLLLDTVPWYLRLYVHTLTITSKGKENKPSYIHYQPAQDRLQPHLLEMLIQLPANSVTKVSIQFERALLKWTEYTPDPNHGFYVSPSVLSALVPSMVAAKPVDWEESPLFNSLLPWT

SEQ ID NO: 10369 - protein, 499 aa, Homo Sapiens; identical to SEQ ID NO: 10368

SEQ ID NO: 10370 - protein, 300 aa, Homo Sapiens; identical to SEQ ID NO: 10366

SEQ ID NO: 10371 - protein, 429 aa, Homo Sapiens
MAAAMPLALLVLLLLGPGGWCLAEPPRDSLREELVITPLPSGDVAATFQFRTRWDSELQREGVSHYRLFPKALGQLISKYSLRELHLSFTQGFWRTRYWGPPFLQAPSGAELWVWFQDTVTDVDKSWKELSNVLSGIFCASLNFIDSTNTVTPTASFKPLGLANDTDHYFLRYAVLPREVVCTENLTPWKKLLPCSSKAGLSVLLKADRLFHTSYHSQAVHIRPVCRNARCTSISWELRQTLSVVFDAFITGQGKKDWSLFRMFSRTLTEPCPLASESRVYVDITTYNQDNETLEVHPPPTTTYQDVILGTRKTYAIYDLLDTAMINNSRNLNIQLKWKRPPENEAPPVPFLHAQRYVSGYGLQKGELSTLLYNTHPYRAFPVLLLDTVPWYLRLLHPLPACPGPAATPPPGDADSAAGQLSHQGFHPV

SEQ ID NO: 10372 - protein, 432 aa, Homo Sapiens
MAAAMPLALLVLLLLGPGGWCLAEPPRDSLREELVITPLPSGDVAATFQFRTRWDSELQREGVSHYRLFPKALGQLISKYSLRELHLSFTQGFWRTRYWGPPFLQAPSGAELWVWFQDTVTDVDKSWKELSNVLSGIFCASLNFIDSTNTVTPTASFKPLGLANDTDHYFLRYAVLPREVVCTENLTPWKKLLPCSSKAGLSVLLKADRLFHTSYHSQAVHIRPVCRNARCTSISWELRQTLSVVFDAFITGQGKKDWSLFRMFSRTLTEPCPLASESRVYVDITTYNQDNETLEVHPPPTTTYQDVILGTRKTYAIYDLLDTAMINNSRNLNIQLKWKRPPENGYIHYQPAQDRLQPHLLEMLIQLPANSVTKVSIQFERALLKWTEYTPDPNHGFYVSPSVLSALVPSMVAAKPVDWEESPLFNSLLPWT

SEQ ID NO: 10373 - protein, 495 aa, Homo Sapiens
MAAAMPLALLVLLLLGPGGWCLAEPPRDSLREELVITPLPSGDVAATFQFRTRWDSELQREGVSHYRLFPKALGQLISKYSLRELHLSFTQGFWRTRYWGPPFLQAPSGAELWVWFQDTVTDVDKSWKELSNVLSGIFCASLNFIDSTNTVTPTASFKPLGLANDTDHYFLRYAVLPREVVCTENLTPWKKLLPCSSKAGLSVLLKADRLFHTSYHSQAVHIRPVCRNARCTSISWELRQTLSVVFDAFITGQGKKDWSLFRMFSRTLTEPCPLASESRVYVDITTYNQDNETLEVHPPPTTTYQDVILGTRKTYAIYDLLDTAMINNSRNLNIQLKWKRPPENEAPPVPFLHAQRYVSGYGLQKGELSTLLYNTHPYRAFPVLLLDTVPWYLRLYVHTLTITSKGKENKPSYIHYQPAQDRLQPHLLEMLIQLPANSVTKVSIQFERALLKWTEYTPDPNHGFYVSPSVLSALVPSMVAAKPVDWEESPLFNSL

SEQ ID NO: 10374 - protein, 232 aa, Homo Sapiens
MAAAMPLALLVLLLLGPGGWCLAEPPRDSLREELVITPLPSGDVAATFQFRTRWDSELQREGVSHYRLFPKALGQLISKYSLRELHLSFTQGFWRTRYWGPPFLQAPSGAELWVWFQDTVTDVDKSWKELSNVLSGIFCASLNFIDSTNTVTPTASFKPLGLANDTDHYFLRYAVLPREVVCTENLTPWKKLLPCSSKAGLSVLLKADRLFHTSYHSQAVHIRPVCRVSHGE

SEQ ID NO: 10375 - protein, 203 aa, Homo Sapiens
MAAAMPLALLVLLLLGPGGWCLAEPPRDSLREELVITPLPSGDVAATFQFRTRWDSELQREGVSHYRLFPKALGQLISKYSLRELHLSFTQGFWRTRYWGPPFLQAPSGAELWVWFQDTVTDVDKSWKELSNVLSGIFCASLNFIDSTNTVTPTASFKPLGLANDTDHYFLRYAVLPREVVCTENLTPWKKLLPCSSKASLCC

SEQ ID NO: 10376 - protein, 242 aa, Homo Sapiens
MAAAMPLALLVLLLLGPGGWCLAEPPRDSLREELVITPLPSGDVAATFQFRTRWDSELQREGVSHYRLFPKALGQLISKYSLRELHLSFTQGFWRTRYWGPPFLQAPSGAELWVWFQDTVTDVDKSWKELSNVLSGIFCASLNFIDSTNTVTPTASFKPLGLANDTDHYFLRYAVLPREVVCTENLTPWKKLLPCSSKGFSYLFPSPPGRPLCAAEGRSLVPHQLPLPGSAYPPCLQKCTLY

SEQ ID NO: 10377 - protein, 355 aa, Homo Sapiens [sequence omitted]

SEQ ID NO: 10378 - protein, 198 aa, Homo Sapiens
MAAAMPLALLVLLLLGPGGWCLAEPPRDSLREELVITPLPSGDVAATFQFRTRWDSELQREGVSHYRLFPKALGQLISKYSLRELHLSFTQGFWRTRYWGPPFLQAPSGAELWVWFQDTVTDVDKSWKELSNVLSGIFCASLNFIDSTNTVTPTASFKPLGLANGRPLCAAEGRSLVPHQLPLPGSAYPPCLQKCTLY

SEQ ID NO: 10379 - protein, 140 aa, Homo Sapiens
MAAAMPLALLVLLLLGPGGWCLAEPPRDSLREELVITPLPSGDVAATFQFRTRWDSELQREGVSHYRLFPKALGQLISKYSLRELHLSFTQGFWRTRYWGPPFLQAPSGAELWVWFQDTVTEFSSQLWTLKEGAEVAPGQ

SEQ ID NO: 10380 - protein, 140 aa, Homo Sapiens; identical to SEQ ID NO: 10379

SEQ ID NO: 10381 - protein, 140 aa, Homo Sapiens; identical to SEQ ID NO: 10379

SEQ ID NO: 10382 - protein, 140 aa, Homo Sapiens; identical to SEQ ID NO: 10379

SEQ ID NO: 10383 - protein, 123 aa, Homo Sapiens
MAAAMPLALLVLLLLGPGGWCLAEPPRDSLREELVITPLPSGDVAATFQFRTRWDSELQREGVSHYRLFPKALGQLISKYSLRELHLSFTQGFWRTRYWGPPFLQAPSGAELWVWFQDTVTEH

SEQ ID NO: 10384 - protein, 123 aa, Homo Sapiens; identical to SEQ ID NO: 10383

SEQ ID NO: 10385 - protein, 123 aa, Homo Sapiens; identical to SEQ ID NO: 10383

SEQ ID NO: 10386 - protein, 183 aa, Homo Sapiens
MAAAMPLALLVLLLLGPGGWCLAEPPRDSLREELVITPLPSGDVAATFQFRTRWDSELQREGVSHYRLFPKALGQLISKYSLRELHLSFTQGFWRTRYWGPPFLQAPSGAELWVWFQDTVTELVPLPDVLPNPHGALPPGFREPSLCGHHHLQPGQRDIRGAPTPDHYISGRHPRHSEDLCHL

SEQ ID NO: 10387 - protein, 316 aa, Homo Sapiens
MAAAMPLALLVLLLLGPGGWCLAEPPRDSLREELVITPLPSGDVAATFQFRTRWDSELQREGVSHYRLFPKALGQLISKYSLRELHLSFTQGFWRTRYWGPPFLQAPSGAELWVWFQDTVTEPLSPSDTDHYFLRYAVLPREVVCTENLTPWKKLLPCSSKAGLSVLLKADRLFHTSYHSQAVHIRPVCRNARCTSISWELRQTLSVVFDAFITGQGKKDWSLFRMFSRTLTEPCPLASESRVYVDITTYNQDNETLEVHPPPTTTYQDVILGTRKTYAIYDLLDTAMINNSRNLNIQLKWKRPPENEAPPVPFLH

SEQ ID NO: 10388 - protein, 128 aa, Homo Sapiens
MAAAMPLALLVLLLLGPGGWCLAEPPRDSLREELVITPLPSGDVAATFQFRTRWDSELQREGVSHYRLFPKALGQLISKYSLRELHLSFTQGFWRTRYWGPPFLQAPSGAELWVWFQDTVTEQASLCC

SEQ ID NO: 10389 - protein, 116 aa, Homo Sapiens
MAAAMPLALLVLLLLGPGGWCLAEPPRDSLREELVITPLPSGDVAATFQFRTRWDSELQREGVSHYRLFPKALGQLISKYSLRELHLSFTQGFWRTRYWGPPFLQAPSGLAASCGL

SEQ ID NO: 10390 - protein, 393 aa, Homo Sapiens
MAAAMPLALLVLLLLGPGGWCLAEPPRDSLREELVITPLPSGDVAATFQFRTRWDSELQREGVSHYRLFPKALGQLISKYSLRELHLSFTQGFWRTRYWGPPFLQAPSVWINLGRSSVMSSQGSSAPLSTSSTPPTQSLPLPPSNPWVWPMAGLSVLLKADRLFHTSYHSQAVHIRPVCRNARCTSISWELRQTLSVVFDAFITGQGKKDWSLFRMFSRTLTEPCPLASESRVYVDITTYNQDNETLEVHPPPTTTYQDVILGTRKTYAIYDLLDTAMINNSRNLNIQLKWKRPPENEAPPVPFLHAQRYVSGYGLQKGELSTLLYNTHPYRAFPVLLLDTVPWYLRLYVHTLTITSKGKENKPSYIHYQPAQDRLQPHLLEMLIQLPANSVT

SEQ ID NO: 10391 - protein, 191 aa, Homo Sapiens
MAAAMPLALLVLLLLGPGGWCLAEPPRDSLREELVITPLPSGDVAATFQFRTRWDSELQREGVSHYRLFPKALGQLISKYSLRELHLSFTQGFWRTRYWGPPFLQAPSVWINLGRSSVMSSQGSSAPLSTSSTPPTQSLPLPPSNPWVWPMTLTTTFCAMLCCRGRWSAPKTSPPGRSSCPVVPRQASLCC

SEQ ID NO: 10392 - protein, 318 aa, Homo Sapiens
MAAAMPLALLVLLLLGPGGWCLAEPPRDSLREELVITPLPSGDVAATFQFRTRWDSELQREGVWINLGRSSVMSSQGSSAPLSTSSTPPTQSLPLPPSNPWVWPMAGLSVLLKADRLFHTSYHSQAVHIRPVCRNARCTSISWELRQTLSVVFDAFITGQGKKDWSLFRMFSRTLTEPCPLASESRVYVDITTYNQDNETLEVHPPPTTTYQDVILGTRKTYAIYDLLDTAMINNSRNLNIQLKWKRPPENEAPPVPFLHAQRYVSGYGLQKGELSTLLYNTHPYRAFPVLLLDTVPWYLRLYVHTLTITSKGKENKP

SEQ ID NO: 10393 - protein, 171 aa, Homo Sapiens
MAAAMPLALLVLLLLGPGGWCLAEPPRDSLREELVITPLPSGDVAATFQFRTRWDSELQREGVWINLGRSSVMSSQGSSAPLSTSSTPPTQSLPLPPSNPWVWPMTLTTTFCAMLCCRGRWSAPKTSPPGRSSCPVVPRPLCAAEGRSLVPHQLPLPGSAYPPCLQKCTLY

SEQ ID NO: 10394 - protein, 145 aa, Homo Sapiens
MAAAMPLALLVLLLLGPGGWCLAEPPRDSLREELVITPLPSGDVAATFQFRTRWDSELQREGVWINLGRSSVMSSQGSSAPLSTSSTPPTQSLPLPPSNPWVWPMTLTTTFCAMLCCRGRWSAPKTSPPGRSSCPVVPRQASLCC

SEQ ID NO: 10395 - protein, 145 aa, Homo Sapiens; identical to SEQ ID NO: 10394

SEQ ID NO: 10396 - protein, 18 aa, Homo Sapiens
RWDSELQREGGLAASCGL

SEQ ID NO: 10397 - protein, 77 aa, Homo Sapiens
SHYRLFPKALGQLISKYSLRELHLSFTQGFWRTRYWGPPFLQAPSGAELWVWFQDTVTEFSSQLWTLKEGAEVAPGQ

SEQ ID NO: 10398 - protein, 61 aa, Homo Sapiens
  misc_feature (1)..(1): Xaa can be any naturally occurring amino acid
XLIQLPANSVTKVSIQFERALLKWTEYTPDPNHGFYVRWEHGPSLCFSVAHLSSAPLCPAW

SEQ ID NO: 10399 - protein, 78 aa, Homo Sapiens
  misc_feature (1)..(1): Xaa can be any naturally occurring amino acid
XLQPHLLEMLIQLPANSVTKVSIQFERALLKWTEYTPDPNHGFYVSPSVLSALVPSMVAAKPVDWEESPLFNSLLPWT

SEQ ID NO: 10400 - protein, 532 aa, Homo Sapiens
  misc_feature (1)..(1): Xaa can be any naturally occurring amino acid
XQLISKYSLRELHLSFTQGFWRTRYWGPPFLQAPSGAELWVWFQDTVTDVDKSWKELSNVLSGIFCASLNFIDSTNTVTPTASFKPLGLANDTDHYFLRYAVLPREVVCTENLTPWKKLLPCSSKAGLSVLLKADRLFHTSYHSQAVHIRPVCRNARCTSISWELRQTLSVVFDAFITGQGKKDWSLFRMFSRTLTEPCPLASESRVYVDITTYNQDNETLEVHPPPTTTYQDVILGTRKTYAIYDLLDTAMINNSRNLNIQLKWKRPPENEAPPVPFLHAQRYVSGYGLQKGELSTLLYNTHPYRAFPVLLLDTVPWYLRLYVHTLTITSKGKENKPSEDLSPEPGPQPALSCPLQVPQTLISQGYIHYQPAQDRLQPHLLEMLIQLPANSVTKVSIQFERALLKWTEYTPDPNHGFYVSPSVLSALVPSMVAAKPVDWEESPLFNSLFPVSDGSNYFVRLYTEPLLVNLPTPDFSMPYNVICLTCTVVAVCYGSFYNLLTRTFHIEEPRTGGLAKRLANLIRRARGVPPL

SEQ ID NO: 10401 - skipped

SEQ ID NO: 10402 - protein, 12 aa, Homo Sapiens
  misc_feature (1)..(1): Xaa can be any naturally occurring amino acid
XWVWFQDTVTEH

SEQ ID NO: 10403 - protein, 128 aa, Homo Sapiens
  misc_feature (1)..(1): Xaa can be any naturally occurring amino acid
XYAIYDLLDTAMINNSRNLNIQLKWKRPPENEAPPVPFLHAQRYVSGYGLQKGELSTLLYNTHPYRAFPVLLLDTVPWYLRLYVHTLTITSKGKENKPSEDLSPEPGPQPALSCPLQVPQTLISQGSS

SEQ ID NO: 10404 - protein, 136 aa, Homo Sapiens
  misc_feature (1)..(1): Xaa can be any naturally occurring amino acid
XYQPAQDRLQPHLLEMLIQLPANSVTKVSIQFERALLKWTEYTPDPNHGFYVRFPVSDGSNYFVRLYTEPLLVNLPTPDFSMPYNVICLTCTVVAVCYGSFYNLLTRTFHIEEPRTGGLAKRLANLIRRARGVPPL

SEQ ID NO: 10405 - protein, 144 aa, Homo Sapiens
  misc_feature (1)..(1): Xaa can be any naturally occurring amino acid
XYVSGYGLQKGELSTLLYNTHPYRAFPVLLLDTVPWYLRLYVHTLTITSKGKENKPSYIHYQPAQDRLQPHLLEMLIQLPANSVTKVSIQFERALLKWTEYTPDPNHGFYVSPSVLSALVPSMVAAKPVDWEESPLFNSLLPWT

SEQ ID NO: 10406 - protein, 213 aa, Homo Sapiens
YNQDNETLEVHPPPTTTYQDVILGTRKTYAIYDLLDTAMINNSRNLNIQLKWKRPPENEAPPVPFLHAQRYVSGYGLQKGELSTLLYNTHPYRAFPVLLLDTVPWYLRLYVHTLTITSKGKENKPSYIHYQPAQDRLQPHLLEMLIQLPANSVTKVSIQFERALLKWTEYTPDPNHGFYVSPSVLSALVPSMVAAKPVDWEESPLFNSLLPWT

SEQ ID NO: 10407 - protein, 579 aa, Homo Sapiens
MQICGSSVASVAAGTSFQVLGPVCWQQLDLKMAVRVLWGGLSLLRVLWCLLPQTGYVHPDEFFQSPEVMAEDILGVQAARPWEFYPSSSCRSVLFPLLISGSTFWLLRLWEELGPWPGLVSGYALLVGPRLLLTALSFALDGAVYHLAPPMGADRWNALALLSGSYVTLVFYTRTFSNTIEGLLFTWLLVLVSSHVTWGPTRKEPAPGPRWRSWLLGGIVAAGFFNRPTFLAFAVVPLYLWGTRGATNPGLKSLTREALVLLPGAALTAAVFVATDSWYFSSPATSRNLVLTPVNFLHYNLNPQNLARHGTHARLTHLAVNGFLLFGVLHAQALQAAWQRLQVGLQASAQMGLLRALGARSLLSSPRSYLLLLYFMPLALLSAFSHQEARFLIPLLVPLVLLCSPQTQPVPWKGTVVLFNALGALLFGCLHQGGLVPGLEYLEQVVHAPVLPSTPTHYTLLFTHTYMPPRHLLHLPGLGAPVEVVDMGGTEDWALCQTLKSFTRQPACQVAGGPWLCRLFVVTPGTTRRAVEKCSFPFKNETLLFPHLTLEDPPALSSLLSGAWRDHLSLHIVELGEET

SEQ ID NO: 10408 - protein, 92 aa, Homo Sapiens
MQICGSSVASVAAGTSFQVLGPVCWQQLDLKMAVRVLWGGLSLLRVLWCLLPQTGYVHPDEFFQSPEVMAGPSPTPLRDSSSRGCWCWYPPM

SEQ ID NO: 10409 - protein, 49 aa, Homo Sapiens
  misc_feature (1)..(1): Xaa can be any naturally occurring amino acid
XRVLWGGLSLLRVLWCLLPQTGYVHPDEFFQSPEVMAGSGRSWGRGLAW

SEQ ID NO: 10410 - protein, 805 aa, Homo Sapiens
MAASGVPRGCDILIVYSPDAEEWCQYLQTLFLSSRQVRSQKILTHRLGPEASFSAEDLSLFLSTRCVVVLLSAELVQHFHKPALLPLLQRAFHPPHRVVRLLCGVRDSEEFLDFFPDWAHWQELTCDDEPETYVAAVKKAISEDSGCDSVTDTEPEDEKVVSYSKQQNLPTVTSPGNLMVVQPDRIRCGAETTVYVIVRCKLDDRVATEAEFSPEDSPSVRMEAKVENEYTISVKAPNLSSGNVSLKIYSGDLVVCETVISYYTDMEEIGNLLSNAANPVEFMCQAFKIVPYNTETLDKLLTESLKNNIPASGLHLFGINQLEEEDMMTNQRDEELPTLLHFAAKYGLKNLTALLLTCPGALQAYSVANKHGHYPNTIAEKHGFRDLRQFIDEYVETVDMLKSHIKEELMHGEEADAVYESMAHLSTDLLMKCSLNPGCDEDLYESMAAFVPAATEDLYVEMLQASTSNPIPGDGFSRATKDSMIRKFLEGNSMGMTNLERDQCHLGQEEDVYHTVDDDEAFSVDLASRPPVPVPRPETTAPGAHQLPDNEPYIFKVFAEKSQERPGNFYVSSESIRKGPPVRPWRDRPQSSIYDPFAGMKTPGQRQLITLQEQVKLGIVNVDEAVLHFKEWQLNQKKRSESFRFQQENLKRLRDSITRRQREKQKSGKQTDLEITVPIRHSQHLPAKVEFGVYESGPRKSVIPPRTELRRGDWKTDSTSSTASSTSNRSSTRSLLSVSSGMEGDNEDNEVPEVTRSRSPGPPQVDGTPTMSLERPPRVPPRAASQRPPTRETFHPPPPVPPRGR

SEQ ID NO: 10411 - protein, 404 aa, Homo Sapiens
MRFFTSVACYGSCLFASELLIRCKDWLKGRPALFTALLACVLYLCEWTGAKHVPGSSYVEMLQASTSNPIPGDGFSRATKDSMIRKFLEGNSMGMTNLERDQCHLGQEEDVYHTVDDDEAFSVDLASRPPVPVPRPETTAPGAHQLPDNEPYIFKVFAEKSQERPGNFYVSSESIRKGPPVRPWRDRPQSSIYDPFAGMKTPGQRQLITLQEQVKLGIVNVDEAVLHFKEWQLNQKKRSESFRFQQENLKRLRDSITRRQREKQKSGKQTDLEITVPIRHSQHLPAKVEFGVYESGPRKSVIPPRTELRRGDWKTDSTSSTASSTSNRSSTRSLLSVSSGMEGDNEDNEVPEVTRSRSPGPPQVDGTPTMSLERPPRVPPRAASQRPPTRETFHPPPPVPPRGR

SEQ ID NO: 10412 - protein, 627 aa, Homo Sapiens
MVVQPDRIRCGAETTVYVIVRCKLDDRVATEAEFSPEDSPSVRMEAKVENEYTISVKAPNLSSGNVSLKIYSGDLVVCETVISYYTDMEEIGNLLSNAANPVEFMCQAFKIVPYNTETLDKLLTESLKNNIPASGLHLFGINQLEEEDMMTNQRDEELPTLLHFAAKYGLKNLTALLLTCPGALQAYSVANKHGHYPNTIAEKHGFRDLRQFIDEYVETVDMLKSHIKEELMHGEEADAVYESMAHLSTDLLMKCSLNPGCDEDLYESMAAFVPAATEDLYVEMLQASTSNPIPGDGFSRATKDSMIRKFLEGNSMGMTNLERDQCHLGQEEDVYHTVDDDEAFSVDLASRPPVPVPRPETTAPGAHQLPDNEPYIFKVFAEKSQERPGNFYVSSESIRKGPPVRPWRDRPQSSIYDPFAGMKTPGQRQLITLQEQVKLGIVNVDEAVLHFKEWQLNQKKRSESFRFQQENLKRLRDSITRRQREKQKSGKQTDLEITVPIRHSQHLPAKVEFGVYESGPRKSVIPPRTELRRGDWKTDSTSSTASSTSNRSSTRSLLSVSSGMEGDNEDNEVPEVTRSRSPGPPQVDGTPTMSLERPPRVPPRAASQRPPTRETFHPPPPVPPRGR

SEQ ID NO: 10413 - protein, 173 aa, Homo Sapiens
MLLAWVQAFLVSNMLLAEAYGSGGCFWDNGHLYREDQTSPAPGLRCLNWLDAQSGLASAPVSGAGNHSYCRNPDEDPRGPWCYVSGEAGVPEKRPCEDLRCPETTSQALPAFTTEIQEASEGPGADEVQVFAPANALPARSEAAAVQPVIGISQRVRMNSKEKKDLGTLGGRI

SEQ ID NO: 10414 - protein, 263 aa, Homo Sapiens
MLLAWVQAFLVSNMLLAEAYGSGGCFWDNGHLYREDQTSPAPGLRCLNWLDAQSGLASAPVSGAGNHSYCRNPDEDPRGPWCYVSGEAGVPEKRPCEDLRCPETTSQALPAFTTEIQEASEGPGADEVQVFAPANALPARSEAAAVQPVIGISQRVRMNSKEKKDLGTLGYVLGITMMVIIIAIGAGIILGYSYKRGKDLKEQHDQKVCEREMQRITLPLSAFTNPTCEIVDEKTVVVHTSQTPVDPQEGTTPLMGQAGTPGA

SEQ ID NO: 10415 - protein, 234 aa, Homo Sapiens
MLLAWVQAFLVSNMLLAEAYGSGGCFWDNGHLYREDQTSPAPGLRCLNWLDAQSGLASAPVSGAGNHSYCRNPDEDPRGPWCYVSGEAGVPEKRPCEDLRCPETTSQALPAFTTEIQEASEGPGADEVQVFAPANALPARSEAAAVQPVIGISQRVRMNSKEKKDLGTLGYVLGITMMVIIIAIGAGIILGYSYKRSVASLLGPLRRRGGRYTKSNFVAFLPKRKQDVENQLKM

SEQ ID NO: 10416 - protein, 145 aa, Homo Sapiens [sequence omitted]

SEQ ID NO: 10417 - protein, 303 aa, Homo Sapiens
MGRPLLLPLLPLLLPPAFLQPSGSTGSGPSYLYGVTQPKHLSASMGGSVEIPFSFYYPWELATAPDVRISWRRGHFHRQSFYSTRPPSIHKDYVNRLFLNWTEGQKSGFLRISNLQKQDQSVYFCRVELDTRSSGRQQWQSIEGTKLSITQAVTTTTQRPSSMTTTWRLSSTTTTTGLRVTQGKRRSDSWHISLETAVGVAVAVTVLGIMILGLICLLRWRRRKGQQRTKATTPAREPFQNTEEPYENIRNEGQNTDPKLNPKDDGIVYASLALSSSTSPRAPPSHRPLKSPQNETLYSVLKA

SEQ ID NO: 10418 - protein, 175 aa, Homo Sapiens
MGRPLLLPLLPLLLPPAFLQPSGSTGSGPSYLYGVTQPKHLSASMGGSVEIPFSFYYPWELATAPDVRISWRRGHFHRQSFYSTRPPSIHKDYVNRLFLNWTEGQKSGFLRISNLQKQDQSVYFCRVELDTRSSGRQQWQSIEGTKLSITQGNPSKTQRSHMRISGMKDKIQIPS

SEQ ID NO: 10419 - protein, 166 aa, Homo Sapiens
MGRPLLLPLLPLLLPPAFLQPSGSTGSGPSYLYGVTQPKHLSASMGGSVEIPFSFYYPWELATAPDVRISWRRGHFHRQSFYSTRPPSIHKDYVNRLFLNWTEGQKSGFLRISNLQKQDQSVYFCRVELDTRSSGRQQWQSIEGTKLSITQGQQRTKATTPAREPF

SEQ ID NO: 10420 - protein, 230 aa, Homo Sapiens
MGRPLLLPLLPLLLPPAFLQPSGSTGSGPSYLYGVTQPKHLSASMGGSVEIPFSFYYPWELATAPDVRISWRRGHFHRQSFYSTRPPSIHKDYVNRLFLNWTEGQKSGFLRISNLQKQDQSVYFCRVELDTRSSGRQQWQSIEGTKLSITQGQQRTKATTPAREPFQNTEEPYENIRNEGQNTDPKLNPKDDGIVYASLALSSSTSPRAPPSHRPLKSPQNETLYSVLKA

SEQ ID NO: 10421 - protein, 226 aa, Homo Sapiens
MGRPLLLPLLPLLLPPAFLQPSGSTGSGPSYLYGVTQPKHLSASMGGSVEIPFSFYYPWELATAPDVRISWRRGHFHRQSFYSTRPPSIHKDYVNRLFLNWTEGQKSGFLRISNLQKQDQSVYFCRVELDTRSSGRQQWQSIEGTKLSITQGQQRTKATTPAREPFQNTEEPYENIRNEGQNTDPKLNPKLHLTQSTSQPPSPQEPPERDPVLCLKGLTNGQPSQD

SEQ ID NO: 10422 - protein, 108 aa, Homo Sapiens
MGRASYGGSPVGHQSSSDHPRAKTCRSPVRDGPRTLCGVPTVALSLHFLREASSGSRTCGRRTSLCTSAKSSWTYRSGRLSWQSIKGTHLTITQALRQPLHRAPLLPG

SEQ ID NO: 10423 - protein, 271 aa, Homo Sapiens
MGRASYGGSPVGHQSSSDHPRAKTCRSPVRDGPRTLCGVPTVALSLHFLREASSGSRTCGRRTSLCTSAKSSWTYRSGRLSWQSIKGTHLTITQALRQPLHRAPLLPGQLCWSPRPLEKNKAMGRPLLLPLLLLLQPPAFLQPGLCEPALSELDRGSGERLPQDLKPAEGGPVCVFLPSRAGHPEIREAAVAVHQGDQTHHHPGCHNHHHLEAQQHNHHSRPQGHRKQRALRIMAPKSGHCHQGCIGCRCAQNCHFGTAVPPPPVVEEKER

SEQ ID NO: 10424 - protein, 46 aa, Homo Sapiens
MGRPLLLPLLLLLQPPAFLQPEGQESGFLRISNLRKEDQSVYFCRV

SEQ ID NO: 10425 - protein, 121 aa, Homo Sapiens
MGRPLLLPLLLLLQPPAFLQPGGSTGSGPSYLYGVTQPKHLSASMGGSVEIPFSFYYPWELAIVPNVRISWRRGHFHGQSFYSTRPPSIHKDYVNRLFLNWTEGQESGFLRISNLRKEDQS

SEQ ID NO: 10426 - protein, 127 aa, Homo Sapiens
MGRPLLLPLLLLLQPPAFLQPGGSTGSGPSYLYGVTQPKHLSASMGGSVEIPFSFYYPWELAIVPNVRISWRRGHFHGQSFYSTRPPSIHKDYVNRLFLNWTEGQESGFLRISNLRKEDQSVYFCRV

SEQ ID NO: 10427 - protein, 127 aa, Homo Sapiens; identical to SEQ ID NO: 10426

SEQ ID NO: 10428 - protein, 127 aa, Homo Sapiens; identical to SEQ ID NO: 10426

SEQ ID NO: 10429 - protein, 127 aa, Homo Sapiens; identical to SEQ ID NO: 10426

SEQ ID NO: 10430 - protein, 138 aa, Homo Sapiens
MGRPLLLPLLLLLQPPAFLQPGGSTGSGPSYLYGVTQPKHLSASMGGSVEIPFSFYYPWELAIVPNVRISWRRGHFHGQSFYSTRPPSIHKDYVNRLFLNWTEGQESGFLRISNLRKEDQSVYFCRVELDTRRSGRQQ

SEQ ID NO: 10431 - protein, 227 aa, Homo Sapiens
MGRPLLLPLLLLLQPPAFLQPGGSTGSGPSYLYGVTQPKHLSASMGGSVEIPFSFYYPWELAIVPNVRISWRRGHFHGQSFYSTRPPSIHKDYVNRLFLNWTEGQESGFLRISNLRKEDQSVYFCRVELDTRRSGRQQLQSIKGTKLTITQAVTTTTTWRPSSTTTIAGLRVTESKGHSESWHLSLDTAIRVALAVAVLKTVILGLLCLLLLWWRRRKGSRAPSSDF

SEQ ID NO: 10432 - protein, 227 aa, Homo Sapiens; identical to SEQ ID NO: 10431

SEQ ID NO: 10433 - protein, 60 aa, Homo Sapiens
MGRPLLLPLLLLLQPPAFLQPGLCEPALSELDRGSGERLPQDLKPAEGGPVCVFLPSRAG

SEQ ID NO: 10434 - protein, 116 aa, Homo Sapiens
MGPKDHMVTSSFCCQSDGCNSAFLSVPLTNLTENGLMCPACTASFRDKCMGPMTHCTGKENHCVSLSGHVQAGIFKPRFAMRGCATESMCFTKPGAEVPTGTNVLFLHHIECTHSP

SEQ ID NO: 10435 - protein, 116 aa, Homo Sapiens; identical to SEQ ID NO: 10434

SEQ ID NO: 10436 - protein, 116 aa, Homo Sapiens; identical to SEQ ID NO: 10434

SEQ ID NO: 10437 - protein, 204 aa, Homo Sapiens
MRLSRRPETFLLAFVLLCTLLGLGCPLHCEICTAAGSRCHGQMKTCSSDKDTCVLLVGKATSKGKELVHTYKGCIRSQDCYSGVISTTMGPKDHMVTSSFCCQSDGCNSAFLSVPLTNLTENGLMCPACTASFRDKCMGPMTHCTGKENHCVSLSGHVQAGIFKPRFAMRGCATESMCFTKPGAEVPTGTNVLFLHHIECTHSP

SEQ ID NO: 10438 - protein, 228 aa, Homo Sapiens
MWVQTHPSSASYKSWGPGTADTHTMRLSRRPETFLLAFVLLCTLLGLGCPLHCEICTAAGSRCHGQMKTCSSDKDTCVLLVGKATSKGKELVHTYKGCIRSQDCYSGVISTTMGPKDHMVTSSFCCQSDGCNSAFLSVPLTNLTENGLMCPACTASFRDKCMGPMTHCTGKENHCVSLSGHVQAGIFKPRFAMRGCATESMCFTKPGAEVPTGTNVLFLHHIECTHSP

SEQ ID NO: 10439 - protein, 146 aa, Homo Sapiens
MRLLQLLFRASPATLLLVLCLQLGANKAQDNTRKIIIKNFDIPKSVRPNDEVTAVLAVQTELKECMVVKTYLISSIPLQGAFNYKYTACLCDDNPKTFYWDFYTNRTVQIAAVVDVIRELGICPDDAAVIPIKNNRFYTIEILKVE

SEQ ID NO: 10440 - protein, 118 aa, Homo Sapiens
MERGVKNKQDFMDLSICTREKLAHVRNCKTGSSGIPVKLVTNLFNLDFPQDWQLYQYHVTYIPDLASRRLRIALLYSHSELSNKAKAFDGAILFLSQKLEEKVTELSSETQRGETIKM

SEQ ID NO: 10441 - protein, 453 aa, Homo Sapiens
MERGVKNKQDFMDLSICTREKLAHVRNCKTGSSGIPVKLVTNLFNLDFPQDWQLYQYHVTYIPDLASRRLRIALLYSHSELSNKAKAFDGAILFLSQKLEEKVTELSSETQRGETIKMTITLKRELPSSSPVCIQVFNIIFRKILKKLSMYQIGRNFYNPSEPMEIPQHKLSLWPGFAISVSYFERKLLFSADVSYKVLRNETVLEFMTALCQRTGLSCFTQTCEKQLIGLIVLTRYNNRTYSIDDIDWSVKPTHTFQKRDGTEITYVDYYKQQYDITVSDLNQPMLVSLLKKKRNDNSEAQLAHLIPELCFLTGLTDQATSDFQLMKAVAEKTRLSPSGRQQRLARLVDNIQRNTNARFELETWGLHFGSQISLTGRIVPSEKILMQDHICQPVSAADWSKDIRTCKILNAQSLNTWLILCSDRTEYVAESFLNCLRRVAGSMGFNVDYPKM

SEQ ID NO: 10442 - protein, 203 aa, Homo Sapiens
MGMLFFVGIRKVILFLLTPNSAGALNKWYKYNHDLPARIIVYRAGVGDGQLKTLIEYEVPQLLSSVAESSSNTSSRLSVIVVRKKCMPRFFTEMNRTVQNPPLGTVVDSEATRNEWYDFYLISQVACRGTVSPTYYNVIYDDNGLKPDHMQRLTFKLCHLYYNWPGIVSVPAPCQYAHKLTFLVAQSIHKEPSLELANHLFYL

SEQ ID NO: 10443 - protein, 495 aa, Homo Sapiens
MGPRSVDLSNNEASSSNGFLGTSRISTNDKYGISSGDAGSTFMERGVKNKQDFMDLSICTREKLAHVRNCKTGSSGIPVKLVTNLFNLDFPQDWQLYQYHVTYIPDLASRRLRIALLYSHSELSNKAKAFDGAILFLSQKLEEKVTELSSETQRGETIKMTITLKRELPSSSPVCIQVFNIIFRKILKKLSMYQIGRNFYNPSEPMEIPQHKLSLWPGFAISVSYFERKLLFSADVSYKVLRNETVLEFMTALCQRTGLSCFTQTCEKQLIGLIVLTRYNNRTYSIDDIDWSVKPTHTFQKRDGTEITYVDYYKQQYDITVSDLNQPMLVSLLKKKRNDNSEAQLAHLIPELCFLTGLTDQATSDFQLMKAVAEKTRLSPSGRQQRLARLVDNIQRNTNARFELETWGLHFGSQISLTGRIVPSEKILMQDHICQPVSAADWSKDIRTCKILNAQSLNTWLILCSDRTEYVAESFLNCLRRVAGSMGFNVDYPKM

SEQ ID NO: 10444 - protein, 852 aa, Homo Sapiens
MSGRARVKARGIARSPSATEVGRIQASPLPRSVDLSNNEASSSNGFLGTSRISTNDKYGISSGDAGSTFMERGVKNKQDFMDLSICTREKLAHVRNCKTGSSGIPVKLVTNLFNLDFPQDWQLYQYHVTYIPDLASRRLRIALLYSHSELSNKAKAFDGAILFLSQKLEEKVTELSSETQRGETIKMTITLKRELPSSSPVCIQVFNIIFRKILKKLSMYQIGRNFYNPSEPMEIPQHKLSLWPGFAISVSYFERKLLFSADVSYKVLRNETVLEFMTALCQRTGLSCFTQTCEKQLIGLIVLTRYNNRTYSIDDIDWSVKPTHTFQKRDGTEITYVDYYKQQYDITVSDLNQPMLVSLLKKKRNDNSEAQLAHLIPELCFLTGLTDQATSDFQLMKAVAEKTRLSPSGRQQRLARLVDNIQRNTNARFELETWGLHFGSQISLTGRIVPSEKILMQDHICQPVSAADWSKDIRTCKILNAQSLNTWLILCSDRTEYVAESFLNCLRRVAGSMGFNVDYPKIIKVQENPAAFVRAIQQYVDPDVQLVMCILPSNQKTYYDSIKKYLSSDCPVPSQCVLARTLNKQGMMMSIATKIAMQMTCKLGGELWAVEIPLKSLMVVGIDVCKDALSKDVMVVGCVASVNPRITRWFSRCILQRTMTDVADCLKVFMTGALNKWYKYNHDLPARIIVYRAGVGDGQLKTLIEYEVPQLLSSVAESSSNTSSRLSVIVVRKKCMPRFFTEMNRTVQNPPLGTVVDSEATRNEWYDFYLISQVACRGTVSPTYYNVIYDDNGLKPDHMQRLTFKLCHLYYNWPGIVSVPAPCQYAHKLTFLVAQSIHKEPSLELANHLFYL

SEQ ID NO: 10445 - protein, 181 aa, Homo Sapiens
MRRRRAAVAAGFCASFLLGSVLNVLFAPGSEPPRPGQSPEPSPAPGPGRRGGRGELARQIRARYEEAGPRLPAQAPPARARAWAAPRFATCPARSTWAQATPRPCTGSACPAVPRWRSRRWTLAATIWAAACASSGYGGAAIGWRPTSCLRRWCCWSGCGTPTCCSSMATATRTARTSQTP

SEQ ID NO: 10446 - protein, 493 aa, Homo Sapiens
MRRRRAAVAAGFCASFLLGSVLNVLFAPGSEPPRPGQSPEPSPAPGPGRRGGRGELARQIRARYEEVQRYSRGGPGPGAGRPERRRLMDLAPGGPGLPRPRPPWARPLSDGAPGWPPAPGPGSPGPGPRLGCAALRNVSGAQYMGSGYTKAVYRVRLPGGAAVALKAVDFSGHDLGSCVREFGVRRGCYRLAAHKLLKEMVLLERLRHPNVLQLYGYCYQDSEDIPDTLTTITELGAPVEMIQLLQTSWEDRFRICLSLGRLLHHLAHSPLGSVTLLDFRPRQFVLVDGELKVTDLDDARVEETPCAGSTDCILEFPARNFTLPCSAQGWCEGMNEKRNLYNAYRFFFTYLLPHSAPPSLRPLLDSIVNATGELAWGVDETLAQLEKVLHLYRSGQYLQNSTASSSTEYQCIPDSTIPQEDYRCWPSYHHGSCLLSVFNLAEAVDVCESHAQCRAFVVTNQTTWTGRQLVFFKTGWSQVVPDPNKTTYVKASG

SEQ ID NO: 10447 - protein, 4074 aa, Homo Sapiens
MTAWLISLMSIEVLLLAVRHLSLHIEPEEGSLAGGTWITVIFDGLELGVLYPNNGSQLEIHLVNVNMVVPALRSVPCDVFPVFLDLPVVTCRTRSVLSEAHEGLYFLEAYFGGQLVSSPNPGPRDSCTFKFSKAQTPIVHQVYPPSGVPGKLIHVYGWIITGRLETFDFDAEYIDSPVILEAQGDKWVTPCSLINRQMGSCYPIQEDHGLGTLQCHVEGDYIGSQNVSFSVFNKGKSMVHKKAWLISAKQDLFLYQTHSEILSVFPETGSLGGRTNITITGDFFDNSAQVTIAGIPCDIRHVSPRKIECTTRAPGKDVRLTTPQPGNRGLLFEVGDAVEGLELTEATPGYRWQIVPNASSPFGFWSQEGQPFRARLSGFFVAPETNNYTFWIQADSQASLHFSWSEEPRTKVKVASISVGTADWFDSWEQNRDEGTWQQKTPKLELLGGAMYYLEAEHHGIAPSRGMRIGVQIHNTWLNPDVVTTYLREKHQIRVRAQRLPEVQVLNVSGRGNFFLTWDNVSSQPIPANATAHLIQTTIEELLAVKCKLEPLWSNILLRLGFERGPEVSNSDGDLTSGTEPFCGRFSLRQPRHLVLTPPAAQKGYRLDQYTHLCLAYKGHMNKILKMIVSFTIGFQNMVKNTTCDWSLTRTSPESWQFDCTDLWETCVRCFGDLQPPPANSPVLVHQINLLPLAQETGLFYVDEIIIADTNVTVSQADSGTARPGGNLVESVSVVGSPPVYSVTSWLAGCGTELPLITARSVPTEGTEEGSGLVLVTTQRRQRTSPPLGGHFRIQLPNTVISDVPVQISAHHLHQLLQNNADDFTSRYLNASDFTVKEDLYTCYEHVWTLSWSTQIGDLPNFIRVSDENLTGVNPAAATRVVYDGGVFLGPIFGDMLATANQHTQVVVRVNDVPAHCPGSCSFQYLQGSTPCVHSVWYSIDGDINLMIYITGTGFSGDSQFLQVTVNKTSCKVIFSNQTNVVCQTDLLPVGMHRILMLVRPSGLAISATGEDLFLNVKPRLDMVEPSRAADIGGLWATIRGSSLEGVSLILFGSYSCAINVATSNSSRIQCKVPPRGKDGRIVNVTVIRGDYSAVLPRAFTYVSSLNPVIVTLSRNISNIAGGETLVIGVARLMNYTDLDVEVHVQDALAPVHTQSAWGLEVALPPLPAGLHRISVSINGVSIHSQGVDLHIQYLTEVFSIEPCCGSLLGGTILSISGIGFSRDPALVWVLVGNRSCDIVNLTEASIWCETLPAPQIPDAGAPTVPAAVEVWAGNRFFARGPSPSLVGKGFTFMYEAAATPVVTAMQGEITNSSLSLHVGGSNLSNSVILLGNLNCDVETQSFQGNVSLSGCSIPLHSLEAGIYPLQVRQKQMGFANMSVVLQQFAVMPRIMAIFPSQGSACGGTILTVRGLLLNSRRRSVRVDLSGPFTCVILSLGDHTILCQVSLEGDPLPGASFSLNVTVLVNGLTSECQGNCTLFIREEASPVMDALSTNTSGSLTTVLIRGQRLATTADEPMVFVDDQLPCNVTFFNASHVVCQTRDLAPGPHYLSVFYTRNGYACSGNVSRHFYIMPQVFHYFPKNFSLHGGSLLTIEGTGLRGQNTTSVYIDQQTCLTVNIGAELIRCIVPTGNGSVALEIEVDGLWYHIGVIGYNKAFTPELISISQSDDILTFAVAQISGAANIDIFIGMSPCVGVSGNHTVLQCVVPSLPAGEYHVRGYDCIRGWASSALVFTSRVIITAVTENFGCLGGRLVHVFGAGFSPGNVSAAVCGAPCRVLANATVSAFSCLVLPLDVSLAFLCGLKREEDSCEAARHTYVQCDLTVAMATEQLLESWPYLYICEESSQCLFVPDHWAESMFPSFSGLFISPKLERDEVLIYNSSCNITMETEAEMECETPNQPITVKITEIRKRWGQNTQGNFSLQFCRRWSRTHSWFPERLPQDGDNVTVENGQLLLLDTNTSILNLLHIKGGKLIFMAPGPIELRAHAILVSDGGELRIGSEDKPFQGRAQITLYGSSYSTPFFPYGVKFLAVRNGTLSLHGSLPEVIVTCLRATAHALDTVLALEDAVDWNPGDEVVIISGTGVKGAKPMEEIVTVETVQDTDLYLKSPLRYSHNFTENWVAGEHHILKATVALLSRSITIQGNLTNEREKLLVSCQEANAPEGNLQHCLYSMSEKMLGSRDMGARVIVQSFPEEPSQVQLKGVQFQVLGQAFHKHLSSLTLVGAMRESFIQGCTVRNSFSRGLSMCGTLGLKVDSNVFYNILGHALLVGTCTEMRYISWEAIHGRKDDWSGHGNIIRNNVIIQVSGAEGLSNPEMLTPSGIYICSPTNVIEGNRVCGAGYGYFFHLMTNQTSQAPLLSFTQNIAHSCTRYGLFVYPKFQPPWDNVTGTTLFQSFTVWESAGGAQIFRSSNLRLKNFKVYSCRDFGIDVLESDANTSVTDSLLLGHFAHKGSLCMSSGIKTPKRWELMVSNTTFVNFDLINCVAIRTCSDCSQGQGGFTVKTSQLKFTNSSNLVAFPFPHAAILEDLDGSLSGKNRSHILASMETLSASCLVNSSFGRVVHGSACGGGVLFHRMSIGLANTPEVSYDLTMTDSRNKTTTVNYVRDTLSNPRGWMALLLDQETYSLQSENLWINRSLQYSATFDNFAPGNYLLLVHTDLPPYPDILLRCGSRVGLSFPFLPSPGQNQGCDWFFNSQLRQLTYLVSGEGQVQVILRVKEGMPPTISASTSAPESALKWSLPETWQGVEEGWGGYNNTIPGPGDDVLILPNRTVLVDTDLPFFKGLYVMGTLDFPVDRSNVLSVACMVIAGGELKVGTLENPLEKEQKLLILLRASEGVFCDRMNGIHIDPGTIGVYGKVHLYSAYPKNSWTHLGADIASGNERIIVEDAVDWRPHDKIVLSSSSYEPHEAEVLTVKEVKGHHVRIYERLKHRHIGSVHVTEDGRHIRLAAEVGLLTRNIQIQPDVSCRGRLFVGSFRKSSREEFSGVLQLLNVEIQNFGSPLYSSVEFSNVSAGSWIISSTLHQSCGGGIHAAASHGVLLNDNIVFGTAGHGIDLEGQAYTVTNNLVVLMTQPAWSTIWVAGIKVNQVKDINLHGNVVAGSERLGFHIRGHKCSSCELLWSDNVAHSSLHGLHLYKESGLDNCTRISGFLAFKNFDYGAMLHVENSVEIENITLVDNTIGLLAVVYVFSAPQNSVKKVQIVLRNSVIVATSSSFDCIQDKVKPHSANLTSTDRAPSNPRGGRIGILWPVFTSEPNQWPQEPWHKVRNDHSISGIMKLQDVTFSSFVKSCYSDDLDVCILPNAENSGIMHPITAERTRMLKIKDKNKFYFPSLQPRKDLGKVVCPELDCASPRKYLFKDLDGRALGLPPPVSVFPKTEAEWTASFFNAGTFREEQKCTYQFLMQGFICKQTDQVVLILDSADAIWAIQKLYPVVSVTSGFVDVFSSVNANIPCSTSGSVSTFYSILPIRQITKVCFMDQTPQVLRFFLLGNKSTSKLLLAVFYHELQSPHVFLGESFIPPTLVQSASLLLNESIGANYFNIMDNLLYVVLQGEEPIEIRSGVSIHLALTVMVSVLEKGWEIVILERLTNFLQIGQNQIRFIHEMPGHEETLKAIADSRAKRKRNCPTVTCTSHYRRVGQRRPLMMEMNSHRASPPMTVETISKVIVIEIGDSPTVRSTGMISSLSSNKLQNLAHRVITAQQTGVLENVLNMTIGALLVTQSKGVIGYGNTSSFKTGNLIYIRPYALSILVQPSDGEVGNELPVQPQLVFLDEQNRRVESLGPPSEPWTISASLEGASDSVLKGCTQAETQDGYVSFYNLAVLISGSNWHFIFTVTSPPGVNFTARSKPFAVLPVTRKEKSTIILAASLSSVASWLALSCLVCCWLKRSKSRKTKPEEIPESQTNNQNIHIHISSKRRESQGPKKEDTVVGEDMRMKVMLGKVNQCPHQLMNGVSRRKVSRHIVREEEAAVPAPGTTGITSHGHICAPGAPAQQVYLQETGNWKEGQEQLLRYQLAGQNQLLLLCPDFRQERQQLPGQSRLSKQSGSLGLSQEKKASCGATEAFCLHSVHPETIQEQL

SEQ ID NO: 10448 - protein, 3396 aa, Homo Sapiens
MTAWLISLMSIEVLLLAVRHLSLHIEPEEGSLAGGTWITVIFDGLELGVLYPNNGSQLEIHLVNVNMVVPALRSVPCDVFPVFLDLPVVTCRTRSVLSEAHEGLYFLEAYFGGQLVSSPNPGPRDSCTFKFSKAQTPIVHQVYPPSGVPGKLIHVYGWIITGRLETFDFDAEYIDSPVILEAQGDKWVTPCSLINRQMGSCYPIQEDHGLGTLQCHVEGDYIGSQNVSFSVFNKGKSMVHKKAWLISAKQDLFLYQTHSEILSVFPETGSLGGRTNITITGDFFDNSAQVTIAGIPCDIRHVSPRKIECTTRAPGKDVRLTTPQPGNRGLLFEVGDAVEGLELTEATPGYRWQIVPNASSPFGFWSQEGQPFRARLSGFFVAPETNNYTFWIQADSQASLHFSWSEEPRTKVKVASISVGTADWFDSWEQNRDEGTWQQKTPKLELLGGAMYYLEAEHHGIAPSRGMRIGVQIHNTWLNPDVVTTYLREKHQIRVRAQRLPEVQVLNVSGRGNFFLTWDNVSSQPIPANATAHLIQTTIEELLAVKCKLEPLWSNILLRLGFERGPEVSNSDGDLTSGTEPFCGRFSLRQPRHLVLTPPAAQKGYRLDQYTHLCLAYKGHMNKILKMIVSFTIGFQNMVKNTTCDWSLTRTSPESWQFDCTDLWETCVRCFGDLQPPPANSPVLVHQINLLPLAQETGLFYVDEIIIADTNVTVSQADSGTARPGGNLVESVSVVGSPPVYSVTSWLAGCGTELPLITARSVPTEGTEEGSGLVLVTTQRRQRTSPPLGGHFRIQLPNTVISDVPVQISAHHLHQLLQNNADDFTSRYLNASDFTVKEDLYTCYEHVWTLSWSTQIGDLPNFIRVSDENLTGVNPAAATRVVYDGGVFLGPIFGDMLATANQHTQVVVRVNDVPAHCPGSCSFQYLQGSTPCVHSVWYSIDGDINLMIYITGTGFSGDSQFLQVTVNKTSCKVIFSNQTNVVCQTDLLPVGMHRILMLVRPSGLAISATGEDLFLNVKPRLDMVEPSRAADIGGLWATIRGSSLEGVSLILFGSYSCAINVATSNSSRIQCKVPPRGKDGRIVNVTVIRGDYSAVLPRAFTYVSSLNPVIVTLSRNISNIAGGETLVIGVARLMNYTDLDVEVHVQDALAPVHTQSAWGLEVALPPLPAGLHRISVSINGVSIHSQGVDLHIQYLTEVFSIEPCCGSLLGGTILSISGIGFSRDPALVWVLVGNRSCDIVNLTEASIWCETLPAPQIPDAGAPTVPAAVEVWAGNRFFARGPSPSLVGKGFTFMYEAAATPVVTAMQGEITNSSLSLHVGGSNLSNSVILLGNLNCDVETQSFQGNVSLSGCSIPLHSLEAGIYPLQVRQKQMGFANMSVVLQQFAVMPRIMAIFPSQGSACGGTILTVRGLLLNSRRRSVRVDLSGPFTCVILSLGDHTILCQVSLEGDPLPGASFSLNVTVLVNGLTSECQGNCTLFIREEASPVMDALSTNTSGSLTTVLIRGQRLATTADEPMVFVDDQLPCNVTFFNASHVVCQTRDLAPGPHYLSVFYTRNGYACSGNVSRHFYIMPQVFHYFPKNFSLHGGSLLTIEGTGLRGQNTTSVYIDQQTCLTVNIGAELIRCIVPTGNGSVALEIEVDGLWYHIGVIGYNKAFTPELISISQSDDILTFAVAQISGAANIDIFIGMSPCVGVSGNHTVLQCVVPSLPAGEYHVRGYDCIRGWASSALVFTSRVIITAVTENFGCLGGRLVHVFGAGFSPGNVSAAVCGAPCRVLANATVSAFSCLVLPLDVSLAFLCGLKREEDSCEAARHTYVQCDLTVAMATEQLLESWPYLYICEESSQCLFVPDHWAESMFPSFSGLFISPKLERDEVLIYNSSCNITMETEAEMECETPNQPITVKITEIRKRWGQNTQGNFSLQFCRRWSRTHSWFPERLPQDGDNVTVENGQLLLLDTNTSILNLLHIKGGKLIFMAPGPIELRAHAILVSDGGELRIGSEDKPFQGRAQITLYGSSYSTPFFPYGVKFLAVRNGTLSLHGSLPEVIVTCLRATAHALDTVLALEDAVDWNPGDEVVIISGTGVKGAKPMEEIVTVETVQDTDLYLKSPLRYSHNFTENWVAGEHHILKATVALLSRSITIQGNLTNEREKLLVSCQEANAPEGNLQHCLYSMSEKMLGSRDMGARVIVQSFPEEPSQVQLKGVQFQVLGQAFHKHLSSLTLVGAMRESFIQGCTVRNSFSRGLSMCGTLGLKVDSNVFYNILGHALLVGTCTEMRYISWEAIHGRKDDWSGHGNIIRNNVIIQVSGAEGLSNPEMLTPSGIYICSPTNVIEGNRVCGAGYGYFFHLMTNQTSQAPLLSFTQNIAHSCTRYGLFVYPKFQPPWDNVTGTTLFQSFTVWESAGGAQIFRSSNLRLKNFKVYSCRDFGIDVLESDANTSVTDSLLLGHFAHKGSLCMSSGIKTPKRWELMVSNTTFVNFDLINCVAIRTCSDCSQGQGGFTVKTSQLKFTNSSNLVAFPFPHAAILEDLDGSLSGKNRSHILASMETLSASCLVNSSFGRVVHGSACGGGVLFHRMSIGLANTPEVSYDLTMTDSRNKTTTVNYVRDTLSNPRGWMALLLDQETYSLQSENLWINRSLQYSATFDNFAPGNYLLLVHTDLPPYPDILLRCGSRVGLSFPFLPSPGQNQGCDWFFNSQLRQLTYLVSGEGQVQVILRVKEGMPPTISASTSAPESALKWSLPETWQGVEEGWGGYNNTIPGPGDDVLILPNRTVLVDTDLPFFKGLYVMGTLDFPVDRSNVLSVACMVIAGGELKVGTLENPLEKEQKLLILLRASEGVFCDRMNGIHIDPGTIGVYGKVHLYSAYPKNSWTHLGADIASGNERIIVEDAVDWRPHDKIVLSSSSYEPHEAEVLTVKEVKGHHVRIYERLKHRHIGSVHVTEDGRHIRLAAEVGLLTRNIQIQPDVSCRGRLFVGSFRKSSREEFSGVLQLLNVEIQNFGSPLYSSVEFSNVSAGSWIISSTLHQSCGGGIHAAASHGVLLNDNIVFGTAGHGIDLEGQAYTVTNNLVVLMTQPAWSTIWVAGIKVNQVKDINLHGNVVAGSERLGFHIRGHKCSSCELLWSDNVAHSSLHGLHLYKESGLDNCTRISGFLAFKNFDYGAMLHVENSVEIENITLVDNTIGLLAVVYVFSAPQNSVKKVQIVLRNSVIVATSSSFDCIQDKVKPHSANLTSTDRAPSNPRGGRIGILWPVFTSEPNQWPQEPWHKVRNDHSISGIMKLQDVTFSSFVKSCYSDDLDVCILPNAENSGIMHPITAERTRMLKIKDKNKFYFPSLQPRKDLGKVVCPELDCASPRKYLFKDLDGRALGLPPPVSVFPKTEAEWTASFFNAVTTEQALKISE

SEQ ID NO: 10449 - protein, 440 aa, Homo Sapiens
MHKSSSIWGDAPPTPQPKCADFQSANLFEGTDLKVQFLLFVPSNPSCGQLVEGSSDLQNSGFNATLGTKLIIHGFRVLGTKPSWIDTFIRTLLRATNANVIAVDWIYGSTGVYFSAVKNVIKLSLEISLFLNKLLVLGVSESSIHIIGVSLGAHVGGMVGQLFGGQLGQITGLDPAGPEYTRASVEERLDAGDALFVEAIHTDTDNLGIRIPVGHVDYFVNGGQDQPGCPTFFYAGYSYLICDHMRAVHLYISALENSCPLMAFPCASYKAFLAGRCLDCFNPFLLSCPRIGLVEQGGVKIEPLPKEVKVYLLTTSSAPYCMHHSLVEFHLKELRNKDTNIEVTFLSSNITSSSKITIPKQQRYGKGIIAHATPQCQINQVKFKFQSSNRVWKKDRTTIIGKFCTALLPVNDREKMVCLPEPVNLQASVTVSCDLKIACV

SEQ ID NO: 10450 - protein, 456 aa, Homo Sapiens
MPPGPWESCFWVGGLILWLSVGSSGDAPPTPQPKCADFQSANLFEGTDLKVQFLLFVPSNPSCGQLVEGSSDLQNSGFNATLGTKLIIHGFRVLGTKPSWIDTFIRTLLRATNANVIAVDWIYGSTGVYFSAVKNVIKLSLEISLFLNKLLVLGVSESSIHIIGVSLGAHVGGMVGQLFGGQLGQITGLDPAGPEYTRASVEERLDAGDALFVEAIHTDTDNLGIRIPVGHVDYFVNGGQDQPGCPTFFYAGYSYLICDHMRAVHLYISALENSCPLMAFPCASYKAFLAGRCLDCFNPFLLSCPRIGLVEQGGVKIEPLPKEVKVYLLTTSSAPYCMHHSLVEFHLKELRNKDTNIEVTFLSSNITSSSKITIPKQQRYGKGIIAHATPQCQINQVKFKFQSSNRVWKKDRTTIIGKFCTALLPVNDREKMVCLPEPVNLQASVTVSCDLKIACV

SEQ ID NO: 10451 - protein, 440 aa, Homo Sapiens
MPPGPWESCFWVGGLILWLSVGSSGDAPPTPQPKCADFQSANLFEGTDLKVQFLLFVPSNPSCGQLVEGSSDLQNSGFNATLGTKLIIHGFRVLGTKPSWIDTFIRTLLRATNANVIAVDWIYGSTGVYFSAVKNVLGVSESSIHIIGVSLGAHVGGMVGQLFGGQLGQITGLDPAGPEYTRASVEERLDAGDALFVEAIHTDTDNLGIRIPVGHVDYFVNGGQDQPGCPTFFYAGYSYLICDHMRAVHLYISALENSCPLMAFPCASYKAFLAGRCLDCFNPFLLSCPRIGLVEQGGVKIEPLPKEVKVYLLTTSSAPYCMHHSLVEFHLKELRNKDTNIEVTFLSSNITSSSKITIPKQQRYGKGIIAHATPQCQINQVKFKFQSSNRVWKKDRTTIIGKFCTALLPVNDREKMVCLPEPVNLQASVTVSCDLKIACV

SEQ ID NO: 10452 - protein, 283 aa, Homo Sapiens
MVGQLFGGQLGQITGLDPAGPEYTRASVEERLDAGDALFVEAIHTDTDNLGIRIPVGHVDYFVNGGQDQPGCPTFFYAGYSYLICDHMRAVHLYISALENSCPLMAFPCASYKAFLAGRCLDCFNPFLLSCPRIGLVEQGGVKIEPLPKEVKVYLLTTSSAPYCMHHSLVEFHLKELRNKDTNIEVTFLSSNITSSSKITIPKQQRYGKGIIAHATPQCQINQVKFKFQSSNRVWKKDRTTIIGKFCTALLPVNDREKMVCLPEPVNLQASVTVSCDLKIACV

SEQ ID NO: 10453 - protein, 224 aa, Homo Sapiens
NVIKLSLEISLFLNKLLVLGVSESSIHIIGVSLGAHVGGMVGQLFGGQLGQITGLDPAGPEYTRASVEERLDAGDALFVEAIHTDTDNLGIRIPVGHVDYFVNGGQDQPGCPTFFYAGYSYLICDHMRAVHLYISALENSCPLMAFPCASYKAFLAGRCLDCFNPFLLSCPRIGLVEQGGVKIEPLPKEVKVYLLTTSSAPYCNAFQLLTVAPNHGISLKLGCW

SEQ ID NO: 10454 - protein, 165 aa, Homo Sapiens
MGPLPVCLPIMLLLLLPSLLLLLLLPGPGSGEASRILRVHRRGILELAGTVGCVGPRTPIAYMKYGCFCGLGGHGQPRDAIDWCCHGHDCCYTRAEEAGCSPKTERYSWQCVNQSVLCGPAENKCQELLCKCDQEIANCLAQTEYNLKYLFYPQFLCEPDSPKCD

SEQ ID NO: 10455 - protein, 130 aa, Homo Sapiens
MGPLPVCLPIMLLLLLPSLLLLLLLPGPGSGEASRILRVHRRGILELAGTVGCVGPRTPIAYMKYGCFCGLGGHGQPRDAIDWCCHGHDCCYTRAEEAGCSPKTERYSWQCVNQSVLCVLLCHPGWSAVV

SEQ ID NO: 10456 - protein, 70 aa, Homo Sapiens
MALLSRPALTLLLLLMAAVVRCQEQAQTTDWRATLKTIRNGVHKIDTYLNAALDLLGGEDGLCQYKCSDA

SEQ ID NO: 10457 - protein, 187 aa, Homo Sapiens
MALLSRPALTLLLLLMAAVVRCQEQAQTTDWRATLKTIRNGVHKIDTYLNAALDLLGGEDGLCQYKCSDGSKPFPRYGYKPSPPNGCGSPLFGLNIGIPSLTKCCNQHDRCYETCGKSKNDCDEEFQYCLSKICRDVQKTLGLTQHVQACETTVELLFDSVIHLGCKPYLDSQRAACRCHYEEKTDL

SEQ ID NO: 10458 - protein, 189 aa, Homo Sapiens
MALLSRPALTLLLLLMAAVVRCQEQAQTTDWRATLKTIRNGVHKIDTYLNAALDLLGGEDGLCQYKCSDGSKPFPRYGYKPSPPNGCGSPLFGVHLNIGIPSLTKCCNQHDRCYETCGKSKNDCDEEFQYCLSKICRDVQKTLGLTQHVQACETTVELLFDSVIHLGCKPYLDSQRAACRCHYEEKTDL

SEQ ID NO: 10459 - protein, 195 aa, Homo Sapiens
MKLASGFLVLWLSLGGGLAQSDTSPDTEESYSDWGLRHLRGSFESVNSYFDSFLELLGGKNGVCQYRCRYGKAPMPRPGYKPQEPNGCGSYFLGLKVPESMDLGIPAMTKCCNQLDVCYDTCGANKYRCDAKFRWCLHSICSDLKRSLGFVSKVEAACDSLVDTVFNTVWTLGCRPFMNSQRAACICAEEEKEEL

SEQ ID NO: 10460 - protein, 212 aa, Homo Sapiens
MGLHLRPYRVGLLPDGLLFLLLLLMLLADPALPAGRHPPVVLGDNNRIPVIGPLKIREQQRSAVSTSWLLPYNYTWSPEKVFVQTPTINYTLRDYRKFFQDIGFEDGWLMRQDTEGLVEATMPPGVQLHCLYGTGVPTPDSFYYESFPDRDPKICFGDGDGTVNLKSALQCQAWQSRQEHQVLLQELPGSEHIEMLANATTLAYLKRVLLGP

SEQ ID NO: 10461 - protein, 318 aa, Homo Sapiens
MGLHLRPYRVGLLPDGLLFLLLLLMLLADPALPAGRHPPVVLGWFTTKHPGPPSFLMVWMYVSLALGRPSHWSSWTPAKAAWVPISTPWWRALWAGATHGVRMSEGLPMTGAEPQRQPQAWKDKYIRAFVSLGAPWGGVAKTLRVLASGDNNRIPVIGPLKIREQQRSAVSTSWLLPYNYTWSPEKVFVQTPTINYTLRDYRKFFQDIGFEDGWLMRQDTEGLVEATMPPGVQLHCLYGTGVPTPDSFYYESFPDRDPKICFGDGDGTVNLKSALQCQAWQSRQEHQVLLQELPGSEHIEMLANATTLAYLKRVLLGP

SEQ ID NO: 10462 - protein, 86 aa, Homo Sapiens
MGLHLRPYRVGLLPDGLLFLLLLLMLLADPALPAGRHPPVVLVEMGFHHIGQAGLELLTASDPLTSASQSAGITGMSPCALPRSPW

SEQ ID NO: 10463 - protein, 242 aa, Homo Sapiens
MGLHLRPYRVGLLPDGLLFLLLLLMLLADPALPAGRHPPVVLVPGDLGNQLEAKLDKPTVVHYLCSKKTESYFTIWLNLELLLPVIIDCWIDNIRLECSGAISAHYTSASQAQALLLPQTPDNWDYRLVYNKTSRATQFPDGVDVRVPGFGKTFSLEFLDPSKSSVGSYFHTMVESLVGWGYTRGEDVRGAPYDWRRAPTAAAGLEGQVYPGLRVTGCALGGRGQDPARPGFRRQQPDPSHR

SEQ ID NO: 10464 - protein, 163 aa, Homo Sapiens
MGLHLRPYRVGLLPDGLLFLLLLLMLLADPALPAGRHPPVVLVPGDLGNQLEAKLDKPTVVHYLCSKKTESYFTIWLNLELLLPVIIDCWIDNIRLVYNKTSRATQFPDGVDVRVPGFGKTFSLEFLDPSKSSVDENGPYFLALREMIEEMYQLYGGPVVLVA

SEQ ID NO: 10465 - protein, 412 aa, Homo Sapiens
MGLHLRPYRVGLLPDGLLFLLLLLMLLADPALPAGRHPPVVLVPGDLGNQLEAKLDKPTVVHYLCSKKTESYFTIWLNLELLLPVIIDCWIDNIRLVYNKTSRATQFPDGVDVRVPGFGKTFSLEFLDPSKSSVGSYFHTMVESLVGWGYTRGEDVRGAPYDWRRAPNENGPYFLALREMIEEMYQLYGGPVVLVAHSMGNMYTLYFLQRQPQAWKDKYIRAFVSLGAPWGGVAKTLRVLASGDNNRIPVIGPLKIREQQRSAVSTSWLLPYNYTWSPEKVFVQTPTINYTLRDYRKFFQDIGFEDGWLMRQDTEGLVEATMPPGVQLHCLYGTGVPTPDSFYYESFPDRDPKICFGDGDGTVNLKSALQCQAWQSRQEHQVLLQELPGSEHIEMLANATTLAYLKRVLLGP

SEQ ID NO: 10466 - protein, 236 aa, Homo Sapiens
MGLHLRPYRVGLLPDGLLFLLLLLMLLADPALPAGRHPPVVLVPGDLGNQLEAKLDKPTVVHYLCSKKTESYFTIWLNLELLLPVIIDCWIDNIRLVYNKTSRATQFPDGVDVRVPGFGKTFSLEFLDPSKSSVGSYFHTMVESLVGWGYTRGEDVRGAPYDWRRAPTAAAGLEGQVYPGLRVTGCALGGRGQDPARPGFRRQQPDPSHRAPEDPGAAAVSCLHQLAAALQLHMVT

SEQ ID NO: 10467 - protein, 298 aa, Homo Sapiens
MGLHLRPYRVGLLPDGLLFLLLLLMLLADPALPAGRHPPVVLVPGDLGNQLEAKLDKPTVVHYLCSKKTESYFTIWLNLELLLPVIIDCWIDNIRLVYNKTSRATQFPDGVDVRVPGFGKTFSLEFLDPSKSSVGSYFHTMVESLVGWGYTRGEDVRGAPYDWRRAPTQWFRLQDPSHLTPAWLWPADENGPYFLALREMIEEMYQLYGGPVVLVAHSMGNMYTLYFLQRQPQAWKDKYIRAFVSLGAPWGGVAKTLRVLASGDNNRIPVIGPLKIREQQRSAVSTSWLLPYNYTWSP

SEQ ID NO: 10468 - protein, 119 aa, Homo Sapiens
MIKCVIPGSDPFLEYNNYGCYCGLGGSGTPVDELDKCCQTHDNCYDQAKKLDSCKFLLDNPYTHTYSYSCSGSAITCSSKNKECEAFICNCDRNAAICFSKAPYNKAHKNLDTKKYCQS

SEQ ID NO: 10469 - protein, 148 aa, Homo Sapiens
MKLLVLAVLLTVAAADSGISPRAVWQFRKMIKCVIPGSDPFLEYNNYGCYCGLGGSGTPVDELDKCCQTHDNCYDQAKKLDSCKFLLDNPYTHTYSYSCSGSAITCSSKNKECEAFICNCDRNAAICFSKAPYNKAHKNLDTKKYCQS

SEQ ID NO: 10470 - protein, 70 aa, Homo Sapiens
MKLLVLAVLLTVAAADSGISPRAVWQFRKMIKCVIPGSDPFLEYNNYGCYCGLGGSGTPVDELDKQKQRV

SEQ ID NO: 10471 - protein, 144 aa, Homo Sapiens
MKTLLLLAVIMIFGLLQAHGNLVNFHRMIKLTTGKEAALSYGFYGCHCGVGGRGSPKDATDRCCVTHDCCYKRLEKRGCGTKFLSYKFSNSGSRITCAKQDSCRSQLCECDKAAATCFARNKTTYNKKYQYYSNKHCRGSTPRC

SEQ ID NO: 10472 - protein, 144 aa, Homo Sapiens; identical to SEQ ID NO: 10471

SEQ ID NO: 10473 - protein, 149 aa, Homo Sapiens
MKVIAILTLLLFCSPTHSSFWQFQRRVKHITGRSAFFSYYGYGCYCGLGDKGIPVDDTDRHSPSSPSPYEKLKEFSCQPVLNSYQFHIVNGAVVCGCTLGPGASCHCRLKACECDKQSVHCFKESLPTYEKNFKQFSSQPRCGRHKPWC

SEQ ID NO: 10474 - protein, 150 aa, Homo Sapiens
MLIATSFFLFFSSVVAAPTHSSFWQFQRRVKHITGRSAFFSYYGYGCYCGLGDKGIPVDDTDSPSSPSPYEKLKEFSCQPVLNSYQFHIVNGAVVCGCTLGPGASCHCRLKACECDKQSVHCFKESLPTYEKNFKQFSSQPRCGRHKPWC

SEQ ID NO: 10475 - protein, 62 aa, Homo Sapiens
MELALLCGLVVMAGVIPIQGGILNLNKMVKQVTGKMPILSYWPYGCHCGLGGRGQPKDATDC

SEQ ID NO: 10476 - protein, 145 aa, Homo Sapiens
MELALLCGLVVMAGVIPIQGGILNLNKMVKQVTGKMPILSYWPYGCHCGLGGRGQPKDATDWCCQTHDCCYDHLKTQGCSIYKDYYRYNFSQGNIHCSDKGSWCEQQLCACDKEVAFCLKRNLDTYQKRLRFYWRPHCRGQTPGC

SEQ ID NO: 10477 - protein, 142 aa, Homo Sapiens
MKSPHVLVFLCLLVALVTGNLVQFGVMIEKMTGKSALQYNDYGCYCGIGGSHWPVDQTDWCCHAHDCCYGRLEKLGCEPKLEKYLFSVSERGIFCAGRTTCQRLTCECDKRAALCFRRNLGTYNRKYAHYPNKLCTGPTPPC

SEQ ID NO: 10478 - protein, 509 aa, Homo Sapiens
MGVQAGLFGMLGFLGVALGGSPALRWYRTSCHLTKAVPGNPLGYLSFLAKDAQGLALIHARWDAHRRLQSCSWEDEPELTAAYGALCAHETAWGSFIHTPGPELQRALATLQSQWEACRALEESPAGARKKRAAGQSGVPGGGHQREKRGWTMPGTLWCGVGDSAGNSSELGVFQGPDLCCREHDRCPQNISPLQYNYGIRNYRFHTISHCDCDTRFQQCLQNQHDSISDIVGVAFFNVLEIPCFVLEEQEACVAWYWWGGCRMYGTVPLARLQPRTFYNASWSSRATSPTPSSRSPAPPKPRQKQHLRKGPPHQKGSKRPSKANTTALQDPMVSPRLDVAPTGLQGPQGGLKPQGARWVCRSFRRHLDQCEHQIGPREIEFQLLNSAQEPLFHCNCTRRLARFLRLHSPPEVTNMLWELLGTTCFKLAPPLDCVEGKNCSRDPRAIRVSARHLRRLQQRRHQLQDKGTDERQPWPSEPLRGPMSFYNQCLQLTQAARRPDRQQKSWSQ

SEQ ID NO: 10479 - protein, 138 aa, Homo Sapiens
MKGLLPLAWFLACSVPAVQGGLLDLKSMIEKVTGKNALTNYGFYGCYCGWGGRGTPKDGTDWCCWAHDHCYGRLEEKGCNIRTQSYKYRFAWGVVTCEPGPFCHVNLCACDRKLVYCLKRNLRSYNPQYQYFPNILCS

SEQ ID NO: 10480 - protein, 441 aa, Homo Sapiens
MVPPKLHVLFCLCGCLAVVYPFDWQYINPVAHMKSSAWVNKIQVLMAAASFGQTKIPRGNGPYSVGCTDLMFDHTNKGTFLRLYYPSQDNDRLDTLWIPNKEYFWGLSKFLGTHWLMGNILRLLFGSMTTPANWNSPLRPGEKYPLVVFSHGLGAFRTLYSAIGIDLASHGFIVAAVEHRDRSASATYYFKDQSAAEIGDKSWLYLRTLKQEEETHIRNEQVRQRAKECSQALSLILDIDHGKPVKNALDLKFDMEQLKDSIDREKIAVIGHSFGGATVIQTLSEDQRFRCGIALDAWMFPLGDEVYSRIPQPLFFINSEYFQYPANIIKMKKCYSPDKERKMITIRGSVHQNFADFTFATGKIIGHMLKLKGDIDSNVAIDLSNKASLAFLQKHLGLHKDFDQWDCLIEGDDENLIPGTNINTTNQHIMLQNSSGIEKYN

SEQ ID NO: 10481 - protein, 441 aa, Homo Sapiens; identical to SEQ ID NO: 10480

SEQ ID NO: 10482 - protein, 1463 aa, Homo Sapiens
MLLSPSLLLLLLLGAPRGCAEGVAAALTPERLLEWQDKGIFVIQSESLKKCIQAGKSVLTLENCKQANKHMLWKWVSNHGLFNIGGSGCLGLNFSAPEQPLSLYECDSTLVSLRWRCNRKMITGPLQYSVQVAHDNTVVASRKYIHKWISYGSGGGDICEYLHKDLHTIKGNTHGMPCMFPFQYNHQWHHECTREGREDDLLWCATTSRYERDEKWGFCPDPTSAEVGCDTIWEKDLNSHICYQFNLLSSLSWSEAHSSCQMQGGTLLSITDETEENFIREHMSSKTVEVWMGLNQLDEHAGWQWSDGTPLNYLNWSPEVNFEPFVEDHCGTFSSFMPSAWRSRDCESTLPYICKKYLNHIDHEIVEKDAWKYYATHCEPGWNPYNRNCYKLQKEEKTWHEALRSCQADNSALIDITSLAEVEFLVTLLGDENASETWIGLSSNKIPVSFEWSNDSSVIFTNWHTLEPHIFPNRSQLCVSAEQSEGHWKVKNCEERLFYICKKAGHVLSDAESGCQEGWERHGGFCYKIDTVLRSFDQASSGYYCPPALVTITNRFEQAFITSLISSVVKMKDSYFWIALQDQNDTGEYTWKPVGQKPEPVQYTHWNTHQPRYSGGCVAMRGRHPLGRWEVKHCRHFKAMSLCKQPVENQEKAEYEERWPFHPCYLDWESEPGLASCFKVFHSEKVLMKRTWREAEAFCEEFGAHLASFAHIEEENFVNELLHSKFNWTEERQFWIGFNKRNPLNAGSWEWSDRTPVVSSFLDNTYFGEDARNCAVYKANKTLLPLHCGSKREWICKIPRDVKPKIPFWYQYDVPWLFYQDAEYLFHTFASEWLNFEFVCSWLHSDLLTIHSAHEQEFIHSKIKALSKYGASWWIGLQEERANDEFRWRDGTPVIYQNWDTGRERTVNNQSQRCGFISSITGLWGSEECSVSMPSICKRKKVWLIEKKKDTPKQHGTCPKGWLYFNYKCLLLNIPKDPSSWKNWTHAQHFCAEEGGTLVAIESEVEQAFITMNLFGQTTSVWIGLQNDDYETWLNGKPVVYSNWSPFDIINIPSHNTTEVQKHIPLCALLSSNPNFHFTGKWYFEDCGKEGYGFVCEKMQDTSGHGVNTSDMYPMPNTLEYGNRTYKIINANMTWYAAIKTCLMHKAQLVSITDQYHQSFLTVVLNRLGYAHWIGLFTTDNGLNFDWSDGTKSSFTFWKDEESSLLGDCVFADSNGRWHSTACESFLQGAICHVPPETRQSEHPELCSETSIPWIKFKSNCYSFSTVLDSMSFEAAHEFCKKEGSNLLTIKDEAENAFLLEELFAFGSSVQMVWLNAQFDGNNETIKWFDGTPTDQSNWGIRKPDTDYFKPHHCVALRIPEGLWQLSPCQEKKGFICKMEADIHTAEALPEKGPSHSIIPLAVVLTLIVIVAICTLSFCIYKHNGGFFRRLAGFRNPYYPATNFSTVYLEENILISDLEKSDQ

SEQ ID NO: 10483 - protein, 1324 aa, Homo Sapiens
MLLSPSLLLLLLLGAPRGCAEGVAAALTPERLLEWQDKGIFVIQSESLKKCIQAGKSVLTLENCKQANKHMLWKWVSNHGLFNIGGSGCLGLNFSAPEQPLSLYECDSTLVSLRWRCNRKMITGPLQYSVQVAHDNTVVASRKYIHKWISYGSGGGDICEYLHKDLHTIKGNTHGMPCMFPFQYNHQWHHECTREGREDDLLWCATTSRYERDEKWGFCPDPTSAEVGCDTIWEKDLNSHICYQFNLLSSLSWSEAHSSCQMQGGTLLSITDETEENFIREHMSSKTVEVWMGLNQLDEHAGWQWSDGTPLNYLNWSPEVNFEPFVEDHCGTFSSFMPSAWRSRDCESTLPYICKKYLNHIDHEIVEKDAWKYYATHCEPGWNPYNRNCYKLQKEEKTWHEALRSCQADNSALIDITSLAEVEFLVTLLGDENASETWIGLSSNKIPVSFEWSNDSSVIFTNWHTLEPHIFPNRSQLCVSAEQSEGHWKVKNCEERLFYICKKAGHVLSDAESGCQEGWERHGGFCYKIDTVLRSFDQASSGYYCPPALVTITNRFEQAFITSLISSVVKMKDSYFWIALQDQNDTGEYTWKPVGQKPEPVQYTHWNTHQPRYSGGCVAMRGRHPLGRWEVKHCRHFKAMSLCKQPVENQEKAEYEERWPFHPCYLDWESEPGLASCFKVFHSEKVLMKRTWREAEAFCEEFGAHLASFAHIEEENFVNELLHSKFNWTEERQFWIGFNKRNPLNAGSWEWSDRTPVVSSFLDNTYFGEDARNCAVYKANKTLLPLHCGSKREWICKIPRDVKPKIPFWYQYDVPWLFYQDAEYLFHTFASEWLNFEFVCSWLHSDLLTIHSAHEQEFIHSKIKALSKYGASWWIGLQEERANDEFRWRDGTPVIYQNWDTGRERTVNNQSQRCGFISSITGLWGSEECSVSMPSICKRKKVWLIEKKKDTPKQHGTCPKGWLYFNYKCLLLNIPKDPSSWKNWTHAQHFCAEEGGTLVAIESEVEQAFITMNLFGQTTSVWIGLQNDDYETWLNGKPVVYSNWSPFDIINIPSHNTTEVQKHIPLCALLSSNPNFHFTGKWYFEDCGKEGYGFVCEKMQDTSGHGVNTSDMYPMPNTLEYGNRTYKIINANMTWYAAIKTCLMHKAQLVSITDQYHQSFLTVVLNRLGYAHWIGLFTTDNGLNFDWSDGTKSSFTFWKDEESSLLGDCVFADSNGRWHSTACESFLQGAICHVPPETRQSEHPELCSETSIPWIKFKSNCYSFSTVLDSMSFEAAHEFCKKEGSNLLTIKDEAENAFLLEELFAFGSSVQMVWLNAQFDGNSK

SEQ ID NO: 10484 - protein, 212 aa, Homo Sapiens
MKVFKFIGLMILLTSAFSAGSGQSPMTVLCSIDWFMVTVHPFMLNNDVCVHFHELHLGLGCPPNHVQPHAYQFTYRVTECGIRAKAVSQDMVIYSTEIHYSSKGTPSKFVIPVSCAAPQKSPWLTKPCSMRVASKSRATAQKDEKCYEVFSLSQSSQRPNCDCPPCVFSEEEHTQVPCHQAGAQEAQPLQPSHFLDISEDWSLHTDDMIGSM

SEQ ID NO: 10485 - protein, 55 aa, Homo Sapiens
MAVQRRLDVMEEMVEKTVDHLGTEVKGLLGLLEELAWNLPPGPFSPAPDLLGDGF

SEQ ID NO: 10486 - protein, 87 aa, Homo Sapiens
MRPLLCALTGLALLRAAGSLAAAEPFSPPRGDSAQSTACDRHMAVQRRLDVMEEMASEPWSWSPAVGGGAPARQRPQNQPCPLDFLP

SEQ ID NO: 10487 - protein, 97 aa, Homo Sapiens
MRPLLCALTGLALLRAAGSLAAAEPFSPPRGDSAQSTACDRHMAVQRRLDVMEEMVEKTVDHLGTEVKGLLGLLEELAWNLPPGPFSPAPDLLGDGF

SEQ ID NO: 10488 - protein, 516 aa, Homo Sapiens
MDAMKRGLCCVLLLCGAVFVSPSQEIHARFRRGARSYQGCSEPRCFNGGTCQQALYFSDFVCQCPEGFAGKCCEIDTRATCYEDQGISYRGTWSTAESGAECTNWNSSALAQKPYSGRRPDAIRLGLGNHNYCRNPDRDSKPWCYVFKAGKYSSEFCSTPACSEGNSDCYFGNGSAYRGTHSLTESGASCLPWNSMILIGKVYTAQNPSAQALGLGKHNYCRNPDGDAKPWCHVLKNRRLTWEYCDVPSCSTCGLRQYSQPQFRIKGGLFADIASHPWQAAIFAKHRRSPGERFLCGGILISSCWILSAAHCFQERFPPHHLTVILGRTYRVVPGEEEQKFEVEKYIVHKEFDDDTYDNDIALLQLKSDSSRCAQESSVVRTVCLPPADLQLPDWTECELSGYGKHEALSPFYSERLKEAHVRLYPSSRCTSQHLLNRTVTDNMLCAGDTRSGGPQANLHDACQGDSGGPLVCLNDGRMTLVGIISWGLGCGQKDVPGVYTKVTNYLDWIRDNMRP

SEQ ID NO: 10489 - protein, 436 aa, Homo Sapiens
MDAMKRGLCCVLLLCGAVFVSPSQEIHARFRRGARSYQVICRDEKTQMIYQQHQSWLRPVLRSNRVEYCWCNSGRAQCHSVPVKRNSDCYFGNGSAYRGTHSLTESGASCLPWNSMILIGKVYTAQNPSAQALGLGKHNYCRNPDGDAKPWCHVLKNRRLTWEYCDVPSCSTCGLRQYSQPQFRIKGGLFADIASHPWQAAIFAKHRRSPGERFLCGGILISSCWILSAAHCFQERFPPHHLTVILGRTYRVVPGEEEQKFEVEKYIVHKEFDDDTYDNDIALLQLKSDSSRCAQESSVVRTVCLPPADLQLPDWTECELSGYGKHEALSPFYSERLKEAHVRLYPSSRCTSQHLLNRTVTDNMLCAGDTRSGGPQANLHDACQGDSGGPLVCLNDGRMTLVGIISWGLGCGQKDVPGVYTKVTNYLDWIRDNMRP

SEQ ID NO: 10490 - protein, 499 aa, Homo Sapiens
MDAMKRGLCCVLLLCGAVFVSPSQEIHARFRRGARSYQVICRDEKTQMIYQQHQSWLRPVLRSNRVEYCWCNSGRAQCHSVPVKSCSEPRCFNGGTCQQALYFSDFVCQCPEGFAGKCCEIDSKPWCYVFKAGKYSSEFCSTPACSEGNSDCYFGNGSAYRGTHSLTESGASCLPWNSMILIGKVYTAQNPSAQALGLGKHNYCRNPDGDAKPWCHVLKNRRLTWEYCDVPSCSTCGLRQYSQPQFRIKGGLFADIASHPWQAAIFAKHRRSPGERFLCGGILISSCWILSAAHCFQERFPPHHLTVILGRTYRVVPGEEEQKFEVEKYIVHKEFDDDTYDNDIALLQLKSDSSRCAQESSVVRTVCLPPADLQLPDWTECELSGYGKHEALSPFYSERLKEAHVRLYPSSRCTSQHLLNRTVTDNMLCAGDTRSGGPQANLHDACQGDSGGPLVCLNDGRMTLVGIISWGLGCGQKDVPGVYTKVTNYLDWIRDNMRP

SEQ ID NO: 10491 - protein, 157 aa, Homo Sapiens
MDAMKRGLCCVLLLCGAVFVSPSQEIHARFRRGARSYQVICRDEKTQMIYQQHQSWLRPVLRSNRVEYCWCNSGRAQCHSVPVKSCSEPRCFNGGTCQQALYFSDFVCQCPEGFAGKCCEIDTRATCYEDQGISYRGTWSTAESGAECTNWNSSALA

SEQ ID NO: 10492 - protein, 178 aa, Homo Sapiens
MDAMKRGLCCVLLLCGAVFVSPSQEIHARFRRGARSYQVICRDEKTQMIYQQHQSWLRPVLRSNRVEYCWCNSGRAQCHSVPVKSCSEPRCFNGGTCQQALYFSDFVCQCPEGFAGKCCEIDTRATCYEDQGISYRGTWSTAESGAECTNWNSSALAQKPYSGRRPDAIRLGLGNHNY

SEQ ID NO: 10493 - protein, 562 aa, Homo Sapiens
MDAMKRGLCCVLLLCGAVFVSPSQEIHARFRRGARSYQVICRDEKTQMIYQQHQSWLRPVLRSNRVEYCWCNSGRAQCHSVPVKSCSEPRCFNGGTCQQALYFSDFVCQCPEGFAGKCCEIDTRATCYEDQGISYRGTWSTAESGAECTNWNSSALAQKPYSGRRPDAIRLGLGNHNYCRNPDRDSKPWCYVFKAGKYSSEFCSTPACSEGNSDCYFGNGSAYRGTHSLTESGASCLPWNSMILIGKVYTAQNPSAQALGLGKHNYCRNPDGDAKPWCHVLKNRRLTWEYCDVPSCSTCGLRQYSQPQFRIKGGLFADIASHPWQAAIFAKHRRSPGERFLCGGILISSCWILSAAHCFQERFPPHHLTVILGRTYRVVPGEEEQKFEVEKYIVHKEFDDDTYDNDIALLQLKSDSSRCAQESSVVRTVCLPPADLQLPDWTECELSGYGKHEALSPFYSERLKEAHVRLYPSSRCTSQHLLNRTVTDNMLCAGDTRSGGPQANLHDACQGDSGGPLVCLNDGRMTLVGIISWGLGCGQKDVPGVYTKVTNYLDWIRDNMRP

SEQ ID NO: 10494 - protein, 562 aa, Homo Sapiens; identical to SEQ ID NO: 10493

SEQ ID NO: 10495 - protein, 473 aa, Homo Sapiens
MDAMKRGLCCVLLLCGAVFVSPSQEIHARFRRGARSYQVICRDEKTQMIYQQHQSWLRPVLRSNRVEYCWCNSGRAQCHSVPVKSCSEPRCFNGGTCQQALYFSDFVCQCPEGFAGKCCEIGNSDCYFGNGSAYRGTHSLTESGASCLPWNSMILIGKVYTAQNPSAQALGLGKHNYCRNPDGDAKPWCHVLKNRRLTWEYCDVPSCSTCGLRQYSQPQFRIKGGLFADIASHPWQAAIFAKHRRSPGERFLCGGILISSCWILSAAHCFQERFPPHHLTVILGRTYRVVPGEEEQKFEVEKYIVHKEFDDDTYDNDIALLQLKSDSSRCAQESSVVRTVCLPPADLQLPDWTECELSGYGKHEALSPFYSERLKEAHVRLYPSSRCTSQHLLNRTVTDNMLCAGDTRSGGPQANLHDACQGDSGGPLVCLNDGRMTLVGIISWGLGCGQKDVPGVYTKVTNYLDWIRDNMRP

SEQ ID NO: 10496 - protein, 96 aa, Homo Sapiens
  misc_feature (1)..(1): Xaa can be any naturally occurring amino acid
XFAGKCCEIDTRATCYEDQGISYRGTWSTAESGAECTNWNSSALAQKPYSGRRPDAIRLGLGNHNYCRTPVPRHWAWANIITAGILMGMPSPGATC

SEQ ID NO: 10497 - protein, 106 aa, Homo Sapiens
MRALLARLLLCVLVVSDSKGSNELHQVPSNCDCLNGGTCVSNKYFSNIHWCNCPKKFGGQHCEIDKSKTCYEGNGHFYRGKASTDTMGRPCLPWNSATVLQQTYHA

SEQ ID NO: 10498 - protein, 431 aa, Homo Sapiens
MRALLARLLLCVLVVSDSKGSNELHQVPSNCDCLNGGTCVSNKYFSNIHWCNCPKKFGGQHCEIDKSKTCYEGNGHFYRGKASTDTMGRPCLPWNSATVLQQTYHAHRSDALQLGLGKHNYCRNPDNRRRPWCYVQVGLKLLVQECMVHDCADGKKPSSPPEELKFQCGQKTLRPRFKIIGGEFTTIENQPWFAAIYRRHRGGSVTYVCGGSLISPCWVISATHCFIDYPKKEDYIVYLGRSRLNSNTQGEMKFEVENLILHKDYSADTLAHHNDIALLKIRSKEGRCAQPSRTIQTICLPSMYNDPQFGTSCEITGFGKENSTDYLYPEQLKMTVVKLISHRECQQPHYYGSEVTTKMLCAADPQWKTDSCQGDSGGPLVCSLQGRMTLTGIVSWGRGCALKDKPGVYTRVSHFLPWIRSHTKEENGLAL

SEQ ID NO: 10499 - protein, 414 aa, Homo Sapiens
MVFHLRTRYEQANCDCLNGGTCVSNKYFSNIHWCNCPKKFGGQHCEIDKSKTCYEGNGHFYRGKASTDTMGRPCLPWNSATVLQQTYHAHRSDALQLGLGKHNYCRNPDNRRRPWCYVQVGLKLLVQECMVHDCADGKKPSSPPEELKFQCGQKTLRPRFKIIGGEFTTIENQPWFAAIYRRHRGGSVTYVCGGSLISPCWVISATHCFIDYPKKEDYIVYLGRSRLNSNTQGEMKFEVENLILHKDYSADTLAHHNDIALLKIRSKEGRCAQPSRTIQTICLPSMYNDPQFGTSCEITGFGKENSTDYLYPEQLKMTVVKLISHRECQQPHYYGSEVTTKMLCAADPQWKTDSCQGDSGGPLVCSLQGRMTLTGIVSWGRGCALKDKPGVYTRVSHFLPWIRSHTKEENGLAL

SEQ ID NO: 10500 - protein, 78 aa, Homo Sapiens
MDGAWRLASWGLRCMQCKTNGDCRVEECALGQDLCRTTIVRLWEEGEELELVEKSCTHSEKTNRTLSYRTGLKITSLT

SEQ ID NO: 10501 - protein, 152 aa, Homo Sapiens
MDTNLNGRGLETWSSWGLRCMQCKTNGDCRVEECALGQDLCRTTIVRLWEEGEELELVEKSCTHSEKTNRTLSYRTGLKITSLTEVVCGLDLCNQGNSGRAVTYSRSRYLECISCGSSDMSCERGRHQSLQCRSPEEQCLDVVTHWIQEGEE

SEQ ID NO: 10502 - protein, 335 aa, Homo Sapiens
MGHPPLLPLLLLLHTCVPASWGLRCMQCKTNGDCRVEECALGQDLCRTTIVRLWEEGEELELVEKSCTHSEKTNRTLSYRTGLKITSLTEVVCGLDLCNQGNSGRAVTYSRSRYLECISCGSSDMSCERGRHQSLQCRSPEEQCLDVVTHWIQEGEEGRPKDDRHLRGCGYLPGCPGSNGFHNNDTFHFLKCCNTTKCNEGPILELENLPQNGRQCYSCKGNSTHGCSSEETFLIDCRGPMNQCLVATGTHEPKNQSYMVRGCATASMCQHAHLGDAFSMNHIDVSCCTKSGCNHPDLDVQYRSGAAPQPGPAHLSLTITLLMTARLWGGTLLWT

SEQ ID NO: 10503 - protein, 281 aa, Homo Sapiens
MGHPPLLPLLLLLHTCVPASWGLRCMQCKTNGDCRVEECALGQDLCRTTIVRLWEEGEELELVEKSCTHSEKTNRTLSYRTGLKITSLTEVVCGLDLCNQGNSGRAVTYSRSRYLECISCGSSDMSCERGRHQSLQCRSPEEQCLDVVTHWIQEGEEGRPKDDRHLRGCGYLPGCPGSNGFHNNDTFHFLKCCNTTKCNEGPILELENLPQNGRQCYSCKGNSTHGCSSEETFLIDCRGPMNQCLVATGTHERSLWGSWLPCKSTTALRPPCCEEAQATHV

SEQ ID NO: 10504 - protein, 286 aa, Homo Sapiens
MGHPPLLPLLLLLHTCVPASWGLRCMQCKTNGDCRVEECALGQDLCRTTIVRLWEEGEELELVEKSCTHSEKTNRTLSYRTGLKITSLTEVVCGLDLCNQGNSGRAVTYSRSRYLECISCGSSDMSCERGRHQSLQCRSPEEQCLDVVTHWIQEGEEGRPKDDRHLRGCGYLPGCPGSNGFHNNDTFHFLKCCNTTKCNEGPKPKNQSYMVRGCATASMCQHAHLGDAFSMNHIDVSCCTKSGCNHPDLDVQYRSGAAPQPGPAHLSLTITLLMTARLWGGTLLWT

SEQ ID NO: 10505 - protein, 290 aa, Homo Sapiens
MGHPPLLPLLLLLHTCVPASWGLRCMQCKTNGDCRVEECALGQDLCRTTIVRLWEEGEELELVEKSCTHSEKTNRTLSYRTGLKITSLTEVVCGLDLCNQGNSGRAVTYSRSRYLECISCGSSDMSCERGRHQSLQCRSPEEQCLDVVTHWIQEGEEVLELENLPQNGRQCYSCKGNSTHGCSSEETFLIDCRGPMNQCLVATGTHEPKNQSYMVRGCATASMCQHAHLGDAFSMNHIDVSCCTKSGCNHPDLDVQYRSGAAPQPGPAHLSLTITLLMTARLWGGTLLWT

SEQ ID NO: 10506 - protein, 46 aa, Homo Sapiens
MGHPPLLPLLLLLHTCVPAWATARDSISKKKKRKKKERRNLRRYNL

SEQ ID NO: 10507 - protein, 153 aa, Homo Sapiens
MQCKTNGDCRVEECALGQDLCRTTIVRLWEEGEELELVEKSCTHSEKTNRTLSYRTGLKITSLTEVVCGLDLCNQGNSGRAVTYSRSRYLECISCGSSDMSCERGRHQSLQCRSPEEQCLDVVTHWIQEGEEGRPKDDRHLRGCGYLPGCPGS

SEQ ID NO: 10508 - protein, 226 aa, Homo Sapiens
MQCKTNGDCRVEECALGQDLCRTTIVRLWEEGEELELVEKSCTHSEKTNRTLSYRTGLKITSLTEVVCGLDLCNQGNSGRAVTYSRSRYLECISCGSSDMSCERGRHQSLQCRSPEEQCLDVVTHWIQEGEEGRPKDDRHLRGCGYLPGCPGSNGFHNNDTFHFLKCCNTTKCNEGPILELENLPQNGRQCYSCKGNSTHGCSSEETFLIDCRGPMNQCLVATGTH

SEQ ID NO: 10509 - protein, 154 aa, Homo Sapiens
  misc_feature (1)..(1): Xaa can be any naturally occurring amino acid
XCERGRHQSLQCRSPEEQCLDVVTHWIQEGEEGRPKDDRHLRGCGYLPGCPGSNGFHNNDTFHFLKCCNTTKCNEGPILELENLPQNGRQCYSCKGNSTHGCSSEETFLIDCRGPMNQCLVATGTHGCGHFCHGKVEFRLGAVAEACTLSTLGG

SEQ ID NO: 10510 - protein, 133 aa, Homo Sapiens
  misc_feature (1)..(1): Xaa can be any naturally occurring amino acid
XRYLECISCGSSDMSCERGRHQSLQCRSPEEQCLDVVTHWIQEGEEGRPKDDRHLRGCGYLPGCPGSNGFHNNDTFHFLKCCNTTKCNEGPILELENLPQNGRQCYSCKGNSTHGCSSEETFLIDCRGTLLWT

SEQ ID NO: 10511 - protein, 185 aa, Homo Sapiens
  misc_feature (1)..(1): Xaa can be any naturally occurring amino acid
XSWGLRCMQCKTNGDCRVEECALGQDLCRTTIVRLWEGRAVTYSRSRYLECISCGSSDMSCERGRHQSLQCRSPEEQCLDVVTHWIQEGEEGRPKDDRHLRGCGYLPGCPGSNGFHNNDTFHFLKCCNTTKCNEGPILELENLPQNGRQCYSCKGNSTHGCSSEETFLIDCRGPMNQCLVATGTH

SEQ ID NO: 10512 - protein, 144 aa, Homo Sapiens
MPAEKTVQVKNVMDKNGDAYGFYNNSVKTTGWGILEIRAGYGSQTLSNEIIMFVAGFLEGYLTAPHMNDHYTNLYPQLITKPSIMDKVQDFMEKQDKWTRKNIKEYKTDSFWRHTGYVMAQIDGLYVGAKKRAILEGTKPMTLF

SEQ ID NO: 10513 - protein, 40 aa, Homo Sapiens
MTRGGPGGRPGLPQPPPLLLLLLLLPLLLVTAEPPKPADT

SEQ ID NO: 10514 - protein, 553 aa, Homo Sapiens
MTRGGPGGRPGLPQPPPLLLLLLLLPLLLVTAEPPKPAGVYYATAYWMPAEKTVQVKNVMDKNGDAYGFYNNSVKTTGWGILEIRAGYGSQTLSNEIIMFVAGFLEGYLTAPHMNDHYTNLYPQLITKPSIMDKVQDFMEKQDKWTRKNIKEYKTDSFWRHTGYVMAQIDGLYVGAKKRAILEGTKPMTLFQIQFLNSVGDLLDLIPSLSPTKNGSLKVFKRWDMGHCSALIKVLPGFENILFAHSSWYTYAAMLRIYKHWDFNVIDKDTSSSRLSFSSYPGFLESLDDFYILSSGLILLQTTNSVFNKTLLKQVIPETLLSWQRVRVANMMADSGKRWADIFSKYNSGTYNNQYMVLDLKKVKLNHSLDKGTLYIVEQIPTYVEYSEQTDVLRKGYWPSYNVPFHEKIYNWSGYPLLVQKLGLDYSYDLAPRAKIFRRDQGKVTDTASMKYIMRYNNYKKDPYSRGDPCNTICCREDLNSPNPSPGGCYDTKVADIYLASQYTSYAISGPTVQGGLPVFRWDRFNKTLHQGMPEVYNFDFITMKPILKLDIK

SEQ ID NO: 10515 - protein, 52 aa, Homo Sapiens
DGQVPPASRSRSVLLDVSAGQLLMVDGRHPDAVAWANLTNAIRETGSSTCTG

SEQ ID NO: 10516 - protein, 589 aa, Homo Sapiens
MVGQMYCYPGSHLARALTRALALALVLALLVGPFLSGLAGAIPAPGGRWARDGQVPPASRSRSVLLDVSAGQLLMVDGRHPDAVAWANLTNAIRETGWAFLELGTSGQYNDSLQAYAAGVVEAAVSEELIYMHWMNTVVNYCGPFEYEVGYCERLKSFLEANLEWMQEEMESNPDSPYWHQVRLTLLQLKGLEDSYEGRVSFPAGKFTIKPLGFLLLQLSGDLEDLELALNKTKIKPSLGSGSCSALIKLLPGQSDLLVAHNTWNNYQHMLRVIKKYWLQFREGPWGDYPLVPGNKLVFSSYPGTIFSCDDFYILGSGLVTLETTIGNKNPALWKYVRPRGCVLEWVRNIVANRLASDGATWADIFKRFNSGTYNNQWMIVDYKAFIPGGPSPGSRVLTILEQIPGMVVVADKTSELYQKTYWASYNIPSFETVFNASGLQALVAQYGDWFSYDGSPRAQIFRRNQSLVQDMDSMVRLMRYNDFLHDPLSLCKACNPQPNGENAISARSDLNPANGSYPFQALRQRSHGGIDVKVTSMSLARILSLLAASGPTWDQVPPFQWSTSPFSGLLHMGQPDLWKFAPVKVSWD

SEQ ID NO: 10517 - protein, 557 aa, Homo Sapiens
MVGQMYCYPGSHLARALTRALALALVLALLVGPFLSGLAGAIPAPGGRWARDGQVPPASRSRSVLLDVSAGQLLMVDGRHPDAVAWANLTNAIRETGWAFLELGTSGQYNDSLQAYAAGVVEAAVSEELIYMHWMNTVVNYCGPFEYEVGYCERLKSFLEANLEWMQEEMESNPDSPYWHQVRLTLLQLKGLEDSYEGRVSFPAGKFTIKPLGFLLLQLSGDLEDLELALNKTKIKPSLGSGSCSALIKLLPGQSDLLVAHNTWNNYQHMLRVIKKYWLQFREGPWGDYPLVPGNKLVFSSYPGTIFSCDDFYILGSGLVTLETTIGNKNPALWKYVRPRGCVLEWVRNIVANRLASDGATWADIFKRFNSGTGMVVVADKTSELYQKTYWASYNIPSFETVFNASGLQALVAQYGDWFSYDGSPRAQIFRRNQSLVQDMDSMVRLMRYNDFLHDPLSLCKACNPQPNGENAISARSDLNPANGSYPFQALRQRSHGGIDVKVTSMSLARILSLLAASGPTWDQVPPFQWSTSPFSGLLHMGQPDLWKFAPVKVSWD

SEQ ID NO: 10518 - protein, 136 aa, Homo Sapiens
MEHKEVVLLLLLFLKSGQGEPLDDYVNTQGASLFSVTKKQLGAGSIEECAAKCEEDEEFTCRAFQYHSKEQQCVIMAENRKSSIIIRMRDVVLFEKKVYLSECKTGNGKNYRGTMSKTKNGITCQKWSSTSPHRPR

SEQ ID NO: 10519 - protein, 810 aa, Homo Sapiens
MEHKEVVLLLLLFLKSGQGEPLDDYVNTQGASLFSVTKKQLGAGSIEECAAKCEEDEEFTCRAFQYHSKEQQCVIMAENRKSSIIIRMRDVVLFEKKVYLSECKTGNGKNYRGTMSKTKNGITCQKWSSTSPHRPRFSPATHPSEGLEENYCRNPDNDPQGPWCYTTDPEKRYDYCDILECEEECMHCSGENYDGKISKTMSGLECQAWDSQSPHAHGYIPSKFPNKNLKKNYCRNPDRELRPWCFTTDPNKRWELCDIPRCTTPPPSSGPTYQCLKGTGENYRGNVAVTVSGHTCQHWSAQTPHTHNRTPENFPCKNLDENYCRNPDGKRAPWCHTTNSQVRWEYCKIPSCDSSPVSTEQLAPTAPPELTPVVQDCYHGDGQSYRGTSSTTTTGKKCQSWSSMTPHRHQKTPENYPNAGLTMNYCRNPDADKGPWCFTTDPSVRWEYCNLKKCSGTEASVVAPPPVVLLPDVETPSEEDCMFGNGKGYRGKRATTVTGTPCQDWAAQEPHRHSIFTPETNPRAGLEKNYCRNPDGDVGGPWCYTTNPRKLYDYCDVPQCAAPSFDCGKPQVEPKKCPGRVVGGCVAHPHSWPWQVSLRTRFGMHFCGGTLISPEWVLTAAHCLEKSPRPSSYKVILGAHQEVNLEPHVQEIEVSRLFLEPTRKDIALLKLSSPAVITDKVIPACLPSPNYVVADRTECFITGWGETQGTFGAGLLKEAQLPVIENKVCNRYEFLNGRVQSTELCAGHLAGGTDSCQGDSGGPLVCFEKDKYILQGVTSWGLGCARPNKPGVYVRVSRFVTWIEGVMRNN

SEQ ID NO: 10520 - protein, 166 aa, Homo Sapiens
MEHKEVVLLLLLFLKSGQGEPLDDYVNTQGASLFSVTKKQLGAGSIEECAAKCEEDEEFTCRYFHCRCTYAGICNSDGKAFQYHSKEQQCVIMAENRKSSIIIRMRDVVLFEKKVYLSECKTGNGKNYRGTMSKTKNGITCQKWSSTSPHRPRFSPATHPSEGLEE

SEQ ID NO: 10521 - protein, 96 aa, Homo Sapiens
MEHKEVVLLLLLFLKSGQGEPLDDYVNTQGPSLFSVTKKQLGAGSREECAAKCEEDKEFTCRAFQYHSKEQQCVIMAENRKSSIIIRMRDAVLFEK

SEQ ID NO: 10522 - protein, 96 aa, Homo Sapiens; identical to SEQ ID NO: 10521

SEQ ID NO: 10523 - protein, 96 aa, Homo Sapiens; identical to SEQ ID NO: 10521

SEQ ID NO: 10524 - protein, 89 aa, Homo Sapiens
MEHKEVVLLLLLFLKSGQGEPLDDYVNTQGPSLFSVTKKQLGAGSREECAAKCEEDKEFTCRYFHRRCTYPEICNSDGHSNITVKSNNV

SEQ ID NO: 10525 - protein, 96 aa, Homo Sapiens; identical to SEQ ID NO: 10521

SEQ ID NO: 10526 - protein, 96 aa, Homo Sapiens; identical to SEQ ID NO: 10521

SEQ ID NO: 10527 - protein, 225 aa, Homo Sapiens
MRPLLLLALLGWLLLAEAKGDAKPEAPCCQEGLRAGGSGSLHLGRDFTVLAGARGSPSPSVSSIPRFWIPGSDNLLVLTVATKETEGFRRFKRSAQFFNYKIQALGLGEDWNVEKGTSAGGGQKVRLLKKALEKHADKEDLVILFADSYDVLFASGPRELLKKFRQARSQVVFSAEELIYPDRRLETKYPVVSDGKRFLGSGGFIGYAPNLSKLVAEWEGQDSDS

SEQ ID NO: 10528 - protein, 727 aa, Homo Sapiens
MRPLLLLALLGWLLLAEAKGDAKPEDNLLVLTVATKETEGFRRFKRSAQFFNYKIQALGLGEDWNVEKGTSAGGGQKVRLLKKALEKHADKEDLVILFADSYDVLFASGPRELLKKFRQARSQVVFSAEELIYPDRRLETKYPVVSDGKRFLGSGGFIGYAPNLSKLVAEWEGQDSDSDQLFYTKIFLDPEKREQINITLDHRCRIFQNLDGALDEVVLKFEMGHVRARNLAYDTLPVLIHGNGPTKLQLNYLGNYIPRFWTFETGCTVCDEGLRSLKGIGDEALPTVLVGVFIEQPTPFVSLFFQRLLRLHYPQKHMRLFIHNHEQHHKAQVEEFLAQHGSEYQSVKLVGPEVRMANADARNMGADLCRQDRSCTYYFSVDADVALTEPNSLRLLIQQNKNVIAPLMTRHGRLWSNFWGALSADGYYARSEDYVDIVQGRRVGVWNVPYISNIYLIKGSALRGELQSSDLFHHSKLDPDMAFCANIRQQDVFMFLTNRHTLGHLLSLDSYRTTHLHNDLWEVFSNPEDWKEKYIHQNYTKALAGKLVETPCPDVYWFPIFTEVACDELVEEMEHFGQWSLGNNKDNRIQGGYENVPTIDIHMNQIGFEREWHKFLLEYIAPMTEKLYPGYYTRAQFDLAFVVRYKPDEQPSLMPHHDASTFTINIALNRVGVDYEGGGCRFLRYNCSIRAPRKGWTLMHPGRLTHYHEGLPTTRGTRYIAVSFVDP

SEQ ID NO: 10529 - protein, 283 aa, Homo Sapiens
MRPLLLLALLGWLLLAEAKGDAKPEDNLLVLTVATKETEGFRRFKRSAQFFNYKIQALGLGEDWNVEKGTSAGGGQKVRLLKKALEKHADKEDLVILFADSYDVLFASGPRELLKKFRQARSQVVFSAEELIYPDRRLETKYPVVSDGKRFLGSGGFIGYAPNLSKLVAEWEGQDSDSDQLFYTKIFLDPEKREQINITLDHRCRIFQNLDGALVSPWGQGHLPGACYELTASVLTSELSVMPSFPAVVLQLNYLGNYIPRFWTFETGCTVCDEGLRSLKGIG

SEQ ID NO: 10530 - protein, 98 aa, Homo Sapiens
MGGCTVKPQLLLLALVLHPWNPCLGADSEKPSSIPTDKLLVITVATKESDGFHRFMQSAKYFNYTVKKEGSVSQVFSTNKRRTRRYLGPWSRRRMERW

SEQ ID NO: 10531 - protein, 758 aa, Homo Sapiens
MGGCTVKPQLLLLALVLHPWNPCLGADSEKPSSIPTDKLLVITVATKESDGFHRFMQSAKYFNYTVKVLGQGEEWRGGDGINSIGGGQKVRLMKEVMEHYADQDDLVVMFTECFDVIFAGGPEEVLKKFQKANHKVVFAADGILWPDKRLADKYPVVHIGKRYLNSGGFIGYAPYVNRIVQQWNLQDNDDDQLFYTKVYIDPLKREAINITLDHKCKIFQTLNGAVDEVVLKFENGKARAKNTFYETLPVAINGNGPTKILLNYFGNYVPNSWTQDNGCTLCEFDTVDLSAVDVHPNVSIGVFIEQPTPFLPRFLDILLTLDYPKEALKLFIHNKEVYHEKDIKVFFDKAKHEIKTIKIVGPEENLSQAEARNMGMDFCRQDEKCDYYFSVDADVVLTNPRTLKILIEQNRKIIAPLVTRHGKLWSNFWGALSPDGYYARSEDYVDIVQGNRVGVWNVPYMANVYLIKGKTLRSEMNERNYFVRDKLDPDMALCRNAREMTLQREKDSPTPETFQMLSPPKGVFMYISNRHEFGRLLSTANYNTSHYNNDLWQIFENPVDWKEKYINRDYSKIFTENIVEQPCPDVFWFPIFSEKACDELVEEMEHYGKWSGGKHHDSRISGGYENVPTDDIHMKQVDLENVWLHFIREFIAPVTLKVFAGYYTKGFALLNFVVKYSPERQRSLRPHHDASTFTINIALNNVGEDFQGGGCKFLRYNCSIESPRKGWSFMHPGRLTHLHEGLPVKNGTRYIAVSFIDP

SEQ ID NO: 10532 - protein, 737 aa, Homo Sapiens
MGGCTVKPQLLLLALVLHPWNPCLGADSEKPSSIPTDKLLVITVATKESDGFHRFMQSAKYFNYTVKVLGQGEEWRGGDGINSIGGGQKVRLMKEVMEHYADQDDLVVMFTECFDVIFAGGPEEVLKKFQKANHKVVFAADGILWPDKRLADKYPVVHIGKRYLNSGGFIGYAPYVNRIVQQWNLQDNDDDQLFYTKVYIDPLKREAINITLDHKCKIFQTLNGAVDEVVLKFENGKARAKNTFYETLPVAINGNGPTKILLNYFGNYVPNSWTQDNGCTLCEFDTVDLSAVDVHPNVSIGVFIEQPTPFLPRFLDILLTLDYPKEALKLFIHNKEVYHEKDIKVFFDKAKHEIKTIKIVGPEENLSQAEARNMGMDFCRQDEKCDYYFSVDADVVLTNPRTLKILIEQNRKIIAPLVTRHGKLWSNFWGALSPDGYYARSEDYVDIVQGNRVGVWNVPYMANVYLIKGKTLRSEMNERNYFVRDKLDPDMALCRNAREMGVFMYISNRHEFGRLLSTANYNTSHYNNDLWQIFENPVDWKEKYINRDYSKIFTENIVEQPCPDVFWFPIFSEKACDELVEEMEHYGKWSGGKHHDSRISGGYENVPTDDIHMKQVDLENVWLHFIREFIAPVTLKVFAGYYTKGFALLNFVVKYSPERQRSLRPHHDASTFTINIALNNVGEDFQGGGCKFLRYNCSIESPRKGWSFMHPGRLTHLHEGLPVKNGTRYIAVSFIDP

SEQ ID NO: 10533 - protein, 418 aa, Homo Sapiens
MLENHILHKRIYILTFFSQQIFILCHAHFIFFFTVRDFCRQDEKCDYYFSVDADVVLTNPRTLKILIEQNRKIIAPLVTRHGKLWSNFWGALSPDGYYARSEDYVDIVQGNRVGVWNVPYMANVYLIKGKTLRSEMNERNYFVRDKLDPDMALCRNAREMTLQREKDSPTPETFQMLSPPKGVFMYISNRHEFGRLLSTANYNTSHYNNDLWQIFENPVDWKEKYINRDYSKIFTENIVEQPCPDVFWFPIFSEKACDELVEEMEHYGKWSGGKHHDSRISGGYENVPTDDIHMKQVDLENVWLHFIREFIAPVTLKVFAGYYTKGFALLNFVVKYSPERQRSLRPHHDASTFTINIALNNVGEDFQGGGCKFLRYNCSIESPRKGWSFMHPGRLTHLHEGLPVKNGTRYIAVSFIDP

SEQ ID NO: 10534 - protein, 703 aa, Homo Sapiens
MQSAKYFNYTVKVLGQGEEWRGGDGINSIGGGQKVRLMKEVMEHYADQDDLVVMFTECFDVIFAGGPEEVLKKFQKANHKVVFAADGILWPDKRLADKYPVVHIGKRYLNSGGFIGYAPYVNRIVQQWNLQDNDDDQLFYTKVYIDPLKREAINITLDHKCKIFQTLNGAVDEVVLKFENGKARAKNTFYETLPVAINGNGPTKILLNYFGNYVPNSWTQDNGCTLCEFDTVDLSAVDVHPNVSIGVFIEQPTPFLPRFLDILLTLDYPKEALKLFIHNKEVYHEKDIKVFFDKAKHEIKTIKIVGPEENLSQAEARNMGMDFCRQDEKCDYYFSVDADVVLTNPRTLKILIEQNRKIIAPLVTRHGKLWSNFWGALSPDGYYARSEDYVDIVQGNRVGVWNVPYMANVYLIKGKTLRSEMNERNYFVRDKLDPDMALCRNAREMTLQREKDSPTPETFQMLSPPKGVFMYISNRHEFGRLLSTANYNTSHYNNDLWQIFENPVDWKEKYINRDYSKIFTENIVEQPCPDVFWFPIFSEKACDELVEEMEHYGKWSGGKHHDSRISGGYENVPTDDIHMKQVDLENVWLHFIREFIAPVTLKVFAGYYTKGFALLNFVVKYSPERQRSLRPHHDASTFTINIALNNVGEDFQGGGCKFLRYNCSIESPRKGWSFMHPGRLTHLHEGLPVKNGTRYIAVSFIDP

SEQ ID NO: 10535 - protein, 229 aa, Homo Sapiens
MTRFGVRLYKLLVITVATKESDGFHRFMQSAKYFNYTVKVLGQGEEWRGGDGINSIGGGQKVRLMKEVMEHYADQDDLVVMFTECFDVIFAGGPEEVLKKFQKANHKVVFAADGILWPDKRLADKYPVVHIGKRYLNSGGFIGYAPYVNRIVQQWNLQDNDDDQLFYTKVYIDPLKREAINITLDHKCKIFQTLNGAVDEVVLKFENGKARAKNTFYETLPVAINGNGP

SEQ ID NO: 10536 - protein, 171 aa, Homo Sapiens
MGHFKDVVTVFLQEILFSFGPCEDAVITKAAPGASPGRRGEKLLVITVATAETEGYLRFLRSAEFFNYTVRTLGLGEEWRGGDVARTVGGGQKVRWLKKEMEKYADREDMIIMFVDSYDVILAGSPTELLKKFVQSGSRLLFSAESFCWPEWGLAEQYPEVGTGKRFLNSG

SEQ ID NO: 10537 - protein, 76 aa, Homo Sapiens
MTSSGPGPRFLLLLPLLLPPAASASDRPRGRDPVNPEKLLVITVATAETEGYLRFLRSAEFFNYTVRTLGLGEEWR

SEQ ID NO: 10538 - protein, 738 aa, Homo Sapiens
MTSSGPGPRFLLLLPLLLPPAASASDRPRGRDPVNPEKLLVITVATAETEGYLRFLRSAEFFNYTVRTLGLGEEWRGGDVARTVGGGQKVRWLKKEMEKYADREDMIIMFVDSYDVILAGSPTELLKKFVQSGSRLLFSAESFCWPEWGLAEQYPEVGTGKRFLNSGGFIGFATTIHQIVRQWKYKDDDDDQLFYTRLYLDPGLREKLSLNLDHKSRIFQNLNGALDEVVLKFDRNRVRIRNVAYDTLPIVVHGNGPTKLQLNYLGNYVPNGWTPEGGCGFCNQDRRTLPGGQPPPRVFLAVFVEQPTPFLPRFLQRLLLLDYPPDRVTLFLHNNEVFHEPHIADSWPQLQDHFSAVKLVGPEEALSPGEARDMAMDLCRQDPECEFYFSLDADAVLTNLQTLRILIEENRKVIAPMLSRHGKLWSNFWGALSPDEYYARSEDYVELVQRKRVGVWNVPYISQAYVIRGDTLRMELPQRDVFSGSDTDPDMAFCKSFRDKGIFLHLSNQHEFGRLLATSRYDTEHLHPDLWQIFDNPVDWKEQYIHENYSRALEGEGIVEQPCPDVYWFPLLSEQMCDELVAEMEHYGQWSGGRHEDSRLAGGYENVPTVDIHMKQVGYEDQWLQLLRTYVGPMTESLFPGYHTKARAVMNFVVRYRPDEQPSLRPHHDSSTFTLNVALNHKGLDYEGGGCRFLRYDCVISSPRKGWALLHPGRLTHYHEGLPTTWGTRYIMVSFVDP

SEQ ID NO: 10539 - protein, 125 aa, Homo Sapiens
TLGLGEEWRGGDVARTVGGGQKVRWLKKEMEKYADREDMIIMFVDSYDVILAGSPTELLKKFVQSGSRLLFSAESFCWPEWGLAEQYPEDSSVLPPPSTKSCASGSTRMMTTTSCSTHGSTWTQD

SEQ ID NO: 10540 - protein, 270 aa, Homo Sapiens
  misc_feature (1)..(1): Xaa can be any naturally occurring amino acid
XFIGFATTIHQIVRQWKYKDDDDDQLFYTRLYLDPGLREKLSLNLDHKSRIFQNLNGALDEVVLKFDRNRVRIRNVAYDTLPIVVHGNGPTKLQLNYLGNYVPNGWTPEGGCGFCNQDRRTLPGGQEVFHEPHIADSWPQLQDHFSAVKLVGPEEALSPGEARDMAMDLCRQDPECEFYFSLDADAVLTNLQTLRILIEENRKVIAPMLSRHGKLWSNFWGALSPDEYYARSEDYVELVQRKRVGVWNVPYISQAYVIRGDTLRMELPQR

SEQ ID NO: 10541 - protein, 66 aa, Homo Sapiens
  misc_feature (1)..(1): Xaa can be any naturally occurring amino acid
XFSLDADAVLTNLQTLRILIEENRKVIAPMLSRHGKLWSNFWGALSPDEYYARSEDYVELVQRKRV

SEQ ID NO: 10542 - protein, 264 aa, Homo Sapiens
  misc_feature (1)..(1): Xaa can be any naturally occurring amino acid
XNFWGALSPDEYYARSEDYVELVQRKRVGVWNVPYISQAYVIRGDTLRMELPQRDVFSGSDTDPDMAFCKSFRDKGIFLHLSNQHEFGRLLATSRYDTEHLHPDLWQIFDNPVDWKEQYIHENYSRALEGEGIVEQPCPDVYWFPLLSEQMCDELVAEMEHYGQWSGGRHEARAVMNFVVRYRPDEQPSLRPHHDSSTFTLNVALNHKGLDYEGGGCRFLRYDCVISSPRKGWALLHPGRLTHYHEGLPTTWGTRYIMVSFVDP

SEQ ID NO: 10543 - protein, 398 aa, Homo Sapiens
MALFGALFLALLAGAHAEFPGCKIRVTSKALELVKQEGLRFLEQELETITIPDLRGKEGHFYYNISEKVYDFLSTFITSGMRFLLNQQICPVLYHAGTVLLNSLLDTVPVRSSVDELVGIDYSLMKDPVASTSNLDMDFRGAFFPLTERNWSLPNRAVEPQLQEEERMVYVAFSEFFFDSAMESYFRAGALQLLLVGDKVPHDLDMLLRATYFGSIVLLSPAVIDSPLKLELRVLAPPRCTIKPSGTTISVTASVTIALVPPDQPEVQLSSMTMDARLSAKMALRGKALRTQLDLRRFRIYSNHSALESLALIPLQAPLKTMLQIGVMPMLNERTWRGVQIPLPEGINFVHEVVTNHAGFLTIGADLHFAKGLREVIEKNRPADVRASTAPTPSTAAV

SEQ ID NO: 10544 - protein, 493 aa, Homo Sapiens
MALFGALFLALLAGAHAEFPGCKIRVTSKALELVKQEGLRFLEQELETITIPDLRGKEGHFYYNISEVKVTELQLTSSELDFQPQQELMLQITNASLGLRFRRQLLYWFFYDGGYINASAEGVSIRTGLELSRDPAGRMKVSNVSCQASVSRMHAAFGGTFKKVYDFLSTFITSGMRFLLNQQICPVLYHAGTVLLNSLLDTVPVRSSVDELVGIDYSLMKDPVASTSNLDMDFRGAFFPLTERNWSLPNRAVEPQLQEEERMVYVAFSEFFFDSAMESYFRAGALQLLLVGDKVPHDLDMLLRATYFGSIVLLSPAVIDSPLKLELRVLAPPRCTIKPSGTTISVTASVTIALVPPDQPEVQLSSMTMDARLSAKMALRGKALRTQLDLRRFRIYSNHSALESLALIPLQAPLKTMLQIGVMPMLNERTWRGVQIPLPEGINFVHEVVTNHAGFLTIGADLHFAKGLREVIEKNRPADVRASTAPTPSTAAV

SEQ ID NO: 10545 - protein, 493 aa, Homo Sapiens; identical to SEQ ID NO: 10544

SEQ ID NO: 10546 - protein, 441 aa, Homo Sapiens
MALFGALFLALLAGAHAEFPGCKIRVTSKALELVKQEGLRFLEQELETITIPDLRGKEGHFYYNISEVKVTELQLTSSELDFQPQQELMLQITNASLGLRFRRQLLYWFLKVYDFLSTFITSGMRFLLNQQICPVLYHAGTVLLNSLLDTVPVRSSVDELVGIDYSLMKDPVASTSNLDMDFRGAFFPLTERNWSLPNRAVEPQLQEEERMVYVAFSEFFFDSAMESYFRAGALQLLLVGDKVPHDLDMLLRATYFGSIVLLSPAVIDSPLKLELRVLAPPRCTIKPSGTTISVTASVTIALVPPDQPEVQLSSMTMDARLSAKMALRGKALRTQLDLRRFRIYSNHSALESLALIPLQAPLKTMLQIGVMPMLNERTWRGVQIPLPEGINFVHEVVTNHAGFLTIGADLHFAKGLREVIEKNRPADVRASTAPTPSTAAV

SEQ ID NO: 10547 - protein, 405 aa, Homo Sapiens
MLQITNASLGLRFRRQLLYWFFYDGGYINASAEGVSIRTGLELSRDPAGRMKVSNVSCQASVSRMHAAFGGTFKKVYDFLSTFITSGMRFLLNQQICPVLYHAGTVLLNSLLDTVPVRSSVDELVGIDYSLMKDPVASTSNLDMDFRGAFFPLTERNWSLPNRAVEPQLQEEERMVYVAFSEFFFDSAMESYFRAGALQLLLVGDKVPHDLDMLLRATYFGSIVLLSPAVIDSPLKLELRVLAPPRCTIKPSGTTISVTASVTIALVPPDQPEVQLSSMTMDARLSAKMALRGKALRTQLDLRRFRIYSNHSALESLALIPLQAPLKTMLQIGVMPMLNERTWRGVQIPLPEGINFVHEVVTNHAGFLTIGADLHFAKGLREVIEKNRPADVRASTAPTPSTAAV

SEQ ID NO: 10548 - protein, 1894 aa, Homo Sapiens
MKAMPWNWTCLLSHLLMVGMGSSTLLTRQPAPLSQKQRSFVTFRGEPAEGFNHLVVDERTGHIYLGAVNRIYKLSSDLKVLVTHETGPDEDNPKCYPPRIVQTCNEPLTTTNNVNKMLLIDYKENRLIACGSLYQGICKLLRLEDLFKLGEPYHKKEHYLSGVNESGSVFGVIVSYSNLDDKLFIATAVDGKPEYFPTISSRKLTKNSEADGMFAYVFHDEFVASMIKIPSDTFTIIPDFDIYYVYGFSSGNFVYFLTLQPEMVSPPGSTTKEQVYTSKLVRLCKEDTAFNSYVEVPIGCERSGVEYRLLQAAYLSKAGAVLGRTLGVHPDDDLLFTVFSKGQKRKMKSLDESALCIFILKQINDRIKERLQSCYRGEGTLDLAWLKVKDIPCSSALLTIDDNFCGLDMNAPLGVSDMVRGIPVFTEDRDRMTSVIAYVYKNHSLAFVGTKSGKLKKIRVDGPRGNALQYETVQVVDPGPVLRDMAFSKDHEQLYIMSERQLTRVPVESCGQYQSCGECLGSGDPHCGWCVLHNTCTRKERCERSKEPRRFASEMKQCVRLTVHPNNISVSQYNVLLVLETYNVPELSAGVNCTFEDLSEMDGLVVGNQIQCYSPAAKEVPRIITENGDHHVVQLQLKSKETGMTFASTSFVFYNCSVHNSCLSCVESPYRCHWCKYRHVCTHDPKTCSFQEGRVKLPEDCPQLLRVDKILVPVEVIKPITLKAKNLPQPQSGQRGYECILNIQGSEQRVPALRFNSSSVQCQNTSYSYEGMEINNLPVELTVVWNGHFNIDNPAQNKVHLYKCGAMRESCGLCLKADPDFACGWCQGPGQCTLRQHCPAQESQWLELSGAKSKCTNPRITEIIPVTGPREGGTKVTIRGENLGLEFRDIASHVKVAGVECSPLVDGYIPAEQIVCEMGEAKPSQHAGFVEICVAVCRPEFMARSSQLYYFMTLTLSDLKPSRGPMSGGTQVTITGTNLNAGSNVVVMFGKQPCLFHRRSPSYIVCNTTSSDEVLEMKVSVQVDRAKIHQDLVFQYVEDPTIVRIEPEWSIVSGNTPIAVWGTHLDLIQNPQIRAKHGGKEHINICEVLNATEMTCQAPALALGPDHQSDLTERPEEFGFILDNVQSLLILNKTNFTYYPNPVFEAFGPSGILELKPGTPIILKGKNLIPPVAGGNVKLNYTVLVGEKPCTVTVSDVQLLCESPNLIGRHKVMARVGGMEYSPGMVYIAPDSPLSLPAIVSIAVAGGLLIIFIVAVLIAYKRKSRESDLTLKRLQMQMDNLESRVALECKEAFAELQTDIHELTSDLDGAGIPFLDYRTYTMRVLFPGIEDHPVLRDLEVPGYRQERVEKGLKLFAQLINNKVFLLSFIRTLESQRSFSMRDRGNVASLIMTVLQSKLEYATDVLKQLLADLIDKNLESKNHPKLLLRRTESVAEKMLTNWFTFLLYKFLKECAGEPLFSLFCAIKQQMEKGPIDAITGEARYSLSEDKLIRQQIDYKTLVLSCVSPDNANSPEVPVKILNCDTITQVKEKILDAIFKNVPCSHRPKAADMDLEWRQGSGARMILQDEDITTKIENDWKRLNTLAHYQVPDGSVVALVSKQVTAYNAVNNSTVSRTSASKYENMIRYTGSPDSLRSRTPMITPDLESGVKMWHLVKNHEHGDQKEGDRGSKMVSEIYLTRLLATKGTLQKFVDDLFETIFSTAHRGSALPLAIKYMFDFLDEQADKHGIHDPHVRHTWKSNCLPLRFWVNMIKNPQFVFDIHKNSITDACLSVVAQTFMDSCSTSEHRLGKDSPSNKLLYAKDIPSYKNWVERYYSDIGKMPAISDQDMNAYLAEQSRMHMNEFNTMSALSEIFSYVGKYSEEILGPLDHDDQCGKQKLAYKLEQVITLMSLDS

SEQ ID NO: 10549 - protein, 1894 aa, Homo Sapiens; identical to SEQ ID NO: 10548

SEQ ID NO: 10550 - protein, 522 aa, Homo Sapiens
MKAMPWNWTCLLSHLLMVGMGSSTLLTRQPAPLSQKQRSFVTFRGEPAEGFNHLVVDERTGHIYLGAVNRIYKLSSDLKVLVTHETGPDEDNPKCYPPRIVQTCNEPLTTTNNVNKMLLIDYKENRLIACGSLYQGICKLLRLEDLFKLGEPYHKKEHYLSGVNESGSVFGVIVSYSNLDDKLFIATAVDGKPEYFPTISSRKLTKNSEADGMFAYVFHDEFVASMIKIPSDTFTIIPDFDIYYVYGFSSGNFVYFLTLQPEMVSPPGSTTKEQVYTSKLVRLCKEDTAFNSYVEVPIGCERSGVEYRLLQAAYLSKAGAVLGRTLGVHPDDDLLFTVFSKGQKRKMKSLDESALCIFILKQINDRIKERLQSCYRGEGTLDLAWLKVKDIPCSSALLTIDDNFCGLDMNAPLGVSDMVRGIPVFTEDRDRMTSVIAYVYKNHSLAFVGTKSGKLKKSFGTGPQGGITQEWIGVEGDPPGANIASQEQMLCVYLQCSSHKAISDQRVQPLLCCFLNVPGNSS

SEQ ID NO: 10551 - protein, 492 aa, Homo Sapiens
MKAMPWNWTCLLSHLLMVGMGSSTLLTRQPAPLSQKQRSFVTFRGEPAEGFNHLVVDERTGHIYLGAVNRIYKLSSDLKVLVTHETGPDEDNPKCYPPRIVQTCNEPLTTTNNVNKMLLIDYKENRLIACGSLYQGICKLLRLEDLFKLGEPYHKKEHYLSGVNESGSVFGVIVSYSNLDDKLFIATAVDGKPEYFPTISSRKLTKNSEADGMFAYVFHDEFVASMIKIPSDTFTIIPDFDIYYVYGFSSGNFVYFLTLQPEMVSPPGSTTKEQVYTSKLVRLCKEDTAFNSYVEVPIGCERSGVEYRLLQAAYLSKAGAVLGRTLGVHPDDDLLFTVFSKGQKRKMKSLDESALCIFILKQINDRIKERLQSCYRGEGTLDLAWLKVKDIPCSSALLTIDDNFCGLDMNAPLGVSDMVRGIPVFTEDRDRMTSVIAYVYKNHSLAFVGTKSGKLKKMPGTSLCPTLELQTGPRSHRATVTLELLFSSCSSN

SEQ ID NO: 10552 - protein, 160 aa, Homo Sapiens
GPDVTAGGPVEARQHPYALQCPGWSHPHPVQGGGLPAAGGQPAGPAWGAPCPPGGGEPGVAPGAADRRGGRGQVQERQREREGADEGHHRDLPDAAALSQGHTAAVCGQLLPERAGLGTRCHLQSSTSSTSWTSRQRSTTSRMKTPSTSGRRTAYRSGSG

SEQ ID NO: 10553 - protein, 162 aa, Homo Sapiens
MALQLWALTLLGLLGAGASLRPRKLDFFRSEKELNHLAVDEASGVVYLGAVNALYQLDAKLQLEQQVATGPALDNKKCTPPIEASQCHEAEMTDNVNQLLLLDPPRKRLVECGSLFKGICALRALSNISLRLFYEDGSGEKSFVASNDEGVATVGLVSSTGP

SEQ ID NO: 10554 - protein, 1838 aa, Homo Sapiens
MALQLWALTLLGLLGAGASLRPRKLDFFRSEKELNHLAVDEASGVVYLGAVNALYQLDAKLQLEQQVATGPALDNKKCTPPIEASQCHEAEMTDNVNQLLLLDPPRKRLVECGSLFKGICALRALSNISLRLFYEDGSGEKSFVASNDEGVATVGLVSSTGPGGDRVLFVGKGNGPHDNGIIVSTRLLDRTDSREAFEAYTDHATYKAGYLSTNTQQFVAAFEDGPYVFFVFNQQDKHPARNRTLLARMCREDPNYYSYLEMDLQCRDPDIHAAAFGTCLAASVAAPGSGRVLYAVFSRDSRSSGGPGAGLCLFPLDKVHAKMEANRNACYTGTREARDIFYKPFHGDIQCGGHAPGSSKSFPCGSEHLPYPLGSRDGLRGTAVLQRGGLNLTAVTVAAENNHTVAFLGTSDGRILKVYLTPDGTSSEYDSILVEINKRVKRDLVLSGDLGSLYAMTQDKVFRLPVQECLSYPTCTQCRDSQDPYCGWCVVEGRCTRKAECPRAEEASHWLWSRSKSCVAVTSAQPQNMSRRAQGEVQLTVSPLPALSEEDELLCLFGESPPHPARVEGEAVICNSPSSIPVTPPGQDHVAVTIQLLLRRGNIFLTSYQYPFYDCRQAMSLEENLPCISCVSNRWTCQWDLRYHECREASPNPEDGIVRAHMEDSCPQFLGPSPLVIPMNHETDVNFQGKNLDTVKGSSLHVGSDLLKFMEPVTMQESGTFAFRTPKLSHDANETLPLHLYVKSYGKNIDSKLHVTLYNCSFGRSDCSLCRAANPDYRCAWCGGQSRCVYEALCNTTSECPPPVITRIQPETGPLGGGIRITILGSNLGVQAGDIQRISVAGRNCSFQPERYSVSTRIVCVIEAAETPFTGGVEVDVFGKLGRSPPNVQFTFQQPKPLSVEPQQGPQAGGTTLTIHGTHLDTGSQEDVRVTLNGVPCKVTKFGAQLQCVTGPQATRGQMLLEVSYGGSPVPNPGIFFTYRENPVLRAFEPLRSFASGGRSINVTGQGFSLIQRFAMVVIAEPLQSWQPPREAESLQPMTVVGTDYVFHNDTKVVFLSPAVPEEPEAYNLTVLIEMDGHRALLRTEAGAFEYVPDPTFENFTGGVKKQVNKLIHARGTNLNKAMTLQEAEAFVGAERCTMKTLTETDLYCEPPEVQPPPKRRQKRDTTHNLPEFIVKFGSREWVLGRVEYDTRVSDVPLSLILPLVIVPMVVVIAVSVYCYWRKSQQAEREYEKIKSQLEGLEESVRDRCKKEFTDLMIEMEDQTNDVHEAGIPVLDYKTYTDRVFFLPSKDGDKDVMITGKLDIPEPRRPVVEQALYQFSNLLNSKSFLINFIHTLENQREFSARAKVYFASLLTVALHGKLEYYTDIMHTLFLELLEQYVVAKNPKLMLRRSETVVERMLSNWMSICLYQYLKDSAGEPLYKLFKAIKHQVEKGPVDAVQKKAKYTLNDTGLLGDDVEYAPLTVSVIVQDEGVDAIPVKVLNCDTISQVKEKIIDQVYRGQPCSCWPRPDSVVLEWRPGSTAQILSDLDLTSQREGRWKRVNTLMHYNVRDGATLILSKVGVSQQPEDSQQDLPGERHALLEEENRVWHLVRPTDEVDEGKSKRGSVKEKERTKAITEIYLTRLLSVKGTLQQFVDNFFQSVLAPGHAVPPAVKYFFDFLDEQAEKHNIQDEDTIHIWKTNSLPLRFWVNILKNPHFIFDVHVHEVVDASLSVIAQTFMDACTRTEHKLSRDSPSNKLLYAKEISTYKKMVEDYYKGIRQMVQVSDQDMNTHLAEISRAHTDSLNTLVALHQLYQYTQKYYDEIINALEEDPAAQKMQLAFRLQQIAAALENKVTDL

SEQ ID NO: 10555 - protein, 477 aa, Homo Sapiens
MALQLWALTLLGLLGAGASLRPRKLDFFRSEKELNHLAVDEASGVVYLGAVNALYQLDAKLQLEQQVATGPALDNKKCTPPIEASQCHEAEMTDNVNQLLLLDPPRKRLVECGSLFKGICALRALSNISLRLFYEDGSGEKSFVASNDEGVATVGLVSSTGPGGDRVLFVGKGNGPHDNGIIVSTRLLDRTDSREAFEAYTDHATYKAGYLSTNTQQFVAAFEDGPYVFFVFNQQDKHPARNRTLLARMCREDPNYYSYLEMDLQCRDPDIHAAAFGTCLAASVAAPGSGRVLYAVFSRDSRSSGGPGAGLCLFPLDKVHAKMEANRNACYTGTREARDIFYKPFHGDIQCGGHAPGSSKSFPCGSEHLPYPLGSRDGLRGTAVLQRGGLNLTAVTVAAENNHTVAFLGTSDGRILKVYLTPDGTSSEYDSILVEINKRVKRDLVLSGDLGSLYAMTQDKVFRLPVQECLSYPTCTQ

SEQ ID NO: 10556 - protein, 1838 aa, Homo Sapiens; identical to SEQ ID NO: 10554

SEQ ID NO: 10557 - protein, 347 aa, Homo Sapiens [sequence omitted]

SEQ ID NO: 10558 - protein, 189 aa, Homo Sapiens
  misc_feature (1)..(1): Xaa can be any naturally occurring amino acid
XEVWGAAPVCHWPPGDTGPDASGGLLRGVPRAQPRHLLHLPRKPRTASLRAATKLCQVVGTDYVFHNDTKVVFLSPAVPEEPEAYNLTVLIEMDGHRALLRTEAGAFEYVPDPTFENFTGGVKKQVNKLIHARGTNLNKAMTLQEAEAFVGAERCTMKTLTETDLYCEPPEVQPPPKRRQKRDTTHNLP

SEQ ID NO: 10559 - protein, 84 aa, Homo Sapiens
  misc_feature (1)..(1): Xaa can be any naturally occurring amino acid
XTDVNFQGKNLDTVKVWMSGGGGRGKPTEDVQRLLQTQGSSLHVGSDLLKFMEPVTMQESGTFAFRTPKLSHDANETLPLHLYV

SEQ ID NO: 10560 - protein, 234 aa, Homo Sapiens
YKPFHGDIQCGGHAPGSSKSFPCGSEHLPYPLGSRDGLRGTAVLQRGGLNLTAVTVAAENNHTVAFLEWRPGSTAQILSDLDLTSQREGRWKRVNTLMHYNVRDGATLILSKVGVSQQPEDSQQDLPGERHALLEEENRVWHLVRPTDEVDEGKSKRGSVKEKERTKAITEIYLTRLLSVKGTLQQFVDNFFQSVLAPGHAVPPAVKYFFDFLDEQAEKHNIQDEDTIHIWKTN

SEQ ID NO: 10561 - protein, 502 aa, Homo Sapiens
MAQRCVCVLALVAMLLLVFPTVSRSMGPRSGEHQRASRIPSQFSKEERVAMKEALKGAIQIPTVTFSSEKSNTTALAEFGKYIHKVFPTVVSTSFIQHEVVEEYSHLFTIQGSDPSLQPYLLMAHFDVVPAPEEGWEVPPFSGLERDGIIYGRGTLDDKNSVMALLQALELLLIRKYIPRRSFFISLGHDEESSGTGAQRISALLQSRGVQLAFIVDEGGFILDDFIPNFKKPIALIAVSEKGSMNLMLQVNMTSGHSSAPPKETSIGILAAAVSRLEQTPMPIIFGSGTVVTVLQQLANEFPFPVNIILSNPWLFEPLISRFMERNPLTNAIIRTTTALTIFKAGVKFNVIPPVAQATVNFRIHPGQTVQEVLELTKNIVADNRVQFHVLSAFDPLPVSPSDDKALGYQLLRQTVQSVFPEVNITAPVTSIGNTDSRFFTNLTTGIYRFYPIYIQPEDFKRIHGVNEKISVQAYETQVKFIFELIQNADTDQEPVSHLHKL

SEQ ID NO: 10562 - protein, 165 aa, Homo Sapiens
MAKMNLSSYILILTFSLFSQGILLSASKSIRNLDDDMVFNTFRLGKGFQKEDTAEKSVIAPSLEQYKNDESSFMNEEENKVSKNTGSKHNFLNHGLPLNLAIKPYLALKGSVAFPAENGVQNTESTQEKREIGDEENSAKFPIGRRDFDMLRCMLGRVYRPCWQV

SEQ ID NO: 10563 - protein, 290 aa, Homo Sapiens
MDLVLKRCLLHLAVIGALLAVGATKGGQVSLKVSNDGPTLIGANASFSIALNFPGSQKVLPDGQVIWVNNTIINGSQVWGGQPVYPQETDDACIFPDGGPCPSGSWSQKRSFVYVWKTWEGIESAEILQAVPSGEGDAFELTVSCQGGLPKEACMEISSPGCQPPAQRLCQPVLPSPACQLVLHQILKGGSGTYCLNVSLADTNSLAVVSTQLIMPGQEAGLGQVPLIVGILLVLMAVVLASLIYRRRLMKQDFSVPQLPHSSSHWLRLPRIFCSCPIGENSPLLSGQQV

SEQ ID NO: 10564 - protein, 575 aa, Homo Sapiens
MDLVLKRCLLHLAVIGALLAVGATKGSQVWGGQPVYPQETDDACIFPDGGPCPSGSWSQKRSFVYVWKTWGQYWQVLGGPVSGLSIGTGRAMLGTHTMEVTVYHRRGSRSYVPLAHSSSAFTITDQVPFSVSVSQLRALDGGNKHFLRNQPLTFALQLHDPSGYLAEADLSYTWDFGDSSGTLISRALVVTHTYLEPGPVTAQVVLQAAIPLTSCGSSPVPGTTDGHRPTAEAPNTTAGQVPTTEVVGTTPGQAPTAEPSGTTSVQVPTTEVISTAPVQMPTAESTGMTPEKVPVSEVMGTTLAEMSTPEATGMTPAEVSIVVLSGTTAAQVTTTEWVETTARELPIPEPEGPDASSIMSTESITGSLGPLLDGTATLRLVKRQVPLDCVLYRYGSFSVTLDIVQGIESAEILQAVPSGEGDAFELTVSCQGGLPKEACMEISSPGCQPPAQRLCQPVLPSPACQLVLHQILKGGSGTYCLNVSLADTNSLAVVSTQLIMPGQEAGLGQVPLIVGILLVLMAVVLASLIYRRRLMKQDFSVPQLPHSSSHWLRLPRIFCSCPIGENSPLLSGQQV

SEQ ID NO: 10565 - protein, 151 aa, Homo Sapiens
MDLVLKRCLLHLAVIGALLAVGATKVPRNQDWLGVSRQLRTKAWNRQLYPEWTEAQRLDCWRGGQVSLKVSNDGPTLIGANASFSIALNFPGSQKVLPDGQVIWVNNTIINGSQVWGGQPVYPQETDDACIFPDGGPCPSGSWSQKRSFVY

SEQ ID NO: 10566 - protein, 344 aa, Homo Sapiens
MDLVLKRCLLHLAVIGALLAVGATKVPRNQDWLGVSRQLRTKAWNRQLYPEWTEAQRLDCWRGGQVSLKVSNDGPTLIGANASFSIALNFPGSQKVLPDGQVIWVNNTIINGSQVWGGQPVYPQETDDACIFPDGGPCPSGSWSQKRSFVYVWKTWDQVPFSVSVSQLRALDGGNKHFLRNQPLTFALQLHDPSGYLAEADLSYTWDFGDSSGTLISRALVVTHTYLEPGPVTAQVVLQAAIPLTSCGSSPVPGTTDGHRPTAEAPNTTAGQVPTTEVVGTTPGQAPTAEPSGTTSVQVPTTEVISTAPVQMPTAESTGMTPEKVPVSEVMGTTLAEMSTPEAT

SEQ ID NO: 10567 - protein, 668 aa, Homo Sapiens
MDLVLKRCLLHLAVIGALLAVGATKVPRNQDWLGVSRQLRTKAWNRQLYPEWTEAQRLDCWRGGQVSLKVSNDGPTLIGANASFSIALNFPGSQKVLPDGQVIWVNNTIINGSQVWGGQPVYPQETDDACIFPDGGPCPSGSWSQKRSFVYVWKTWGQYWQVLGGPVSGLSIGTGRAMLGTHTMEVTVYHRRGSRSYVPLAHSSSAFTITDQVPFSVSVSQLRALDGGNKHFLRNQPLTFALQLHDPSGYLAEADLSYTWDFGDSSGTLISRALVVTHTYLEPGPVTAQVVLQAAIPLTSCGSSPVPGTTDGHRPTAEAPNTTAGQVPTTEVVGTTPGQAPTAEPSGTTSVQVPTTEVISTAPVQMPTAESTGMTPEKVPVSEVMGTTLAEMSTPEATGMTPAEVSIVVLSGTTAAQVTTTEWVETTARELPIPEPEGPDASSIMSTESITGSLGPLLDGTATLRLVKRQVPLDCVLYRYGSFSVTLDIVQGIESAEILQAVPSGEGDAFELTVSCQGGLPKEACMEISSPGCQPPAQRLCQPVLPSPACQLVLHQILKGGSGTYCLNVSLADTNSLAVVSTQLIMPVPGILLTGQEAGLGQVPLIVGILLVLMAVVLASLIYRRRLMKQDFSVPQLPHSSSHWLRLPRIFCSCPIGENSPLLSGQQV

SEQ ID NO: 10568 - protein, 661 aa, Homo Sapiens
MDLVLKRCLLHLAVIGALLAVGATKVPRNQDWLGVSRQLRTKAWNRQLYPEWTEAQRLDCWRGGQVSLKVSNDGPTLIGANASFSIALNFPGSQKVLPDGQVIWVNNTIINGSQVWGGQPVYPQETDDACIFPDGGPCPSGSWSQKRSFVYVWKTWGQYWQVLGGPVSGLSIGTGRAMLGTHTMEVTVYHRRGSRSYVPLAHSSSAFTITDQVPFSVSVSQLRALDGGNKHFLRNQPLTFALQLHDPSGYLAEADLSYTWDFGDSSGTLISRALVVTHTYLEPGPVTAQVVLQAAIPLTSCGSSPVPGTTDGHRPTAEAPNTTAGQVPTTEVVGTTPGQAPTAEPSGTTSVQVPTTEVISTAPVQMPTAESTGMTPEKVPVSEVMGTTLAEMSTPEATGMTPAEVSIVVLSGTTAAQVTTTEWVETTARELPIPEPEGPDASSIMSTESITGSLGPLLDGTATLRLVKRQVPLDCVLYRYGSFSVTLDIVQGIESAEILQAVPSGEGDAFELTVSCQGGLPKEACMEISSPGCQPPAQRLCQPVLPSPACQLVLHQILKGGSGTYCLNVSLADTNSLAVVSTQLIMPGQEAGLGQVPLIVGILLVLMAVVLASLIYRRRLMKQDFSVPQLPHSSSHWLRLPRIFCSCPIGENSPLLSGQQV

SEQ ID NO: 10569 - protein, 661 aa, Homo Sapiens; identical to SEQ ID NO: 10568

SEQ ID NO: 10570 - protein, 661 aa, Homo Sapiens; identical to SEQ ID NO: 10568

SEQ ID NO: 10571 - protein, 296 aa, Homo Sapiens
MDLVLKRCLLHLAVIGALLAVGATKVPRNQDWLGVSRQLRTKAWNRQLYPEWTEAQRLDCWRGGQVSLKVSNDGPTLIGANASFSIALNFPGSQKVLPDGQVIWVNNTIINGSQVWGGQPVYPQETDDACIFPDGGPCPSGSWSQKRSFVYVWKTWVPGTTDGHRPTAEAPNTTAGQVPTTEVVGTTPGQAPTAEPSGTTSVQVPTTEVISTAPVQMPTAESTAAQVTTTEWVETTARELPIPEPEGPDASSIMSTESITGSLGPLLDGTATLRLVKRQVPLDCVLYRYGSFSVTL

SEQ ID NO: 10572 - protein, 299 aa, Homo Sapiens
MDLVLKRCLLHLAVIGALLAVGATKVPRNQDWLGVSRQLRTKAWNRQLYPEWTEAQRLDCWRGSQVWGGQPVYPQETDDACIFPDGGPCPSGSWSQKRSFVYVWKTWGQYWQVLGGPVSGLSIGTGRAMLGTHTMEVTVYHRRGSRSYVPLAHSSSAFTITDQVPFSVSVSQLRALDGGNKHFLRNQPLTFALQLHDPSGYLAEADLSYTWDFGDSSGTLISRALVVTHTYLEPGPVTAQVVLQAAIPLTSCGSSPVPGTTDGHRPTAEAPNTTAGQVPTTEVVGTTPGQAPTAEPSGT

SEQ ID NO: 10573 - protein, 134 aa, Homo Sapiens
MGKEEIPRPTLTSVKTLLYTKEFPQTVKVPRNQDWLGVSRQLRTKAWNRQLYPEWTEAQRLDCWRGGQVSLKVSNDGPTLIGANASFSIALNFPGSQKVLPDGQVIWVNNTIINGSQVWGGQPVYPQETDDACI

SEQ ID NO: 10574 - protein, 452 aa, Homo Sapiens
  misc_feature (1)..(1): Xaa can be any naturally occurring amino acid
XQVWGGQPVYPQETDDACIFPDGGPCPSGSWSQKRSFVYVWKTWGQYWQVLGGPVSGLSIGTGRAMLGTHTMEVTVYHRRGSRSYVPLAHSSSAFTITDQVPFSVSVSQLRALDGGNKHFLRNQPLTFALQLHDPSGYLAEADLSYTWDFGDSSGTLISRALVVTHTYLEPGPVTAQVVLQAAIPLTSCGSSPVPGTTDGHRPTAEAPNTTAGQVPTTEVVGTTPGQAPTAEPSGTTSVQVPTTEVISTAPVQMPTAESTAAQVTTTEWVETTARELPIPEPEGPDASSIMSTESITGSLGPLLDGTATLRLVKRQVPLDCVLYRYGSFSVTLDIVQGIESAEILQAVPSGEGDAFELTVSCQGGLPKEACMEISSPGCQPPAQRLCQPVLPSPACQLVLHQILKGGSGTYCLNVSLADTNSLAVVSTQLIMPVPGILLTGQEAGLGQVPLI

SEQ ID NO: 10575 - protein, 252 aa, Homo Sapiens
MAELEFVQIIIIVVVMMVMVVVITCLLSHYKLSARSFISRHSQGRRREDALSSEGCLWPSESTVSGNGIPEPQVYAPPRPTDRLAVPPFAQRERFHRFQPTYPYLQHEIDLPPTISLSDGEEPPPYQGPCTLQLRDPEQQLELNRESVRAPPNRTIFDSDLMDSARLGGPCPPSSNSGISATCYGSGGRMEGPPPTYSEVIGHYPGSSFQHQQSSGPPSLLEGTRLHHTHIAPLESAAIWSKEKDKQKGHPL

SEQ ID NO: 10576 - protein, 227 aa, Homo Sapiens
MHRLMGVNSTAAAAAGQPNVSCTCNCKRSLFQSMEISCHGFPVCKSHQHQEWKSLCWSLRSPGGASSITGFGSMKVTNPAMNLPECQWLRIQKAELEFVQIIIIVVVMMVMVVVITCLLSHYKLSARSFISRHSQGRRREDALSSEGCLWPSESTVSGNGIPEPQVYAPPRPTDRLAVPPFAQRERFHRFQPTYPYLQHEIDLPPTISLSDGEEPPPYQGPCTLQLR

SEQ ID NO: 10577 - protein, 287 aa, Homo Sapiens
MHRLMGVNSTAAAAAGQPNVSCTCNCKRSLFQSMEITELEFVQIIIIVVVMMVMVVVITCLLSHYKLSARSFISRHSQGRRREDALSSEGCLWPSESTVSGNGIPEPQVYAPPRPTDRLAVPPFAQRERFHRFQPTYPYLQHEIDLPPTISLSDGEEPPPYQGPCTLQLRDPEQQLELNRESVRAPPNRTIFDSDLMDSARLGGPCPPSSNSGISATCYGSGGRMEGPPPTYSEVIGHYPGSSFQHQQSSGPPSLLEGTRLHHTHIAPLESAAIWSKEKDKQKGHPL

SEQ ID NO: 10578 - protein, 237 aa, Homo Sapiens
MMVMVVVITCLLSHYKLSARSFISRHSQGRRREDALSSEGCLWPSESTVSGNGIPEPQVYAPPRPTDRLAVPPFAQRERFHRFQPTYPYLQHEIDLPPTISLSDGEEPPPYQGPCTLQLRDPEQQLELNRESVRAPPNRTIFDSDLMDSARLGGPCPPSSNSGISATCYGSGGRMEGPPPTYSEVIGHYPGSSFQHQQSSGPPSLLEGTRLHHTHIAPLESAAIWSKEKDKQKGHPL

SEQ ID NO: 10579 - protein, 237 aa, Homo Sapiens; identical to SEQ ID NO: 10578

SEQ ID NO: 10580 - protein, 237 aa, Homo Sapiens; identical to SEQ ID NO: 10578

SEQ ID NO: 10581 - protein, 208 aa, Homo Sapiens
MPAIPAHGAELEFVQIIIIVVVMMVMVVVITCLLSHYKLSARSFISRHSQGRRREDALSSEGCLWPSESTVSGNGIPEPQVYAPPRPTDRLAVPPFAQRERFHRFQPTYPYLQHEIDLPPTISLSDGEEPPPYQGPCTLQLRDPEQQLELNRESVRAPPNRTIFDSDLMDSARLGGPCPPSSNSGISATCYGSGGRMEGPPPTYSEVI

SEQ ID NO: 10582 - protein, 465 aa, Homo Sapiens
MLPLWTLSLLLGAVAGKEVCYERLGCFSDDSPWSGITERPLHILPWSPKDVNTRFLLYTNENPNNFQEVAADSSSISGSNFKTNRKTRFIIHGFIDKGEENWLANVCKNLFKVESVNCICVDWKGGSRTGYTQASQNIRIVGAEVAYFVEFLQSAFGYSPSNVHVIGHSLGAHAAGEAGRRTNGTIGRITGLDPAEPCFQGTPELVRLDPSDAKFVDVIHTDGAPIVPNLGFGMSQVVGHLDFFPNGGVEMPGCKKNILSQIVDIDGIWEGTRDFAACNHLRSYKYYTDSIVNPDGFAGFPCASYNVFTANKCFPCPSGGCPQMGHYADRYPGKTNDVGQKFYLDTGDASNFARWRYKVSVTLSGKKVTGHILVSLFGNKGNSKQYEIFKGTLKPDSTHSNEFDSDVDVGDLQMVKFIWYNNVINPTLPRVGASKIIVETNVGKQFNFCSPETVREEVLLTLTPC

SEQ ID NO: 10583 - protein, 179 aa, Homo Sapiens
KLFEVEEVNCICVDWKKGSQATYTQAANNVRVVGAQVAQMLDILLTEYSYPPSKVHLIGHSLGAHVAGEAGSKTPGLSRITGLDPVEASFESTPEEVRLDPSDADFVDVIHTDAAPLIPFLGFGTNQQMGHLDFFPNGGESMPGCKKNALSQIVDLDGIWAGQVLPVSRSRMPTDGSLC

SEQ ID NO: 10584 - protein, 132 aa, Homo Sapiens
MLIFWTITLFLLGAAKGKEVCYEDLGCFSDTEPWGGTAIRPLKILPWSPEKIGTRFLLYTNENPNNFQILLLSDPSTIEASNFQMDRKTRFIIHGFIDKGDESWVTDMCKKLFEVEEVNCICVDWKKGSQAT

SEQ ID NO: 10585 - protein, 191 aa, Homo Sapiens
MLIFWTITLFLLGAAKGKEVCYEDLGCFSDTEPWGGTAIRPLKILPWSPEKIGTRFLLYTNENPNNFQILLLSDPSTIEASNFQMDRKTRFIIHGFIDKGDESWVTDMCKKLFEVEEVNCICVDWKKGSQATYTQAANNVRVVGAQVAQMLDILLTEYSYPPSKVHLIGHSLGAHVAGEAGSKTPGLSRIT

SEQ ID NO: 10586 - protein, 467 aa, Homo Sapiens
MLIFWTITLFLLGAAKGKEVCYEDLGCFSDTEPWGGTAIRPLKILPWSPEKIGTRFLLYTNENPNNFQILLLSDPSTIEASNFQMDRKTRFIIHGFIDKGDESWVTDMCKKLFEVEEVNCICVDWKKGSQATYTQAANNVRVVGAQVAQMLDILLTEYSYPPSKVHLIGHSLGAHVAGEAGSKTPGLSRITGLDPVEASFESTPEEVRLDPSDADFVDVIHTDAAPLIPFLGFGTNQQMGHLDFFPNGGESMPGCKKNALSQIVDLDGIWAGTRDFVACNHLRSYKYYLESILNPDGFAAYPCTSYKSFESDKCFPCPDQGCPQMGHYADKFAGRTSEEQQKFFLNTGEASNFARWRYGVSITLSGRTATGQIKVALFGNKGNTHQYSIFRGILKPGSTHSYEFDAKLDVGTIEKVKFLWNNNVINPTLPKVGATKITVQKGEEKTVYNFCSEDTVREDTLLTLTPC

SEQ ID NO: 10587 - protein, 467 aa, Homo Sapiens; identical to SEQ ID NO: 10586

SEQ ID NO: 10588 - protein, 467 aa, Homo Sapiens
MLIFWTITLFLLGAAKGKEVCYEDLGCFSDTEPWGGTAIRPLKILPWSPEKIGTRFLLYTNENPNNFQILLLSDPSTIEASNFQMDRKTRFIIHGFIDKGDESWVTDMCKKLFEVEEVNCICVDWKKGSQATYTQAANNVRVVGAQVAQMLDILLVKYSYPPSKVHLIGHSLGAHVAGEAGSKTPGLSRITGLDPVEASFESTPEEVRLDPSDADFVDVIHTDAAPLIPFLGFGTNQQMGHLDFFPNGGESMPGCKKNALSQIVDLDGIWAGTRDFVACNHLRSYKYYLESILNPDGFAAYPCTSYKSFESDKCFPCPDQGCPQMGHYADKFAGRTSEEQQKFFLNTGEASNFARWRYGVSITLSGRTATGQIKVALFGNKGNTHQYSIFRGILKPGSTHSYEFDAKLDVGTIEKVKFLWNNNVINPTLPKVGATKITVQKGEEKTVYNFCSEDTVREDTLLTLTPC

SEQ ID NO: 10589 - protein, 118 aa, Homo Sapiens
MLIFWTITLFLLGAAKGKEVCYEDLGCFSDTEPWGGTAIRPLKILPWSPEKIGTRFLLYTNENPNNFQILLLSDPSTIEASNFQMDRKTRFIIHGFIDKGDESWVTDMCKQPGASPRA

SEQ ID NO: 10590 - protein, 185 aa, Homo Sapiens
MLIFWTITLFLLGAAKGKEVCYEDLGCFSDTEPWGGTAIRPLKILPWSPEKIGTRFLLYTNENPNNFQILLLSDPSTIEASNFQMDRKTRFIIHGFIDKGDESWVTDMCKTEYSYPPSKVHLIGHSLGAHVAGEAGSKTPGLSRITGLDPVEASFESTPEEVRLDPSDADFVDVIHTDAAPLIPF

SEQ ID NO: 10591 - protein, 163 aa, Homo Sapiens
MLIFWTITLFLLGAAKGKEVCYEDLGCFSDTEPWGGTAIRPLKILPWSPEKIGTRFLLYTNENPNNFQILLLSDPSTIEASNFQMDRKTRFIIHGFIDKGDESWVTDMCKTPGLSRITGLDPVEASFESTPEEVRLDPSDADFVDVIHTDAAPLIPFLGFGTN

SEQ ID NO: 10592 - protein, 467 aa, Homo Sapiens
MLGIWIVAFLFFGTSRGKEVCYERLGCFKDGLPWTRTFSTELVGLPWSPEKINTRFLLYTIHNPNAYQEISAVNSSTIQASYFGTDKITRINIAGWKTDGKWQRDMCNVLLQLEDINCINLDWINGSREYIHAVNNLRVVGAEVAYFIDVLMKKFEYSPSKVHLIGHSLGAHLAGEAGSRIPGLGRITGLDPAGPFFHNTPKEVRLDPSDANFVDVIHTNAARILFELGVGTIDACGHLDFYPNGGKHMPGCEDLITPLLKFNFNAYKKEMASFFDCNHARSYQFYAESILNPDAFIAYPCRSYTSFKAGNCFFCSKEGCPTMGHFADRFHFKNMKTNGSHYFLNTGSLSPFARWRHKLSVKLSGSEVTQGTVFLRVGGAVRKTGEFAIVSGKLEPGMTYTKLIDADVNVGNITSVQFIWKKHLFEDSQNKLGAEMVINTSGKYGYKSTFCSQDIMGPNILQNLKPC

SEQ ID NO: 10593 - protein, 112 aa, Homo Sapiens
MARSSWQLSPAAPEHVAAALYQPRASEMQHLRRMPRVRSLFQEQEEPEPGMEEAGEMEQKQLQKRFGGFTGARKSARKLANQKRFSEFMRQYLVLSMQSSQRRRTLHQNGNV

SEQ ID NO: 10594 - protein, 154 aa, Homo Sapiens
MKVLLCDLLLLSLFSSVFSSCQRDCLTCQEKLHPALDSFDLEVCILECEEKVFPSPLWTPCTKVMARSSWQLSPAAPEHVAAALYQPRASEMQHLRRMPRVRSLFQEQEEPEPGMEEAGEMEQKQLQKRFGGFTGARKSARKLANQKRFSEFMR

SEQ ID NO: 10595 - protein, 176 aa, Homo Sapiens
MKVLLCDLLLLSLFSSVFSSCQRDCLTCQEKLHPALDSFDLEVCILECEEKVFPSPLWTPCTKVMARSSWQLSPAAPEHVAAALYQPRASEMQHLRRMPRVRSLFQEQEEPEPGMEEAGEMEQKQLQKRFGGFTGARKSARKLANQKRFSEFMRQYLVLSMQSSQRRRTLHQNGNV

SEQ ID NO: 10596 - protein, 93 aa, Homo Sapiens
MENGYTYEDYKNTAEWLLSHTKHRPQVAIICGSGLGGLTDKLTQAQIFDYGEIPNFPRSTVPGHAGRLVFGFLNGRACVMMQGRFHMYEGYPL

SEQ ID NO: 10597 - protein, 289 aa, Homo Sapiens
MENGYTYEDYKNTAEWLLSHTKHRPQVAIICGSGLGGLTDKLTQAQIFDYGEIPNFPRSTVPGHAGRLVFGFLNGRACVMMQGRFHMYEGYPLWKVTFPVRVFHLLGVDTLVVTNAAGGLNPKFEVGDIMLIRDHINLPGFSGQNPLRGPNDERFGDRFPAMSDAYDRTMRQRALSTWKQMGEQRELQEGTYVMVAGPSFETVAECRVLQKLGADAVGMSTVPEVIVARHCGLRVFGFSLITNKVIMDYESLEKANHEEVLAAGKQAAQKLEQFVSILMASIPLPDKAS

SEQ ID NO: 10598 - protein, 61 aa, Homo Sapiens
MMQGRFHMYEGYPLWKVTFPVRVFHLLGVDTLVVTNAAGGLNPKFEVGDIMLIRDHINLPG

SEQ ID NO: 10599 - protein, 221 aa, Homo Sapiens
MQRGLALSLVSGARRQSHAAASAGRDARGNRAGVAPPEQEGDRYTYEDYKNTAEWLLSHTKHRPQVAIICGSGLGGLTDKLTQAQIFDYGEIPNFPRSTVPGHAGRLVFGFLNGRACVMMQGRFHMYEGYPLWKVTFPVRVFHLLGVDTLVVTNAAGGLNPKFEVGDIMLIRDHINLPGFSGQNPLRGPNDERFGDRFPAMSDAYDRTMRQRALSTWKQMG

SEQ ID NO: 10600 - protein, 166 aa, Homo Sapiens
MARLRSGMESILPPSAHELAQNRLHVSITNAKTRENHLVSTFSSREDLIKVLLASSFVPIYAGLKLVEYKGQKWVDGGLTNALPILPVGRTVTISPFSGRLDISPQDKGQLDLYVNIAKQDIMLSLANLVRLNQALFPPSKRKMESLYQCGFDDTVKFLLKENWFE

SEQ ID NO: 10601 - protein, 190 aa, Homo Sapiens
MKHINLSFAACGFLGIYHLGAASALCRHGKKLVKDVKAFAGASAGSLVASVLLTAPEKIEECNQFTYKFAEEIRRQSFGAVTPGYDFMARLRSGMESILPPSAHELAQNRLHVSITNAKTRENHLVSTFSSREDLIKVLLASSFVPIYAGLKLVEYKGQKWVDGGLTNALPILPVGRTVTISPFSGRLDI

SEQ ID NO: 10602 - protein, 253 aa, Homo Sapiens
MKHINLSFAACGFLGIYHLGAASALCRHGKKLVKDVKAFAGASAGSLVASVLLTAPEKIEECNQFTYKFAEEIRRQSFGAVTPGYDFMARLRSGMESILPPSAHELAQNRLHVSITNAKTRENHLVSTFSSREDLIKVLLASSFVPIYAGLKLVEYKGQKWVDGGLTNALPILPVGRTVTISPFSGRLDISPQDKGQLDLYVNIAKQDIMLSLANLVRLNQALFPPSKRKMESLYQCGFDDTVKFLLKENWFE

SEQ ID NO: 10603 - protein, 253 aa, Homo Sapiens; identical to SEQ ID NO: 10602

SEQ ID NO: 10604 - protein, 135 aa, Homo Sapiens
LQLQRNQLRMLEPEPLAGLDQLRELSLAHNRLRVGDIGPGTWHELQALQMLDLSHNELSFVPPDLPEALEELHLEGNRIGHVGPEAFLSTPRLRALFLRCPEGDRRGGGGQGRAWEGHDRLSVQGQQASHDEHRG

SEQ ID NO: 10605 - protein, 512 aa, Homo Sapiens
MAESGLAMWPSLLLLLLLPGPPPVAGLEDAAFPHLGESLQPLPRACPLRCSCPRVDTVDCDGLDLRVFPDNITRAAQHLSLQNNQLQELPYNELSRLSGLRTLNLHNNLISSEGLPDEAFESLTQLQHLCVAHNKLSVAPQFLPRSLRVADLAANQVMEIFPLTFGEKPALRSVYLHNNQLSNAGLPPDAFRGSEAIATLSLSNNQLSYLPPSLPPSLERLHLQNNLISKVPRGALSRQTQLRELYLQHNQLTDSGLDATTFSKLHSLEYLDLSHNQLTTVPAGLPRTLAILHLGRNRIRQVEAARLHGARGLRYLLLQHNQLGSSGLPAGALRPLRGLHTLHLYGNGLDRVPPALPRRLRALVLPHNHVAALGARDLVATPGLTELNLAYNRLASARVHHRAFRRLRALRSLDLAGNQLTRLPMGLPTGLRTLQLQRNQLRMLEPEPLAGLDQLRELSLAHNRLRVGDIGPGTWHELQALQVRHRLVSHTVPRAPPSPCLPCHVPNILVSW

SEQ ID NO: 10606 - protein, 32 aa, Homo Sapiens
MAWTFECSRTTSPEPLSTSPCRTTSSRNSPTM

SEQ ID NO: 10607 - protein, 430 aa, Homo Sapiens
MAWTFECSRTTSPEPLSTSPCRTTSSRNSPTMSCPASVACEPSTSTTTSSPPKLSVAPQFLPRSLRVADLAANQVMEIFPLTFGEKPALRSVYLHNNQLSNAGLPPDAFRGSEAIATLSLSNNQLSYLPPSLPPSLERLHLQNNLISKVPRGALSRQTQLRELYLQHNQLTDSGLDATTFSKLHSLEYLDLSHNQLTTVPAGLPRTLAILHLGRNRIRQVEAARLHGARGLRYLLLQHNQLGSSGLPAGALRPLRGLHTLHLYGNGLDRVPPALPRRLRALVLPHNHVAALGARDLVATPGLTELNLAYNRLASARVHHRAFRRLRALRSLDLAGNQLTRLPMGLPTGLRTLQLQRNQLRMLEPEPLAGLDQLRELSLAHNRLRVGDIGPGTWHELQALQVRHRLVSHTVPRAPPSPCLPCHVPNILVSW

SEQ ID NO: 10608 - protein, 164 aa, Homo Sapiens
MAWTFECSRTTSPEPLSTSPCRTTSSRNSPTMSCPASVACEPSTSTTTSSPPKNNLISKVPRGALSRQTQLRELYLQHNQLTDSGLDATTFSKLHSLEYLDLSHNQLTTVPAGLPRTLAILHLGRNRIRQVEAARLHGARGLRYLLLQHNQLGSSGLPAGALRP

SEQ ID NO: 10609 - protein, 123 aa, Homo Sapiens
MGRPTQWPSLLLLLLLPGPPPVAGLEDAAFPHLGESLQPLPRACPLRCSCPRVDTVDCDGLDLRVFPDNITRAAQHLSLQNNQLQELPYNELSRLSGLRTLNLHNNLISSEEQSHLQGAPRSP

SEQ ID NO: 10610 - protein, 510 aa, Homo Sapiens
MGRPTQWPSLLLLLLLPGPPPVAGLEDAAFPHLGESLQPLPRACPLRCSCPRVDTVDCDGLDLRVFPDNITRAAQHLSLQNNQLQELPYNELSRLSGLRTLNLHNNLISSEGLPDEAFESLTQLQHLCVAHNKLSVAPQFLPRSLRVADLAANQVMEIFPLTFGEKPALRSVYLHNNQLSNAGLPPDAFRGSEAIATLSLSNNQLSYLPPSLPPSLERLHLQNNLISKVPRGALSRQTQLRELYLQHNQLTDSGLDATTFSKLHSLEYLDLSHNQLTTVPAGLPRTLAILHLGRNRIRQVEAARLHGARGLRYLLLQHNQLGSSGLPAGALRPLRGLHTLHLYGNGLDRVPPALPRRLRALVLPHNHVAALGARDLVATPGLTELNLAYNRLASARVHHRAFRRLRALRSLDLAGNQLTRLPMGLPTGLRTLQLQRNQLRMLEPEPLAGLDQLRELSLAHNRLRVGDIGPGTWHELQALQVRHRLVSHTVPRAPPSPCLPCHVPNILVSW

SEQ ID NO: 10611 - protein, 421 aa, Homo Sapiens
MGRPTQWPSLLLLLLLPGPPPVAGLEDAAFPHLGESLQPLPRACPLRCSCPRVDTVDCDGLDLRVFPDNITRAAQHLSLQNNQLQELPYNELSRLSGLRTLNLHNNLISSEGLPDEAFESLTQLQHLCVAHNKNNLISKVPRGALSRQTQLRELYLQHNQLTDSGLDATTFSKLHSLEYLDLSHNQLTTVPAGLPRTLAILHLGRNRIRQVEAARLHGARGLRYLLLQHNQLGSSGLPAGALRPLRGLHTLHLYGNGLDRVPPALPRRLRALVLPHNHVAALGARDLVATPGLTELNLAYNRLASARVHHRAFRRLRALRSLDLAGNQLTRLPMGLPTGLRTLQLQRNQLRMLEPEPLAGLDQLRELSLAHNRLRVGDIGPGTWHELQALQVRHRLVSHTVPRAPPSPCLPCHVPNILVSW

SEQ ID NO: 10612 - protein, 505 aa, Homo Sapiens
MWPSLLLLLLLPGPPPVAGLEDAAFPHLGESLQPLPRACPLRCSCPRVDTVDCDGLDLRVFPDNITRAAQHLSLQNNQLQELPYNELSRLSGLRTLNLHNNLISSEGLPDEAFESLTQLQHLCVAHNKLSVAPQFLPRSLRVADLAANQVMEIFPLTFGEKPALRSVYLHNNQLSNAGLPPDAFRGSEAIATLSLSNNQLSYLPPSLPPSLERLHLQNNLISKVPRGALSRQTQLRELYLQHNQLTDSGLDATTFSKLHSLEYLDLSHNQLTTVPAGLPRTLAILHLGRNRIRQVEAARLHGARGLRYLLLQHNQLGSSGLPAGALRPLRGLHTLHLYGNGLDRVPPALPRRLRALVLPHNHVAALGARDLVATPGLTELNLAYNRLASARVHHRAFRRLRALRSLDLAGNQLTRLPMGLPTGLRTLQLQRNQLRMLEPEPLAGLDQLRELSLAHNRLRVGDIGPGTWHELQALQVRHRLVSHTVPRAPPSPCLPCHVPNILVSW

SEQ ID NO: 10613 - protein, 574 aa, Homo Sapiens
MWPSLLLLLLLPGPPPVAGLEDAAFPHLGESLQPLPRACPLRCSCPRVDTVDCDGLDLRVFPDNITRAAQHLSLQNNQLQELPYNELSRLSGLRTLNLHNNLISSEGLPDEAFESLTQLQHLCVAHNKLSVAPQFLPRSLRVADLAANQVMEIFPLTFGEKPALRSVYLHNNQLSNAGLPPDAFRGSEAIATLSLSNNQLSYLPPSLPPSLERLHLQNNLISKVPRGALSRQTQLRELYLQHNQLTDSGLDATTFSKLHSLEYLDLSHNQLTTVPAGLPRTLAILHLGRNRIRQVEAARLHGARGLRYLLLQHNQLGSSGLPAGALRPLRGLHTLHLYGNGLDRVPPALPRRLRALVLPHNHVAALGARDLVATPGLTELNLAYNRLASARVHHRAFRRLRALRSLDLAGNQLTRLPMGLPTGLRTLQLQRNQLRMLEPEPLAGLDQLRELSLAHNRLRVGDIGPGTWHELQALQMLDLSHNELSFVPPDLPEALEELHLEGNRIGHVGPEAFLSTPRLRALFLRANRLHMTSIAAEAFLGLPNLRVVDTAGNPEQVLIRLPPTTPRGPRAGGP

SEQ ID NO: 10614 - protein, 151 aa, Homo Sapiens
RRLPRLRGHRHPQPLQQPAQLPAAQPAALTRAAPPAGSPANNLISKVPRGALSRQTQLRELYLQHNQLTDSGLDATTFSKLHSLEYLDLSHNQLTTVPAGLPRTLAILHLGRNRIRQVEAARLHGARGLRYLLLQHNQLGSSGLPAGALRP

SEQ ID NO: 10615 - protein, 182 aa, Homo Sapiens
  misc_feature (1)..(1): Xaa can be any naturally occurring amino acid
XFESLTQLQHLCVAHNKLSNAGLPPDAFRGSEAIATLSLSNNQLSYLPPSLPPSLERLHLQNNLISKVPRGALSRQTQLRELYLQHNQLTDSGLDATTFSKLHSLEYLDLSHNQLTTVPAGLPRTLAILHLGRNRIRQVEAARLHGARGLRYLLLQHNQLGSSGLPAGALRPLRGLHTLHLY

SEQ ID NO: 10616 - protein, 388 aa, Homo Sapiens
MGAAAWARPLSVSFLLLLLPLPGMPAGSWDPAGYLLYCPCMGRFGNQADHFLGSLAFAKLLNRTLAVPPWIEYQHHKPPFTNLHVSYQKYFKLEPLQAYHRVISLEDFMEKLAPTHWPPEKRVAYCFEVAAQRSPDKKTCPMKEGNPFGPFWDQFHVSFNKSELFTGISFSASYREQWSQRFSPKEHPVLALPGAPAQFPVLEEHRPLQKYMVWSDEMVKTGEAQIHAHLVRPYVGIHLRIGSDWKNACAMLKDGTAGSHFMASPQCVGYSRSTAAPLTMTMCLPDLKEIQRAVKLWVRSLDAQSVYVATDSESYVPELQQLFKGKVKVVSLKPEVAQVDLYILGQADHFIGNCVSSFTAFVKRERDLQGRPSSFFGMDRPPKLRDEF

SEQ ID NO: 10617 - protein, 194 aa, Homo Sapiens
MGAAAWARPLSVSFLLLLLPLPGMPAGSWDPAGYLLYCPCMGRFGNQADHFLGSLAFAKLLNRTLAVPPWIEYQHHKPPFTNLHVSYQKYFKLEPLQAYHRVISLEDFMEKLAPTHWPPEKRVAYCFEVAAQRSPDKKTCPMKEGNPFGPFWDQFHVSFNKSELFTGISFSASYREQWSQRRENHSCVTLLFPR

SEQ ID NO: 10618 - protein, 424 aa, Homo Sapiens
MATLSFVFLLLGAVSWPPASASGQEFWPGQSAADILSGAASRRRYLLYDVNPPEGFNLRRDVYIRIASLLKTLLKTEEWVLVLPPWGRLYHWQSPDIHQVRIPWSEFFDLPSLNKNIPVIEYEQFIAESGGPFIDQVYVLQSYAEGWKEGTWEEKVDERPCIDQLLYSQDKHEYYRGWFWGYEETRGLNVSCLSVQGSASIVAPLLLRNTSARSVMLDRAENLLHDHYGGKEYWDTRRSMVFARHLREVGDEFRSRHLNSTDDADRIPFQEDWMKMKVKLGSALGGPYLGVHLRRKDFIWGHRQDVPSLEGAVRKIRSLMKTHRLDKVFVATDAVRKEYEELKKLLPEMVRFEPTWEELELYKDGGVAIIDQWICAHARCLPTSLSAESGSGGFQRFFCPKYSVSEQMVACVHSGHFHTVCLLV

SEQ ID NO: 10619 - protein, 429 aa, Homo Sapiens
MATLSFVFLLLGAVSWPPASASGQEFWPGQSAADILSGAASRRRYLLYDVNPPEGFNLRRDVYIRIASLLKTLLKTEEWVLVLPPWGRLYHWQSPDIHQVRIPWSEFFDLPSLNKNIPVIEYEQFIAESGGPFIDQVYVLQSYAEGWKEGTWEEKVDERPCIDQLLYSQDKHEYYRGWFWGYEETRGLNVSCLSVQGSASIVAPLLLRNTSARSVMLDRAENLLHDHYGGKEYWDTRRSMVFARHLREVGDEFRSRHLNSTDDADRIPFQEDWMKMKVKLGSALGGPYLGVHLRRKDFIWGHRQDVPSLEGAVRKIRSLMKTHRLDKVFVATDAVRKEYEELKKLLPEMVRFEPTWEELELYKDGGVAIIDQWICAHARFFIGTSVSTFSFRIHEEREILGLDPKTTYNRFCGDQEKACEQPTHWKITY

SEQ ID NO: 10620 - protein, 380 aa, Homo Sapiens
MATLSFVFLLLGAVSWPPASASGQEFWPGQSAADILSGAASRRRYLLYDVNPPEGFNLRRDVYIRIASLLKTLLKTEEWVLVLPPWGRLYHWQSPDIHQVRIPWSEFFDLPSLNKNIPVIEYEQFIAESGGPFIDQVYVLQSYAEGWKEGTWEEKVDERPCIDQLLYSQDKHEYYRGWFWGYEETRGLNVSCLSVQGSASIVAPLLLRNTSARSVMLDRAENLLHDHYGGKEYWDTRRSMVFARHLREVGDEFRSRHLNSTDDADRIPFQEDWMKMKVKLGSALGGPYLGVHLRRKDFIWGHRQDVPSLEGAVRKIRSLMKTHRLDKVFVATDAVRKEYEELKKLLPEMVRFEPTWEELELYKDGGVAIIDQWICAHASS

SEQ ID NO: 10621 - protein, 212 aa, Homo Sapiens
MATLSFVFLLLGAVSWPPASASGQEFWPGQSAADILSGAASRRRYLLYDVNPPEGFNLRRDVYIRIASLLKTLLKTEEWVLVLPPWGRLYHWQSPDIHQVRIPWSEFFDLPSLNKNIPVIEYEQFIAGRRTACGVCFVVSQCSARDKESGGPFIDQVYVLQSYAEGWKEGTWEEKVDERPCIDQLLYSQDKHEYYRCLLRLLPLPQRMVLGL

SEQ ID NO: 10622 - protein, 141 aa, Homo Sapiens
MVFARHLREVGDEFRSRHLNSTDDADRIPFQEDWMKMKVKLGSALGGPYLGVHLRRKDFIWGHRQDVPSLEGAVRKIRSLMKTHRLDKVFVATDAVRKEYEELKKLLPEMVRFEPTWEELELYKDGGVAIIDQWICAHASS

SEQ ID NO: 10623 - protein, 265 aa, Homo Sapiens
  misc_feature (1)..(1): Xaa can be any naturally occurring amino acid
XQFIAESGGPFIDQVYVLQSYAEGWKEGTWEEKVDERPCIDQLLYSQDKHEYYRDGGLVSPKCRLPLKALTLPGLLWKSCQLTASMCPVPGQLALKHGRGWFWGYEETRGLNVSCLSVQGSASIVAPLLLRNTSARSVMLDRAENLLHDHYGGKEYWDTRRSMVFARHLREVGDEFRSRHLNSTDDADRIPFQEDWMKMKVKLGSALGGPYLGVHLRRKDFIWGHRQDVPSLEGAVRKIRSLMKTHRLDKVFVATDAVRKEYEEL

SEQ ID NO: 10624 - protein, 111 aa, Homo Sapiens
MEWWASSPLRLWLLLFLLPSAQGRQKESGGLRAVPSLPLGLGVWPESRGAPPRGRLPGRCRGRCSSELGRRHRGALRRRVQNGKYLLTKLTGLWRITNHVQVKTAAATMVS

SEQ ID NO: 10625 - protein, 163 aa, Homo Sapiens
MEWWASSPLRLWLLLFLLPSAQGRQKESGSKWKVFIDQINRSLENYEPCSSQNCSCYHGVIEEDLTPFRGGISRKMMAEVVRRKLGTHYQITKNRLYRENDCMFPSRCSGVEHFILEVIGRLPDMEMVINVRDYPQVPKWMEPAIPVFSFSKARLWKIGKIYL

SEQ ID NO: 10626 - protein, 187 aa, Homo Sapiens
MEWWASSPLRLWLLLFLLPSAQGRQKESGSKWKVFIDQINRSLENYEPCSSQNCSCYHGVIEEDLTPFRGGISRKMMAEVVRRKLGTHYQITKNRLYRENDCMFPSRCSGVEHFILEVIGRLPDMEMVINVRDYPQVPKWMEPAIPVFSFSKTCFISCVASGQRPHLCCISHGLASFLESVWFHCLS

SEQ ID NO: 10627 - protein, 392 aa, Homo Sapiens
MEWWASSPLRLWLLLFLLPSAQGRQKESGSKWKVFIDQINRSLENYEPCSSQNCSCYHGVIEEDLTPFRGGISRKMMAEVVRRKLGTHYQITKNRLYRENDCMFPSRCSGVEHFILEVIGRLPDMEMVINVRDYPQVPKWMEPAIPVFSFSKTSEYHDIMYPAWTFWEGGPAVWPIYPTGLGRWDLFREDLVRSAAQWPWKKKNSTAYFRGSRTSPERDPLILLSRKNPKLVDAEYTKNQAWKSMKDTLGKPAAKDVHLVDHCKYKYLFNFRGVAASFRFKHLFLCGSLVFHVGDEWLEFFYPQLKPWVHYIPVKTDLSNVQELLQFVKANDDVAQEIAERGSQFIRNHLQMDDITCYWENLLSEYSKFLSYNVTRRKGYDQIIPKMLKTEL

SEQ ID NO: 10628 - protein, 189 aa, Homo Sapiens
  misc_feature (1)..(1): Xaa can be any naturally occurring amino acid
XCGAALPPAPQRGICSSKWKVFIDQINRSLENYEPCSSQNCSCYHGVIEEDLTPFRGGISRKMMAEVVRRKLGTHYQITKNRLYRENDCMFPSRCSGVEHFILEVIGRLPDMEMVINVRDYPQVPKWMEPAIPVFSFSKTSEYHDIMYPAWTFWEGGPAVWPIYPTGLGRWDLFREDLVRSAAQWPWKK

SEQ ID NO: 10629 - protein, 334 aa, Homo Sapiens
MDPRGILKAFPKRQKIHADASSKPSCASALRCLCPESDIGADSACPGPAEWLSSLRAHVVRTGIGRARAELFEKQIVQHGGQLCPAQGPGVTHIVVDEGMDYERALRLLRLPQLPPGAQLVKSAWLSLCLQERRLVDVAGFSIFIPSRYLDHPQPSKAEQDASIPPGTHEALLQTALSPPPPPTRPVSPPQKAKEAPNTQAQPISDDEASDGEETQVSAADLEALISGHYPTSLEGDCEPSPAPAVLDKWVCAQPSSQKATNHNLHITEKLEVLAKAYSVQGDKWRALGYAKAINALKSFHKPVTSYQEACSIPGIGKRMAEKIIEILESGHLR

SEQ ID NO: 10630 - protein, 188 aa, Homo Sapiens
MDPRGILKAFPKRQKIHADASSKVLAKIPRREEGEEAEEWLSSLRAHVVRTGIGRARAELFEKQIVQHGGQLCPAQGPGVTHIVVDEGMDYERALRLLRLPQLPPGAQLVKSAWLSLCLQERRLVDVAGFSIFIPSRYLDHPQPSKAEQDASIPPGTHEALLQTALSPPPPPTRPVSPPQKAKEAPNT

SEQ ID NO: 10631 - protein, 470 aa, Homo Sapiens
MDPRGILKAFPKRQKIHADASSKVLAKIPRREEGEEAEEWLSSLRAHVVRTGIGRARAELFEKQIVQHGGQLCPAQGPGVTHIVVDEGMDYERALRLLRLPQLPPGAQLVKSAWLSLCLQERRLVDVAGFSIFIPSRYLDHPQPSKAEQDASIPPGTHEALLQTALSPPPPPTRPVSPPQKAKEAPNTQAQPISDDEASDGEETQEACSIPGIGKRMAEKIIEILESGHLRKLDHISESVPVLELFSNIWGAGTKTAQMWYQQGFRSLEDIRSQASLTTQQAIGLKHYSDFLERMPREEATEIEQTVQKAAQAFNSGLLCVACGSYRRGKATCGDVDVLITHPDGRSHRGIFSRLLDSLRQEAVPSVGPGFLTDDLVSQEENGQQQKYLGVCRLPGPGRRHRRLDIIVVPYSEFACALLYFTGSAHFNRSMRALAKTKGMSLSEHALSTAVVRNTHGCKVGPGRVLPTPT

SEQ ID NO: 10632 - protein, 575 aa, Homo Sapiens
MDPRGILKAFPKRQKIHADASSKVLAKIPRREEGEEAEEWLSSLRAHVVRTGIGRARAELFEKQIVQHGGQLCPAQGPGVTHIVVDEGMDYERALRLLRLPQLPPGAQLVKSAWLSLCLQERRLVDVAGFSIFIPSRYLDHPQPSKAEQDASIPPGTHEALLQTALSPPPPPTRPVSPPQKAKEAPNTQAQPISDDEASDGEETQVSAADLEALISGHYPTSLEGDCEPSPAPAVLDKWVCAQPSSQKATNHNLHITEKLEVLAKAYSVQGDKWRALGYAKAINALKSFHKPVTSYQEACSIPGIGKRMAEKIIEILESGHLRKLDHISESVPVLELFSNIWGAGTKTAQMWYQQGFRSLEDIRSQASLTTQQAIGLKHYSDFLERMPREEATEIEQTVQKAAQAFNSGLLCVACGSYRRGKATCGDVDVLITHPDGRSHRGIFSRLLDSLRQEGFLTDDLVSQEENGQQQKYLGVCRLPGPGRRHRRLDIIVVPYSEFACALLYFTGSAHFNRSMRALAKTKGMSLSEHALSTAVVRNTHGCKVGPGRVLPTPTEKDVFRLLGLPYREPAERDW

SEQ ID NO: 10633 - protein, 575 aa, Homo Sapiens; identical to SEQ ID NO: 10632

SEQ ID NO: 10634 - protein, 575 aa, Homo Sapiens; identical to SEQ ID NO: 10632

SEQ ID NO: 10635 - protein, 269 aa, Homo Sapiens
MDPRGILKAFPKRQKIHADASSKVLAKIPRREEGEEAEEWLSSLRAHVVRTGIGRARAELFEKQIVQHGGQLCPAQGPGVTHIVVDEGMDYERALRLLRLPQLPPGAQLVKSAWLSLCLQERRLVDVAGFSIFIPSRYLDHPQPSKAEQDASIPPGTHEALLQTALSPPPPPTRPVSPPQKAKEAPNTQAQPISDDEASDGEETQVSAADLEALISGHYPTSLEGDCEPSPAPAVLDKWVCAQPSSQKATNHNLHITEKLEVLAKAYSV

SEQ ID NO: 10636 - protein, 487 aa, Homo Sapiens
MDYERALRLLRLPQLPPGAQLVKSAWLSLCLQERRLVDVAGFSIFIPSRYLDHPQPSKAEQDASIPPGTHEALLQTALSPPPPPTRPVSPPQKAKEAPNTQAQPISDDEASDGEETQVSAADLEALISGHYPTSLEGDCEPSPAPAVLDKWVCAQPSSQKATNHNLHITEKLEVLAKAYSVQGDKWRALGYAKAINALKSFHKPVTSYQEACSIPGIGKRMAEKIIEILESGHLRKLDHISESVPVLELFSNIWGAGTKTAQMWYQQGFRSLEDIRSQASLTTQQAIGLKHYSDFLERMPREEATEIEQTVQKAAQAFNSGLLCVACGSYRRGKATCGDVDVLITHPDGRSHRGIFSRLLDSLRQEGFLTDDLVSQEENGQQQKYLGVCRLPGPGRRHRRLDIIVVPYSEFACALLYFTGSAHFNRSMRALAKTKGMSLSEHALSTAVVRNTHGCKVGPGRVLPTPTEKDVFRLLGLPYREPAERDW

SEQ ID NO: 10637 - protein, 152 aa, Homo Sapiens
MDYERALRLLRLPQLPPGAQLVKSAWLSLCLQERRLVDVAGFSIFIPSSPSLMMKPVMGKKPRLVQLIWKPSSVATTPPPLREIVSLAQPLLSWISGSVHSPQARRRPITTSISQRSWKFWPKPTVFRETSGGPWAMPRPSMPSRASISLSP

SEQ ID NO: 10638 - protein, 248 aa, Homo Sapiens
MEALCVCSLMPLHWSWILTASHLAAFFQGFRSLEDIRSQASLTTQQAIGLKHYSDFLERMPREEATEIEQTVQKAAQAFNSGLLCVACGSYRRGKATCGDVDVLITHPDGRSHRGIFSRLLDSLRQEGFLTDDLVSQEENGQQQKYLGVCRLPGPGRRHRRLDIIVVPYSEFACALLYFTGSAHFNRSMRALAKTKGMSLSEHALSTAVVRNTHGCKVGPGRVLPTPTEKDVFRLLGLPYREPAERDW

SEQ ID NO: 10639 - protein, 218 aa, Homo Sapiens
MHHQKYLQRFLGGKREKKQKEACSIPGIGKRMAEKIIEILESGHLRKLDHISESVPVLELFSNIWGAGTKTAQMWYQQGFRSLEDIRSQASLTTQQAIGLKHYSDFLERMPREEATEIEQTVQKAAQAFNSGLLCVACGSYRRGKATCGDVDVLITHPDGRSHRGIFSRLLDSLRQEGFLTDDLVSQEENGQQQKYLGVCRLPGPGRRHRRLDIIVVP

SEQ ID NO: 10640 - protein, 298 aa, Homo Sapiens
MHHQKYLQRFLGGKREKKQKEACSIPGIGKRMAEKIIEILESGHLRKLDHISESVPVLELFSNIWGAGTKTAQMWYQQGFRSLEDIRSQASLTTQQAIGLKHYSDFLERMPREEATEIEQTVQKAAQAFNSGLLCVACGSYRRGKATCGDVDVLITHPDGRSHRGIFSRLLDSLRQEGFLTDDLVSQEENGQQQKYLGVCRLPGPGRRHRRLDIIVVPYSEFACALLYFTGSAHFNRSMRALAKTKGMSLSEHALSTAVVRNTHGCKVGPGRVLPTPTEKDVFRLLGLPYREPAERDW

SEQ ID NO: 10641 - protein, 300 aa, Homo Sapiens
MLMHHQKYLQRFLGGKREKKQKEACSIPGIGKRMAEKIIEILESGHLRKLDHISESVPVLELFSNIWGAGTKTAQMWYQQGFRSLEDIRSQASLTTQQAIGLKHYSDFLERMPREEATEIEQTVQKAAQAFNSGLLCVACGSYRRGKATCGDVDVLITHPDGRSHRGIFSRLLDSLRQEGFLTDDLVSQEENGQQQKYLGVCRLPGPGRRHRRLDIIVVPYSEFACALLYFTGSAHFNRSMRALAKTKGMSLSEHALSTAVVRNTHGCKVGPGRVLPTPTEKDVFRLLGLPYREPAERDW

SEQ ID NO: 10642 - protein, 246 aa, Homo Sapiens
MPRSCCSRSGALLLALLLQASMEVRGWCLESSQCQDLTTESNLLECIRACKPDLSAETPMFPGNGDEQPLTENPRKYVMGHFRWDRFGRRNSSSSGSSGAGQKREDVSAGEDCGPLPEGGPEPRSDGAKPGPREGKRSYSMEHFRWGKPVGKKRRPVKVYPNGAEDESAEAFPLEFKRELTGQRLREGDGPDGPADDGAGAQADLEHSLLVAAEKKDEGPYRMEHFRWGSPPKDKRYGGFMTSEKS

SEQ ID NO: 10643 - protein, 267 aa, Homo Sapiens
MPRSCCSRSGALLLALLLQASMEVRGWCLESSQCQDLTTESNLLECIRACKPDLSAETPMFPGNGDEQPLTENPRKYVMGHFRWDRFGRRNSSSSGSSGAGQKREDVSAGEDCGPLPEGGPEPRSDGAKPGPREGKRSYSMEHFRWGKPVGKKRRPVKVYPNGAEDESAEAFPLEFKRELTGQRLREGDGPDGPADDGAGAQADLEHSLLVAAEKKDEGPYRMEHFRWGSPPKDKRYGGFMTSEKSQTPLVTLFKNAIIKNAYKKGE

SEQ ID NO: 10644 - protein, 267 aa, Homo Sapiens; identical to SEQ ID NO: 10643

SEQ ID NO: 10645 - protein, 267 aa, Homo Sapiens; identical to SEQ ID NO: 10643

SEQ ID NO: 10646 - protein, 267 aa, Homo Sapiens; identical to SEQ ID NO: 10643

SEQ ID NO: 10647 - protein, 580 aa, Homo Sapiens
MHLSAVFNALLVSVLAAVLWKHVRLREHAATLEEELALSRQATEPAPALRIDYPKALQILMEGGTHMVCTGRTHTDRICRFKWLCYSNEAEEFIFFHGNTSVMLPNLGSRRFQPALLDLSTVEDHNTQYFNFVELPAAALRFMPKPVFVPDVALIANRFNPDNLMHVFHDDLLPLFYTLRQFPGLAHEARLFFMEGWGEGAHFDLYKLLSPKQPLLRAQLKTLGRLLCFSHAFVGLSKITTWYQYGFVQPQGPKANILVSGNEIRQFARFMTEKLNVSHTGVPLGEEYILVFSRTQNRLILNEAELLLALAQEFQMKTVTVSLEDHTFADVVRLVSNASMLVSMHGAQLVTTLFLPRGATVVELFPYAVNPDHYTPYKTLAMLPGMDLQYVAWRNMMPENTVTHPERPWDQGGITHLDRAEQARILQSREVPRHLCCRNPEWLFRIYQDTKVDIPSLIQTIRRVVKGRPGPRKQKWTVGLYPGKVREARCQASVHGASEARLTVSWQIPWNLKYLKVREVKYEVWLQEQGENTYVPYILALQNHTFTENIKPFTTYLVWVRCIFNKILLGPFADVLVCNT

SEQ ID NO: 10648 - protein, 580 aa, Homo Sapiens; identical to SEQ ID NO: 10647

SEQ ID NO: 10649 - protein, 355 aa, Homo Sapiens [sequence omitted]

SEQ ID NO: 10650 - protein, 77 aa, Homo Sapiens
MAKLIALTLLGMGLALFRNHQSSYQTRLNALREVQPVELPNCNLVKGIETGSEDLEILPNGLAFISSSWKNTSDGPE

SEQ ID NO: 10651 - protein, 375 aa, Homo Sapiens
MAPPTELLARPERGSAPGSRAMGRLVAVGLLGIALALLGERLLALRNRLKASREVESVDLPHCHLIKGIEAGSEDIDILPNGLAFFSVGLKFPGLHSFAPDKPGGILMMDLKEEKPRARELRISRGFDLASFNPHGISTFIDNDDTVYLFVVNHPEFKNTVEIFKFEEAENSLLHLKTVKHELLPSVNDITAVGPAHFYATNDHYFSDPFLKYLETYLNLHWANVVYYSPNEVKVVAEGFDSANGINISPDDKYIYVADILAHEIHVLEKHTNMNLTQLKVLELDTLVDNLSIDPSSGDIWVGCHPNGQKLFVYDPNNPPSSEVLRIQNILSEKPTVTTVYANNGSVLQGSSVASVYDGKLLIGTLYHRALYCEL

SEQ ID NO: 10652 - protein, 354 aa, Homo Sapiens
MGRLVAVGLLGIALALLGERLLALRNRLKASREVESVDLPHCHLIKGIEAGSEDIDILPNGLAFFSVGLKFPGLHSFAPDKPGGILMMDLKEEKPRARELRISRGFDLASFNPHGISTFIDNDDTVYLFVVNHPEFKNTVEIFKFEEAENSLLHLKTVKHELLPSVNDITAVGPAHFYATNDHYFSDPFLKYLETYLNLHWANVVYYSPNEVKVVAEGFDSANGINISPDDKYIYVADILAHEIHVLEKHTNMNLTQLKVLELDTLVDNLSIDPSSGDIWVGCHPNGQKLFVYDPNNPPSSEVLRIQNILSEKPTVTTVYANNGSVLQGSSVASVYDGKLLIGTLYHRALYCEL

SEQ ID NO: 10653 - protein, 354 aa, Homo Sapiens; identical to SEQ ID NO: 10652

SEQ ID NO: 10654 - protein, 219 aa, Homo Sapiens
MGRLVAVGLLGIALALLGERLLALRNRLKASREVESVDLPHCHLIKGIEAGSEDIDILPNGLAFFSVGLKFPGLHSFAPDKPGGILMMDLKEEKPRARELRISRGFDLASFNPHGISTFIDNDDTVYLFVVNHPEFKNTVEIFKFEEAENSLLHLKTVKHELLPSVNDITAVGPAHFYATNDHYFSDPFLKYLETYLNLHWANVVYYSPNEVKVVYLCC

SEQ ID NO: 10655 - protein, 342 aa, Homo Sapiens
MGRLVAVGLLGIALALLGERLLALRNRLKASREVESVDLPHCHLIKGIEAGSEDIDILPNGLAFFSVGLKFPGLHSFAPDKPGGILMMDLKEEKPRARELRISRGFDLASFNPHGISTFIDNEFKNTVEIFKFEEAENSLLHLKTVKHELLPSVNDITAVGPAHFYATNDHYFSDPFLKYLETYLNLHWANVVYYSPNEVKVVAEGFDSANGINISPDDKYIYVADILAHEIHVLEKHTNMNLTQLKVLELDTLVDNLSIDPSSGDIWVGCHPNGQKLFVYDPNNPPSSEVLRIQNILSEKPTVTTVYANNGSVLQGSSVASVYDGKLLIGTLYHRALYCEL

SEQ ID NO: 10656 - protein, 84 aa, Homo Sapiens
MGRLVAVGLLGIALALLGERLLALRNRLKASREVESVDLPHCHLIKGIEAGSEDIDILPNGLAFFSVVSVFFLPQIQQRRYKGI

SEQ ID NO: 10657 - protein, 84 aa, Homo Sapiens; identical to SEQ ID NO: 10656

SEQ ID NO: 10658 - protein, 50 aa, Homo Sapiens
MGRLVAVGLLGIALALLGERLLALRNRLKASREVESVDLPHCHLIKGIVW

SEQ ID NO: 10659 - protein, 32 aa, Homo Sapiens
MMDLKEEKPRARELRISRGFDLASFNPHGIST

SEQ ID NO: 10660 - protein, 53 aa, Homo Sapiens
MMDLKEEKPRARELRISRGFDLASFNPHGISTFIDNDDTVYLFVVNHPEFKNT

SEQ ID NO: 10661 - protein, 69 aa, Homo Sapiens
MMDLKEEKPRARELRISRGFDLASFNPHGISTFIDNDDTVYLFVVNHPEFKNTVEIFKFEEAENSLLHL

SEQ ID NO: 10662 - protein, 113 aa, Homo Sapiens
MMDLKEEKPRARELRISRGFDLASFNPHGISTFIDNDDTVYLFVVNHPEFKNTVEIFKFEEAENSLLHLKTVKHELLPSVNDITAVGPAHFYATNDHYFSDPFLKYLETYLNL

SEQ ID NO: 10663 - protein, 122 aa, Homo Sapiens
  misc_feature (1)..(1): Xaa can be any naturally occurring amino acid
XENSLLHLKTVKHELLPSVNDITAVGPAHFYATNDHYFSDPFLKYLETYLNLHWANVVYYSPNEVKVVAEGFDSANGINISPDDKYIYVADILAHEIHVLEKHTNMNLTQLKILTISHLEGT

SEQ ID NO: 10664 - protein, 245 aa, Homo Sapiens
MGKLVALVLLGVGLSLVGEMFLAFRERVNASREVEPVEPENCHLIEELESGSEDIDILPSGLAFISSGLKYPGMPNFAPDEPGKIFLMDLNEQNPRAQALEISGGFDKELFNPHGISIFIDKDNTVYLYVVNHPHMKSTVEIFKFEEQQRSLVYLKTIKHELLKSVNDIVVLGPEQFYATRDHYFTNSLLSFFEMILDLRWTYVLFYSPREVKVVAKGFCSANGITVSADQKYFASRMFCLRSPG

SEQ ID NO: 10665 - protein, 354 aa, Homo Sapiens
MGKLVALVLLGVGLSLVGEMFLAFRERVNASREVEPVEPENCHLIEELESGSEDIDILPSGLAFISSGLKYPGMPNFAPDEPGKIFLMDLNEQNPRAQALEISGGFDKELFNPHGISIFIDKDNTVYLYVVNHPHMKSTVEIFKFEEQQRSLVYLKTIKHELLKSVNDIVVLGPEQFYATRDHYFTNSLLSFFEMILDLRWTYVLFYSPREVKVVAKGFCSANGITVSADQKYVYVADVAAKNIHIMEKHDNWDLTQLKVIQLGTLVDNLTVDPATGDILAGCHPNPMKLLNYNPEDPPGSEVLRIQNVLSEKPRVSTVYANNGSVLQGTSVASVYHGKILIGTVFHKTLYCEL

SEQ ID NO: 10666 - protein, 270 aa, Homo Sapiens
MGKLVALVLLGVGLSLVGEMFLAFRERVNASREVEPVEPENCHLIEELESGSEDIDILPSGLAFISSGLKYPGMPNFAPDEPGKIFLMDLNEQNPRAQALEISGGFDKELFNPHGISIFIDKDNTVYLYVVNHPHMKSTVEIFKFEEQQRSLVYLKTIKHELLKSVNDIVVLGPEQFYATRDHYFTNSLLSFFEMILDLRWTYVLFYSPREVKVVAKGFCSANGITVSADQKYVYVADVAAKNIHIMEKHDNWDLTQLKETFWQDAILIL

SEQ ID NO: 10667 - protein, 61 aa, Homo Sapiens
MGKLVALVLLGVGLSLVGEMFLAFRERVNASREVEPVEPENCHLIEELGIKISRHAKLCAR

SEQ ID NO: 10668 - protein, 46 aa, Homo Sapiens
MGKLVALVLLGVGLSLVGEMFLAFRVGFYLLQRKGECLSRSGASRT

SEQ ID NO: 10669 - protein, 46 aa, Homo Sapiens; identical to SEQ ID NO: 10668

SEQ ID NO: 10670 - protein, 808 aa, Homo Sapiens
MIPFLPMFSLLLLLIVNPINANNHYDKILAHSRIRGRDQGPNVCALQQILGTKKKYFSTCKNWYKKSICGQKTTVLYECCPGYMRMEGMKGCPAVLPIDHVYGTLGIVGATTTQRYSDASKLREEIEGKGSFTYFAPSNEAWDNLDSDIRRGLESNVNVELLNALHSHMINKRMLTKDLKNGMIIPSMYNNLGLFINHYPNGVVTVNCARIIHGNQIATNGVVHVIDRVLTQIGTSIQDFIEAEDDLSSFRAAAITSDILEALGRDGHFTLFAPTNEAFEKLPRGVLERIMGDKVASEALMKYHILNTLQCSESIMGGAVFETLEGNTIEIGCDGDSITVNGIKMVNKKDIVTNNGVIHLIDQVLIPDSAKQVIELAGKQQTTFTDLVAQLGLASALRPDGEYTLLAPVNNAFSDDTLSMDQRLLKLILQNHILKVKVGLNELYNGQILETIGGKQLRVFVYRTAVCIENSCMEKGSKQGRNGAIHIFREIIKPAEKSLHEKLKQDKRFSTFLSLLEAADLKELLTQPGDWTLFVPTNDAFKGMTSEEKEILIRDKNALQNIILYHLTPGVFIGKGFEPGVTNILKTTQGSKIFLKEVNDTLLVNELKSKESDIMTTNGVIHVVDKLLYPADTPVGNDQLLEILNKLIKYIQIKFVRGSTFKEIPVTVYTTKIITKVVEPKIKVIEGSLQPIIKTEGPTLTKVKIEGEPEFRLIKEGETITEVIHGEPIIKKYTKIIDGVPVEITEKETREERIITGPEIKYTRISTGGGETEETLKKLLQEDTPVRKLQANKKVQGSRRRLREGRSQ

SEQ ID NO: 10671 - protein, 779 aa, Homo Sapiens
MIPFLPMFSLLLLLIVNPINANNHYDKILAHSRIRGRDQGPNVCALQQILGTKKKYFSTCKNWYKKSICGQKTTVLYECCPGYMRMEGMKGCPAVLPIDHVYGTLGIVGATTTQRYSDASKLREEIEGKGSFTYFAPSNEAWDNLDSDIRRGLESNVNVELLNALHSHMINKRMLTKDLKNGMIIPSMYNNLGLFINHYPNGVVTVNCARIIHGNQIATNGVVHVIDRVLTQIGTSIQDFIEAEDDLSSFRAAAITSDILEALGRDGHFTLFAPTNEAFEKLPRGVLERIMGDKVASEALMKYHILNTLQCSESIMGGAVFETLEGNTIEIGCDGDSITVNGIKMVNKKDIVTNNGVIHLIDQVLIPDSAKQVIELAGKQQTTFTDLVAQLGLASALRPDGEYTLLAPVNNAFSDDTLSMDQRLLKLILQNHILKVKVGLNELYNGQILETIGGKQLRVFVYRTAVCIENSCMEKGSKQGRNGAIHIFREIIKPAEKSLHEKLKQDKRFSTFLSLLEAADLKELLTQPGDWTLFVPTNDAFKGMTSEEKEILIRDKNALQNIILYHLTPGVFIGKGFEPGVTNILKTTQGSKIFLKEVNDTLLVNELKSKESDIMTTNGVIHVVDKLLYPADTPVGNDQLLEILNKLIKYIQIKFVRGSTFKEIPVTVYKPIIKKYTKIIDGVPVEITEKETREERIITGPEIKYTRISTGGGETEETLKKLLQEEVTKVTKFIEGGDGHLFEDEEIKRLLQGDTPVRKLQANKKVQGSRRRLREGRSQ

SEQ ID NO: 10672 - protein, 809 aa, Homo Sapiens
MIPFLPMFSLLLLLIVNPINANNHYDKILAHSRIRGRDQGPNVCALQQILGTKKKYFSTCKNWYKKSICGQKTTVLYECCPGYMRMEGMKGCPAVLPIDHVYGTLGIVGATTTQRYSDASKLREEIEGKGSFTYFAPSNEAWDNLDSDIRRGLESNVNVELLNALHSHMINKRMLTKDLKNGMIIPSMYNNLGLFINHYPNGVVTVNCARIIHGNQIATNGVVHVIDRVLTQIGTSIQDFIEAEDDLSSFRAAAITSDILEALGRDGHFTLFAPTNEAFEKLPRGVLERIMGDKVASEALMKYHILNTLQCSESIMGGAVFETLEGNTIEIGCDGDSITVNGIKMVNKKDIVTNNGVIHLIDQVLIPDSAKQVIELAGKQQTTFTDLVAQLGLASALRPDGEYTLLAPVNNAFSDDTLSMDQRLLKLILQNHILKVKVGLNELYNGQILETIGGKQLRVFVYRTAVCIENSCMEKGSKQGRNGAIHIFREIIKPAEKSLHEKLKQDKRFSTFLSLLEAADLKELLTQPGDWTLFVPTNDAFKGMTSEEKEILIRDKNALQNIILYHLTPGVFIGKGFEPGVTNILKTTQGSKIFLKEVNDTLLVNELKSKESDIMTTNGVIHVVDKLLYPADTPVGNDQLLEILNKLIKYIQIKFVRGSTFKEIPVTVYRPTLTKVKIEGEPEFRLIKEGETITEVIHGEPIIKKYTKIIDGVPVEITEKETREERIITGPEIKYTRISTGGGETEETLKKLLQEEVTKVTKFIEGGDGHLFEDEEIKRLLQGDTPVRKLQANKKVQGSRRRLREGRSQ

SEQ ID NO: 10673 - protein, 836 aa, Homo Sapiens
MIPFLPMFSLLLLLIVNPINANNHYDKILAHSRIRGRDQGPNVCALQQILGTKKKYFSTCKNWYKKSICGQKTTVLYECCPGYMRMEGMKGCPAVLPIDHVYGTLGIVGATTTQRYSDASKLREEIEGKGSFTYFAPSNEAWDNLDSDIRRGLESNVNVELLNALHSHMINKRMLTKDLKNGMIIPSMYNNLGLFINHYPNGVVTVNCARIIHGNQIATNGVVHVIDRVLTQIGTSIQDFIEAEDDLSSFRAAAITSDILEALGRDGHFTLFAPTNEAFEKLPRGVLERIMGDKVASEALMKYHILNTLQCSESIMGGAVFETLEGNTIEIGCDGDSITVNGIKMVNKKDIVTNNGVIHLIDQVLIPDSAKQVIELAGKQQTTFTDLVAQLGLASALRPDGEYTLLAPVNNAFSDDTLSMDQRLLKLILQNHILKVKVGLNELYNGQILETIGGKQLRVFVYRTAVCIENSCMEKGSKQGRNGAIHIFREIIKPAEKSLHEKLKQDKRFSTFLSLLEAADLKELLTQPGDWTLFVPTNDAFKGMTSEEKEILIRDKNALQNIILYHLTPGVFIGKGFEPGVTNILKTTQGSKIFLKEVNDTLLVNELKSKESDIMTTNGVIHVVDKLLYPADTPVGNDQLLEILNKLIKYIQIKFVRGSTFKEIPVTVYTTKIITKVVEPKIKVIEGSLQPIIKTEGPTLTKVKIEGEPEFRLIKEGETITEVIHGEPIIKKYTKIIDGVPVEITEKETREERIITGPEIKYTRISTGGGETEETLKKLLQEEVTKVTKFIEGGDGHLFEDEEIKRLLQGDTPVRKLQANKKVQGSRRRLREGRSQ

SEQ ID NO: 10674 - protein, 781 aa, Homo Sapiens
MIPFLPMFSLLLLLIVNPINANNHYDKILAHSRIRGRDQGPNVCALQQILGTKKKYFSTCKNWYKKSICGQKTTVLYECCPGYMRMEGMKGCPAVLPIDHVYGTLGIVGATTTQRYSDASKLREEIEGKGSFTYFAPSNEAWDNLDSDIRRGLESNVNVELLNALHSHMINKRMLTKDLKNGMIIPSMYNNLGLFINHYPNGVVTVNCARIIHGNQIATNGVVHVIDRVLTQIGTSIQDFIEAEDDLSSFRAAAITSDILEALGRDGHFTLFAPTNEAFEKLPRGVLERIMGDKVASEALMKYHILNTLQCSESIMGGAVFETLEGNTIEIGCDGDSITVNGIKMVNKKDIVTNNGVIHLIDQVLIPDSAKQVIELAGKQQTTFTDLVAQLGLASALRPDGEYTLLAPVNNAFSDDTLSMDQRLLKLILQNHILKVKVGLNELYNGQILETIGGKQLRVFVYRTAVCIENSCMEKGSKQGRNGAIHIFREIIKPAEKSLHEKLKQDKRFSTFLSLLEAADLKELLTQPGDWTLFVPTNDAFKGMTSEEKEILIRDKNALQNIILYHLTPGVFIGKGFEPGVTNILKTTQGSKIFLKEVNDTLLVNELKSKESDIMTTNGVIHVVDKLLYPADTPVGNDQLLEILNKLIKYIQIKFVRGSTFKEIPVTVYRPTLTKVKIEGEPEFRLIKEGETITEVIHGEPIIKKYTKIIDGVPVEITEKETREERIITGPEIKYTRISTGGGETEETLKKLLQEDTPVRKLQANKKVQGSRRRLREGRSQ

SEQ ID NO: 10675 - protein, 749 aa, Homo Sapiens
MIPFLPMFSLLLLLIVNPINANNHYDKILAHSRIRGRDQGPNVCALQQILGTKKKYFSTCKNWYKKSICGQKTTVLYECCPGYMRMEGMKGCPAVLPIDHVYGTLGIVGATTTQRYSDASKLREEIEGKGSFTYFAPSNEAWDNLDSDIRRGLESNVNVELLNALHSHMINKRMLTKDLKNGMIIPSMYNNLGLFINHYPNGVVTVNCARIIHGNQIATNGVVHVIDRVLTQIGTSIQDFIEAEDDLSSFRAAAITSDILEALGRDGHFTLFAPTNEAFEKLPRGVLERIMGDKVASEALMKYHILNTLQCSESIMGGAVFETLEGNTIEIGCDGDSITVNGIKMVNKKDIVTNNGVIHLIDQVLIPDSAKQVIELAGKQQTTFTDLVAQLGLASALRPDGEYTLLAPVNNAFSDDTLSMDQRLLKLILQNHILKVKVGLNELYNGQILETIGGKQLRVFVYRTAVCIENSCMEKGSKQGRNGAIHIFREIIKPAEKSLHEKLKQDKRFSTFLSLLEAADLKELLTQPGDWTLFVPTNDAFKGMTSEEKEILIRDKNALQNIILYHLTPGVFIGKGFEPGVTNILKTTQGSKIFLKEVNDTLLVNELKSKESDIMTTNGVIHVVDKLLYPADTPVGNDQLLEILNKLIKYIQIKFVRGSTFKEIPVTVYSPEIKYTRISTGGGETEETLKKLLQEEVTKVTKFIEGGDGHLFEDEEIKRLLQGDTPVRKLQANKKVQGSRRRLREGRSQ

SEQ ID NO: 10676 - protein, 128 aa, Homo Sapiens
MSLRLDTTPSCNSARPLHALQVLLLLSLLLTALASSTKGQTKRNLAKGKEESLDSDLYAELRCMCIKTTSGIHPKNIQSLEVIGKGTHCNQVEVIATLKDGRKICLDPDAPRIKKIVQKKLAGDESAD

SEQ ID NO: 10677 - protein, 216 aa, Homo Sapiens
MLRLSERNMKVLLAAALIAGSVFFLLLPGPSAADEKKKGPKVTVKVYFDLRIGDEDVGRVIFGLFGKTVPKTVDNFVALATGEKGFGYKNSKFHRVIKDFMIQGGDFTRGDGTGGKSIYGERFPDENFKLKHYGPGWVSMANAGKDTNGSQFFITTVKTAWLDGKHVVFGKVLEGMEVVRKVESTKTDSRDKPLKDVIIADCGKIEVEKPFAIAKE

SEQ ID NO: 10678 - protein, 212 aa, Homo Sapiens
MGPGPRLLLPLVLCVGLGALVFSSGAEGFRKRGPSVTAKVFFDVRIGDKDVGRIVIGLFGKVVPKTVENFVALATGEKGYGYKGSKFHRVIKDFMIQGGDITTGDGTGGVSIYGETFPDENFKLKHYGIGWVSMANAGPDTNGSQFFITLTKPTWLDGKHVVFGKVIDGMTVVHSIELQATDGHDRPLTNCSIINSGKIDVKTPFVVEIADW

SEQ ID NO: 10679 - protein, 140 aa, Homo Sapiens
MGRTVVVLGGGISGLAASYHLSRAPCPPKVMLGGSWLQTLEASGCVLSQELFQQRAQEAAATQLGLKEMPSHCLVHLHKNCIPQYTLGHWQKLESARQFLTAHRLPLTLAGASYEGVAVNDCIESGRQAAVSVLGTEPNS

SEQ ID NO: 10680 - protein, 156 aa, Homo Sapiens
MGRTVVVLGGGISGLAASYHLSRAPCPPKVMLGGSWLQTLEASGCVLSQELFQQRAQEAAATQLGLKEMPSHCLVHLHKTKNQLKWRQSHDRTVEWPKEYPGRSRKQAPSILHVPGCQLLRCRDRDHLGAVSEQPRSSAESRVGVASSTFSTFPLF

SEQ ID NO: 10681 - protein, 78 aa, Homo Sapiens
MGRTVVVLGGGISGLAASYHLSRAPCPPKVVLVESSERLGGWIRSVRGPNGAIFELGPRGIRPAGALGARTLLLFLLF

SEQ ID NO: 10682 - protein, 185 aa, Homo Sapiens
MGRTVVVLGGGISGLAASYHLSRAPCPPKVVLVESSERLGGWIRSVRGPNGAIFELGPRGIRPAGALGARTLLLVMLGGSWLQTLEASGCVLSQELFQQRAQEAAATQLGLKEMPSHCLVHLHKNCIPQYTLGHWQKLESARQFLTAHRLPLTLAGASYEGVAVNDCIESGRQAAVSVLGTEPNS

SEQ ID NO: 10683 - protein, 188 aa, Homo Sapiens
MGRTVVVLGGGISGLAASYHLSRAPCPPKVVLVESSERLGGWIRSVRGPNGAIFELGPRGIRPAGALGARTLLLVMLGGSWLQTLEASGCVLSQELFQQRAQEAAATQLGLKEMPSHCLVHLHKTKNQLKWRQSHDRTVEWPKEYPGRSRKQAPSILHVPGCQLLRCRDRDHLGAVSEQPRSSAESRV

SEQ ID NO: 10684 - protein, 184 aa, Homo Sapiens
MGRTVVVLGGGISGLAASYHLSRAPCPPKVVLVESSERLGGWIRSVRGPNGAIFELGPRGIRPAGALGARTLLLVSELGLDSEVLPVRGDHPAAQNRFLYVGGALHALPTGLRGLLRPSPPFSKPLFWAGLRELTKPRGKEPDETVHSFAQRRLGPEGGPHSQTQHSFARPWLSAGASGHFVEV

SEQ ID NO: 10685 - protein, 477 aa, Homo Sapiens
MGRTVVVLGGGISGLAASYHLSRAPCPPKVVLVESSERLGGWIRSVRGPNGAIFELGPRGIRPAGALGARTLLLVSELGLDSEVLPVRGDHPAAQNRFLYVGGALHALPTGLRGLLRPSPPFSKPLFWAGLRELTKPRGKEPDETVHSFAQRRLGPEVASLAMDSLCRGVFAGNSRELSIRSCFPSLFQAEQTHRSILLGLLLGAGRTPQPDSALIRQALAERWSQWSLRGGLEMLPQALETHLTSRGVSVLRGQPVCGLSLQAEGRWKVSLRDSSLEADHVISAIPASVLSELLPAEAAPLARALSAITAVSVAVVNLQYQGAHLPVQGFGHLVPSSEDPGVLGIVYDSVAFPEQDGSPPGLRVTVMLGGSWLQTLEASGCVLSQELFQQRAQEAAATQLGLKEMPSHCLVHLHKNCIPQYTLGHWQKLESARQFLTAHRLPLTLAGASYEGVAVNDCIESGRQAAVSVLGTEPNS

SEQ ID NO: 10686 - protein, 477 aa, Homo Sapiens; identical to SEQ ID NO: 10685

SEQ ID NO: 10687 - protein, 113 aa, Homo Sapiens
MGRTVVVLGGGISGLAASYHLSRAPCPPKVVLVESSERLGGWIRSVRGPNGAIFELGPRGIRPAGALGARTLLLVSLRDSSLEADHVISAIPASGIWTFGAIFRRSRSPGNRV

SEQ ID NO: 10688 - protein, 161 aa, Homo Sapiens
  misc_feature (1)..(1): Xaa can be any naturally occurring amino acid
XADHVISAIPASVLSELLPAEAAPLARALSAITAVSVAVVNLQYQGAHLPVQGFGHLVPSSEDPGVLGIVYDSVAFPEQDGSPPGLRVTVMLGGSWLQTLEASGCVLSQELFQQRAQEAAATQLGLKEMPSHCLVHLHKNCIPQYTLGHWQKLGKLGKQLG

SEQ ID NO: 10689 - protein, 230 aa, Homo Sapiens
  misc_feature (1)..(1): Xaa can be any naturally occurring amino acid
XQAEQTHRSILLGLLLGAGRTPQPDSALIRQALAERWSQWSLRGGLEMLPQALETHLTSRGVSVLRGQPVCGLSLQAEGRWKGFGHLVPSSEDPGVLGIVYDSVAFPEQDGSPPGLRVTVMLGGSWLQTLEASGCVLSQELFQQRAQEAAATQLGLKEMPSHCLVHLHKNCIPQYTLGHWQKLESARQFLTAHRLPLTLAGASYEGVAVNDCIESGRQAAVSVLGTEPNS

SEQ ID NO: 10690 - protein, 180 aa, Homo Sapiens [sequence omitted]

SEQ ID NO: 10691 - protein, 169 aa, Homo Sapiens
MRQRADRRSMVSTSGAATASSAAGPSRGAAHSPSSAPHASRHRPPFSSRATGLLQQRQHCVHHCTQLCPRVQTPCLPPPPAPATELHSYLQQGGERGLLDTTPVQGSRPGKNVQLTENEIRGLCLKSREIFLSQPILLELEAPLKICGDIHGQYYDLLRLFEYGGFPPE

SEQ ID NO: 10692 - protein, 286 aa, Homo Sapiens
MSDSEKLNLDSIIGRLLEGDIHGQYYDLLRLFEYGGFPPESNYLFLGDYVDRGKQSLETICLLLAYKIKYPENFFLLRGNHECASINRIYGFYDECKRRYNIKLWKTFTDCFNCLPIAAIVDEKIFCCHGGLSPDLQSMEQIRRIMRPTDVPDQGLLCDLLWSDPDKDVQGWGENDRGVSFTFGAEVVAKFLHKHDLDLICRAHQVVEDGYEFFAKRQLVTLFSAPNYCGEFDNAGAMMSVDETLMCSFQILKPADKNKGKYGQFSGLNPGGRPITPPRNSAKAKK

SEQ ID NO: 10693 - protein, 341 aa, Homo Sapiens
MSDSEKLNLDSIIGRLLEGSRVLTPHCAPVQGSRPGKNVQLTENEIRGLCLKSREIFLSQPILLELEAPLKICGDIHGQYYDLLRLFEYGGFPPESNYLFLGDYVDRGKQSLETICLLLAYKIKYPENFFLLRGNHECASINRIYGFYDECKRRYNIKLWKTFTDCFNCLPIAAIVDEKIFCCHGGLSPDLQSMEQIRRIMRPTDVPDQGLLCDLLWSDPDKDVQGWGENDRGVSFTFGAEVVAKFLHKHDLDLICRAHQVVEDGYEFFAKRQLVTLFSAPNYCGEFDNAGAMMSVDETLMCSFQILKPADKNKGKYGQFSGLNPGGRPITPPRNSAKAKK

SEQ ID NO: 10694 - protein, 330 aa, Homo Sapiens
MSDSEKLNLDSIIGRLLEVQGSRPGKNVQLTENEIRGLCLKSREIFLSQPILLELEAPLKICGDIHGQYYDLLRLFEYGGFPPESNYLFLGDYVDRGKQSLETICLLLAYKIKYPENFFLLRGNHECASINRIYGFYDECKRRYNIKLWKTFTDCFNCLPIAAIVDEKIFCCHGGLSPDLQSMEQIRRIMRPTDVPDQGLLCDLLWSDPDKDVQGWGENDRGVSFTFGAEVVAKFLHKHDLDLICRAHQVVEDGYEFFAKRQLVTLFSAPNYCGEFDNAGAMMSVDETLMCSFQILKPADKNKGKYGQFSGLNPGGRPITPPRNSAKAKK

SEQ ID NO: 10695 - protein, 253 aa, Homo Sapiens
MSDSEKLNLDSIIGRLLEVQGSRPGKNVQLTENEIRGLCLKSREIFLSQPILLELEAPLKICGDIHGQYYDLLRLFEYGGFPPESNYLFLGDYVDRGKQSLETICLLLAYKIKYPENFFLLRGNHECASINRIYGFYDECLSPDLQSMEQIRRIMRPTDVPDQGLLCDLLWSDPDKDVQGWGENDRGVSFTFGAEVVAKFLHKHDLDLICRAHQVVEDGYEFFAKRQLVTLFSAPNYCGEFDNAGAMMSVDET

SEQ ID NO: 10696 - protein, 87 aa, Homo Sapiens
MALKKFVMVKFLNDSIVDPVDSEWFGFYRSGQAKETIPLQETSLYTQDRLGLKEMDNAGQLVFLATEGDHLQLSEEWFYAHIIPFLG

SEQ ID NO: 10697 - protein, 52 aa, Homo Sapiens
MASPGCLWLLAVALLPWTCASRALQHLDPPAPLPLVIWHGMASCKPNTGMTP

SEQ ID NO: 10698 - protein, 46 aa, Homo Sapiens
MASPGCLWLLAVALLPWTCASRALQHLDPPAPLPLVIWHGMAVAIP

SEQ ID NO: 10699 - protein, 46 aa, Homo Sapiens; identical to SEQ ID NO: 10698

SEQ ID NO: 10700 - protein, 305 aa, Homo Sapiens
MASPGCLWLLAVALLPWTCASRALQHLDPPAPLPLVIWHGMDSCCNPLSMGAIKKMVEKKIPGIYVLSLEIGKTLMEDVENSFFLNVNSQVTTVCQALAKDPKLQQGYNAMGFSQGGQFLRAVAQRCPSPPMINLISVGGQHQGVFGLPRCPGESSHICDFIRKTLNAGAYSKVVQERLVQAEYWHDPIKEDVYRNHSIFLADINQERGINESYKKNLMALKKFVMVKFLNDSIVDPVDSEWFGFYRSGQAKETIPLQETSLYTQDRLGLKEMDNAGQLVFLATEGDHLQLSEEWFYAHIIPFLG

SEQ ID NO: 10701 - protein, 282 aa, Homo Sapiens
MASPGCLWLLAVALLPWTCASRALQHLDPPAPLPLVIWHGMGDSCCNPLSMGAIKKMVEKKIPGIYVLSLEIGKTLMEDVENSFFLNVNSQVTTVCQALAKDPKLQQGYNAMGFSQGGQFLRAVAQRCPSPPMINLISVGGQHQGVFGLPRCPGESSHICDFIRKTLNAGAYSKVVQERLVQAEYWHDPIKEDVYRNHSIFLADINQERGINESYKKNLMALKKFVMVKFLNDSIVDPVDSEDRLGLKEMDNAGQLVFLATEGDHLQLSEEWFYAHIIPFLG

SEQ ID NO: 10702 - protein, 306 aa, Homo Sapiens
MASPGCLWLLAVALLPWTCASRALQHLDPPAPLPLVIWHGMGDSCCNPLSMGAIKKMVEKKIPGIYVLSLEIGKTLMEDVENSFFLNVNSQVTTVCQALAKDPKLQQGYNAMGFSQGGQFLRAVAQRCPSPPMINLISVGGQHQGVFGLPRCPGESSHICDFIRKTLNAGAYSKVVQERLVQAEYWHDPIKEDVYRNHSIFLADINQERGINESYKKNLMALKKFVMVKFLNDSIVDPVDSEWFGFYRSGQAKETIPLQETSLYTQDRLGLKEMDNAGQLVFLATEGDHLQLSEEWFYAHIIPFLG

SEQ ID NO: 10703 - protein, 301 aa, Homo Sapiens
MASPGCLWLLAVALLPWTCASRALQHLDPPAPLPLVIWHGMGDSCCNPLSMGAIKKMVEKKIPGIYVLSLEIGKTLMEDVENSFFLNVNSQVTTVCQALAKDPKLQQGYNAMGFSQGGQFLRAVAQRCPSPPMINLISVGGQHQGVFGLPRCPGESSHICDFIRKTLNAGAYSKVVQERLVQAEYWHDPIKEDVYRNHSIFLADINQERGINESYKKNLMALKKFVMVKFLNDSIVDPVDSEWFGFYRSGQAKETIPLQETSLYTQFCSLPRLECNGMISAHCNLRLPGSSEFSCLSLPSS

SEQ ID NO: 10704 - protein, 306 aa, Homo Sapiens; identical to SEQ ID NO: 10702

SEQ ID NO: 10705 - protein, 148 aa, Homo Sapiens
MASPGCLWLLAVALLPWTCASRALQHLDPPAPLPLVIWHGMGDSCCNPLSMGAIKKMVEKKIPGIYVLSLEIGKTLMEDVENSFFLNVNSQVTTVCQALAKDPKLQQGYNAMGFSQGGQFLRAVAQRCPSPPMINLISVGGQHQVPCA

SEQ ID NO: 10706 - protein, 208 aa, Homo Sapiens
MASPGCLWLLAVALLPWTCASRALQHLDPPAPLPLVIWHGMGDSCCNPLSMGAIKKMVEKKIPGIYVLSLEIGKTLMEEGSGSEMPFTSHDQSDLGWGTTSSLVQAEYWHDPIKEDVYRNHSIFLADINQERGINESYKKNLMALKKFVMVKFLNDSIVDPVDSEWFGFYRSGQAKETIPLQETSLYTQDRLGLKEMDNAGQLVFLAT
